United States Patent Application Publication US 2007/0067865 A1 - sequence listing, part 5

SEQ ID NO: 16004 - DNA, 599 bp, Glycine max
ctacattgctggaggtgttgtaactcctggtgacaaaggtcatgctagatcagctatgaagttcattatgtccattctcttaagcaccagtgcagtacttgttcttctcacaatctatgtcttagtcagaactcacatggccagcaaggtgctcatggaaaatgaaacttgggagatgactttgtatcagaagctggatttctccattgatgacattgtcatgaatttgacatcagccaatgtgattggcactggaagctccggagttgtgtacaaagttacaattccaaatggtgaaacattggctgttaagaagatgtggttagcagaagagtcaggagcattcaattctgaaattcaaacattggggtcaataaggcacaagaacatcatcaggcttcttggatggggatcaaacaagagcctgaagttgttgttttatgactacctgcctaatggaagcctgagctcattacttcatggttcaggaaagggaaaagctgaatgggagacaagatatgatgctatattaggtgtggcacatgcacttgcatatttgcaccatgattgtttgcctgctattattcatggagatgtca

SEQ ID NO: 16005 - DNA, 1824 bp, Glycine max
cgggtcggaccagccgtccgagaatttcaattgcacaaggaagcgtcgcagaaggggtattatgttaaggatgccagtgggaatgactttgatggctggtgctggccaggttcttcgtcgtatccggatactttgaacccagaaattatgtcctggtgggctgataagtctgcttaccagaattatgagggttcaacgccttcgctttacatatggaatgacatgaatgaaccttccgtcttcaatgggcctgaggtgacaatgcctagagatgttacacactatggaggtgtggaacatcgggagttgcacaatgcctatggatattacttccacatggcgaccgctaatgggctactgaagcgtggtgaggggaatgacaggccatttgttttatcaagagcattatttgctggaagtcaaaggtatggagcagtttggactggggataacactgctgattgggatcacctaagagtttctatcccaatggttttgacccttggtcttactgggatgtcattctctggtgctgatattggtggattttttgggaatcctgaacctgagttattggttcggtggtatcagctaggagcttactatcctttctttagggcccatgcccatcacgacacaaaaagacgagaaccatggttgtttggagaacgaaatacagaattgattaaggatgcaatacatgttcgttatgcacttctcccgtatttctacacattattcagggaggctaacactacaggtgttcctgtggtccgtccattgtggatggaattcccatctgatgaagctacttttagcaatgacgaaactttcatggttgggagcagtattttagttcaagggatctatacagagcgagctaagcatgcatcagtctatttgcctggaaaagaatcctggtatgacctaagaactggaactgtgtacaaaggaggggtgacacataagttggaggttacagaggagagcattcccgctttccagagagctggaaccattattgcaaggaaagaccggtttcgacaaagttccactcagatggcaaatgatccctacactctggttgtagctctgaatagttcccaagcagctgagggtgaactctacatagatgatggcagcagctttaattttctgcaagggggctatatccatagacgatttattttctcgaatgggaaacttacttctatagacctggcacctgcttccagtagcaaggggcgttatccatcagatgctttcattgagaggattatcctgctgggacatgctcctagctcaaaaaatgcactcattgagccatcaaatcaaaaggttgatattgaacttggccccctttgggttctaagggctcgtgcaccagctgttacaaccatacgtagacctaatgttcgtgttgcagaagattggactataacagttatataacatttccggttcgagggaggagtttaatgttcaaagttactgctagtgcacaacgagattttgtttctgtagttgagttgatatgaagttcagctgcaacgttggggtaagaagaaagaaaatcattaattttgaagaatgcatttgcaccaactcagtttgagcggcttatttaatgtatggactcgttgactcaaaagattaacatttggaagttgtgattccattgttgtatacaggaattattttgataaggataaatttgtatcgtctggaatggtctgtgtcttgcgaaaagttatgtgatgaatgcaataactttagtaaaatagtttaaaaaaaaaaaaaaagggcgccccgcgtagagatgct

SEQ ID NO: 16006 - DNA, 729 bp, Glycine max
tccgggtccggatttccgggttcgaccaaggcgtccgccacgcgtacggtgattggttcagctacttgaagcggaagtaagcactagacttggtagccaaggtcctgattctgtcaagagtcacccatggtttaattgtattgaatgggaagggattagacaccacacctttcccgttccgcaggaaattatttctcgtataacacagtacttggaagttcattctgaggattgtagtactggttatctgggttctccattgcaggaggtaaaagaacttaatgtgcctgaatggcttgaggactggtagaagaatgacctttacattttgtcttctttttgaagtttggctttgcaccagtatttacctttgcttattcggacaaattgcaatccaagaatgcagttaaccagaaaatgcaaagagagcaatagatgctgaatattccctatagtttgaatcttttagttgcaaaatgggtagggtaggtttattatcttattcatctcctcccttttctaattttttttgggggtaattcctctcctctgtaaatattatatatgtgtaaatgattgaatttgttttcattttcaattgcaattcaagcaatttagttttgtcatggaacaatattcatattagcacacaaaatgcaatcttatttttgttcttccggaataaaacttccctaaaaaagccattcgtgatcgactaaatcatcaatt

SEQ ID NO: 16007 - DNA, 388 bp, Glycine max
gttgttttctctgtttgcagcttcttctgtttctctctctcaaattcaatgttgttcatgttcatgtctatgtccatttgaggttgagagagagaggcactcagatacgtttccgttcagagacagacacaacacaacagaaagtgttcagagagagaaatagtgaacgcaacaaaacaatgtcttctctggatttgttactattttctctgagcagggccttttgtagtcccatcgccgttttctttcagatccaggggtgtttaatttgcttaacgcttgctcttgggtgggcttgtgctgcttatgtcaggaacagagagatcaaacaaatgaaggattgtatgaagaatggcaatagcttctctttcctatgtcatgacattaa

SEQ ID NO: 16008 - DNA, 537 bp, Glycine max
tcccgggtcgacccacgcgtgcgaccacgcgtccgcccacgcgtccggaggatgagggtggttttacgcgacttgcctcattcgtctgcgattgcgagcctttgacggaggatgatctggaagccatcgaagcctctctttccaataacaaaaaacgtccattcaacgatcacactcacactcctcgtcgtcgcttgcccaaatcgcttatcgctcttcaacacccaaacgcttcttctttctcgccccatccccgtccatgcgattcaagaatgacattgcctgtaatgaagtttagtggtcaaatttcttatagcaggacttttgatgctgtagagaaagctgcaacaaagctcttacaaattctccaagaaaaaacgaccgacatgatgcaaactgcaattggatttgacattgagtggaaacccaccttcagaaaaggtgttcctcccggaaaggtagcagtgatgcagatatgtggtgacactagacattgtcatgttctacatctaattcattctggaatccctcaaaatt

SEQ ID NO: 16009 - DNA, 405 bp, Glycine max
cagtaacagaaggaaaacaagaggcagtgttgttccctttcatggcccaaggccacataatcccgttcttagcattagcacttgaattagaacagagaaaaaagtacagcatcaccatactcaacacttccctaaacatcaaaaaactaagatcctctatcccaccagactccaccatctccctcgtcgaaatccccttcactccctccgaccacggcctccctcccaacacggagaacaccgactccatcccctaccacctcgtcattcgcctcatccaagcctccaccaccctccaaccagccttcaaaaccctcatccaaaacatcctcttccaaaaccaaaaacatcaacttttaatcatctccgatcggttttgacatacattcggagttcagagaggga

SEQ ID NO: 16010 - DNA, 716 bp, Glycine max
acgaggccaaacaggcttacgcggaatctgactgctgcccgaagtcattctcagtaactgctaatcactgacacggtcagctaagctaagctaccccttctctctctaaaacctttgccattgtctcccacaacaccttacaccccacaactccaatgtctgagtcaagactcatttatttataaccaccaccagctcaggtggcgcagccaaaccaaacccacaagaggttaagaacaagtagaataacaaaacccattcttcacctctctcccatcgtaataatgggtcagagcctgagttgcagtggcaaccatgaccacggcctcttcaccgccgtgctgcacggcgaccttcaaattgtcacaactctcttggattccgacccttctctcttgcaccaaacaactctctacgatcgccactctcctcttcatattgccgctaccaatgaccagatcgagattctgtctaagctcttagatggatctctcaacccagatgttttaaatcgccacaaacagactccgcttatgctggcagcaatgcatgggaacatcgcgtgtgtggagaagcttcttcaagccggagctaatgttttgatgtttgatactatttacgggagaacctgcttacactattccgcttactacggccaacaatcttgccttaaggctattctttccgctgctcaatctagtccagtggctgcttct

SEQ ID NO: 16011 - DNA, 272 bp, Glycine max
gtgagagtcaagattcattcatttatttatagccaccggttcaggtggcgcagcaacaccaaacccacaagacgtgaagaacaataacataaaccattcttcacctctcctctctcccaccatagtaatgggtcagagcctaagttgcagtggcaactatgaccacggcctcttcaccgccgtgcagcacggtgaccttgaaattgtcacacctctcttggactccgacccctctctcttgcaccaaaccactctctacgatcgccactctc

SEQ ID NO: 16012 - DNA, 706 bp, Glycine max
ggaaggagaaatccggggaagcagaatcagcgtgatggcgagaaactgggtgggtcgatccttggcgcttcgtcacgcaatgaagaatagggttctcacactctccttcaaccgaattcttccctcactcccatcaaaatcctctctcttagccaccaccgccgccgccactgcctcctctcctccgcctcagctccttccgacgttgtccttgttaattccgaggaagagttcaacaatatccttaccaaagtccgagatgactcgttgcacgcggtcttctatttcactgcggcttggtgtggaccttgcaggtttatttcacctatcgttggggagctcagtaagaagtaccctcatgtaacaacatataagattgacattgatcaggaagcacttcaaggcacactgggcaagttgcagatttcatctgtgccaacacttcatttctttcagaatgggaaaaaggctgatgagcttataggtgctgatgttgcgcgattaaactatatcacagagaaactcttcaagaaggactgactttgattttggctgaatggacgatgaagtgcaaaatgattgaactgtggctgcttggagtatgtctaggcgtccctcttgatatgctggtgtcaatgtcttggtttaatattgaagtgttttgtgtaggtctttaggacatgggatatttgttatacgtaatgtt

SEQ ID NO: 16013 - DNA, 509 bp, Glycine max
  unsure (1)..(509): unsure at all n locations
taccggtctcggaattcccgggtggacccaaagcaaagggaaggagaaaggggaagcagaatcagcgtgatggcgagaaactgggtggttcgatccttggcgcttcgtcacgcaatgaagaatagggttctcacactctccttcaaccgaattcttccctcactcccatcaaaatcctctctcttagccaccaccgccgccgccactgcctcctctcagctctccctcctcccctccttccaccactctcgctccctctcctccgcctcagctccttccgacgttgtccttgttaattccgaggaagagttcaacaatatccttaccaaagtccgagatgactcgttgcacgcggtcttctatttcactgcggcttggtgtggaccttgcaagtttatttcacctatcgttggggagctcagtaagaagtaccctcatgtacaacatataagattgacattgatcaagaagcacttcaaggcacactgggcaagntgcagatttcatct

SEQ ID NO: 16014 - DNA, 523 bp, Glycine max
  unsure (1)..(523): unsure at all n locations
gtaccggtctcggaatgcccggntggacccacgcgtccggcctggtgttgggttgcttgcaaggaagagaacagagcagaaccatagatatgaacaccaacaccatgccacatgccgacaatcctatcaccttggagaatcatcattggaaccaccatggataccactcactgtcttagatgaaactgctctcaaggccagacaaaggcttcacaagaagcttggacacttcttttcctcatacaggtcaagtgagaatccaagaaaagaaggaaaagtaaaccaaagcagctacgagaagaaggatggaggaataggtcggaagttgttagagagttcatggttgttgcgtggcaacaagtttaagaaagatagaaaagtgggcgctgtgtgcctagaagatttggggcaagagctacaggttatgaacctttcatgctcccataagtaccattcagcatgccttcttccctggcttgcagcccatccncattgcccttattgtcgaaccccagttcagccc

SEQ ID NO: 16015 - DNA, 334 bp, Glycine max
ggccagttatagtatctcagttactggtggtggacgagtaattcgtgctggacgtaacatgcggaagccaacttaagtgttctttcttactcgaagtttctcttttgaatagggtgtgccagcagcattcgttgggattgttatgattcgcttcttttaatctgctctaatgaaacattgcttctgggttttgttgtttcccattttatttttattctctcgatgacactgtcatataagtgtaccatggctgaattttggtctccttttgaaatttgtcagcataattattttgtagaaaattagttgaaagaatgctttacctttgataaac

SEQ ID NO: 16016 - DNA, 1426 bp, Glycine max
acttttgttcgtactgtccagcatttaccataatgctataattttaagaattttgataattctaattctatgatggtatgatatgattactgtcttgtcgggtccgataggaactttagccaatcagttttttgaatccaggaagctttcacaaccaaccttttccgatctttctctcaaaccggctcgcatttccagaaaaaccctgagcttgaagatggcccaagttgctcaaaacccttctcagcagcagaaagtcataataactaacaagtatggcaataaactagtgggcattttgcatgaatctggaaccaaagagattgttatcctatgccatggtcttcgatccactaaggaagacgatatcataaaaaatcttgctgctgctctagaaaatgcaggagtcagttcttttcgctttgacttcactggaaatggggaaagtgaaggttcatttgagtttggtcactattggagggaggttgatgatctgcatgatgtggttcaacactttcatggggcaaaccataaagttattgcaattattggacacagtaaaggaggtagtgtggtgcttctttatgcttctaaacatcatgacattaaaacagttgtcaacctctctggacgctatgatctgaaggcaggacttgaagaacgccttggaaaagattatttggaaagaattatgaaggatggcttcattgatgtgatgcagtcaggaagttttgattaccgtgtgactttagaaagtttgatggatcgattagatacaaacatgcatgaagcatgccttcagattgataaagaatgcagggtactcacagttcatggttcttcagacccagttatccctgttggagatgcatctgagtttgccaagattataccaaaccacaagctaattatcatagagggagctgatcattcatacactaatcatcaagatgaattagcctctgttgttgtgaaccgcataaaggaagccttggtccatttttctaatgatgtgtaattgtggtagaccttgcagttacgagccaattgaaattgcaacaggtgacaaaatttcagttgtggatgaacatgcctatgatgttctgcagcatgtttgagctcttctagtttttgcttataaaattggtgaatcttgcatcatgatgaaaataatggcgagagaaatatctgggagtatacaatgtcatttttaaattatcaattatgacaaatgcaatatgtaaacagttatctcatggtagcatatggtagccatagtggggggttattcccacattttaagggtctggggacacctcagtattatagaataagtgtaaggaaaccttatggtaaagactgtttagtcgtcacctgtttgatgaacatcttaaaaatgatgaaaatatttgtaagattgatttct

SEQ ID NO: 16017 - DNA, 435 bp, Glycine max
ggatgcagagaaggtactagtttagtgtcacgaaaataacccgcagacgcaaacgtgaaaacacagacaagacgcatacgtccgtctcaacgtgtttgagattataaagacttggtggaagggtaagctaaagttgaagagttgaggggaatacaagaagagaaggaggttgaggtactcaataaagttttgatttgtttgaatcggggggcttgatgccaatgttggatacagttgtatgtgctagaaacagtcaacagtcgcttcataaggtgaaggtgacattctagtagtggaaagggccagagtcgagatgattatatatgtttgatttgcctctacacactggcaatccttaggtctgacagatggctttttataatgaagaagagaagactgaagactacctcttcaagattgttttaattggtgatt

SEQ ID NO: 16018 - DNA, 282 bp, Glycine max
actcgagccgattcggctcgaggaaaaaaggaattgatgcagagaagctactagtttagtttcaccaaaataacccgcagacgcaaacgttgaaaacacatccgtctgccccaacattacaagggtttgagattataaagacttggtggaagggtaagctaaagttgaagagttgaggggaatacaagaagagaaggaggttgaggtactcaataaagttttgatttgtttgaatcggggggcttgatgccaatgttggatacagttgtatgtgctagaaac

SEQ ID NO: 16019 - DNA, 494 bp, Glycine max
  unsure (1)..(494): unsure at all n locations
accggnccggaanncccggggcgacgcacgcgtccgcaacaacctttcaaaccctccaaccttagtttcaattctaaacttgttcaccctttattctctcctcttccaaacatcaaccatggcttcaataataaccttggtgacatccaccttgctctttctttctttcactttgtcatgtgctattgacacctccaccatcaccaactacaccgacaatgaggtcatgaccatgtacgaggagtggttggtgaagcaccaaaaggtgtacaatgggttgggagagaaggacaagaggttccaagttttcaaagacaacttggggttcatacaagagcacaacaacaaccagaacaacacttacaaacttgggttgaaccagtttgctgacatgacaaatgaggaataccgtgtcatgtattttggcaccaagagtgatgccaaacgcaggctcatgaaaaccaagagcaccggtcaccgctacgcgtacagtg

SEQ ID NO: 16020 - DNA, 295 bp, Glycine max
ttcaaaacttgtttacaccttgtactctcctcttccagacaccatcatggacacaatgaccatgatatacaccttactctttctttctttcactttgtcatatgctattaagacctccaccatcatcaactacaccgacaatgaggtcatggccatgtacgaggagtggttggtgaagcaccaaaaggtgtacaatgagttgggaaagaaggacaagagattccaagttttcaaggacaacttagggttcatacaagagcacaacaacaatctaaacaacacttacaaacttggg

SEQ ID NO: 16021 - DNA, 463 bp, Glycine max
ccgggtcgacccacgcgtgcgcccacgcgtccgcctcatcttgttgtgcgtgtgtgttagagagagttagagaatgggaaagtgccaagccgttgacactgcgactctagtgattcagcaacccaatgggaaagtagaaaggttgtattggcctgtaagtgctagtgaagtgatgaagaccaaccctgatcactatgttgctcttcttatctccaccacattgtgctcatccaaggacaatgaaaatcgctcaaataagagtgacaacaccaacaccaccaaccctgttcgccttacccgcatcaagcttctcaagccaactgatacccttgtgcttggccaagtttatagactaatctcagctcaagaggttatgaagggtctttgggaaaagaaacaagcaaagatgaagagaaacttgtcggaatcagcacaaaagccaaatctgatgaaggaaaggaca

SEQ ID NO: 16022 - DNA, 288 bp, Glycine max
cttgtggctgctataagtattgtagtgaggtgcttcctcatcttgccgtgtgtgtgagagagttagagaatgggaaattgccaagccgttgacactgcaactctagtgattcagcaacccaatgggaaagtagaaaggttgtattggcctgtgagtgctagtgaagtgatgaagaccaaccctgatcactatgttgctcttcttatctccaccacattgtgctcatccaaggacaatgaaaattgctcgagtaagagtgacaataccaccaaccctgttcgccttacc

SEQ ID NO: 16023 - DNA, 403 bp, Glycine max
  unsure (1)..(403): unsure at all n locations
cggaattcccgggtcgactccacgcgtccgcggacgcgtgggcggacgcgtggtcggaaccaccatccaatgagacggcgccccgtggcgggtgttctccccgaccaaatggagaaagcaaacaccaaaaaccctaattccagactttgctttctcgcttccctctccgtattcttctggttcctcctcctctacttccacttcgccgtcctccgccaccaacccaccaaccctaaccccgtagtccccatcactctccaacctcaacaacctcgtaaaaacctcggcttccccgagaaaatttcccaaccggagaaacccactttccccttcgaccgtgccctccgaaccgncgacaacaagagcgacccatgcggggggcgctacatctacgtccacgacc

SEQ ID NO: 16024 - DNA, 408 bp, Glycine max
cagctcgagcggctcgagcggctcgaggattcctcaactcaccatccgcgttcattttccctcccaactcactcgtccccttctcactttcattcattcatgactctctccttttctatcggaaccaccatccaatgagacggcgccccgtggcgggtgttctccccgaccagatggagaaagcaaacaccaaaaaccctgattccagacttcgctttctcgcttccctctccgtatgcttctggttcctcctcctctacttccacttcgccgtcctccgccaccaacccaccaaccctaaccccgtagtccccatcactctccaacctcaacaacctcgtaaaaacctcggcttccccgagaaaatttcccaaccggagaaacccactttccccttcgaccgtgccc

SEQ ID NO: 16025 - DNA, 1075 bp, Glycine max
cggaattcccgggtcgactccacgcgtccggtccattccctcttggccttcaattagctcagttcctactgttcaagtttcgagaccaacactctcttcaatcagttttctaacaacaaacaaccgttcaagaatagtcttccaaggccggaggacttttccaaggccctatacacctttgatattggacaaaatgatcttgcctttggtcttcaacacacttcacaggaacaagttataaagtcaattcctgaaatcttaaaccagttcttccaagcagtgcagcaactatacaatgtaggggcaagagtgttctggattcataacacaggtccaattggatgcttgccctacagttacatttattatgagcccaagaagggtaacatagatgcaaatggcggtgtgaaacctcagaatgatcttgctcaggaatttaacagacagctcaaggaccaagtgtttcagctaaggagaaagttcccacttgcaaaatttacatatgttgatgtgtacactgccaagtatgaactaatcagcaatgcaagagaccaaggttttgtgagtccattggagttctgttgtggcagttactatggttaccacataaattgtgggaagacagccatagtaaatggaacagtatatggaaatccatgcaaaaatccttcccaacatgttagttgggatggcatacactactctcaagcagcaaatcaatgggttgctaaaagaattctctatggatccctctctgatccccctgttcaaatagggcaggcatgtttctgagtatagttcattcagttcacgcgttactagctagagagtgccatacattatggggggggtcttcattcttcacattgttattatttccataaccaagccctttgtttaagaacaattaattggggagctgtgcacatgagtaagaacatatttcataatttatgttgtgggaaaagctttttgtagctcaattttggaaatgtgaggtcacactgtaacggctcaactaccagattatggtgtatatctttataaaggattgaaagacaagaatttgttgttt

SEQ ID NO: 16026 - DNA, 407 bp, Glycine max
cggaattcccgggtcgactccacgcgtccggaatttcttagtcagctctgatatttaacatggcctcatcatctccctctccctctccctctccaatgttcacagtgcgaaggttgcaacccgagttggtggctcctgccatccccactccccatgaacttaaaccattatccgacatagatgatcaagaaggtcttcgtttccacattcctatgatacaagtttatcgtaaccaaccatcaatggcagagaaagacccagttcaagtgattcggaaagcactggcaaaaacacttgtgttctattacccttttgcgggtaggcttagggagaggcctgaccacaagttaatggtggattgtactggagagggcgtcttggtcattgaggctgatgcttacgtaaca

SEQ ID NO: 16027 - DNA, 531 bp, Glycine max
gggtcgactccacgcgtccgtcgccaaataatccatgagcacatccaaaggggcattccatcggcttatgagatggaggagttctttgcttatgccgagaagcagcaactaacaatattgatggacaagtacaatttcgacattgtcaatgaagtacctctgcctggacggtacgagtgggtcccagtactccactaggagtgtcatatggtgataatatgggatttcaagagccattagacttgtattttaattttaacaactagaagaagctttgactaaccatttagattgcttgaggctcttgtttaacaagctacaagggaaaggatctgtttagaaatttccaatatccgattagtagtttagtagtgtctttctgatctgtagggtgtagggggggtatatggtatatctagtttctaagtcatctttaatgtaatttcattaccttctgtttatataattcagtggggattagacatgatgtttatgtagagagtagtactcatccatctaaggtcctcatgc

SEQ ID NO: 16028 - DNA, 380 bp, Glycine max
cggaattcccgggtcgactccacgcgtcgggaaggtcttatgtccatttcttctagttctaggctctccagcttgaaaatgggaatatgcctgaacataactgacagaggacttgcctatgttggcatgcgttgctcaaaattaaaggagctggatctatacaggtctactggggtagatgatttgggcatttcagcaattgctcggggttgccctggccttgagatgataaacacatcctattgtactagcattactgacagggcactaatcaccttgtcaaaatgttcaaatttgaagaccctggaaattcgaggatgtcttcttgtacatccataggtctggcagctattgcaatgaattgcagacaactaagtcgt

SEQ ID NO: 16029 - DNA, 480 bp, Glycine max
accggtccggaatgcccgggtcgacgcacgcgtccgcattgatatggagttatggaccatagaaattagcacatgctcatcaaaactggcattcggaggtcaccgaagcaaaattactgctgaaagaggcacttcaagcagaggttggcttgcctgttgacaggaatatccctctgataggcttcattggtaggcttgaagagcagaaaggttctgatattcttgtggaagctatcccaatgttcattgaccagaatgttcagattatgattcttggaactggcaaaaaggtcatggagaagcaaatagagcaactagaggaaatttatcctgacaaggttagaggggtagcaaaattcaacggtcccttggctcacaagattattgctggagctgactttatagtgatcccaagtagatttgaaccctgtggtctagttcagttgcatgccatgccatatggaacggtgcccattgttt

SEQ ID NO: 16030 - DNA, 1219 bp, Glycine max
tgataatggatttcctagatgtaactgtgatgatgaggccagcttttggactattgaaagcattctggagtgtcagagagttggtgatttcttgattgctgtggcctacttctctatccctattgagctgctttatttcatcagttgctcaaatgtcccattcaaatgggtcctgattcagttcattgccttcattgtactatgtggattgacacatttgctcaacgggtggacctatggccctcacactttccaacttatggtggcacttactgtctccaaaatactcactgcattggtgtcatgtgccactgccataaccctcatcactctgatcccattgcttctcaaagtgaaggtcagagagttcatgctgaagaaaaagacgtgggatcttggacgtgaggttgatcatattatgagacaaaaggaggctgcaatgcatgtaagaatgcttactcaggagatacgtaagtcactcgatagacatacgattctgtataccactttggtggagctgtctaaaacacttggcttgcaaaattgtgctgtgtggatgcctaatgttgataagactgagatgaacctcactcatgaattgaatgggaggaattttaatttgactatacgcattactgatccagatgttgtgagaattaagggaagtgacggtgtaaatatactcagctccgactcagcacttgctgttgggagtagaggagtttctggagaggcaggaccggttgcagcaattcgaatgccaatgctacgggtttgtaatttcaaaggaggaacacctgagctaagacaggcttgttatgctatattggtcttaattcttccttctggagataatcaggagcctagatcgtggagcaatcaggagctggagataattaaggtggttgctgatcaggtcgcagtggctctatctcatgctgcaattcttgaagagtcccaacttatgagagagaagttggaggagcaaaatcgagctttgcaacaggcaaaaaggaatgctttgatggcaagccaggcaagaaatgcatttcagaaagtcatgagcgatggaatgaggaggccaatgcactcaattttgggactgctttcaatgatacaagacgataaattaaagagtgaacagaaacttattgtggacgcgatgctaaggaccagtaatgtcctatcaaacttgataaacgatgccatggataactca

SEQ ID NO: 16031 - DNA, 1531 bp, Glycine max
tcggtccggaattcccgggtcgaccgcacgcgtccgcccacgcaccttcttcttttcgcctcacaccatgaaaccccttctccgcttcggaatcgccttcatcctcctcctccattcctccctcgcttctcatatcccctaccccaaagcaatttccgatttgaaggatacaattgtgaagggatttgggttcacggcggaagatgatgttacgattacggggttcgatcctcgagacgccgaggtagggcattccgtggagtaccaattcgacctcgaaatcgatcacaaggttattcccttcaagctcctcgaagacgtcaaacactgggattacgtcgatcttcccattttccgggccgaggcccaatccggtttggtccctaaacgggcttcggctgacgggcttcccgttttggctcccttcgttctcgctgggcccatggaactctggattcacgacgccaacgacatgcgactctcccttccccatgacgtggatgctggtgtgttgaagaaagtggtgttggctgagggagcagcggttaccgtcaaaggtgcaagatccgttagtcttcggcaacctcttgatttccctcttccgttaaaccgaacggagaatggttttgctaacggtcttttaactttggctgagcatcttcgccatgcttctagaacccagggttctccgattctctcgctgagaatcgttggtcccacatcgctcacagcagcgccttcttccgacacaacaacctcaacctcaacctcgttgaagctcaaacgtcttgcacctggtctcgtggaattgtcatcgcccttgaagagcaaagagattgaaccattttcgagggttgatcttgagggtgaagcccccacggtgcttactccgacccagtttgcgacattgtggcctcttgcttcgcttaatgggtcgaatgctaacttgttggggtttgagaaactcttacattctgtgttgggggctaaggctgagaagaaaggttcctttaggttgttgaaggctgatgtttctgctcagacttacgtgaagatgggttttaaggcggagaagaaggtgaagaaaggggaattggagggttactatccttcgtggaggactaagcccgagactgtgacgacgcactttgaggtgctggctaaggttgatggggagaaagttgtgccggagaaagttatgccggtggagcctgttattgcggtggacagtgtggcgccgaatttgctcacccagaatgtgtccatgtccaagacacaagtagttcaccctccacccaaccccttttacttgtaatttgtggaaaggaaaagggattgactgaactctaccgagaggattcgtaacagagagaagagggaacattcttgtttcacttttgattttggtatatagtatagacacaacagttaagatacttgtttgaaattgtaattaatgagaaacttgttttatttgtccatcataagatttgctttcttagactattcaaattaactactttaacaaaaa

SEQ ID NO: 16032 - DNA, 353 bp, Glycine max
ctcgagccgctaatttcaattcaaccccattttcattagtatcctttccggtagagtggaaacaaaaaggaattgaaatgaaatgagacgaaagttagttttgtatttaactaaaagttgtcgttttaaaacgaacgggccttaatgattttaatgtaatttctgaaactgataattaaacatttgatttggttgtgcagcatgacgtggatgctggtgtgttgaagaaagtggtgttggctgagggagcagcggttaccgtcaaaggtgcaagatccgttagtcttcggcaacctcttgatttccctcttccgttaaaccgaacggagaatggttttgctaacggtctttta

SEQ ID NO: 16033 - DNA, 469 bp, Glycine max
cttcttcttttcgcctcacaccatgaaaccccttctccgcttcggaatcgccttcatcctcctcctccattcctccctcgcttctcatatcccctaccccaaagcaatttccgtatgttccgctaatttaatattcctctctttttttaaaaaaaataaatcatcatccaggttttgaatgcgtttatgttatttgtaggatttgaaggatacaattgtgaagggatttgggttcacggcggaagatgatgttacgattacggggttcgatcctcgagacgccgaggtagggcattccgtggagtaccaattcgacctcgaaatcgatcacaaggttattcccttcaagctcctcgaagacgtcaaacactgggattacgtcgatcttcccattttccgggccgaggcccaatccggtttggtccctaaacgggcttcggctgacgggcttcccgttttggctcccttc

SEQ ID NO: 16034 - DNA, 612 bp, Glycine max
gtccggaattcccgggtcgaccgcacgcgtccgttccccaaagaagaacgtggcctctctgctaaaccccttatcgtctccaaaaatggcttcttctatcataggcgtttcctccatttaccaaacaccccctctcgaactataccagaggccaagcactgcttccacttcctccgttaggttgcaatctttagactccaagtctcacttcaacaacctcctccgagcccaccaacgccactccactggcccgggcctcaagcctacaccgatctttcgtcccctccgccgtcgccacccccaactcctccctcctcagcgaagaagccttcaaaggacttgcccgcgaattcgaccaaaacgacgaccaattcacccgcgcctcctccgccgccgaatccgttaaccccgacgaactcgacatttccaagctcgacttgccctcgcgtctcgttgagtctctccggagccgtgggattactcaacttttccccattcagagagcggtgttagtacctgcactagaaggtagagatatcattgcgcgaccaagaccggtaccggaaagacgtcagtggcggcattcctattattaaagcctcactgaagatg

SEQ ID NO: 16035 - DNA, 590 bp, Glycine max
gtggcctctctgcaaaaccccttatcatctctctctttatctctttgtctccaaaaatggcttctatcataggcgtttcctccatttaccaaacaccttctctcgaactataccagaggccaaatactgctgcctccacttcctccgttaggttgcaatgtttagactccaagtctcacttcaacaacgtcctccgagcccaccaacgccactccactgggccgggcctcaagcccacaccgactactttcgtcccctccgccgtcgccacgcccaattcctccctcctcagcgaagaagccttcaaaggacttggccgcgacttcgacgaattcgaccacgcctccgattccgactccgccgccgaatccgttcaccccgacgagcttgacatttccaagctcgacttgccctcgcgcctcgtcgagtctctccagagccgtggaattactcaacttttccccattcagagagcggtgttagtacctgcactagaaggtagagatatcattgcgcgagccaagaccggtaccggaaagacgttagcgttcggaattcctattattaaaggcctcactgaagatgaacac

SEQ ID NO: 16036 - DNA, 816 bp, Glycine max
agcctccatcctttataactgaaccttccctcacaccttccccatcagtcatcacactctctctctctctctttccttctctcttttcaactcattgaggcattcatcaaacaccttctcaaaatggccaaagttggaaaactaacaaagctcaagtcagcaatcaagagatggccctcattgaccaggctcagccgcaacagcagcagtgtctcttccaacaaaggggtctctggaaaaggaacatcccttaattcatccaaggaacacgagcatgaacaagaacaacttcgtgcggtttatgttggcaagtctaggaggcggtacctcgtgaactccgaagtgatcgatcaccccgtgtttcaggagctagtggacaggtcttgctcttctaattcttcttcttctcatcatcatgacgatgatggggtggtggtggtgtcgtgcgaggtggtgctgttcgagcacttgctgtggatgcttgagagcgaagagacccagttggggtccatggatgagctggtcgagttctactcttgtgcatgctgacacaaacaccccctagtaataataatgactgactttaattgtttcttctctcatgtggtcacgcaaaacaccattggtcatgactgctttgcgaattcagattgattcaaatgttatatattatataaacatatatatattgctattattatataaagtgggcatgttgtagttgacatgaaagtgatattagttgttatgacattgttttaggtgaatctaatgcgacttcaaattaatcacctatttcatttgcaaaaaaaaaaa

SEQ ID NO: 16037 - DNA, 1900 bp, Glycine max
gacccgacacagacacacttggtcttcctctgaccaagaccaacgaaccaacctcttcctccgactaccgttctccatcctattttgaccttagtccatgggaaactgcagcagcggggccggagcccccaccacctactccgacgaccatccccaccacaacggcatcaccgtcctccctcccaactcaaacccttcaccccaactccccaagcccccaccgacctcctcctcctcctcctcgctgggccgggttttgggccggcccatggaggatgtccggtccatttacatattcgggcgggagctggggcgcgggcagttcggcgtgacgtacctggtgacccacaaggccacgaaggagcagttcgcgtgcaagtcaatcgcgacgcggaagctggtcaaccgcgacgacatcgacgacatccgccccgaggtccagatcatgcaccacctcaccggccaccgcaacatcgtcgagctcaagggcgcctacgaggaccgccactccgtcaacctcgtcatggagctctgcgccggcggtgagctcttcgaccgcatcatcaccaagggccactactccgagcgcgccgccgccaactcctgccgccagatcgtcaccgtcgtccataactgccactccatgggagtcatgcatagggacttgaagcccgagaatttcttgttgctcaacaagaacgatgattcccccctcaaggccacagattttggcctctccgtcttttttaagccaggggatgtgtttagagaccttgttgggagtgcttactatgttgctcctgaggtgctgagaagaagttatggacctgaagctgatatttggagtgctggagttatattgtacattctactttctggtgttccacctttttgggcagaaaatgaacagggtatctttgatgctattcttcgtggacatattgattttgcatcagatccttggccttccatatcaagtagtgccaaagatctggtcaagaagatgctacgagctgaccctaaagagcgactttcagcggttgaagtacttaatcatccctggatgagagtggatggagatgcacctgataagcctcttgatattgctgttttaaccagaatgaaacaattccgggcaatgaacaagctaaagaaagttgctctgaaggttattgctgaaaacctttctgaagaagaaattattggcttgaaagaaatgttcaaatccatggacacagataacagtggaacaatcacattcgaagagttgaaagctggtctcccaaaattgggtactaaactttccgaatctgaagttaggcagttgatggaagcggctgatgtagatggaaatggaaccattgattacattgaatttataactgctaccatgcacatgaatagaatggaaagagaggatcacctatataaagcctttgaatattttgacaatgataagagcgggtacatcacaatggaagagttggaatctgcccttaagaaatatatatgggtgatgagaaaacaataaaggagatcattgctgaagttgatacagacaatgatggaagaattaactatgatgagtttgtagccatgatgaggaaaggcaacccagacataacgcacataacccaaagacgtcgcaaataagctatgctttgtggtttgttgggttcagagtgtctacacgttttagtattacggcctgctatttgattaggcacttgcatgatatttgtgggtctagactctagttggacaagtttatttctactgcttgagcagacacgaatgggtacaaatcaaaggaaaaacagaacaatcctttttttcacaagtgaggcacattttattcagttcgtctcttggtttatgcagagtgttaacattgtaatta

SEQ ID NO: 16038 - DNA, 960 bp, Glycine max
ctgtcactcaccgaccctccaccgcaacccatatataaataccacttttgaacccaaccaaacacgcgcgatcgcaatggccatggctcttcgcagactcaacaaacctttctccaacgccacttccatttatcgccagtcctcttcgctctccgctcacgaaaaacacaaatctcgcgccgattggataaagcagctcaacgatcctctcgaggccatcgatcccgagatcgccgacataatcgaactcgaaaaggcgcgtcaatggaaggggttcgaacttataccttcggaaaatttcacgtcgctgtcggtgatgcaagcagttggatcggtgatgacgaataaatacagtgaaggatatcctggtgctagatactatggaggaaacgaatacattgacatggctgagaccttgtgtcagaagcgtgcacttgaagcttttcagctggatccagcaaaatggggagtcaatgtgcaatcattatctggatccccttctaacttccaagtttacactgctttattgaaacctcatgagagaattatggcacttgatcttccccatggtgggcatctatcgcatggttatcagactgacaccaagaagatatcggctgtatctatattctttgaaacaatgccatacagattgaatgagagcactggttatatcgattatgaccagttggagaaaagtgcagcactttttaggccaaaattaatagttgctggtgctagtgcttatgctcgcctttatgattatgcacgtgttcgcaaggtctgtgataagcagaaggcagttctgttggctgatatggcacatatcagtggattggttgctgcaggtgttattccttctccttgtgattatgccagatgttgtcacaaccacaacacatcagtcacttcgtggaccacgtggggctatgattttcttcaggaagggtgtgaaagaga

SEQ ID NO: 16039 - DNA, 388 bp, Glycine max
cggaattcccgggtcgcccacgcgtccgatcgcaatggccatggctcttcctcttcgcagactctcctccaccctcaacaaacctctcgccagcgctacttccatttatcatcgcatgtcctcctcgctctccgctcaggagaaagacaaatctcgcgccgattggataaagcagctcaacgatcctctcgagaccatcgatcccgagatcgctgacataatcgaactcgaaaaagcgcgtcaatggaaggggttcgaacttataccttcggagaatttcacgtcgctgtcggtgatgcaagccgttggatcggtgatgacgaataaatacagcgaaggatatcccggtgctagatactatggaggaaatgagtatattgacatggct

SEQ ID NO: 16040 - DNA, 553 bp, Glycine max
agaatatctcccccaaaaaaaaacacacacatataaatcacccaccaacctcttccgcacccaccccagtctcactcgtcactcaccgaccctccaccgcaacccatatataaataccacttttgaacccaaccaaacacgcgcgatcgcaatggccatggctcttcgcagactcaacaaacctttctccaacgccacttccatttatcgccaggtataaacatacatttctttttattcattctcttcataacactctgtgcttgcttcgttgttgcagtcctcttcgctctccgctcacgaaaaacacaaatctcgcgccgattggataaagcagctcaacgatcctctcgaggccatcgatcccgagatcgccgacataatcgaactcgaaaaggcgcgtcaatggaaggggttcgaacttataccttcggaaaatttcacgtcgctgtcggtgatgcaagcagttggatcggtgatgacgaataaatacagtgaaggatatcctggtgctagatactatggaggaaacgaatacattgacatggctgag

SEQ ID NO: 16041 - DNA, 342 bp, Glycine max
cggaattccccgggtcgactccacgcgtccgtctgaattagggtttcttttccccttttggcaatgatgaacggaggaggaggacgacgaatcgtgctgataactggagtcggaaaaggactcggaagagccctggctcttgaactcgcccatcgtggtcacactataattggctgctcccgttctcaagataacctcaattccctccaatcccaactctctctgtcttcttccaaccatttgttactcaacgccgacgtgagctccaatgagaacgttcaagaaatgtgccgcgatgtcatggacaatagatctgatgctgatatcatactgaacaatgca

SEQ ID NO: 16042 - DNA, 553 bp, Glycine max
ggattcccgggtcgatcacgcgtcggctacgcgtccgatttcaagtggataaggagatggttcgaatgggagacatgtttggttacaaccataaatcacatgttagcaaatgttagaattcagaaacagggtcgtgatagttggtggtggcttgatgacaacactggaatatactcagtaaaatatgggtatagggtcttgcataatttacttatgggaagtcaaccaacagaggcgttttcaatgatttggaaaattgaaggtcccgaagaaagttatatgccttgtgtggagagaagtattcttggattgattgccaactaaggacaatctaaggaataggaacattatggatgcttcacaggatgtgttttgcgctttttgcggacaatttgaggaaacaacccctattgaaccattttggcagcatttacataaagttttgaaaaaagaagcagaaatgtgggtggtagtttggtgcacagttatatggtacgtttggtgggtaagaaataaatgtggtttcacggaatctgtttttgacaggacgctg

SEQ ID NO: 16043 - DNA, 509 bp, Glycine max
  unsure (1)..(509): unsure at all n locations
actcttgccttatcggctcgagggtgtctaaatctcttagaagtttgtgtttcagtgttcagctctcacattaagatanctccttgaggaggattcagtaccatcatggcatggtgattaacacccctgttctccatgcttcttcttcttctgaagaagaagcgcctccggggaaagcttctcatgctgcaatggagggtctgagtttggctgagaagagtgctgaggctgttgaagaaagtaataaaggaattgaaaatggttcaaagagagaaacttttgctgatttgattgaagaaaagggtcgtgagagcagtttcagctctgagtttctgtcatctgagaccactcatggcgagcatagtaggagtagcactgaggactcatcttcatctccttctgtggggtggcccgttcaggaaattgctgcatctgattgtgctagtcctcatggaggtgaagatggtgagaagaaccacttggttttggagaataaggagtttgagaaa

SEQ ID NO: 16044 - DNA, 360 bp, Glycine max
tacgcacatccacgaaaaggaagcagagaaaactaaccagcaagagatctcacaggaaaaccaggaggctgagatcaagcaattgaggaagaccatgactttcaaagccactccaatgccaagtttctacaaggaacctcctccaaaagttgaattgaagacgatacctataacgcgcccagaatctccaaagcttggaaggcacaaaggatctgctgtgaacaattcagaagataaatcttcttctagtccacatggaaagcaacaacagaatgattcaaccaaggcaaaggcaaagggtagtaataaagaagtgattccaaagaaaccaatcagaaaatctcaagcccagctgcagtc

SEQ ID NO: 16045 - DNA, 440 bp, Glycine max
acggtctgatctcagttgtcagtttatggtggtcaaagtggctttcaatccatgatgaaaagcgatgcaaagaaattggctgaacaggatgaatcagtattgaaaacctcaggaattccttacaccataattaggaccggtgcattacaagatacacctggtgggaagcaaggctttacctttgatgagggttgtgcagctagtggaagtattagcaaagaagatgctgcctttgtttgtgtagcagcttttgattgtgtcccacaaactggattcatttttgaggtggccaatggggataacaaagtttcagattggaaagaatgtttggccacattgatggagaaagcaagtcaaaaacttcagtgactattgacagggaatgtgtgttcttcctattgaattcttgatgtgcagaatggtctcaaatgggttggttt

SEQ ID NO: 16046 - DNA, 585 bp, Glycine max
aaattatctgaaagataaggaggccacgtaccccaaattttggcggttgaggagcagctccttcatttcctcttactctgttttttctgtttctgttggctaagaaacaaagaaagagcccagcgataaagcaaaagcgcatttccgctgttgtatgtgtgtgtttgcgatgccaggtggggcaaccgtctgctccggtcaccggtttctctgcgttgttctgcattcgactcgtccccgactcagctacccgactcggtcgcgacccgttccggttcaacttggatccgtgtttgtgtcgaatggtaatggcgatagtaagcggttcagctccaagttgagcctcattcccagagccgttgattcttccaccgcacaatcttccgtcgtttccgacgatggcttctccgtttctaagctttcatttggtgtgattggtctaggtgttggactctcactcttgtcctacggttttggggcatattttaatattctccctggatctgaatggtcagctataatgttaacttatggcttccctcttgcaattattggaatggcactcaagtatgcagaactcaagcc

SEQ ID NO: 16047 - DNA, 672 bp, Glycine max
atcatcctgcactcacttactcatcctgggcaattctgatctctccctctggaacaaggcagaatgcttctccttcacttgcatagctgtcagccatggattataccaccaactcacatccacctctcatcaattaccaacaattccaggaggtttatgccgtgccacttcagctggatcagatcttcagcattacacgtgggtcgtcttagagtgcacggtgaagggagatgggaagttgattctcacaggtcagaggttaagtcaaattccaccacttacaaacatgtcctggaaaatttgggctccgagtttgtttggatgaagaaaaataataatagtactcagggtccacaggctagaagcatgatgcaatttatgtcattggacatcatactcagaatgacccataagcagctgtataatctaatgataaaagttggccaagcagtacttccacatgtgtttcagacttgtagtgcaacaagcttgccttttgcttgtgtttctaatgccttgaataaacctaagcctcttaatttagacgtgtccttgccttctattcatgatattagatggagcttagcacggttgttatacttatttaacatccagcttgaaagaaatgttgccacgttctttggggtgctccttttagcgtgcttctcattt

SEQ ID NO: 16048 - DNA, 466 bp, Glycine max
gcgtaccttcctgataaattgcgcaattttatttggggaaagttttagtcggaactcgtacttcaaatgctttttttgaaacagcagattttagcaattgattataatcattttgagtttaggttgtgttactcaaaatttgttggatttgattgcaattcagtttgaattatttaactatgttcccttattactttactcatttacgtattcagactgatgataattaagtaaattacttaaataaaatgaattgtaagttccaacataaatttcatttgcaaattagttcagatagtctttttttgaagaattccaaacacaatagtttgattactaaaaatcaaatctattttgtattttagcggttctgaggacagtgtatgtaatttgccctgaagaatatagcttaagcctcagaagaagtaatttgtctgaaaaatttattggtttttattcttatcgt

SEQ ID NO: 16049 - DNA, 883 bp, Glycine max
cccacgcgtccggctacatggtcagaatacatgggtagtgatgccaactacgttctcaaaggggatccagccattgatcgagctcatgccactttcatctcatgtggcttctcaactgcatttggagctgcttggaaggaagccaaggttgaaagtggatccactgttgctgttgttggtcttggggctgttggatataggggctgtaattggatccaaaatgctgggagcaggtaggatcattggaatggacacaaacgagaacacgagagcaaatggagaagcttttggaataactgactttataaatccgggtgattctaataaatctgctgcagaatcggtcaccgaactaagtggtggaatgggtgccgactattcttttgagtgtactggagtttccactttactctctgaatccttggaagccacaaaaattggaacaggtaaagcaatagtaataggtgtaggaattgaaattactttgccattgggtctttttgccattctgcttggtagaactttgaaaggttctgtttttggaggactcagggccatttcagacctttccattttagctgacaaaggccacaaaaaggaattccctcttcaagaactcttcacccatgaggtcacattagcagacataaacaaagcatttgagctactaaaacaacccaattgtgtcaaagttgtcatcaacatgccatagtcatattagcgcaattgtaggtaatctccggcaaagtttgaaaaagattcacgtttcactctttatcaattaccattgtctctctctttgtccttctctatgcatgtgtgtatgtggaacccagatcctctgccacgatcctaccacctacaatagtattttgtccgttcc

SEQ ID NO: 16050 - DNA, 519 bp, Glycine max
ctcgagcccaaatacaacactactttcagttttttctgtctctgaatctcaaactcttcggaaagattaacattaatggctccaagggatatcaatagatccaacgttgttgttgttgccggagtatccaacccgacccataaagagatccgttaccgcggcgtgaggaagcggccgtggggccgctacgccgccgagatccgcgacccaggcaagaagacacgcgtgtggctaggaacgtttgacacggcggaggaggcggcgcgtgcgtatgacacggcggcgcgtgagttccgcggcacgaaggcgaagaccaatttccccacccacgcggcggcggcgcgtagtcccagccagagcagcacgctggactcctcgtctccgccgccgctggaccttactcttgccgccccactcaccgtcgcgggcgcgttggttttctccggtggcgcgtcccgtggtgttcttcgacgcttttgcgcgtgccgaggtgcgcgcgtcgttcgatcttcccgtggc

SEQ ID NO: 16051 - DNA, 492 bp, Glycine max
accggtccggaattcccggtcgagcccacgcgtccgcccacgcgtccgatttccgttggaaagttggttactttgtttggatcggtctctcacattgtcctgctaataacgcctgatattctctccatctctaaacattcgcatcatatcataccataagtgtgttcagtttcttcaaccgtttgccttgaattgttcatatcatcctgggaagaaggtcaaagtttttatctgtttcaactttcagcaatcggtttctccttttgaagctgattgagtttggtggatgatggctaacactaaaatttcatcttctgagtggcgtaagctctctccgagtgttaccacggccttggcgtcggcttttcttgaatggttgctgattcttttcctgtttattgatgctgttttttcttatgttataacaaagtttgctggttactgcaaattgcaaataccgtgcctgttatgctcaaagcttgatcatgtgtt

SEQ ID NO: 16052 - DNA, 475 bp, Glycine max
attggatcaaactgccttggaacgaaacaagaagggccatcttcccgttcatcttgcttgcaaaaggggttgtgttgagatggtaaaagaagtctttgaacctggatccggatggcccattaatccttatgttctcctcaatcaaaagggtcaaaacattcttcacattgcggcaaagaatggaagagataatgtggtagaatacctactaggaaattgcaacactggtcatctacatataaaccagaaagactatgatgggaacactccattgcatttggcttccaaaaatttatttcagcaagttatcagcttgatcacagaggataagaggactgatctgaatctcacgaatgaagacggtttaacggctggtgatatcagtaagacctttgaacatccaatgttacgtggaagagagattttatccatggagttatcaaaaggagctggagtccctgtaaatcacatgttg

SEQ ID NO: 16053 - DNA, 471 bp, Glycine max
ctcgagccgaagtcaatcattccaaaatccaaacccaaacacaaaacaccaaatttcttgaaccttccccttcaatataaaatccctagtttcaaaatctctcccaaactaaaccaaatcaaatttccaaaaccatacacacaatttccaaatcctccttcaaaagggagttcaaaacctcttcctaaccaaaaccacactcgaagtttccactttccaaatcctccttcataagggtggctcaaaacatcttccaaacctaacaaaatccacaacttaaaaaaaaaccacacacacacaaaatttctaaatttctccttgagaagggaaaatgcaaaataccctgcagcaacaaaccgaagaaagttcacaacttccaccgaaggtgtccttttccgggcacaagatgggtgatttgagtgatgggcaacaccatggtgggtatttggccgtggttccccggtccagacc

SEQ ID NO: 16054 - DNA, 457 bp, Glycine max
gcgctcctgaattgctgcttctttaagcatcatttatctatataacaatatgcaattatgtgggttttaacttacttgcgaccgtatgcactcttcttcctctcctgtttgatcttttttggtagtgttttagccacttgccctagtcttcaacatttatgatttgatcgtacctgtaaatcatttggtttgcatgtagtcacgtatcttaaacttctcatcacgaaagctttaaactcaattcttggtggtttaagtaagagctttatacctgcagtttaacactcccttaaaaaattggcttgcaatattaatgttaaagctgtgaatgggagtttgttttgcattcagctactttgacattgctgatgatggtgtaaataataatgtaattctgatgactaatttatattatgtcatgttcttccaatgcttaaaattgtttgattaaaatatt

SEQ ID NO: 16055 - DNA, 786 bp, Glycine max
  unsure (1)..(786): unsure at all n locations
cttacatatgcaaatattctaacccttggagcctattctgtacctggtattggcggtatgatagctcagactttggaagagcagctgtnncgctggcttcgagcagctgagttgacttgtgatcgtgcagctcttcttgttgctcaagaccctaaggttgtcatctctgtcctcatgaaattagctgggggatgtccatctatggctgatcaactaaatgtggatgcattcctggagcaagctcgctcttatgaaaaagctgcttccagcccaattgggtggtatataaggaatgcacaaacaaggcaactgtcacatcctctgcctgttctacgtgctagcgaaattgatgaatggtcaagaactccagcttataaatctcttttgaaacgaggaattcagatcaaatcttagaacgaaatgtctagcagtgcatgcatggaatttgttgaaagtgcacagcagctcaaggttcttcaagttagtgcgtggtggcagatgttcaaatggtttcaggcggaagtagcatttattatgcatctatctacggctgctggcaaacgtgtatgtattcactgtgttataatagtcaacctgtaagtagaattttggtgagctggattattatttcatagaaatattggttctggaaagaaaagaattacctgcccaattctagcttagaaaatttctcggagtagaacacactattatgtaagttttatgaccgaaaatttttatttgttgtattttacactataagctaagctctttttgaatagcact

SEQ ID NO: 16056 - DNA, 718 bp, Glycine max
ggctttggtggccgaggggaacgaggaggctttggtggtagaggtagatcagacagggaaggttttggtggtaggtggggagcagaaggaggacgtggaggccgaggcaggggaaggaacgatcaatctggtggttggaacaacagaagggattctggtgaggatgggccctctgactggaagaagggggcagataatggtggatggaagaatagtaatggatctcaggcttggaaccaggatactggtgacaaggataggcagagctggagccagggaaatgcagataaggagcatcctagctggaaccaaggaagtggaagaaatcagagctggagttcagcaagtggagctaatgataatggatctcaggcttggaaccagggaaatgcagataaggagcatccaagctgaaaccaagctggaaataagcagagctggagttcagcaagtggtggaggtaacaataattggaacaacaatgggtcatcgcagactgcagaggctagctggaaaaaatctacaactgaagggaccaatatccagggtggtgggtggaacaagggatctagttcaaacactacttctaaggatgagaccattcagacacttggttgccagtgcttatcaaagttcatctactgtcaggtggatgctacttatactcataacattgaaaagttggtgccgaaagtgtgcatgctatcacgggaacatg

SEQ ID NO: 16057 - DNA, 484 bp, Glycine max
attgaatttatatgatgtgaaagctacaagaattgaagaccagttgaagttttgtttggatcagcttcaaaaacttgcagaggataagcttcaaagttctgtcactttggaaaatacacaaagaaggctgtccagtgttagaagacaatctcagcaggttacggatatggtggtggaaatgcaatctaaaattggcagtaatcgagtgacgcgcatggagttacaagtagaacttgagaaagaaaggtttgccaagaaaagagtggaagagaatctggaggttgctaggagaaagtttacatgccttaaagaacagaatgagggctttttagtaactgaaaagcttcaacaggaacttgaagagtacagggaaattatcaagtgcagtatctgccaagacagggcaaaagaggtggtaattacaaaatgctaccacttgttctgctactcatgtatccagaaagttgctgggagtaggcatcgc

SEQ ID NO: 16058 - DNA, 457 bp, Glycine max
gcacgcacgcgttcgcgaacagtgagagcgacctcttccctttcctctctcttcttctctttgagacactctctctctctctctctgcttatgcgatacaaatatgatatcacttccccataccctacatctctaattttatattcatgtgaaacccgcactttcttcttagagaaggcgattgcagaaaaacacttaccgcttagagcaacaaaagaaaaaactggagagaaagagactataggcgacaacgtatatagagagacaagtaattagtgtctgtgaaatatagatagagagagggaggaaactgtagaagctatcaaaaccaccgaggggaaaacgatgtctgagagctttacatcctttcataccctgcaactctaagagtgtttggcgatgttggatatgcttgttctccttattataactgatcgataattcaactattggacag

SEQ ID NO: 16059 - DNA, 469 bp, Glycine max
gagatgagatccttccgactcttatgcctattgttcaggctaagttgtctgctggtggggatgatgcttggaaagatagggaagctgctgtcttggctcttggtgctataggtgaaggttgcatcgatggtctttatccgcatctgttggacattgtggcatttcttgtccctcttcttgatgataagtttcctctgatacgaagtatttcatgctggacactatcacgatttagcaaatttattattcaaggtattgggcatccgaaaggctatgaacagtttgataatgttcttatgggtcttctacgaacaattttggatgataataaaccggttcaaaaagctgcttgttcagcttttgcaacgctggaagaggaggctgctgaagagttcgcaccacccttggaaattattctaaagcacctaatgactgcatttgggaaatatcagagacgaaacctcagaat

SEQ ID NO: 16060 - DNA, 833 bp, Glycine max
tccacgcgtccgcccacgcgtccgcccacgcgtccgaatttctcccacgacaacgtatcacaagctcccaatatagcaagcagcaaacatgatttcttccgtgtcctttccagcgtctcttcccgccgttaacttctccggcaacgccatggcttcgccgtcgtgccgcgtcaaatcccggccaatagtcgccttcgccaccgccactgccaccgctgaagctcgctcttcctggacggagcaaccgagaccttcctatctgaactcctcttgctcttcgctttacgatatcctcggcatccccgctggcgcctctaaccaagaaatcaaggccgcgtaccggcgactagccagagtctgccaccccgacgtggcggccatcgaccggaaaaattcgtccgctgacgaattcatgaagatccacgccgcgtactctactctttctgatcccgacaagcgcgctaactacgatcggaggctcttccggcgacaacggccgttgtcgacggcggcggtgttctccggttacacgcgtcggaactgggaaacggatcagtgctggtagtgagtcactgagtcgactcgctcgagtgaatgagagaagacgcggttattgaagcgcctttctttgcatataagtaattaatcactagttagttagtcgttagagtttgtatgatactacgtatatgtatagctacatacatacatatacgcgtagagtagaatagactgccacttgtactgagtactcttgtaatataaacttttcatcaaaaattttatggatgaaaaagaaaaaaaaaaaaacagaaaagaaaattgactttggt

SEQ ID NO: 16061 - DNA, 716 bp, Glycine max
tttgtgttacaagagtgtcaactgatccacttgcacctcagtcatttggggcatggattcaggatgttgctggcaatcacacgggtgcaatatcattgctaatagccgattttttcctcttctgcggcgtgtttactttgacagttgtgcaggctagtcagatatcacgcaatattacaacaaatgaaatggcaaatgcaatgcggtatagttacctcagaggtccaggtggtagatttagaaacccatatgatcatggtatcaagaagaactgttctgatttcttgatcaatggttacaacgaagacgttgagtgcattgaagaattaggtagctcagaggagggtataggaatgatgcacatggcaagaagctcgaacttagcaaatggagactcgcataaccattccgaatatgcaaggggcaatggaaatggccatcatgttattaatgtgaattccaattccaacagtacccactccaaaacaaatcatggtcatgttcattctacgcattgtagccataataataaccatggcaaaaccagaaatgacaatgctcccttgggcttaggtcttggccttggacggaacaccagatctgttacaccctcatcatgatatttataagtctagtggttgaacctaacctgtaatgtatcataggcacacatctgggttggtttatgttaattcaatttattgtggctcttttct

SEQ ID NO: 16062 - DNA, 841 bp, Glycine max
ctcgagccgacaagtttggtgacgactcacttctgcaccgagccacctccaactacactttactttattattattctctgccggcgtggctttctttcttcttttataaaagtcatatcataatcataataatattaatcgagttttccgcagagaaaaaaaggggtcgaacgagtgaatcagaacataagtgaagactgcgaatataggaacccaatcctaattctattgaatttttatttttagcggtggaaattcatcatcgatcgcatctattccataaatagcaaatagaaaacaatgggtaaaaagcaatcttttcggagcaaagcagcctacttcgtttctgatctcaccactggtcttctcaaccctatttctgacaacaacaacaacaacaacaaacccccttctctccctccttccggagaagaagaaaaagaagatgtgggtgagtcaaagggtggtagtgatgatgtgataattgatgggcctgatacttcgtccttcactgcgtttctctattctctgttgtctacttcggattccggggataaagttggtgaagctgataagaagaatgatgatgaggtggcaggtgatgactctttactatcagactcagccacgaaggaaagttttgttgtgaagaaaagtttgttttccaggagcaaacattcacttggtagggccattcaccaaatgggtggatttagcaacagggatagcaattacaccgacgaaggtggtcgtgagatgaagcgcattgtgaaagagccattggcatgggctgtgtctggggttggtgatcatctgcctcaaatttctgagccttcaatgc

SEQ ID NO: 16063 - DNA, 434 bp, Glycine max
cccacgcgtccgcttgccctcggcctctaacccttctctgctctctctcttccatcgcgcgctctgacttcgcctgcgatacccaccaccaccatgcccacaaccttccatctgccgtcaccaaccacaccttccgccaccgttaccccttcctctgtttcacccgcattggaacccttcgctccacctcttctctctttcgcatttttctggttttcccttttttcagattcgagagctcaatcgcaacacctccgtaagactgccaacctcgttccgatggtcatcgttgtcgtcgaatccaaagtccaatcgaccacctgcgctgcccttgtgaacgtgtttgcgtggacggtgtgaccaacttcttcaacaccgctcttcatttttctgggtttttagcaaatgctttctctttcattttttcagatctt

SEQ ID NO: 16064 - DNA, 521 bp, Glycine max
atgcgatctcatacattattgttcgctattcttcgagattcttcggtctcttagttaaaaaggatcgttagggttttctattttcatctaattgcatggaaccaatttgatggaactagataatacaattgattaattaattgctgcatcgaatggagaaatctgtttaactccttaaatatttgtttcgaatcagttgatttttcactatgcgtatttcaggatcgaaaagtctagtttaaccacacgtttgtggttgtagtggaagcgtaacgaagatgaatggcattgggaaactcaaatcgtcgagttctgaattggaccttcacattgaagattacctaccttctggatccagtgttcaacaagaacggcatggcaagctccgactgtgtgatttgctagacatttctcctagtctatctgaggcagcacgtgccattgtagatgatacattcacaaggtgcttcaagcaaatcctccagaaccttggaactggaatgtttatttgtttcctttgt

SEQ ID NO: 16065 - DNA, 492 bp, Glycine max
gggactcggatgaatcatgtttggttaggacaaaattgccctccatcactttccttgttagagttggtttctgcaacctaccatgcaattcctcacctgaatccgttttctattgccacgttgtggaagcgtaacgaagatgaatggcattgggaaactcaaatcgtcgagttctgaattggaccttcacattgaagattacctaccttctggatccagtgttcaacaagaacggcatggcaagctccgactgtgtgatttgctagacatttctcctagtctatctgaggcagcacgtgccattgtagatgatacattcacaaggtgcttcaagtcaaatcctccagaaccttggaactggaatgtttatttgtttcctttgtggtgctgtggagttgtggttcgatatttgattttgttccctattaggattctagtgttggcattaggatggattatatttttttcagccttcattccagtgcactccct

SEQ ID NO: 16066 - DNA, 466 bp, Glycine max
caaaaaccctttcgcttattttattatcgttttcctttctcccgagtgttctcctttcttgcttccttctccggccatctttatcctgatggcgtcgtctctgggaattgcttgcggtggaaacaacgccaaattagggatcccaaagcagcggtgtggttcggttcttcagccgccgtgctccctcgctatggggcgctcgacggcgagggtggggaggatcacggcggcgatggccacggccacggcggtgatgaccacggccacggcgaaggagcaagagactaccactccgatgatgatggcaatggagctgttcgggaaacgcgatggaggagccaaaaacgacgctgttgagggacaggagaggctggacaggtggatgagagagtcggtggtggagatcgtgaagaatttgaaagaagcgcctctgctggtgcaagtttttcccaaatcggcgacgatg

SEQ ID NO: 16067 - DNA, 360 bp, Glycine max
ctcgagccgtttcagcttcagtttctcttgtgtttctcaaagtcacgttactcatccacgcgtccgtttgcctccttctgagagacacacacatagatagatatgataacgttgtaatcgagatggctgccacgtgttgcaacttcactcaagcttcttctagtttcaagaaactgcatgagaacattcagctgcagagctacttcacaaggtgccatcaaagatcagcgtgtagtgttgaaaaagacttccataggagatatggaggaaggttgcaagttgaaagatggcatcaatatcaacatgtgttatgtgcaagaagaagggagttgtccccttctgtcaatgaaaaattttgaa

SEQ ID NO: 16068 - DNA, 694 bp, Glycine max
gcacattgagcatagttgaagtttatggggtggatgccattgagagaatgctggaggatttgatatatgcccaagataagccatttgcatctggggaaggtaatggtgagaagagggtagcatctcccctttctaacgctgccaaggctgacaatgttaggccaaatactatcacagggatcaattctgatcctgcttcagaaatctcttctgaaaaccaagaagctataattgtgaaaagaaatgttcctgatccagttgaagaaatccgtcaacaagttggtcggatgccgggggataccgttctcaagattctgatgcagaaagttcgttatctggacgccaatgcgtcggttttggagcagtatatggaggacttaaattctagatatatcaacattttcaaagagtacagcaaagacatgggagaaaaagatctacttctagagaagatcaaagaagaaatgggtagattccttgaacgacaagatgttatgatgaaagaatttagtgatcttgactcttggaggtcccatttttctgtgcaactggatcatgtactaagggacaatgcttgtttaaggtctgaggttgaaaaagtccgggaaaatcaagtgtctttggaaaacaaggttgtagttgtgttttctgtgtgtgttattttttcattgcttgctatttttccgctatcttt

SEQ ID NO: 16069 - DNA, 469 bp, Glycine max
caatttccaatcttaaaaaacaaaaagaagagctttgaggaggtgtaacataattcctcatgtggtgttgagttcacgttcacgcccatcccagtaaaggtggaacccccatggctgttacagcctctagctttggaactacatggtgtcttagaagagcagctcaggcttttgctatctctcattctcatattctccgcaacaatgttaaactctctttgcagaggaacttttgctctcatcttctctccgtttctacttctttagcttcaggtgtaagccagacagtacaagctctaaagggagaagttgacttgttactcaaaggagtaggagaaagaagtgtaacgtaagaagtaaaacatattcttgagatggctagacgagcatcattaaagcgagagattctccatacagattttctaacccctccagtgttaaaggaatctatgcaagttttggaaaaact

SEQ ID NO: 16070 - DNA, 488 bp, Glycine max
cggacgcgtgggcggacgcgtgggcttcttgttgccactgtcatctcaatgtttttggtggacaagtatggtggaggagaattctttctggaagctggctttgaaatgatatgctgcatgattattacaggtgcagtcttggctgtgaactttgggcacggcaaagaaattgggaaaggagtgagtgcctttctggttgttgtgatcttcttgttcgttttggcatatgggagatcttggggtccccttgggtggttggttcccagtgagctcttcccattagagatacgatcatccgcactagagcatcgcggtctgtgtcaacatgatcctctctgcacttcttgctcaattgttcctcatgtcactttgccacctcaaatttgggatcttcttgctctttgcttccttaattatcttcatgagcttctttgtcttcttccttttgcccgaaaccaagaaagttccaattgaggagatttatcttc

SEQ ID NO: 16071 - DNA, 439 bp, Glycine max
aaagaattgatatgcagtccatgttaatttgcagagtgatataattgagatgtgcgattgggggtcaatctatattggtcagtgaaatgggttggtgtggttctagaaattcaggtcttcaggagtgaataagtcattggataacttgaaagctataagttcaagttccatcaaagccaagagtccaccttcacctgatcaagcattgttaggggcaattatagctggtgtgattgctgttgttctctacaggttcaccacatctattgaggctactctcggtcgccaaacactgtcagataatttctcagtccgccagataacaatcaccataaggacattaataaatggcctgcgctaccttgctacatttgtctacggcatcaattctggccggttatttctttattctggccagcttgccatggacaccatggga

SEQ ID NO: 16072 - DNA, 563 bp, Glycine max
gtcatccgtccgtgattaccatatttccttttctctcttcttccttccttccttccttccttccacaaatggtgcactctcactctcaccatcaccaccttctcttctccagtctccctcttcgtctctcactcaccaccacccatcacaactcttctttaccatctcttcattttctccacagacccatcatcaccaccaccaccacaacaactactgtttcagccattcctcctactgctgcatggcttgcaaagctcacaacacaagactttgcccactttgaactcccttcttcccatcttttcacagatgacccttctaccattcaggttgcttgcagtgttcttctcactggtgccatcactgtcttcttctttcgctctgtccagcgccgtgcaaagcgtgccaaagaattgaaatttaggtcttcaggagtgaataagtcattggataacttgaaagctataagttcaagttccatcaaagccaagagtccaccttcacctgatcaagcattgttaggggcaattatagctggtgtgattgctgttgttctctac

SEQ ID NO: 16073 - DNA, 571 bp, Glycine max
gggggattggaggtggtgagtttggcttgtggcctggtgggaggggatactcttctgaggacacacccttgagtgttacattgctttcctctcaggtacaagacaatgaagccgcataccagtctttgaagttcttagaagaattggatggaaaaatcccaatagttcacgttgaagatgtctgtgaagctcacatcttctgcgcggagaatccatcaattaatggcagattcttggttgcaagctcatatgcatcatccgcagaaattgcaaattattatcttcaagcctatcccgaattcaatttgaaccacaagtatttggaaaggccaaaaagggatataaaatgggcgtcaaggaagctgacagacaacgggtttgtgtacaaaaatgacctgaagatgatattggatgattgtatcagatgcgcaagaaggatgggcgacctctagtttttttaatattggaagggacaaatttattaataaccgtaaatgtcattaatgcagtggatggaatttgcaaaagaaaggatgcagattgtagaaggactccaaacttgagaggatcc

SEQ ID NO: 16074 - DNA, 391 bp, Glycine max
gaccagtctagatccacatcttttaagagattcttcttcaagtctcaagttattgccaaaaacaaattcaacatcggaaaatgtgaggatcatgtctgggtgacaaaggatgaactgatggagtattttcccgagcaagctgagtttttaaacaagatgatcattagctgatgacaatggaggatagttgtttagttgaaactattgcaaattagctctaaatgacagtgagggaccttgaaagaagatcaagctagcatagtttttctgggcataactgaagatttcaatttgaagttacacttaacatcccaaatttgcccaattttattgacaattatgtttggatatctatcttaccagttcaccaactagtcttgttttagagttc

SEQ ID NO: 16075 - DNA, 453 bp, Glycine max
gccacgcgtccggcgaatctacttcaggtcacaagtgattgctaaaaacgagttcgacggcggaaaatgtgaggattttgtctgggtgacacaggatgaattgacggaggattttcccgagcaagccgagtttttaaataagatgatcattagctgatgaatgtggagaacagctgtttaattgaaatttttgccagctagttcctagaatgacagtggagggccttgctcgaagatcaatgtacgataaagtttctgggcacattggacgatttcgatttaaagttaaacgtgacatctctagttgcggagacttgtccgagttaatggatgctggtaggcctttttgtttaaaaacgtattttgttgtttcttttaatttgccatagctcttcttgtagctgtactgtaataaataagttgcaatggtgattatgacgatttgaatatgtt

SEQ ID NO: 16076 - DNA, 484 bp, Glycine max
gcaacattgaaaaagccttatcaaataaagtgtgtgtgcagagagagaactgaagaagaagaagaagaagaagaaggatcttcggtatctcagccagtactttcaatttgcataagaatctgcatctgggaaacctcagacacacactcacagtgacaagaataagaaaatggtaacagaagaggttgttggaggagattctggagattcacatcaccaccaccgtaactctgacatagaactcattgccactgctgaaagggcacctttacctcacagtggaccactgaacaaaagaagaagttccaagttgagcaacgcttcttctgcttctgcttctgcttccatctctgccccagaggaacaacaagatgaaggagactacgttgaggtcaccatggacatccaaggtggctctgtggcacttcacagcgtcaaaaccgttaacaatgaccaaggagaagacgagaaactcattcttctc

SEQ ID NO: 16077 - DNA, 655 bp, Glycine max
gaaacacctcaccttccatccctccgtttcgtgacgcttttttggcggttttggcctttttcggtttcgaacattcggacgaatttctctctctctctcttcaattcaacacttggaggacatgagatggatcgggaagaatatttggggaagtgttccaatatgaaatgccaaagagtggatgaatcatatgtacatgctcttcaagatgaagtaatggaagttgagcatttgcttgcagaacctagaaatgatcatgcttccctggatggtagtttggattctcatacaactttgaatggaaaggatgatttggaactggaggcccttgatggattgctggatgatgttgaaatcaatgatcttgaaggaactgttggtttccctggtggtacatgtgaagaatattttttggattttggatttgctgacaaatttgaggaggtactaggctctggtccttttgtagggtcactcttgcaaaactcaagttctgaaagtcattcttccggattaagcggaagtagcattgttggtggggttttagaatcaaccaaagtacctattgcaaaatctgaatgcaaaaatgattctctagatgagacaataacctatgaagcacatggtgccttcaggaacaatccaagtcaaccat

SEQ ID NO: 16078 - DNA, 334 bp, Glycine max
ctcacccggattacaaggatgtcggtattgctcggtttacaactaaatattttaacgtcagaggctgcctgcctaatgtcaacgctgatatgcttttgccagcatggaatcctccatctgaatggggaaaaaaagtgatgcttcgagtggatgcacgacagggagctccaaaggatggaaattctccccttgaactttttgaggtagagattgatcctcttaagattcattgaacagagatgatcctacagaatgatgtgggaatatttcttcccagaagaagaacaagattcccaacgtcgtcaggaggttcggaaggtttcaaccactgctg

SEQ ID NO: 16079 - DNA, 1974 bp, Glycine max
aacaattcctacatatccttccttcataaaacatggctctaacacttcgttcttcaacttcttttattaatcagaaggaaaccaaagtcctcaaaacttctgacaatgcccctgcaatagttagtttttcaaaattcaagccatcatcatcattgttccggctccgggcaaaaaattccatgcaagaagctcatcacactcgtgagaaatgggagaaggtgctggctccgtcggtcgcacatagccacaatgattcaaagagagtacctgtgtatgtgatgttgccattagacacagtaacaatgggaggaagcttgaacaagcccagagcgatgatgaatgcgagtttgatggccctgaagagtgcaggggttgaaggtgtaatggtggatgcttggtggggtttggtggagaaagaagggcctttgaagtacaactgggaaccctatgctgaacttgtgcagatgctgcaaatgcatggcttgaagcttcaagttgttatgtctttccatcagtgtgggggaaatgttggagacaattgcagcattcctctaccaccatgggtgttggaagaaatcagcaagaaccctgagctggtttacacagacagatcagggaggaggaatcctgagtacatctccttgggctgtgattcggttcctgttctaaatggaagaactcctctccaagtgtactctgactacatgagaagctttcgtgacaaattcagagattacttgggcagtgttatcgtggaaatacaagtggggatgggtccttgtggagagctgagatatccatcttatccagaaaccaatggaacttggaggtttcccggaattggagaattccaatgttatgacaagtatatgaaagcatccttggcagcagcagccgaagacattggaaagaaagaatggggaggaggtggaccccatgactcaggccagtacaatcaatttcctgaggatactggatttttcaaaagggaaggaacatggaacactgaatatggacagttctttctggaatggtactccggtaaattgctggaacacggtgagaggatccttgtatctgccaaaggaatatttgaaacaactggggtgaaactatcagggaaagttgcaggaatccactggcattacagagcaagatctcacgcagctgaactaaccgctggctactacaacacacgaaataacgatggatatctgcctatagcaaggatgctcgcaaaacatggagttgtcttcaatttcacctgcatggaaatgaaggacagagagcagccagactttgcaaactgctcacctgaagggttagttcaccaggtgaagatggcaacaacaacagctagagcagagcttgcgggggaaaatgcattggagagatatgatgcagatgcatatgctcaagttttatcaacaagtaagtcagaatccggcagtggattggctgcattcacatatctaagaatgaacaagaggttgtttgaagctgacaactggcggcacctagtggatttcgtaagaagcatgtctgagggtggtcggagagagagacttccggcagctgattcccatgggagtgatctttatgttgggcacatcaaagcaacacaggaaaagcacacacaagaggctgctcttgtgtaattgcatatttttgcaagttcaggcatcttggtatatagttaaaagcatcataagatatttttttatagaaaaagggaagctacaaaagaaaaaaaaaaggagaaatgacataggatcatgacacagaacactggcatatgtcatgccaacacctgagatgatcgagaagatattatttcatgtcatgtgatgtataactccaactacaatggagaaaaaacagtttatctcctgacgttataaaccccttgattctgactagagatgattgaatggaaatcctcaagtgtgttctccacacttaggctctatatat

SEQ ID NO: 16080 - DNA, 577 bp, Glycine max
gttctttcttataaatacaagcataccatcttgaacaattcctacatatccttccttcatcttcaaaatatggctctaacacttcgttcttcaacttcttttattaatcagaaggaaaccaaagtccttaaaacttctgatgatatccctgcgacagttagtttttcaaaattcaagccattggtccgtctccgggcgaaaaattcaatgcaagaagcgcatcacactcgcgagaacagcttcaatgaagcaagtagaagcgagaaatgggagaaggtgcttgctccatcggttgcacataaccacaatgattcgaagagagtacctgtgtatgtgatgctgccactggacacggtaacaatggaaggaagattgaacaagcctagagcaatgaatgcgagtttgatggccctgaagagtgcaggagttgaaggtgtaatggtggatgcttggtggggtttggaggagatcgaaagtccacagacgtacaaacaggctctgttcgctgaatttgtacagacagtgctcttgcactagctgacgatggatatgatgattgcattaactacatataagg

SEQ ID NO: 16081 - DNA, 900 bp, Glycine max
aggctcgctcgatttgaaagtacccaacacaccacacaaacaaacccacatccccccttttttttcttcatatcatttcacacacctccttgttcttcttgttgtttttttttcttccctctcttctctttgtttttcttctccttcggttgaatcaatgggtgcagaggttaagatctggaatcccgttgaagtcgctgagcaagctcgccatgactacgcttcgcagattcatccctcacatctcaccattgatccctccctcgagcttcctcaaatgacacctctcgtcctaaagttgtgcaaggatatgttcaaggcgtggtcgaatttggatgattcttgctttgttgttgagaaaatttccgggggcataacaaatttgttactcaaggtttcagttaaacaagaaaactgcattgaggaaactataactgtcagattgtatggacccaacactgagtacattattgatcggcagagggaattgcaggctaccaaatacatcacagctgcaggatttggtgctaagtggcttggcatatttgggaatggcatggtgcaatcttttataaatgcacacactctatctcctcagatatgcgagagccaaagctggctgctaaaatagctaagcaacttcaaagatttcatcatgtggaaattccaggctcaaaggaacctcaattatggaatgatgtctggaagttctttgagaaagcatctgttcttgaatttgatgatagtaaaatgcagaagacttatgagacaatttcattcaaggaagtccatgatgaaattgttgagctcaagggattgtgtgatctactcaaatctcctgtaatttttgctcacaatgacttgctttctagaaatataatgatgaattgtgaagaagaa

SEQ ID NO: 16082 - DNA, 587 bp, Glycine max
tggaaggcgagggtttgaggtgcgcaacaaacaaagatgaaagaagcggaggagcaactttgcgaggcggccagaaaaggtgacacggagaaagtgaggtctctcatagactccggcgctgacgtcagccacttcgacggcgagggcctcaatcctctgatgcacgccgcaaagcacggccatgcacccgtcctcaccctcctcctctccgccggcgctccctggaacgctctttccccctccaacctctccgccggcgactacgccatgcaagaaggccacaacgaagccttcgagcttctcgtcaacgccgggattcaagccgaactgatcctgggaacaattgcgaggaaggaaaacaagaacggcgattccggtcacgattacttggaagacagggtgagttttagcgaagacaagcttatggactctgaaagcaaggctgtgatgatggcgtgggagaatccgttgatggaggctcatgccaaggcggtttgttccggtggtggccacgtactcaatattgggtttggtatggggctcgtggattcggccattcagcgatatgcacctgcttcacacaccat

SEQ ID NO: 16083 - DNA, 376 bp, Glycine max
cccacgcgtccgcaagcaaaatcagttctgtcaaggtcaggggaatttagcaagcctgtcagttcaatgtggatgcaacttttataagctacaaagtaaagtgtattcaaataaccgttgattaaaatgaaatgaatagttttgttttctataaactgtaagttattgcatgtattcaatcttgtaatctcaaaatattttgttttgtttcacgtggttgtatatcaatagattctttatcaattgtaggtgaaaaattgtcataggttttgttggataaataaatattgatgtttaataggttctgtggattgtatatcccggcattctttgttctatgtaacgtatgaacccttttaatagtttcgtttctact

SEQ ID NO: 16084 - DNA, 575 bp, Glycine max
caaagattcaagaaatgacaaacgaatcaagaatctaactttgcttctcaagtgcttgaagataatggaaaatgctattttcctaagcaatgagaatcagactcatttgcttggaatgaaaagaaaattgagtcctcagggacccccaacttcttttactgagctgatataactgtcataaaaatcctctcagatctatgtttacgtcgaagtgcctctgctgcatccaatgataacaagccttacgatcccttctctatgaccagtcatgattctgaactggatcagctcagagactataaagagaatgagactttatccatcagttccactggaaagtaccacggtgtggagagagcctcttctgttaagagttctaatgcttctcagatcaaccgaatattgacatgtaatcggttggaaagttcgctatccatttctgaaactcccagcacttcaactactgatacttattcactaaagacgagggtcagttcttccacgtctgggtcttgtcgtggtgcatctaagagttcatacttgtaaaacatccaggattcaaaatagttccggga

SEQ ID NO: 16085 - DNA, 910 bp, Glycine max
ggaagttaataaaattaaattaatggcgcacgttatccgctccagagagtgcgaggcgagagagaatgacaatatctgttttcttagttccttcgacgcctcagttgtgtaactacagaatctcatggccaattcccacttacccttctctttcttcttctaagttaactgtttcactgtgctctccttcccctccaacatctgttatcgaagagggtccttctccttcaccagaattgaccagtggttgtaaggcgtgtggaagagaagaagtggagcaaggatgcaatggtgaaggaaggattcagggtgggattgctacagtaccaggctttgggtggtggcctataaaggcttacaggccatgccctgcatttgtggcatctggtggtaggtataggcgccaaggacaaagcatggacgaggttgtctccggaagtggtaaaactaaaacacccattgccactgactccaacacaagtaacaaaaaggaaagttcgaagaaatctaagaggtaaatgtttgggaggaatattacagtcatcgctctatcgaggtgacaaaagcaagagctttaaggaagaggaggggtaaagaaaatgttgatgttgtggtctgctacaaatgttacaaataatattctgtgaggattatggaaatctatgtaagtcttatacatgcattaggaaatagggtgatgccatgtaatcatgttcactggatttccttgaatctctaccgcttttttcattcatcatcagttatctatcattatagttactttaggtttttaggtttttttatcgataaatattaattcattagaatgtgaattttgtaaacaaacgagatcgaatcttgtgatcttttttttctcccttaattatttaactcatcttatatcttctat

SEQ ID NO: 16086 - DNA, 468 bp, Glycine max
gactcatacgcccacgcgtccgcccacgcgtccgcccgcgcgtccggtcggagtccgggagggtgaccgaggcgaggaagttgcggcgtgtgatggctgagaaaggctattttcctgatgaggtgacctatacttcactgatgaatgagttgtgtatgatgggggacgctctaggggccctggccttgttgggggagatggaggccaaggggtgtagtccgaatgcgtgcacgtataacacgctgctgcacgggttgttgaatgcgaggctgttgtagaaggctgtcaagttctaccaggtgatcagggctggcggtctgaagcttgatacagcttcttatgggacttttgtcagggcgctgtgtagggacgggagaattgcagaggcgtatgaggtttttgattatgctgtttagagcaagagcttgacggatgttgctgcttactcgacattggagaacacgctta

SEQ ID NO: 16087 - DNA, 350 bp, Glycine max
cgccgtcgttttgtacagcccaagaatcttcgagaaggccgggatcaaatccgataactaccgtctcctcgccacggttgcggttgggttcgtcaagaccgtttccattttggtcgccacttttttcttggaccgggccgggcggcgcgtgttgctgctttgcagcgttagtgggctcatactctcgcttttgactctgggcctgagtctcactgtggtggaccattcgcagaccacgctgaattgggccgttgggctcagcatcgctgcggtgctgtcctacgtggcaactttctctatcgggtctgggcccatcacgtgggtttatagctccgagatattcccgttga

SEQ ID NO: 16088 - DNA, 443 bp, Glycine max
cccacgcgtccgggcatttggcgttggtgttttcttttggtgaggtatatgtttgaaggccacgtgggacgaagatgaagaccattctccggttttgattcccaatttcattttgattctctgaagttgaataatatttttttattattcccattatgtaaacaaattttgttgttgatggtttgatttcacaaaatttgattgattttgttcatggtttatgcactgcatctgttttaccctctctatctgtgtccaatgtcgatggcagtggagatataactgatgcaaagatccataaaggttgacttaccagcccattgcaccgattttgaaatttgccatgggtcaaatgggacctcccgaaatccccaaatatataagtttttaatgcaattgtgttatttgtatgtgtaaagtgaattggcaagtgatgatttatt

SEQ ID NO: 16089 - DNA, 484 bp, Glycine max
cccacgcgtccgtgaagctagctagtgtgaatgtgtttggtttttaaaatgtgtatgaagggttttcagtggttaattatcaattggtttgattcgtgtgacaattcatggcttgcttactggcattttaatgtggtttgaggaagaggctttgaaaccacacacacagccactatggtagtttgtgtggtttatgagttttgtatgatttgtgctttgtaagcaattttcacgtgtttcttcctttcagtgtgcttaactcgggtttgcttagcacataatgtggggggttttgtgatatttttgtccgtttcttttatttcctgattattaggctttgtttgtttactgttttcaaaaacagttttgtgttttataaaatttggttttgtctcctgagcacatttgaaagtttttgtccctccttgagcacatttctgttttctaaacgttttcccctgagcatttgaagaaaatagaagag

SEQ ID NO: 16090 - DNA, 956 bp, Glycine max
tttttcaggggagccagaaacaaatcaaaagaagaacgaggaatatatgtgaagcatttcaaaaacattccaatggccgatatggaaatagttcttccagaaaagaaaaaccctggattaactccaatggattgggtcaagtttcttggatcagctgtagttggtctggttgctgtagttagttcacttgaaatgccttcagctgattggtgggtcatcattgctgttgtctccacagtaattggttatattgctaagacttacttcacgttccaacaaaacatggctcagtaccaaaatttgattacacagtcaatgtatgacaaacaacttgacagtggaaagggtacacttcttcatttgtgtgatgatgtcattcaacaggaagtcaaagaggttatagttacattctttattctgatggaacagggcaaagctacaagacaggatcttgatcaatggtgtgaggaactaatcaaagaagagtttgatgaggaatgtaattttgatgtggatgatgctgttgagaaattagagaaatcgggaattgttactcgagattctgttggtcgatatcaatgtgtcgggctaaaacgggctaacgataccatgggcaccaccactgaagagcttgtccttaaggcaaaacagggaagcatgactgcttgatggtgttttcaaatcgtgctcatctgtctcatgtacatgtagtgttggttgataatgacaatcctgaaattgcctaagggtagaagctgcctttacacaatcctagatggacgtcccatctcttagacggaagctagtttctgctttctgtatacagttttctgtatttttcatgtaagtctatgtcaatgtattctctatattttattcttttttcagcagtttgtgttaataaaacctagtccctgattctgaaaaaaaaaaaaaaagctagttctagatcgcga

SEQ ID NO: 16091 - DNA, 481 bp, Glycine max
catcagtgaactccgagggacgtgaattgatgatcataatgctgcctaagcagtagttcgacttcagctcggggctaacagtctctacgctactattgttaagcttcttttaaagtgaaaaaaacgagtgtgactttatagttctcgttttgttggacgatagtcctaacaaggttgaaacctagaaccttgtgtagactacccagacactgcattaagccaaccctaatgggttaaataacaaattgaatgaaatagaaaagtaagaatgtatcaaactatcaatagtactggtaacatggttaaaacctagaatcttgtgtaggctacccagacctttccttattagaccgaccctgatgtgttaaaaaacaaactgtatgaaatgaaaaataaggatgtactcaaattagttaatgatgttattcaagattataaggtgctttagttttatatatataaatcctcatttgatatcttc

SEQ ID NO: 16092 - DNA, 402 bp, Glycine max
aaaaaatatatctaaaataataatccaaagacaatagttgtgttgtgttcagttaagggtgaaccttagcaacagcatgctcatcactattctgtgtggaacctgttaaatgtgctatagctttatttcaacttctccatggcttcttttctttccttatctcttcccaagttaaacttaataaaggcctcttcagcagctaacaccactacaacaacaacaaccactcttcccacagctgagacactcaatgagaaatttggcagaaaaggcatcaagttcttggagtctgataacactcccatagttgacctaacagtgagaaatggcagctccttgaggctgaggatacctgatgctcatgtgacatcatacaaaccaaaagttaattggaaagatgat

SEQ ID NO: 16093 - DNA, 949 bp, Glycine max
cctaaacaagagaaaagtgatctacgtgtgattgatgatgcacgcactgctgatcggttgcttaattggatcaacaagcaattaggcagttcatttggcctggatgatcagaaatttcaaaatgagcttctttcatccaatgtatcagaccctgggcagattgcaggagcgtatctatgatgtcgaagaggcaacttctacagcttttgacatcatcttagagcacaagatgataaaaccgggaactcgtgcttcacttataaagtttcttcagcttttagcagctcatcatccttctaggagatgccggaagggtactgctgaatttcttgtgagctttgatgacttgtacccaacagattttgggtcaactaataaccaggaggatgataggagttcagtttggaacctaaagatttgtggaaaagatgtgcctcgtggatactggatgttttgccgtggcagtaagaatgaaaccagaggctttagttggggtttatgggttcttcttctttcaactctctgtgaggattgatgatggagagagccagtttacatttaatgcaatatgtgagtttgttcacaacttcttcatctgtgaggaatgccgacaacatttctacaagatgtgttcaagcgtttctagtcctttcaacaaagcccgtgactttgctctctggttgtggagttcccataacaaggtaaacgaaagattgatgaaagaagaagcatccctaggcactgctgaccccatattcccaaagacaatttggccaccgaagcagctttgctcttcctgttacctaagtgttgaccagaggaacaacaaaattgaatggaaccaagatgaggtctttaagttcttggctgattactacagtaaaacactagcgtctctgtacaaggacaagagtattgtcggaaatgacggaagtgaaggagctgttga

SEQ ID NO: 16094 - DNA, 435 bp, Glycine max
ctcctcttcttctacttttcattcttctctctctctaaaccacgcctagagagagaaaactcgccgccggcacccctccggcgatgacatgaccgccgtttccctcactcccttcgtagacctttgatgcgccgatcgaatgcccgcactcgcagcgccgcctccaatctcaacaacaacaacgaattaatggatccgatcaaaaccaaaacccgctccaccaacctcttcgcccgtaaccctaaggccgcgcaatcaaagtccctccgttccataatcctcgtctccctcgcgctctccttcctcttcctcgtttcctacttcgccttctccccgccggaggccaatttccggtaccggatcatcgtggacggcgggagcacgggcacgcgcgtgcacgtgtttaaatacaggtctggtagggcgctggagttc

SEQ ID NO: 16095 - DNA, 658 bp, Glycine max
tgtgagcataaagaaacatctcaatctcaaaagaagcatctcgtgtatcgtctcttaaaaacaatggaattgatgtgccattgttcgagctttcttcttccgccggagaatcctaacacgacgtgttcgctttctctaaagtacgctctcgttgttctcaaccaaagcctaccgagatttgctcctctgctctgggaccacgctcaagtacgagtttgcgctgatggaggtgccaatagggtgtatgatgaaatgcctcttttcttccctcatcaacaaccttcccatgttcgcaccaggtacaagcctgatgtaattaaaggagacatggattcaatcaggacagaagtacttgacttctatgcaaagctgggaactaagataattgatgagtctcatgatcaggacaccacagatttacacaaatgtgtggcatacatacgtgacctcaccccaaatgttgatggatcagaactatgctgaatacttggttatagtatttattttctgattttcttttggagagtggagatagcggagtgaactgatgtcaattttaactgtggactcaaataattttggaataattgaaatgaattaagtctggtgccatacctgctttaatccctttttgacagtaaagaatgttatcatgcta

SEQ ID NO: 16096 - DNA, 722 bp, Glycine max
gtggaattattagtttttcatgggatatatgtggaaagtcacatccttcattgagtggtacaagcctgatgtaattaaaggagacatggattcaatcaggacagaagtacttgacttctatgcaaagctgggaactaagataattgatgagtctcatgatcaggacaccacagatttacacaaatgtgtggcatacatacgtgacctcaccccaaatgttgatggatcagaactatgcattcttgttgctggagcacttggtgggagattcgaccatgagattggaaatattaacgtgctgtgccgattttccaacacacgaattatccttctatctgatgattgcctcattcaccttcttccaaagaatcattggcatcaaatctttgttcaatcttctgttgagggtccgcattgtggtctcattcccattgggatgccgtctggaagctctacatccacaggactcaaatgggacctcaatgacgcagcgatgagttttggaggtttagtaagcacatccaatattgtgaaaggggaaatagttacagtacagtctgattcagatcttctttggactatttctattaagaagctctaggatttacatgttgcacagtgccgtgatttttcagatctttgataccaatttatatgggtcttgttccatttaaaggcccgagcttctgctgaccttttctttatgtttcattctttcaatt

SEQ ID NO: 16097 - DNA, 459 bp, Glycine max
gaccctccgtcagacggatcatgcctatgaggcctgtgacagaattgggctcgagctgctcaagcggggatctgatttccgcctcggggagaagagaccccgagagtgttgagcagcccatcgtgcttaaagaagggttcatgatcaagagggcccaaggacggaagcgctttgggatgaagaattgtaagaacagatggtttcgcttgaccatccatgaatttacctaccacaaaagcataggggaccagcctctctacagcattcccatcgagaacatcctggcagtggagtagctggaggaggagtctttcaaaatgaataacatgttccaggtcatccagccagagcgtgcgctgtacatccaggccaacaactgcgtggaggccaaggactggatcgacattctcaccaaagtgagccagtgcaaccagaagcgcctcaccgtctaccacccgt

SEQ ID NO: 16098 - DNA, 466 bp, Glycine max
tttcgactttgtccacacacatatataaatcccaaacaagtgaacaacactccctcctttgtcccattactagtacatacattcccctaaccaagttttaagtttttctcaacagaatggaagcaaccaacagaagctcttcctccacttcctcttcctctgattgctgctcttccgagtccaaccccaacaagcccgacagaatcaaaggcccatggagcgccgaagaggatcggatcctgaccggactcgtcgaacgatacggcccacgaaattggtccctcatcagccgctacattaagggaaggtccggcaagtcatgccggctccgatggtgcaatcagcttagccccgccgtggagcaccgccccttctcggcccaagaggacgacaccatcatcgcggcccatgcccagtatggtaacaggtgggccactatagcccgattgctaccgggccgaaccga

SEQ ID NO: 16099 - DNA, 1019 bp, Glycine max
cggtgccgctcgtgctcaaagcctctagatcattctattgagttcagcagttcgcgattttctgagattggggaatcctgcatcgaggatgatgatggcaagatgagacccttggttctgaaaaacaagcctccaagatggcatgaacagttacaatgttggtgccttaatttccgtggacgagtaacagttgcgtctgttaaaaactttcagttgattgctgccacccaaccagctgctggtgcacctacaccatctcaaccagctccaccggagcacgataagatcattcttcagtttggcaaagttgggaaggacatgttcaccatggattatcggtaccctttatctgcattccaagcttttgcaatatgcttgagcagctttgacaccaaattggcttgtgaataagataaatcatgaatcagaagggttataagtgagctaatgaaacaatgatgttgatggtatatttccctttgtttttcttttcttttcctattttcattaccagtatcatgggagtaggcaattgttgttactcagcttttgtatgactaaattgtaaccgtagtgcatctctgatgtaataggattttagagcatttttaacatacaatgttgctatgtttctttctcagttgattctaccaacaaaccatcatttaacatattttaggctctgctgcagtctacattgtctggtacatgtttggtaattgagaggtatatatattctgtcacatggtgattgtatgtacttgtaccttgtatggtgggtgctgaatagattgatcttaagaattgtttgggaatcaggaaaacaatgatgcttgcctggtctggatgttgtgcccatgccaatagagatgtttcacttgtttttggaagatactgatcatgtttaagatggctgaacaaattattgtactcatgtgaattgtgatgtgatgatgactacataacatgactagaacggctttcgtgaatcagttaacaagttagccaactgatttatt

SEQ ID NO: 16100 - DNA, 1190 bp, Glycine max
cttgtgctctctcttcagtctctcccacacacccttcttcttcagctgagttgtttgtaatacagcaagatgaatccatggaacatgagaacttccaagttactctctcaacaagtttcttatcctccttatctctttgtagaagagattccaaacatgggaaattccagtgttgtgaccaaggatgctagaggttcacagctgacaatcttctatggtggccaagttcttgtcttcgatgatattcaagctaaaaaagccaaggacatcatgtcttttgccggcaaaggaatgtctcaaaaccagaacgactgtgcttacactttccctgctacaacttctgctactcccagtagaccattcccttttcttatgaatatcattccaaccactgccaacaattcggttcaagaccaccctcaagcaccatccaaacctgttatttgtgatctaccattggctaggaaagcttcacttcatcggttcttggagaaaagaaaggatagaattgctgccagagcaccatatcaaacaagcaatcacatggcagcccttaataagctagctgaatccaagccatggctcaccttggcacctaaatcaccacaacaagacgaatctgattctgatagcagctccagctttgtgttattttaactacttttgttggacaaggtgaagaagattgtagtgtcaacattttgataaacggagtcaacattttatgggcttctctatagctccgtgctgaatttttgggagggctatgatcaatgctgttgctcatggctttactattattatatttaagagtgtaatttagggcaaaaaagtaatgtaaatgtagtttggttagcatagttttagtaaaatattgaaatcagttcttctcaattctcattatcacgtgtattatatgtaaaacttactgttaggattatctttctatatgctagcctgtttgttatggttcaattggtttcctactagtatgtgagacacatatagtcaaattccatctttccagcgaattcagtttttcctctcaaattatcctagttcatgccatgcagcagaaaatgaggtagattgagcagcaataagaataacaaattgaactaattgaaagatataatgtgcatgcaattattatgtagcattgttataaaaatgtcctcagatattgttga

SEQ ID NO: 16101 - DNA, 458 bp, Glycine max
cgctcgagccgatccggctcgggcgcttctgctctctcacgagaagaatactactaactgtgttgtaatacctcagtggagaacaagatgaatccatggaacatgagaacttccaagttactctctcaacaacttgcttatcctccttatcgcttggtagaagagattccaaacatgggaaattccagttgtgtgagcaaggagccaagaggttcacagatgacaatcttttatggtggccaagttcttgtcttggatgatattcaagctgacaaagccaaggacatcatgtcttttgccggcaaaggaatgtctcaaaaccagaacgactgtgcttacactttccctgctacaacttctgctactcccagtagaccattcccttttcttatgaatatcattccaaccactgccaacaattcggttcaagaccaccctcaaacaccatccaaacctgt

SEQ ID NO: 16102 - DNA, 782 bp, Glycine max
acgaaaagaaacatttgcccatttattcagagtcaaaagaaaagagttactgaagaataaaatgcgtgcgagaaaagaggccttggcataagacttcttccagctactgaacaagattctgccacggcaaaatcggtgaaattttcagcaaagtttgacaaaaataggaaggacaagagggcattgatcagttctgaatctatcttctctggaggctctagctattctatgtctgacaagagaaaacgagagctagagtcaaaacgaagaaaaatttgtgcgacttcagcatccagccttctagctggtagggtaaagccatcatcatggtcacagccttcaagcaagcaaaagggaactgtaagatgttagaaagatgaaacatgtctgacattggttagcactggtcactggcgaccttgacaattggcagtggaatctttgtacataaaagcttgctgttgtgataatatttatgttatgttttcgagttgtaaaccatttcatgaatttatttatatggaagcagatatatttttcatcattccctcccctcctcacacccgcagagactaagaaatcttgtttcctcttcaccttagtaatttgtttttagctagaattgtaatatgacgtccaaatttgggtggtcacggttgagtgtttcaatccatatatgtttcattaggaattgaggctgatggccgggacagttgtcattgttgaacaaattgaagaaacatgatatgatgttggtggagtaaaattaaagttgatggact

SEQ ID NO: 16103 - DNA, 453 bp, Glycine max
gcctcgagccgaatcggctcgagattgcacatatatcagtactcattctcttccctctcctctcactacttgtcatcaaaggctggaactcacatccactaccgtgcactgttattcataaaaaagattatatttacacaacaatatataatggccagatttctacacatgcttataatgctctctagccttgctctaattatctcagttttgccattggcctccgcatctttgaaggtggacttctataaaactacgtgcccatctgcagaggcaatagtgaaaagagccgtaaacaaagccgtttctctcaacccgggcatcgctgctggtttgataagaatgcattttcatgattgttttgtgaggggttgtgatggttctgtgctattagaatccacccaaggcaacccatcagagagagagcaccctgccaacaacccaagttacgtg

SEQ ID NO: 16104 - DNA, 379 bp, Glycine max
accaagagaggtgggggtgctagtttctctaagccatccagtgccatcctcgtcgctgcaccgacacacgctctcgccgtcgccatgactgagcagatgacccttcgtggcaccctcaagggccacaactgctgggtaacccagatcgctactaccccgcagctcccggacatgatcctctccgcctctcgagataagaccatcatcatgtggaaactgaccagggatgagaccaactatcgaattccacagcgtgctctgcggggtcactcccactttggtagtgatgtgggtatctcctcagatggccagctcgccctctcaggctcctgggatcgaaccctgctcctgtgggatctcacaactagcaccaccacta

SEQ ID NO: 16105 - DNA, 438 bp, Glycine max
cgtaaacactccctaccgaagaacaaacaagtcctcttacatgcaacaccaacaccaacaacatcactaacgcaatttcaatttcagtatattttgactcccacgcgcgcttacttccttccttcccctatccctgttccgtttcggcgcgtgccatgggcgcgtcgctgtcttcgaacggttccagtatcggcccgggcctcggggacataccggagagctgcgtggcgtgcgtgttcctccacctgacaccgccggagatctgcaacctcgcccgcctcaaccgcgcgttccgcggcgccgcatcgtcggactccgtctgggaggccaagctgccgcgcaactaccaggatctgctcgatctcgttccgccggagcgccaccgcagcctctcgaaaaaggacatcttcgcgctcctcttccgacccctacccttcg

SEQ ID NO: 16106 - DNA, 361 bp, Glycine max
atgctatccaccaacaacaaacaacccttcttacatgcaacaccaacatcactaacgcattttcaattttcagcatattttcactcccacgcgcgcttacttcctcccttcccctcggcgcgtgccatgggcgcgtcgctgtcgtcgaacggttcgagcatcggcccgggcctcggggacataccggagagctgcgtggcgtgtgtgttcctccacctgacgccgccggagatctgcaacctcgcccgcctcaaccgcgcctttcgcggcgccgcctcgtcggactctgtctgggaggcgaagctgccgcgcaactaccaggatctgctagatctcgtgccgccgccggagcgccatcacc

SEQ ID NO: 16107 - DNA, 395 bp, Glycine max
cccacgcgtccggaaatttctaaactgcttgacaaacttaaaggaaataacttagttggagaccctagcaagttcttaatccttcctttacatggctcaatgcctactgtcaaccaatgtgaaatatttgaacgtcctccccctaacaagagtgttaatttgcaggagttaacagctgatgcatgaaattgtgaaacatgttaattgctagaggaagattgtttctgggaaaacaatagttgttagaagaaaaatcgtgctagcaacaaatattgctgagagtagcatcaccatagatgacgttgtgtatgtcatagactggggaaaagcaaaggagaccagctatgatgctctaaataagcttgcttgctttgtgccatcatggatttcaaagg

SEQ ID NO: 16108 - DNA, 319 bp, Glycine max
gatcttctacaatgtgctaatgaatctaggtagaggcaacaattgagtatatatgtcggaatgaagctggtggagcaattcttgtatttctcactggctgggatgaaatttctaagctgcttgacaaactaaaaggaaataacttagttggagactctagcaagtttttaatccttcctttacatggctcaatgcctactgtcaaccaatgtgaaatatttgaccgtcctccccctaacaagagaaaaattgtgctagcaacaaatattgctgagagtagcatcaccatagatgacgttgtgtatgtcatagactgtgg

SEQ ID NO: 16109 - DNA, 464 bp, Glycine max
ctagcaacgctttgatttcagcctcatccacagcgagtaagaaagcgaggaagtaggttgtggatattgatagaaacaaatgagatccgacgccttccaaacagctaacatttatcgccttcttctcaaggcagtcaagaaacatattgggaaggaagagaacaagagacattttatagaatttgtaacctcagagttccgtaacaaccgaaatttgtctgactgtgtggctatccaacagaaaataaagcttgctcgtgattatacttttcttcttaacagtgtacaccatcacaaggatttacttttttcatacaatattgccgtggataggtcagatgacacaaaaaggactcttggaaaatctgcttctagtgttggtcttcagcttcccgaggtttatcagccataatgattggtagtgttcatttttgcatgcatggaacatgcctttgtactacact

SEQ ID NO: 16110 - DNA, 524 bp, Glycine max
  unsure (1)..(524): unsure at all n locations
ccaccagactacaaacaaaatgaaccttgttattaatgatagggatgaactcattcaaacttaggatgaacagatacacaaaatacaattaanttccagggatcacttccaaaggatttttactgaccatgaaaagctcaaattgcaactggaatctcacaaaaatgagcttgagttgccgaaagttgaattgtaaaaacgcgaagcacataacgaaagtgaaaagaaaaagttggcagaggaaattgaggagaatgcatcgaaaaatagctctcttcagatggctgctttagagcaaatgaaagctgatgaaaatgttatgaaactggctgaagatcaaaagaggcaaaaagaacaactccatgctaaaatcattcagcttcaaaaacaacttgatgtgaaacaagagctggagttggagattcagcaattaaaaggttcattaagtgtgctgaagcacatggaagatgacgaagatgctgaaattctgaacaaggtagatacactacaaaaggatttaaggg

SEQ ID NO: 16111 - DNA, 679 bp, Glycine max
cgtaagtgtcatagagaaggagctatcctagttccaagctgtttattaccttgcatcttccgcaatcaccttctctcttcactcttatctctttctctctaaaaatgtgactttgttgtacgtgtgagagtgagcctaaaacagtacggatacttgagcaaaggaacaaatattgaagtgtccaatgcgtaccaacaataccctttagtttactctctctaaaaaaacaaacaattctctatcctctacactctagtctctcgctgtttgttctctacttaactcacatctctaagctgtgtgcgtgaaccagcggatagcaaggatgagtaaacaagacatgatgaaaagtcagaattgccttctcaaggtcaatatccactgcgatggctgtgaacagaaagtaaagaaaatcctgcagaaaattgatggggtgtattctgtgaacatagatgcggagcgagggaaggtgatggtgtcagggcatgtagatccagctaaactgataaaaaagctgaagaggtcagggaagcatgccgaactttggggtggccagagaggcatgatgtacaaccaaaactaccccacctaccctcagttcaagaacatgcacatagataacaccaaagggggcagcaaggacaacaagtctcagaatcacaaaggtggtgctcagaaa

SEQ ID NO: 16112 - DNA, 928 bp, Glycine max
cccacgcgtccggcaaaacactgaatgaggatgaggatgagaatcaaacgccattgaaacaacaccttttactcagacagagccgttaaccaaatgccacaatggcaacggcgccgttaactctccatctctgttgccttggccgaagcttatgcaaaacgctctttcttactccctcccccgccgctcttgggagcatctcctcacgatcactttccgaggcaagttccgccgccgaatctctttgtcccggcgcttctccgccggctccacctcccgagaagtggaatatgaattgggctttggaggaggagtggatgagaaggttgatgtgattgtagggggaggagggcaccccgggtgccaagccgctcttgcctctgcacgtttgggagcaaggactcttcttcttactctcaacattgaccgaattgcgtggcagccttgcaatccagctgttggtgggcccgcaaagtcccaacttgttcatgaagtggatgcacttggtggtcaaatacggaagattgctgatagatgttacttacagaggcgtgtacggcaatgtctcaagaggtcctgcagttcgtgcattacgtgctcagaccgataaaagggactatgccattcaaatgaaaagtgtagtagaaagcactccaaacctttctattcgagaggctatggtcacagatattttactagggaagaatgataacgtggaaggtgtttgtacattctttggaatgaaattctatgctccgtctgttattctcaccacagggacttttatgagtggtaaaatttgggtcggtagaacttctatgcctgcaggaagagcttgccagtctgcttcacttggattaacagaaaacttacaacgacttggttttgaaactgatcggttgaaaactggaaccccttgccgagtgga

SEQ ID NO: 16113 - DNA, 1181 bp, Glycine max
  unsure (1)..(1181): unsure at all n locations
attttcttttaattttcgccagcattttcgtgggggtcctcctcctcctctctctcgcgtaacccttgtttcgctccctgctaacataatctgtagagaaaacctgacaccagaaaaggttcgttccgagacaaaaccccaacgatccaaacggtcattgagcgtttcatggtgcgagtcactgaattgaatcggataggaatctgagtttgtgatcggttgacgcggtcatgggtgctgccggctccaagctcgagaaggctctcggagaccaattccccgaaggagaacgttactttggcctcgagaatttcggcaacacttgttactgcaacagcgtcttgcaggcactatacttctgtgttccgtttcgcgaacaattactagagtattatggaaataacaaaagcatattggacggggaagaaaatcttttaacttgcttagcggacttattttcacagataagttcccagaagaaaaaaactggtgtcattgctcccaaacgatttgtacagaggttgaaaaaacagaatgaactcttccgtagctatatgcaccaggatgcccatgagttcttgaactttttgctgaatgaacttgttgacattctggagaaagaggctcaggctgcaaaaactgatcaggagacatctccaccttctgaaaaggctgttaatgggccccccaagaacctggtcaagcnnntaatggnntgttcacccaaagaagccnnntttagttacccttgggtacccacaannaaattttcaaagggaataccctcaccccaatgagacaacccggtgcttgcaaacctgtgagacccagtgacggctagagatgaaacatttttggacttgagtcttgatattgagcaaaacagttcaattacaagctgtttgaaaaatttcagttccaccgagacactgaatgctgaagacaaatttttttgcgacaaatgctgcagtttgcaagaagctcagaagaggatgaagataaagaaaccacctcacatcttggtcatccatcttaagcggtttaagtacatggaacagctaggccgctacaagaagctgtcctaccgggttgttttcccccttgagctgaagttgagtaacacagttgaagatgcggatattgagtattctctatttgcagtagttgtccatgttgggagt

SEQ ID NO: 16114 - DNA, 647 bp, Glycine max
cttttcactttgtctagtcatgctttgactgtatatcactgatatataaacgatgctttggcttgttagtcccccggtcccccctccccctctgttgtgagtaaataattgtgactgatgatcagtgtccatttctggaaatgatttatctgagtttgcataatgacaatttgttacttttgaatgaggttgtttaccataatgttactgaactctgtgctgtaaagtgtatttgttatttatcattgattgttattatctgttatattcaatgtttcattggttgcatattgactcttattttgtcaaagtttttcattagagacaacattgttattgtgaatcttctcttggtaggatgcccatgagttcttgaactttttgctgaatgaccttgttgacattctcggagaaagaggctcaggctgcaaaaactgatccggagacaattccaacctcctgaaaaggctgttaacgggcccaagaatggtcaagctaatggtgttcacaaagagcctttagtcacttgggtacacaaaaattttcaggcaatactcaccaatgagccaaggtgcttgccatgtgagacagtgacagctggagatgaacatttttggacttgggtcttgatatacagcaaacagttc

SEQ ID NO: 16115 - DNA, 737 bp, Glycine max
ccattttctccattttttttttccttcatccaatctgcattctcttgcgctcgctcgacaacaacagaaagcggcacgacaaaccctagcgattcgatgctgtgcgatgcgactcgctgagttgaaccggataaagatctgagtcgcggtgatcggttcgacgccctcatgggtgctgcgggctccaagctcgagaaggctctcggcgaccaattccccgaaggtagagcgttactttggcctcgagaatttcggcaatacttgttactgcaacagcgttttgcaggcactatacttctgtgttccatttcgagaacaattgctagagtattatgcaaataacaaaggcatagcggacgcggaggaaaatcttttgacttgcttagccgacttattttcacagataagttcccagaagaagaaaactggtgtcattgctcccaaacgatttgtacagaggttgaaaaaacagaatgaactcttccgtagctatatgcaccaggatgcccatgagttcttgaactttttgctgaatgaacttgttgacattctggagaaagaggctcaggctgcaaaaactgatcaggagacatctccaccttctgaaaaggctgttaatgggcccaagaatggtcaagctaatggtgttcacaaagagcctttagttacttgggtacacaaaaattttcagggaatactcaccaatgagacaaggtgcttgcaatgtgaaacagtga

SEQ ID NO: 16116 - DNA, 542 bp, Glycine max
tgaaagttgagacttgaaaccgtttttacacaatctgtcacggatattatggagggcaacagtggcgcgtcctaagacctctttattttcggaagattttttttcctaaacgccgttcttctttccattttctccattttttcttcctccatctgcattctctttcgctcgacaaaccctagcgatttgatgctgtgcgatgcgactcgctgagttgaaccggataaagatctgagtcgcggtgatcggttcgacgccctcatgggtgctgcgggctccaagctcgagaaggctctcggcgaccaattccccgaaggagagcgttactttggcctcgagaattttggcaatacttgttactgcaacagcgttttgcaggcactatacttctgtgttccatttcgagaacaattgctagaatattatgcaaataacaaaagcataacagatgcagaggaaaatcttttgacttgcctagccgacttattttcacagataagttctcagaagaagaaaacacgtgtcattgctcccaaacgatt

SEQ ID NO: 16117 - DNA, 1898 bp, Glycine max
aggaagacgtggaaatgattctagagaatcttccagctcaaaggcagagcatgcttttctctgctaccatgcccagttgggtgaagaagttggcgagaaaatatttgaacaatccactcacaattgatttggttggtgatgaagaggaaaagcttgctgaagggataaaactttatgctatagcagccactgccacttcaaagcggacaattctttctgatcttgtaactgtttatgcaaagggtgggaagactatagtttttacacagacaaaaagagatgctgatgaagtatcattgtcattaacaaatagtataatgtctgaagcactgcatggtgatatatctcagcatcagagagagagaacattgaatggtttccggcaagggaaattcacagtgcttgttgccactgatgttgcagctcgtggacttgatattcccaatgttgatttggttatacattatgaacttcccaatgatgctgagacttttgtacatcgttctggtcgtactgggcgtgcaggaaaagaaggtactgccattctgatgtacaccagtagccagaggagaacagttagatcccttgagcgtgatgtagggtgcaagtttgaatttgttagtgcaccggctatggaagaggttttggagtcatctgctgagcaggttgttgccacacttggtggagttcatcctgagtctgttcagtttttcaccccaactgcacagagactgatcgaagaacaaggaacaagtgcccttgcagctgcactcgcacaactgagtggattttcccgaccaccatcatcccggtctcttatcacccatgaacagggatggattacattgcaactaactcgagattcagatagtagaagatatttttcagcaagatcaatcactgggtttctttctgatgtttatcctgcagctgctgatgaagttggaaaaatccatttaattgcagatgaaaaggttcaaggagctgtttttgatcttcctgaggagattgctaaagaattacttaatagggacataccacctggaaacaccgtttccaagatcaccaagctaccttctttgcaagatgatgggcctccaagtgatttctatgggaggttctctgacagagatagaagtagccgaagaggttctacttctaggggaggttttagttctaggggaggttccgcttctagggaccggagaggttttaaatcctcacggggctgggatgtggaagactccggtgatgactttggtgatcaatccagtaggagaggtggtagaaattttaaaactggcaacagctggtctcgagcagcaggtaaaagcagtggcgatgattggctaattggaggtggtagacgatcaagcaggccttcatcatcagacagatttggagggacctgttttaattgcggggaatctgggcatcgtgcatcagattgtccaaacgtttcaaacagacgaagcttttttaagttcccacatatatatgtttgggcaccacttttgtccaaacgtttcaagacgtgagctgctgccactgtttttgacctaatgggttccggaaaattgaaagatgcttcccaaaacagttacagaatcaattttaatttgcatctctcgtgttggcgtgatctccaaagggacctctgtttttcgtggagtctcaatgaaatttagtatttgttttgggaagtggtattggataaagaatagcgttaacagtatgattatgttatcttatttttggggtgagtttgggggattgtatgggcctgtattctatttaaccatgttactagtatttaatatctttctgaaccttcctggtttaggaacagacaggaaaaatgaatgaaagatgaaatcccaaaggtttatggaaaaaaa

SEQ ID NO: 16118 - DNA, 737 bp, Glycine max
aacactcactcattgaggctcacacataatggaagaagcctggttcataatcctagtctctctctgtgtctgcgttctcataagagtcatattattattcttccttcacaaaaaaaccctagccaccccaccaggccctcctcacatcccaatcatcacaagctttctatggctcaaaaaatccttcatagaactcgagccattcctccgaaccctcgccgccaaacacggtcctatcttcactctccgcataggatcacgccccgtcatattcatcgccaacagagccctggcccaccaagccctaatccaaaacggttccattttctccgatcgccccaaggccctccccgccgccaaaatcgtcagcagcaaccaacacaacatcaactccgtcccctacggcgccacctggcgcgccctacgccgcaacctcacctccgagatgctccacccctcacgcgtcatgtccttctccggtacccgcaagtgggtcctacacaccctcctcacgcgccgcaaatcagattcacaatccaacgattcaataaaagtcattaaccacttccaatactccatgttctgcttgcttgtgtttatgtgctacggggaaagactcgacgatgggaaagtcagagacattgagcgcgtgcagcgacaaatgctcctgcggattataaggttcaatgtactcaatttctggcccatagtcacgcgcgtattgatcttcaaactat

SEQ ID NO: 16119 - DNA, 849 bp, Glycine max
gaataccggcgcgagccactgcatcaaaaaattcttaaggatggccacagcagaagaaatttcaactttgaaactgttgcgccaatatctcttgggggatatttcagacccttttctcaccaatctcattccagtaaaactcgaagacccctcatcaggacttgatatgggttcaaacttctcagaacatagcagcttctgcaagttgctagaatgcattgattttgaagcagacacagaagtggtaggtctcacgtctcatcataaggtcgaaaactccattgaaacaagtcttccacataattccaatttgccagaagaaccaatggtgtcaacgaaaaaggaagcaacatgttatgcaacaaggcgttacagaggtgtgaggagaaggccatgggggaagtttgcggcagagattcgcgaccccaaaaagaaagggagcagggtgtggcttggcacatttgacactgagattgatgctgctaaggcttatgattgtgctgccttcagaatgaggggtcacaaagccgtgttgaatttccctctggaggctggaatgtctcatccagagcccaacagtagtggcaggaaaaggagaagacattatacaacagctgtcacaagttcaagtcatgtcatgtcatgacgaataattcagtgtgggataaccatgtttttcctttggcattttttgtcagttacataagttaatgcaggttttatagttctactacagttgagcgtgatgaggtctgttatttatatccttgacttatgattaagggaagcaaatggggtgaaattgaattaaaccaagaattaaacagttcataaaagatacaaagaaaa

SEQ ID NO: 16120 - DNA, 564 bp, Glycine max
cttctatatatgaagataacaatcagctgaatgttgacaatgctcaacgtgcactagtctcattattgctccggaaaatggggaagattgccctccaaatggatgttattcagatgggaatagtcttcaacagttttgggaatattatggcgcagattagtcaggatgactgccaacactatgcacacgtgatcttgttgcctctatataaagtttgtgaaggatttgcgggaaaagttgttactgataatgtcaagaagttggcagaagacacctgtaaaaaactagagaatattttgggtactcagaactttgtgcaagtttacaaccttatcaggaagaaccttaaattgaaaagaaataagaggagacaagaagaaaagctcatggccgttatcaatccgatgcgaaatgccaaacggaagttaagaattactgccaagaatcgtgctaacaaaaagagaaagattacgacaataaaaatggggaggtggatgcgttgattgaaaggaggtgtgaggagaaatgtccatatctctgtacctctagtttggcactgtgagt

SEQ ID NO: 16121 - DNA, 813 bp, Glycine max
ggaggtttgtgaagtgttaagtaattaatggcagcttcaagtagcatcatctccatctcctctgcttcactcttcactccaaaaatccaatgcctccccaaacacaattacaaggaccatgatcatgttcatgttccatcatcatcatcatcatacttcacaacacacgctgctctcaagatatcaagaccaacaacaacaacgtttggaatcaccacaacaaccaccagggttaataatgttcctcctcgtaggtttagttgttcagcatcgtcatcttcttcctcttccactcttccctcagctcttctatttgactgtgatggagtccttgtggatactgagaaagatggtcaccgcatatctttcaaccaaaccttccaagagagagaactaggtgttacctgggatgtggacttgtacggggaattgctgaaaattggaggcggaaaagaaaggatgacagcatactttaacaaggtgggttggcctgcgaatgccccaacaggtgaacaagaaagaaaagaattcatagcttcactccacaaacaaaagacagaactatttatggcccttatagagaaaaaactgttgcctcttcgtccaggtgttgcaaagattatcgatcaggcttttgctcaaggagtccaagttgcagtttgcagcacttccaacgagaaggcggtctctgcaatagtatcattcttgctgggacctgagagagcagaaaaaatcaagatatttgcaggagacgtggttccccgtaaaaagcctgatcctgccatctacctattagcagccagcactctgaat

SEQ ID NO: 16122 - DNA, 451 bp, Glycine max
  unsure (1)..(451): unsure at all n locations
acgcccacgcgtccggttggttgtctccataggagggcttgtggtcaatgtcattggcttgatgttcggtcatgaggagcatcatcatgctcatggccatgtattatctggatcatcatgctcccattcgcacacacacacggagtcgcatagtcaccacacccaccatcatcatgatcatgatcatgatcatgatcatctgcatagccatggtcacgaaacaacaatccatggaagcaatcaagaatatatatcagtttcaagtgattgccgagacgattcatgccctggtgatcatggccatcatcataatcataaccactgtagtcatgagaggaagcatcatggtgagtgtcatgatcatgaagacaaacacagcattccgagctttaagcatcatgatgctngccgccactgccatgaccatggtgaacatcatgatcaaactggg

SEQ ID NO: 16123 - DNA, 630 bp, Glycine max
tttgcttcgacagcttccaggatcaatgattgtcaccacaaatcaacatgagatttcctagcgtgttttgtcctcattcacatgttttccaggaaacttcccagaaagtcatgcatcacataattgctctaagtcaaacacgcttgattgtggagctcttaaatgataggctaccgaaaaatagatgcatcttgtgggtataggtagatactaattaattcttttaagtcatcctcaatcgtacagttctacatctgcacaatctttggatccctctcattccgatgtgattcgcctggagtattatatgcccaccagctttcatggtgttgtggcataataaacacaaaacttgggaagttagtgtgagttaccctaagttgtgtccgttttaactcttaaggtatcaaaaaggattcctcaaaaagtgaacttgggagtatcacatttccatgtttggtacaagtcttgaataaatattttctagagttattgatgcctagaatataaaatgttcatatttccctcgcttcttattcccatggtgaaagttgggtatcttagagtgggaatgaaatttattttctacaaaaactacctatcctcactccattcttccttcctttttct

SEQ ID NO: 16124 - DNA, 1244 bp, Glycine max
gggcacgtgcagtacgtaggctgttcttgtgggtgttgttggattggaatcggagagaaatggagagcagcgccgtctacggaagcattcgaccaagttacccgatctgcccctctcgacgttcttcctctcttctctctcaccaatctcccttcctattcgagccttctctttctctcaagcttcgcaagcagtttcctctcatttcgcagaattttctggaagccgcttctcctctcaggccttctgccactttgtcttctgattcctaccgtgagacgattgaattagctgatatagaatgggacaaccttggttttgggcttcaacccacggattatatgtattccatgaaatgcacacgaggtggaaccttctccaaaggtgaactgcagcgttttggtaacattgaattgaacccctcagcaggagttttaaactatggtcagggattatttgagggtttgaaagcgtatcggaaacaagatgggagtatactcctcttccgtccggaagaaaatggtttgcggatgcagataggtgcagagaggatgtgcatgccatcgcctactgttgagcagtttgtggaagctgtaaaggagacagttttagcaaacaaacgttgggttccccctgcaggtaaaggttccctgtatattagacctttgctaatgggaagtggaccggtacttggtcttgcacctgctccagagtacacctttctaatatacgtttcacctgttgggaactacttcaaggaaggtttggccccaatcaatttgattgtggaaaatgaattacatcgtgcaactcctggtggcactggaggtgtgaagaccattggaaactatgctgcagttctgaaggcacagtctgaagcaaaagctaaaggctactctgatgttttataccttgactgtctgcacaaaagatatttggaggaggtttcttcatgcaacatttttgttgttaagggtaacgttatttcaactccagctattaaagggacaatcctacctggcattactcgcaaaagtataattgatgttgctcgaagccaagggttccaggttgaggagcgattagtgtcagtggatgaattgctagatgctgacgaggtcttctgcacgggaacagctgtggttgtatcacctgttggcagtattacttatcttgacaagagggtagcatatggggatggtattggcgtggttgcacagcaactttatactgtccttaccaga

SEQ ID NO: 16125 - DNA, 697 bp, Glycine max
ctggattcctgagaaagttgcttcttgagaaagtttcttctgttgattgtgacaagatggtcatggttgcttgtggttggcggcatacaatttctgtttcatctttgggtggcttatacacatatgggtggagcaaatatggccagttaggacatggaaattttgaggattctcttgtgcctcaaaagcttcaagccttgagtgataagttaatcagtcaggtatcaggtggttggaggcatagtatggcactcacgtctactggactactatatggatggggttggaataagtttggacaggttggagttggtgacaatgttgatcgttgctctcctgtgcaagtgaagttcccccatgatcagaaagtagttcagatctcatgtgggtggagacacacaattgctgtaactgaaaaggaaaatgtattttcttggggaagaggcacaaatgggcaacttgggcatggggataccgttgaccggaattctccaaagattattgaggcattgagtgtggatggatcttccgggccgcacatagaatcctcgaacactgatagattgtcagggaaaagtggtgcctccttatctgagagatatgcaggtgttccggatgaaactgtaagtgtctcgttttagcatatacattatgtgctacaattactatggatctttgctcaggatttaggaaacct

SEQ ID NO: 16126 - DNA, 691 bp, Glycine max
gccgtaaacagatgtgaacggttccttcctccttcattgttcgcctcatcaacattacctccttcttccaccgtatcataggataggaccactcctaacacgtttttgcctttttaattaattcctttctttttattcttcccttccctgagtcttccacattattttccttcttctcatcaagaaattttggtggcagaccctgtgagaaatattaaagacgggccactttcaaaatataccatggagccacaattagaatcccctttgggaagaaaagattctacaggaagtgccgattcttctaagccttcaaagcatgtcattgagacagctgcgccctttgaatctgtcaaagatgctgtgtccaagtttggaggaagaattgattggaaatctcgtcgaacccagagtctggtggaggagagaagcaagctcgtagaagactttagaaaggaagaaactgcagaggaattggaaaacactaagaagcttatagaagaactcaaaactagcttagaaaagatagaaaaagatgagcttcaagcaaaagaagaggctgaacgtgtgattctcaaaattgaagagatggagcaggacattgtaagtgaagctagtattgaagccaaggcacaacttgaggctgaaaaagccatgcttacagaagcgctttcggagtctgaattcgtta

SEQ ID NO: 16127 - DNA, 541 bp, Glycine max
ccagttatagaaaatggtgatgtttttgagaatgatgatgttgaacgcattaaatctgccacaggtgcctcgtcagtgatggttgccagaggggcactctggaatgcttcaatgttttcgcccgagggcaaagtttcttatgaagctgtgaaaagagaatatattaggaagtgcatcttgtgggataatgatataaaaagcaccaagcatacattaaaggaaatgataatacattattcttgtctagaactgcctgaagggaaggctgtgatcaaatcagagtccatggctgatctagcgtaagttaatttttccttatcacttgcctccgtgcttgcaatgtatactaggtgttgactatagaacaatataatcaattgtgacatgtttgtatactccaattatttttcagtgactttacactatgcatcatttgtaaacaaattacagaatcaatgcttcccagttcctttggagattacttgattatgggattgcatcctaaaaaaaaaaaaaaaaaaaaaagggcggccgccagcta

SEQ ID NO: 16128 - DNA, 434 bp, Glycine max
tttttcaggatcacaataataaattgccccaatcgcgtgctgggaaaagcagcaaaaggaggggctttattgccaggggcaaatctgttttttcactcaatggatggcaagttcgtcaaggaacttacttccaaaatgtagttgccacacaatatgatggaggaatggatgctaaatttgagttcaatgagaatggagatgctgttttctcagggtatgtcttcaacagaggaggctatgtggaactatcaaaaaagctttctctgccactaggttatactcttgataggtatgagggtttggttctttctgtcggtggcaatggaaggtcttatgtattaattctagaagctggtccttcggcagatccaagtcagagtagattgtattttgcaagaattagtacaaaagtgggattttgtagggttagagta

SEQ ID NO: 16129 - DNA, 1221 bp, Glycine max
cccacgcgtccgatcatttagagaagcatttgaaggaaaattgtaagcacatacacatggggcttttattgaccaagtgtgatctagttcctgcttgggcaacaaaaggatggcttagagttttgtcaaaagaatttccaactctagcattccatgcaaacattaacaagtccttcggaaaaggttcacttctatcagttctgagacaatttgctcgattgaaacgtgataagcaagcaatatctgttggatttgttggatacccaaatgttgggaagtcatcagtaatcaacacattgcgtactaagaatgtctgcaaggttgctccaattccaggggaaacgaaagtatggcagtatataaccctaacaaagaggatctttctgattgattgtccaggtgttgtctaccacaacaatgatactgaaacagatgttgtgttgaagggtgtggtgcgtgtaactaatttgaaagatgctgcagaccatataggtgaggttttgaaacgtgtgaagaaagagcatttggagagagcatataaaataaaagagtgggatgatgagaatgacttcttactgcagctttgcaaatcatctggcaaacttctgaagggtggtgagcctgacctgatgactgcggcaaagatgatacttcatgactggcagaggggtcgaattcccttttttgttccccctcctaggcaggaggacttgtctgaggaacctaatgttaatggtgttgacctagatgattcagttgatggcaacgaggcttctgctgctatgaaggctatcgcagatgttctttcatcgcagcaacaaataaatgtacctgttcagaatgatttatatagtgagaaggagttgaagggggaagctactgatcaacatccaaacactaatgcaaacgaagaaattctggcccttgatagtaacacatctgaagaggatccaatcagcgagccataacttttggttgctgttgtagcagtcaggaaattgtaaattttaagttggttttgtttccatcctctaaaaagctttgaagagaacaagcttcttttccctcaattcacttatgcacaagcgagtttcatgctgggacttcaatgtaaattttttttttctatttttattctctctattttcataatccaatacacagttaataatttttgtatgaatgttgatgttgatgttaaattaataattttaatttagt

SEQ ID NO: 16130 - DNA, 514 bp, Glycine max
accaggattaacataatggtagactctccccctagaatgtcaacgatgttagtcacttagtctacccttaaagttattcttgatgttcacaaagggaaggatttaaactggttgttttgcatgcaaatgctttggtgctttcaggctgttgatttgcagatagattccgaagcagtgtttttttttaatggtatttttggagaatcctgaaggtattgttatggggtggaggttggacaattctggttggaggataaggatttctcatgtacatcgagaagcaaatgcttgtgcggatgctttggccaatttgtcttatggcttgcagttgggttttatgatgcatgagcaacctcctgctatcagtcaactgttgcttgctgacagtagaggagttgtttctcctcgcattatttctttgtagtttcctttgggcttttgctctgtttaataccaaaacaaaaaaagctttgctgcttttattctagtggtgcattgtgtagatcaattgata

SEQ ID NO: 16131 - DNA, 602 bp, Glycine max
ttccacaccagatagccaatcctctctatctttggttcagcagccattagcgatttcccttatctctctccatcttaactccaagcacaagaatcatcttcccatttcgtttctgaccaatggcttccctcactgtcccaaaccattgtgttcccactttgcttcgcactcactctctcaactacccatcttcccaaaacctcccacttccttccgcgccatcaaattctcaattttttggcctcaagttatctcattcttctgtttcatctatcccttcatcttcttcactcaaaggcaccattttcgccaaggtgaataaaggttcaaagccaccgaattttacgctgaaagatcagaatgggaagaatgtgagcctctccaacttcaaaggaaaaccagtaattgtgtatttctaccctgctgatgagacccctggctgtaccaaacaggcttgcgctttcagggattcatacgagaagttcaagaaagcaggagcagtggttgttgggataagtggtgatgatgctgcctctcacaaggcatttgccagcaagtacaggctgccatttactttgttgagtgatgagggcaacaaggtg

SEQ ID NO: 16132 - DNA, 1227 bp, Glycine max
gattcacactcttgttttaaacccttcactcactcactcactcacgcctgttcgtaaatgtctatcacttccctcaccatggccgagtcctgcctcctctcttctccctcctcactcttccacaccaaaaccaaaccctctctctttacacccccctccaaacccctcacactccaattttcatgcctcaactcctccgtctctctctccctcgccgcaccaactcaccgttctccccttgtaactttcgtggcccaaacttccgattgggctcaacaagaagaagaacagagcctcgctgaaaccgaagcgggcctggaaagttgggagcccaacggcgaagacgccggcgatgagagcttcgtcgaaccgccggaagaggccaagctcttcgttgggaacttgccttacgacgttgatagccagaaattggccatgcttttcgaacaggccggaaccgttgaaatcgctgaggttatttataacagggaaactgaccagagtcgcgggtttgggtttgtgacgatgagtactgttgaagaagctgaaagcgctgtggagaaattcaaccgctatgatatcgatggaagactgctgactgttaataaggcttctccaagaggaactcggcccgaacgcccaccacctcgtcgttcctttgagtcttccttatcaatctatgttggtaatttgccatgggatgttgacaatacccggctggagcaaattttcagtaaacacggtaatgttgtgaatgctcgggtagtctatgacagggagtcaggtcgatcacgtggctttggctttgtcacaatgtctgatgagacagaaatgaatgatgccgttgctgctcttgatggccagagtttggacggaagggcaattaaggtgagtgttgctgaggacaggccaaggcgtggctccttttgagcgttagcatatgtagttccccatgtcagctgctggagttctcttgcatttttttaatagctgaggatatactatagtgtcaatttttgtttaaaggaaaatcctttcttggggcgccaatttcagattagatttaagtatttcgttgttattaatttaatgtccagatgaaagttaagttgtaattcctgactccggagatggagaaaaggtatactttggtggtggccttttctttgggctaattggtaataattattgaatggaaaaagggggaaggaaagtcttgcgcgactt

SEQ ID NO: 16133 - DNA, 522 bp, Glycine max
  unsure (1)..(522): unsure at all n locations
acgcacttactcttcttcttcttcgtacatgtctatcacttcttccacttccttcaagtccctcactatggccgagtcctgcctcctctcttctccctcctcactcttcaacaacaaaaccaaaccctctctattctcacccccctccaaacccctcacactccaattctcatgcatcaactcctcagtctctctctccctcgccgcgcgagctcaccgctctcccctcgtcacgcgcgtggcccaaacttccgattgggcccaacaagaagaagacgacaccgccaccttccaagacgaagaacagggccttagtgaaacccacccgggcctttccagttgggagcccaacggcgaagacgccgtgagaagagagcttcgccgaaccgccggaagaggcaaagctcttcgttgggaacttgccttacgacgttgatagccagaaattggccatgctcttcgaacaagcncggaccgttgaaatcgccaggtcagagagagagagagagagagaggctcttt

SEQ ID NO: 16134 - DNA, 462 bp, Glycine max
aaaaccggaccgacccacgcctcccattctaatcaaaataacgggtctcttctttcaagcacttcattttcttcttttccacctgctgtatcaaataggtttaccagtcagaatatatctagttcatcatctgctgccacaagcagtggcattagtgccactggaaattctactagcatggcaactatctcacctgccacaattgcatctagtaatagttgtttctctaccccagtggtggcatcctcatcgtcagcaatttccctttttaaatttggatcctctcctgtccaatcagcaggtttacctgtgtcatcttctggttcagaaccaccagaaactaaaagcagacaggatgcaggaatcagtggtcttagcagcactgcatttggtgctagcagcggtatttttggcttcagctcttcagcaatgacaactgtaaatagccagtctcagagttct

SEQ ID NO: 16135 - DNA, 436 bp, Glycine max
tgagaagatttgtcctccacactgcattttaacatcaaacacatcaactattgaccggggggttattgggggggcgaccagctctcaaaatcgcattgcgggtgctcattttttcagtcctgcccacattatgcctcttttggagattatacgaaccgataaaacatctgcacaagtgattcttgatctgataacagttggtaaaatcataaagaagacacctgttgtggtgggtaattgtactggctttgcagtgaataaaacattcttcccatattcacaaggtgcccatttgttggtcaacttgggcgtggatgttttcagaattgacacattgatacgcaactttggctttccgattggtcctttccagcttcaacactttgctggctatggaactgccgtttctaccttaaaaaatatttgcttgatgctt

SEQ ID NO: 16136 - DNA, 507 bp, Glycine max
ctcaattgcaactagctaatggctatgcatggaacttcttgtttggtgccttctgttctggagctagcaaaacaacccatcatcgaagttccagaacgatatgttcatgccaatcaagatccacatattctttccaacacaatttctttaccacaagttcccatcatagacttgcatcaattgttgtctgaagatccaagtgaactagagaagctggaccatgcgtgcaaagaatggggtttctttcagcttataaaccatggagtggaccctccagtggtggaaaatatgaagataggtgttcaagaattcttcaaccttccaatggaagagaagcagaaattttggcaaacaccagaggatatgcaggggcttggccagttatttgttgtatcaggggaacaagagctagaatgggcaggcatgttctatgctcacacatttccattacattcaaggaatcctcatcttattcctaagattccccaaccattcagagaaaatcta

SEQ ID NO: 16137 - DNA, 531 bp, Glycine max
ttcgttttgagatttcttccattcatcaccactaagccacactagacactacaatcattatcaagttccaattgggttattttttgtcatttaaaaagaaaatcaaagcaagagtttctttgaagaagacttgtacacaaagatgagttcaagcagaacttgggctgtggcagccagtgttggagttgtggaggccttgaaggaccagggtctgtgtaggtggaacaatgctttaagatcagcacaatatcaagtgaaaaaccatgtgagatccttgtctcaggcaaacaaggtttcttcttcctcatcttctgctgtggtttctagtagattaaaggaagagggtgcgaagcagtcagaggaatcattgaggacagtcatgtacttaagttgttggggtcccaactagagtcataaggcagttactaaataactaaatatttgatagggaaagttggggcagagatttgtagacttgtaatggtgcttgttaattagcattcaaagttgcgacagatattgatgtaaatc

SEQ ID NO: 16138 - DNA, 467 bp, Glycine max
ccctcgtgtccgcggacgcgtgggctcttaggtttttggctctttgcagaatctttgagtgacacatacctagctatcacctcaatggattactattttggaaaccttaatcctaacccttattaccatcactctgccgtagtgaacatggcatctccctcctccgagttcatgttatctgattatctcgtgttggaagatgctcttgttgttgatcatcatcaagagtcttggtcacaaagcactgaaactgaatcgtcggagaaagcaacctccagcgatgcaagtcatgggttcggtgatgcaacctccaacaccaacatgcatataaagtgccaaaatagtgggattaagggaaagaatgcagaagtgagtcaaaggataacgtttagaaccagatcgcaacttgaggttatggatgatggatataaatgaaggaaatacgggaagaaaacagtgaagagcag

SEQ ID NO: 16139 - DNA, 760 bp, Glycine max
gtcttgacggtcccattttcaccccattgtgcaaattgaaagtagtagggaacccctacgatagctactacatggggacaatgacgtcaccttaacgtctctcgtgttgacacgtagctcaatgaggctatttcgctgcatcctccaaaaaagtgtttggaaagatcctttccaccccatgccaaaagcgagcatatttatttaaaaaaattgaaaaaaattaaacacaattttattttattataggatatttattaggtatttattggatataaatggcaacatgctttaatcctaagcctgataaaaaggccaaaaactttaaggttttggctctttgcagaatctttgagtgacacatacctagctatcacctcaatggattactattttggaaaccttaatcctaacccttattaccatcactctgccgtagtgaacatggcatctccctcctccgagttcatgttatctgattatctcgtgttggaagatgctcttgttgttgatcatcatcaagagtcttggtcacaaagcactgaaactgaatcgtcggagaaagcaacctccagcgatgcaagtcatgggttcggtgatgcaacctccaacaccaacatgcatatgcaagtgcttcttaattatctcgagttattttatttttttcattaaacaagaaaatggtatatcgcgtattctatgctattttatgtgtgcgcaagtacgcatatatgttcattaatcttcttgggattttaatttg

SEQ ID NO: 16140 - DNA, 452 bp, Glycine max
caagcacagacacagaaaaatggctctaacacttcgctcttcaatttcccttgtcaaccagaaagaaaccaaactcccaaaagccaaagacgaggttcccaccaaagtgttttactttggaaaaaccaacccatctttccgtctcagagcaaagagttccatgcaacaaacacacgtcacacgaaacaacagctttaactccgaagtaacgatgataaacgagaaaagggagaaggttcacgctccatcggttgcacatagccacaatgattcaatgagagtgccagtgtttgtgatgctgccattggacactgtaactatgggagggactttgaataagccgagagcaatgaatgctagtttgatggaccttgaaagtgcatgagtggaaggagtgatggttgatgcttggaggggctaggcggaaaaagacgtacccttgaagtataatt

SEQ ID NO: 16141 - DNA, 790 bp, Glycine max
ggctcgagggaacagggtaaactcaaacaacatcaaccaaagtaccaaccaagaccagaaggctttgtatatctacctatctgtctaagccattcatcaaagctcaactggaccagatgatgtaggctcttagatccgagtgatgaaagttggatatttgatatcagtatcacaaaattattcagtgtgaagcaatatggggaacacgtgtgttggtcctagcatttcaaaaaatggttttgttcaatcagtttctgcggcgatttggcggtcccaattgcctgaaggttcagtgtctaatagagaatctgtaaaagaggaagcaactagtgtgcccgaatcgcccttgcctgtccaaaacaagcctcctgagcagataactatgccgaaacaagaagccaaacaagagggaaaatcagaaatagaaccggaaaaggaacaggataagaagaaacagaagaaacgtggttcagtgaagagagtttctagcgcagggcttcgtgttgattctgtgttgcaaagagagaccgataatttcaaggagttcttcactcttgggagaaaacttggacagggtcagttcgggacaacgttcttgtgcgtggaaaaggcaacagggctggagtgcgcctgcaaatctattgcaaagaggaagctcgccaccgatgatgatgtcgagcatgtgagaagagaaattcagataatgcaccacttggtcgggcatcctaatgttatatccatcaaaggtgcatatgaagatgccgtggctgttcatgttgtgatggaatta

SEQ ID NO: 16142 - DNA, 433 bp, Glycine max
cgttctattcctaacttgaacgagaattcgatccgtgtgttgtgcaatgctaacacctcagagggattcaagccttcaaaggatgtctctttcccagaaattaatctccaaaccggttcaataaacggtttcattggtgggccatctgcgtctagacgtccacttttggccttctttgctggtgggcttcacggcccaattaggcccgttcttcttgaacactgggaaaacaaggacgaagacattcaggttcacaagtaccttccaaagggtgtgtcatactatgagatgttgaggaagagcaagttctgtctttgtcctagtgggtacgaggtagcaagtcccagagtggtggaggcaatctacacagggtgtgtgccagtgctcatttcagaccattatgtgcctccattcaatgatgttttgaattgga

SEQ ID NO: 16143 - DNA, 978 bp, Glycine max
cggctcgagaaaacactctcaacaaatgaatattctcggacaatcattcaacgaatcaaacaacggaagctactcttgttcgtcgccggagactggtagctcctctaacattccaaacacttttcactccgacgaggaagtgcacacactagcttcggcgcgtcctaagaaacgtgcggggcgtcgaatttttaaggagacaagacacccggtgtaccgaggagtacgaaggaggaacaacaacaagtgggtctgcgaggttcgtgttcccaacgacaagtccaccaggatttggcttggaacgtatccagtgcctgagatggccgcacgtgcgcacgacgtcgccgcgctcgcgcttcggggcaagtcggcttgcctcaacttcgccgactcggcgtggcggctgcccttgccggcgtcgacaaatgcgaaggagatacggcgagtggcggcggcggctgctgtagcgattgcggcggaagacagctgcggcgagcagttacagaatagtattgtgaatgatgccgttgctgatgattgtgaagttagcagaagtgacgtcagctttgatgaagattccaatagcaacaaaggtttgagagttttttgtgatttggatgaaattacaatggcagatgcaccggtttttgaggacatgcgtgagtggcttcagagtatggcggatgagcctttaagatcgcctacttttgtaacatatgttaatgttagggatgtctggaactttgtggaggatgatgctgaggtatccttgtggagcttcacaatttagtgcgtttagtttgttctttgtcttctttcgtttttggtttttgtacataattaggaacggaggagtacgaaaatgtaccaagaccgagacgatataaggagctagctatatagggaggatcataaaactgtaagacattgcaaattttctcattcagttgtttttgtaattctcataatcatatagat

SEQ ID NO: 16144 - DNA, 561 bp, Glycine max
  unsure (1)..(561): unsure at all n locations
tcgaactcgnacgaatcggctcgacacaactcaactaagcgcaaaccaaaccaacacaaacaaaaacatctctcagcaaatgaatattctcggacaatcactccaccaatcaaacaacggcagctactcttgttcgtcgccggagactgcaaactcctctaaccttccgaccactccgaaagccgttcactccgacgaggaagtgaacacattagcatcggctcatcctaagaaacgtgcggggcgtcgaatttttaaggagacaaggcatcccgtgtacagaggagtgcggcggaggaacaacaacaagtgggtctgcgaggttcgtgttcccaacgacaagtccacgaggatttggctcggaacgtatccaacgcctgagatggccgcacgtgcgcacgacgtcgccgcgctctcgcttcgaggtaagtcggcgtgtctcaacttcgccgactcggcgtggcggttgcccttgccggcatcgaccaatgcaaaggagattcggcgcgtagcggcagcggctgctgtagcgattgcagcggaagacagccgcggcaagca

SEQ ID NO: 16145 - DNA, 522 bp, Glycine max
aaactcccagatggacgtgaagttgccgtgaagcgcttatacgagcacaactggaagcgagtagaacagttcataaacgaagttaagatcctcacacgtttgcgtcacaaaaatcttgtgtcactctacggctgcacttcacggcacagccgtgaactcctacttgtgtatgaatacatttcaaacggcactgtagcgtgtcatctccatggtggattagcgaagcctggctccctaccatggtctacacgaatgaaaattgccgtagagactgctagtgcattggcttatctccacgcctctgacatcattcaccgtgacgtgaaaacaaacaatattctcctcgacaacaacttttgtgttaaggtagcagattttggactttcaagagacgtccccaacgatgtcacacatgtctccacagctccacaagggtccccaggttaccttgaccctgaatattacaattgctatcagcttactagtaagagtgatgggtatagttttggggttgggcttatt

SEQ ID NO: 16146 - DNA, 672 bp, Glycine max
ctcgagccgcagaatcttgttgcatgggccagacccttgttcaaagatcgaagaaaattttcgcaaatggctgatccaatgctccaaggtcaatatcctccaagagggctattccaggcccttgctgttgcagcaatgtgtgttcaggagcaggccaatatgcgtccagttatagctgatgttgtcacagctttgagttaccttgcttcacagaaatatgacccgaatactcagacattacaaagctctcgccttgctcctggtactcctccaagatccaagaggggatattgatatggagctgaatgtttgttagctatatgatattctggtgcaaatttcaaacatcttacaacacactgcaagttatagatttgtagatcataataccagttgtcttatggtggtgatctttcttcagagcatagttgctaaaaatgttttgtaaaattttgttctacctctggtgcacagaactgctcctatttccatttggagccaagatagtatatcctcttccttttgttagtttctatttaaaagcaaattgctggattcattattcatgttccttttgtcttactggtgtaccaacattttatagttgtctattcttcttgtcctgggtgtttgtatagttatcaagctctataaaatttggctttttcaaac

SEQ ID NO: 16147 - DNA, 796 bp, Glycine max
atcgacgaacactaattcaggaaaaagaaatcgaggaggtataggatggaacaggggatatacgcggagctgagcgaggcgatggagtgtttggaacacatatgctatgaggggtgcacccacgttggaccgtacgatgcggaggtgaagagggagaggacgccgtgtgggagattcgccacgtgccagggtcttcaggttctgatccgccactttgccacgtgcgagaagaaggttcgcggtggctgcgtgcggtgcaagagaatgtggcagctctttcgactccattcctatgtttgtcacgacaccgattcctcctgcaaggttcccttttgcaggcaatttcaattgagaatgcagcaagagaaaaggaaagatgatgctaagtggaaactactagcgaggaaggtggcctcagccaaagtcatgtcttcattgtcactgccaaagaggaagcgagatgaagaaacaagagtgtcgatggacaatcccgggattagaagttttacattactatgcatattcttataaataatgatgtatagggcagtgtgttccgtgctacacacttgatagagcagtttctatagggagagagtattctgcttgccggtttgttctgtgtaaaagcagggtttttgatggtgtgaacttcttgtacttggctcttttacttgagaaaatggcgaattgagtggtaccctgtaagttgtaacggtcaattttgtttgtttgaacctcattttgcgttgtctgagcatttgagaatattgtaaagctagtgttcaatttgatg

SEQ ID NO: 16148 - DNA, 1230 bp, Glycine max
  unsure (1)..(1230): unsure at all n locations
tgcatctcctgaaacacaaccttgtgcagaaagcacttctgcccaacagggctggagacaggttgttgatgcattatgcaacgttgtatcagcctcaccaacaaaagcagctacagcagttgtacttcaggcggagcgggaattgcagccctggattgccaaggatgatgattcaggtcagaagatgtggagaatcaatcagcggattgtaaaattgattgtggaacttatgaggaatcatgagactgcagaatcattggtaattgtggcaagttcatcagatttactactgcgagccacagatgggatgctggttgatggagaagcttgcactttaccacagctggagctattggaagcaacagctagagcagttcagccagatcaatacttcaatttggatgagaaagacatctggattggctgtggcagatggcctttcaaaccttttaaagtgtcgcctctcagctacaattagatgtctttctcatccaagtgcacatgtccgagctctgagtatatcagttcttcgtgacattttgcatactggttcaatcagatgtagtcctaaacctcggagattaaatggcacccacaacccttcttatcaatacttcaatttggatgccgttgactggcaagctgacatagaaaaatgcttgacttgggaagctcacagccgactttcaaacggattgtctattaactttcttgatatcgctgccaaagagttaggctgtactatttccatgtgaaatgaaatcatccatcttagtctgtgacaattttttgctagacttatagaaaaagaaaaagaaaacagaagttattgatatgcttatggaactaacgggtttgcaaataagcataattctgctagtcctgttaaaaagagctgcaatcataattctagtatgtttatagaaagctcattttgtatcatgcatgtactctagctaaactaagtttcaccttgaacttgcttgtgactctgctctggatagaacagacttgtacagtaacgaaaaacgactgtaaccaggtccttttctccatcattgtctcattttgtgttatgcttatgttgatttagcttgtaatggaagtctcttccaattgtttggattaatgtatgttcaggcaggatttcctttttttctctcttttnnnnnnnnnnnnnnnnnnnnnnnnnnnnnnnnnnnnnnnnnnnnnnnnnnnnnnnnnnnnnnn

SEQ ID NO: 16149 - DNA, 650 bp, Glycine max
gtttttctgtagtttcactgctatggcacaagctgattgcatctcctgaaacacaaccttgtgcagaaagcacttctgcccaacagggctggagacaggttgttgatgcattatgcaacgttgtgtcagcctcaccaacaaaagcagctacggcagttgtttgtcaggcggagcgggaattgcagccctggattgccaaggatgatgattcaggtcagaagatgtggagaatcaatcagcggattgtaaaattgattgtggaacttatgaggaatcatgagactgcagaatcattggtaattgtggcaagttcatcagatttactactgcgagccacagatgggatgctggttgatggagaagcttgcactttaccacagctggagctattggaagcaacagctagagcagttcagccagtgctcgagtttggagaatctggattggctgtggcagatggcctttcaaaccttttaaagtgtcgcctctcagctacaattagatgtctttctcatccaagtgcacatgtccgagctctgagtatatcagttcttcgtgacattttgcatactggttcaatcagatgtagtcctaaacctcggagattaaatggcacccacaacccttcttatcaatacttcaatttggat

SEQ ID NO: 16150 - DNA, 640 bp, Glycine max
ggtacacgttatgtgcaggcaattccatgtggccacatggatgagagaagggggttgtggaagaagaagatgatgaacaacaacaggcaacacagcaacaccaactgaaacatcttcatcatctacgaacgaccataaattttctctctttccctttccctctctctgtctgtgttttttcttaaaaaattctgtgagaggcatagaggaagatgaaggaaagcagtgatgggtttgtgagagcggatcagattgatctgaagagcatagatgaacagttggagaggcacctcagcaaggtgttgaccatagaaaagaaaaagcgctctgaaggggaagaagatgctgatcatgttcatcttcatgttcacaccaccagtgccactgcttctcccaaattctcacatgcttcttctgctgctagggttattaacttcaagaagaaaaagcaggactgggagattgatccttctaaactcatcatcaaaactgttatagctcgtggcacttttggcactgtccatcggggtgtctatgatacccaagatgttgctgtgaaattgttggactggggggaagaaggacaaagaacagaagcagaaattgcctccctgagggcagcgtttacacaggaagttgc

SEQ ID NO: 16151 - DNA, 585 bp, Glycine max
gaagaagcccatacttgtgggagatagatggcacgcttgtcactgctcattttcgcgttctgcgccgtcgccgtcgccgtcgccgtcgcgggctcctccttcgatgatgccaaccctatccgtttagcgtcggacttggagtcgcaggtgctggacgtgatcggacagagccgccacgctctctccttcgcccgcttcgctcgccgccacggcaagcgctaccgttccgtcgacgagatccgcaaccgcttccggatcttctctgataatcttaaactcatcagatccaccaacaggaggtctctcacctacacgctcggcgtcaatcattttgctgactggacttgggaggagttcaccagacacaagctcggcgctcctcagaattgctctgccacgctcaaaggcaaccacaggctcaccgatgctgttcttcctgacgagaaagactggagaaaagaaggtatagtcagccaagttaaagatcaaggcaactgcggatcttgctggacattcagcacaactggtgcattggaggcagcttacgcacaggcctttgggaagaatatcagtctttctgagcag

SEQ ID NO: 16152 - DNA, 551 bp, Glycine max
gtcttagtccacgcccgccacccacctcattatttcaattttcccctctcttacggagtcggtttctctcttcccttattcatcactcttccaaaataaaattaaaaaaaaaacccacctttttagttttctctcatagtctcatctcatcacgacaaacaacaatctaatctatgcaaccccaaagaaacccaattcaatagaaaaagaaaacaaaaaatcagatgagccagtggatacacgtggcggtggcagcatccgccgtgggatgcgtctcgacccttttgttggtctttctctggcgttggtgccataaaagaaatcatcgcagaaatttcgttgagccggctagtttgaccagagtggagagtgtccagggagggatttctgtttccaggcttcatcaacaacaacaaccttttcaattggatcagggaaacaagaacaacaacaagggcaattacaattactatgtttttcgcggtggtggcgtgtcggggaaaagaaagttgttcaattggggtgatcatccatctatggccgctgatgct

SEQ ID NO: 16153 - DNA, 893 bp, Glycine max
gccgaacaaaaacagccaaacatcgttcacaagtggcttgcttggtcggactaggaaagttttcaaagccaagcaaatacgagctttacccaattttcttgctgttgaattttccactgttcaatcttcaaaatcacatttttctcgatcttcaccttctgggttgcttttttttttttttcttcttcttcttcttcttttgttttcgctatggaatcgaaaaaccctgcgaggtttacgctggggaagcagtcgtcgcttgccccagaacgccataacaaagaagcagagctccaaaaagatggggaagctgttgatcagggtgtgaggttgatgtattcggcattcgaaggcgatgtggatggaattcgcgaggcgttggagtctggtgtgagtgtgaattacaaggatattgataatcgcactgctcttcatgttgcggcgtgtgagggcttcactgatgttgttgatttattgctccaaaaaggtgctgaagttgaccccaaagatcgatgggggagcacgcctcttgcagatgctattttttacaaaaagaatgacgtgatcaaactattggagaagcatggagcaaagcttctgatggcccctatgcatgttaatcatgcacgtgaagtcccagagtatgaaatcaatcctaaagagcttgattttaccaacagtgtggagataacaaaggggactttctgtattgcactgtggcgtggaacagaggttgcagtaaaaaagcttggggaggatgtaattagtgatgaggagatagtgatggctttcagagatgagcttgctctgttccagaagatccggcatccaaatgtcgttcaatttctgggtgctgtgacccagagtagtccactgatgattgtgacagaata

SEQ ID NO: 16154 - DNA, 1333 bp, Glycine max
ccttttcgtccgtctagatagaaattgcctacagaggattccaaaccagaggaatttggaagattgtagaatgttttatgataaaagaaatttatcctctgcattcccagaatctgagtccagaagccgcagacgggtgatattcatgctggtaggaatatttggtgggcttggctttattgtgctgctggcattggtcctcatgcttgttctaaaacaatgtcacaatcggaaaagcttggaagttccaagggagaccaaagatgggggggctgttgaagaaggggaaagccctatacctccgaaagatattgactttgtgactggtgtgggagaagcatatagttttgagcaaatgctccgttggactggcaatttcgctgaatcaaatgtcataaagcatggtcattctggggacctcttcttgggagtcttggaaggtggagcaactgtggttgtcaaaaaggtagatttgaatttatttaagagagaatcgtatgttgtggaattgggactattaagtaaggttccacatgcaagattggttccaatcctgggccactgcttggacaatgaaaatgagaaatgcatagtttacaagtacatgccaaatcgagatttagctacttccttgcacagagtcactggttcagatggtaaaatacagtccctggattggatcacgagattgaaaattgcaataggagctgctgaaggcatagcttacctacatgagtgcagccctccccttgtccacagagatatccaagctagcagtatactacttgatgataaatttgaagtgcgacttggaagtttgagtgaggttactgcccaaggagatcttcaacaaggagtcatctcaagggttttcagcaagccaccatcttccaatcaagcagattctggtaaatcatcagtgacatgtgcctatgatatctactgttttggcaagattttacttgagctcattaccggtaacattgaagtcagcaagttagatgatgcctctacaaaggagtggttagagcaaaccttgccttacatcactatatacgataaagaacgggtgactaagattattgacccatcattgatcgtggatgaggacctgttggaagaggtatgggctatggcaattgtggccaatgcatgcttgaatcccaagccttccaaacgccctcctatgaggcatgtcctgaaagcattggaaaatccattgaagattgtgagagaagaaaatactagctcagcaaggttgagatcaaactcttctaggaaatcttggagcactgcattctttggtagctggagacacagctcatcagacagt

SEQ ID NO: 16155 - DNA, 417 bp, Glycine max
cggacgcgtgggcggacgcgtgggtgagcataggttggttgcgagcgaaacacagaaaatgatacccagatgctctgtttcaccccctcagattcgcccatttcagtttcagaacttgaacggtctccgacaactcgccgaaacgcggcgtttcaaggtatggttgctggaccagttcggagtcctccacgatggaaaacaaccttaccccggtgccatttcaaccttagaaaatatagctaagacgggtgctaagatggtgatcataagcaactcatcgagacgttcatcggtgactattgagaaagtcaagggtcttggatttgatgcctctctttttctgggtgccatcactagtggagaactaactcaccagtacttgcaaaggagagatgatccttggtttgcagctttggg

SEQ ID NO: 16156 - DNA, 568 bp, Glycine max
  unsure (1)..(568): unsure at all n locations
agagcctagggttctttttctcttctgctctcactccttgcaaatctcgcgtaacgcatgcgtttcttcactcaatcggagcccagcactgatctatttggaactcttcgaggtctgtggttttactgtactcaatttgataaattaaggcaaagacgatgaccaagaagaagaatcccctggtgtttatggatgtgtccatcgatggggatcctgttgaaaggatggtttttgagcttttctatgatgttgctcccaagactgcagaaaactttcgtgcattatgtacaggagaaaaaggtatcagtccaaatactggaaaatcactgcactacaagggttctttcttccatcagatcataaaaggttccattgtgcagggtggagattttgtcaatcgaaatggaactgctggagaaagcatatatggttcgaagttcccagatgagtcacctaagctaaagcatgatgctaccggacttttatcaatggcaattgcagaccgtgacacacttggttctcattntattatcactttgaaagctgatcatcatcttgataggaagca

SEQ ID NO: 16157 - DNA, 523 bp, Glycine max
  unsure (1)..(523): unsure at all n locations
tccttttcgtggttatcgacttgggttttaacctagggttcttattctcctgttttgctcactccttgcgaatctcgcgttacgcatgcgtttcttcttcgctttgtttattcaattggagcttagtactgatctatcgaaaactcaagtcctctgaggtctgtggttttactgttctaaattttgataaattaaggcaaagacgatgactaagaagaagaatcccctggtgtttatggatgtgtcgatcgatggggatcctgttgaaaggatggtttttgagcttttctatgatgttgctcccaagactgcagaaaactttcgtgcattatgtacaggagaaaaaggcatcagtccaaatactggaaaatcactgcactacaagggttctttcttccatcagatcataaaaggttccattgtgcagggtggagattttgtcaatcgaaatgggactgctggagaaaagcatatatggtctaaagttccagatgagtcacctangctaaagcatgatgctact

SEQ ID NO: 16158 - DNA, 558 bp, Glycine max
cggctcgagatttagcagaagactgatctgaggcatccaaactcatactacccatcagttctcaatttcttcaaagggcatgatgcatacaagccctaacacatgaaggttgtgctgcaccatccagagccattccagaggatcaatcaggttaacagtaaatttagagtatggctttacttgctgaagagaccattggcaaattcttgcagctactagtgcagagaaggataatgggcaataatctgtagttgtagggcgagccctggtacagtagttaagttgcgccttggtgaccgattggtcatgggttcaaatctggaaacaacttctttgtatatgcaaaagtaaagttgcgtacaatgatccacccccatacctttgcatggcgaggaaccttttggcaccaaggtacaatagttttaacgctcagtctgcagccacaaattcaaattttttcacctaaaagtttttgaaagtatgtgtatgagaattgtgctagtctttgtatattgtcttagtagaatagatgctcatggagttcagtcccttgagtta

SEQ ID NO: 16159 - DNA, 620 bp, Glycine max
acggtactctcgtgtcatctggaatgacttcctggtatggggcaagggttactcctgctcaaatttcgggatgcagagaagaatttgcagaacatggaagctatgatagaagcgatgacccctgaggagagggaaaagccagaactgttggcagaatcccctgtcaggaggaaaagggttgctcaggattcagggaaaacagagcagcaggtaagccaacttgtagctcaacttttccaaatgcgtgttcgtatgaagaacctgatgggtgtaatggaaagtggatcacttccaacacttagtaatcttgaggaagcgcttaaagcagaggaaaaggccccacctggcactgcaaggaggaggaagagatcggaatcaaggagtgtatttggggactcaacaccagcaaggccaagtcctcgtggttttgggagcaaaaattgaaaatccataaagggtttaacacaacaatataatgggaagtctggatcaacgggtcaccggtgatcaacttgtttgatttagcgttattcagctaaaataattctttgccatcattagagcaattcatatagctccaacttgtttgattcagctttcttcggctaaaagatatttac

SEQ ID NO: 16160 - DNA, 474 bp, Glycine max
gggccgacggacgcgtccgcccacgcgtccgagcttttctctttcctttttgactgcaaaactgaaaacggcgagctctgctactccccatcctcacgcatctccttactgagcgccagtttcaccgcctcgacgccaattgccttgccctcctcgtcgtctctgtcatcaaggccaaccgcacgctctatactgggcgatggtcctgccgacaccctttgtgaaagctcctaaaaattttacaattcttttgtttttgaaagaatttaaaattctaaatttatagttaaaaatatattccatgttaaaatgttaaaattttaaattctcttctatgagcatctaaaaagattattcacgcggaaaaaattttaaatcctctaaataattacttttcccattttaattccctcattcaaacataaaacaaatccaacttgtactgttttcactaatttttcccccactaatttt

SEQ ID NO: 16161 - DNA, 676 bp, Glycine max
cagataaataaaattcggagagatgaattatgaaagcagggttgttttttctggtgttagtgttaggtcgaatcttaatcctgtagctgatcgttttgtatccatgcttgctcagtgtggattttatcctctcctccataattttccaacaaaatctcaaacataataaataaaaattacatttttattcacaaaaatatcgggattcatcttgttctcattttgcccccttttttcttctgctctcccgaatcagaaaccctaatcattgtttgggatttcagaggaaagaaatttaaacagagcacgaagatgaagggtctcttcaagtccaagcctcgcactcctgcagatgtagtgcgccagaccagagatcttctgctctttgttgatcgcagccccgaaacccgcgaaagcaaacgtgaagagaagatgtccgagctatttaaaaatatcagggagctaaagtcaatcctgtatggaaatagtgaatctgaaccagtgtctgaagcctgtgcgcagttgactcaggagttctttaaggaggacacgttgcgactgcttatcaagtgtcttccaaaattgaatttggaggccagaaaagatgccactcaagttgttgcaaatttacaaaggcaacaggttcagtttaagttgattgcatctgattacctgg

SEQ ID NO: 16162 - DNA, 465 bp, Glycine max
catgaattatgaaagcagggttgttttttctggtgttagtgttagctctatgtatccatgcttcctctgtgtggattttcattttatcttctcctccttaattttccaacaaaatctcaaacataaataaattaaaaaataacatttttatttacaattaataaagatatcgggattcatcttgttcttattttgccccctttttcttctggtctcccgaatcagaaaccctaatcagtgtttgggatttcagataaagaaatttaaacagatgaagggtctcttcaagtctaagcctcgcgctcctgcagatgtagtgcgccagaccagagatcttctgctctttgttgatcgcagccccgaaacccgcgaaagcaaacgtgaggagaagatgtccgagctatttaaaaatatcagggagctaaagtcaatcctgtatggaaatagtgaatctgaaccagtctc

SEQ ID NO: 16163 - DNA, 437 bp, Glycine max
  unsure (1)..(437): unsure at all n locations
gggtaccaatgacttaaaacggggtaagggaggatgcggtaaagggcttaaaatgggaaggcgcccaactgtaactcaggcagaggaggaaataaaaaatgaagcanctgaagctgctgaattatgcaagctgcttatggatgattatggagctgacagaaagaaaaagaagaaagctaaagttatggtgggagaagcaagattggtaccgaaaatgcaatccaagttttcctttgacaatgctgaacaagttaagcaaataactaatactgtacaattagatggaactaatcactggaaagaggatgcaatcacagatcttagggaggaggaaaactttcccactaaaaaaagcaaatcactgaaggtcaataaagtcaagaagaatgatattacacctattagtatacccaataaaaaaatcaaattgaatatgg

SEQ ID NO: 16164 - DNA, 777 bp, Glycine max
caaacttcaaacctgacgttcgacattaaatctagttttcactcaaatcacttttcaaacagcgattataaaacttaccgaaatcatgttgtgtctgagactaccattgctacgccccaaaagcacttttcctccctctgacttttgctacaactactaccagtacaagcatatagttggaatggctcgattttcattggatgagatatcagacactggtgcctttgtgagatctgcttcaacattcagaaattggatttcgagggacccgaattcgctgtttccaccggaatcagggaggtatcatctctatgtatcatatgcttgtccttgggcttccaggtgccttgcttacttgaatatcaaaggacttgacaaagccatcagtttctcggctgtcaaacccatctttgagagaactagtgaatctgatgactataaggggtgggtttttcctgaatcagaaactgaggtgcctggagctgaacctgatatgttgaatggagcaaagactattagggaactttatgaaattgcaagtgaaaactatgccggaaagtacactgttccggttctgtgggataagaaactcaagacaattgttaacaacgagagctcagagataatccgcatgtttaatactgaattcaataatattgcacaaaaccccaccttggacttgtatcccactgatttaaaagcccaaattgatgataccaacgagtggatatacgatagtataaataatggtgtttataaatgtgggtttgcaaagaa

SEQ ID NO: 16165 - DNA, 1036 bp, Glycine max
tagagagagagtgagagatggcgtattgaatgggcgaagattttcacgctttgcttttgcctccaaattgatctctctctgtcacgagctttgatctgaagcgaacacttcctctgcgaacatggaagcaagtgcgggaatggttgccggttcgcataaacggaacgagctcgttcggattcgccacgattcttctgacagcgggtctaaacccatgaagaatttgaatgggcaaatctgtcaaatatgcggtgatactgttggattaactgctactggtgatgtgtttgttgcttgcaacgagtgtgctttccctgtgtgtcgtccttgttatgaatatgagcggaaggatgggaaccagtcttgtccacagtgcaagactagatacaagaggcacagagggagtcctcgagtggagggtgatgaagatgaagatgactctgatgatatcgagaatgagttcaattatgcccaaggaaaagccaaggccaggcgccagtgggaagatgacgctgacctggcgtcgtcttctagacgcgaatctcaacagccaattcccctcctcaccaatggccaaacgatgtctggtgagattccgtgtgccacacctgatactcaatctgtgcgaactacttcaggtcctttgggcccatctgaaaaggttcactcacttccctatgttgatccaaggcaaccagttccagtaagaattgtggacccatcaaaggacttgaattcttatggtctgggaaatgttgactggaaagaaagggttgaaggttggaagctcaagcaggagaaaaatatggtgcaaatgactggtagatacgctgaagggaaaggtggagatgttgaagggactggttctaatggagaagaacttcaaatggtagatgatgctcgacaacctatgagtcgtgttgtgccaattccttcatctcagctgacgccttatcgtgttgttatcatccctccgcttgattattcttggtttcttcttacatattcgtgtaactcaccctgtgaaagatgcata

SEQ ID NO: 16166 - DNA, 1775 bp, Glycine max
aataaaggctgcagcatcattcgctatgtgtgtgcggtgtaggttggtattatcctcctggggcttggatgaatgctacgtgtgaaggtgttgatgtttgatttgtggatgcataggatgcaataattctactgcttctaaatgaatataagtgtcgggtgtataaggggccttctactcccctcgcggtgctttcatctctagattagtactcacaccttataaaagagaaagaaaaagaataagagagtgatgaaagcggagatgaaggatggagctccaagttgtgctgaatgataatggtaactacggcaaattctcacacctacttgcttcccaagatcgtgattatcttctctctccaactggggctcaggtgaaagtttctgatcttgaagggagagtagtgggtctattattcgctgcgaattggtacccaccatgccgtggattcacccaaatcctagttggaatctacgaggagctgaaaagcagagtccctcaattggagattgtgtatgtgtcctctgatgaaaacttggatgcctttaatagcttctatggaaacatgccgtggcttgcaattccgttctctgatttggaaacaaagaagtctttgaccagaaagtttgacgtggaagccgttccgtgcttaattttgttgcaacctgatgatcgtaaagagcacgtaacagttcgtgacggggttgaacttattcaccgttacggaatccaagcttatccattcaggaacgagagcttggagcagctgcaaaaggaagacaaagtgaagcgtgataatcagactctcactaatttactagcaaaccaccatagagactatgttttgagtcacactcacacgggactcaaaaaggtacctgttgcttggctagtgggtaaaacaattggactctacttctcagcggaatggtgcgtcccatgcgccaagttcactcccaagctgatttccgtttacgagaagataaagcacgagctagccggaaagggagaggaagacttcgaagttgtgctaatatccagcgaccgcgaccaagcatcctttgactcctactacagcaccatgccttggttagccttacctttcggtgacccagaaatcaagaacctcgttagacactacaacgtgcaagggattccctggttggtgatcataggccctgatggtaaaacaataaccgtacatggcaggagtttgataaacttgtaccaagaaaatgcgtaccctttcaccaacgccaaagtggaggagctggagaaacagctggaggaagaggccaagggtcttccggcattggtgtatcatgaagggcaccgccatgatctgaatttggtgtctgatggaaatggtggagggccctttatctgctgcgtgtgtgatgaacaagggtctagctgggcctaccagtgtctccaatgtggctatgaagtgcacccaaagtgcgtcagaactgtggaacgcgatgacaatgtcttggtggacaccactggttgcttctaggatttaattaactaattcaattcctttggcaattaattctatgtcgtcctagagggcgatgacttgagtgcacaagggaagggactggaatgcccttaaattagttagatcacgtgtctttatgggtgcttttctacttgttcagaatatgtgactgacggtgataaaaagaaaaggagatacttggggaatcaactatttgattctccatagctttttttttataaaaaatagtgctgttactatgttcgtt

SEQ ID NO: 16167 - DNA, 419 bp, Glycine max
ttattgagaagtattattaagacattttcagtacatcttttctaactgtttttttcttcttcttcttctcttggtatttctagaaaaagttgtagaatatatccatgaatagaaatagaattttgggtgcacgcagttttatttgaactgcatgcagagaatcatggatcctgttccgcgtgacgggtgttgctcatgtacacaggtacctgtagcttccctagtgggtaaaacaattggactctacttctcagcggaatggtgcgtcccatgcgccaagttcactcccaagctgatttccgtttacgagaagataaagcacgagctacgccgaaaagggagaggaggacttcgaagttgtgctaatatccagcgaccgcgaccaagcatcctttgactcctactacagcaccatgcct

SEQ ID NO: 16168 - DNA, 385 bp, Glycine max
cctataagtgcgtcagaactgtggaacgtcatgacaataatgtctaggaattttttaattaaattcctgtggcaattaattctatatcctgtgttaccgtccaagaggggcgataacttgacttggctgtatcctaatctgcaccagggaagggactggaatgccctttagataaattagattacgtatctttatggtgcttttctacttgttcagaatatgtgtgactgagagtcataagaaggaaaggtgatacttggggaatcatctatttggttctccatagcttttaagaaaaactgttgttacttgttcgttatcaagtgtctttctataactaacaatgacaataaaatttatagtacgtactgtatttgatatgttt

SEQ ID NO: 16169 - DNA, 341 bp, Glycine max
gtgattagctgaaatttaacggtaatcactaatttttgtagatcccatatctaaattttagacaatattccagagcaaagtagagggttgtagaaggaagtttgagagcatttctcttgttttgaatttcttcgcttcttatttggcttgtagttatagaaaaacttgtagaatatcgagccttatatgaataggaatatatataatttgtggtgcacgcagttttatttgaactgcatgcagagaatcatggatcctgttccgggtgacgggtgttgctcatgtacacaggtacctgttgcttggctagtgggtaaaacaattggactctacttctcagc

SEQ ID NO: 16170 - DNA, 537 bp, Glycine max
cccacgcgtccgggaaaattagaatcaaatggcttaggattacctacatcaccgtgatcatcagatgttcagaaccgggtgttgcaggctgctgccaaacatgaatcccaaccatccgatagtgaaggtaaccaagatccagtacctgaaccgacagttcctctcaatcagaatgtatgagtcattccagattgtcatgtgctaacatgaaaattagaagagagattaatatggtcacagcaaatttaacttccatgattgaaagtttggaagttgacattatccaaacactgctgccacggactctgccctgcctgtaggcgttttgacaatatagaaagaaaaaaaaacatttcatgaggatgattatgtttgattttgttgcatgcatgccacgccaaaagggctgggtacaatttccactgtcaaaataataagaatgtatttgcgtgatgcaatttgtaccaaaaatttgtggtggttcaacttatagtattgcaaactaatccttcaataaactcattgctgttttggtct

SEQ ID NO: 16171 - DNA, 617 bp, Glycine max
cgtgcgggctggtcttggtatgcttagtcgaatttcaaaggggactacttatactccagcgaagttccctccaaagcctcttaaattatgggcatatgaggggtctcctttctgcaaacttgtacgtgaagtacttgtggaattggagctgccacacttgcttgtcagttgtgctaggggtagcccaaagagacatatactttatcagaaaactggaactttccaggcaccttttttggaagatccaaacactgggatagaaatgtttgaaagtgcagaaatcatagagtatctaagagcaacatacgctctttagtaagtgatgctatgatagggagaggcttgtaagggtttttaagtctcatgatatgcaccttcatttccttttgtaaatgtaattgctaatggttctaagttctaacgggtaaatcaaattttctctatatagaaatttcaaatagtggaatcaagtgcctcaatatttagcaatggtttgaggtggttaaaaatgtgggttgctaagtagggttctgtttcgttcttttaatttgggacccttttcaatttcattcatcatcactgcgcctacagctctaataactacataatagaccttg

SEQ ID NO: 16172 - DNA, 1084 bp, Glycine max
cttaagatgcgtccataacaatcctcagggaggacatcttccagattatgcaccacatcctgctattgtattgaagatggaagatggcactggtctacttctccctataattgttttggagatgccaagtgttctgctaatggcagcaatacgcaatgttcccatagctagacctactttgtatcaagtagtgaaggagatgattgacaagatgggttacgaagtcaaatttgtcagagtaaccaggagagttcatgaggcatactttgctcagttatatcttaccaaggttggaaatgacgcagaatatgtgagctttgatcttcgaccttcagatgctatcaatattgcagtaagatgcaaggttcctatacaagtcaacaagtacttggcatacagtgatggtatgagagtaattgaatcaggcaaattgtcaacacagttccctggtatggatggccgactattcactgaaatggaccggccaagtggtcaaccttgtgccgagaccacggagtttaatcttttacacaatatgttgaaagctgttgttgaagaacgctataaagatgctgctttgttcagggaccaacttaatcaacttagggcgggaaaaaacatgaaaaacagattctgaatgctttaattgtaaaaatacaatcttacattagaatgtcgatgggggttcggtacagctgagctgattgcagtcatgtctctcccttcctcggtctatatatgcttacattgtctgtgaatatttgtatatatttataaacattaatgctaatgcaatcatgtggaacttttcactgcttttctgagacttgtttcaatcttaaaaagctgttaatatgtaatgtgttcttctatccatgggatgcagtatgcgactgatggatgtgtttcgctgtattattaaaaatatttgggatgattagataaaatgctgtaaatatattacttggttctcagttatttgtgcatttgtttttttttaggtagactagctaataggagaacttttatatgtatttgtactcaaataaccattcagtgcttattcaattcgattcttccactg

SEQ ID NO: 16173 - DNA, 514 bp, Glycine max
gaattacatacatacattattcactgaatagaaatctaaaagtctttggatttgggttcggatctgttccaaatttccaatatatttttgagagaggcagaagaagaagaagaaaagatggtgggaccagtgagacctcagtttgtgctctttggttcttccattgttcagctcagttactctctccaaggttggggcgctattcttgctcatttgtatgctcgcaaggcggatataattctgcgaggatactctggttggaattcaaggcgtgctgtgcaagttctggatgaaattttccctaagaacgccactgagcaaccagatttggtaattgtgtactttggtggtaatgattctcttcttccacatccaagtggtcttggtcaacatgtacctctccaagaatacattgaaaatatgagaaagattggtacccatctaaagagcctttcaaagaagactcgccttatatttctcagtgctcctcctgtcaatgaggcacaaatttatg

SEQ ID NO: 16174 - DNA, 1253 bp, Glycine max
cttttatagtgattggcataaacacagctttcagtagcaggaagaggcgtgattccgttagagagacttggatgcctcaaggtgaacaacttctccaattggagcgggagaagggaattgttatcagattcatgattggtcacagtgcaacttccaacagcattctagatcgagctattgattcagaagaagctcagcacaaagacttccttcgcctagaacatcttgaagggtatcatgagctgtctgcaaagacaaagattttcttttccactgctgtttcaatgtgggatgctgatttctatgtcaaggtggatgatgatgtccatgtcaatttaggtgtcctggcaacaacccttgctcgtcatctatcaaaacccagggtctacattgggtgtatgaaatctggacctgtcctttctagaaaggatgtcaaataccatgaacctgagttttggaagtttggagaagaggggaacaaatacttccgacatgcaactgggcagatatatgcaatctcaaaggatttggccacttacatttccatcaaccagccgattttgcataaatatgctaatgaagatgtctcgcttggtgcatggttcattggtcttgaagttgagcatattgatgaccgcaatatgtgttgtggaactcctccagactgtgagtggaaggcacaggccggtaacgtatgtgttgcatcatttgattggagctgcagtggaatttgcaagtcagtggagaagattaaatatgtccactcaaagtgtggtgaaggagatgaagctgtttggagtgctttattttagattgtttcaaagggagatggttttttctggttcggagagggactgattatttaattgcagctgggacaaagtcaattttcagatttgagatgaagcaaatagatataacatgaaaagatctcgtaactgttcaaaactggttaagcaaggctggttgatcaatttttgtggaagctgaagttggcaattgcatggatgtggatctgagtatatagatatattgactataccttccaagcctgttctattcttagtgtgggaggtatgataactattcttggtgttattgtaacaaagtctgttctagttttgtaattccttttatatgctatttttttttcatagttggggtgagattggttattatgccctttgtaacgagaaaaacaatgtatttatagttttgctgacgcgttaaattggtcccccctttttggtggt

SEQ ID NO: 16175 - DNA, 564 bp, Glycine max
gtagatcgctgtgagaaacacaacaaacgctgccgcaacgcaaccgtttcgaaagcactcactgactcagtttgtttctcgtttcgtcgaacccttggaaggcacaatgggagggaggaagaagaagttcatcgacaagaagaactctgctactttccaactcatcgctcgcgacacctccgacccttccttctcccaatccgaccgtgtcttcgtccgcgtcgacaacaaccccgtttccttccccgtcgccgacgactccgctttcgatgactcccccgacgactactactacgacgacggcggcggcggagttagcggtggtcccttgccggagggcgtgaggagggagattctggagctagggtttccggatgatggctataactacttgaatcacttgagggaaatcaaaaacaccggcgctggtgctgctttctttcacaaccccaagttcaagcttcaacacctccctcgcgatgttaaggcatatgatgcttcgagattgcaaatttctgaggcggatggagaggctgtggagaacactatatacagtgttgcgtc

SEQ ID NO: 16176 - DNA, 650 bp, Glycine max
gttattagattgaaagagctgtcaaccaggagctatgttagtacaggatttccaaattggtttgcactttgaagattaatcaatatcgggggagtaatagtttgtacgtcaaaagtatcatcagaaattccagccactgaatgcctccaaatattctagctttgaataaggagactaggaaattggtgaaggtcgtcaaactcaaattttcttgtgtccatggaaaagatacattgcacgatgaccaatgtcctcctggtgcctttgaaagtccttgagtgcaggtggttaatgagatgcagattagctacttgctatcctgggagatgcatgcttattctaaattgttttaaacattagtttatgtacagctaaatttgtaacaggattatgggcattgcttttatcgggaattcactgacttattaattccagagcttacatcatgcaagtacatttctaaaatttcaaatttgttttcttctaaaactgtgaattcatgatacttctaacttctttggggctctcttcagctatctgaatccatgtaaatactctataattattttctaaacccaaattttattcatgggtgtagacgtctgaattatttgtcagataagatatttaacaaaaaaaaaaaaaaatat

SEQ ID NO: 16177 - DNA, 1324 bp, Glycine max
ggttatcggataattcatcattgaatgtggtgtccttaagcttgaggaactgtcaatcttgccaacgtttgcctccccttggacttttgccatttctgaaggagctttcaattgacggccttgatgggattgtgagtattaatgctgattttttcgggagtagctcttgttcatttacatccttggaatctttgaggttctccagtatgaaggaatgggaagaatgggaatgtaaaggtgtgacaggtgcttttccacgtcttcaacgtctttctatggagtgttgtcccaagctgaaagggcacttgccagagcaactatgtcatttaaattatctaaagatttctgggtgccaacaacttgtaccttctgctctcagtgcccctgatattcatcaattatacctagcagactgtgaagagctgcaaattgatcatccaacaactttgaaagagcttaccattgaaggtcacaacgtggaggcagccttactcgaacagattgggcgcaattactcttgttcaaataacaatattcccatgcacagttgctatgatttccttctaagcttggacatcaatggtggctgcgactctctaacgacctttccgctagatatcttcccaatactcaggaagatttttatcaggaagtgtcctaatctaaagaggatttcacaggggcaggctcataatcatctccagagtcttggtatgagagagtgcccccaattagaatcattgcctgaaggaatgcatgtcctccttccatctcttcatgatctgtgcataattgattgtccaaaagttgaaatgtttcccgaaggaggtttgccatcaaatttaaaagatatgggtctctttggtggtagttacaaacttatctccttattgaaaagtgccttgggaggcaatcactctctagaaagcttagttattggaggagtggatgttgagtgtcttcctgacgaaggtgtactgccacactctcttgtttatctagagatcaggaagtgtggagatctaaaaagactggactacaaaggtctctgccacctctcctctctcaaggaattgcttcttgttggctgccccacgctcgaatgcttaccagaggagggtctgcccaaatccatttcaactttgtggattatcaattgtccgttgctcaaacaacgttgccgggaacccgaaggcgaatactgtccaaagattgctcacattaaacgcgtgtcggtattagattgaaagagctgtcaaccacgagctatgttagtacatgatttccaaattggtttgtactttgaagattaatcaatatcggg

SEQ ID NO: 16178 - DNA, 367 bp, Glycine max
aaaagactggactacaaaggtctctgccacctcacctctctcaagacattgcatcttgttaactgccccaggctccaatgcttaccagaggagggtctgcccaaatccatttcaactttgtggacttacaattgtccgttgctcaaacaacgttgccgggaacccgaaggcgaagactggccaaagattgctcccattaaacgcgtgtcgttacccggtggttaatgagatgcagattagctccttgctatcctgggagatgcatgcttattctacattgttttaaacattagtttatgtacagctaaatttgtaacaggattatgggcattgcttttatcgggaattcactgacccgcccatttct

SEQ ID NO: 16179 - DNA, 470 bp, Glycine max
ggacggcccgggccgaccgacgcgtacgcttaaaacgacgttgttttgatgggacaacacgggaacagcacgaaaaaggatgacagagaagtccatttcatcatttttagcgaacatattggagttcgtatattatagtggagctgttactacggtgcaccagctatgcaagtggtttattatggaccacttttatataccgtaagattaatctcatcgacacacttacatggtgtcaacaccaattttttggctctttctttctctggttccccctcatccatgggttcacactttctgaggaaggaggaaacatcctgcgagcatgtcctccactggatgttccctggcagtgcaccactggcgaacaagaacaccttgactactttaccaccattcatcgtcgtgtacgaaaggtcaaccggttggctatgacattcccaaggttgatgtttgaattcggcgccact

SEQ ID NO: 16180 - DNA, 1253 bp, Glycine max
tctttatgacggttggaatgtcaattgatccaaaactttttgtttcaaacttcccagtcattacgggcacactaggactcttaatatgtggcaagactatcttggtttgtttgataggtagaatgtttgggatttcactcatttctgccatcagagttggtctacttcttgctcctggtggggagtttgcatttgtggcttttggtgaagctgttaatcagggcataatgtcttcccagctgtcctctttactgtttcttgttgtgggaatttcaatggctctcactccatggctagctgaaggaggtcagctccttgcttcccgttttgagttacacgatgttcgaagtttattacctgtggaaagtgagacagatgatctgcaaaatcatatcattatttgtggatttgggcgagttgggcagatcattgcacaacttctttctgagcaacttattccatttgttgcactagacgtgagaagtgatagagtggcagttgggcgtgccctggatctccctgtgtactttggagatgctggtagtcgagaggtcctacacaaggttggggctgaaagggcatgtgctgcagcaataactcttgatacccctggtgcaaattatagaacagtttgggctttgagcaagtacttcccaaatgtgaagacttttgttcgtgcccatgatgttgatcatggattgaatttagaaaaggctggagctactgctgttgtcccagagaccttggaaccaagtcttcaactagcagctgccgtgcttgctcaggctaaacttcctacatcagagattgcagcgactataaatgaattcagatcccgccatctgtctgagctcactgaactatccgaaacaaatggaacttcttttggatatggatataatagaactacgagcaaagccaaatctcattccccagattcatcagatgatactcaagtctctgaaggtaaactggcgacatgaagattgccccatatatacaaagtggaaggtaaaagaaaacagaaaagtgaaaaattgtatagcagcagagtaaatgttccatcatgatgtacagaaatatatatatctgcataaaaaaatttgattaatcatccttaaatttcagctgaggatggtgtccttgttttatgtaacattgattttgtttcatattctttggatttcgaaaagcgtgtataatatgaagtcatatttccattttttttatcaagagtatgacatccctgaaca

SEQ ID NO: 16181 - DNA, 549 bp, Glycine max
ctttgatgaattttaatatttgacgctgtggtacaaatttttgaagtcactgtcgcttttgcaatagagatggaagagaattctgctctggaacaccattgttactaccctcttcctgcttctgctgcaaaagctgatcatcccaatcataatgatggtgaaaaagaagaaacttgtgcagaggaaggtagctctcaacatcagcctaacacatcacagaattgtgtttcataccaaagcaataagcctcgcctcaacagatatgcacttggtggtgctatcttggcttccacaaactccatcctcttaggctatgatattggggtcatgagtggtgcttctcttttaataaggcaagatctaaagatcacatcagtccaagtagaaatccttgttgggtgcttaaatgtgtgttccctgataggatctcttgcttcaggcaagacctctgattggattgggagaaggtacaccataatggttgctgcagcaacattcctgattggtgctattctgatgggtttggccccttcattcacattcctaatg

SEQ ID NO: 16182 - DNA, 975 bp, Glycine max
  unsure (1)..(975): unsure at all n locations
ccctctcgtctcttcacgcgtccgcccacgcgtccgcggacgcgtgggtttattttctcctctgttattatcggagaagagaactggatcgattgaagaagagagtggaaaatggagctcgtatcagtatgtgggtggaaccggttctgtgaggccaacttcttcattggctggaactgaggtgagtgtggatgaaattcgatctgctgctgctgcttctggttactatcccccttcccttcatggagccttggttggttcacctgagcctgatcctacagagcaagctcttgtttatcagggtggatatggaggagattatggtggacccacaccccaattccagaggaaaatcttggatgaagtggagatacgagagttgctcattgatcatgttggtcatcgttgctgttggggcggtcgtcctgctcgaacatggaggattcatgcagtggaagactgtaatgtatatgtaggaactctggatacatttatagaggaaagagaaatcataagagagacagaaccataccttggtggcagtattgacggaaaggataatggacctgaacttggtatttgggaattggatctaagatctcagttccctgttctatttgaaccctataaagaagtgcgggaaaagattccccattctgaagttatagaaaagtgcacagtttgtgcatgacggggaagtacagtctgtgctacatgcaatgcagaccaagaacctggattttataaggaaaatcagatgactcagtgtgcaacttgttatggaaggggtttaatcgctcataaagatggttctgacactgtatgtgtgaaatgtaatggcttgggaaagtattccttgtgtaacatgtggatctcgtggactaattcagtgtgcaacatgtaatggaagtggttctcttctagcacgcaatctggccattattcgatgnnnnnnnnnnnnnnnnnnnnnnnnnn

SEQ ID NO: 16183 - DNA, 553 bp, Glycine max
gaaggtcttggtcttgtttctttcgtttctttgtttctctttctctagctagctaagtccgttcgtgatcgaaaagagaaaaagatcatggaagaaagtctagtaaaaaaacatgaagaagatagagtagtaagatggggtgtttatagtgaagaaatgagaaggatctgtgaaatagcagggcctatggtggcagtggtttcttcccaatatttgttgcaagttgtctcaaccatgatagttggtcatttgggtgaactctatctctctagcgcagccttagccatttccctatcaggggtcactggtttcagtcttcatatgggaatggctagtggactggaaacaatttgtggacaggcttatggagctcaacaatatcaaagaattggaatgcaaacatacactgctatattctctctcatattggtttctattcccgtgtctatcctttggatcaacatggaaagcatactagttttcataggccaggaccctctaatttcgcatgaagcagggaagttcacaatttggcttgttcagcactttttgc

SEQ ID NO: 16184 - DNA, 485 bp, Glycine max
  unsure (1)..(485): unsure at all n locations
tcgcgttctccaccctcaaccttgtgttacctccgatagtaataaccagcgttcgtccacaaaatgtctcgaaacggcgacgtagtggaacagaacgcggccccctccaccacctcgtcgtcgaccactataagaaacagagcagacccgttcctggtagcgtgcaggtgcttcagcttcctcacctctctcgccgccattctctgcatcgccgtcaacgtcctctccgccgtccgttccttcaaacacgcatctgacattttcgacggcatattccggtgttacgcggtcctcgtggcggctttcgtggtcctcgccgagaccgaatggagtttcatcataaagttctcgaaggttttggagtattgggctgccaggggtatgctgcagatctttgctgcagtcatgacaagggcatttcctggctatattgnggaccggagggacctttntcttctacagagcatagcaagttatttgctact

SEQ ID NO: 16185 - DNA, 757 bp, Glycine max
gatgactgcatgtacatccatcaagatccacattaagcaagttattcttagattcagaacaggaatattggtgagtgaagaagaattaagaagagaagcaagaatagtgtcataggatgtatgtgactaggcctttgtctctgtataagaaatctgcagatgctctctcattgcctccacctgagggccccaattctggtattttggtgatccaagatgaagatttggtgccaacctcttgttttgggttgggagagttccatgaagtgaaggagttgcctttccctcaaaatctaaaccttgagttgttctatagatcaggcatttcactgaatagaaccactcactaccaccatgttgccttcattccagttcttaaccagcccttgtcttccaacaaatactatgtgataaatctcagtgggaaaaaaagaggggaggcatacattaactcaaagggggaagatttggacacattctgtttctacaatgctgtatctgatgtaccactacatccaatagttatcaatgacacatatcaagagtttgagatatttcctagaagaagcaaagttactttcaggagtggtttttcagctaaatctgttgccccagatgggataccctccaagatttttgagtacaaggtggaaagtgagtgcttcaacttcaagtgattctagcctaggagaagcatcaggtgtgaatgaaaccctccgtgccagcaagccagagttccaattctccttagcaaaaa

SEQ ID NO: 16186 - DNA, 649 bp, Glycine max
tcccaaacctttccctcagcaacggaatccaccaaactctcgcatcaatcttcgtttctttagagagagagagagagagagagagcgcggtgtcggaatcgtgttctccgattgcaccggtggttcgatttatggtcgtcggagaatcgccgatctcgctgagagtttcgaatcgcaccggtgaccggaggagatggtgaattccatggtggaacgcgccacgagcgacatgctcatagggcctgattgggccatgaacatcgagatctgcgacatgctcaatcatgaccctgggcaagcaaaggatgttgttaaaggtataaagaagcggattggaagtaaaaattcaaaagttcaacttcttgcactaactttgttggagacaatcataaagaactgtggagatattgttcacatgcatgttgcagaaagagatgtgcttcatgagatggtgaaaatagtaaagaaaaagcctgattttcatgtcaaagagaagatactggtgcttgtagatacttggcaagaagcttttggaggcccaagggcaagatatccacaatattatgctgcttaccaggaactgttgcgtgctggggcagtattccctcagaggtctgaacaatctgcacctgttttcacacctccacaa

SEQ ID NO: 16187 - DNA, 420 bp, Glycine max
agctatcaaactcacttagccggcacaaaaacaacttaatagaaaatgccttccaagaggcttcaatggagatccttagtacttggttgtttcaaggccaccaagaaccaatccttggaatctccaaacatagtttccaagaagtcatcttcaagtagaatcttcctttctgatttaagcctaagcgattattcatcagtttctatcatgagtgatttatccaattctcttgtgggatcaaatcttcgtattttcacctaccaggagctctctgaggttacacacaacttcagcaaatccaactatcttggggaaggtgggtttgggaaggtgtataaaggatttattgatgacaatcttaaacgtggattgaaagctcaaactgtggcagttaaggccttaaacttggatggaaaacaa

SEQ ID NO: 16188 - DNA, 694 bp, Glycine max
tcggataaactaattctttgggtcattctttcccactttctaccacagagactagtgatcgattaagcaacttaacacagaattgcatatatgggaaacacttgtgcaccaactcaatacgcaagcaaaggcggaaaccatagttggcaatccacggtgaacatagttcacttagatggaaagttgcaacaattgaaggagtcaattaaggcatggcaagtgttgtctgagaacccaaactgctacatatgctgctcagaatccatgtatgttgggtcaccgatgcctcctttggctccaagtgaagagcttcaattgggtctcatatacttccttggtccaattcccaaatcacgaatcccactttctctgcaggacttgggagcactagccatcaaggctaatgcagctcttgctgctgcaacacctaattatagctaccctatcttaaaacccaattcacaaaaaaagttccgtacgcaccctactctttctaacgtttctctggtgtattcccattagattttgaagatgggtttaaaggttgaatgtgtgatattttcacccatgttgtaaaagctgtggatgatggtgaagtcaagggatctaactcatttgattgagtaaaatgccatgaagttatataaactccctgcactatattccatttggaccgattaaaaaaaaaaaggac

SEQ ID NO: 16189 - DNA, 785 bp, Glycine max
cccaaacacaaacatcatagtatatagtatctatctaaagtaaataatcatggcacgggagaaccctcttgttattggtggtgtgattggggatgttctcaacccttttacaagctccgtttctttgactgtttcaatcaataatagggcgattagcaatggcttggaactcaggccctctcaagttgttaatcgccctagggttactgttggtggtgaagacctaaggaccttctacactctggttatggtggatgcagatgcacctagccctagcaaccctgtcttgagggaataccttcactggatggtgacagatattccagctaccacaaatgcaagctttgggagagaggttgtgttttatgagagcccgaacccttcagtagggattcatcgaatcgtgttcgtattgttccagcaattgggcagagacactgtcatcaccccagaatggcgccataatttcaattccagaaactttgctgaaattaataaccttgcacctgttgcagcagcttatgccaactgccaaagagagcgtggttgccgtggaaggagatattaacaagttcaattaatgaagattcttggatgccttactccagcttatactttagagaaataaagacagaagagagaaaaatatatatagtaccttaagtaatatgatgtaataaaaggaaagataaataatgataataataataatgataataataataatagatgcttagtgtcatagaatagtagcactatcatcaaataagttagaagagtaatgg

SEQ ID NO: 16190 - DNA, 746 bp, Glycine max
tgctgctgctgctgctgctgcatcaactccttattcttcatacatgtccactgtggctgttacaccaatggctcaatctcatcgcatgaaaaaggctccttcaaatctgggggatgatcctttaaaaatgtcagttatgcagcgtcacaaactaatggtgcactcagtgttgctggtggtctttcaaatgtcaaaattttgagtaaatctaaggtttctcgggaaatggacggccctgaaagtagggttgtgcagtcttctgtacaattacctgttggcaatggtggaagcattgacaaatcaagtatgagcagtgcccaaatctcaggctcagcaaatggaaggctagtctcaagctttgcttctaaacagcagaccagggcaactggtgctgtgtacccttctcaaagataggaagatggaagggcgtgttagattatcctgtctcaccaggatgcggatgaaaacatacaagattatttatcgggtttgtgggagaatgttttttgaagcattgacggagtaatcttgtgccctgggcaaaatgtgattttaagttgccggtgctatctccatctccagtttctgtagtagtttatttctcccagctgttacaattcagtgtgctttcattaatgtgggcctcttgctgtggtattcttgctgcatacattgcatctgataaactgcgatttttttatgaatgcttgaaagattaatcagcatggttaaccttttcagtttgc

SEQ ID NO: 16191 - DNA, 559 bp, Glycine max
  unsure (1)..(559): unsure at all n locations
atcgagccgctcgactcgctcgagccggtttttataagtttgattgccaaatcaatatccatggcttcggaggacagaaacgaagaagagcttcacgttctattggtggcattctctgcccaaggtcacatcaaccctttgcttaggcttggcaaaaaactactaagcagaggcctccacgtcaccctcgccaccaccgaattagtttaccaccgcgtcttcaagtcctccgccgccacccccaccgccaccgtccccacttcaatcaccaccaacggaatccaagtgctattcttctccgacggcttcggaaccggcctagacaacaagaccatcacccccgaccaatacatggaactcataggaaaatttggtcccatcagcctctccaacatcatcaaagaccacttccttaacggttcccaaaaactcgtttgcatcatcaacaacccctttgtcccatgggttgcagatgtagctgccaacttcaacatcccatgcgcatgtctctggatccaaccctgtgctctctacgccatatactaccgnttctacaaca

SEQ ID NO: 16192 - DNA, 501 bp, Glycine max
accccatctgatcttgttttaattattgatgagaaacctcatggtgtcttcaaaagggatggcaatgatcttgttgtcacacagaagatatctcttgttgaagctctgactagttacacaggacagctgacgacacttgatgggaggaatcttacagtctccaccaactccgtcattagtccgatatacgaagaagttattaaaggagagggtatgccaattcccaaggaaccttccaaaaagggaaacttgaggatcaagttcaatatcaagttcccctctagactcacatccgagcagaaaactggcattaaacgattattgacatcttaaactctggtgatgcctctccttatcacataccgaatcgtgtaagattggaattattttttcaaatgtaaattctttccctttgcgagatggttttcagttagaacagtctattggacgtttgatatttgtttgctccttcatatttatgtagtttctggtcttgatgcc

SEQ ID NO: 16193 - DNA, 961 bp, Glycine max
cccacgcgtccgcccacgcgtccgcagtctccactttctgagaagagggccaaattagagttagattattagggtttaaccgttcctccccttccttttcaccataatcaacatcaacctcttccaaatcccaatggatccgaccaagaagcgcaagctcgacgagaacggcttcatcaacaacgactcctccgagcccctcaagctctccccctccgacgcccgcaagctcatcgagcgcttcaccactgaccagctcctcgacatcctccaggacacggtggcgcgccaccccgacgtcctcgctgccgtgcgcgctgtctcagaccccgacgtctcccagcgtaagctcttcatccgcggcctcggctgggacaccaccaccgacggcctccgctccctcttctccacctacggcgacctcgaggaggccgtcgtcatactcgacaaggccaccggcaagtctaagggctacggcttcgtcaccttccgccacgttgacggcgcgctcctcgccctccgcgagcccagcaagcgcatcgacggccgcgtcaccgtcacgcagctcgccgccgccggaaactctgcgttgaacgccaacgccgtcgacgtggctctccgtaagatctacgtcgccaacgtgccgccagacctccccgcggacaagcttcttgcacacttctccgtctacggtgaaatcgaagaaggaccgttagggtttgataaacagactggaaaatcgaaagggtttgctttgtttgtttacaagtctccagagggggcaaaggctgcgttgatagatccaatgaagactgtggaagggaggcagttgagttgtaagttggcgattactgatgggaagcaagggaagcggtccgggccggactcgggccaggcccatcatgggaatgttcaccacattcccagaaacatcctcaacaacacatccgaaaacaaacac

SEQ ID NO: 16194 - DNA, 749 bp, Glycine max
ctcgagccgggctgaagtggaggcaatggagtcacttgggggcttggaatctcccacttctatcatgaaatgtggtgaggagttgactgacggttctataactgattgtcttagttttgcagatgcgcttagcccaatgcttgacgcaggtaagggtgatgcactaagctcctcaggtgatttacacttaccatctcaaaccacaacaccagatgacccattaaagcaagcagatgtacatcatcatcctcaaaaaatatctggggagcattcaacaaagagttgagaagttgagtctactttctctaagattagctggaacccaaccattcaatattcctgggatcctcctaattgttgacatgacagattatgttgcagggggccatttttcttatctttaggctaaacatatcttagacaaacttgatttggatagatattatcctgtttataacagcattctttgcaaacagtaacctctcgccttcattgtttgcttgttgatgaagaaaagaaacagtgttagggttcttcgtagtcttgtctattctatgtaatctcatctcattgaattttaaatgtgaagaactttcttaggtttcattgttggacagatccgtattcgtctttccttcaaaatttcgaagaaattaataatttccgggatgtatatctgttcttcgagatctttagattgaattgtgcaaatatagtaccaacatcccaccggtagttgcacgagtagg

SEQ ID NO: 16195 - DNA, 802 bp, Glycine max
cattagatgctggggaatgggtttgggcctagggtttagagttgtttctctttctcctggtttcagaaaattgtctgttgatcacattgtttcagcttacaaaagaaccggtagaagagccatatttcttgattatgatggtactatcgtaccaaaatcttctataaataagacccccagccctgaagtcatatccatgctaaatgatatgtgcaatgatcctaaaaatactgtgttcattgtgagtggaaggggaagagattctttaagtgattggtttacttcatgcaaaatgattggacttgcagccgaacacggatactttctaaggtggagtaaagattctgaatgggaaaccagtcccttgtctcctgatcttgattggaaaaagattgtggaacctgtcatgcagttgtatacagaggcaactgatggatctaatattgaaactaaggaaagtgctttggtctggcatcatcaagatgcagaccctgattttggctcatgccaagccaaagaattgttaaatcatctggaaagtgtccttgctaatgaacctgcagttgttatcaggggccagcatattgttgaagtcaagccacagggattaaacaagggattggtggctgaaaaggttctttccactatggttaatgatggcaatccaccagattttgtgatgtgtgtgggagatgacatttccgatgaagacatgtttgagagcatattaaggacagtttcatgcccttcattgccagtagttccagagatctttgcctgcactgtaggtcagaaacctagc

SEQ ID NO: 16196 - DNA, 685 bp, Glycine max
atccccacaaacactttcacctccgcaagaagcttcaacaaaacgacatcgtcgactgcgcggccgcacctcaattacctcgactccgtagaatcctcgtcgttctcccgcaacaccaactcttgggacgatcccttcgcaccagcgtccagattcgtgctcagatccacgctctcctcgctctagtcctctatctaccgcctgcactctgagcgctttctaaccctcaccgctccatcattgccaaaaccaactagctctccaacctccaccacaccaccaagctcctccagcactccatcagcgaccgcatggccaccgtcaactccgaaaaactccatctcgccaaggccccctaactccaattcgagatcctaatggtgtaagaatattcaactgttgcatgaaccgcgaacccaaaatcgaacctgcgtcgggggtactgcaaaccgatcaacaaacccaaacttgggagctaaaaacctagatctaaaaaatcaggttgcagttatggtgcgtgacaggtttggagaagcaaccgcagtcaaagatgacgaatgcgcggtctcgacggtcctcttgtggtgtgtggcctccatgcgctctatgaacttggactcgttggagaagtcgaggtagtcacaccccacggcggcgcatgcgaccatgacgggctcgctgtgga

SEQ ID NO: 16197 - DNA, 1921 bp, Glycine max
accggtccggaattcccgggtcggaccaagccgtccgccaacccttcctaccggttgcaaaaaaactcattagggtggaacagcctaaccggctggatgggatcaaccccatgatcaaggccattatgaaggcgattaagatggggattgaaccgattcctgtgcatagtgggcttggaggtgcttactatttcagaaacagtaagggggaaagtgttgcaattgtgaagccaaccgatgaggagccttttgccccaaataacccgaaaggttttgttggcaaggcgcttgggcagcctgggctgaagcgatctgttcgggtcggggagactgggtttagagaggttgctgcttatcttcttgactatgatcattttgccaacgtgcctcctactgcattggtgaagatcacacactcggtgttcaatgtgaatgatggtgtcaatgggaacaatttatggcggaagaggctgtttagcaagattgcgtctttccagcagtttattcctcatgattttgatgccagtgatcatgggacatcgagtttcccggttgcttctgtgcatcgtatagggattttggacattaggattcttaacaccgataggcatgctgggaacttgttggttaggaaacttgatggcattgggagttttggtcaggtggagttgattcccattgatcatgggctctgcctgcctgaaactttggaggatccatattttgaatggattcattggccacaggcttccattccgttctcagaggatgagcttgcctacattgaagatcttgacccttatcgggattgtgagatgctgagaatggaactgccgatgatccgagaggcgtgtctcagagtcttggtgctgtgcactattttcctcaaggaggctgcggcttatggcctttgcctcgctgaaattggtgagatgatgactagggagttccgcagggtgaggaggagcccagtgaacttgaagttgtttgtttggaggcaaggaagatagtggcggagagggacagggaggaactgtctcccggggctgagatgagagatgatgagtttctgtttgatatagattattatgatgaagttggatcagattttacgccaaagatggcaatagatgaccccttaaccagagcaacttttcagcctgctcttgggaatgggcatgctcgtaacccgctttccaaattggatgaatgcattgaggaggaagaggaggaagctgagggagaatctccaaagggatttgttacttcttccactgaagaaaaaatcccatctgtttcagaactttccgtgtcactgaaaaataccatgttagatgggaaaaaccagaatcagcagaaatatggaggaaaggtggataatggccattttgcaaatacatcatctggtcataagagtgccaatgagcagcttcctccaagcataagctttgtggatgtgacagaaatgaccgaggatgaatggtcaaattttctggagaagtttcaagagctgctgtatccggcatttgctaagaggaaatccataaccttaggtcagaggcagagtcagaggcttggtacttcctgccagttttgaagttgagcgatatgttggtatgatagagaggactataggatgaagaagaataaggtttgtaggtttcagggaatgaatgaagggttgttaagatagttctggtctatgaaatttggatgagtgcaacgtagaaaaacctgctgtaaatatgcttggcatcagctaagtggtgagccgattagttgtttgtattttgatttcatgatttcatttcttctttcccccttctctttgtaggataaaattgtgccatgaaatttgtgtatatagtgaaatggcatgtgcccttttcttttctccacttaaattggtttctgccaatgt

SEQ ID NO: 16198 - DNA, 248 bp, Glycine max
ctcctccacgccgtgtctgtcgtcgcaagggagggcacattgatactagtcgacctatcgagatattgggacagtctaacccgcttgatgggatcaagcacatcatcaaggacattatgaaggcgattaacatggggattgaaccgattcctgtgcatagtgggcttggaggtgacttactatttcagaaacagtaagggggtcagtgctgcaattgtgaaaccaaccgatgaggagccttttgcccc

SEQ ID NO: 16199 - DNA, 544 bp, Glycine max
cccacgcgtccgggggtaatagcctgattggtgctcttccacatgcccactactacccattggataaggaagaaaactactggtttttgcttgcggattctgtttcaaacaacgtgtggttttctcagaaggttagtttcatggatgaagctgctgctgtaactgctgcatctaaggcaattgaggagtctatggaggggtcaggagcaaatgtgaaggagaccagtaaggtagttgcagaagcagttgagaaggtgaaagggggctctagattagtattgggcaagttccaggccccatcagagggtaactacaatttgacttgctattgtttgtgtgattcttggttgggctgtgacagaaggacaaatttaaagctcaaagttttgaaacggactcgggctggcaccagggctgctgttttggctgatgaaggacctatcatggaggatggagttgaggaggatgaggacaacgaggatgaagagtatgatgatgactatgagagtgagtacagtgaagatgaagaagatggccagaacac

SEQ ID NO: 16200 - DNA, 482 bp, Glycine max
ctgccacccaaacccagagagaatagaaccacctccagagaaaaatattcaaagatgtccagcgttaaggagttagttgaatctaagtgtctgagttctgttccctccaactacatttgccttgaaaatcccgaagattctatattgaattatgaaacagataatattccaaccattgatttttcccaactcacctcttctaatcccagtgtacgctccaaggcaatcaaacaactaggagatgcttgccgcgattggggtttctttatgctaatcaatcacggtgtgtcggagatactaagggatgaggtgattaggacaagccagggcttttttgatctgactgagaaagaaaaaatggagcacgcaagaaggaacctatttgatccaataagatatgggacaagcttcaatgtcacggtggacaagacccttttctggagagattatctcaaatgtcatgttcaccctcactttaatgc

SEQ ID NO: 16201 - DNA, 518 bp, Glycine max
gcgacaggtcttgttggaaaattccgaccatctattcctcttagtctggaagaacttgacagataaggaatatgggactttaatcgcctaagtcgcccatatattaagcgggaattattgcaggaaaaatttggtgatgcttggacttttgttgcaacaacttttctaaatgaaattgacacgaacttctatgagttcaaggaggattgcaacacagagaaaaaaatagcttccaaactgaaaatttgtgcagaaagttctctattgttggagagtgtagacaaattgaggcacaatctctttgatctttcacagaatatagctctaatccgagattcagacgatccaagaaaattttatcctcgtttcaaccttgaagatacctcaagtttccaggattcggatgatcatatcatgaatgttctcaaaagattattcaacgactactatgtctgtcgtcaatagaatctttggaggcaaaatgcattgaataccctgcctgtacttctaaattcatc

SEQ ID NO: 16202 - DNA, 482 bp, Glycine max
ctatcatgaaggggggtgtaaggtctggacagtggcgtggaaggcgaatcagccactggcactgaacaattaaccattaacaagaacaagaacatttcaagggaggacatagtaatggacatggttctgcattcagccttgtacccaccatctctgtcttgttcctcttctactactggaacaagatggcccaattcccgggttggtgttagtttgagttggaggagcttgtccttggtgccttgtgcactgaaggcatattatgattctgaattggagaataaaaagcatctacttctgacctctgtccaagacacgcaaaggggcctcttaacaacttctgatcaacgctcttgtatcgaggaagctcttgtgagtctcgaaggatgcaacattggctctcaccctatcaatctctccaacttggatggaacatggcgccttcagtacacttctgcctttgatggtctcattcttcttca

SEQ ID NO: 16203 - DNA, 537 bp, Glycine max
ggcacaggtggagaaagtatatatggggggaaatttgcagatgaaaatttcaaactaacacatgatggacctggcattctttctatggctaatagtggtcctaacacaaatggatctcagttctttattacattcaagcgccaacctcatcttgacgggaaacatgttgtttttggaaaagttgtcaacggaatagacattttgaagaaaattgagcaggtgggaacatctgatgggaaacctacccagccagttaaaattattgattgtggtgaagtctctgaaacaaaaattcagcatactgcagagaaggagaaaggaaaaaggagaaaatctgggaagtccttatcttctgatgatggttctgacaaaaaatcaaggggaaaaaggaaaaaatcttccaaagacacaaggaagagaaggaggagatactcaacatctgatagtgatagctattcctcagattctgagtcagattcagattctgaatcggattcatcagtttctgattctagttcctctagtgatgggaaacac

SEQ ID NO: 16204 - DNA, 809 bp, Glycine max
  unsure (1)..(809): unsure at all n locations
tcgtgagtcatgtcaatcgctaatcctacaatttaaattatgcttttatgacaggtttggcctcagggttcacttgaagagcaggtgcagtctctagtgaagaattgggagatggaaatgttccacaaggtggacctgcaggatttcagatcaatagacccaaagaaatacactttcagcctgaacggaaggaagcctatgactctggaagagatgatgaagcttggtggagggtatataccaatgctgcaaacctctataccagagaaaatgaggccttacaatccctatgaagaaacagcagattcatcccataaggctttcacgacaacattcccacgtgggtttgctttggaaattctgcacgtgtattctggaccaccagtgatcgtgtacaagttcaggcactggggctacatggagggtcctttcaaacgccacgccccaactggagagaaaattcaattctatggaatggcaattttcacgttggatgagaattcaaaagtcgtgaaggtggagtttttttatgatcctgccgaattgcttggaggtctcctgaaaggtgccaagtttgatggcagtgctgaagatgctgttgcaagctgtcctgtactcaagaacaccggctagagcagcacatgttcaaaaagtttatcctttgaaagtaaaggttaattgcagatngtgcatcaatggcttggttaacttttagtttttacaaggtatatctgtaggtaatatttactggagactcttcaaatnccagccaattaatggttgaatcaataacacccccaacccccttt

SEQ ID NO: 16205 - DNA, 477 bp, Glycine max
gacccacgcgtgcacggcgtcatcaagtgttagggaggacaaataccgcccctttatgcgcgaagacagtgagaagaacatcaaatggagatatggtgctcctccaaattatgacgttgtcaacaaattatttgatgaaggcagaaccaaggtatggcctccgggttcacttgaagaaaaggtgcagactttagtgaagaattgggagatggaaatgttccacaaggaggatttcaaggataacagatcagtggacccagagaaatacactttcagcctaaacggaaggaagcctattagtttggaagagaaaaagaagcttggaggagggtatattccactgctgcaaacctctataccagagaaactgaggccttacaacccatatgaagaaacaacagattcatcccacaaggccttcacgacaaacattccacgtgggtttgcttttgaattctgcacgtgtactctggacca

SEQ ID NO: 16206 - DNA, 478 bp, Glycine max
gatggcgtcatcaagtgttagggaggacaaataccgcccctttatgcgcgaagacagtgagaagaacatcaaatggagatatggtgctcctccaaattatgacgttgtcaacaaattatttgatgaaggcagaaccaaggtctcctcttcttgatttctttgtgtgtcaattaagagtgtacatataaatgatttatccagtgaagaaagaaaaagttgttcatgccaaatcgaacaatttgattatgtttttcttgacaggtatggcctccgggttcacttgaagaaaaggtgcagactttagtgaagaattgggagatggaaatgttccacaaggaggatttcaaggataacagatcagtggacccagagaaatacactttcagcctaaacggaaggaagcctattagtttgtgagagaaaagggagctttggaggagggtttattccacttgttcaaaccttttaccagagaaac

SEQ ID NO: 16207 - DNA, 1110 bp, Glycine max
aggctcgagcaaagttacgtctataaacaacaacagcttcgggttcagtagaaaattgaaaattccaattcttgggtttgaaaacagaacagctaaactaaatcgaagcaaacaatagtgagtgagatcgtgaagaaattagtttggaaatggcagtggcaggttgtcagaagcttctggaattgagcacgaagatcgtcgctgttggcagaaactacgctgctcatgccaaagaactaggcaacgccgttcccaaggagccggtgttgtttctgaaaccgacgtcgtcttacttgagtaacggcggaaccattcaaatcccacacaacgagggctctctgcatcacgaggttgagctcgctgtggtcatctccaagaaagcccgtgacgtctccgaatcctctgccatggattacgtcgccggttatgcactggctctggatatgactgctagggaccttcaagctgctgctaagtctgcaggtcttccatggagtttggcaaaaggccaggacactttcaccccaattagttctattttgccaaagactgcagtgccaaatcctgatgatctagaattatggttaaaggtagatgaggaaatacggcaaaagggctcaaccaaggacatgatctttaagatcccatttctaattagctacattagctctgtcatgacattgtttgaaggggatgtcatactaactggtactcccccgggtgttggccctgtcaaagagggtcaaacaattactgctggcgttacaggccttgtggacgtacagtttaatgttgaaaaaagagctaggcctgttctttcttgataaaaccctcctcgaaggtacttcagttctacagaaaatatcttgccaaaaggaaaccaggggacacaataaaaattcagttatatggacttgagagtctacgatatttaacagtttatttttttgtaatggtcgtcgaatccgtacaatagatcttttggagtgctattttagacttttgtcatgaaaatgattatgatgatgggcgactttctatttatggtggatgtgcttttttatactgtggccaataaggattataatggagcgcatatggattcctttt

SEQ ID NO: 16208 - DNA, 537 bp, Glycine max
  unsure (1)..(537): unsure at all n locations
gttctccttttcatgggctcacttaaagaggatcttgcaactactatggaatcttttgccggtttagaggttgcttgtaaggaactaagaaacaaccggctgttcctcaagcttcttgaagccgttctcaaaactggcaaccgaatgaatgatggaactttccgtggtggtgcacaagcatttaaacttgatacacttctgaaattatctgatgtaaaaggaacagatggcaagactacactcttacattttgttgttctagagattatccgctccgagggcataaaagccatcagaaaggcaaaagagagccagaaatcgtctagtattaaattggatgaccttcacgatagtacccgagaaacagaagatcgctaccatgaaatcggtcttcaggtggtttcacgattgagcagtgaacttgagaatgtaaaaaaagcagcaattatagatgctgacagcttaacaggaactactgccaaacttggccatggtctcataaaaacacgagacttggtanacaaaagcatgaagaat

SEQ ID NO: 16209 - DNA, 530 bp, Glycine max
cggctcgagcggctcgaggtaacagcccttccgttcgtgcgtggattgacgcgccatcgttcgtcgctgctgccgccgatcatcggcatcatcactatctgtctcccgcggcagcgcagcggcgttggtgtatcagtctgctccttccacggcggcatttacggcggcgcccggtggcttctcgggattccgcgtgccggcacgaattcagggtgaggaggagcacgacggcggcatgtccgataagccgtcctctgcttcctccgattctcgccgttgaaccgtcgagatcgtcagccgatttctgtctccttggaatcaattgggtatgtgtgtgatctgatttttgcagggatggaggagacgaagttggacttgtaatggttcggttcggttcagtggactattatgcttgtggaatgaagaaaatctggggttgaatatccaggtttttgaattctccaatctgttatgttaatttaatttatgtttttcatgtttcattaaggagactttcaagtttgagtact

SEQ ID NO: 16210 - DNA, 778 bp, Glycine max
  unsure (1)..(778): unsure at all n locations
gttgaagctcacatccccaaccttctcctgtgcaatgagcaacatgcttccagccatgacttttgtgatggcagtgttttgccggatggagaagatagacataaagaaggtgagatgcatagcaaagatagtgggaacattagtcacagtggcaggggcaatgttgatgaccttatacagaggtcctatagtggagatggtgtgggccaaacattcacacaataaaaccaatgcaacaaccaccacaggatcattggacaaagattggttcttaggatgcacctttcttatcattgccacccttgcttgggcttccctatttgttttacaagccaaagctatacagacgtacaagaatcatcagctaagcttaacttcacttgtgtgctttataggcactcttcaagctattgctgttacttttgtagttgaacacaatccttctgtatggagaattggctgggatgtgagcttacttgctgctgcatatgctgggattgtgacatcaagcatatcatactatgtacaaggactggtaattaagatgaaaggacctgtctttgcaactgcctttagccctttaatgatgatcattgtggccatcatgggatccttcatccttgcggaacaaanttatcttggaggtgtaattggtgccatcttaatcgttatagggttatacttaagttctgtggggaaagcacaaagaacatatagagagcaaagtggcagatgaaattcccttgcctgtaaaagatgctcaaattgctgtaattgc

SEQ ID NO: 16211 - DNA, 782 bp, Glycine max
cggacgcgtgggcggacgcgtgggctagaactagtcgcttcagcatgtgttggtaattcacgcaaatgtaggccttcgatggctcaagtggcaaccattttgaacaacttagaaacggaagtgtgtctctgatcttcatgatgatgcagtcaaaagtcaatttgattgaacaaattgccttccaattttgtaccaaaaaaatggggtctgaccaattaccaataattggtataaaaaaggcatgtgttctagtcagaaaaaaaaacttggtcttatgactcttatcatatgattagttaccaaattgattgaaatgaagatcgaggacaatattagtgaggtaagttaggtgagattgacattcatcggatggcagtaattggtaagaaaattggtgggtttttgatgagggaggggccttatggcttatcccctatggtgtgacaggctaagtagtcagagaatcatttttggtggggaattttgaaagagaaaggtgggacggtgccgttgtcgttaggacggtgaatattaatctctggttccgtgtggcatggggatccttttgctaatgaaagtgaccttctcaattatctctttcatttttatttttcaatcttagtttccatcagcttttaatgtgtgtatatgtagttagttatgtacctattttttccagcttgtgattacttagccatacagagttttagattttgagaacttaatgtcgtttttaagtttacacaaagctttataacagcccttataaaaataatttcaac

SEQ ID NO: 16212 - DNA, 909 bp, Glycine max
tttgaagagaagcaacaatcaatgcgtccataatttcctatattccctgattggtgtgattactgtcaacaaaaacagctggaattggattctccaacataacatcgacttagaaagaatctttggagcatttttcactcatggctatgattatggatgctgttcttggaaaactgcttgatgagctgctgaaagaagttgtgaatgtgaaagacagggctgtgaagttcagagccaccctgataaccttagagtcaaccctaaataaagtaggaaggttggctaaacagattgatggtcttaacaatcaattgaacaaaccagccgaggaaatgaaagagctgaaagataagttggcgaaagggaagaaactcgttatggagtgctccgaaatccagtggtggaattgctgctataaggccaactaccaagaggaactcgaggcgttgtacgagtcgatccgtttgtacttcaatctggatatgcaaggtctgatactaactaatgagttacaaaaccaggtgattctgaccgagattcatgcaacagttatggaaagtggtccgagaaggaccgaattgaaaggcgtgtgttcgcctccggcccctccggctttcacggttggcttggatgttcatttgagggagatgaaggtcaagttgctgaataaccaccaccatgctggatctgtgctcacggtcaccggaacaccaggctcagggaagtcaacgttggttaaaaagttttgttgtgatgaggaagtcaaaggtatattcaaggaaaacatattcttcatcacctttgcgcaaaagcccaagttaaataccatagtgcagagactgtttcaacacaatgcttgccaggtgccagagtttcaaagtgacgatgatgcagtttatcaattggaaa

SEQ ID NO: 16213 - DNA, 438 bp, Glycine max
cccacgcgtccgcccacgcgtccgggaagaaaggcttttgggcaagatatcggggagatttggctccatttgctaaattccagtcaggttgatgtggctcatatgaactgtatgaatataaacgtcctttgacaaatggagctgagccaaagcagtgacgagcgcaagaaggcagaggaagcaaatgaacatttatgaagatagttatgcttcagttggctttatggtactagaggcagactgctgcagaccgcaaaataaggtttaacaatcaatcatacgctgcaaacttaaaaatgtgtttttaactattggatgtttatgttcaatgaatacaaattaacatatctttgcaagttaagtcaagtgaaagctgaacaaggcgaatcttgagaacagacaggatcactcaatgttgtatttgattaatgttggctc

SEQ ID NO: 16214 - DNA, 1529 bp, Glycine max
gacagtttagaaatggggaaacccatagaagagctgaacaaagcaccggaaggcactgcaaatggtgatctttctaacagtaagacagatgccaattgtgagtctgctgaccatccgaacatgccttctcttactgttccagagattgttaatcgtgtgagatcaaaccctggtgatccttgcattcttgagacacaagagccactgcaggatttggtcagaggtgttctgaagatattttcttccaaaacagcacccttaggagcaaagggttggaaggtactcgcagtttatgaaaaatctaccagaagttggtcatggactggcccagttattcataattcacctgactatgataccactgaggaggtgacatctcctgaagcttggggtcttccacataagatgcttgtcaagttggttgattcctttgccaattggttgaaatgtggtcaggaaactcttcaacaaataggaagtcttcctgctccgcctttggcattgatgcaagtcaaccttgatgagaaagaaaggtttagggatctgagggctcagaagagtcttaacaccataagacctagctcagaggaagtgaggacttattttaggaaggaggaggttctcaggtactcaattcctgacagagccttttcatatactgcagctgacggtaaaaaatctattgtggcacccttgagaagatgtggtggtaagccaacatcaaaagcccgagaccattttatgttgaaacgtgatcgaccaccacatgttacaattctttgtcttgtaagagatgctgcagctagattacctggaagtattggcactagagcagatgtttgtactttaattcgagattctcaatatattgttgaagatgtttctgatgcacaaattaaccaagtagttagtggagccttggatagattgcattatgaacgtgatccttgtgtacaatttgatggggaaaggaaactgtgggtttacttgcatagagaaagagaagaagaagattttgaggatgatggcacttcatccacaaagaaatggaagaggcagaaaaaggatgctgcagatcaatctgatcaaggaacagtaactgttgcttgtcctggaactggggagcaaagcggatatgatttgtgctcagatctcatggtggatccaccaccatgccttgatgatgataagggaatggaacctttgtctactgatacaaggccaaatgcagaggcacatgttgatgtcaatcgagcttctgaagaaggcaatgtttgtgatggtaattcaatggcttgggaggctcttgatttaaatcctactcgagagttatgccaagaaaattcaacaaacgaagattttgatgaagaatcctttgggagagaaaggcccgttggactattaagtgcaagcttgttgtgaaaaattcttcaggtagttatttacctcattttgggcattattcgattggataatgctctttttgcccgttggcttacttgtatctaaaatatcatagcacctttgtt

SEQ ID NO: 16215 - DNA, 486 bp, Glycine max
tttgtgatggtaattcaatggcttgggaggctcttgatttaaatcctactcgagagttatgccaagaaaattcaacaaacgaagattttgatgaagaatcctttgggaaagaaaggcccgttggactattaagtgcaagcttgttgtgaagaattcttcaggcttttggtccatgggcactcgagttcggtcatgcttgttgtagctgtgccacctttgtatattgatttgatctcgaagaatagaatagaatgtgatcttgttgaagatcataaaatttggttagtttaggtggatgttttaacgactttacatcccataaataataccttttgagttgaaatttctaatgatctgtagcttcttgtgcgatgtggcgttgttgtattgcatcgcaaaattctgtagatatggcttaattaagccaatgatgtcagtaaatccaataaatctgttcacccaaatgaacaggacaaaattttaatt

SEQ ID NO: 16216 - DNA, 521 bp, Glycine max
cttacctttctcggccttttggctaagatcaagtgtagtatctgttcttatcagtttaatatctgatatgtgggtcaggggaggattcttcacagtagcttgctgctggaatcatcatttagtgtcgctcaagtgttgcactacaccttcggcctgccacaccccaccatttcagttctaaccttagtaagaatctattaacagcaaggaaaccatgagtagcgccgcctttaaggtcggtgtgttggggagtggaatttcaggagccgtgcgtgcttcaactcttgccagaaatggggtttctgttactctctttgagtcagctagaggccctggtggacgcatgtcccaaagaagagagagaactgaagatgggacggagctgcattttgaccatggtgctccatttttctcggttagcaagtctgaagttttacatctggttcaagagtgggaatcaaggggtctcgtagctgaatggaaagagaagtttgcctcgtttgattttcacacaacatacg

SEQ ID NO: 16217 - DNA, 762 bp, Glycine max
aaattctggaattcagggatttttacatcctagcatcagtctatcacagacatcgctgattgaagtatttgtgtacaagagatgcagaaacatagcttgccaaaaccaacttcctgctgaagattgtacctgtgagacatgcaccaatggcaatggtttctgcaatctttgcatgtgtgttatctgcagcaagtttgactttgaagtaaatacatgccgctggattggatgtgatttgtgttctcattggactcacacagactgtgccatacgtgagcaacttatttgtatgggcccttctgcaaagaatggagcagggccaagtgaaatggttttcaggtgtcaagcatgcaacaggacttcagaacttctgggttgggttaaagatgtcttccagcattgtgcaccatcatgggatggagaggccttgatgagggaacttgattttgtcagtaggatctttcatggtagtaaagacccgcgggggaggaaactttattggaagtgtgatgatctcaaggaaaaattgaaaagtggaaaagtggaatctaaggcagcatgcagggcaatattgatggtttttccaagagcttgagctggactctccaaagagcctggaaaatgcagaaagtggaaagctaattgctccccaggaggcatgcaatagaattgctgaagtggtccatgaggctataagaaagatggaaatagtagctgatgaaaagatgagaatgttcaagaaggctcgcttggcttttgatg

SEQ ID NO: 16218 - DNA, 444 bp, Glycine max
cgcctcgaccgacgcgtccgcacccctggagttttgctcactatgttacctttctctccctcactgtatctgtgatctttggggaatctcatttgcggtggtatcgcaaagtggagtcacttgtgcttgatcaactcccaaatggtcaatcctactacacttaaacactgttaccgacttcatctagctttagcccatcttcatatgttgggccattttttatctccttcaactcattatcaaatggttgcgatgtagaatcccttcttttctcatcaagaggcgtctctctggttcattagaaacacaatccccatttcttaagatgaaggattgctagatgcttattgaaaatggttgcagctgtgtaaatcactggtaatgtcacagtaattgctggccagttcaagaaatccgagtcttaacacaatttcaaattttatt

SEQ ID NO: 16219 - DNA, 491 bp, Glycine max
agaaaagagaagaagaagaagaaacattgcgaacatgaaaagttagaaccaagcggatggaggaatcggcggtgctcccccggcaatcgctcatcggcgccggcgaacttcagatcgcttctcttgcttctccgaggtttgtgccttgcggtttttttcagaggcatttgttgttggaaatcttgcagtacgggtttgtttggctcaccggtggaaaattgttatatatgggctgaggtgtgcttttcatgggaggtgtggaggatgaagaaccagctttgaaacgcatgaaattatcctctaaaggattagttggtctctcaaacggttcgtcttcagtggagtctgttggaggctcttctagtgacttgatggctcggcccctgtcatctgaaggggacggcgaagttattggttccaaaggggttatgaaacgggaggaatttgttaggataatcacaaaggcatttgattcgcttggttacaagaag

SEQ ID NO: 16220 - DNA, 457 bp, Glycine max
attaaattatcagcctcctccagtttcttcttcagggtccaaggaccagaaatctgatgttgtcaattcgctgtcttctacagcttctagttcacaaagtaatgctcgtcaatctcagggcaagcttgtgtttgggtcaaatgcaaaccgtactaatgagacaggaaaggcgaaagagtcgaaaccagagccccctaaagagaaagaagagccgaaatttcaacctttttcagggaagaagtattctttacggggttaatttataccaatcaagtaaattaaaatgtccttttacttttaaagtaagttactttgttgatctatgcatggatcgatgtctattgcaaaaacgtgtattttttttattgtattatatgcagtagatagaccagtagacgccacagcaaatacctttgattacttgtgaatgaagctcttgacgaggtttgcaatcgtg

SEQ ID NO: 16221 - DNA, 422 bp, Glycine max
cagaaacctgatgttgtcaatttgcagtcttctacagcttctagttcacaaagtaatgctcgtcaatctcagggcaagcttgtgtttgggtcaaatgctaaccgtactaaagagacaggaaaggcgaaagagtcaaaaccagagccacctaaagagaaagaagagccgaaatttcaacctttttcagggaagaagtattctttacggggttaaattaaaatggccttttacttttaaagcaagttactttgttgatctatgcatggatcgatgtctattgcaaaaacttttatttatttattgtattataagcagtagatagaccagtagatgccacagaaaatacctttgattacttgtgaacgaagctcttgacgagggttgcaatcgtgtctgaatggtaaataaaaagatggataatt

SEQ ID NO: 16222 - DNA, 642 bp, Glycine max
ctcgagccgctcgtgccgtgctgcttcatactttttctcgcctataaaatgtccgccactgcttcactctgcgccacttccagaacaactttctcatcatcgaagcccgtcgcgagaagaagctgcttcgtcgcggttcccaaaatcgcgtttcccaagctccgtttcaaacccgtcgctatggctacgctcggcgctcgcatggtggccgccgcacccaccgtcactccgccggcctcgctcgacttcgaaacctccgttttcaagaaggagaagattaacctcgctggacacgacgagtacatcgtgaaaggagggagggatttgttccctctgttgcagggtgctttcaaggggattaagcagattggcgtcattggatggggttcgcagggacctgctcaggcacagaatttgcgggactcgcttgctgatgcaaagtctgatattgtggtcaaggttgggctcaggaaaggttctcgctcctttaatgaggctcgcgcagctggttttagtgaggagaatggaactttgggtgacatatgggaaactatctcaggcagtgatcttgtgttgctcttgatttctgatgctgcacaggtgataattatgaaaaaatattttcccacatgaaaccaaata

SEQ ID NO: 16223 - DNA, 882 bp, Glycine max
ggaccatccgtatccccatcacagattccaacagcatctgcaccccatgcaccgtattattccagtaaacaagctgtaccttgctttttcttccaaaaaggactttgcctaaaaggtgacagatgtgccttcttgcatggaccacccactcctacttctagcacgggtaataaagtagctgctcaggttccagtgactagccaaggagccgagaatccatgttttaagaagccttttgtcagcaatgaaaagtatactcaggaaaggaaaacttcccaaggaaattttgcaaagtcaggtggagctcctgaagctaaaccttcccccaaaattgaaactgctcctcaaagaaatatgtttgaattggagaagaaagtgccaccaccatctgcagaattcaataatgaggcttctagatttaagacaatttctccaccagtgaccaatgggcccattgtggcccggtcaaaccgtctgcaccaagctcgtgtgccagatgatcacaatttccagagtggcaaggacagtgatgagtttctcagagaatcatctcctgggtttgatgttcttgtagctgatgaacttaggaattctgattactaccatggggaagatgaattcggtaaagcaagaggtcaagatgaaaggaacttagactctttgaatgaatatgatttaggacattctggtgattatagtttagcagctgatattgatcgagaaagattccgtgggcctcaaggttatgagtcatatgatcacatgcaggagccatatgcttgggagcagcataggaagccctcatcccatgtaggcaggaggactcgccgcagatccaacagtcctgaaaatgctgaggtctcagatctacgacatcattta

SEQ ID NO: 16224 - DNA, 539 bp, Glycine max
accagtttcgcccttcggatcagcctgtcgtcctcttcggacgcacattcgctgatcgcgaaaccctagggatcctcgttccgctcaccgtgttcgtcattttcctcaccagcgttggatccttgttgatctctgcattgatggttggattggcgatcgtgtgctcgcacggcgcgttccgcgttcccgaggatctgtttctcgacgatcaggagccgaacagctccggattcctctcgttcctcggcggcgccgccgcttctgccgccgcgccggccgtcgcgcgcgtgtgaacggcgggatctggacggccgctgtgtccggtggattcttctcaggttggttcggccttttttgttgtaatatgttaaattgaaaattgttgcgatattctttgccttttgagatccaaggcgaattgcttagggtttagttctgttactgcttactactttttgttttacgccgatatattattgtgctattaaacctcaagtaatgcagcagcttagtcattgattttgcttctgaaaaaaaaa

SEQ ID NO: 16225 - DNA, 519 bp, Glycine max
cctcgcgccgaagcgggtccgtagcagagataagtgatatgcaaaacatgtctctaatagcttcactctcctccacaacttcacaactcacttcccttccttccctcccttcttcctcctctccactttctcgcaaatttcccctcactttccgggaaaaaaacagaactccaatcacacctcacaagctccctttttcagcaaggcctaccaccaccagagtggtgttggtgaagtctcaggccacagcacctgcttcttctgaggctgtggcagtgacacctgtgtcttctgagatgaaggcatgggtctatggggaatatgggggtgtggatgttctgaagctggactccaatgttactgtgcctgatgtgaaggaagatcaggttctaatcaaagttgttgctgctgctcttaaccctgttgatgccaagaggaggcagggaaagtttaaggccactgattctccccttccgactgttccgggttacaatgtaccggttgtggtggaaaaggttg

SEQ ID NO: 16226 - DNA, 379 bp, Glycine max
caaaagggtggttgaagttgaagcagagataagtgtctcaacaagtgatatgcaaagcatgtctctctgtgcttcgctctcctccgcagcttcacgcctcgcttcccttgcctccgtctcttcttccgcctctccgctttcccgcgggttttctctcgctttccgggaaaaagacacaaccccagttgcgccacctcgcgagctccccttcttctcggcgaggcctgcccccgccagagtagtgttggtgaagtctcaggccacagcgcctgcttcttctgaggctgtgaaggtgacaccggtgccttctgagatgaaggcatgggtgtatggagaatatgggggtggggattgttctgaagctggactccaatgttgc

SEQ ID NO: 16227 - DNA, 1953 bp, Glycine max
cagaacttgaagcattgttattgtgtgtaagctcctaatcacaaagtagaagaaataggaaacaccctttggagatatttgcttaggccattggtcatggcaactcgaagactttcattgctcctctctcgctctctatcttccacttcttttcaagctgcttctctacttcactcactagggagaaactctggcaagtggggaaactttaacagattcagcactgcagcagcagttgaggatttaatcactccacaagttccaataacatacactaagcatctgataaatggacaatttgtggatgctgcttcagggaaaacttttccaacatatgacccacgcacaggagaagtgattgctcaagttgctgaaggtgatgcagaagatatcaaccgtgcagtatcggcagctcgcaaggcctttgatgaaggaccttggccaaaattgactgcttatgaaagatgcaagataatactgcgctttgctgatttggttgagaaacacggtgatgaacttgcagctctggagacatggaacaatggaaagccttatgaacagtctgccactgctgaattaccaacgtttgtgcgtttgtttcgttactatgctggttgggcagataaaatccatggtctgacagtgcctgctgatggaaattatcatgtggagacattgcatgaaccaattggtgttgcaggacaaatcataccttggaactttcctctcctcatgtttgcttggaaagttggaccagctcttgcatgtggaaatactgtcatccttaagactgctgaacaaacacctttaacagctctctatgtagcaaaactttttcatgaggctggtcttccaccaggtgttttgaatgtagtttctggctatggtccaactgctggtgcagctctagcaagtcatatggatgttgacaagctagcattcactggatctaccgagactggaaaagttgtgcttggattggctgcgcaaagcaatttgaagcctgtgacattggaacttggagggaaatcacctttcatagtgtgtgaggatgctgatgttgaccaggctgtagaacttgcgcactttgctttgttctttaatcaggggcaatgttgctgtgctgggtctcgtacctttgtacatgagcatatctatgatgagttcttggagaaagcaaaggctcgtgctttgaaacgtgttgttggggatcccttcaaaaagggtgtcgaacaaggacctcagattgatgtggaacaattccagaaggtccttaggtacataaagtccggtattgaaagcaaggccacccttgaatgtgggggtgaccaaattggctcaaagggcttctttgtccagcccactgtcttctcaaatgttcaggatgacatgttgatagcaaaagatgaaatatttggccctgtacaaaccatcttgaagttcaaggacatcgacgaagtaattcgaaggtcaaacgcaacgcactatggtctagctgcaggagttttcactaagaatgtgcacacagccaacactttgatgcgagcactgagggttggaacagtatggatcaattgctttgatgtttttgatgctgcaattccctttggagggtacaaaatgagcggcattggcagggagaagggtatctacagtctcaacaattacctgcaagtgaaagctgtggtttcaccagtgaagaaacctgcatggttgtgatttgtgaattgctcaaactgctatgaccgaaatcctacgtggctatcatctttttccgctgaggcaatggcatgcaataaataatgtgatgttactaagataaaacctgattaggtacctgaacattataccagttgaatttatgtatttttcacttgttaattgctcaaacacaaacttggatactgtaatgacactgttgctgtaggatataaattttgcaccattcacact

SEQ ID NO: 16228 - DNA, 1173 bp, Glycine max
ggaagaaaaataaagttattattaaaactgaaatatccaaaagtcagaagatggcattgcgaggattgagtgcggtggcggtgacggcgtcaatacgccctcccggtcctcgattcagagtagacagcggcacatcaaggattccctcttccggatgcagaatctcggtgcggtgtaaagctgtcggagaaagccgacaaggttccttggaggaaaccgttgtttatgagggtatttatggcccctggaccattgacgactccgatgttcgagaggtaattttgtacagatcaggattggtaacagctgctgcatcatttgtggtcgctggttctgctgccttttttcccgatactctgaagcagaatgttgatttattgtatgtccttgggtctggtgggttgggtttatccgtgctcttgattcacatatatgtgtctgagatcaagcgcgccctacaagcactatgggggcttggtgttgctggatcggccacaacctacttttgcctcgctcaaccagctaataagaatctaataccatgtgttgttgacaacccatcagctggctggctggtcggtcctccttttgctgccttgacaggacttgtcttcaaggaaggactctgctatgccaagcttgaagctggacttctcacctttgttattcccatacttcttcttggccatctgactggcttgatggatgatggagttaagcttactttacttgcttcgtggatgactctttttgtgatatttgctggaaggaaattcacccagcccatcaaggatgacatcggtgacaagtccgttttcatggtcaatcctctccctggtgacgagaggtaagccttgcttgagaaactagcacagcacaatattcagaatcaagatgcattgctttaactggatgccggaaaatttcggaaggaccatctcacgctctgtgagcaattatcccatgtaaaaggaaatattttcagcccctcccctagaaattaaagatgataccacagttactaaaccactttcccatgtcttccttgatctctgcaaaagttacactacatggtctatactatacacatatatttagggtcgttgtcctgtgcaaatgataatgcatgcttgactcagaacctgcagaatgacaatttagtgaaggttggtt

SEQ ID NO: 16229 - DNA, 2017 bp, Glycine max
aaagaatttctcgttttctactttcgaataaacgaataagaagccttcacaccgcttcgttttgtggtgcttgcttctttttctcttccttttcgcttcttactagtattcctttcttcttcatttcgttttctccgccgttttcgtcactcagcatcagcagcaacagcaccaggtgtctactatctgactacacatgtgctgtttacattgtctttcaattgggtgaagtctgactgaagagcaatgcagaaggataccagtaccactgccccatcaaccacaagcggtcgggttaggcaccgaaaacgctcaaatgaggttattccggaggttagcaaagcaaatgggacccagttactggttaatgacaaaagcaaatacaaatccatgctaattcgagcatattcatccgtatggatgattggcggctttgtattgatcatctatatgggtcatctctacatcactgcaatggtggttgttatccaaatcttcatggcaagggagcttttcaatctactcaggagagctcatgaagataggcagctgccaggatttaggctattaaattggcattttttcttcactgcaatgttatttgtttatggacggattctgagtcaacgcctggttaacacagtaacttcagacatggttttatatcggctagtgagcaatcttattaagtatcatatggttatctgctactccctatacattgctggatttatgtggttcattctcacattgaagaagaagatgtacaagtaccaatttggccagtatgcttggacacacatgattctaattgttgtatttggccagtcctccttcaccgtggcaagcatttttgaagggattttctggtttcttctcccagcaacacttattgtcattaatgatattgctgcttatatctttggtttcttctttggaagaacccctttgatcaagttatctccaaagaaaacttgggagggttttataggggcatctgttaccaccatcatctctgcatttatgcttgctaacatcatgggtcgctctcagtggctaacgtgtccaaggaaggatttgtcaactggttggcttcactgtgatcctggtccactgtttaagccagaatcttatcccttacctggatgtatttctcactggttttcttggaaagagatatcaatcctaccaattcaatggcattctttatgtcttggcttgtttgcttcaattattgcaccttttggaggcttctttgcaagtggctttaaaagggcttttaaaataaaggactttggtgatagtattccgggacatggtggaattaccgacagaatggattgccagatggttatggccgtgtttgcatacatatatcatcagtcatttgttgtgccgcaaactctctcggttgaaatgattttggaccagatatcgatgaacctaacattcgatgagcaacaagctctatattggaggcttggggaaattttacaacaggggtttgctaggatgtcttagattcatggcgaggtgtatttgttctgtcaccttctattgtattccttcacatacaggggaaaaggaaaagatactatgtacatgtgtttgttttctatcttttgagtgaaacaaattaaaggttcagaagctgtcaagatgtgcatagtgtatgttgaccgttagtttcattctgtttttctcgctctattagttgattgatggctttgcttgaacagctacctaccgttcactcgtgatcttagaataattcacatggccaatggcagtaattgaacgcctctgatgtattcaattcctggaggtgaaggggtgttaatatttttcaagtaccttaaatgtagcttgaatcgcgttttgataatatattctgttctaatgcgatcaacaattatttttcttcttctatcaaatgttgcctatattgtgaatgggtgcgcagattgtaatgtgtgaacaaattatatgatgaataggatataaattgttttccatt

SEQ ID NO: 16230 - DNA, 521 bp, Glycine max
gccacgaaagaatttcttgttttctgctttcgaataaacgaataagaagccttcacaccgcttcgttgtgctgtgcttgcttctcttttattctttctattagtattcgtttcgttttctccgccgtttccgtagctcggcttcagcagcaccagaaccaggtgtctactatctgactacacatgtgctgttattgtcttccaattgggtgaagtctgattgaagagcaatgcagaaggatactagtaccaccgccccatcaaccacaagtggtcgggttaggcaccgaaaacgctcaaatgaggttattccggaagttagtaaagcaaatgggaccaagttactggttaatgacaaaagcaaatacaagtctatgctaattcgagcatattcatctgtatggatgattggcggctttgttttgatcatttatatgggtcacctctacatcactgcaatggtggttgttatccaaatcttcatggcaagggagctgttcaatctactcaggagagctcatg

SEQ ID NO: 16231 - DNA, 635 bp, Glycine max
cgcgtccgaagttattgaagtatgtttgaaaaatgaggttagtgtcaaagtatcaagcggcaatatgctggaggaaaatttagaagaacctgggacgatacaaagcttcagacacacaggaacaaatgctaacaaggaagtaaactataagaaagtagtaccagcttcaccagagcagaatctttcaagaccaatggaagcaaaccaggctgattcatattctttgaaaaatgggacaactctggaccaaacaatatatgataacaagcaattaaacagtgatgcagtccaagatatgtcttcagatgacctgaaaaagtcaaccagggagataaagtatcgatactgttgttttatgcattaactaagaagagaaaagtgtgaaagccaataacaagaaaatagggtatttagaggcatgaggtccacttgccaagggaccaggtaccgggtttggactaattttgtcccttattgttctactaaaatgtcaaattattattagtattttttttatgctcaatctatctctagaattaagtttatttagaaatgtatgattgattagttaaggtagactgcgtagtctatgaatgttataattataattaactaagttttattttgttcctagc

SEQ ID NO: 16232 - DNA, 613 bp, Glycine max
ggttcgtttacgcggcggtggtttacccaatgccgaagatctcgggggtggtgaaactcgacgtgtcgaagggggaggagcggagggactgcacggtggggtgcaggatgtacggcgagggttgctacggcggagaaccgttcttcgtggcgagggaagaagggggcgaggaagatgatgggtacttggtgagttacgtgcacgatgagaggaagggggagtcgaggtttttggtgatggacgcgaagtcgccggagctagatgttgtggcggcggtgaggcttccgcggcgggtgccgtacgggttccatgggctgtttgtgaaggagagtgagctgaggaaagtgtcgttgtcgtgaagctgagacatgatggttcgtgtgtggggcttgtcttccacgcttctgtccattatacatgtgtcctgtaatgtaatgtatagcaccattattgcttctcagaattaattgatgaggtgtaattagtaattacatgcaagtctatgccagctaaacaaagtaatcatcgttcatgtatgggtgaatcatgaaggaacagctgaataaattatttgtatttttcattattaccgttacatttgtttttgagtttt

SEQ ID NO: 16233 - DNA, 655 bp, Glycine max
cgcgtgggcggacgcgtgggcggacgcgtgggcggacgcgtgggagtaagcaaaggaatgggcgggttattttcttattcatcacttcccgaggaggagagtcctgacgtgaaagcattccactccgcggagagctggcagagccacttgaaagagatcaaagagtcccctaagctagttgtgatatatttcacggcgtcctggtgtggcccttgcaaattcatcactccagtgtttaaccagatagccgcagagtttgcaaacgctgacttcgtcaagatcgacgtggacgaattatctggtgtggcgaaggagtttaaggtggaggcgatgccgacgttcgtggcgtggaaggaaggaaaggaagttgagaggcttgtgggagccaataaggtggagctcgagaaaaagattaagcaactttctcaatcgtgaaagcatgtatgatagtaatcttttagctattcaaaccaacctatgtatgtatgtgtgtatgaatctttgttttcaagggaaaataaaaataagaaccagagtatatgcccattaaggcttgtgatgatgatgatgttgtaaaatttaaactcattagctgtatgtatgtttcttccccaagatgatgtctgtttcaattatatgtagtatattatatttg

SEQ ID NO: 16234 - DNA, 506 bp, Glycine max
ggagaagcagcaacaaagaccttgttcttgttggttatggatcaaagggtcataaaattcattactctggtccattaacatcaagcaacatggatcaggtgttgaaagaccatgaccgccaaattcaagaggcggttagacgggcacgtttggataaggcaaaaatgagaaggctccaagctgaagggaaccagataaccaattcattatttgtttcaggccgttgatttgtagagttgttgagatgcaacaaggcatcataaaggatctttaattcttttttaatggggggcctgtatagggagaaagtatcctttgcaaaatgccctggtggccgtgttaggtaactctatagcttagaaaagctctcccttaaaatttatcacatattttctttctacttaccgctggaatttctggcataagcccattcttgtaaagcttatcagccttaagctgttagaaatctggggaacaattgtgtcatgagagttaataatattcac

SEQ ID NO: 16235 - DNA, 734 bp, Glycine max
aaatttggatttccagagatcgtgaaaacggtcaaactatccgcattcctattgatcatggctattccttgcctgagagttttgaagactgcactttttactgcttatactggccacaagctaaggagccttactctcctgacaccattgattacataaaatctctggatgctgcataagatataaagcttttgaagtttcatggatggtaccttcctcctaaatgtgcccatatccttcgtatatcaaccatgcttcttctgaaaggtgcatatagaggactcactcctttcgtcttaggaagcatcatgtgtagagaaacactgaagaaaaaatctgtcattgagcagattgttgaggaagcagaggaagcggcatttcctggagcaagtgaagctgcatttcttgatctggtttcagtggtcatggatagtcatttggatgagctattcccgtgactgaatatacataattcacatacttattactactattttgataatacagtgataaagtggtcgtgcttgtttcgtcttcaaagaggatccatcaaactcgtttagtagactgtggttaaaacttctgtattgaccaatcaagcatttgatgcttgtattgcaaatatcgacttctcttatatatatatctcttataacatggaaatatattgaccaggaatgtttatggagtcctgtgcaataatattcctcttatgttctttggtgaatataaaa

SEQ ID NO: 16236 - DNA, 375 bp, Glycine max
atgcagcctggtttcatgttgaaccaaccttattcttcccagcccctcaattacagtgccatgggaacccttttggctcaacagcaattcttggcaacaatggctaatttccaacaccttagtaatgtcaacatgcaagatgatggtgttgctcaaatggctggacccaatggaagatcacctttgccagacatatttcaaccaaattttcaaactcaaactcctagctcaatgatcaacacttcaaggaaagaagaaactaaagcatttgactttatctcggaccatatgacctctggtcgtgattcaaggaggatgagattaaactttctatcttgtgctgttgtggaggatatttacggtgtggaattgctg

SEQ ID NO: 16237 - DNA, 688 bp, Glycine max
  unsure (1)..(688): unsure at all n locations
cgcccacgcgtccgatgtaatacatgctaaaaaaagccttgacttcatagtccttacggtaatatgcctctttcctcttcttcttcttctttctttcttccgccactgccgcagagcgtagaaggaaatcaaacagcagagagagggtaaagcatacgtgggttaaatccatgcgcatgagtcggaagaatttgtgttagcggtgaggagatatattgagaattaatatttgatagtgtatatatggggaggggaagagtggagttgaagaggatcgagaacaagatcaataggcaagtgacgttctcaaagagaaggtctggtttgctgaagaaagcgcgcgagatctctgtgctgtgcgatgctgatgtggctctcatcgtcttctccaccaaaggcaagcttttggactactccaaccaaccttgtacggaaagaattcttgaacggtatgagaggtattcgtatgcggagaggcaacttgttggagatgatcaaccaccaaatgaaaactgggttatagaacatgaaaagctcaaggctagggtggaggtactacagagaaatcaaaggaattttatgggagaagatctggacagcttaaatcttaaaggacttcagagtttggagcaacaactngattccgctctcaaacacattagatcacgaaagacccaagccatgaatg

SEQ ID NO: 16238 - DNA, 693 bp, Glycine max
tgtgagactcacggtcatgactcatgtaaattcgtctcccacaacaacactagctctcacgtacataaatataaagatgttgatagcatattataaatcatagagttcattccatacacagaaagaagaacaacactaagaaagcagaatagggaaaaatacatcgatagaggaaaattaattgaagggtgctactactacgaccttctatatcattaatgattgaaattcgtgttggaattgtcttgtaggtgtagtagtgataataagagaggatcatatatatattagtagtgctagaaattaattgaagtgtgtaatagaatagagtgtgatagagagagatatggggagaggaagggtgcagttgaagaggatcgagaacaagatcaataggcaagtgacgttctcaaagagaaggtctggtttgctcaagaaagcacatgagatctctgtgctttgtgatgctgaagtggccctcatagtcttctccaccaaaggcaaactctttgagtacttcagcgatccctgtatggaaaaaattcttgaacggtatgagaggtattcatatgcagagaggcagcttgttgcaagtgatcaaccactaactgaaaattggactctggaacatgcaaagctgaaagcaaggttggaagtcctacagaaaaatcaaaggaattttatgggacaaga

SEQ ID NO: 16239 - DNA, 323 bp, Glycine max
gatagaattcattctatacacacacagaaagaagaaccaccaagaaagaagcataggggaaaatacatcgatagagagaaattgaagggtgctacgtccttctattgtattaatgattgaaattcgtgtgggaattgtcttgttggtgtggtagagataataagagaggatcatagtagtgctagaaattgaagtgtgtaatagaatagtgatagagagagagagatatggggagaggaagggtgcagttgaagaggatcgagaacaagatcaataggcaagtgcagttctcaaagagaaggtctggtttgctcaagaaagca

SEQ ID NO: 16240 - DNA, 308 bp, Glycine max
cgttctcttgggaaaaaagccttgactaatagtccataccataattttcctctttcctctgtgcctcgcttcttcttgaatccatgcgcatgagtttgaagaattgtgttagcggtgaggtgagatatttcaatatttgataattgatagtatatatatggggaggggaagagtggatttgaagaggatcgagaacatcatcaataggcaagtgactttctccaagagaaggtctggcttgcttaagaaagcgcgcgagatttctgtgctgtgcgatgctgatgtggctctcatcgtcttctccacta

SEQ ID NO: 16241 - DNA, 652 bp, Glycine max
gggaaaagagatggcccgtttttgttgattttagtgggttttggcgggtgaagtggaaatggagcggtgagggaaggaaattagggtaattgcagtaatgtcgagttagggttttggcgtcccatttataaaggtctgctgcggctgtgcgcgcgtgtgtctgcattgcgagtgtcgtcgttttgattccccccttctctctctctctctctctataaacttctctctcgtcccctctttccttctcactctctctctctctcaccccactcactcactctcttactctctgcatgcttctgcttcttctctcgctctgattccgcggaatcaattcaaatcagcttctgggaatcgaatctcagatctcggagatcagaatggtggatccaactggaaaaggatcggaggttgaagttgaggactcaaactcaaaccctaacgctccttcctcagggaacagtccgagcagcaacaatgagcagaagaaaacctgcgccgattgcggcaccaccaagacccctctctggaggggtggtcctgcaggacccaagtctctgtgcaacgcgtgcgggatcagaagcaggaagaagaagagagcgatcttgggaataaacaaggggagcaacgaggacggaaggaaaggaaaggg

SEQ ID NO: 16242 - DNA, 446 bp, Glycine max
  unsure (1)..(446): unsure at all n locations
ggtggatgacggagtgaatggtgagggagcgggtgtccagatagaaggggccgctgtggggggtttggagactgaagagtgccgaggcgtggatggtggatgagggcaagtccaggtagagactcagggctacgtgccttgtccttgcttgccttgagtccgtgaacgagtgaggatcaactgctgccatcgtcctaaactctctctctctctctctataaacttctctctcttcccctctttccttctcactctctctctctgtcaaccgactcactcactctcttactctctgcatgcttctgctttttctctcggtctgattccgcggaatcaattcaaatcagcttctgggaatcgaatctcagatctcggagatcagaatggtggatccaactggaaaaggatcggnaggtgaagtgaggactcaaactcaaaccctacgc

SEQ ID NO: 16243 - DNA, 403 bp, Glycine max
ctcgagccgcgcgtgtgtctgcgttgcgagtgtcgtcgttttgattcccctctctctctctctctctccaccttcactcactctgcatgcttcttcttcttctctcactctgattccgcgaaatcaaatcaaaatcagcttctcggaatcgaatctcagatctcggagatcagaaatggtggatccaactggaaaaggatcggagattgaagtcgaggactcaaactcaaaccctaacgctccttcctcagggaacagtccaagcagcaacaatgagcagaagaaaacctgcgccgattgcggcaccaccaagactcctctctggaggggtggtcctgcaggacccaagtctctgtgcaacgcgtgcgggatcagaagcatgaagaagaagagagcgatcttg

SEQ ID NO: 16244 - DNA, 963 bp, Glycine max
gatggcccaaatttccaacgaagcacaacatcaggatggcaatgtattggcttgcacaaggatgtcaacctggagactccctggtttttcattattctggtcatgtatcacagcaaaggaactatagtggtgatgaagctgatggatatgatgaaactctatgtccccttgattttgaaacacagggtatgattgtagatgatgagatcaatgccgcacttgttagacctattcctcatggagctaagctacatgcactaattgatgcctgccatagtggcactgttctagatttgccatttctttgcagaatgaacaggagtgggcaatatgtatgggaggaccatcgccctagatctggtgtatggaagggatctagtggtggagacattatctgcttcagtggatgcgatgatcatcaaacttcagctgatacatctgctctatcgaagattacatcgactggggcaatgacattttgcttcatccaagccatagagggtggtcatggggctacctatggcagcattcttactgcaatgcgtactgccatcagaaatgttggcagtggtggtggcggcagcgctattgggggtggtgatgtcgtaacatcccttctctccatgcttttgaccggaggtagtctcagcggcgtcggtggactgagacaggaaccacagttaacagcttgcgaagcatttgatgtgcatagaaaacctttttcattatgatattactattactcaatattctttattctacaatttgttttcctcggctctgcccctgtacacgactaaattgattaattaatgtattataaagtagagagtatccttttttttctgaaatcactgaggatgtgtttggatgaatttatgtctacccttgagattgtgacatgctcttataataatgactttggttgctgctgcaatcgttggattaaaaaaaaaaaaaaaa

SEQ ID NO: 16245 - DNA, 897 bp, Glycine max
agcacgaaacactttgagatcatcttcaatcatcattaacacattccaagacttggatggagaagccattgatgtccttaggatcaagaaccctaacatatataacattggcccacttcacttgattgataggcattttcttgagaaagaaaagggcttcaaggccagtggatcaagtttatggaaaaatgattcaaaatgcttagcatggctagacaaatgggaacctaactcagtcatatatgttaattatggaagtataacggtgatgacagagcatcacttgaaagaatttgcttggggactagcaaatagcaagcaacatttcttatggataataaggccagatgtagtaatgggtgaatctatatctttgccacaagagttctttgatgcgatcaaggacaggggatatataacaagttggtgtgttcaagagaaagtgctttctcatccatcagttggggcctttctaacccattgtggttggaattctacacttgaaagtatatctgcaggtgtgcctatgatttgttggcctttctttgccgagcaacaaacaaattgcaagtatgcatgcacaacttggggaatcggaatggaaattaaccatgatgttaggagagaagagatagcaaagcttgtgaaggaaatgatgatgggagaaaagggaatggaaatgagacaaaaatccttagagtggaagaagaaagcaataagagctactgatgttggaggatcatcttacaatgatttctataagttaataaaggaggtttttcattacagtgttctttaagtccttattttataatcaggtgtattaaggtttattagttagataaaaatacctttcttaagttataatgggatgacaaacatgatgcaattggtttg

SEQ ID NO: 16246 - DNA, 417 bp, Glycine max
cttttcttctcaaacaaactcttgagattctctaattccgttccttccgtaggcccctagatccggagatgaagaaccccaggaagaagaagaggccgaagccggcgcagaagaaggtacttgaggagaacaacaaaggtgttgttgttgctgggaatgaaaacgaagaagaagagaagagaaaacgcagcgttttggaggcactggttgaggctttctccttgtcttcaatcagggaagcttccatggcctatgagattgcagggggagatcccgacagggcttcggagatcctgaggaagggttcttcggacagattcgaggattcgttctcgtgtttttcttatggttcttcttctagcggcggaagcagcggtgggggcggttcttcttcttgttcggggttggaattgggtt

SEQ ID NO: 16247 - DNA, 481 bp, Glycine max
cggaaactcgatcgtcttgcctagcctaatataattggccaccatgaccgatgaacaacgagaaccacaagcttccccgagcaatggcgtccacaagttagaaagaaaacaaatagctgaaagagaaagaaaacaaatagctggaagggatagatcggtttttagaggcaggcgtccacgacctgggttttctgattcattttcaagcactgacttggaagctttagagattgaagagggctctcctaggagtcaagggtctgaaaccccaagttcaagggccagcacttctgattcggagagtcagggatcttttgctggggcacctaataccaataaccaatggcggggtttctttaaactactcaagaaaggatcacaaatgcctttccaaccttttcacccacttaaaaatgttccaaaactgacaggaagaaaagcaagaggatcagggaggacctcattccttctctgaattctc

SEQ ID NO: 16248 - DNA, 423 bp, Glycine max
cccacgcgtccgctgctttgctttctgagattggactgaacatccaagaagcacatgccttttctacaactgatggtttctcattagatgtgtttgttgttgaaggatggccccatgaggaaaccgaaaagcttaaagctgctttggaaagtggagtcttgaagaagattgagaggcaggtgaggtctagtccacaatccgtatcttctgttgacgagcccgatcaagcaaagttgtacagcgaactggatcatgtgacaataccaactgatgggacagatgtttgggaaatagatcctaaacatttgaaatatggaactcaaattgcatctgggtcatatggtgaactatttaaaggtgtatattgtagccaggaagtggccatcaaagttctcaaggctgaccatgtaaactcagaattgc

SEQ ID NO: 16249 - DNA, 388 bp, Glycine max
cccacgcgtccggcaaatctggccctgtctctgctgatatgagaaatattgtggacattgaacaagaaagaagcttctacttgtatgatgatatgagggtagtgtttcctcaacgtcattccgattctgatgagggcaagttacatgtggaatatcatttcccttcaaatccaaaatacttcgacatcagctgctgaaatgccgctgtctctcagtgatttttgtatatatagttgtaaatgttgtacgtatacaattcatttctttcaattctggggtgatttgcctccatgtaactaataatttgtaaattggaatggaaaatgttcatatttgattcatagcacttgctttgacccaaaaaaaaaaaaaatttaattataatttt

SEQ ID NO: 16250 - DNA, 850 bp, Glycine max
gtaatttgtcttgtaatatgtatgaatgagctaagtggaaagtgaacacgtgcctctttactaacgaaaccaaagcatgaagatgaattgctactggtggcatgccctgataatgagtggttgtgtgttgggcttgtgcgtgggcataggaggttgtgtatgtgtggtggagaacgagaatggaagaatcatcattgatattagtcacaggtaccatcctgatatgcctgcctgggaatccaaggatagccttgggcagtttttgtggcttacaagaagcatggccaatggttctctggctaacttctcccaattcaagctccccgctcacagcggcacccatgtcgatgctcccggacatgttttcgatcactatttccattctggctttgatgtcgactctctcgatttactactccttaatggccctgcactattagttgatgttccaagagatacaaacatcagtgctggtgttatgaagtcattgaatattccgaggggcgtacgtcgtgtgctcttccgaacattaaatacttacaggcggcttatgtatcagaaggaatttgacacaagctatgtgggattcacagaagatggagcaaattggctagtggagaacactgacattaagcttgtgggaatagattatctatctgttgctgcttacgaccacttgattccagctcaccttgtttttctgaaaggcagggaaatcattctcgtggaaggcctgaagcttgatgatgtggcaccaggaatatatacggtccattgcttacctcttaggttggctggtgctgacggatcacccataagatgcattctcatcaaataataagtcaacagc

SEQ ID NO: 16251 - DNA, 1578 bp, Glycine max
aataattacagaattaaatggcatattattaaaaactgttttcgttacccttcagaaatacaacgagctgatagaggagacaagaaaagaaagagaaagagtttgcagagttgaattccgaaagaggaatggcgaagcacgaggagcttcctatcccgattaacaataacctagaacccgtctatggcggaggttccgcactcgaagaagctcagcttcgtttcgataatttgaagtccaaattcgtcgaaatcttcggtcatcatcctcaaatcttcgctcgctcacctggaagagtgaacttgattggggagcacattgattatgaaggttattcggtgctgcctatggcaattcggcaagacacgatcgtggcgattcggaaaaatgaggcggaaaaggttctcaagatagctaacgtgaatggtgaaaaatattcactttgtacttatcccgccgatcctctccaggaaatcgacttgaagaaccacaaatggggacattattttatatgtgggtacaaaggtttccatgactatgcaaagttgaaaggagtgaatgttggtgaacctgttggacttgaagttcttgttgatggaacagtgccgacaggttctggactatcaagctctgcagcgtttgtctgctcatccacaattgctattatggctgcttttgatgtgaacttcccaaagaaagaacttgcacaagttacatgtgattgtgaacgacatattgggactcaatctggtgggatggatcaggcaatctctgtcatggccaagactgggtttgcagaactgattgatttcaacccaattcgtgcaacagatgtgcaacttcctgctggtgggacttttgtgatagctcattctttggcagagtctcaaaaggctgttactgctgccacaaattataataatagggttgttgaatgccatttggcttctattgtgctcgctataaagctagggatggatccaaaagaggcaatatcaaaagtgagcacactgtctgatgttgaagggttatgcgtatcatttgctggtatttataactcatctgatcctgtacttgctgtaaaggaatatttgaaggaagaaccatatacagctgaagaaattgaagcagttacaggggaaaagctgacttcatttttgaacaataatgcagcttatttagaagtgttaaaagttgcaaagcaatacaagttgcatcagagagctgctcatgtgtattcagaagccaagagggttcatgctttcaaggatgtcgtatcttcgaatctaagtgacgaggacatgctaaagaattgattgagttttgatagtgcaaagggataagagccaaatgttgaagagtaattttaaccctagaaaatttcagttacagatgaatggagtttgaaactctgattttacatttctattatcaggtgcatgcaaccattccatttgctttcgcttgtagacattaactgatagcaacatgatgctatgctacagtgcttgttgtaatatattgatattatatgcttggtttataagcttttcatttaaatgtgacagtaagacatcc

SEQ ID NO: 16252 - DNA, 936 bp, Glycine max
cccacgcgtccgcccacgcgtccgcccacgcgtccgactgtctgatgttgaagggttatgcgtatgatttgctggtatttataactcatctgatcctgtacttgctgtaaaggaatatttgaaggaagaaccatatacagctgaagaaattgaagcagttacaggggaaaagctgacttcatttttgaacaataatgcagcttatttagaagtgttaaaagttgcaaagcaatacaagttgcatcagagagctgctcatgtgtattcagaagccaagagggttcatgctttcaaggatgtcgtatcctcgactctaagcgacgaggacatgctaaagaagcttggcgaccttatgaacgagagtcatcatagctgcagcgttttatatgaatgcagctgtccggagttggaagaacttgtaaatatttgtcgtaacaatggtgctcttggggcaaggcttactggagctggatggggtggttgtgctgttgctttggtgaaagagagcatagttccacaatttatccttaatttgaaggaatgtttctaccagtctagaatagacaagggcgttattaagaagaacgatcttggcctttatgtatttgcttccaagccatcaagtggtgcggctatcttcaagttttagtgttctttaacccgcttcccttcttatggctgcaactttcttcccgagatctaaacacaaattagatgcaatttctgatggagtaagattaaatggtaccctcatcgttaagttattttagttgatacaatgaaaacaaataatgttattgccgaatggctaagtcatcttctgtaatggaaaaataaacgtgttatcacgaaaacagcgtttaaactcttacgtagttgctatgattagataattgtaaaaatccttaatgttttaatatatattgattttggaac

SEQ ID NO: 16253 - DNA, 416 bp, Glycine max
tgtgctgttgctttggtgaaagagagcatagttccacaatttatccttaatttgaaggaatgtttctaccagtctagaatagacaagggcgttattaagaagaacgatcttggcctttatgtatttgcttccaagccatcaagtggtgctgctatcttcaagttttagtgttctttaacccgcttcccttcttatggctgcgactttcttcccctgagatctagacacagattagatgcaatttctgatggagtaagattaaatggtaccatattttctttgttaaattattttagttgatacgatgaaagcaaataatgataatattgccgaacggcttttatgtcgcagccttaacccgcttcccttcttatggctgcgactttctgtaatggaaaaataaacttgttatcacc

SEQ ID NO: 16254 - DNA, 429 bp, Glycine max
acgtccacgcgtccgcttgaagcaaagctgtgtttgcattgattggaatttcggggccagagattatgagggacattgcgtataataatgtactaattgcagtggtaaactattgccatggaaagaataatcgattattgattcatactagaacccaaaagttctaaagatcaaaagaatcaattataattaaaaataatcaattaaatatgtttgaaattgttgcaactggttttcaaacttgacttttcctttcatttttcacttgcctataaaaggttaactttcatgtgatagtgagagagagtaatttcaaattttacaaaagaaaaacttcaaaaaaatggaaaaaaaaatattttatcaaaatacaaaaaataaaagagacaaaattaaattttacaaaagagagaaaagaatgaaaatttg

SEQ ID NO: 16255 - DNA, 627 bp, Glycine max
ggcaccattgaaagtgtcggagaagtgagagcagtgtcaggcatgcaccaacgcaaggcagaaatggcgagacaagccgatgcatttattgcgctgccaggtggatatggcaccctggaagaactacttgaagtgatcacctgggctcaactaggaatccacgataaacccgtggggttgttgaacgtggatgggtactacaactcgttgctgtcattcatggacaatgctgtagacgaaggtttcattacacccgctgcccgtcacattattgtctctgcccaaactgcccaagatctcatgtgcaagcttgaggaatatgtcccgaagcactgtggcgtggcaccaaagcaaagttgggagatgaaccaacagttataaaaaagttaacactgcaaattaccaaattcagatacttgtcgttaaccaagtcgaatctacatattttctctaccccattagaaaatagctttctcaatacaaatcaagccttttttggctgacactgtgtaattgcggatcagaatctgatctgtatgatccaagaacgtgacactagaaaacttccatcattaattgttggcgcccactagattctgtgttatatagtaaagcttgcttcagtgc

SEQ ID NO: 16256 - DNA, 276 bp, Glycine max
cggacgcgtgggcgaggcactcgtccggttcggcgtctatgtcaccgctcatgtacactttcgccgacaatcccagcaacctccgcaagttcatgggacatgaagcaaatcagagagtttgattgggaagtatggtgtggaagcttttgggagcacgccctctctgctcatattcttcttctttgcttctcacacccctcttatttcgcagcaaaataagcttggttcatggccaggaacctattttaaggaacctctgtaacatgaaaccatctc

SEQ ID NO: 16257 - DNA, 315 bp, Glycine max
gttcggcgtctatgtcaccgttcccatcattctcatgtacactttcgccaacaatcccagcaacctccgcaagttcatgggacataggtcatacattgaatatcccccagaggcagaaaagccaccatcaccggaggaacttagggaaatggcacgggagatggctcgtaaaaggaacagttcttgatgctccacgtgattgttttggctgcaccacagtggttgtgtaaccctgtcactgattatgcagtatatatgtttattgttttgttgtgtaataatagataatgatttataaactacactactgaaaaa

SEQ ID NO: 16258 - DNA, 456 bp, Glycine max
cagatagctatgaatttgctggcaatatcatacacaagcaccggcagattggtaatgctgtgcctcctcctctagcatcagcattggggagaaagctcaaggaagcagtggacagtaagagctccacttagaagatgggccttctacattaggtcatgcttattgtattcataacagtcaccaagatattgcaaatcatcattccgggttccaaaaactagaaacccttgtatatagtgatatccattggtcatttgttgaggctaattccttgtttaactttcctcaaccaaggaattgaatggatgatgctcattttctatcaactaggattttcttgattagatggtattttggctgtttatgaaagaaatggttgggaattgattacctcccaatgtgtagttgaaaattgagaccaattttttttaacctgttatgaatatttgttgttgc

SEQ ID NO: 16259 - DNA, 1362 bp, Glycine max
ttatactagcctacaggcttctgggctctggctcgggtgtgtgttctgttacccttgcctttcctctggagttgggttcgggtgacaacacaaacacaaacacgatggtgtgttgatcactctgtcttctctttctctctttccatttgatgtctctccccaccaaacggtcgagcaccgctggttcctccctgtcgccgccacctcctatgaaaaaggccaagtccctcctcctccgctcctcctccgacgaccacgacgccgttttggacccttcctccatgcctctcgacgacgatctccccaatgcccgcgccgccaatctcgcccgcaagaaagccaccccgccccaacccgccaagaagctcctcatcaagctccacaaagctaaaccaacattgcccacaaatttcgaggaggatacatgggcaaaactaaagtctgccatttgtgctatatttttgaagcaacctaactcttgtgacttggagaagctttatcaggctgtgaacgatctctgcctttataaaatgggtggaaatctttatcaacggattgaaaaggagtgtgaagcacatatatctgcagcactgcagtctttggttggccaaagcccggatttggttgtttttctgtctctagttgagagatgttggcaggatctttgtgaccaaatgttgatgatccgtggtatagccttgtttctggataggacatatgtgaagcaaactgcaaatgtccggtcattatgggacatgggcttacaacttttccgcaaacatctttcattgtctccggaagtagaacacaaaactgttacaggtcttctacgaatgattgaaagtgaaagaaaaggtgaagcagtggatagaactcttctaaaccatcttttgaagatgtttactgctctgggaatttatgcagaaagctttgagaagccattccttgaatgcacatctgaattttatgctgctgaaggcgtgaaatacatgcagcgatcagatgttccagattacttgaagcatgtggagataagattgcaagaagaacatgaaagatgtttgatctacttggatgcaagtactaggaagccattgatagcaacggcagaaaagcaacttcttgaacgtcatatacctgccattcttgataagggcttcgcaatgcttatggatgggaatcgtattgaagacctccagagaatgtactcactcttttcaagggtcaatgccctcgagtcattgaggcaggccattagttcatatatcaggagaactggtcagggcatttgtttggacgaggagaaaagataggatatggtttcatcccttttggaatttaaggcttctcttgacacaacat

SEQ ID NO: 16260 - DNA, 715 bp, Glycine max
ttcacgtccctgtgaatgatgagtggactgcaatcatctaatattttactagacaaagactttgagccccatctcgctgatttcggcattgcaaaaagtctatgcccatctaagacccacacttcaacttacataatgggcacaattggctacatagaccctgagtatgctagaacttcccgcctcactgagaagtccgatgtgtatagctatggtatcgtattgcttgagcttctaactgggaggaaagctgttgacaacgaatcaaacctccatcatctgattttgtccaagacagctaatgatggcgtaatggaaaccgttgatccagatattactaccacatgcagggacatgggagcagtaaaaaaggtttttcagcttgctcttttatgcacaaagaagcaaccagtcgataggcctacaatgcatgaagtgactcgcgtctgggaagccttgtgccatccataaccctaccaaaacaaactgactcaacacaagtgctgctacctgattctcagtcatctgctaaaatgcaatgctacaaagatgaatatgcaaatctcaaaactcctcacttggttaactgtccttccatgagcacctctgatgcacaactcttcctcaaatttggggaagtaatatcacaaaatagtcactgaggattttgataatcaaattgagaattaatgaatcattgtatgttttaagccac

SEQ ID NO: 16261 - DNA, 555 bp, Glycine max
aaaaatcactgataaaatcgcaggcgaacgtcacagtcactccctctcctcacacgaaaaaagtatccccccaacccaccccaccccacccccaaccctcaacttagggttcttctgttcttcttcttcttctcctttaaccaaacaacaagaaaaaaaaaatcacattccccaaaacacccttctcgctccgcatggcgaaaacgaggccaggcagaaaggacgtggactcgtacaccataagaggaaccagcaagatcgtccgagctggagactgtgttctgatgcggccctcggacacgtcgaagccgccttacgtggcgcgcgtggagaagatcgagcaggacaacaggagcaacgtgaaggtgcgtgtgaggtggtactaccggccagaagagtcgattggtggtcggagacagttccacggggctaaggaactgttcctctccgaccactacgatgtgcaaagtgcacacaccattgagggcaagtgtgttgtgcactcttttaagaactacaccaagcttgagaatgtgggtgctgaggattactatt

SEQ ID NO: 16262 - DNA, 265 bp, Glycine max
gacacaaaaaaagtgaaaccccccacaccacacccaaccctcaccttagggttcctctgttcttcttctaacccaacaagaaaaaaaaatcacattccccaaaacacccttctcgctccgcatggcgaaaacgaggccaggcagaaaggacgtggactcatacaccataagaggaaccaacaagatcgtccgagctggagactgtgttctgatgcggccctcggacacgtcgaagcccccttacgtggcgcgcgtggagatgatc

SEQ ID NO: 16263 - DNA, 417 bp, Glycine max
gaagatggaggctttgaggtaataaagaaggcgatattgaatctatcgcttcgccacaaagatcacatcagtgcatatggagaaggaaatgagagaaggttgactggaaagcatgagacagcaagcatcaacacattttcttggggagtggctaaccgtggttgctcaatccgtgtgggaagagacactgagaagaatggcaaaggttacttggaagataggcgaccggcttcaaacatggatccatatgttgtgacatcattacttgcagagactacactattgtgggagccaactctggaggctgaagctcttgcagctcagaagttagcattgaaggtctaaacctattgattgatgaggagctggaaaatactttcactttccttttagattatctatattataatgatcttg

SEQ ID NO: 16264 - DNA, 943 bp, Glycine max
ccacacacccgcgcacgattcgaacggggcagcatctccgacttttcctcccaagtttcccttcgattttcccgagaaaatctcgttccgagaaaatctagctcaatctctgcaacactcatatatccacagccacgcgtccgcccacgcgtgcggagaaacgcgagtccggtgtacgcccggcagtggagcggcggttccagcagcaccggttcctcgtcgccggcgatgtcgccggctcatcctcagtcgcgcctcggtcctacttctgccaccggtctctccaccgtcaagcgcacgcaaaacgtggccgccaaagccgccgcgcagcgacttgctcgcgtgatggcgtctcagaataccaccgccgacgacggcgaggacgacgacgatctcgatttccggttcagcgctccgtctccggcctctctttcttccttctccagcaactccggcagtaaccggagtgccagcgcgaatgccaccgccattcctccgatttcggtcgccaggcctaacagatctccttctcctgcggtcggaactttgtagagcatactcattcggttcgttcaacatcagccggaagaccggcagtttcagttcgctcggcggcagtggtggctccgaacaaatccacactccgaacgcctatggctatacctcctattgaccctcctaccaatcggaatagagacaaaaggtttacatcagatatatccatcagaccacttaactcaaaagacacaggagatcagcgtgaagcttctgcactccgtgatgaactcgatatgctacaagaagagaacgaggttttattagaaaagctaagacaagcagaggaaaaacgccaagaagtggaggccagaacaagggaacttgagaaacaggacgcttctcttggagaaggtgtatccctcgaagctcaactgctgagcaggaa

SEQ ID NO: 16265 - DNA, 489 bp, Glycine max
tagaaaaccgaatataagaagctctttgacaaaaaataaaaagccacgtattctcctcggtctattctctgccgcggacccattacgacgaagcggcgtcgttttatcccacacagccgcgcacgacttcgaacggaacagagactctccgacctttcctcccaattttcccgagaaaatttcgcttcgagaaaatctagctcaatctctccgcaacactcatatatccacaacaccttacacttatggatcggaggagaaacgcgagtccggtgtacgcccggcagtggagcggcggttccagcagcaccggttcctcgtcgccggcgatgtcgccggctcatcctcagtcgcgcctcggtcctacttctgccaccggtctctccaccgtcaagcgcacgcaaaacgtggccgccaaagccgccgcgcagcgacttgctcgcgtgatggcgtctcagaataccaccgccgacgacggcgaggacgacg

SEQ ID NO: 16266 - DNA, 499 bp, Glycine max
gtgccacactagttttttttctacacatacatatatcacaagaaaaattaagcaacgattcaagaagaaaatgggttctgaacttgaagctcccattcacgtcctcatggtgtcctatccagcacaaggacacataaaccctttgctcagactaggtaagtgccttgctgcaaagggcttatttgtaaccttcaccacctcagagaccgctggtaaaaacatgcgaaccgccaataacatcactgacaaatcagtgattcctgtcggcgatggttttctcaagttcgatttctttgaagatggcatggcagatgatgatgatggtcccaagaagataaatctcggtgatttcagtgcacagcttgagcttttcgggaagcaatacgtttcccaaatggtcaagaagcatgctgaagaaaaccacccattttcttgcatcataaacaacccttttgttccatgggtttgtgacgtagctcgacatggatcctctgccatg

SEQ ID NO: 16267 - DNA, 511 bp, Glycine max
cagcacttttgctcacattatcttcatcttcttcttcatcgaactgcggacgcacttagcagcagtagcagaaatggctaccacttctgcttcattcgctcgcttctccgtcatatcgcgaccttcttcgtcaaatccccaattcatcctcttcaacgccgctccccgaaccggaacccctcattcccgaaccggttcggcccggttcaggtgcttggccggccagaccgggttcttcacgaaactagggcggttgataaaggagaaggcgaagagcgacgtggagaagctcttctcgggattctccaagacccgcagcaacctcgccgtcatcgacgagcttctcctctattggaacctcgccgacaccgatcgggtcctcgacgaactcgaagaggctcttttagtgtctgattttggtccaagaatcactattaaaatagtggagaatttgcgtgaggatatattttcagggaagcttaaatcagggaatgagataaaggaagcactg

SEQ ID NO: 16268 - DNA, 422 bp, Glycine max
tcgtagcattgtttggctcgagaagttgtcaacttaatagcatgtgaaggggaggaaagagtggaacgtcacgagcttctgaagaagtggagatcgcgttttactatggctggattcgcaccatatccactgaactcgtttattacttgttcaataaaaaatcttcagcgaagctaccgaggacattacactctagaggagagagatggggctctgtgtcttggttggatgaatcaagttcttattacctcttgtgcttggaggtgatgatccaatggcaactggttcatttttgttatttcagacttttagttagtttatgtatcatcataatcttcttacgcagaattcatagtcaagttactctgtagtttgttataaaataaaataaaaaaagaaacactagatttatgttaataatg

SEQ ID NO: 16269 - DNA, 1129 bp, Glycine max
acggctgcgagaaacagaagggggggaatgtactgtgcaacagaaatggtggcaccaaccttgaatgtttttccttcttcttctctaagactaagactcgaattgccctctcttcttcactcgaagctcaaacaagcacgctttccgtttccgtcgttctcgcttcaaaaccctaccttccgtcctgttatctgcagagcctccgagtcacccaccgttccacctaagaagcgttcctctaacaacagaaaccctaaaaacaacagcaaaaagaacagtaagagtaactctgtcactgttgattccaactccatttccaattcttctcttccgcctcctcttcccacgtcactgcccaaaccacccacgggattcgtcgtagacgaacgcggtaaagttctatctgcttccagagaccgactcgccactctagttgatccggcgaataaccttcccttagagtgtgtcgtaaggagagagttcaagagttctcaaggagatgattgtatgttgctctgccccgctgatatgcctatccaaatattgaagaacacgagcgaaggatggttggatgtcagtgatgaggaacttgaatctattctgccctctgctgcttatgcacttgccaagatacgcttgtatctggttcatagtggatactgttatacagctcgtggtggtttttgttattcagaagaggacatatttgactttcatacagatagtaaaggtgatagcttgccaaccgaaggtgtagaaattgcacacttcagtctggaacaagcacacggcatgatatatacaccatccgatccccttctttttgttgctgtgaaggctcggattcgggttgaggttgcattttgctgacgatgaactgcttgaggatccggctatcactagcgctatagatgaagagactgagtttaatgccttggtggaggaagaagctgcgctccttgattcactcttgggtaaaagataaccccatatttacttttttgcagcagagctgtcccagctcccaagacccaccgatgttttgcttttacgtgtttgtttgcatgttgaagaaagaagctactttttgtaacttcttccttaacgcagatcaaaagttaccaaacat

SEQ ID NO: 16270 - DNA, 567 bp, Glycine max
cccagcgcaacatgcagaaccccgtggccacactccagctctgcgtcgccgaacgctgcctcgtcttccagattctccactccccttcaatccctccctctcttgtttccttcctcgctgaccctaacatcactttcgttggtgttgggatccaagaagacgtggagaagcttctagaagattataatcttaacgtggcgaatgttcgtgaccttcgctccttcgctgcggagaggcttggcgaccttgagctgaaacgggccgggctcaagtctttgggcctccgcgtgctgggcctggaagttgccaagcccaagcgggtcaccaggagtaggtgggacaatccctggctcactgcccagcaggttcagtatgcagccgttgatgcctttctctcttacgagattgatcgccgtttgagttcttataattaattcatgccttttgtttttttttccttttctcacttgtcttgtgtaggagtatttggtaattttgtgaattgtaacacttggtgttgcttgctatgttaccattcgaatgcttaatttgatttttctgaaattt

SEQ ID NO: 16271 - DNA, 851 bp, Glycine max
gttactcaatcttcacttattgacagattcacggcgcacgagccctagctcttatccgtgccgttgaatctcgccgtccggctgctgctgttagtcgacggagctctcctactattcaaaacagaagctatgaaatcgttcaatataaatggaaccactctttctgttgcactctacactgacgtaacaaattcaaaagaactcttggaaagtatgcaagccgggacattggagccagaagttgcattcctcaatgctttacttattccagatattttccctgttctagcagctgcacacaaaacacttgtagccaagtctcgagactctttgaccacacgcactcttcattcagagcttggttacaactactcagggtctaagcatattactgaatctttgaaaagatgcggcatctctgacagcacaacttgtatccttgctgctcgatttgatgctagtcctgatgagataaaagctatagggaagctcattaacggcaaagagattgacctggaggagctagaagggagagcaaaccaatcccagatacaaaagatttacaagatatcttcctcggaacttggagtatcatcacttgctgatgcaataacttgtcgtatagctgctcgtgatgccctgtgagaagaatgaacgtgatctgcttgagttttcttatctccttgatctattgcagaaaatgtcatgaaatttataagaaagcttcaggctacctttatatatactttagctttcatgtgctgtaatgctgatgtatttttttattatcattcttactgcagtaacatttcttatggaaaataaaaaagtagatggtcatttgatctggt

SEQ ID NO: 16272 - DNA, 386 bp, Glycine max
  unsure (1)..(386): unsure at all n locations
cgccaaagangctctggnatagcangccaannngaaaagcagcgtgaagaccgaggattgtccctccgatggacttcccgagttcgctctcgttggccgctccaacgtcggcaaatcctcgctcctcaactccctcgtccgccgcaagaagctcgccttaacttcgaagaaacccggcaaaacgcaatgtataaaccattttcggattaataatagctggtacctggttgatttgcctggttatgggtatgcatctgcaccgcatgaacttaggatggattgggaaaaattcaccaaaaactattttcttaaccgctcaacgttagtttcagtattccttctaatagatgctagcattcctgctaaacaaattgatctcgactatg

SEQ ID NO: 16273 - DNA, 684 bp, Glycine max
tcgcgttgctgcagcttttgccaatatgtgggttcctttttgtcgaaagcacaacattgaacccaggaacccagaatcttattttaacctgaagagagatccctacaagaacaaagtgcggtctgactttgtgagggaccgcaggcgagtaaagcgtgagtatgatgagttcaaggttcggattaatggccctcctgattcgattcggcgccgatctgatgcttataatgccagagacgaaatgaatgcaatgaagaagtggagagagaatggaaatgaagaaccaatggagagtttgaagattcctaaagccacatggatggctgataaagaacccagctgctggcctggtacctggacaactgctgcaccggaacattccaggggtgatcatgccagtatcatacaggtaatgttacaacccccaagtgatgaaccactgactggcaaaacatcagattcaaatgccttggatttcagtgaagttgatattcgtcttcctatgcttgggtatggttctcgggaaaaaagacccggctttgatcacaacaaaaaggccggggccatgaatgcccttgttcgagcctcagccataatgtccaatggccctttcatacttaatcttgactgtgaccactacatatataactctcaagcactgagagaaggaatgtgcttcatgat

SEQ ID NO: 16274 - DNA, 407 bp, Glycine max
caagggtttaacaattttctgggtgtgtcgaacgagggctcagcttaaagtttgttccttttttctcaatcgttttccctcacggcacattcttcttcttcttcttcttccaaaaaacaggaacatggatcctccgattaagaaaaaggcattgtctcgtcctagcttgagtcctcagaagaaagacaagtgcatagtttttccccttgtgaggtataatgaattccggcagcctgtttgccaggcttgtaatgtagttatgttggagtctatacgtgcacacctagcttctcctgagcatcacgaggtaatggaaaaactgaaagctaatgctgctggatcaactgaagataaggatgcaaagccagttactgttaccaacaactctcccaaggctaatccagaac

SEQ ID NO: 16275 - DNA, 614 bp, Glycine max
gctagcatatataacaagcaaccctcaccatttatattgtttcagcgaagaagaagggagaaattgatgttctttaatgtgaaaaagggttggaacggtttttgattttaaccctgcaaagagccttcctttgcggtttttcttcttgagaagaagaaggctctttgttgttgttgattttgaagaaggaaagaaggaaggaagaaaatgttgaggctatggatttcttatctgcaattggtggaactttttgtgagttcattggttcatatgctttatgggttttacatatttagctccgctgtggctggggatctctcacaggttctcaatgaatattttcacaaggctaataataatgtgaatgttgaggtcaaagaggaaatttccaagctcaataatgctaatgatcttcctcctattgtgctggttcatgggatttttggatttggcaaagggagattgggggctttatcgtactttgctggggcagagaagaaggatgaaagggttcttgtccctgatttggggtccttaaccagtatctatgatagggcacgagaattgttctattatttaaaaggtgggcaagttgattatggtgaggagcacag

SEQ ID NO: 16276 - DNA, 484 bp, Glycine max
tttagattgcaaagaaataaatcttaagaaatgtccaaggagcactctacaaagccaatgcattaaatatcttggaccaaaagaaagagaagaatacgaagtaatagttgaaaatggaaagctagttcacaaaaaggatggtaggcttgtggacactgatgagaaatccaaatggatatttgttcttagcaccacaagggccttgtatgtggggagaaaacaaaagggtacgtttcaacactcaagctttctttctggcggtgcaaccacagcagctggcagattagtggcccatcaaggtgcccttgaggctatttggtcatatagtggtcactaccaccccacagaagagaacttcaaagaatttataagctctcttgaggagcacaatgtagacctcaccaatgtaaagagatgtgctatagatgatgataatccaatacttattgggacctaaattttttttcctaaaaatttttttttt

SEQ ID NO: 16277 - DNA, 343 bp, Glycine max
gctggaggcaaggcatcttgtcgtaggtacttctctttggatggggttctatccgatgcttgtggacagcctgtagataaggagaatgaggtttttgcttcactgttgtatgccgacacgggggcaccagtggagaatacagccgatgatgaagcaccccttttagctagttatgatggaatagaattttcctcttgtgaaagaccaagtaagcttttgctgggacgtgcttcatttaagctcaatatatctcagctttcatccaagtgtgacaacaggttgttactcatcagctcttgtgttccaaaactaggaaagtatgcttttcttgaggcatattccc

SEQ ID NO: 16278 - DNA, 859 bp, Glycine max
tcgattttaattaatgcaaaactggaatttatacagatatgtacaacagtataaggcttcatagtgtactacaaagaattagatgtaacagtaacatataacctatacaaactctaaagaatcaaagaatgatctgctgtgcaatgttttttagcctgttctgatgaaaatctacattgcctcacaaaacatacagatttcgtgtatttaaggaataacgttagtacacttgtagggataggcgtgcttgacattgtggctcttaaaagatgatgctcttaagagctgttgtttccgtggaaaatgacacctcaagcaattcgcaagggatcaaaatcatattgccaaaactagcattgcttccgtgtaatctttggaacaaaagctttggtatcaaatgcacaaaattaggaagtgtgatgatgagagtcatcattgcacatgcactcaggaccaggatactttgtgacatccctcccagacttgctagtcctgaattctggctgacctaatgaatcctgatgcaattccttgataatcctattgaactcttcttcggggagggaagaatccagaaaataggggagcatctgtcttttgtttggggttatatatttcttgtgtcctgcgtaggcccggtgaccctgaaataacatttagtttcaataattatagaaattgtcacattaagaatatgagttattacaatataattatagaagcggccatctatattacttatataaatctttatacctgaagtgcatggcccatattgcttccattagatcgcatgaaaccatgagttttctcagagcttatgtaatcaatggcagccattagagaagctttatttgca

SEQ ID NO: 16279 - DNA, 293 bp, Glycine max
tagtacaaggcttcatactgtaatataaagaattatacgtaagtatcaagagtaatatatatcctatacaaactctaaagaatcaaagaatgatctgctgttcattgttctagcctattctgatgaaaatctacatggcctcacataacaacatacagttcttaagagcaccatcttttaagagccataatgtcaagcatgcctatccctacatgtgtattcaccttgtgccttaaatatacgtaactgtatgttgttatgtgagcctatcctgatgacaatctacattgcct

SEQ ID NO: 16280 - DNA, 540 bp, Glycine max
ttcgtccgttcacgcgtccgttgatctacagattatagaaagcaaaccaacattactagctagtggagtatttaattatacttcacatgctcccttataatttttggaaattgatatataccaaagccgtaagatttttcccatctttctcgtgatatagttcttctggctcacaagccaataaaggcaaccacaaccttcaacttcaacagcacttgatcacattcactgtctagtgattcgtgatccaccttcacttcccgtttccaataatttaaatcacactctaatcagttctcaggattcctgtttgcatcatattcacaattggaacttcaaagtacaagcttttgagatttggaggttagctctttgcaaggaattgaattgttgcacctcattaccatctgtgacatctgaaattcaggtttcttagtattatttgagaccaacacaatggtgtctgcttgtgtgaccttgaaagccaatacccatttagtaaaatcgagaaaagacaatccttttcgtcaagattgtggt

SEQ ID NO: 16281 - DNA, 634 bp, Glycine max
cttcatgatccttagaaaagtcaaggatacagggttttgtcagtatattgacgggcctgatcaatctgtatcaagtaagattgttcgacgcctgacaattgcaacccatgattttagtggaagtacaggaagctcacccattcggtcaattcttatcagcacaggagaagaggaagacgtatctcagcacttggttaacaaattccctaccaattacatgctactgaaggtacttgattttgaaggttctgcttttcgttatgttcctgaaaatctggggaatttatgcgcacttgaagtatttaagcttccggtatacatggattgcaagtctaccaaaatccattggcaagctccagaatttggagaccttggatataagagacacaggggtgtctgagatgccagaggagattcgtaagcttactaagctacgtcagcttctgtcttattatacgggtttaattcaagggaaggatattggaggcatgacatccctacaagagatacctaaagtgattatagatgatgatggagtggtcattggagaggtatgaaagctaaagcagttaagggaactgttggtggtaaaagttaggggagaacacgaaaagactttgagttccgtaataaa

SEQ ID NO: 16282 - DNA, 796 bp, Glycine max
tatacttcacagtctttatgataactgcatgaaataccatattggggtgcttgttgacaagtctctcatacagattagtgacgatagagttacattgcatgacttgattgagaacatgggtaaagaaattgacagacagaaatcacctaaagagacagggaagcggaggagattatggttactaaaagatataattcaagtcttaaaagacaactcggggaccagtgaagttaaaatcatttgtcttgatttccccatatctgacaaacaagaaacaatagaatggaatggaaatgccttcaaggagatgaaaaaccttaaagcacttattatcagaaacggtattttatcccaaggtcccaattatctaccagaaagtttgagaatattggaatggcacagacatccttcccattgtttaccgtctgattttgatacaacgaatcttgccatacgcgacttggaatagttccatcccgtcattggggtgtggtggcatatccaagaagttgatgtatctaactatctaagggttttggatagctgatgcatctggtctctcaaatttgaaggaattttcatttgaatattgtgagaatttaattatagttcagagtcaattggttttctgaataaactttaaatattgagtgctggttgtttccgcaaacttaggagttttctacccatcaagggatggattgaatgaatgaaacaactgtgactcaactcaacatctttttatacaaatacaatgctgcatgcaaatgaaattttgggaagaatttgtactggg

SEQ ID NO: 16283 - DNA, 1414 bp, Glycine max
ggaggaagaagaggttgaagaagtggaagaagaggatgcgatgcaaaatcatagcagtgatgaaacaaaggtggaagatgaggatgagaagtaaaaacatgctgaactcctttcaattcctcctcatgggtctgaagtatacattggtggcattcctcatgcctcagatgaggatttgaaatctttatgtgagcgtattggggaagttgcagaggttcgaataatgaagggaaaggattcttccgagaacaagggctttggttttgtgacctttagaagtgtggaattggcttctaaagccattgaggagctaaataataccgaattcatgggtaaaaaaattaaatgttcaaaatctcaagccaagcaccgtctttttattggcaatgttcctagaagctggggtgttgaagatctgaagaagattgtaactgagattggacctggagttactggtgtggaactagtcaaggatatgaagaacaccaacaataaccggggctttgcttttattgactattataaccatgcatgtgctgagtattcaaggcaaaagatgatgagcccaacatttaagctaggtgagaatgctccaacagtgagctgggctgatcctaaaaatgctgagtcctctgctgcatctcaggtgaaggcagtatatgtgaagaaccttccaaagaatgtaactcaagagcagttgaagaagctttttgaacgtcatgggaagatcacaaaggtggttcttccaccagcaaagtctggacaggaaaagaacagaattggctttgtacattttgcagagaggtcaaatgctatgaaagcactgaaaaacactgaaagatatgaattagaaggtcaacttttacaatgctctctggcaaagccacaggctgatcaaaagtctggaggatcaaacacacagaagccaggaccaggattgcttccaagctatccaccacatgttggttatggtttggttggaggtgcctatggtggacttggtgcacgatatgctgctccaggtcttgcacagcccatgctatatggaggaggtcaaaactccctcaggaatggccatcatgcctatgcttttagctgatggacggattggatatgtcttgcaacaaccaggaatgcagccacaagccccaccctcacatcatagaggtggcaggggcggtggtggcagtgggagtggcaacaggaatgtcgggagttcaagtaagggaaggcacaacaatgatggtggccatgggcgcagatatcggccatattagccggtcttgatatatagatagtagcacccccttctctcaaatgtacttggggcatttcaagctcagttaatttatcaaaatgtgctacatatttttttattaaaattttattctgcagaattacatacatgatgtca

SEQ ID NO: 16284 - DNA, 514 bp, Glycine max
tggatatgtcttgcaacaaccaggaatgcagccacaagccccaccctcacatcatagaggtggcaggggcggtggtggcagtgggagtggcaacaggaatgtcgggagttcaagtaagggaaggcacaacaatgatggtggccatgggcgcagatatcggccatattagccggtcttgatatatagatagtagcacccccttctctcaaatgtacttggggcatttcaagctcagttaatttatcaaaatgtgctacatatttttttattaaaattttattctgcagaattacatacatgatgtcagggcgtttgtaagttgaattcttcctatgttgataattaatcagttttatacttgagaacccttttttaaaaaaaaaaaaaaccaaaacaagaactaatacaaaaagatcaacatacttaataaataacttcaataaaaacaggggcagcctttctaaaggatccaagcttacttacgcgtgcatgcaacgtcatagcttttttatag

SEQ ID NO: 16285 - DNA, 391 bp, Glycine max
  unsure (1)..(391): unsure at all n locations
ttggatatgtcttgcancaaccaggaatgcagcctcaagccccaccctcacatcataaaggtggcaggggcggtggtgccagtgggagtggccacaggaatgccggaagttcaagtaagggaaggccccccaatgatggcggccatgggcgcagataccggccatattagctggtcttggtatagatagtagcacccccccttctctcaaatgtatttagggcttttcaagctcatttaattcatcaaaatgggctacatatttttttcatcaaaaaactgttgtacaatcagtcttgattacatacatgatgtcagggcgtttgtaagttgaattcttcctatgttgataattaatcagttttacacttgaggaccctttttcccatggg

SEQ ID NO: 16286 - DNA, 713 bp, Glycine max
tttcatagagatctcaaagcaagtaatgttttacttgatgaaaagttcaatcctaaaatatcagattttggaacagcaaaagcttttggaggagaccaaatcgaaggaaacacaaaaagagtagttgggacttatggatacatggccccagaatatgctgttgctggactattttcaatcaaatcagacgttttcagctttggtattttactgatggagattgtatgtggaataaaaaataaagctctttgtgatggaaaccagattcatagccttgcatggacactttggaaagagaaaaatgctttacagttgattgactcaagcataaaggactcatgtgttatctcagaagtactgcgatgcatccatgttagtctcttgggcgtgcgacaatacccgggggataggccaaccatgacttcagtaattcaaatgttagggagtgagatggatatggttgagccaaaagaacctggtttctttccaaggagaattttgaaagaaggaaatctatgcacaaatctaaaccaagtgacttcaatcgatgaattatccattacgtcattaagtggtcgatgaaaatgcagtatatgattatgtttggcaagtcgcttagattgtctatgatctgtttttactagttttaaagtaatgttttattaaatactaacttctaattgttatgtgcttatattttattacactaaatt

SEQ ID NO: 16287 - DNA, 382 bp, Glycine max
gattaatatgatgtcatgtgtgtctctccaatcttttatccaaattaagtactaaacaagtgctgtattgattagtttctagttctgatctccatgatacatgattcttgctttaaattttatgtctgcctgtaatgttatgttatgtttgaattaaagtatgtattttgcttcattatttaattgaattattgtgctatgtttgtgaaataaagcactgaatttacatctagtgaagtaaaaaaggggggtgaattcagaatggaagccctaattggagaagagtggtggataacaagaagattttactgagtaggctgggctgacaagttcaaatattggattaggtatgcattacccaattctacttcatattcctact

SEQ ID NO: 16288 - DNA, 1459 bp, Glycine max
gttcatccaaaaacccctttatgtgactcactcgagccaacaacctctcacacgcgaccaacccccccataactcataaggccaaaaccatttctcacaaaacccttcattacacacattattatcattatcacacacacaaaaaaaacctctcatttcaaagagagagagagagatttcacagaccaaattgcagaggacgacaaagttcacaacttcaaggaaaatcgaaatggcccaagtgagcagagtgcacaatcttgctcaaagcactcaaattttcggtcattcttccaatcccaacaaacccaaatcggcgaattcggtttcattgaggccacgcctttggggtccctcaaaatctcgcatcttggtgcacaaaactggaagccttatgggaaattttaatgcggggaagggaaattccggcatgtttaaggtttctgcctccgtcgccgccgccgcagagaagccttcgacggcgccggagatcgtgttggaacctatcaaagacatctcgggtaccatcacattgccagggtccaagtctctgtccaatcgaattttgcttcttgctgctctctctgagggaacaactgttgtagacaacttgctgtacagcgaggatattcattacatgcttggtgcattaaggacccttggactgcgtgtggaagacgaccaaacaaccaaacaagcaattgttgaaggctgtgggggattgtttcccactattaaagaatctaaagatgaaatcaatttattccttggaaatgctggtactgcaatgcgtcctttgacagcagctgtggttgctgcaggtggaaatgcaagctacgtacttgatggggtgccccgaatgagagagaggccaattggggatttggttgctggtcttaagcaacttggtgcagatgttgattgctttcttggcacaaactgtccacctgttcgtgtaaatgggaagggaggacttcctggcggaaaggtgaaactgtctggatcagttagcagtcaatacttgactgctttgcttatggcagctcctttagctcttggtgatgtggaaattgagattgttgataaactgatttctgttccatatgttgaaatgactctgaagttgatggagcgttttggagtttctgtggaacacagtggtaattgggataggttcttggtccatggaggtcaaaagtacaagtctcctggcaatgcttttgttgaaggtgatgcttcaagtgccagttatttactagctggtgcagcaattactggtgggactatcactgttaatggctgtggcacaagcagtttacagggagatgtaaaatttgctgaagttcttgaaaagatgggagctaaggttacatggtcagagaacagtgtcaccgttactggaccgccacaagattcttctggtcaaaaagtcttgcaaggcattgatgtcaatatgaac

SEQ ID NO: 16289 - DNA, 618 bp, Glycine max
gcttgagctctagccgcaatttcagtgtgttttttaagagagagagagaatcacgtttacatggctctgaatttgcaactaaaaaatgttgaaacaattggttttcagtttcttcataacaacgctttctctttcacttatccttttcaccatcaatatcatacccatgcctcgctctcttttccctcaccaccacaaactcgctttcgccctccgacaaccgtcttctccgccctgacggcggagcagatcgccgtgccgccggtgaggatggtggctgtggttggcaacggagctgccagccctctcaagtccgcatcttgggaacaagtcatgcttcacactgcaaagagattgaaatgggttgatgaaaggtatgaacttcttgtatttacagatgaatgtattatatctaatggaccgatgaccatgaaactccagagagaattactgaatgctgatatattggttattgttgctgttacaaacaaggaatctgttgagtggattaataacaacagaaaaactattgaaaatgtaatatgccttgactcttcaccggatttgaaaaacaaattaggaggctatgatgttcccagtgaagtgagaggaagtatg

SEQ ID NO: 16290 - DNA, 743 bp, Glycine max
acgtttggtgaatcgaatataccctctacctcgtactctattgctggtacctcaagaaggaagaccatgaagcccgccttgtccactgaagctcctaaacctggacatgggcaaggaagtaataaaattggcccttcaagtagctggatttcatctgtgcagcgcatatcttctgccaaatgaataaccaatatggtttgattctgatcaagaagattccctgtatgcattccgcaaatccgtggtatttgcttgcttcaactgtacatttttggtcaagaattttcaagtgatctatccagggagactgccaatggctgcaaggttgataaatttcaaagctcatcttctgagaccatcttgtgttgctttttccctaaggtgactgcaaacgattgtttggtataaataccagactacccaggcttggctgctttgctgtaaataaatttcaaatgtgacacgcggcaatcttgtgtatccatgtttttatgtaaaattaatgcgtgaatgtagccctgtttcccctttttgtgacttgatgataattatcattgggccatatgttatatggtgacccagtttcgtttaaattgattgacgatattatgaattgtaggtgtattttcagttggttctgttaaggtatatttgattttagtttttcacttttgcttgtaatttatttttacacggttatgctattttcactgcctaaataatataccatgtaattatatatc

SEQ ID NO: 16291 - DNA, 655 bp, Glycine max
cccacgcgtccggactagttgcaacatctgagtgctcaaaactccttttccctttttcaaatgtgacggacctctttattccattctatttatgcaattaacttgatacttctctgggataatgtcaaacttccgcttttcccagcaaatttgaagtacaaattttctttatttttcattagccatctattgaactctccccacaatcaactctgcacaattatgttcgttataatacttttgaatcttaaaatcaatataatactatgcatgtggatcaattctccctttgttctatagctagctcagatttccgaaatgtacaaccccccattcttgatcctagtctggaatactgtccattcgttttcccctaagctttgactattcggctagcattcttttgagtaaagatgtctggtttagtttgagtttagtcattaggccgttgatttttaatggatataatttgataggttgatagtgttctgcactgaaacattttatgctggaggtttagtttgagtatggttcattgggggggactgaacgtaggggaagttaatattagaaggtcactttgtatatgatttatggtgcacatcccgtagtttaagatgatggtccattgtatatacagcttagcttcaagacc

SEQ ID NO: 16292 - DNA, 545 bp, Glycine max
ggaacaagatagaagtgaagcgaacaatataacattcttgtgactgtgacaaagagatttgacttgcacgaggaatacagcttgctttctagctaacatgggctggctgggtacgagtacgactcaacttgtgtgtctttcgtgaaaggcaagacactgaagcttcaaatttcaacattctcctgttcgtgtcatcgattgggaatattgcggtgctggcaatgctaactttgtgtttctgactcattgtacttaattaatttctagctagccactctgtcatgactttgttttccttttccaccgattttccagcggctgggagcttaatatttgcgggaatggaatggaacatctctggcgtgttgacttttcacgcggaggctggcgtcaagtcaaattactgctaacaaaacgtatattacagtgttaatcccccccaatgttaggggaactctgccatgaaaaattgaaggttccgatgaaggaatgtggtcagtttgggtgataaaaaaataaagagataaatgataacttaattacag

SEQ ID NO: 16293 - DNA, 1290 bp, Glycine max
gttggtatattcaggctttaggaggggagagtttggtctacacacaccaccacatgaagagcatggtgacgccattgacgagggtcttaccctttcgtcacccaaatggccataatacccttccattttctcttacacgctacccttcttcaccaaacttctccttctcctcccctctcactctcactctttccatggctgcttcaccccaatcctccgctccaactgtgtcgcctggtgatgttaacatcgacaaagatggtgtatttcaattgattcaagctcatcaggaaaaagctgctagacttccaccagttgaggagattcgaactgtccttgatcgtagcgtgcgcgggatgctctctacattctcaaagaagtttgatggttatccatcagggtctatggttgactttgcatgtgattcaaatggatatcctatattagcagtgagcgacttggcagttcattcaaaggacctaactgccaatcctaaatgttcattgcttgtggctagagatcctgaagataggactgatttagtgattactgtacatggtgatgctatctctgttcctgaaaatgaaagagaagccgttcgagctgcatatttggcgaggcatcccaatgcattttgggttgactttggagacttccaattcttgcgcattgaaccgaaagttgtacgatttgtgtcaggtgttgccacagctttgttaggatcaggagagtttagtggagatgagtataaatctgcaaaagttgaccccatagctcagttttccaagccagtggcgtctcatatgaacaaagatcatgctgaagataacaaagtgattgtgcagcattggacctcagttccagtggactttgccttcatactagatttggatagtcttggtttcaatgttaaggctggttatcagggtgatactttcaagcttcgtgtacctttccctcgatgtgcagaagatagaaaggatgtgaagactctcattgttgagatgcttcaagctgctaggcctaaagttgattgatcacttcacagatcaatgatgaacaggtgctcctagaatcttcatataatccatcaattcaattcatgtgtttcagcctccaagatttgtcattttttcttcattctgagattagttggctatgccttgcaactagatattcatataccacataattattaacactatttatgccaaataaatacttgcatacgtattggtaacatttttgtctgctacttttaaaccaacttacaaatctttggtaatcctt

SEQ ID NO: 16294 - DNA, 544 bp, Glycine max
gaagataacaaagtgattgtgcagcattggacctcagttccagtggactttgccgacatactagatttggatagtcttggtttcaatgttaaggctggttaccagggtgatactttcaagcttcgtgtacctttccctcgacgtgctgaagatagaaaggatgtgaagactctcattgttgagatgcttcaagctgctaggcctaaagttgattgatcacgccattgatcaatgatgaacagcacctgccagtcatcctggggagaggacaaaatgtatacgtcaaaaaagtaaatgcagttataatttccaaagataaagatgacaaagcaaatggttgacttttgtcatttcttttatacacactatttagtattcttactagggaaagcacttgaaaattcagacatacaagtggtatggtattttatcaaagaaacaaaccctttatacataaatgattttgtgtatttcttcctggtgtactcttgtatagagttggaacaatgtatggataatccttaagaaacaacaacaattattt

SEQ ID NO: 16295 - DNA, 372 bp, Glycine max
cccacgcgtccgttctcaggcaaagtagcttccctgctggccatttctctaacaacatctcctttcagaacgggtatgatgctatgaaaggtgttggaaactatagtggggtcaatggcaatgatggtgaacttagtctatctatgaacagaatgaagaatcaaataagcttctcatcaataagtccttcttcttccttgggagtgctatcaccaacttccaaaataggcacggagggtattagggtaactagcactgaggatgggaggcagggagggagcaatggtgatgctcgatattttggccctggattctcctatgcttcttggaatgagccttcacaccacaaaagacagcgaagtagtaatgatg

SEQ ID NO: 16296 - DNA, 596 bp, Glycine max
agcaacaagtatggtgtatacggggtctgtgcatggtgcatactctactggaatgatggctgctgaggactgcaggatgcgtgtcctggagcgttatggggagctagatttggtcccgccggtaatgggagaggatgcttcagtgataccactccagatctctcgtttgtaatctcaggaggctttatgcagcccccttccgggtggcatccgttgtcaaatgttgtgttgaacttgagtagctgggaggtgctgtgactcctagagtatgaataatctcattagtaacgcagaaatgcgtaatttggaatgacatgcactcgcatttagttatatagttgccaataatatggtaacgcattggtgttttcgttgttgtgtttaagctctaccgtgtttaggacttattttatcattgaagaactttgcacaatcattgtaagtagaccggtaggacagtagattatacactgatggtgggtcggctcattcatcagacagatattatctaccgactcatcgaaggggttagttgtgttccctgatatgagtcctggattcaaagatcccaaaggtgtcatattttgatgttccat

SEQ ID NO: 16297 - DNA, 1430 bp, Glycine max
tgatagttccttttgattgaaattcatcaacttcttgcagctatggactttttgatatggatgggaaacaggttcctcaagagttggtagcaaaagttggtgaaatatttgaggcaattttgcaggagacagataaaataaggcaagaatccagtgaagacatgtctgtacttcgtggtctttcaatcgttttcgataggaagccagaactgaggttggaggggattgcttataaggtacttcagtggtatttatgtagactggagggctggtttgctgcagacactgatgctatttcactgaaaggatgggaccaggaggtactgctccctggtggtcatggtcttatggtccgtggttacttgcctgttataaataccctagccaagggtcttgatattcgcttggggcacagggtcacaaaagtagttaggcgatataatggagtaaaggtaacagtggaaagtgggaaaacgttttttgctgatgctgctgttattgctgtcccacttggggtgctcaaggcaaagaaaatattgtttgagccaaagcttccagactggaaggaagctgccattgctgatcttgggattggacttgagaataaaatcattttacactttgaaaatgtgttttggcctaatgtggagttcttgggagtagttgcagagacatcttatggatgcagctactttcttaatctccacaaggctacaggtcgtcctgtccttgtttacatgccttctgggcagcttgccaaagacgttgaaaagatgtctgatgaagcagctgtcaacttcgctttcatgcagctcaagaagattcttccagatgcttcttcaccgattcagtatcttgtgtctcgatggggatcagatataaattcactaggttcatatagctatgatgcagttgggaaaccccatgaactatatgagaggctacgggtcccagtagataacttgttctttgcaggggaagcaacaagtatgagctatccaggatctgtccatggggcatactccactggaatgatggctgctgaagattgccggatgcgtgtgctcgagcgatatggagaggttgatttattccagccagtgatgggagaagagggttccatgtctatcccgcttcagatatcgcgtctttaatcgtctttgggtcacaactagtggacagaaacacaatctatctatgcttgttcttttgttatcaacctatatataagttatatagcaaatgttttggcaaatagtctttaagagtatatgtccacttgtgaaatcacattttgtgttggatttccttagtcagtgtttccagtaactggtaatgtgaatattgcgcacctaagaggcgttgtcacttctatcagtatacttataataaaattgggacaacaatttatgtgttaaaaagaatttggt

SEQ ID NO: 16298 - DNA, 395 bp, Glycine max
gggaaacatgttctttcagagttggtaacaaaagttggtgaaatatttgagacaattttacaggagacagataaaataagacaagaatccattgaagacatgtctgtacttcgtggtctttccattgtttttgacaggaagccggaattgaggttggaggggctcgcgcataaggtgcttcagtggtacttatgcagaatggagggctggtttgctgcagattctgatactatttcactgaaaggatgggaccaggtagctcctatattgaaagaaataatttgtaaagtcgtctcatagccaggtgcatgagtcttcaacatgcagccttctatgatccataaccatgtaaatgtgtttcctgatctacatataggagaggtgctgctccctgg

SEQ ID NO: 16299 - DNA, 407 bp, Glycine max
  unsure (1)..(407): unsure at all n locations
cggctcgaggaaccaccgtttctctctctctctctctctctctctcacggtgctgccactgtcactcttctctcctttctgcttccccgattctctatttttgcggtgctgccactgtcactcttctctcctttctgcttccccgattctctatttttgcgcgtaatcggtggcttagagatttgaaaagttttcatttctaattgagcaaacacaatgagtgaccatgtcggtccacctatttatgaatataatgatgaagtcatcattgatgaatttttccttgatgagtcagatatcctccatgaactttccatggacgatgaagatcttcctgatgcggatgatgattttgaaaccaaacatgttgaaaaggttgatgatgccatngacacattcaaaagtca

SEQ ID NO: 16300 - DNA, 366 bp, Glycine max
taggtgcaggaagagggagaggtcatcccaggtttcaggcccgcctccgatttcttccacctcaaaatggtattggaaggcgagttttggatgacattgagttgctgaacactgattcactagttaaggaggtagaaaggatttttgcttcaagtcctccagattcaatggagcttgagaaggcaaagcaaatgctgaaagagcatgagcaagcacttgttgaccccattgcaaggattgcagatgcatctgatggtgaaagtgatggagaacagccgttcttgcagcatggtcaattaatggaaaggggatgagagcacaggaaccaactgcatgttggaggaatctgtcttggagctgaagtct

SEQ ID NO: 16301 - DNA, 1786 bp, Glycine max
ttgtttattcaaaccgcgtcatcttcccatgggtggttattatgtttcataggggctgctgggacctcaactcaacacgccccactttattcttctctctacgcgttcgaatatgttcttcttcactttcctcttttcaacgctctccactcctttcctttcttaacctcttctactagacacacaactctaaacaaaagggtcttctcttcttatttgaatttgacttaaagctacttctctctttattctctattttgttttcaacatgatcattgccaatatatagacaacatcagacttcctttattatcttggctacctactacctctttcctttcactttgttgtttgtttgtgttatcttgacttttgaaacgtgagactgagaatggaacgtggggttcttgatagtatcattaataggctgcttgaagtcagaggcagaccagggaagcaggtgcaactttctgaggctgagatcaagcagctttgtcttgtctccagggatatcttcttgaggcagcccaacctcttggaactcgaggcaccaattaagatctgtggagatgtccatggtcaatattccgaccttctgcgactttttgagtatggtggattgcctcctcgttctaattacttgtttctaggggactatgttgatcgtgggaagcaaagtttggagacaatatgtctccttctgtcttataaaataaaatatcccaacaactttttccttctgaggggaaaccatgaatgtgcttctataaaccgcatttacggattttatgatgagtgtaaacgaaggtacaatgtgaggctttggaaagtgttcacggagtgtttcaactgcttgccagtggcagctctaattgatgaaaagatactttgtatgcatggtggactctctcctgagttacacaatctgaatcagataaagggtttgccgcgtcctattgaagtgcctgaaactggtctactatgtgacctcctttggtctgatcctagtagtgacattcggggttggggagaaaatgaacgcggagtttcctatacttttggtgctgacagggtgacagaattccttcagaagcatgatcttgatttgatttgcagggcgcatcaggttgtagaagacggatatgaattctttgctaacagacaacttgtaactatcttctcggcacctaattactgtggagagtttgacaatgctggtgctatgatgactgttgatgagacacttgtgtgctcttttcaaatattgaagccagtagaaaataaaaagcctagtaagtttggctttgggagcacaactacagttaagcagagtacaacaaaagccaagttccagcaatcattttttggtgctaaagcatgacttgatgagcgtgagtacaattattaaatgtttggtatagccaaagttgacttggaagaagtgttatcagtgttcgcttcaatgtgaaggaagagtacaactatcgatacaacccaagaactatgaagaataatggagattatcttcgctttaccttttagggatagctgaataattctttcttctgctggcatagttgccccttatacaatattgtcaaatacaaatggaggactgaggggttacttttcttctccttcagtcctcctatattctctttgccgatcttcctttgtattatagtgaattaacgcatcaccccttcgaatgtcttttggaagttatttccccattgtgaccatgttgtcacttggttggttagaatatatatgttctacatccctt

SEQ ID NO: 16302 - DNA, 1166 bp, Glycine max
ctacaagtggagaagagatgagcaagtttgagtctcttcttcttgataagaaccgtagaatggaacatgaactaacacagttgaaggtcacactttctgagaaaatgtccatactggaaacagctgaacagaagatagcagagcttacagcaaaggctaatgaacaacagaaattggtacagaagttggaagatgatattttgaagggatatagttcgaattcaaaagaccgtaaagggaacttccttgatgattgggatctttcagaagctggtgggggtgaggtttctgagaatacagaccaaaggcaagtatccttagaccaagatcagagctcaatgcttaaagtgatttgtaatcaaagagatcgatttaggacccgcttgcgagagacagaagaggaaataaggcagttgaaggagaagattggggtattaacagtggaactggaaaagagcaaagctgataatgtcaaactttatgggaagattcgttatgtacaagactataatcatgagaaagtgatttctaggggttctaaaaagtatgctgaagatcttgaaagtggtttcgcgtcagatgttgaatctaaatacaagaagatatatgaggatgatattaatccttttgctgcattctcaaaaaaggaaagggatcaaagatacaaggagttgggattcagggacagaattacacttagcagtggacgttttctccttggcaacaagtatgcccgaactttcgcattcttttataccattggattgcatatcttggtcttcacctgtctctaccgaatgtctgctctcagttatcttagcaatggcccagaggaattccttgttggagagaaaaacgttgatcttccgcgtggcccctagtggatatgcaactcaggtttcagctggtgatttctcaaattgaacattacatgtggtcgaaatgcaacctcttttcaatggtcattttcaactcaattttcagtgatcgatttctcaaattgaacggtgcacatggtcggtgtgcatcctcttttcagtggtcttttttaacagatggaacgatagcatattgtcaatattaaaaaatcaaatgtgttgtacatatatgactgttgttttactctaacaatgttgcaatgaaaaataaaggcatttttttttttt

SEQ ID NO: 16303 - DNA, 649 bp, Glycine max
cccacgcgtccggtcattgatacttgttgtgctacttttgctgaaatacaaaagagaggcaaagatttttgggccgaatttgagttgtatcttgcagatcttctcgttgggcttgttgttaatgttgctttggtaggtatgttggcaccctatgctcgattagggaaaccatcaatatctagtggattccttggtagaatgcagaaagcttatgcagccttgcctagcagtgtatttgaagcagaaaggccaggatgtaggttttctgtacaacagagacttggaacatacttctacaagggtataatgtatggtgctgttggatttgcatgtggtattataggccaaggcattgcaaatatgatcatgactgcaaagcggagcataaagaaatcagaagaggacatacctgtgccacctcttgtgaagagtgctgctctttggggcgtctttctagccgtttcttccaacacgcgataccaagtcgtcaatggactggaacgtttggttgaagcttcaccaatggcaaagcaggttcccccagttgctctggctttcacagttggtgtgcgttttgccaacaatgtgtatggtggcatgcaatttgttgactgggctaagtggaagtgtgtgcaataactcctttatc

SEQ ID NO: 16304 - DNA, 2186 bp, Glycine max
ctgggaggtgaacttccaaagtccaactggagtactccactaagcttcttgtgtctctctttcactgctttctcgggaaacattcccgattccattgcccatttggagtctcttgccacactatttctggagcggtgcaattttgatggactgattccctcatcattgtttaatctaactcaactcttcagtatagatctatcatttaataaattagttggccccattccatattggtgttattctttgccttccttgttagagttggatcttaacaacaaccacctcacggggtcaattggtgaattctcatcttattctttggaatacttgtcactctctaataacaaactgcaaggtaattttccaaattcaatatttgaactccaaaatcttactcaattgagtttgtcatcaactgacttgagtggtcatctggactttcatcaattttcaaagttgaaaaatctaaatgacctcgaactttctcacaatagttttctctctattaactttgatagtattgctgactatttcttatcccccaaccttgaatacttaaatttatcttcctgtaatattaatagtttccctaaattcatagcaccgcttcaaaatcttatccgactagatgtttctcataacaacattcgtggaagcattccccagtggtttcatgagaagctcttgcactcctggaataacattactcatattgatctcagtttcaacaaattgcaaggagatctcccaattccacccaatggcattagatactttttagtctcaaataatgagctgaccgggaacattccttcagcaatatgcaatgcaagctccctctatatactcaacttggctcataacaacttgacaggccagattctgcaatgcctggcaacatttccttctcttttggcattggatttgcaaatgaacaacctttatggaaacataccttggaacttttctaagggaaatgcattggagactataaagttgaatggcaaccaattggatggaccattaccatggtctttggcccactgcacaaatctggaagttttggacctggcagacaataacataaaggatacatttccccattggctagaaagcctccaggagttacaggtactcagtttgcgatcaaataagtttcatggtgtcatcacttgtttcggtgccaaacatccatttctcaggctgagaatttttgatgtctcaaataacaattttagtgggtccttgccagcatcatacatcaagaactttcgaggaatgatgagtgtgaatgacaaccaaactggttcgaaatatatgggtaaccaatatttctataatgattcagtagtggttgtaatgaaaggtcaatacatggagctcgagaggatattaactatttttacaaccattgaattatcaaataatatgtttgaaggagaacttctgaaagtccttggcgaattgcattctctcaaagggcttaacctttcgcacaatgcaatcacgggtaccattccacgatcctttggtaatttaagaaatttggaatggttggacctctcgtggaaccagttgaaaggagagattcctgtgtctttgatcaatttgaattttctggctgtgttgaacctttcacaaaaccagtttgagggtatcatacctacaggtggacagtttaacacatttggaaatgattcctatgcgggaaatccaatgctatgtggattccctttgtcaaaatcctgcaataaggatgaagattggtcaccacattcaacatttcaccttgaagaatcaggatttggctggaaagctgtagcagtgggatatgcatgtgggtttctatttggaatgcttttgggatataatgctttcatgactgggaaagcacaatggctcgcgagacttgttgaaggtgtgcttaattaattaatgaagagtgaaaaggacaaatcatagggaaaggaaatagtttatccttagtttaatatggttctttggtgtgtgtctgtatgttttctgtaattttaacttatgtcctttgtgtaacaaatcacatctctcttgactcgagtgatgtatttcaagttgtttaaaaataagaaaaaaaattgatgatagtagatatcaaaatgagtggtcatcacatgtgatgatattggctcaaaaacattgattct

SEQ ID NO: 16305 - DNA, 778 bp, Glycine max
  unsure (1)..(778): unsure at all n locations
acgaggcaaaccaaatcatacgagagcgagagtgtgatagagagataatgcgttcttatggcttaaccgtaccgggaagcgaccaccgcttctgcgtgcccaccgtatctcaggtgttctttaggcccaacaggcccattaaccgaatcgcgtttcccaaggccaccctcaagaacgacggcttcgtggtggacctgagcttctacgaccttctgggaataccggaatccggttcggtaacggagatcaagaacgcctacaagcaactcgcccgaaagtaccacccggacgtgtcgccttcgggtcgggtcgaggagtacacaaagaggtttattcaggtgcaggaggcctacgaaaccctgtctgatccttccagaagagctatgtacgacaaggacatggccaagggcattaacttcgccttcaacgcccgcagacgctataattaccacgatcaggtagttgaacaaaaaagtgaatggaaagccaggtggaaatctcaactgtcagagctgaagagaaaaagtaacagcaaggatgttggagggaatatgtcatgggcagcacgaatgcgccaacaaagggatgaattgtcaaatgaatcatgacctggattttccttagttctctatatgtatgtaactagttgtatatatagataatagataatgtgtacatcttcctactcgagatcaaatcagatataaaattgatgttgcgcnnnnnnnnnnnnnnnnnnnnnnnnnnnnnnnnnnnnnnnnnnnnnnnnnnnnnnnnn

SEQ ID NO: 16306 - DNA, 530 bp, Glycine max
cccacgcgtccgcgcaaacaaaatcaagtagtaagagcgagaagagaggagaagaaagggagagagataatgcagtgttatggcttaaccgtaccgggaagcgtgcccaccgtatctccagtgttcttgaggcccaacaggcccattatcgcgacccgaatcgcgtttcccaaggcgaccctgaataagaaccagggcttcgtggtggagctgagcttctacgagcttctgggcatacccgaatcggtttcggtaacggagatcaagaacgcctacaagcaactcgcccgaaagtaccaccctgacgtgtcgccaccgggtcgggtcgaagagtacaccaagaggtttattcaggtgcaggaggcctacgaaaccttatctgatccttcccgaagagctatgtacgataaggacatggccaggggcattaacttggccttcaacgctcgtcgacgctataattatcacgatcaggtggttgaacaaaaaagtgaatggaaagtcaggtggaaatctcaactgtcagagct

SEQ ID NO: 16307 - DNA, 2540 bp, Glycine max
  unsure (1)..(2540): unsure at all n locations
agaaaagcgcagcttgttccatccacgtcactctctccatctgaaagcagcgccgccgttgagttagtttatatccgagacgccaccacagtgaatattcaacactctctctatctagggtttttccatggccaccgtgatccgcaaccctatcctcttcccttccacctctcaccaccccaaccaaaaccacacattcctcactctccgcttctctcaaaccttacgctcttctctccgctccaaatcccgattcgccgtttcctgctcccaatcggaacctcctcctcctcctccttctgcttctcctcgacggcgtcctccgtacatcccgaaccgcattccggacccttcctatgtccgcattttcgacaccactctccgcgacggcgagcagtccccgggcgcctccatgacctccaaggagaagctggatgtggcgcggcagcttgccaagctcggcgtcgacatcatcgaggccggcttccctgccgcctccaaggatgactttgaggccgtgaaaatgatcgcccaagcggtcggcaacgccgtggaaaacgacggctacgtccccgtcatctgcggcctctcccgctgcaacgagaaggacattcgaaccgcctgggaggccgttaagtacgccaagaggcccaggattcataccttcatcgccaccagccccattcacatggagtacaagttgagaatgtccaaagacaaggtcgtcgacattgcccgcaatatggtcaagttcgctcgcagtttgggctgcgatgacgtcgagttcagtcctgaagatgctggaaggtcggatagggagtttctttatgaaattcttggagaagttattaaggtcggcgccaccacgctcaacatacctgacactgttggtataaccatgcccagtgaatttggaaagttgattgctgatattaaagctaatacccctggaattgaaaatgttattatttccacccactgccagaatgatcttggactttctactgcaaacactatagagggtgcgcgtgccggtgcaaggcaactggaagtgacgattaatgggattggtgaaagggctggaaatgcctccctagaagaggttgtgatggccttgagatgcggagcacatgtcaatggcaatctctacactggaattaatacaaagcacatctttctgacgagcaagatggtcgaagagtacactggtttgcagatacagccacacaaggctcttgtgggagctaatgccttcgcccatgaaagtggcatacatcaggatggaatgctaaaacacaaaggtacatatgaaataatatcacccgaggacatcggacttgaaagaaccaatgaagcaggtattgtactggggaagcttagtggtcgccatgctttgagaaagcgacttgaagagcttggttatgaacttaatgacgaccaagttcagactttattttggtgttttaaagcagtggctgagcaaaaaaagagggttactgatgctgacctcagagcattggtatcagatgaagtttttcaagcagagcctgtctggaaacttggtgatttgcaggtgacttgtggaactcttggcctttctacagcaactgtcaaacttttgagtagtgatggtagcacacatgttgcttgttctgttggtacaggaccagtggattcggcatacaaggctgtggatctgattgtgaaggagccagtaacacttcttgagtactcaatgaatgcagtcacggaaggcatcgatgcaattgccactacccgggttgtgattcgtggggagagtgaaacaagtactagtactactcatgctttaactggagaagctgttcttcgaacatttagtgggactggagcgggaatggatgtcgttgtttccagtgtcaaggcctatattgctgcactaaacaagatgtcgggtttcaaggaatcctctccatctgctgaaaaaatttcagtttcttcattgaagatttgagaattgtgtggtgcttctttggtaacaattgtttgtgttaaaccacgaagaggaagacaatgttgcagcagcatccttgcctctcgcagttctccatattaagggttgtccctgtattttgaccggaatatatttgcaacctgtaatttattgattcacccaagtagcctttgcaaagaatgtaacttaagtccgttttaaatattcagactacagggattctttcccttttcattttcttgggtgccctttatttgaaattataaatgtcctttaagattagagtgttcctgtccgttccagaataaggacatctcaaagtttcgtcttgtggctataataaggtgctatggcaccattttgttggatcaatgtaatattcgtcaactgtcaaaataaaaaatttggaagcggatggctgttnnnnnnnnnnnnnnnnnnnnnnnnnnnnnnnnnnnnnnnnnnnnnnnnnnnnnnnnnnnnnnnnnnnnnnnnnnnnnnnnnnnnnnnnnnnnnnnnnnnnnnnnnnnnnnnnnnnnnnnnnnnn

SEQ ID NO: 16308 - DNA, 1011 bp, Glycine max
gaaaatcccccctcctcttcccaacgacgctgtcgcctcgtgagaacactattttgtctatttaacactaaaaaacgccgtcgttttgtccttaaaacccgatccggtagacacgtactcccatagctaattgtgagaatttcggtcacctgttttatttatttattttgcctttttcggttgccctctctttaagtgctgcctcctattttttgtgttctctctctcgttttttgaagacgaacattaaacaaccgtgaagaagcagttaaagcaaactgcgaaacgctgaacatttgaagcaaattaaaaaaaataaaagagaagaaatcatcgttgttgtggacattgtgtttgttttctaagaagaatggaaactgtgtgtttaaaatctgggatggttcccacgatctctattagtgggtcgctggatgcacgtgccaatccttctcaggtgagcacggtggggcgcgccgccgcggataaaccgccgcagaggtcggtgttttcgaggttttccttttggtaccctttggaatctctctggcctcgggggaacaacagcaggtacaaagggctggccctcgacgacgccgttttggcggacaacaacgccgaagcgaaggccgttagagatgacggccagggtgacggaacggaaaggcagaccggaaactgggttttgaagattctgcatgtgaagtccgtgtgggaagggaaacagcgcaatgaagaggatggtacggttcatgatcaaactcaaaccaatttcgacgaggaggaggtgtgtgaatgtgatgcttgcggggttgatgaagatgacggctactgtgaagaagaagaggctgaattcgatagaggctcgttttcgagaatgcttcggagggtatcgttaggcgaactagattgtacgctcagatgtcacacttggggaacttggcttacgatatacctagaatcaagccagggaaactcttgaaacatcatggtctgcgctttgtaatttcatcg

SEQ ID NO: 16309 - DNA, 337 bp, Glycine max
ctcatcgcgtccgcacacgtagtaccatagctaattgtgagaattattaattttattgtgcctttttcggttgcccttctttaaaagctctctctctctctctctctcgatctgaagaagaacatcaaattaaaccacagtgaagcagtcacctaaaccaaactgcgaaacgctgaacatttgaagcaaattagccaagacgacatcatcgttggtgtggacattgtgtctgcttcctaagaagaatggaaactatgtcggttaaaatctgggataggtcccacgatctctattagtgggtcgctggacgcacgtgccaatacttcccaggtgagca

SEQ ID NO: 16310 - DNA, 427 bp, Glycine max
acgctgggagcaaacagtacgacttcttgaagcatgatttggaatcggttaacaggagcaagactccttttgtggtggtgcaagggcacaggcccatgtacactaccagccatgaaaatagggatgctgctttaagaggaaagatgcttgagcacttggaacctctgttggtgaataacaatgtgacacttgccctttggggtcatgttcatagatacgagagattttgtccactgaataacttcacttgtggtgttaatgcgggtcacaatgcaggggacaaaaaaggatatactgttcacattgtgatcggcatggcagggcaagactggcaacctgtctgggaaccaaggccagaccatcccgatgatccaatctttccacagccaaaatggtctctgtaccgcggaggcgagtttgggtacac

SEQ ID NO: 16311 - DNA, 1077 bp, Glycine max
gaccattcttcgcagcaaacacgaaaaggttctttctaacctcctcagtccttattccacttcaatcgcaattatttaatctaacaaataattgaaatcgcgattgattgcagtgatcgagatgctggggaagacgaggaaggtttcggcgcgtggcgaagccgtggcggcgaactacgccttcggtccctccgaagatgacgtaatcatcaaacacaggcttctcacgcgcaccaccaccaccaggggtgaccctcccttgaagaagcttcagaagaagttcaccacgttcgtctccgaagtcgacaaagacgaagacatcaactacaacgactgcgagaagctggctagagcgtttctgcaggagctgacgacattcgaaattccgcttctgaagagcaaggcgattgtggaggcgaacgttagggagaaggagaacttcaacgagttgaaggaggaaatgaatcgccagatcctgctggcgcagtccgacattgaggatctcaagaagcagcttgaggagagcaaggttgagaggaggcacaaggaggagtgcgaggctattaggaagttgattgccatgcagcccccgagatccgagacaatgaaggttatttcggagttggagaaggaaattgccgcgttggatgccgagaacacggctggttcgaggttgttggagctcaggaagaagcaatttgcgctgttgttacatgtggtggatgagttgcagaacacaatagaggaagagcaaaagagccttgtcgaggagatgagaatggcaacggaggagcttaagaatgggatggtagacacaaatgggggggccgaagcaatggcaattgaccagtaactagattgaatatcagtcttcctgttgtaacatttcttacatctcaatcatgttttttttttctatagtgagtaggaaacatacgaaaatgaaacatcagtattatgctagtgcttagaccttagtaaaactaatgcattttccctaaaaaaaatggaaatactaaatgcatttcgattggatttttgtatcaaattttgtctagccattccttaattatagtt

SEQ ID NO: 16312 - DNA, 276 bp, Glycine max
gggaatcaccattctgacctccttactcgttacactactttccccccttttcgccttgcagcagtggatcgagatgctgggaaagacgaggaaggtttcggcgcgtggcgaatccgtggcggcgaactacgccttcggtccctccgaagatgacgtaatcatcaagcacaggcttctcacgcgcaccaccaccaccaggggcgaccctcccttgaagaagcttcagaagaagttcacctcgttcgtctccgaagtggacaaggacgaagacaacaa

SEQ ID NO: 16313 - DNA, 288 bp, Glycine max
ctctattcagcattgtttcctatccttcctgccgtacgtctaattatttagtatcatggggaacttcttgtggatgatgctacacttgttgcaaagttgtatactgtacgagattctggtgttatatttgcatttagtctagttgaaattgaggactaaaaaggcttcaatggttgggaaaatttagaactattacccgattgggggaggcaatgaagggaaaaaagatttacacaacgatctctatgcattatgtatattttattggaagaatgaagatttattttt

SEQ ID NO: 16314 - DNA, 638 bp, Glycine max
tgatcattcattcactaatcatcaagatgaattagcctcggttgttgtgaacttcataaaggaaaccttgcaccaggataggagtactgctaactagtttcaagccagttgaattcctactgatgacaattatttttttcttgtcatggatgaacctgcctttgatgttctacaacatatttgagctcttctagtttttgcctattaaattagtgaatcttgcatcattgtgaaaataacggcgaaagcagtatctgcgagtgttatttacctctgatcagatgcatgtacaaagttactttgacattatcaatttatgaatgcaaacagttatctcatggtaccaccctgtggccagggcaaaagccttagaggggttatataactacaaatgatcatatataacggtcatcctagttatgtgtgtgctaagttccacatctcatattcgttgtgggtaaatgttatgacatggaaacttcctagtttttacactatcttctatcagtataatttatttcattttattttttacatgtatttctctcacattcgaaaggtgtgtggagtggggacatcttgtattattaccgaaggaaaaaaaaaatctcatgctaggaacttcctagtttttgttt

SEQ ID NO: 16315 - DNA, 372 bp, Glycine max
gatgttctcattcttctccaagctgctgctactcttcctttctttcaagttggacagatcggtcaaaaaggtgaatgtcgtgatcaatcccatggaggtgttatccgcaatgttgttcgatggagtattccaaatttgttagaggaacaagaaggtgctacactgcttgtatccgccaagtttaatgttgtatctgtccgtaatatctaccttcagtttcaagagatcacagtccaagatatatatattagtgaagagcttcgggctctgatagctccagcaatactaaccgagatcttttataagtcttcagattttgcaatttctcctcgatttcaaagcttagatccctgtgagggaccaggaaggcat

SEQ ID NO: 16316 - DNA, 466 bp, Glycine max
cgttttgtggggagggtgatgtcgagaagggaagggagctttttgatgagatgttgatgaggaaggttagtcccaatgtggttacatacagctgtttgatgcagggtcttggcaagaccgggcggtgactcaaggcttctgagatgttgaaggacacgatggatgagaacagaggacgaggctaaggtgttggatttgatggtgcaggagggggaggagccgggtactttgacatacaatgttgttgtgaatgggctttgtaaggaggatcgggtggatgatgcacttagggttgtggaaatgatggcgaagaaggggaagaaacccgatgtggttacgtataatacgttattgaaagggctgtgtggagctgctaaaattgatgaggcgatggaactttggaagctgttgttgaatgagaagttccatgtgaagctggatgtcttcacgtttaataatttaattc

SEQ ID NO: 16317 - DNA, 448 bp, Glycine max
actcgagccgattcggctcgagatttcatttgagtatatctgttatagtttatttactactgaaagatggattcgaagaggaagatagcattacttatcttcggtctgctggccatgctccttttcatctcctcagaggtggcagccagagaactgaaagaggtcactggtgctggcttgtctggtggccgtggcgtaaactttggtggctttggtggcattggtggtggccctggcttccgctttggcttcaataatggcttccccctcttcttccctggattccccagcttccgtggattccccggcttccctggattctccggcggccctggattccccggcactggattccccggcactggattccccggcatcttccctggctttggtggtggcgtcggcggcggcttctcaaacactggctttggtggtgttggtggcgttg

SEQ ID NO: 16318 - DNA, 556 bp, Glycine max
tttagatcttacttttgtccaactttttgaaagattttatactttgaagttccattaagaaagagtaaattgagaatcccattaaggaattcctcactctcttgctaataataatataaagtgtttaatgtaaaaagcatgttaaagagttttccattctcgatcaatcagaatttataataggtaagaattgtaaggtactagtagttcttattcttataggaagttaacaacttaccatatatgacaattgtaaatgcatatactattttctctaatgtaaatgtggtaaaaacattatagctgcatgatggcttctatttctttgtctacatcttttcaaaccttacaatgactttttttttttgttgaaattctccagtacactataacttgtaccagttttccttttccatgtctagaattccttggtcaaatttggcaactttcgtttttccaatgtgtccatgtgatttagaagaataatagtactcctagattagcctgtctattgtgctaaacttgtgacatgtaggagttactacaagtgcacaca

SEQ ID NO: 16319 - DNA, 667 bp, Glycine max
agatatggtgcaggcagttatggatcaggcggcaattatggggacagtggccctggcaataactactcgggaggctatagtggtagtaacagtggacattttggtgatgccggtagtgtaggcaatcatgaaagctctactggttttgccggtaatggatatgatggaagtgtcgtggatggcggtgttggtgcagggtcggaatttggcagcagtggccaattagatagcaaaacaagcagcaatggagatgagggttttggggattacagggatgacaacgatgcagataattttgccaagagggcttgatggaattttatagttttttgttttctgctgctcgtgttctgtatcctacctaaatctctttggacttcaacctgataagcatttcatgcatgttatcttgatcagctagacatggatgggaacaacattatctaggtccatcttaagcgtctttcttcccttattttcctaagagtcaaatatttcatttttgttgcttacttttgagttgatttagtatcaaaccaaattgagatattcatacagcatgtaaatctgtgagttgttgcaagtcgggacaacagtttgagacttatgtgggaattctttgctcagttagttattcatatcaagtggtttagttctgcacccaaaa

SEQ ID NO: 16320 - DNA, 705 bp, Glycine max
gtaaaattgcactggtggtggtggtggatgcatgcttacctaatttgtgcatgctgttacacgatataaatgagtctgtgagagtgagagtgattcactgttttgtgtatgcaactaacgatttcttttgtgctgagtttgacggtgaatcagaggcaggcgtacgtatacgtgtagtagggtgattgagagatggacgctcccctgctgctggtgaacggcgagggggcggcgctggtggcggagaatggtgactacgtggcggtgagggagctgaaggaggtgaagaaggtgttttggattgagaccaagagagtgtgggagattgcgatgcccatcgttttcaacatatggtgtcagttcggtgtcaactccgtcaccagcatgttcgttggacacctcggcgacattcagctctctgctatctctctcattaactccgtcattggcacttttgcctttggtttcatgcttgggatggggagtgcaactgagacactctgtggacaagctttcggagctgggcaggttaatatgcttggtgtttatatgcaacgctcatgggtgatattatcggtgaccagtatcttgctcttgcctatatacatttttgccgctccaattttgaagcttcttggtcaacaggaagatatagctgatcttgcagggagtttctccattttagtaattccacaatttctttca

SEQ ID NO: 16321 - DNA, 997 bp, Glycine max
atatctatcggtgtagtgtggggagaaaggtaggttggattgtgagttagcttgctcttggaattaatcgccactttttttgatataacagatcaaactgaagacgctggtcacaataagtgaataaagctcagatcgagtttcatcagagtcacaataatgaagcaagaagtggttccaaggtcactagcaccaccaccaccaccaccacctcctccacttccaaaattcagggtcttctcaagaccaagagcagaagagagtgtcacaaaccgagaaatcgccaagttttggaggcaaaagaggatcgtggaggaggaccacctccttgctgctatcaaggctgtggctagactccgtgcacgcactctcacggagcaagagtacgagaggttcgagttgtctctgaagaccgataataatgactacgatgaaaccgagaaagaaacggtgaagtggatcgtagggacaaatgcttattgcaaaacagttgctaaggaccaagaagtgcgcatcggaatcaaggattggtggacaaaaagcaaatatgcgtatttgaatcaaccagccatagattccatggatcctcctaagaaacgaaccactacgtatgttcccaactttctttcttaccagcccaagcctttgtatccttctgctattggtgtcttttaagccacaggaggcattccatttctgcttgttaattactaataattacttgaactcctgctagttttcacctacgttttcatttcattcgtcatttttttttctttttgtgggggagggttgtccaatgtttcatttgtcattcaaatgcgtgtccatgtccttttatataagtattgctggacattctaaataacatgcgagtattttgtaatttgtatgtgtcattctattgttccgtttccaggttatttatcagtgaaaggattactgaagtactgaccattaaacttgttacatgtttgttacaaaaggtttagtttac

SEQ ID NO: 16322 - DNA, 422 bp, Glycine max
ctcgagccgcttttatcgtttctcactatatatccacacgcaacaactaggggggctatgcatattgaatattctgtctgactcagaaattccacaatcaataaggtgaaattaattgccacttcttctgatctcgtgtccttttttctgatataacagatcaagctagctgaagaagctggaaatggttccaaggtcactagtaccaccacctcctccacttcccaaattctcaagaccaaaagcagaagagagtgtcacaaaccgagaaattgccaagttttggaggcaaaagaggatcgtggaggaggaccacctccttgctgctatcaaagctgcagctagactccgtgcacgcactctcacggagcaagagtacgagaggttcgagttgtccctgaagaccgataatgacaatgatg

SEQ ID NO: 16323 - DNA, 416 bp, Glycine max
atggatccgggtatggtgggagaaagcaagaatctgaatatggatccgggtatggtggcaggaaggaggaaccagaatatggatccggatatggtggaaggaaggaggaatctgaatatggatcaggatatggaggaaggaagcaagaatcagaatatggatccgggtatggtggaagaaaggaggagagtgaatatggatccgggtatggagggaggagtgagtatgaggagaaacctagctatgggaggagcaactatgagagccaaggaggaggaggaagggttgagtatggttatgaggggcgtccaccccggcaggaggaggaggaggggttccgcaagcccttctatgagaggaaggctgatgatgatgatgatgatggctatggtcattagaaaatatggagatgactt

SEQ ID NO: 16324 - DNA, 399 bp, Glycine max
gcgtccgacaaatcgaaatcgttctctcctcactgagcactcactctatcacttcaactctgcatttgaactctcaattggggtgttttgctgccatatatttcaatagaaaaaggggatttgcgtgcaaacttcgtcatggaggtattcaaaagggccataatacagcctgggccaccggaaagttttgctttgaggacggttcaagaagtaattaagcctcagaaacaaacaaaattggcccaagatgagaaccagttcctagaaaatattctacgtatgttgcttcaggagtttgtgtcagcagcggtacagtttggggagaaaatcatgcaatttggccaatcaattgattctagtgaaactacccaaggccacattccccgccttcttgatatt

SEQ ID NO: 16325 - DNA, 383 bp, Glycine max
cacagagcacatttcaagatgagaagcatgtggaatttgactgttgcatgaaaccagagcagacacaagcatgtgctatgtacaaaatttgcagttgcaagtgttgtggagagaaggcagatgacacagactgtttggtttgtgattcatgtgaagagatataccatgtgtcctgtattgagcctgcagtgaaagaaataatacctcacaaaagctggtattgagccaattgtactgctaatgtgattgaatctctccatgagaattgtgtgctatgtgaaaggttaaatgatgcaaagaccctggatgatgtaattggtgatggaagctttcctacaattgaagaaacacaaaatgaatttgaagagaattcaaattgcacc

SEQ ID NO: 16326 - DNA, 416 bp, Glycine max
cccacgcgtccgcagaagttgaagataaactttccaaagaaggctttgatagagctgtggcacaagagaaagatgataaacctgaggactccaataactcattgtctagtgaagacagcaacagcaacgataaagatgggtccattgatgaggaaaggtcatcaccaattgcacatgctgttaaggttgagcatgacactgacactggaaacaggttgaaggaaaataaaaaccctgaagcatttacagaaggctcacgcatggacggcttggcttgtgagagtaatgaaacgcgtccgggtaaggatgaaggacaagcagatacacacacaatcagttgttcaatgcataaagaagttgacaatgctgtcatggctgataagacaccaaatggcgttccatctaggacacacata

SEQ ID NO: 16327 - DNA, 520 bp, Glycine max
gttcttttgtctgttcctgttgttcagagtctaacggcggttagttggattgatgagggggttgtgaggaaaattaggggaacttctttttcaacaagagtgtctgttcagtttgaatatggcatgattaaagctgcccgtggaatcatcaatccgctggtttctgatgtgcacattttctctgatcacagatcaggtcctgaggctggaaactctcctggatatgggatttctctggttgcggaaactacgtctggttgtttcatttctgtagacactgctgtttctcaagtgagggatgacgatacttctggccttgcagatgatgcgaaacgagacttaatgccgccagatgatattggtgtggggattgctagtgctttactaggggagatagctcaaagtggagtggtagattcaacacatcagggtttgttatttcttctatgtgctctatgccctcaagatgtttccaaggttcgtgtaggaaaactttcgcagcatggagttgaaactctca

SEQ ID NO: 16328 - DNA, 551 bp, Glycine max
ggaatctgccccgaatagagagcttccccaccctcagcgtggtgcccgtgaaagggaacgtctacaggtatcttcatactgtattattttgttgcttgcttttgattaatgagtgctcattttatctacctgtgatataggctgttaaccaacttggtgatgctaatgaggttctgaatgaacgtgctgtggttgtcatggctcgcatgagtaataagcttacaggacgggatttttcaacttgttcttcagtatcaaacaactcccctcagcatgctgtggaccatagcagtttaatttctggagacactcgtgaagttgatcatgctttatctgtgaagttgcaagttcaaaagttaataatccaagcttcctcgcatgaaaatttgtgccaaaactacgtagggtatggtctcttaacttagtaattttctgagtaaacatcaaattttacacacccacccacacacgagttctggtaaatgggcttatcaatctttgactccctcctttattttctctttttgattagatcaaaaggaactttcatg

SEQ ID NO: 16329 - DNA, 383 bp, Glycine max
ttttaacttcaatgaagttccacaaatgtctatgcttaccagcaatcatgtacctcctgttgtaaattctgaggaatctgccccaaatagagagcttccccaccctcagcgtggtgcccgtgaaagagaacttctacaggctgttaatcaacttggtgatgctaatgaggttctgaatgaacgtgctgtggttgtcatggctcgtatgagtaataagcttacaggacgggatttttcaacttgttcttcagtatcaaacaactcccttcagcatgctgcggaccatagcagcttaatttctggagacactcgtgaagttgatcatgctttatctgttaagttgcatgttcacatgttaataatccaagcctccttacatgaaa

SEQ ID NO: 16330 - DNA, 1098 bp, Glycine max
gatttcaacaagaatcagctcgtggagaagatccgaaggctgaagaagaagtaccggaacgtcctcaacaagatttgctccggcaaggaattctccttcaagagcgctcacgatcaagccaccttcgaaatctcgcgcaagatctggagcaacgtgactccagtcggcgacaattcattggacgacgacgaaatcaaccctagccgtagccccaaccctaaccttaattttagccctgtaattcttaagaatgaaacgattttcaggaattccacggagaagaaaacaccgaaacgctctcggcctcgatcggcggtgaaaatcgagccaaatgacggatccgcgtcgaacagagatcataattgtattagcaatactacacctactgctactgctgctgctactaacactactgctgctgctgctgctactaacaataataactgtaacagtggttatggaaataacataccgagtatgatcgaggagacggtgaggagttgtttgtcgccggtgttgaaggagttgatggcaggggccatgggaggaggagcgtttggagcgagagggttttcgttgaacttgaaccctatgcctttgatgaattggagttttggcggtggggaaatggtggatgagaaatggaggaaacaacagatattggagttggaagtgtactcaaagcggttggagctggttcaggatcagatcaaggctgctatggaggagttgcggtcacacggaggaggttgatcaaatcttttagtttgtttttggttttgtagtgagtgattggagttcttcttcctcttcatcatcaatggttggttcattctcatagcttagtggttagctagtagtaactagtaagtggtaactagtgtttttcttttcgattttagctttcgctgattcggtggagcacttgtcctttaaaataaaaatgtttttagtacattttagccgtttttatgttcctctaaatttcaatggtctcatacatgtacagaacagattgaagtaactggtgcggagtgatggctttgtaccattatatatgttgtaaaagatgcgaaagtagtgagttcttaattgtgc

SEQ ID NO: 16331 - DNA, 388 bp, Glycine max
cagcaatcaatctcacatccatcgccaatgaagcggaagaaatggtcggaactggaagagcgaaccctcctctccaaatactccgagctcctccattcaggaatcctcgccaagctcaaaacgcgcgagaagaagttcaagccggtggcggagcacgtgaacgcgctgcaccacctccgcgacccagcctcgttccccttcaagtggtcgtggcccgacgtctcgataaaggtgcagaacatgcgccaccagtacctcggcgtcaagcagaagatccgcctctcccttcaccacttcaattggaaggacggtaacaatcattgggagaattttcttaaatacaaagaagtcttgggcgatgtgcaattgttggaatccccaaaaccta

SEQ ID NO: 16332 - DNA, 436 bp, Glycine max
ctcgagcgccactgtagtgtgtgtattaacagctgcgtatgttgcatttgtactttaccttatttcacgggccattacctatacaccgtggcggaggttaacccgatcaaagacagttgctaccacagtgagttgagcagtcaaattccaattcctgaaaaccatggagtaggaaatgctttgccgctgaaggctttcacaagtacttttcctcgatttttttaggcatactcatgcttggtaatttgtagaagaaattatgctgagggcagtggtaccttgttggttgtcatacttcaacaaaacaagtcaattatgtatttgtatttctgtcaaaattcgatgcataatgcagctgttagcatgccttggatattgagataatgtagtgagataccttttaaaactaatgatgttcacacagatagttcccctt

SEQ ID NO: 16333 - DNA, 796 bp, Glycine max
ttaagagggtcccattggaagagtcggaagcggaggggaggggagaggaagaaggaacatgtcaggcgttagagatgggcgttgttgttgttggtgtgcccacccatccccaatccaaacactcttctcttagtaccctaatctacttattattatcacaaacacaacccaacccttccatcttcttcttcttcaatccatgccggtcaacgccagctggtgctgagggtcaatcgaggtcttcctttctcaatggggagcgggagcagaagctactcggccaaccccgccgactacaagcttctagaagaagtcggttacggcgccagcgccaccgtgtaccgcgcaatctacctcccttacaacgaagaggtcgccgtgaagtgcctggatctggatcgctgcaacagcaatctggacgacataagaagagaagcgcagaccatgagcctaatcgagcaccccaacgtcgtgagggctttctgctccttcgtcgtggagcggagtctgtgggttgtgatgggattcatggcgcagggctcctgcctgcacctcatgaaggctgcgtatcccgagggattcgaagaggccgccatcggatctatcctcaaggagactctcaaggcgttggagtatctccatcgacacggacacattcaccgcgacgttaaggccgggaatattcttcttgacgataacggcctggtcaagctcgctgactttggtgtttccgcttgcatgttcgacaccggcgaccgccagcgctccagaaacaccttcgtcggaactccgtgct

SEQ ID NO: 16334 - DNA, 447 bp, Glycine max
aaaattccaaaccggagggaaaaggaagaaggaacatgtcaggcgttagagatgatggccgttgttgttggtgttggtgtgcccaccctcactctctaatctctaagactctctactcttctcttagtgctctaatctaattattattatcaacataagtcacaacaccaccattcttccattctctctctttcttctacactattcattcaatccatgccggtcaacgtgaggtgctgaaggtcaatcgtggtctttcgaaatggggaacgggagcagaagctactcggcgaaccggagcgactacaagcttctagaagaagtcggttacggcgccagcgccaccgtctaccgtgcaatctacctcccctacaacgaggaggtcgccgtcaagtgcctggatctggatcgctgcaatataaatctggacgacatacgtagggaggc

SEQ ID NO: 16335 - DNA, 386 bp, Glycine max
cgcacgtatactttgctctgctacatactcaaacttcccctctctcttcgctctcgcctcgtccttcacaaagcaacctgatcgagcaattccagcattcactccgctagcgtctttcactcacaaaacttggtgaaatagtgaaacggatcgtgagactcctaaaccagaagtcgaagtttgcgtgtagaaatggacggcacgtttgacgatgaatctgaaccggccgttacaatcggcgagtacctcgaggaagttgaggaacgggaactggaagctgatttagttttggggggtgatgatggcaaggagtgtacctataacaaaagttatatgaaaaggcaggctattttctcttgcctcacctgcactccaaatgggaatgc

SEQ ID NO: 16336 - DNA, 293 bp, Glycine max
cgcacgcacgtatactttgctctgctccttactccaaagtgcccctctctcgcgcttcgtctttcaccaccgtacaatttttccgcagcttcaacgcaacctgatcgagacaattccagcattcactccgctagcgtctttcactcataaaatttggtgaaatagtggaacgtttcgtgaaactcccaaaccagaagccgaagtttccaagtgaaaatggacggtacgtttgacgatgaagctgaaccggccgttacaatccgcgagtacctggaggaagttgaggaacggga

SEQ ID NO: 16337 - DNA, 518 bp, Glycine max
ggtgaaggtgcagaactgatcccggttgtcaagcaggggtcttctgagaagcccggatacatggttgttgggtttgaggtgattccttgtagtattatgcataatgctgattctgcgaaaaccttgaagatgtatgagaagtatccatcgtctatcagatgcgatccagccactgtggcaatgcctatcaaggagggtcagcctgttgttttcacttatgaggtcacctttgaggagagtgacatcaagtggccatctagatgggatgcttacttgaagatggagggagctaaagtgcattggttttctatccttaattcgctcatggtgatcacttttcttgctggcattgttcttgtgatcttcctaaggactgttaggagggatctgacccgttatgaggagctcgataaggaggctcaagcacagatgaatgaagagttatctggttggaagcttgtagtgggagatgttttccgcactccgacaaatcctgctttgttgtgtgtgatggttgg

SEQ ID NO: 16338 - DNA, 501 bp, Glycine max
acgatattggccaactgttatttgatcgtgttctgtgtgatgtcccatgcagtggagatggtacccttcgtaaggcacctgatctctggaggaaatggaacacagggatgggacatggccttcacagcctacaagttttaattgctatgcgaggtttatctctacgttaaaattggtggaagaatggtgtactcaacatgctcaatgaatcctatttagaatgaagctgtggttgctgaggttttgcggaggtgtggagggtctgtcaaacttgctgatgtttctagtgagctttcacaacttattcgtcagccaggtctcaagagatggaagatatatgacaagggcacttggttggtctcttataaagatgttcctaagtatcgtagaagtgtaattctttccagtatgtttccttctggcagaggtcatcatgatcttgttgatagtagttgtagtgttgacccagagggcattactaatggtattaacggaaatgct

SEQ ID NO: 16339 - DNA, 410 bp, Glycine max
gttcgatttaagagtgaggttgtggcttgtggagttgtatatgctgctgctcgcaggttcgaagtacgccttcctgagaacccaccatggtggaaggcatttgatggggagaagtctgggattgatgaagtatgccagggtatctggctcaacctttatagcccttccaacaggcaccaatatatacccagtctgcaaggatggggactttacattctccaacaaatcatcggaatcaaagtctcaatcaacacccaaagatgttccgcaaaatagtcccccagctgatactgacaactcagtgccaaagggaactcaaggagaagctaatattgaatccaatggtagcaagggtgcaaattgtaaggtagccattgataagctgaaagattctaaaaagtctgatgatg

SEQ ID NO: 16340 - DNA, 588 bp, Glycine max
cggacgcgtgggcggacgcgtgggttttgtatggtgctgatatgaaagtttcattgatggacaagggacccagtggttcgatgcggtcgagtaataataagaacgggaagaagaaaaaggagaaacctgaattggctgttcttgatcatcctggtcttggaagggttccaaagggtttagaaggagagcaagttgcagcagggtggccaacttggttttcttctgttgctggtgaagctgtccaagggtggataccgcggaaggcggatacttttgagaggtttcataaaattggccaaggaacctacagtactgtgtataaggctcgtgatttgactgaccaaaagatcgttgcgttgaagagggtacgctttgataattgtgatgctgagagtgtcaagtttatggcaagggaaatccttgttctgcgtaagcttgaccatccaaatgtaataaagttggaaggcttgataacatcgcagacatcttggagcttgtaccttgtttttgaatacatggaacaacgatcttacaggacttgcatcaagtcctagcattaatttttctgaaccacagggtaaaatgctt

SEQ ID NO: 16341 - DNA, 499 bp, Glycine max
aaacaaaaaacaccatttgtagcacgcgggtttgatttttctccaggtaatgaaattttagcattttactaacaccctttttcttctttgtatttggggatgctttttttaaaaaagaaaattattttattttttgtttctgtatctgggtcttggaaatgtgataatagtttaattggctcgtcactctttaaaataatgagtattattgttattgataagtgtagtcaatggggacgtataatgatgggtgtttctgcattatcaacataaagaaggactaataatattttttaacttatggtttttctggtgatttgaattaaagtgagtatttttctgttgggggttgattagtttattctggtatctgtgtgggatttccaggcatttacggcaggtggcggatttgactttgttggtgacaggtgtcagctaaggaggttacggaaggtcaagtttgtttgtttgattgattggagtttctgttacctctaca

SEQ ID NO: 16342 - DNA, 480 bp, Glycine max
gcgctctcgcgttctatttcctagtatcttttggatgaagcactgattttctctcttaatccaccatgtcgaatagccaaaatccgaattacgatggtagctcatttctcattgacataaccaccactgtgaattacaccatcagcacacccaaaaaaagatggcgttttgcttatactgctatttattctagaagggtcatgctttccttggccaaagaaatcatatctaagagaaatacaaacactcatccttactctaaactattccaaactcaatctaccggttccggaagcactcttgatatcattgagccactaattccccaacatggtaccaataatcattattctttggttcctgatgttgacaaagccagacttgctagcatggtaaaggacaaaaacttggaagcctttgttgagtttggaagagttgaaggtgttgcaaatactcttggaaccattcctgcaaacggaa

SEQ ID NO: 16343 - DNA, 370 bp, Glycine max
ggaacccaaggaaaaatgtcagatcatatccttaaatggggagaaaaacaaagctattggtgctatagaaagatcgaactcaacagttccagtttgcgaagggaatgcggcacacttgcttacgaataaacatctgattatttcacagaatcttgtgcactctcccgctttagatccacttcacatggtgcgagaaagcctaaaatctgcaaggctgagccttctgggattcaaagcatagatcagaccacggcataggtgatatctgcgttggagacttttctactatgagtagaactcacatatatacttcttccaattgtataaagcatttgctaaactacattgatacaagattggacagtctact

SEQ ID NO: 16344 - DNA, 267 bp, Glycine max
cccacgcgtccgattcacaacacactgaatcatatagaaagcattatcacaaattgttcgagtcattgatcttctcttctctttttcccccataaagattattccatcgcatggtaggttcctgcaactacgtacatgcaaatggaaaacatagtgtgtgtagcacagcgcattaatatggggacaagaatcacttttcagttggaagaaaggtataatttacagcacggaatgtctggggcgggtggagctatacgtgtggagaga

SEQ ID NO: 16345 - DNA, 487 bp, Glycine max
cggctcgagccgcagccactcgagaaaagcagcatagtgagatactacgtatactacgtagtactacacatttcatttgcctcttgtagtagccatggttttccaaacaaacattaatcctcacttcgtattgtttcctctcatggctcaaggccacatgatccccatgatggacattgcaagactattggcacggcgtggtgtgattgtttccatattcaccaccccaaaaaatgcatcacgattcaattctgttctttctcgtgatgtttcatcaggcctcccaatccggctagtacaactccattttccatccaaagaagcaggactacctgaagggtgtgagaatttggacatggtagcttcaaacgatttgtacaaaatattccacgccatcaagctgctccataagccagcagaggagttctttgaagcactaacacccaaaccaagttgcataatctcggacttttgcattccttggact

SEQ ID NO: 16346 - DNA, 528 bp, Glycine max
ggttcataacacactgtggttggaactctacaatagaagcaatatgtgctggggtgccaatgcttacgtggccactatttgcagatcagtttttgaatgaaagtctagtggtgcatgtactaaaagttggattgaaggttggggtggaaattccacttacatggggtaaggaagtggaaattggtgtgcaagtgaagaagaaagatgttgaaagggcaatagcaaagttgatggatgagacaagcgaaagtgaagaaagaagaaaaagggtgagagagcttgctgagatggctaacagagccgtagagaaaggggcttcatcatattctaatgtgaccttgcttatccaggatatcatgcaaaaaacctagagagatgtgtgataatctcatttgtcataaaccaatttgaagtaaaaggcaactcatttgtcataagtgtagtagattcgtgtgaatgttggggcagaagttccaatgaattggggagaggaagagaaaactggtgtgttggtgaagaaagaggact

SEQ ID NO: 16347 - DNA, 540 bp, Glycine max
ggcaaatttgagcacgggaataggagcagataatcagaaaacaatggccgtagcaataggaagaagcttctccattcagcccggctctttattcaacaacaagagcttggatagaggttcaccagctggaagattatcgtggcttggggatggtgctgctgccactccacgttataggcaaacttgtgttggggcgcaacagcgacctacatggctcccaggacttgatcccccacctcatcttgatggaactcttgctggagattttgggttcgacccacttggacttgcagaggatccggcaagcttaaggtggtatgtgcaggcagagctggttcattgtcgctttgcaatgcttggggtcttcggaattctagtgacagatctacttcgcgtcacaagaattagtaagataccggtttggtttgaagctggtgcggtaaaatacgactttgccaatacaaagacactcttccttgttcaactagttctgatggggtttgtggaaactaaaaggtatatggattttgttagtcctgg

SEQ ID NO: 16348 - DNA, 830 bp, Glycine max
tcggtataaacgcacattgcttttggttaataaggcagatcttttacctgtttctatcagagagaaatgggcagaatattttcgtgctcatgatattctcttcatcttctggccggctaaagctgctactgctgccttggaaggcaaaaaacttggttcatcatgggaggatgataacatggggagaactaatagcccagacacaaagatatatggaagggatgaacttttggcccgcttgcaatcagaggcagaagagatagttgacaggagaagaaattctggctcctctgaggcaggaccatctaacattaaatcccctgctgaaaatactgctggtagttcatcatcgagcaatgttgttgtgggatttgttggatatcctaacgtggggaaaagttcaactattaatgctctggttggtcaaaaacgcactggtgtcacctctaccccagggaaaacaaagcactttcagacattaattatctctgatgagcttgaccctttgggattgtcctggattagtttttccatccttctcaagctcaagatatgagatgattgcttgtggggtgttacctattgataggatgactgaacaaagggaatctgtccaagttgttgctgatagagtcccgagacatgtcattgaggagatttataagataaggcttcctaaacctaagtcatatgagtcccaatcgcgcccccctctagcatctgaacttttgagagcatactgtacttctcgtgggtatgttgcctctagtggactccctgatgaaaccagggctgcccgtcagatgttgaaagattacattgatgggaag

SEQ ID NO: 16349 - DNA, 358 bp, Glycine max
ggccatataatttttttgtatttgaaataatgttcgggatcatccacaagattgaggagacgctccatgtgggagggcacaagaaagaggagcacaatggagaacaccatggttagcactaaggtgaacacataggagaacaccatggtgagcacaaaggtgaacacaaaggacaacaacaccatggggagcacaatgagggacttgtggataagatcaaggacaagatccatggtgatggccatgacaagggtgagaaaatgaagaagaaggacaagaagaagaatgagcatggacatgaccatcatgggcatagcagcagcagtgacagtgattagatcttatatgataagcaagt

SEQ ID NO: 16350 - DNA, 624 bp, Glycine max
gagctatgtcggcccatgcacgcctacgttagcttggaattcgggttgggggggttcgggaaaattttgaattgacaactaaatctcccacctttggaggggaatgctctatattttgggtgagtatgccaccttgtgtatatatctcctgtgcggaatttgatagttatggttacgtttgctctataaacattggaatttttaacctgtaaccaagatactcaaatcatggttttagtattcatgatgaatagcaacgagggctaccatgctaatggaggacttatagctgggcaccaatcttttgacgacatatattaccagtttaccacagtccacagtgctaatgtgctacatgttagtatggcacccctctttgtgctttgctagcagtatttatcagtggtaaacatgagcagacatttgtgactaattttattctcaagattgaagatagcatagcatggcttttggggagtttatgcattgaccgagaaaattgttcattaattcctaatcttctgatggcgaacttgtatttcctctaatattggaagtcaaatttaaccaattaattggggattatgttgaaaaataaagtatgcttgttcgggtttgcttctt

SEQ ID NO: 16351 - DNA, 728 bp, Glycine max
  unsure (1)..(728): unsure at all n locations
cttatttccaacccttctcattatttgtttcttctctgttgactcaaaaacaatgctatgtctatcactcttaccattaatcaatcatctccctccgatcttaatttcttccatataacgagagagagagagagagattaattagttttcctgcaacttcaacttttgttatggccaaccggtggtggaccgggtcggtgggtctagagaactctggccactcgatgaaaaaaccggatctggggttttccatgaacgagagtacggtgacggggaaccatataggagaagaagatgaggacagagaaaacagcgacgagccaagagagggagctattgacgtcgccaccacgcgccgccctaggggacgtccaccgggctccagaaacaagccgaaaccgccgatattcgtcacccgagacagccctaacgcgctgcggagccacgtcatggagattgccgtcggagccgacatcgccgactgcgtggcgcagttcgctcggaggcgccagcgcggngtttccattctcagcggcagcgggaccgtcgtcaacgtcaatctccggcaacccacggcacccggcgccgtcatggcgctccacggccgcttcgacatcctctccctcaccggctcctttctcccttgggccgtccctccnnggcgcaccggctcacaatctacctcgccgggagccaggggcagaatcgtcgcggcgggngtagttgcc

SEQ ID NO: 16352 - DNA, 696 bp, Glycine max
agataaggtgcgatgtataataaggaacatagttagggactgggcagccgagggtaaaaaagaacgtgatcagtgctacaatcctatacttgacgagcttaatatgctattccctaatcgcagtaaagatagtccacctgcatgtttagttcctggtgctggacttggtcggctggccctggagatttcatgtttaggatttatcagtcagggaaatgaattttcatactacatgatgatatgctcgagctttattcttaaccattcccaaacggctggcgagtggacaatttatccttggattcacagcaattgcaattcattatcagacagtgatcaacttcgtcctgtttcaataccagatatgcatccagccagtgcaggaattactgaaggtttttccatgtgtggaggtgactttgttgaagtttacagtgattcaagccaagttggtgcatgggatgcagttgtaacttgtttctttatcgatacagctcataatattgttgagtacattgaaataatttcaaaaattttgaaagatgggggagtttggataaatttacggacctctacttatcactttgcagatatgtatggacaggatgatgaaatgtccattgaattgagtttggaagatgttaagagggttgcatttcattatggatttgaatttgagaatgaaagaactattga

SEQ ID NO: 16353 - DNA, 418 bp, Glycine max
caatcatgaggaacaccttcaggggttaggaagcttttcaggtcatgaatgctcagaagatgctgaagacagcaatgaggaccctgtcgagaaggaattcgaagattttctttactccagtggggcgaatcctaatgtgtatgtcctttcatctggaagatgggatgtaaatcaagaagctcaatcaagctcaagaccaccaacaattgatcaagagtttgaggagtacttttctatgcttatgctctaggacagtttaccgataaaggagcatgcatagttgtatatataatgctgaaaacggctgttgtatgtattgtacgaagatttagtagtattctgatgactttataacatcttcagtaggtgtaatatgatatttcttcttatggcctttgttctctttatctctcaccct

SEQ ID NO: 16354 - DNA, 380 bp, Glycine max
acgcgaaaaggcggaagttcagacaattgacatgatgcgggtgtgaggcaatgttctgtgctcatgttcacactgttactggtcagtggtatgtcacaccgttaaattttgatcacaaacatgacatgctggatgcaaagcggccgttattgctacctgcccgttggaagatgacatcaactcatataactaacattcagaattttcaaaaagtaaggattcgcccttcacatatgtatggcgcgtttgcaaacaactatgggatttaaaaatgtccgagtttttagaaaagagattcataatcaagttggaagacacaaatgaaaacgcaagcctgttttgcaaggggctttcaagtcccaaaagggtttgggcaaaaa

SEQ ID NO: 16355 - DNA, 1179 bp, Glycine max
ggcaaagaggactgcagatgaggtgagagcaactgttcagcctcgtacacattacgaggctgaacagtggcaagactgtataaaaactctactgagagccatacatttggcgccctcaaactataccttaaggtttgatgcaggggttgccatgcaaaagttttcagcatcaacactacaaaaggcaaagaggactgcagatgaggtgagagcaactgttgcagagcttcaaaatgctgttcgtgtatttagtcagttgtctgctgcttccaacctacatattcacggcttgatgagaggaaaattgacactcatgttggatactgcaaccacttactttcagctgcaaaagttcatcttgaagcagctgaacgtgaagagcagcatgtacggcagagacaagaacttgctcgtcaggttgcatttgctgaggaagcccgtcgaatggctgaagagcaaaggaaatttcagatggaaaggagaaaacacgaggatgaactaaagcgagtgctacaacaggaggaacattttaggcgtgttaaggagcaatggaagagcagcagtcattcaaaacggagagaaagatcagatgatgaagagggaggagggactggtgagaagaagagaaaaaaaggtggaaagcggagaaagaaggataagcactcaaaatcgcgctatgacacagaggaacccgaaaatgatatgatggatgaacaggaaatggaggatgaagaagctgacataaactacagagaggagccccaaactcagatgaatgatgatgctgaggaaaatgctcagggtcttcttgcagcagctgggcttgaagattccgatgcagatgaggaagcgcctgcaccttcctcaagcatagcccggcgaaggcaagcattatcagaatctgatgatgacgaaccattaatacaaaggcagtcaagtccagcaagagaaaactctgctgatatgcagttgagtgatggagaaatcagggatggggataagacaaatggagatgatggcagtgaagaggagaaacaatattagattttggaccctacaggttagtcttattatcagccaagtgattttgtacgagtgataacatttaaattttatgtatatatacttgaaaagttaaaaaggttttatttagaaaaagccaacttttttgttcgtggc

SEQ ID NO: 16356 - DNA, 689 bp, Glycine max
tctcgagcctttcgaacaaagcaaacacctccaactacaaacaaacacacttcacaactttgctttttctctctttcaatgtcctcttcttccttctcccccgccactctcaccaccgagcaggagctttccgtcatcgttgccgcccttaccaacgtcgtcgccggctccacctccgcctccagctccttctccctccccgaattccgccttccacagacctctgatcctctcgccgccgcctgcctaatgccgccgccgccgccgccgagcatggacacttgtcgcgagtgcaacatcgcaggatgcctgggatgcaactttttcccggaggagaaaaagaagcagaagagggccaagaagaagtacagaggcgtgaggcagaggccctggggaaagtgggccgcggagattcgtgaccctcgtcgtgctgcccgggtctggctcggcacgttcggaaccgccgaggatgccgcccgggcctacgacaaggccgcgattgagttccgcggcccacgggccaagctcaatttccccttggtggacgagtcgctcactttgcagcagagcgagccagagagggttcaaacagaagaagagcgaataaagacagagaatctcaatcaaggtatggaaatggattcattcgggaacaaggataccgaattctgggacaggattaacgaagc

SEQ ID NO: 16357 - DNA, 742 bp, Glycine max
ctcgagcgcatcaatgttgctgttgctgtggcaattaatggtggtttgatcacccctgttcttcaggatgcggataagttggacttgtatctattgtcccaaaaatggaaggagctagtggaaaaagctcgtgcaaagcagttgcaacctcatgagtataattcaggaactttcacgctttccaatttgggtatgtttggagttgacaggtttgatgccatacttccaccaggccagggtgctatcatggctgttggcgcatcaaagcctactgttctggctgataaagatggattcttcagcgtgaagaataaaatgctggtgaatgtaacagctgatcatcgaattatttatggggctgacttggccgctttcctccagacattctcaaaaatcattgaaaacccagaaagcctgacattgtagtcatgctgtacttccaacataaaattatctccaccactggatcacgactcgataatgtttgtttagaagctatttgactcaatgccgaacattttgtgatttttttccctcaactttcattgttttatcttttaggagctatcctgaggaccaatgatagattttttgacagggagaaacagctttaaaattgtttacagtgagggatgttctaaacggcaattattttgagaatctacatgtaagcaataagcggttttaacttttaaatgttggatttttcagtaaaaaattactgtttactccttgagaaatg

SEQ ID NO: 16358 - DNA, 343 bp, Glycine max
ggaaacgaaagcggaaaggaaggaagaaagaaagaaacaacactgactgaacagaactcaagctcaacactgtctgtagaaccaggttaatagaggtccaaggccaaacttgcctttaaggtttgaaccgactgactacaatacactcctcacttacaaatttcttatacaatccatgattgtgttacacctttttgctgctccccttccttcttgcactaccattacatgctccaaacatttttcccatgacaaccactttgtgccatcttcaacggttccgcggctatccctgagccatgtcagaacaaggatattcttatgtagtgctagaaatcgacag

SEQ ID NO: 16359 - DNA, 636 bp, Glycine max
gccaacccaagttgaaccagtggagttgcgaggaactaaacacagaacactaaaccgcgacaccccaaacgagaggaccaaaaccaaagacattccgttgcacacagataaaaacatccaaacctcattaaaacaaaacatcaaagttcaaaacctttttcaaccacctcaaaacgctgctatctctttctccactctccccaacatggccgtcgttggcgtcctcgcgctgcaaggatctttcaacgaacacatagctgctcttagaaggttaggggtgcaaggcgtggagattcgaaagccagagcagcttaacacaattagttccctcattatccctggtggagaaagcaccaccatggctaagctcgccgagtatcacaacctgtttcctgctttgcgagagtttgtacaaatgggaaagcctgtttggggaacctgtgcagggcttatattcttggcaaataaagctttatgacaaaagacttggggtcaatatttgggtggcggacttgattgtacaatgcatagaaattttctttggcagtcagatttaaagctttgaagcaaaactttcaatgcctgagctttgttttcaacgaaatgaggtcctgaaacattttgtggaattttatt

SEQ ID NO: 16360 - DNA, 453 bp, Glycine max
ggcaaattgtcccggatgccctcctgaaatttggcacacatgtatagaaaaaggagtccaaactttatggggcacacttcaaggaaattcctgttgatgctccaaagtctcaaaagaaaacatttgacgactctgatgaagactaagtgctggctacttgtgtttatttttggctgaagaaatatatgaattcggtcatttcttactctttttggccgagttatttattactttaagaggtaataaaaaaggttagttataaatagattagtgagtcttttcatgttgtagcatgcacccatctgtgcggtctgttgcttttggcttcactttgagatgataattttgtattcacacatatttttagctgtctagaattgtcttataagttacaatttccagggtttgacattttagatttttaattgattaattaattaatttactattttc

SEQ ID NO: 16361 - DNA, 700 bp, Glycine max
  unsure (1)..(700): unsure at all n locations
cccacgcgtccgcccacgcgtncgctgttttttaattcaaggttttatgccagtgacaataggattgaaaattgaaatggtattttttaagtttcaaaataaaaatttgtgtaattgttataacatttttaaacatgtattttaactgttcgtatttttttcctctaaagaaacatgggagcctttggtttgagaaaacattctttttcattttctatttgcacttttaattacaaaaaaaatgtcaattgttttctaaacaaacaataaacaagataaaaaaatcatgttagatatgacttctagatagttattatatattctaattagtaatttgtgattggatcacgacataaaaattctttaactgtcaatgcaaacattatttactctttttgtaattagaatagaaaactttcaaatgaacccctgaacaaagggatgtaacatcctgaaattaattgaatgtgaaaagttggagatgagcttattatcgtttaagtggcttatatgctgctgctagtatggtgacggactaagcacaatcatgtaactagttactaactattggacccatcttacttaccccatatgtggtagtaataatgaggctatgaatttgcaattgttattgaattgattgtatatggtgtggacttgcaggttgcatcacaaccaaggagcttggaactgttatgcg

SEQ ID NO: 16362 - DNA, 390 bp, Glycine max
cctcgagccgattcggctcgaggtcggaaagtaatgttagtttcggccccgatcttggtttctcatatggcatgagagttgtaaattgcagcattattgcggcttgatcgcctgccagccacatatattgagtgcaagagttgaactggccttggagttcgagtggcctaacatggacagaagaggaggctaacgatttagtgttccttttggggatggatggatggcttattattttttccttccatttctgttatattttacatgatagattttgggaggaatcatatcaactcattatggttgttcatctttgtaaaactttcaaaattgtttagttgaaaacaccacgtgccactgttcattcagaaaattcattggtctattctt

SEQ ID NO: 16363 - DNA, 771 bp, Glycine max
tcgcccacgcgtccggattgatgagtcaagcttaacaggagagagtgagccagtgatggtgagttcagaaaatccatttcttctttctggaacaaaggtccaagatggatcatgcaagatgctggtcaccagtgttggcatgaggactcaatggggtaagttgatggctactctcagtgaaggtggagatgatgaaaccccactacaggtgaagttgaatggtgttgcaacaattattggcaagataggcctattctttgcagtggttacttttgcagttctggtgcaaggacttgtaagccaaaaactccaacaaggaagcttacggagctggaccggtgacgatgcgttggaactgttggagttctttgcagttgcagttaccatagtcgttgttgctgttccggaggggctgccactagctgtgacactgagccttgcatttgcaatgaagaaaatgatgaatgacaaagcccttgtgagacatttggcagcatgtgagaccatgggatcagccacaactatatgtagtgacaagactgggacactaacaaccaaccacatgactgttgtcaaaacatgcttctgcttgaacagcaaggaagtgagcagcaataaggattcttctagtttgtgctctgaactcccagaacctgctgtgaaacttctacaacagtcaatattcaacaatacaggaggagaggttgtgattaaccaaaatggcaaacgtgagattctaggaactccaaccgaggctgcaatattggagtt

SEQ ID NO: 16364 - DNA, 374 bp, Glycine max
cttgtttattatcgtgtatatattgagaagatacatgcctatctatcatcatttgcttagcaaatttctcaaactttctctcaagatctgaaaccactctgatggagcaaagtaaggagaaaaatgctccttggttatcagtgccacagtttggggactgggatcagaagggacaagtgccagactactctctagatttctctaaaattcgggaaatgaggaagcaaaacaagacaaatatttcaagggcaagtcttggtaatgaagaggagctcatggcttcttctgccactaacaatacaagcactgtccacagtgatgagcaccagcacccccactacaaccaaaccaactctccaactgtaagatccctc

SEQ ID NO: 16365 - DNA, 467 bp, Glycine max
gtcgtttttaaatttgcgatctaactcctgaaatcgcacaattctacgatgcttggtgctggatcagactgagataagattggagtagaaaacgtatgatggtcgatccctctgttcactttctctttcgtgaaaatcgcaggaaggtaactgctgaagactgaagtacctgaaggctgaggtggtgttttcatggcttccgacacggccaaaggactctcaatcgaagaggcaaccgtttatgatctccaacttgcttttcggacaaaacaactaacctctagggaagtcgttgacttctacctcaaacaaatagaaacgcaaaacccagttctgaaaggggtgttggagttgaacccagatgcactatcacaagctgataaagctgaccatgagagaaagactaaggcaccggggtctctttcaccactgcatggaatacccattttgattaaggacaacattgc

SEQ ID NO: 16366 - DNA, 465 bp, Glycine max
ctaaaacgctctcaaagagccgaattacctgaaagcttcatggggtttcctgaatttggctgtcaaaaaacccagggtgtgctcttggaatggttgtagtgctatggagtttgtttgtgttgttgcttggattggatagccatttgagtgaggtgtctggattacttcctcttggcttgtttttataatcttggtaaagatggttctgcatagctggatttccagctctcatattcttgttaatttcttgctgctgcttggttgtggcataacctacgggactgacactgatatcttctgcttgaaaagcatcatagaatcccttgaagacccctataattatttgaagttctcttgggatttcaacaacaaaactgaagggtatatccgcaggtttaatggggttgagtgttggcaccctgacgagaacagggtcttgaatctcaaactgtcgaatatgggact

SEQ ID NO: 16367 - DNA, 541 bp, Glycine max
cggacgcgtgggttctcctctcatacttaatttgtttccttccattggaacgtttgttttatgcaacacgaatttctgtttgtgtgtaacaacactaatctccctctcaaaagagacttatcaaatgagagtactgtcacacaataagagttaatcttggttatatggtaacacatgattattcttaactccgtccgtacccatgaatcttacctaatgaataatcagatattaattgcccatatatttattttatggagacaacttctataaatcatcttgtttgtataagagctactaccagtacaaacccggggctacccgctgagtttaagcatatgaataagcggggagaaggaccatacggtcggtgactttgtactctagtgaagtgagacccataagccccagttggcaatttatgttgtaattactatttagttgcaattagctgtaatcaccctttttctctgtactcaatgagatgtttgatttaactagatttgaaatttatagtatagaatatcaccgtttgggcatt

SEQ ID NO: 16368 - DNA, 568 bp, Glycine max
  unsure (1)..(568): unsure at all n locations
gtgggtttcgagataactttgtacagcaactcgacaatagtgttgtgggaatccgtgcaactattacgagattgtcccagctttccgcccacccggccgaagagctgtggcgacatcttgaggtcacttctaaggtcaatcctcaattctatgcatttaggtggattactctcctgctgactcaggaattcaattttgctgacagccttcacatttgggacactcttttaagcgatccagatggccctcaggagactcttcttcgggtatgctgtgcaatgctggttctcgttcgtaagcgcctcctttgcgggtgatttcacttctaatctcaagttgctgcaaaattatcccaccacaaacattagtcatttgctctatgttgccaacaagtttcgtgtacagtcagtctaatgttgcattttgctcttctatctctagtttctctttcaaattcaatgcctgtaaatgacttttaagtgtgagactcacagcaatgccggtttatttattttgttttacttataattngtacgtattttttcttgggtggtggngtcaatgtgag

SEQ ID NO: 16369 - DNA, 513 bp, Glycine max
agcggccgttacgtggagtgagtaactatattgagcgtcaaatcggagaatcgaaatcggaggaatcaaagccctgctgaatggcgccaccggcaccacccaagtcaagtcagggtcaggtgatgaataatgcaaggattcacttcttttccattctcctcgctctccaatacggtgctcaacctttgatctccaaacgcttcatcagacgtgaagttattgtgacttcatctgttttgacttgtgagcttgcaaaggttatatgtgcagtgttttttatggcaaaagatggtagtctgaggaaattgtataaagagtggactttggttggtgcgttgactgcatcaggacttcctgcagctatatatgcattgcaaaatagtttgctgcaaatttcttacaagaatcttgattcactcacattctcaatgctgaatcagaccaaaatatttttcaccgcgctctttgcatatttcatattgaggcaaaaacaatcgattgagcaaattggag

SEQ ID NO: 16370 - DNA, 526 bp, Glycine max
agacaccagaaaggcagcacagccctcagatgtttacagctttggtgtagtgttgctagagcttctgactgggaaatcccctatccacacaactggtggtgatgagattatccaccttgtgaggtgggttcattcggttgtgcgcgaggagtggacagctgaagtgtttgacttggagctgatgagatatcctaacatagaagaagagatggtggaaatgttgcagatagccatgtcatgtgtggttaggatgcctgatcagaggcctaagatgtctgaagttgtgaagatgattgaaaatgtgaggcagactgatgcacagactcactcatcatctgggaaccaagcagaacaacttaaattttctcaacgtgacaatggtaactctccttccactccctcctacttccagagaggaagtgaatgaaagaacctttgtttgtgatttgagtgcatcttgtcaatgtttaactccaagttctgaacaagagcgtggttattattattatcattattattttttctc

SEQ ID NO: 16371 - DNA, 1593 bp, Glycine max
ccagaacagaatgaacaacttgtcaaaactcgcaggttctcaacatagcaatgcacctcatgttcggcccctctaaattcagtgagcaaattaatagaggacaactggaccttaattgtgaaaatcaatctagcaagctaaggtgcaaaggtttatcactgtctgatgccattactagtacttgtgattctcagatgcatagtggagaatttgaagccctaaataaaaaacccaagtcctcagatattgaaaataaaggtactaataatgatgaagaattgccatctcttgagctcagtttaaagaggcttagaggagttgaagatgctggtattgcaattcaggatgacaggaatgttttaagacgttctgatcagtctgctttctcaaggtacaatgcagccttaaaccctaagaaatctcccactggatgtgttggaagcaattctcctcataataatagcttagaagttacaaagaaagattcatctcacgatattcaatctcattctagcggcaatcctcctaaccaaaactcaaatggtgctagcaataacattgatatgggttccactactaataatgcttacgctaaatctgcagttataagtgagccagcagtagcatcgacaaccaaatgtttgcaccaaacatctgcttaccagcctgaaaaaaacaaccttgtttgtacctctcaacaagttgtcttacataatactgaagatacgacggcaacaatgctggcaccacctaaactagacagacataaagattctgcagctccagacttccatctccattgtgaaaaccataactgtattgctgacaacatgaagcaccagctgccacctgatcatgatgctgaatctataaagaaaatggctactgctgctccacattgtggatcatcaaacgtggaagaagtgctagttgaaggtaatgttggaaaccacagtatcaatagaagtgtttcaggcagcaacaatggaagcaatggacaaaatgggagcagcacagcagttaatgctggagggacaaacacggaaagcaacaatggactcactgggaatagtggcagtggtgatgctagtggaagtggaagtgccaacagagtagatcaaaacaagacttctcaaagggaagtggccttaactaaatttcgccaaaagagaaaagagagaagggagaggtgctttcataaaaaggttcgatatcagagcagaaagagattagctgaacaacgacctcgatttcgtggacaatttgtgcgacagacctctaacgaaaatgcaagtgaggcaacaacagatagctgattcagagcattggccacaatggcataatgatggggatatgcgaaaaaaggttgaggagtcttcatgtagaatttgggaattattctgtgtgttgtgttaatgtataaagaccctggttattccaacttgttcatttggaacctgaatcaatttatgtggaaagagattgttatgccgattgatgctcggataacttactgtaatttaagttactttttcctcgatcttgtgcttgaatcaaatgctttttcacattatcaactagttaaaaaaaaaa

SEQ ID NO: 16372 - DNA, 477 bp, Glycine max
  unsure (1)..(477): unsure at all n locations
aaaaaaagaagggagaggtgctttcataaaaaggttcgatatcagagcagaaagagattagctgaaccccgacctcgatttcgtggacaatttgttcgacagtcctctaacgaaaatgcaagtgaggcaacaacagatagctgattcagagcatttgccccaatggcataatgatggggatatgccagaaaaggtcgaggagtttgcatgtaaaatttgggaattgttctgtgggtttgtgttaaaaaggtataatgactctggttattccaacttgttcatttgaaacctgaatcaatttatgtggtgagagattgttatatgctgattgatgcccggataacttatagcgactcaataatttcaattacttgtgatcttgtgcttgaagaatcaaatgtgttagttcacattctgtnnnnnnnnnnnnnnnnnnnnnnnnnnnnnnnnnnnnnnnnnnnnnnnnnnnnnnnnnnn

SEQ ID NO: 16373 - DNA, 444 bp, Glycine max
tgaaaaggttaaagaccagagcattgcaaaaactgaacagtacaagagaaaacaacatggccttgagtcaaaggaggagaagaaagaacggaaggctgctgtgaaggaggaacgacgtgaggcacgtcgcaataaaaaagaaatgaaagagctttataaatgtgaagcacatcgggcacagagagctgctgctgtgtctggtccttcttccattcatcttttgtaagttaacaattacaagtactggtttgtcactcgtgtttgtgtgtctgctattctgcctctgtgacaagcttgtgaggttctatgataatgccttcgtacatcattacaaagttttgccacttaaaacattgtgcatggcagttgtgagtctttttgcctaagcaagaatgtgcttagagagtttttttggtactggaaagaaagcttttgttggttttc

SEQ ID NO: 16374 - DNA, 307 bp, Glycine max
tccagtaccaaaaaaactctctaagcacattcttgcttaggcaaaaagactcacaactgccatgcacaatgttttaagtggcaaaactttgtaatgatgtacgaaggcattatcatagaaccctgcacaagcttgtcacagaggcagaatagcagacacacaaacacgagtgacaaaccagtacttgtaattgttaacttacaaaagaggaatgaaagagctttataaatgtgaagcacatcgggcacagagagctgctgctgtgtctggtccttcttccattcatcttttgtaattgttaacttac

SEQ ID NO: 16375 - DNA, 902 bp, Glycine max
gccggcataattcaggtgatgctgaaacctcccagcgatgaacctcttttaggaagtgctgatgatacaaggctcattgacctgactgatgttgatatccgtcttccccttcttgtttatgtttctcgagagaagcgtccaggctatgatcacaacaaaaaagccggggccatgaatgcattggttcgagcctcagctataatgtctaatggcccttttatactcaatcttgactgtgatcactatatctacaactcaaaggcaatgagggaaggcatgtgctttatgatggatcgtggaggtgaccgcctttgttatgtccagttcccccagaggtttgaaggaattgatccctctgatagatatgctaaccataatactgttttctttgatgtcaatatgcgagcccttgatggactccaaggaccagtctatgtgggaactggatgccttttcagacgggttgcactttatggttttgacccaccgcgttctaaagagcaccacacaggttgctgtaattgttgctttggtcgtcagaagaagcatgcatcactggcaagcaccccagaagagaaccgttcactgaggatgggtgattctgatgatgaggaaatgaatctatcgttgtttcctaagaagtttggaaactctactttcctcattgactcaattccagtggcagagttccaaggtcgtccgctagctgatcaccctgctgtgaaaaatggacgtccacctggtgctctcaccataccccgcgatcttcttgatgcatcaactgtcgcagaagccatcagtgtcatctcctgttggtacgaggacaagactgagtggggaaatcgtgttggatggatctatggatctgtgacagaggatgtggtcactgggtataggatgca

SEQ ID NO: 16376 - DNA, 1191 bp, Glycine max
gacgacagaaggggagaaaaccctggtttagtttggtgttaggctttgaagctaaagtcaacaacacatagcagaggatagatagtttgttcgttgcgttgccatgtcggcgtcggagattgttcgggaactggattcgctgaaggacgaaaagaccataattgagcagaaaatctctgcgcttgaagctcaactcagagagattaatctccaaaacgacgccgcaccacccaacggattgacgcaggacatgattcacagatacagtcgccaccttgtgcttccttcctttggtgttcaagggcaggcaaatctgttgaagtcttcaattttagttgtgggagctggagggttgggtgctcctgcattgttatactttgcagcttctggtgttgggcgcttgggagttattgatcatgacgtggttgagctgaataatatgcacagacaggttatccacacggaagcatatgttggtaagccgaaagtgaaatctgctgctgctgcttgtcgctcgatcaactccactattcaagttgtggaacatgaagaagctttgcagacttccaacgctttggaaattctcagcaaatatgatataatagtagatgcaacagataatgctcctacccgatacttgatcagtgattgctgtgtggttctaggaaagcctcttgtatcaggtgctgcactgggattggaagggcagcttactgtctacaattacaatggtggtccttgctatcgatgcctctttccaactccaccacctagaacagcatgccaaagttgtgctgagggtggagttctaggagtagttcctggcataattggctgtctccaagctcttgaggctattaagattgcagcttctgttggtgaaccactctcaggaaggatgcttatcttggatgcattgtctggacggattcgtattgtcaaaattagaggaaggtctatgcagtgcgaagcttgtggagaaaatgcaacatttacccagcagcaattccgagaatttgattatgagaagttcactcagactcccttgcgtgtgcctcctttgaaattaaatctacttcccagtgaatcaagaatcagcagcaaggagtacagtgaagtaattcttaagaaggaaccacacgtgctggttgatgttagaccagctcaccatttcaagattgtatctctacc

SEQ ID NO: 16377 - DNA, 428 bp, Glycine max
atcaattcgaagcacatttgttttgttgcaagagaaacagtaatgttggactagaaagtggaaaaccctggtttagattggtgttgggcttttgcgcaggaacatagtcaacactcaacataggatagatagtttgttcgttgcgttgccatgtcggcgtcggagattcttcgggaactggattcgctgaaggacgaaaagaccaaaattgagcacaaaatctctgcgcttgaagctcaactcagagagattaatctccaaaacgacgccgcacctcccaatgcttcttcttcttcatcgtaccccaccaacggattgacccaggacatgattcacagatacagtcgccaccttgtgctcccttcctttggtgttcaagggcaggcaaatctattgaagtcgtcaatcttagttgtgggagctggagg

SEQ ID NO: 16378 - DNA, 652 bp, Glycine max
gcacgccctatgctggccttcgggtgtggatatgatcaaacgcatcatggtcaaaatcccccaccttccacagctggggttcttggccttggaaatggcagaacaagcattttgtctcagcttcactctcttggcctaattcgcaatgttgtaggccactgcttaagtgggagaggaggaggctttttattctttggagatcaactcattcccccatctggagttgtttggacacccttattgcagagttcctccgcacaacactataccacaggtccagctgatctgtttttcgatagaaagcctacttctgtgaagggccttcaacttatctttgatagtgggagctcctacacatacttcaattcccaagctcataaagctcttgttaatctggtaactaatgatttaaggggaaagccattgagtagagcaactgaggattcatcactaccaatttgttggaggggtccaaagcctttcaaatctctgcatgatgtcactagcaattttgagccactattactgagcttcacaaaatcaaagaactcgctgctgcagctaccaccagaagtctatctaattgtcactgtgagaaccttctctctctctctatttctctttctaatgaaaggaataaaataaattatgt

SEQ ID NO: 16379 - DNA, 557 bp, Glycine max
gcaatttcaagccactattactgagcttcacaaaatcaaagaactcgctgctgcagctaccaccagaagcttatctaattgtcactaaacatagcaatgtctgcttgggaattctagatggcactgaaataggactaggaaatactaacataattggagatatctctttacaagataagttagtgatttatgacaacgagaaacagcagattggatgggcctctgccaattgtgatagatcttccaattcataaataaatcaatgtaatttttttctttagctgagactgtagatagggatttctctcaaggaaatcttagcaaaccggtgccctgcaacttatgatgttatagattatcaatgagttgttaggcaaggagggttaggacttacgatgtaaaatggctgggatagtatatatgatttactatacatatttcatttactataactttgtttcttcttttttgttgcccaaactataattttgttttccacaggctacaatatacgcatttacaaatgaaacatcggctgaaaaggttgatgtttctgt

SEQ ID NO: 16380 - DNA, 531 bp, Glycine max
cttggaaatggcaagacaagcattctgtctcagcttcactctcatggcctaattcgcaatgtggtaggccactgcttaagtgaaagaggaggaggctttttattctttggagatcagcttgttccccaatctggagttgtttggacacccttattgcagagttcctccacgtaagtgttaaaaattaaaatagatattatttgtttcctttatgagatattgctactcatgagaacttacacacagtctttgtttcagacaacactataaaacaggtccagctgatctgtttttcgatagaaagactacttctgtgaagtgtcttgaacttatctttgatagtgggagctcctacacatacttcaattcccaagctcataaagctcttgttaatctggtgagatatggaatccaaggagccttgttattgtattgtatggccaatgataattacctcccatcttcagttagtaatgtttgatctgtgattcagatagctaatgatttaaggggaaagccattgagtagagc

SEQ ID NO: 16381 - DNA, 2620 bp, Glycine max
cgcaccactagcacttcattgagttcatttcacagttcctattcgtaccaaatgacaaccaccaatacgagtttctctctctagaaccaccgaagcgaagaagaagagagaagagaatcacggtttccgccatggacgcggcatcgcagctcgtctcctgcggaatcgatcccttccatcgcgcctcctctccttccccgcgccaccgccgccacagcaacctcctcctcctacgccgtcgctccagccgtgtcttcgccgtctccgccgagccgaaacccgccgtcaacggagcaaactcgaggccgcctccgaccagagccgtcaatggcggcgtctccacgagaattggagatgtttcgaaggagattaagagagtgagggcgcaaatggaagaggatgaacagttagcgacgctcatgaggggtcttcgaggccagaatttgagggactcgctcttcgctgaggacgatgttgaacttcgtcttgttgaggtagacgagagtagtgagtttttgccattggtgtatgatcctgccagcatttctgcatattggggaaaacgtccacgcgcggttgcaacgcgcattgtgcagttgctatcagttgcaggaggttttctttctcgcattgccggggatgtgattaacaagaaggttaaagagaatgaagttgctagggccattgagttacgtgaaattgtgacatctttgggtccagcgtacataaaactcgggcaagcattgagcattcgacctgatatactgtcacctgtagcaatgacggagctgcagaagctttgtgataaagttccttcatttgcagatgatgtggctatggctctaattgaggaggagcttggtcagccatggcaaaacatctattctgaactatcatcttctcccattgcagctgcatctcttggacaggtatacaagggtcgcctaatggaaaatggggatttggtagctgttaaagtgcaaagacctttcgttcttgagacagttacaattgatttatttattattaggaacctgggtttggctcttcgaaagtttcctcaggtctccattgatgtggttgggttggttgatgagtgggctgctcgattttttgaggagttagactatgtgaatgaaggtgaaaatggaaaccgttttgcagaaatgatgaggaaagacctaccacaggttgtcataccaagaacctaccataaatatacatcaaggagggttcttacgacagaatggattgatggagagaagctgtcacagagcacagaaagtgatgttggagaactggttaatgttggagtcatctgctatctaaaacagcttctagatactggattttttcatgctgatccacacccgggaaatttgatccgcactcctgatggaaaacttgccatacttgactttgggcttgttacaaaactgactgatgatcaaaagtatggaatgatcgaagcaattgctcatctcatccatcgggattatccagccatagtaaaagactttgttaaacttggttttattcccgatggagtcaatttggagcctatcttaccagttcttgccaaggtttttgatcaggccttagaaggtggaggggcaaaaaacatcaattttcaggagctggcatcagatttagctcaaattacctttgattatccttttaggatacccccatactttgcccttataattagagctattggggttctggaagggatagctttagtaggaaattctgaatttgccattgttgacgaggcttatccttatattgcacagaggctcctcacggatgaatctcctcggctaagggatgctctgcgttacactatatatggtaaatctggagtttttgatgctgaaagatttattgatgtcatgcaagcctttgaaaattttattactgctgccaaaagtggtggtggagagaatatgaatggcaatatggctgagcttgggattcttactactagtcagtcagaatatttgttgtcaggattccaatctgtcattcctctatcacagcagccagtgcaaacaagggcagctttagcgtttttgttgtctgacagggggaattttttccgagaatttcttttggacgagatcgtcaagggcatcgatgcagtaacaagggaacaactggtgagagtaatgtccttgctaggagttcagaatgtaacccctgttttcagcatggtacctacagtgggaccctttaagcctgcggctcttatacccaccataactgaagaggatgaagttatattgaacaatgtccagatggtggtggagttcttgactgctggaagttccctatcaagaacatctggtcaggcactgaatattcctcagattatccaagagcttctcccagtgttaccaggcatctctgttaaagtgcttccggaggttgttagcagattatcttctcgggttttagcacgattaattcgtgatacatttttgtaagagaattctgtctaccttactgcacacaattgtgtatattttgacagttgttcaaaaattgtatatatgaccattattttacatattttcatgttgcagaaaattcttaattacatattttacatattttc

SEQ ID NO: 16382 - DNA, 472 bp, Glycine max
  unsure (1)..(472): unsure at all n locations
ggaangaccgggccggccgacgcgtccgcttattctctactcctgtacaaacaccaacgctcaaaactttacaacatttgcaggagctgccgcaccaatcatcctcttcatctctcttcgcacgcacaacaacagagaccggaccccaccttcccacagccaccatggtcgaaaccagacgcggcgcctcttcttccaagtgttctctctcttctccttctgcgcccaacaccaaacgatccaaggtgtccaaggattcctttgtggcggctccggtcaacaaatctggggaaccggagctacggccctctgatctgccagatacggcgtcgttgaaggccgtggatgtttgtgacgccgtgttgcccgataagtctccttctgaaggcgaggctttggtgcctccacggtgtgcaggtgaaactgcggagaaatcgaacgtggctggtcttcccccaaagagcgtgaaaaa

SEQ ID NO: 16383 - DNA, 1952 bp, Glycine max
gtgagattctaggaactccaaccgaggctgcaatattggagtttggtttgtcattaggtggagattttcaaggagagagacaagcatgtaaacttgttaaagttgagccattcaattccaccaaaaagaaaatgagtgtggtggttgagctccctggtggaggcttaagagcccactgcaaaggtgcttctgaaataattctggctgcttgtgacaaagttctcaactcaaacggtgaggttgtaccccttgatgaagaatcaactaaccatcttaaggatacaataaaccagtttgcaagtgaggcccttagaactctatgccttgcctatgtggaattggaaaacgggttctctactgaagaccctattcctgtttctggatatacatgcataggagttgttggtataaaagatcctgttcgtcctggtgttaaggaatctgtggcaatgtgtcgttcagctggaataacagttagaatggttactggtgacaacattaatactgcaaaggctatagccagggagtgtgggattttaactgatgatggcatagctattgaaggtccagagtttagagagaagagtcagaaagagttgcttgaactgattcccaaaattcaggttatggctcgatcctcacctttagacaaacacacattggtgaaacacttgcgtactacttttggggaagtggtagctgtaacaggtgatggaactaatgatgccccagcccttcatgaagctgacattggacttgcaatgggaattgctggaactgaggttgcaaaagaaagtgcagatgtcataattctggatgataacttctccacgatagtaacagtggccaaatggggacgttcggtttacataaatattcagaaattcgtacagtttcagttaaccgttaatgtggttgcattaatagtgaatttcacatcagcctgcttaacaggaactgcacccctcacagctgttcaactcttgtgggtgaacatgataatggacacactgggagcacttgctcttgctactgaacctccaaatgatgatttaatgaaacgttcacctgttggaaggaagggaaatttcatcagcaatgtcatgtggaggaacatcttaggtcaatccttgtatcagtttatggtgatatggtttcttcagtcaagaggaaaatcaatctttttacttgagggccccaattcagatctagtcttaaacacgcttatttttaacacgtttgtcttctgtcaggttttcaatgagataaattcacgtgaaatggagaaaataaacgtttttaaaggcatattggataactatgttttcgtgggtgtcatcagtgctactgttttcttccaaatcataatagttgagtacttgggaacctttgcaaacacaacacctctcaccctggcacagtggttcttttgcttgttggttggatttttgggcatgccaattgctgctcgcttaaagaagatccctgtttgaagcacctgaatggataaaaagcagtagttggttaccgttagttgttgcattgcttcaaggtccattatgcctttacattcactaactcgcctggtaatgcttgaggctttcttgggttggaatcagaaatcgagcagtgaaacaaatcactggagtgatgtctcgaagcagtttgactagcattaaccatttaaccattttatttaatacgttgtttattttctaggatagcagaatgattgatgacttgctgtaaataagtaaattactagccttcctcagtttgtttcaatttttatatttataaatctcatttgtttctatgttctataatggtgatcctgaactgtccgttccgttattttaaaagctctgcgtagtcataatcttgttgtgccagcacaattgactgagacatgacaacctgcaatatataaaacaagaacctttccttattac

SEQ ID NO: 16384 - DNA, 562 bp, Glycine max
ggccaaatggggacgttcggtttacataaatattcagaaattcgtacagtttcagcttaccgttaatgtggttgcattaatagtgaatttcacatcagcctgcttgacaggttagaaagttaatttaattttgttaccacaaaatagggttatgtacttacataaacagcaaggaactgcactttttttgtttgcgcaccagcctgcatgacagattataaataaaaacactttttttgttttcttcttattagttatctgatcttacatgtattttctctatccaggaactgcacccctcacagctgttcaactcttgtgggtgaacatgataatggacacactgggagcacttgctcttgctactgaacctccaaatgatgatttaatgaaacgttcacctgttggaaggaagggaaatttcatcagcaatgtcatgtggaggaacatcttaagacaatcattgtatcagtttatggtgatatggtttcttcagtcaagaggaaaatcaaatctttttacttgagggccccaattcagatctagtcttaaacacgcttat

SEQ ID NO: 16385 - DNA, 966 bp, Glycine max
tgagtctacgtgtttgacagaaaggttgagctatagcctaaagggagagacacataaatagtttctactttctattcatagatagatggctggcccaattatgagacctcagattgtgctatttggctcctccataattcaaatgagcttcgacaatggtggttggggtgctattctagctaacttgtacgctaggaaggatgcttatgtgcaaccatcattggtaattgtgtattttggtggcaatgattctattgatcctcacccatctggccttggtcctcatgtaccccttgaagaatatgttgaaaacatgaggaaaattgctaatcatcttaagagcctctcggaccatattcgcattatatttctcacttctcctccgatcaatgaagaactaatccgcaaaaagctcagtgcaacgcaatcaggaagaaccaatgaatcctgtggagagtatgcagatgggttaatggagctttgtgaggagatgaatatcaaggccattaatctgtggtctgcaattcagacaagagaggattggttagacgttagcttcacggatggagttcatctatcagcagagggaagcaaggtagtggtgaaggaaatattaaaggttctaagagaagtagattggaaacctagtctgcattggatgtcaatgccaactgaatatgcagaagattcaccatattatcctccaagtcctgatggaacaacaaccataaatgtgtctcatattatctcccgaaggtgtttgcagtgggatatatagtactttatgtatttatattgcgtaccatataagaggctcaattatgttgtgtggagtggagctcttggaaaagtgatattttccctaccccatacgttttgggggcgctttaattattctattctagttttcatttgttacatgtacttaaatttgtgttaataaattaaaattccactcaatttaca

SEQ ID NO: 16386 - DNA, 993 bp, Glycine max
gaggggagagattgccttcttcttttattctttaatctctcccctcttgccttcttcttttattcttttccaaccagtgaattaatcttattatcgtttctcctggtgttaaaaagtttctaaaattttctctacttgatattcacacatcaacatacctgaaagctccaagatcgcggtgagtctacgtgtttgagagaaaggttgagctatagcctaaagggagagacacataaatagtttctactttctattcatagatagatggctggcccaattatgagacctcagattgtgctatttggctcctccataattcaaatgagcttcgacaatggtggttggggtgctattctagctaacttgtacgctaggaaggcggacatcatcttaagaggatactctggttggaattcaaggcgggctttggaggttttggatgaaattttccccaaggatgcttatgtgcaaccatcattggtaattgtgtattttggtggcaatgattctattgatcctcacccatctggccttggtcctcatgtaccccttgaagaatatgttgaaaacatgaggaaaattgctaatcatcttaagagcctctcggaccatattcgcattatatttctcacttctcctccgatcaatgaagaactaatccgcaaaaagctcagtgcaacgcaatcaggaagaaccaatgaatcctgtggagagtatgcagatgggttaatggaacttgtgaagagagaatatcaggccattatctgggtctgaattaaacaaaagattggtaacgtacttacgtggagtattatcacaagaacaggatggtaagaaataaagttaaaagaatgaaactattgatgatgaatgcactgaatcaaaattacattatctcagtctatgacacacctaaggttataattccgaaggtgcggggaatatagacttagattaatgcgaccattaagtaatattggtgatgactttgaa

SEQ ID NO: 16387 - DNA, 633 bp, Glycine max
catgtccaatattatttgatgatccacaccacactagcatggtaaaccctagcctatccctatatatacgtcaatgagatgttcatttttgttgtaagaagagcatatatatatatatatatattgtcatctcttcttccaccaaactttcggagttttctttggttaattagtaaaaaattgcttaattaatttgtccttccagaggatcgaatgagatagaaagggtactggaggggcaattaattaattaatctctagtgagtatatatataaatatggagagcctggaagaaagagtgtttatgttgatgaatgaacaatattattattccaattccaatgtatcagatcagctgcatatgcatcatcatcgctctgtgtctgtggagaatctaaacctatggtgggaaaacaacaccgactccgatgactcagccgagcgaattttgtattgggaatctcagatctcactgcttcaggaaattttggagcggtaccatttaagtgggtcaaaattgagacttgaggttggtcgaatcattaaagaggtcaaagcttctgatttttgcagctgcttgaaggctaactcttcggattgcatcacctgtttgagaagacgagtggttgacg

SEQ ID NO: 16388 - DNA, 308 bp, Glycine max
ggtcagaagagcatatattatgttatggcttcttccacaaactttcggagttttctttcgttaattaataaaatctttgcttaattaatttgtccttcctggaggggcaattaattaattaatctctggtgagtatttataaatatggagagcctggaagaaagagtgtttatgttcatggatgaacaatattatttttccaattccaatgaatcagagctgcatatgcatcatcatccctctgtgtctgtggagaacatatcgtgggaaaacaacaccgacttcgatgactcacccgagagaacttt

SEQ ID NO: 16389 - DNA, 429 bp, Glycine max
ggaagaaaatagacggaaaaaatggcgtgcaggagcatgcttcgttcatcgattctggtggaacccttccaattgcaacctcttcattttagtaacagacccgttagcgcttatccgtttcgccgtggcaaaggactaaccctccgttgctccagcaacgagacgccgtcgtttcaggacgatcagggtccacctcaagaggccgtgttgaaggccatttccgaggtgtctaaggcagaagggagggttgggcaaacaacaaacatggttattggaggcaccgtgtcggatgattctactaatgaatggctcactttggaccagaaggtgaactcatacccaactgttcggggattcactgcaataggaactggaggggaggacttcgttcaagccatggttgttgctgtggaatccgtaatccagcag

SEQ ID NO: 16390 - DNA, 763 bp, Glycine max
cccacgcgtccgcccacgcgtccgggggatcacttctttgacatgtcaaggtttgattccttgcaggcacgaaagtggatattcttcacaaccagagaggctcacgagatttgattccataagtagtagcagcaaggattttggttacaataatgataaattcacaaggtttgattccataagtagcagcaaggattttggctacaataatgataaattcacaaggtttgactccataagtagcagcaaggattttggctacaatcctgagacgctcacaaggtttgattccatgagtagcagcaccgatttgggcttcggtcgtcagggacatgcaaggtttgactcaattagtagcaccaaggacttcggtcacagtggtccgttctcttttgatgactctgatccattcggctcctctggcccttttaaggtctcttcagaaaatcattctccgaagaaaggttcagataactggagtgcattctagcctgcaatccaactcttcccgattttctttgttgtttctatttccttgattgttcatgacagcctatttttttgtgtatagctagaagaaaagctggacggtaatatatggtgtggccaatgtatcagtttgaagagaagctttttctatttttttggggtaatgtgcggatgttgtgtgaaagatagatagataaaattaaatgccttgatgtgtatttaatgtacaacgaagtttaatggcaagtgcatgcaaagttttttttcttctttt

SEQ ID NO: 16391 - DNA, 335 bp, Glycine max
ccctttttgtgtaatgtaggaagcaactccgttcttctctctctctgaaacgcaacttcattagccaattaattggcttcgcaaaatgtcggggaagagaaagaggaagttgaaattgttaagcgatgcaatcacagataatagaagaacagttgctgaggtgaaaagtgaaaatttggagatgcaatcctgggctgatctccctgctgaactcttagaatcgatcttgtcccgattgatcctagcggataacatccgtgcttctgctgtttgcaggagatggcattctgttgccagtgatgtacgtgtagtaaaccaatcaccatggcttatgt

SEQ ID NO: 16392 - DNA, 611 bp, Glycine max
gctgcatccatccattcatccatcgtcgtcgtcaaaccaaaccaaatcctatatctcgcattctcattcactctgcccccaattccaaatccccattccctaaccctaaccctaaaaccgaatcttctcatgaaacctcccacgccacactcctccgtatcagaatcaggttcgattccctaaccctccacaaatcgctttcttctctttgcagtttctccatggagggctctgcagaggatttcggagcccccgagtcatgggaggtcgctgatttggacgagtccatgaaccgcttgaacctcatgctctcttccaacaacgattctaagcaacctcaccaacgtgtcgccgatgatgacgatgctatgccgcctcctattccgcctccttcgtccagtggcgacgaggtttccgatgacgtcatcaatcaggttgatcagttccttcgcgaagctattcagaaccctcgcgaacggctttcaatcttgaggatggagcaagatgttgagaatcttattcgtgatcctactcaacagcagcttgaatttaagcagcttccaacattctatctacggctggctgtacacctggtagcctagcattactca

SEQ ID NO: 16393 - DNA, 802 bp, Glycine max
  unsure (1)..(802): unsure at all n locations
cggatctaaatagattgttctactcaacaatatctacgctaaattcatcatcgtggtgatgatgtttctgtttcttctgaaaaaggtatcacacataaatctagacaagtgttgacccattctcatctgcaactacaaacaagactctctgtccttgacagacagctgttccaaacccaacatcattcacctgctcccaccattccatttcctctttctttctcccacctctctcatatcttcagatccatcactctctttgcagaaaaaaaaggctttgatatttggaaatgtctgaagtgagaaacaaagtggatttcatccagttgcttggacctgacatgtcaatcaagattctcacccatttggatgacccttgtgatcttattcgggtttcttctgtttccagttcttggcaccgatttgttattgaacatggcctctgcaagcaactttgcttgaaaatgtttcctgaaatatctggtgttgctcatataattgagcttgacaacattattgaaccactaagcaacactcttggcagttatgtaagttgggagtctcataagagaaatcatagagtctatgcatttttggcttctggtcttactcctatgaggaaaaattgcatctcaaaagccattagtgcatccagcactgataactaccctgaagaaagcattctacatacgttggagcctggggatagaactgaatatagagcatcatactggtcaagcaaaggggaaagcgatccttctgttcctgagactntagtttatgagctagcttcaaattatgt

SEQ ID NO: 16394 - DNA, 1408 bp, Glycine max
cctttgcaaaccctttccaacaattagcaaaacatttgttaaacgatggaagtaatgtgtggtgccaaagttggcaatatggtccataaggccaagccttatgtgttaactgtggggttgcaatttgggatggctgggacatacctcttcaccatggccagtttgaaccatggaatgagccgtttggtgttcattgtgtatcgcaatgccattgctgcattggcccttgctccctttgccttgatctttgaaaggaaagttagaccaaagatgacatggactgtcttcatacagatattagtacttggatttcttgagccagtggttgaccaaggattcactttcttggggatgcaatacacttcagcttcctttgcatccgctgttatgaatgccgtgccctctgtaacctttgtgcttgcagtaattttcaggttagagcatataaaaataagggaattacgcagtcaagcgaaagtaattggaaccttagtaacctttgctggggctttgttaatgacactatacaaaggccctcaattcgacctatttcatcattcaaacacaacccaccagcaaggtggaagccactccactcagaatcactcacactgggtcgccggaactctcttcatttgcctgggttgcctggcttggtcttccttctacatattgcagtccataacggtgaaaaggtaccctgcggaactatcactctcatcgttgatatgcttggcgggtgctttgcaaagtgccgtggttgctctgattgcagatcataaccctcgagcatgggctatcggttttgactacagcctctacggtcctctatacactggaataatgagttcaggaatagcatattatatacaagggttggtaatgcaaagcagaggtccagtgtttgtaacatccttcaatcctctttgcatgatcattgttactgctttgggctccctccttctaggagaacacctctacctgggaagcatcattggaggcatcattatcgcagtgggtctatactctgtggtgtggggaaaaggcatagactataaagatgacatgtcatcaccagcaacaacaaaagaaacagaaacaatgcagcttccgattacctcaccaaataataaataacagagactttgcgttaacttatagaaacgaaatttacatagtaattcgatcgacttatgttggcggaagtgaccgatgatagcgtaatatgcaaatcatatagtgatttgttgtgctggtgtgggcactatatttagccatgttaagttgaaacaagactttgtttaagttaatactaatttgttagaaagtgttttgctatcgttagttataccaagagtttatattgttaatcaatgtgcaattctataagaatctaaaaattgtgttt

SEQ ID NO: 16395 - DNA, 535 bp, Glycine max
caaaaaacaaaaaattaaagtaggcagaggcagcgcagcattagcataacaaaattgaagtaagcctcacatcacagatttcccagtaaacaacgaacccatcatctcaatctgcttcttcactctaatcgaatcgaaccacccttcaaatcgcgcatcaaaatcgaagcttatacatatacatacaccacgcgtgaatccaacggtgatgatgaccgggaagcaaggtttcttctctctgcgaggctcactcctcttcctcgcagtcctcacacttttatctttcacctacctttccctcaaatactccaccccaacaccccaggtaccaaatttctcatttttctccaaaccccatttcgaaatttctcatttttcgccgttttcaagattacccttttgctctaggttaccaacctctcggtcgagaaactcaacgacgcgccgggaaccgagaaggaagaagaaggaagaggagaagaagaagaggttccggacacgttccactcgccgcgcgtattcaagctgaactatg

SEQ ID NO: 16396 - DNA, 262 bp, Glycine max
agcatagcaaaatgatagagtactgcgagtaaggaaggttccaagcctcatatcacagatttccaaggaaacaacgaacccatctcaatctgcttcttccctataatcgaacccttcaaatcgcagatcaaaatcgaagcttattatacagtgatgatgaccgtgaagcaaggtttcttctctctgcgaggctcactcctcttcttcgcaatcctcacccttctctccttcacctacctttctctcaaatactccaccccaa

SEQ ID NO: 16397 - DNA, 450 bp, Glycine max
gtaatgcgctgtggtgtgggcatttcaatccataaagtcccaaaaacactgacagcgagaccaactcaaccacctcttccagttgcagacttgagttccttatgatgggaaccgcatgtttcccaactactaatgttgttctcaaacctcaaaacttatctgggaatttctctaccctctgtgataactttcggtgtctgaggttcctcactccgaaaccgccccacctgcgatcctctcactctaagttgggaaatagagtaaagctgacatctttttcgatgtccaaggcaacccatttgaaggtttcacaagctgcactctcatccacggaagaatcactgtcttcatctcctcgggtaataggagaacatgacttgctcattgtgggtcccggggttcttggtcgtttggttgctcagaagtggagtcaggaacttccgggtagtc

SEQ ID NO: 16398 - DNA, 593 bp, Glycine max
gttgattgttgaagtttctcttctcttgctctgactccaatatttcctttaaaataaaaatagcattctcttccttcttccttcttccattcattcattcacatttcacgctttcttcagagcctgcacttgttccacccttcaacataccactcctcctcttccccaattctcttatccgtaatctggcactcttcagagaagactttgtaagataaaaagagaaatggccttagaccagtattttgatgaggctgtgccccagttggattccttggaagataaatcgtctctcgaaacatggaaatgtggcagtgacgatattgcagattcggatagaaatgcctctggtggctttgattgcaacatatgcctggagtgtgtgcaagatccagtggtcactctttgtggccatctctactgctggccctgtatttacaaatggcttaatttacaaactgcctcttctgaaaatgaagaagagaagcaacaatgtccagtctgcatatcagaaatctcacagtcgtcccttgttccactatacggccgcggccaaaccgtgttaccatctaaaggcaaaggccaccaagtag

SEQ ID NO: 16399 - DNA, 837 bp, Glycine max
atcacattgcccataaagctgcagtagatctccaatcagatcatgatctcttactgaaaagctcaactcagcaatgtgtatcatcaaatgcatttggagggccagcagaaagtaatgctgcaaactatggtgtggatggaaatgcagcggagagtgatcatgggagcaataatggacaggatggaagcaacaccttgacaatcagaatgataaatatggaaatggcaatgtggctgctgggagcattggaattggtggcattgataggaaaagctttgggaatggggcagatgaaggacggcttgcattgagagaggctgccttgaccaaatttcgtctaaagagaaaagaaagatgctttgagaagcaggttcgatatcacagcaggaaaaaactagcagaacagcggccacgtattaggggacaatttgtcagacgaatagtgtctgaaggcaaagaagaaaaagataaacaaagtgacaacctggttcctggggataattctatcgacattcctcaatagcaccagacaaagtggtgatcattatttgactgattccgttccattaactgcctctagcttcttgctagcagaccagcttttcacacgttcacctaggaaggagcttggaggtttgtgttagaggaatctgtgattaggtagttgaaatttatctctattgtgtgaaaatcagacatttaatttgaaatttctagacaatgttctagattctgtttatgtttgtctgaactttaaaactccaaatggacccatagaagtggttacctttggataggttaacctctgatgaaataaaatttatcatgttagctttc

SEQ ID NO: 16400 - DNA, 446 bp, Glycine max
cgaataccttcgcgggaatgtccgtggatcctagtaagagaccattgatggattatgttcagaagattcagagggatgtttatgctaacatgcgcggtgttcttgtggattggttggtggaagttgcagaagaatacaaacttgtttcggacacgctttatttctctgttgcttatattgataggtttttgtcgttgaatattttgtcgagacagaggttgcaattgctgggggttgcttcaatgctcattgcttcgaaatacgaagagattaagccgcccgaggtggaggatttttgttacattacggataacacatactctaaggaagaggttgtgaacattggaggctgaaatattgaaggctttgaaatttgaattgggtggtcctacagtgaaaacattcttgaagagattcttcaaagttggtcaagagggtgttgatac

SEQ ID NO: 16401 - DNA, 655 bp, Glycine max
actcgagccgctcgagcgattcggctcgacatttgatccaacagacacactccctctctctcttgatcattctctctcagtgctctcgatctccatctgcaacttccttgtctgacagatcctgtgttccggagaaaggaaaggaaaggaaagatgtcggggcaaacgcagcgtctgaacgtggtccccaccgtgacgatgctgggagtggtgaaggcccgattggtcggcgccacgcgcggccacgcgctcctgaagaagaagagcgacgcgctcacggtgcagttccgccagatcctgaagaagatcgtgtccacgaaagaatctatgggcgacatcatgaaaacgtcgtcgttcgcgctcaccgaggcaaaatacgtcgccggcgacaacatcaagcacgtcgtcctcgagaacgtgaaagaagcctccctccgcgtccgctcgcgccaggagaacgtcgccggcgtgaagctcccgaagttcgactacaccgccgacgccgacgccacgaaaaacgacctcaccggactcgcacgcggcgggcagcaggtgcagcagtgccgcgccgcgtacataaaggccatcgaggtgctcgtcgaacttgcgtcccttcaaacatcgtttctgactctggatgaggccatcaagacca

SEQ ID NO: 16402 - DNA, 484 bp, Glycine max
aaatgacagaagcaacttctaatgtatatgtagctttgtcatctatgggagaggaacaatctgtaaagataagacaaactgatgatgtttcaaaggaatctgagaccaatgactcatcaattgtcagaggaaataaagattcagtcattgcaaatgggtcaatcagtgttaagtcttcttcggccgtggctgaacttcaagttcctagttctatacccagcccgagtgatccggatgatgctgtactggctcccaagaaggtcgcaatgaatggtttcttacaaagtgatggtggaaaggagctggaggatcctatatccccaaattcatgtactctagtggttgttcaaaaacatcagcttacaactgatgatgtaagggccgttcatgatgttaatgacctaacaaagggagaagaaagagtgaaaatttcatgggtgaataacaccactaatgatttcccaccactctttcactacatacc

SEQ ID NO: 16403 - DNA, 613 bp, Glycine max
cggacgcgtgggataacgctaatggactcgttctctttcaccactgttccatagagcaactcaaaaccacgaaaaaaaaacatgaatccccgttttgcccctctctctttctcaatcccttctcttcgaaaaacaccttcttctctcattggtgctaaccacacctccgctcgcttctgctcccgataaataataccacacaaaaaaaatccccaccttttttttttcttcttcttttatttcaattcaattcatttttttgtgaatttttctggttattgttattaatttctgtgagaagtgcacaacttgtttccatggatccaaccgtagcgaagcctggcgttctcagaaacgttctggttcggttactcctcttcggcgttttcatcgtcgtcgtacggttcgcttacgtcatcaccctcgccggtgagtcctgcaccgtcggcgacttctgcttcttctctccgtcgatcaacctcgcaatcgccggcaccagatcaggcgccctcgcagcgcgcggaggagccgccgggccgccggagcgctatgccagcaaggactggatcaacggcgtccggttctactcgtcggctttccaggacatgatctc

SEQ ID NO: 16404 - DNA, 245 bp, Glycine max
cagagaaccagaatacttcattttgtgggattctttgttggcgggatttcatgttgtagaaatattttataggtaaggaagatcttttcttcctgaatgaggggacatttatgctatcaaatcaaaactgataaaattgtaacgtgtatatttttaaccgaagtacagttaaaaattcagagtgatatatagtacattcacaattccaaaaaaaaaaaaaaaaaaaaaggggggcccgccgatta

SEQ ID NO: 16405 - DNA, 573 bp, Glycine max
gctgtatttttgtttcttcttttttcctgtttccgtggtttgggtctgtttttgcgttgcagacatcccacacacaacacattcacaacacaacatttgatttctctcttttgtcatcctcaaaatccacaatctttcctccttaatatctccgaccccaacaaaaagaaacaagcaagccatggattcccagatccatggcttgtcctcgtaaagtcaacccctttaccagtcaaacttaaccccccttctctccccctctgaaaccgcaggaagaagatcaaatcgaagaaggcttaaaaaaaatgaagggttcgaacaaccggttcttcacggtggcgctggtggcggcgtggtactcctcaaacattggggtgcttctcctgaacaagtacttgctcagcaactacggcttcaagtacccaatcttcctcaccatgtgccacatgacggcgtgctccttgctcagttacgtcgccatagcgtggatgaaggtcgtgcctttgcagagcattcgatccagggtgcaattcttcaagatctctgctctcagcctcgttttctgcgtctccg

SEQ ID NO: 16406 - DNA, 542 bp, Glycine max
tggtggcattacttgctggagcaggataacccaaaccggaacagaagcaaaagcagaaacgaagatgggtggttccgttttcactcacttcctcgttctcccctcctcttctactccttctctttccactctcttcccatccaaattccccaccagacccatcaatgaatcttttcccttcacccttacctgcaaccaattcccttccaaactcactacttcgcggccttcccaattctcagctcctcctagttactcatgctctgtaaaaaagataaaagcttcgggaagtcagcaaacaggatccattcgacatggagacaaccttgatgcaatgaatagcaggagtttgctgcagaagtttcagaggaaaatgccaacggtattccttttcaacaagcaatctatgatgagtgactttacaaccaaagatattgatgacagggaaagatcatccaaatgggtttcagcattcctctttggacaaactatatcagtgatttctcctgatgtttcatgtgcaagcagctcagcaagaataa

SEQ ID NO: 16407 - DNA, 1618 bp, Glycine max
ctttctcttccaccgccatcatctctgcaccctccaccgccctcacacccttttaatatcctcactccccccaccacctcccactcttttcttttcacacccctcctcattcttcttcttcacactaattcagaatcaacatgaacccaaatgatgctaactctcctaagccgttggagattctgcagatgaaccctgttcctccgtttttgtccaagaccttcgacctcgtcgacgacccgactctcgaccccattatctcatggggctccaccggttttagcttcgtcgtgtgggaccctctcgagttcgcgagaatcgtccttcctcggcatttcaagcacaacaacttctccagtttcgttcgtcagctcaatacttatggattccgcaagattgacacggacaagtgggagtttttcaacgaagctttccagcgagggaagaagcacttgctgaagaacatccaaaggcgcaggtcatctcaatcccagcaggttggtagctatattggaatcgaatgttctactgaggcaggaaggtctgatgttgagattgagatagaaaggcttaggaaagaaaggactatgttgatggaagaggttgttgatttgaaacaagagcagcgaagaatggctcaccgcgcaggagaagtgaatcaaaggctccaatccacagaacaaaggcagaaacaaatggtttctttcctggtcaagttaatccagaaccccgcctttttagcccgccttaggcatgaggagcaaaaagaaatagattctccaagagtggtaaggaagtttgtcaagcagcaccaacatgaaactggaacagcagaaactctccaagaagggcagatagtgaggtaccaacatgattggagaaatatagccatgtcttctgaaactccaaaactaagtccagtttccattgaacaatctcctcactacctttcacagggtttggcaggagaagtgagtgtaggcgcagaagatcttactgctcaaatagagaatattgtatcaaatgacttggctgcagtgcacgggatcacagtgtctcaggaaattatgattggagaaggattatctagctttggagctgaagacccccttttcaaagggaaaagtgtcatgagtccaattctagaagttcctccagagtattttgcttccttcccagagggtttgaccaaggggaaagactttcaagatttttctgctcttggaactgaaggcatgataaagctagaagatatatgggactctggccttaatgttagtggtgctgcttcaggtagtgggaatgagctgtggagcaatcatgtcaactatgaagagtttccagaatttggagtcacaagtggtatgtctgactcagacatctgggatattggcttaggaagtttgggaattgataagtggccaactgatgaaccttctcttggtgaaacaaatggtcaagctggtcaaccaaaagaagataggcctaagaattttggtccatagggtttcatttgctcctgcacttgttgccctttggttacttgctatatttatagttcctaggaggcatattattgaatcattgatttataaatagtattcattcacctgctttt

SEQ ID NO: 16408 - DNA, 492 bp, Glycine max
ctttgaacatgaaccccaacgatggcaacaactctcccagtcccaagcccttggagatggtcaacccggttcctccgattccttcctaagaccttcgacctcgtcgacgccccgactctcgacccgatcatctcgtggaactccacgggcctcagcttcgtcgtgtgggaccctctcgagttcgcgagaattgtccttcctcgacatttcaagcacaacaacttttccagcttcgttcgccagctcaatacttatgtaactaggtgtttgtcttcagggattccgcaagattgacacagacaagtgggagtttttcaacgaagctttccagcgagggaagaagcacttgctgaagaacatccaaaggcgcaggtcatctcaatcccagccggttggtagctatattggaatcggatcttctaccgaggcaggggggtcagaggttgagattgagatagaaaggcttaggaaagaaaagactatgctgatgga

SEQ ID NO: 16409 - DNA, 1016 bp, Glycine max
ctgctaagtgctacttaagtactaaacgctctttctctctctctccatgtctccgttcatctcattcgtcaattaataacacaaagcaacaagcaaacaaacctcactttctgtctctctctatctaacaccaacaaacaaaccccttctctctccaccacctctactttctctctctagggtttcgtcgcgaactctcactctcgctcctctgctaaccacgattgtagggttccaatcctcgcgcgaattgcatcacagtctgtgatcaaccgagttttgagtcttctccttcctcgtcgattgcttcctcgggctaaaggattgttgtaatcactgacacacaaaccaaatgttgctgtagggtgttgaggtttataccgtggtgggtgaatgttgttgcttgatgcttgatgatagtttctatggacttgaatgcctcgccagttccagaggaagatgaagatatctttgaggagaagatacatgttgaagagtttcatgaacctgaagaacgcatagaaactggagctgatatagcacgccgggagcgtgaagaaagaaagagacggttgaagagagaacgaccggatgatagacctgtacatgtgtcacaatcacctggatatgatcagctatttcataccaagaatcaaagatcatatgataaaagcaggcttcctcctgggtggttggattgcccttcatctggccaggaaatttgttgcatgataccttctaaggttccacttggtgaatcgttcaatgactgcattcctcctggtaaaagatgctcatttaaacaagtgatacatcaacagagagttttagggagaaaacttggtctggtgattgatttgacaaataccactcgatactatcccgtgtcagatttacaaaaagagtgcatcaagcgtgttaagattcaatgcagggggcgacattctgtacctgataatttatccgggaaccagtctgtctatgaggttacacaatttgtgtcacgtctaaagcac

SEQ ID NO: 16410 - DNA, 617 bp, Glycine max
acttcaaatccttcactatgaagcaggacaaaaatatgagcctcactatgattacttccttgatgagttcaacactaagaatggaggccaacgtattgctacagttcttatgtacctttcagatgttgaagaaggcggtgagactgtatttcctgctgccaatgcaaattttagttctgtgccttggtggaatgatttatgccaatgtgcaagaaagggtgtcgcagtgaaaccaaaaatgggtgatgctctgctattttggagcatgaggcctgatgccactctagatccatctagtttacatggcggttgcccagtaattaaaggaaataaatggtcttcaacaaagtggctgcatcttcatgagtacaaggtttgacccatcaactgcataggattaacgtggtacagggtgagtatttcatcgcattttggattggagaaacacaagttcaatgcattcatgttcaccttttattctacctagtgatctttccctttgctcatgtgcgccagcattttcttcacatgtagaataaaccatttggtttctctttctcatggatagataatttggcgttgccaagggaaaaaagagtatgtacagttaatgatcc

SEQ ID NO: 16411 - DNA, 897 bp, Glycine max
gcgaggtagttagaaagctgaaccacagaaaatggaagagtgaaggtagaccacaaatgaaataaggcagtgtgatatggtggaagagtgagaaatgaaaggtattgtgatattaccgttctgttctcccatggctttcgcagcagctcctcttatccaggttgtattatacggaaatcccaagtttttggttttgaggagtactgctcgttgcacggtccacgcctctcgcagaccaccaccccctgggcctggagttgacaccagaatccattgggaaaacgaagatgaaggttggattggagctaccaataccaaacaccaacagacccacaaacccaataacaacatgttacaggctgatgactttcctgatttcctcaccgcttctttaggttctcattacgaattcttgggtgtatcaccagatgcggatgtagaagaaattaaagttgcttatcggaaattgtcaaaggagtatcatcccgacacaacttccctgcctctcaaaactgcctcagaaaagttcatgaaattaagagaggtttacaacgttcttagcaatgaagagagtcggaaattctatgactggacccttgctcaagaggttgcaagccgccacgcagagaagatgaaaatgaaattagaggatcctcgcgagcaacaactcaagaactgggaacctgttccagacatggttgaccgccttggtggaaggaatatgaagcttagtgatcaggcagtttctgccatccctattgatcttttcatcattgtttttgccatatgttgtatcatatatgtaattttctttaaagaaccctattactactaattagttaaccaattataacaccgtatatgttatacaacaaaaaaaaaaaaaaaaaagggcgg

SEQ ID NO: 16412 - DNA, 321 bp, Glycine max
cccatggcagctcctctgcaggttgtattatacggaaatcagcctcacccagaagccaagtttttgtttttgaggagtactggtcgttgcactaattttcaggttcactcctctcgcagagcaccccctggtgttgacaccagaatccattgggaaaacgaagatgaaggttggatcggaggtaccaataccaaacaccaacaaacccacaaacccaataacatgttacaggctgatgactttccagatctcctctctgcttctttaggttctcattacgaattcttaggcgtatcaccagatgcggattcagaagaaatt

SEQ ID NO: 16413 - DNA, 471 bp, Glycine max
ttaagcaggataatctcattcaaggtcgttgtcttggtgagttgactaagcaagtgttttcagatcttgctgccagtgaatatcagatggctgaatatagaatatcaatatctggtaggaagcaaagtgagtgggaccaactagccagttggatagtgaataatgatttgtacagcgagaatgtcgtttggttgattcagcttccacggttgtacaatgtgtacaaagaaatgggaattgtgacatcattccagaacatgcttgacaatatttttattccactttttgaggtcactgtcaacccagattcacatcctcagctgcatgttttcctgaaacaggttgttgggttggatttggtggatgatgaaagcaaacctgaaagacggccaacaaaacacatgcctacaccggagcaatggactaatgtattcaatccagcattttcatactatgtctattactggtatg

SEQ ID NO: 16414 - DNA, 699 bp, Glycine max
gtttgatgcaatggatgatcctccttctgtgctggatgtggtagtttatgattttgatggaccttttgatgaagctgcatctctaggacatgctgaaattaattttctaaaagcaaatatagcagatcttgctgatatatgggttccccttgaaggaaagttggcattggcatgtcagtctaagctgcacctaagaattttcttggacaacactagaggtggtaatgttgcaaaggactatttaagtagaatggagaaagaagtcgggaagaagattaatttgcggtctcctcaagcaaattcagcatttcagaaactgtttgggcttccacctgaggaatttctcatcaacgatttcacctgtcatttgaaaagaaaaatgcccctgcagggcccgctatttctatcagcaagaataattggatttcatgcaaatttgcttggaaataagacaaaattcttttttctttgggaagatattgaagacattcaggttattcctcctacattctcatcaatggggagtccaataattgtcataactcttcggaagggtagaggtgtagatgcaaggcatggtgcaaaaacacaagatgaacaaggcaggctgaggtttcattttcagtcatttgtgtctttcaatgttgcacacaggtagacaagggacattatataacatctgacgaacttatttcctat

SEQ ID NO: 16415 - DNA, 366 bp, Glycine max
atgaacaaggcaggctgaggtttcattttcagtcatttgtgtctttcaatgttgcacacaggactatcatggctctctggaaggtcaggtccttgagtcctgaacagaaggttgagtttgtcgaagaacaatctgatagcaaaagccttataagtgatgagagtggctcattccttggcctggatgatgttagcatgtctgagatttattcttgttctctttcaattcctgcaagttacctcatcgagatatttagcgggggtgagttggaccgtcgggtcatggaaaagcttggttatcttaattattcttatactccttgggtatctgagaaccatgatatctctgagagagcagtatattaca

SEQ ID NO: 16416 - DNA, 444 bp, Glycine max
cccacgcgtccgcggacgcgtgggcatgcacctaggactagtaattgaagaaataactgaagatgtgccttctggaagctcttctttggaacaaacagtggttcaaccaaaaaaatctggtgactcctctaagagttacagtacagctaacaatggaaatccaaaaacaaatgcagacagtttagatgcattgaaaaaagatcctgaagctgtcagatcattccaaaactttatttcaaataccgatcctgacatgctggcttctttgaatgctggacaattcaaagacgtgtctccagatatgattaaaactacctctgatatggttagtaaaatgtcacctgaggaacttcaaagaatgcttgacatggcttcttcatttcaaggggacaacccattttttagaggaggttcccctgattcttctttcaaccctggatcaat

SEQ ID NO: 16417 - DNA, 429 bp, Glycine max
cccacgcgtccgcaagtttgcagtaagcagtttatgagccaaagatgagcatgtatctagtaccagttgtggagtgatgaaggtgtttactgttgctgcatcagttgtaatatcaacttgccatctgagaaattgtggacagacacctatttgcttgttgtcaattttgctggaccatgcaggcctgagagcctacagtagtgggtttaggcctatactaagtgattaggggtcaagtggtagagattttcttatggtttggacctcttttgcttggtatatactgttgttgcaactattgatcccagcttgtaaaaatcctactgtttacactgtgtaaaatactatgtcaatcaattagaaatcaccacacatggtatttaaatttaaaaaagttaaacctccaaaaaaagggccggcgctctagag

SEQ ID NO: 16418 - DNA, 1122 bp, Glycine max
gtagaacttactggtgggttgggaatgattatggtcacgactgaagccaacggtgaagagcttcttgcagatgcgcatcttttagcagctactatggtgggtcaaaccgcaggagataagattaaggagtatataaagctgagtcagtacccaacagcaacgattgagtttagaggaactgtgattggtggttctccttctgctcctcaaattgcttccttttctagccgtggaccgaaccatcttacatcgcagattctgaaacctgatgttattgctcctggtgttaacattttagcagggtggactgggcgtgtgggtcccacggatttggacattgatcctaggagggtcgagtttaacataatttcggggacttctatgtcgtgccctcatgcgagtggcattgctgcattgcttaggaaggcttatccagagtggtcacctgcggcgattaagtctgcattgatgaccactgcttataatgtggataattctggtgggaacattaaggatcttggaagtgggaaggagtcaaatccgtttattcatggtgctggacatgttgatcccaatagggcacttaaccctggtttggtttatgatttggactctaatgactatgtggcgttcttgtgttctgttgggtatgatgctaatcagattgcggttttcactagagagcctgctgttgaaagtgtttgtgaagggaaagtggggaggactgggaagttggctagtcccggtgacttgaattacccttctttcgcggtgaagttgggtggggaaggtgatttggttaagtatagacgggttgttacgaatgtgggaagcgaggttgatgttgtttacactgttaaggtgaatgctccacctggtgttggtgttggtgtttctcccagcacgcttgggttcagtggcgaaaacaagacgcaggcgtttgaggtcacatttagtagagctaagttggatggttctgagagttttggatccattgaatggactgatggaagtcatgttgtgaggagtccaattgctgttacattgagtgctgcatattcatcattcattcacaggtgatggatttagtcaagtctctttataattttctgtaatcgtatt

SEQ ID NO: 16419 - DNA, 583 bp, Glycine max
gaaacgacattggtggatacacacttgcttacaatttggagacagcaatttctggatgcactgaggttgttgccgccagaatcaaaaaaaaataaaagatgcatgtctccgcgtagcttgtattttctggcaattgctgattttaccttggaggtttctgtttgcatttgttcctccatgccaaattgctcatggatggatctccttcatttgctctctgcttttcatctctgggatagcttacgttgtgactaagatcacagatgttataagttgtgtcacagggataaatgcttacgtgatagcatttacagccctagccagtggaacctcatggcctgatctagtggcaagcaaaattgctgcagaacgtcaaaaaactgctgattctgcaattgcaaacatcacttgcagcaattcagtgaatatatatgttggtattggtgttccatggcttattgatactttgtacaacttcatagcatatagagaacctctccgaatccaaaatgcagggggactaagcttttcgttgattgttttcttctccacttctgtcgggtgtatctcagttttggtttta

SEQ ID NO: 16420 - DNA, 468 bp, Glycine max
agaaagcagctattgtgttattgggtggagtgtgagaatccaaatgtctgtatctatctagctccctctgcaattatccattttctggggcgcattttagcaacaatggtgcacccaatagcagaggcaaacgaggaaagtccgttcgggaaactaacgccggaagagttctacgcgcatcactcagtgagtcacggttccgagttcgtgacgaaccctagaggtctcaagctcttcacacagtggtggaccccactccctccaaaaaccatcattggaaccctcgccgtcgtgcacggatacaccggcgagtccagctggctcctccagctcaccgccgtccacttcgccaaggccggtttcgccacctgcgccctcgaccaccagggccatggcttctccgacggcctcgtcgctcacatccccgacataaccccgtcgtcgacgactgcatcaccttcttcgaga

SEQ ID NO: 16421 - DNA, 1295 bp, Glycine max
tccctcgcgtccgcacagcttcttccgtatacttccctctctctcttcccactgttaccattttccactgtttgtttgttctcagctcaaggaggattcttgcccaagtcctcgtttttctgatcgagctatgaccaaggacttgtcttaaagagcatcttttttaccattcttaggtaagcaatggttggtgcatcttggtttcgaactctatggaagattcgacggaaggatgatactaattctgagaaggcagtgattggagtgttagcatttgaagttgcgagcttgatgtccaagcttgttaatttgtggcagtctttgagtgataaacaggttgctaagttgagagaagagataacaaattctgtgggcatcagaaagcttgtttcagaggatgagaatttcattgtacgcttaatcagtctagagatgcttgagaatatggcacatgtggctgaatctgtggctaggtttggtaagaaatgcagtgatccaagtttgaaagattttgagaatgcctttgatgaattgatcacttttggtgttgatccatatcggtggggattcactttcaagaaaatggaaaaaaaggtaaaaaggatggaaaagtttatatcaactaacgcaactttgtatcaagagatggaactgctggctgatcttgagcaaactcttggaagaatgaaggcttacactgaatcagatggaccgaatttaattgactatcaaaagaaggttgcatggaaggggctggaggtgaagaacttaaaggctaattctctgtggaacagaacatatgattacacggtgcttgttttagcaagatctttatttacaatattcagtaggatcaacaatgtatttggcattcaagagattatagatattggcaaaaccaagaatcgaagtgctttgaattctgatcatgctaatggcagtcgatcggtttctgaattattgcaaccttcagtccaaccctccagcaaagttcgtgccaggttcgcttcaggacccctcggtgattttgctgctacatctcgtccaaatgctcaagtaaataaagctagcatgtttccttctgatggtgggggctcatccacaaagtcaggcctaatttcagcaaagaacagaagtctcaaatttttctcaggtcctcttggaaaaaattccaaaaagccagttccagacaatggaacaaataaaaatagcaagatttggaactttcatggtaactcaaccaccgcaaatgggaaggaaattcacacaaggcaaagtcgactgactcaagtaga

SEQ ID NO: 16422 - DNA, 756 bp, Glycine max
ccttaaacaatttccgttctcggttcattcacccacgtcaacaaaacaatatcaaccgaaccatccaaatcccgagaaaacagattttgaaacaaaagccatttgcatgagatagatagatagaacgaaaccgaatcgatgatggggtgggtggcgaatcggtggacgggcgtcgccgccgccatatggatccagtggagctgcggcgcatcgtacaccttcagcatctactcctccgtgctcaagtccacgcagggctacgaccaatccacgctcgacaccgtctctgtcttcaaggacatcggcgccaacttcggcgttctctccggcctcctctactccgccgtcgccccctacacaacccaccgcgcctccccctccaagtccatatggacctcgctcagcgggccctgggtcgtcgtcgcggccggcgccgtccagtgcttcgctggcttcatcttcatctgggcctccgtcgtgggcctcgtgagcccgccgcccgtgccggtcatgtgcttcttcgcgtggctcgcgtctaacggtcagaccttcttgaacaccaccaatgtcgttaccggcttgcccattttccctgagtccagcgcacccatatggtattatggaaggatttctgggactgagtggagctatcttggtccaaatctaccatacgttttttgatggggacccagcaacctaccttttgatgcttgctgtgttgccttccgtgatctgtgtgttgcttatgttctttct

SEQ ID NO: 16423 - DNA, 568 bp, Glycine max
cttgaggcttgagctagctactctacacacttagcacaacaacaacaacaaccatatttcgaacttgagacaccggattctgtaggataagagcttatcaagagtagagttgccttgtgcaatctgtttctgtcttctgtctagtgcatcagatatagctggttaagattctctactcgggtgcatggcaatggtgatctcttctgttcatgccacactatttgccagggcctctttcttttgccaaagtagtggcctaagaagctttagatcgtgtttacctttctcatcttcagctgcttctgtctcctctcacaatctttcacggaagaaatggaggcagccagtgttgtcagtgttggatcttggcggagtcaagataagcagagaagatgtggtgagggatgatccggcaaacaatgtgccagacaatatattttcaaaacttggagtgcagcttcaccggagggatcaacaccctcttgggatactggagaatgcgatatacgagtattttgacactaattattcaaataagttcaacaaggttgatgatctttgtcctatt

SEQ ID NO: 16424 - DNA, 356 bp, Glycine max
cctcgagccgattcggctcgagcaaaaaacgagctctgaactctgaactctgaactatagctactctacccattacattacacacttagctcaacaacaaccacatttccaacgaattgagttatttctaattagcctcccatccagtgaggcaccggattccgtacgataaaatagcttgtcaagagtagagttgccttgtgaaatctgtttctgtcttctgtcaagtgcatcaaatatagctggttaagattctccacgcaggtgcatgacaatggtgatctcttctgttcatgccacactatttgccagggcctctttcttttgccaaagcagtggcctaagaagctttagat

SEQ ID NO: 16425 - DNA, 278 bp, Glycine max
cccacgcgtccgcccacgcgtccgcgtggctctctctcattgtcggtgtacgcagatcttagtgcactccacgctcttggcacctgctcttctgctgttgttcttgcggattggctttgtggggtgtgacaaattgtggtttttctgttgagagtagctgaaaggtgggtttttgtgtggaaatgagggcgcttttgctggtggggtggtggagtgtatgataataataaagggtggtggtttttggttttgaagattgtggctttggaaagggaagg

SEQ ID NO: 16426 - DNA, 1203 bp, Glycine max
caaaatcatcaccgcataagctgggatttgatttgcataatcctccttcccctccagcttgtaatacatcttctggacagacctggagacaccctgatataaatagttcttccaattgcttagttaccacaccagctcatgtttcagctacaaaaacatcaccacataagctgggatttgatttgcataatcctccttcccctccagcatgtaatacatctacatggcaggcaatcattggtgagcccaatgattttgatgaatccgtttcagatctgttggcagaagtggaagcaatggagtcacttggtggcttggaatctcccacttcaatcatgaaatgtggcgaggatttaactgaaggttctaaaaatgattgtctcagttttgttgcagagcttagcccaatgcttgatgcgggtaaaggtgatgccctgagctccactggtgatttaaacttaccatctcacccgacagcagctgaggaaccattacgacaagcagatgtgcatcaccatcatcatcaaagaatttctgcggaggattcttcaagaagttcggaagttgaggtgggtacaaagaacggtgtttcaggtaaggtcaattgggattcaggctcagaaaattcacccattgttccatcccctggaacattgggcctggctatagacaccacttggagacttggcttagagaatacacacttgggatggagtggaatagatcaaggaaatgcaaatgtgggttggggagtaggacagactgcagtgcaggaaaacagaagttcaagttcgtacacttctgcagtaactccaggccttggggatagccaaacaaaatatggcagtgatcgattttctgtgtccagagatcggggttttcaaggtcatagtagggaatcaggtttgagtagaagcagaattccatataacaggcaaccgtcatatggtgttggaaatggagcatcatataagcctctgcccaaagggcagcgagtttgtaaattttatgaaagtgggtattgtaagaagggagcatcctgtgattactggcacccatgattttagattccattagcactggtcacacttgttttttgtaatccttaacatatctaaagttggctctttccaattgttgtaatttaaccgacactattagtcaagtggcataattttttttatatgaaactactcttctttt

SEQ ID NO: 16427 - DNA, 504 bp, Glycine max
tattgttatccatcctattcctatccacttgaggaagaaatgcatcatatctgtgtttgctgcaagggcttgactcctctacctcctcctcctcctccgcttcaccaaagacgaaacactctagtcattacttttgcttcaaagtctggaggaggattttcacttaactcgttactgaaaagttgtaaaagttgcggaggaaagggggcaattgaatgtcctggatgtaaggggacgggaaagaataaaaagaacggaaatatatttgaacggtggaaatgttttgattgccaaggatttgggctaaagagctgtcccagctgcggaaaggaaggcttaacacccgaacaaagaggagaaagataggactaaggattcaaacttgcacttttctctcaattgatcaaccccttacccctttatgcaatcttatacttacgatataaatagaggtcatatgcatctttttgaaactttgataatttgaatattaaacttcagatt

SEQ ID NO: 16428 - DNA, 219 bp, Glycine max
gaaagaatgacgactgggctatgcttcatatcattaaaaagtgaagtatatatggggcaggaacattgtgcctatcttacttaccaaatggtgtgcaagctttgcaataatttgtaacattaatattgtggcaacctaatatttgtatagataagtttttaatgtaaatgacagaaaagtgtggtttctgactattaattcttctctgtcatgatcagt

SEQ ID NO: 16429 - DNA, 774 bp, Glycine max
aaaactcagacaggggagttatgatactgagatacttcaacgcgactggatcagatcctgagggaagattgggtgaggctcctaggcctgaactgcgagagcaaggtcgaatatcaggtgcctgctttgatgctgctcgtggtattgcacctggcttgaaggtaagaggaacagactataagacggctgatggaacttgtgtacgagactatattgatgtaactgacctggttgatgctcatgtaaaagctctggaaaaggcacaacctagtaatgctgggatctacaatgttggcactggaaagggtagttcagtgaaggagtttgtggaagcttgtaaaaaggccacaggggtggacattaaagtggactaccttccgcgtcgtccaggcgattatgctgaggtgtacagtgacccatcaaagatcaaacgtgaattgaattgggttgctaagcacactgatcttcaacagagtttgaaggttgcatggagatggcagaaatctcatcgtgatggttacggggtttcaaatgcattattttgaattacatagaattctaacataacagcagaagactagaagaaaccccggcagcatccatttcagctgcacttctatgatatcttagaataggggttgatattatttttttctttcttttactccattggggaatttgttcttagggagcatgttgtccattcgattcatgtattgcccgcataatatgattcaataatataatgcacaggctctattatactttttctct

SEQ ID NO: 16430 - DNA, 437 bp, Glycine max
  unsure (1)..(437): unsure at all n locations
tacacactgagcttactttacttttactacccccattcctatgcagcttcatgggattgaactgcaatcacgacttcaaacaccgtctcaattctgcaactttttctcatttgggttgaactctctgtctcaatgaggctcttcttccactcttcactctgctcttaaactggttaatcaaaagatggagcgcgcgaggctaaacatgagaggccattgctctggttcgactccctcagaagaatctgctctggatcttgaaagaaactgttgtagtcattctaatctgccctcacttagtccaccaacgcttcaaccctttgcttcagctggacagcattgtgagagcagtgccgcttacttctcatggccaagccgcttgaatgatgctgccgaagagagagcaaactantttttaaatctacaaaaagggggtg

SEQ ID NO: 16431 - DNA, 380 bp, Glycine max
gcaaagagacacactgagcttactttacttttacccccattcatatgcagcttcatgggattgaactgcaatcaccacttagcaccgttcaaacaccatctcatttctgtaactttttctgcagcagattctcattccatcttccctatgggatgaactcgctgtctcaatgagcctctagcactctccactctgctcctcaactggttaatcaaaagatggagcgcaccaggctaaacatgagaggtcgttgctctggttcgactccctcagaagaatctgctttggatcttgaaagaaactgttgcagtcattctaatctgccttcacttagtcctccgacgcttcaaccctttgcttcagctgggcagcattgtgag

SEQ ID NO: 16432 - DNA, 540 bp, Glycine max
caaattttcgtcaaagcagaagcaaatacatagcatatcgccaaagaccaaaatccatgtggcccaaaatcagaaaacaaaccacccttattagatgttggatgcaggcacacagcaacgcaatggaaaggaagttcccctcctgatctcgggtcaggtagaacattacagaagtatacacttttaacctttgatttgaggctatcaatcccccaaggatgaaaagaaatcagtccagatgagaatttagatgtacaaaacagaagtgcaagaatcaccccatattgtgagatggggttcaagtcactgatgtagtgtaagggaataaattagataactcattgctgggggatactttatttgattctcaaaggtctctctttaggagctctcttgctgtcttctttaatcataagctctgtggcagcttttcacttatgacaagcccatttttccgttggccttccattgtttataaattagatcttaaagtcttgattcatgttttaaatgtctttctagtacatgaatctttgaatt

SEQ ID NO: 16433 - DNA, 601 bp, Glycine max
ccctcgcgttttggagttctctcttctcttctcactccgcagaagagagagaaatatccaatacctagcgttagcgtagcgtactctcccaatcccaatcccctttctctctctctatcccttcttttcttcttcttcttcttctattccctctccctccgctttttctcttcatcgttgtggttcggcgtcgctgaatccgtcacgttgttgtttgtgtcgaatcggacggcgaagattgcatcgcgaggtattatgcagcagagtgatcaaacggtgttgagcttgaggcccggtggtggaagaggcagcaggctcctcgctcctcgattcgactcctcctcttcgtactctgcttcccctgcttttggctcctttcccgctgatcttcctctcctgcgtccccacggtggagctccctcacccttctctatcaaggctggagatgctcggtttgagggtcgtgagcgtgtgcgatatacaagggaacagcttttactgcttagagagggtgttgagatccttgatgatgttttaaagatcaaacaagatattgaagctgaactttttggtgaagatcaaagctgggcccgctcagaaa

SEQ ID NO: 16434 - DNA, 456 bp, Glycine max
gagaagaggttctaatttgggaaggtgctaagaatatggagaaaacatcttgggcgtgcggcgttatcacccaggtgtgtctctgctttgctctatacatagctctcaacttgggtcaacctcagacttctgatctttacttcatcagtgtcaaaggaggtttcagaccctttacccaacaattgcatcttctcaagcagatggataaggtggcaaaagcttacaacgcaagttttgttgtgagcagcagtgagctgggggaatatgattcactcatgcagaatgctactcaacattttccgtctctgagactaccctggtacaccacatacactactactacatcttcaaaaacaaaaggacaagaagtggggtgcttttcaaagaagatctcgacatctaacaggataacctcaggtgtcatcggtgtggatactgaattattgaaagattatg

SEQ ID NO: 16435 - DNA, 392 bp, Glycine max
acgcgtccgcacaaaccaggatttatctggtagctggagaagcatatggtagaggaagtatgaaatatggtgaggatgctttccccaacattttctctcattcctctctgtcttctgaagaagagttgaatcctttcaagaatcaccagaacatgttagctggcatagactatattgttgcacttcagagtgatgtatttctctatacttatgatggaaatatggcaaaggcagtacaaggccataggcacttcgaaaacttcaagaagactatcaatccagacaaggtaaattttgttaaactcgttgataagttggatgaaggaaaaatttcttggaagaagttcagctccaaggtaaaaaagctgcatgaagatcgaatcggtgctccg

SEQ ID NO: 16436 - DNA, 1105 bp, Glycine max
ccgcacagtatttgagttcatcgaaattagagaaatttgagggtttgaacaaacaggctcttgaagttgtttacagggtcactgttgggggtgttaaagttaccccttttaatgattccttgtggagaacttgggttcctgatgatgggtttttcagaccaagtgttgggtcggaaaagctttactttggtgggagaatcaattaccatgttggaggggctagtcgtgaggttgggcctgataatgtgtataatagtgctaggttgattaggagtaagaatgattctgttcctaacgttaatatgacttgggtgtttccggttgttggagggtataagtacttggttcggttgcatttctgtgatattgctagcatttcggttggtttgctttacttcaatgtttatgtcaatggaaatttggcttatgaagatttggatctctcatacgttacgaattcgctggcttcgccgttctacgcggactttgtggttgatggaggagatgatggggccttgagtgttggtgtaggtccttcgaagagcagcatgccgcatgtcatcgatgggatattgaatgcggttgaggttatgaagttgaacaattctcgcagtagtcttgatggagaggtttgtgctgatttagttatgaagagctggtcgacgaggaataatacaggtatgctgtttactttggtggctgctgtttgcattgtgttgagcttgtccatagtgattcgtaggaggttgattgggtcgagggaatctgtgtcttggtcaaggttgcctgtgaatttgtcggatgatagtgttaagaattaagattggtgatatatagttatatcaaaatataagaaaaaaagattggcaatgtttagtcagcaagtgaataagttgtgtgtaaaaatatcagcaaatctagccatctaatgttgtggccctcatgagaaaagagaagcatgaaggaacatgctgcagatcaagctagaaaaggaagacattctggaagcccgactaataccaatgctttagggattggtgtattatatctaagtttccttacttgtttatatcataatattaattaaggctttccttttgccttc

SEQ ID NO: 16437 - DNA, 469 bp, Glycine max
tgaatccattatggttgaccgtcatccccaatatcgacaatcaaggtgtctttttgttgtaagaactgatggtggctggattgatttctcctatcagaagtgccttcgggaatacattagagataagtaccctactcatgcggaaaggtttattagagaacattttaagcgtgggagtggttgatgtatatatagtagaatttgtatactttggtgtgctgactgctttttacatctgctttccccccttattgttcagtgtcctgcctccattgtcaatggtagtggataatcattgactgggatatcaagcttattagttattatgaaagctacacaggaaattattgaagtgaacttcactttgttgacttgtaaattggtggttaggtaactggttggcagtaaggaacagaatcttgttgttgatccacctctaaaatattatataagatatttgctagaattc

SEQ ID NO: 16438 - DNA, 741 bp, Glycine max
ttcgtccgctcacttattattacatcaaggataaggctaattcatcattgtttggtgctcagaaaaaaaaaaaaaacatttgtcaatttttttctctttctttaactcctctctcttgggaatcccagatctccaaaccagtgttcaagccccaccttcatatggttctagatggcaaaaccaagttcagctgatggtaggactagaagttctgtgcagatctttatagtagttggtctgtgctgtttcttctatatattaggtgcatggcagagaagtggtttcggaaagggagatagcatagcattggagattactaagactaacgcagaatgtaatatagttccaaatttaagttttgattcccaccatggtggagaagttaacgaatttgatgaagctgattcaaagcctaaggtatttgaaccatgtgctgctcgctataccgattacactccctgtcaagatcaaaagcgtgccatgacctttcctagagaaaacatggtctatagagagagacactgccccccagaagaagagaagttgcagtgtatgatccctgcacccaaggggtatgtaacaccatttccatggccgaagagccgtgattatcttccgtatgctaatgctccctacaagagccttacagttgaggaggctattcagaattggatccaatacgagggaaatccgttctacttccctggtggcggaacccaatttcctcaaggtgctgataaa

SEQ ID NO: 16439 - DNA, 466 bp, Glycine max
tcgcgctactcagcgcgacgcataataataatccatagagtttttttttttcattcccctttttcttcttttattttctttctcctttttcttttgtcttttattattatgctgctgttgttcgttcatgtgaacatggtggatgctgatagaagcagataatatagggtttatatacagattttttattagtacgtcccacacactgcccatgcagcagggataatcattctttggtgccaatttttttttttcataaaatcctctctgattctctctctctcttaattagtttctcttaggaatcccagatcttcatagccattgttccctctagcttcatatgattggttctagatggcaaaaccaagttcagctaatggtaggactagaagccatgtgcagatctttatagtagttggtctgtgctggttcttctatatattgggtgcatggcagagaagtg

SEQ ID NO: 16440 - DNA, 395 bp, Glycine max
ctcgagccgctcgagccgattcggctcgagtttctctttctttaactcctctctcttgggcatcccagacctccaaaccagtgttcaagccccaccttcatatggtccgtaagagatctcaactttcgacccatcatctaaaatttcttcctttcttcttctttttcttgtctatgtctttttgaattctcttcctttcttcttgggatccaaggttctagatggcaaaaccaagttcagctgatggtaggactagaagttctgtgcagatctttatagtagttggtctgtgctgtttcttctatattttaggtgcgtggcagagaagtggtttcggaaagggagatagcatagcattggagattactaagactaacacagaatgtcatatagtt

SEQ ID NO: 16441 - DNA, 1032 bp, Glycine max
ctggcgatgagagttcattcaacatgtcagatcatgagtacactgcagggaacttcagtgatttggaagttatgtccccatctccaagacattcttgggattacgtcaatcgctgtggcagtcctttttcttcctcatccttcagccgtgcatcttgttctcctgagtcgtcagtatgcagagaggccaagaaacgactctctgaaagatgggccatgatgtcatcaagtaagggttctcaagaacaaaggcatgtgcgtagaagctctaccttgggtgagatgcttgctctttcggatataaagaaatctgtaatatctgagcttgagggtattcataaagaacaggagccaagtgaatctgcttcttgtagtcgaaattttagtgccggaacatgtgtggatggttctcctagaaacctttctaggtcaaaatctgttccgacatcttctactgtctatgaaaatgggctcaacgttgaagtttgtgataatgatgctggcaaagcacatgggtctggggagctgacaaagtcaaagagtatgaaatcatcatttaaagggaaagttacaagtttcttcttctcaaggaataagaaaccatccagagaaaaatcttgtctatctcaatctgttgatgaatcccaatccactgccattgaaacatcagattctccagtgaattcatctagagtccttagggatgatgtgtctcaaagcttcgacagtggatccatcggagagtgttctcttccagctccatatgaatcatcaggcaaaattttatcagattctatctctaatggacaaggtgctgtaccactggaggctggattgactctgtcaaagtccatggtgcctgggatttcaagcgaaaaccagggtcagcccagtccaatttctgttttagagcctccatttgaagatgataatgctgttgtcgagtccttgggctgtgtgaggggtggtcagctgggatcacgggtgtctctgaagtctaatttaattgataaatcaccacctatagaatcaa

SEQ ID NO: 16442 - DNA, 509 bp, Glycine max
gatcccagtcccaaacatggttcttagatttgccatattgtaaaaattagatttgcagcctcataaaccagcaggcagcagccccttatgctttaatttctccaatccttttatctcgttggcataacttaaaattgttcaatatgttggtttgtaatcggggttattgcaattcctagtactagtagttaggcgaagagaatgggagatggcgtttccctagctgtgatttagacctttgaattatctgctactgctagtcttgtgtaataatgtccaagaaatgtcccagatagatgttgcacttaattagaacatccttagctaacatgtcaaaaaacagattaaaatggctgctaattaacagagaagccactagtgtggctacaagatctaatatggaagatcccttgtctagagacaccgattcctgtctcataggctccggtgaagtaactcagacccaataccggaagcccatgatgtatttctgctgaaggtgctgcata

SEQ ID NO: 16443 - DNA, 1266 bp, Glycine max
attgttttcatcactcccaacccaagggtctcacacacgcaaaacaattaaacaaagagcttccaccgtcgacttgcatgtcttcagcaaattagatgcttgtacttttgttgttaatgtctgcagtgatgggaatgtcttaagtattgtaacagactgttctgcacatgccacccatgttgctggtatagctactgctttccacccaaaggagcccttgttgaatggagttgcacctggcgcacaaataatatcttgtaaaattggggattctcgcttaggttcaatggaaacaggaacgggtttgattcgggcactcatagcagctgtggagcataagtgtgaccttatcaacatgagttatggcgaagcaacgttactgccagactatgggcgctttgctgatcttgtgaatgaggtggtgaacaaacatcgtctgatatttgtgagcagtgctggtaatagcgggccaggattgagcactgttggtgcacctggtggtacatcttccagtatcataggtgttggcgcatatgtatctcctgctatgacacacaaccacatctttctgcttctcttgctgagccaccagtttcagactacggcttagaggaagaagccagggaatatgccaactcagttcatatagatgatgatccagtggacaagtatagtcttcctgagcaccagcagcagctacaagaagaacttgaaaccgaaattgtggtggaggaaacttccgtacaggaggcatctccaccaattcataccgttgcacacacttatccaaaggaaaaaaaaaaacccccccctgttgctcttgtggaagagtcctttgaggagcctcctaagaaaacatatgcatctattttacgagtttccaaagggctgccagtgttgtcagctgctccaaagcatgctccacattctttcaaaagtgctccacctcctccagagttgaaccatgtagcacagcctgctgttcagcagtcaagctctgcatctatgtatgctcccgagtcagggaccgaggcagcagaagaaggctatgcactagaagaagatgaagtaacatctgtctatgttagaaacttgcctgctaatgttactgaagtggagattgaccaagaatttaagaattttggcagaattaagccagatggaatattcattagggtccgaaaggaaattggagtctgctatgcatttgttgaatttgaagacattattggtgttcaaaatgcacttcagtcttctccactccaa

SEQ ID NO: 16444 - DNA, 545 bp, Glycine max
agacgatacttgttagcagtgctggtaatagcgggccatgattgatcactgttggtgcacctggtggtacatcttccagtatcataggtgttggcgcatatgtgtctcctgctatggctgctggtgctcattgtgttgttgaacctccatctgatgggcttgaatacacttggtctagccggggaccaacagctgatggagaccttggtgtttgtgtgagtgctcctggtggtgctgttgctcctgtccccacatggactcttcaacggcgtatgctcatgaatgggacatcaatggcatcaccatcagcttgtggaggaactgcgttgctcataagtgcaatgaaggctgagggaatcactgtgagtccatacagtgtgaggaaggcgcttgaaaataccgcaattcccataggtgatttacctgaggataaattatccactggacaagggcttatgcaagttgacaaggcttttgaatatatacagaagtgccaaaatgttccatgtgtttggtatcaaataaaaatccagcaatgcggaaaa

SEQ ID NO: 16445 - DNA, 380 bp, Glycine max
gtttgatgtgaatctcctggcaagctattgcataaataaatggaattaagaccaagaaacggatcccaaagctgatttccttatcctaacactctcatctggtctctatgtctcgaatcttctccgcatggaacaagaagaagctgcaccttcatctcaacttaatccccactattttttcttcttcccacactcacttcgacgctctcgctgccgccaatagtgggcttctccggcccagtttgaggctctacagtagtagtagtagcagcagcaatggggagccaccagaggattggcctcacgatcactacgctgctacgcaaactcctattagtgttaatttcattcgggcctctgggcccagggacgggtgggtc

SEQ ID NO: 16446 - DNA, 699 bp, Glycine max
  unsure (1)..(699): unsure at all n locations
cccacgtaaaaacaccaaattacatagaatttttaggcgtaaccaaagtacgtaccaaaccatggcattgacaagtcaattgagaaaccttcttgcagctctagaggctgaggaagcagcccaaaaatccaaaggtaaagtgaacacatacaccaaccatggcgatgggtttcagaacatcactggcactaagaccaacagtggtgcatattctggtgatggtaacactcatcacgccaccaacaactacggtggtggtcctgctataaataatagtggcaatttccagggacatggcaatggaggctttattggtggtaatttcgatgcctcaacgaggaactactgattaatttatgtatgatcaacttcatgtattaaatatcgtgttctgcgctacgtatactaattaataataaaattagagctgcatgctgcagctctaacagtgtgtgatatgaataattacttgagaggggggatacgacacaccttcttgagttcataaatttcaattccgatctttttggttgtggtgtattattaataacaatttgttattattaattattaagtgacttctataataacaatttgttaactttactacttcctctactttgttataaatgtatctttctgtgttaagttgaggtcttctttntatatattaataaaattgtattaaattttatgcac

SEQ ID NO: 16447 - DNA, 1024 bp, Glycine max
caagtttgaagtttcagacggacaagccgtggatgacacagctcgctgctgttgcttgtttgtcccttgctgcgaaaacagaagagacccatgtgccactcctcttggaccttcaagtggaggagtcaaggtttgtgtttgaggcaaagactattcagagaatggagctgctggtgctgtcaactcttaagtggaggatgcttccggtgaccccaatttccttctttgaacacattgtgagaaggcttggtttgaaaagtcgcttgcattgggagtttctgtggcgttgtgagcgggttcttctcaatggcattgccgattcaagggttatgagttatcttccttctacattggctgctgcgacaatgatccgtgttattaaagagattgaatcatttaatgcgaccgagtacattgatcagcttctgggtttactaaagattagtgaggaacaagtgaaccagtgctacaaaatcatacagaaactattaggttgctatgaaggcatttacagccttcaccagaaacgcaagcgactatctgaaccgggtagcccgagtgctgtcactgatgcatctttcagttgtgatagctcaaatgattcatggaccgtgtcatcatcagtctcactttcactggagccgctgttgaagaggagaaaatctcaggaccagcaaatgcgactgccttctgtcaattgtgtgtcaattgatgttcttaatagccctcgctaataatgatcttagtatttacttcaaatgtggtagctttctttcatatcaatctggcagttatgttattgaaatgctactaaattatgttcttagttatagacatttctagccataatttgaaaattaatgaggcagagactgagatacccttctccactttgtggtttaaggtggaaaagggatctggtactgagtagaaatataagttataaacttgtaattctacctgagttatactttcagtgcagtttttactcatcttacactgatatttgacaatatgtgcaatc

SEQ ID NO: 16448 - DNA, 401 bp, Glycine max
catttcttcattttgtcgcgctccttcttctcttctccgtcgacgacgtttgtttgctcctcctcctcctcgaagccacagatctgctgcggagctaccgtatcctgtatttattcttcttcttctgtaagcttcttcgtcggagaatttggaatttgatacactggatcggatatgccggtggctgcttccgctatatacttcttgaacctccgcggagacgttctcatcaatcgcctctaccgggacgatgtcgggggaaatatggtcgatgcttttcggacacatataatgccaacaaaagaacttggtacttgtcctgtgaagcagattggtggctgctctttcttttacatgaggatcaccaatgtttacatcgtgattggtgtcagcagcaatgc

SEQ ID NO: 16449 - DNA, 846 bp, Glycine max
cccacgcgtccgcccacgcgtccgcccacgcgttcgctttgtgacttgccatgtgttccaagatataatctccaactccaaacaaaacctctttacatgacacatgtgtatgtttgtgcatgataaattctcattcatttttgggctgcaaatccaactgggtcattattactggttctgagtggtcttgcttcagatcaggtttttttgctaagaacaactcagattttcagtacagtgttactgccaagcagaagttgaattaacgtggataatgattaccgcgcttgaagagtagaagcaataattcagcagtgtttgtgtcaaaatattttgcagctcgagtatatcaaagaactggctagttctcaatgcaaacatctcagaatcataaaatttcttatggctctggcgggttctatgctgagcctgtgcaaaatttggagtcatattgcatgccatcaagtgagaacatagacaattactcttcctctgataacagcagccaaacaacctacccttcagtccaaactttagaacaatattgcacccttgaatctgcttccacaggcaacagtttctcctaaccaaaattctccacctgctctcagtttctcatctaacaatagtccattgtcaaagctagagtcaaactcatatgtgttaaggccacagcattctcttgaaattgctagtggctcgcctgaggatgattcttatttgacgcatgaccttgatgacctgacacataagataagagagctggaaactgctatgctaggacctaatgcagatatgctagatatctacagtaatgtaattccagaacctgattcatttttgtta

SEQ ID NO: 16450 - DNA, 394 bp, Glycine max
ggttgaggaatcaaagaatcacaaccacaatcaccccttgactttgctgagtccaatatcggagcgcaaaatcgtgtgccctcatggcaccaattcccccgtgttgtggaacttgttggaatttcgggtcattgagttgtgcaaatcatataccaccaatatctcatctgcagcagtgagcaaagttgttttctttcccaattccccttggattggtgctcaagattctgtggcttgctgcattctttttggagggcaagttggggttcatgaaacatggggatgagaaatggacccctgtggattacaagaacttcttcttacgatgatgttattgtgttccagggtcagttttatgtgactgatgatcggggtaccatttcatggattgata

SEQ ID NO: 16451 - DNA, 1090 bp, Glycine max
tgtagacttatttgcaatcaattactataaggcttgaggagtggaggcttaagcgaagagacacagaggagtggatgaggcatcgccaactccctgaagatttgagaagtcgtgttagacgatttgttcaatataaatggcttgctactcgtggagttgatgaggaaaccattctacgtgccttacctgctgatcttcgccgtgatatacagcggcatttgtgcttagaccttgttagaagagttcccttcttctcacagatggatgatcagcttctggatgcaatatgtgagcggctggtatcgtctctgagcactcaaggaacctacattgttcgtgagggtgacccggtgactgaaatgctttttatcattagaggtagactggatagttctactacaaatggcggccgtagtggtttcttcaactcaatcatattgagacctggagatttttgtggggaggaacttctttcttgggctttactccccaaatccaccattaatttgccttcttcaactaggacagttaaagccctaagtgaggttgaagcttttgctcttcgggccgaagacctcaagtttgttgctaatcaatttaggcgccttcacagtaagaagctgcagcacacttttcgattttattcccaccattggaggacttgggcagcttgctttatacaggctgcttggcgccgatataagaaaaggatgactatgaaagacctcagtttgagggaaaccattcctttagacgaagcagtagctggtgagagaaaacatggggactattctgctggttcaaattcaactcagactaaattgaaccttggggctacaattcttgcttcgagatttgctgctaacacacgaagaggggctctgaagatgaaagatgacatgccccagttacagaagcctgaagaacctgacttttccactgaagctgacgatgattagttacacttattcagtggcatttggttttcaaattcggttgggtcctgcattctatttcagtatggataatgattctgcaggtcacaaaaatcctgcgtaaccctctgcctgccgtatgacccttgctggta

SEQ ID NO: 16452 - DNA, 449 bp, Glycine max
gcgctcccgggaaagtgagggaaagcacgagaaagcttgcgaaaatttcacgttcttctatttgcaaacactgattttccattcaattactgctattattatcaattattattattttgctgtgatcaaattggtttatcgtattaagaattttcattattattattactgttgagactttcctcaagtcttgcaccaaagaactgggttcccagttttctccaattctagggcaactttttcggctaaatccctttcttcccatcgaagcgagctctcattgcaaattaaacgcgctttgcgtgctgcgatcttggttgtgatggaaactagggcatagaattggccgtgcagaagaaaaaagcgattaaaaatgttcttcagcggcgatccttcgacgcggaagcgtgtcgatttgggaggtcgcagttcaaaggaaagggaccgga

SEQ ID NO: 16453 - DNA, 651 bp, Glycine max
cggacgcgtgggcggacgcgtgggtctcactcaaccaaatctcagttttgagttcaactcaactaaactatgtcttccttatccctatatgccaacctctcctctctaccatcctccctcaccattcgttcttcttcatccaaagatacctctttgaaacaggattggaggacaaagtccaaacctatcccaccaggtggcacataccctgcaaaagatcattgcagtcgttgtgggttgtgtgatacttactatattgcccatgtcaagaatgcatgtgctttcttgggagatggaatgtctaagattgaaagattggaacctgttgttcatggtagaggcaggaagactgataacttggatgagacctacttaggggtatatgaggaactgctatatgctcggaaacttaaccctgtggaaggagctcaatggactgggatagtaacaaccattgcaatagaaatgcttaaatcaggcatggtggaggctgtcatttgtgtacaaagtgatcctgatgatagatttgctccaagacctgttttagcaaggacaccagaagaggtgttggctgctaaaggtgtcaagccaacattgtcacctaacctcaatactctcgcacttgttgaggctgcaggtgtcaagcgcctt

SEQ ID NO: 16454 - DNA, 623 bp, Glycine max
cggctcgagcggctcgagcggctcgagatgatatcaaatcaccctcaacttgagagagagagagagagaagtggatgatggagagagaggaagagaaagaggtggttggtgtgagtgtgctgcacggtggtatgatcataacgatggacgaggagcagcgagtgtatagggacgggggaatcgtggttgaacatgataaaatcaaagcaatcggacaatctgctgatatccttgcggagttttctgatgtcgccgacagtattgttgatctgagcggacatatcttactcccaggatttattaacacccacgttcatagctcccaacaaatggccagaggcatagcagacgatgtggatttaatgacctggctgcatgagcgcatctggccttacgaatcgaacatgagcgaacaggattcggacctctctactttgctttgtgggattgaactcattcactccggtgtaacctgttttgcggaagctgggggccagcatgtttctgggatggctagaccagttggcttactgggtgtgcgagcttgcttgacccaatcaaccatggactctggccactgattgcccccatgctgggtcactcgaaccactgaccaatgcatt

SEQ ID NO: 16455 - DNA, 445 bp, Glycine max
acgagaaaacccttttcgccggaaaacccaccgcaaccttcgcggttcgcgattccgcttccggttccaccgtgctcctcttacacacagcatatgggaaaaactagttggttgataatattggttacttgtttgtgcctgcttgccttttctgatggtagagaactcaaggttagacataaaaagcctcattaccaatacaatcatacgcttgctacaatattagtggaatatgcttctgcggtatacttgtcagatttaactgaactttttacttggacgtgctctaggtgtaatggcttgaccaagggatttgaaatgatagagttagttgttgacgtcgagcattgcttacaggcatttgttggagtggccgatgatccttgtgccattatcattgcattcagaggaacaaatgaacacagcttacagaattggattgaag

SEQ ID NO: 16456 - DNA, 530 bp, Glycine max
  unsure (1)..(530): unsure at all n locations
ctctttgacttctccttcatctctttcgctggacaaaacccctttcgccggaaaacccaccgcaacctttgtggttcgcaactccgtttccggcttcaccgtgctcctcttacacgcagtatatatatatgtatgtatatggggaaaactaggtggttgataatattggttacctgtttatgcctgctttccttttctgatggcagagaactcaaggttaggcataaaaagcaacattaccaatacaatcatacagttgctacaatattagtggaatatgcttctgcggtgagttctatgggaattctgtatgttctaacttcaacctttaagatgtgtaggcagaggatttagaattgtttatgtgtattatttggtttctaatcttgggtcagtcatgaatttggaatttgggtttctgatgaaactttcgagtttcaactttcaacttcctctctctctctaaatggttttattattatagctntaattgtaagtctgatatgaatttttggttggttataagaatt

SEQ ID NO: 16457 - DNA, 411 bp, Glycine max
ttacagacagcattttcttctctgcagcattcaaatcctgtcacagtgacgaaacgacacgaattgaagacaaaagagtcaaacataaatgatagatacatagggttcattcagagtttagtcaaatgcttcgttcacggcggcgctccccttacggcgcctacctctgcgccgtgatctccgccgtgctcctcctcttctccgtctccctcctctactcccgcctctcccgctcccacccccactcccaccacctcccccgtccctccctcgtttcccactccacctccgccgacatctccatcgcctcctccgacgaccccatcgacgagctcgacttcatcgacgaaaccctagatcccccctccctccgcctcaaccctcccccctaccacctcttcttcgatcccc

SEQ ID NO: 16458 - DNA, 562 bp, Glycine max
tctcgagccgaatcggctcgaggaaaatgacttgaatgagcatagagcggacctgctttcgaagccagagaacatcagagaaaaaattgttgatggaaggatctcaaagaggcttggggagcttgctcttctagagcagccttttattaaggatgacagtgttttagtgaaagacttggtgaagcaaactgtagctgcactcggagagaacattaaagtgcgccgttttgttcggtttacgcttggggagacatctgaaaaagaaacaacagtaccagcataactttaggataagtaacatgcatatggattccccagttaccattcatgcttgcttgatgttacttatcctaaagttatgctggtactggggaatccatatgcatgttacaaaagtccaagagactaatgttggaaacagcagcaattgattcttcataataaccaaatgtgcaatcggcagggacactttttcctaatctggatctacattgaagatacacgaggactaaaatttgtgtaattctctacagttgtatgctgaaaaatattagtggatgca

SEQ ID NO: 16459 - DNA, 537 bp, Glycine max
gtaggatctcaaagaggcttggggagcttgctcttctagagcagccttttattaaggatgacagtgttttagtgaaagacttggttaagcaaactgtagctgcacttggagagaacattaaagtgcgccgttttgttcggtttacgcttggggagacatctgaaaaagaaacaacagtaccagcataactttaggataagtaccatcaagcatgaatggtaactggggaattcatatgcatgttccaaaagcatatatgcaagagactaatgttggaaacagcaattgaattttcataaccaattgtgcaatcggcagggacacttcttcctaatctgtatctacattgaggatacacgaggactaaattttgtgttaattctctacagtttgtatgctgaaaaatattagtggatgcatttttgaattacaagttttattaagttttgaattactggtttcattaattattgactcgttacttctcatgtaaatggttgatttaaaactgcatggtatagttgaaataattgatgg

SEQ ID NO: 16460 - DNA, 420 bp, Glycine max
cccaacaacaaaacaacaccaacaccaacctttttcataccttaattcttgagtttgagcatgtctttcagtttcactgaccttctttctactaacaacaacaatcccttgaacatggatgatgatccctttggacttgaatttgctaataatttcaagtcagcttcactgcctctctctccttcttcaatctacccttcttcttatgctgagttccctcctggttttgtcccaacttcacagtcattgaattcacaccactttttttcttctcaaattgttcctgcatcttacacaactgagccatcttctagcatgagcttcaacatgagaaacacttcaactgtgggtcaacacggaaaccaggaagaagagagaaactactctgacctctcttttctaacaaaaacaaaccacgtg

SEQ ID NO: 16461 - DNA, 765 bp, Glycine max
acaggcttacccttttgcttcttctctctctcaagagtttccactcaaaccagatagttcacaacctccaaaacacaacaccacaaggaaacaaaacaacccattgagagcttgcacaactctcatggtagtagtagcactactacttcacacactctctctctgagtgcctcacaccacagattctgtgatatatataccaatggaggccctcaatgctgctggcttgacccctctatctgtgctctctgatacaaaaacaacaagaactaaacacccttctgtttctgtatgcaaagtctcaaacttttccacctcaaccaacaagaaacaagcattgctgcaaagttgcatatcaaaaactttgcatggggggctgattcttgcagcttccgttgtaaatggtggagctgccacagctttaacgtacgatgaagccctgggacaacctttgagcctccctggtgctggggactttgatgtgaacggttttgtggagagtgtcactggctttgcagctgaaaaccctgcaattcttgccgggggagtggctgttttggcagtgccattggttttgtctcaggttttcaagaagcctaaggcttggggtgttgagtctgctaagaacgcgtatgctaaacttggggctgatgggaatgctcagctgcttgacataagggcactggtggagattaggcaagtggggtccccagatgttgggggtctaaagaagaaagccgtgtcaataccttataagggtgatga

SEQ ID NO: 16462 - DNA, 566 bp, Glycine max
  unsure (1)..(566): unsure at all n locations
caatcaacatgattgtgttttatggtatttcatcatcaaatgtttttggtagagttgcctactatgtaaggagggattcaaattcatgagaacaatgcactccatgtggncttaatttttattgtgttctctttacaggcatgtcatcaggaaaaagttcagtgacaagtttccagggatcacctgtacccccaggactaatggagggtggtctgattgatgttcaacaattttcactcaaagctttgcttctataagaattccgacaagaaataattcactctcataatatccggctgcaccaccggggaaggacatgcaccaatggttcttggcatgccaagaacagcaatccctttaaacaaaaaaatatatttgtgctggcaatcacatggagtttggatacattggtttgcagattccacatcaatacaattcacaatttcattgtccatagctggagatttaaatgtaaccacatgatgttaaaagctgtgcatgcccaatagtacactaatttgtttaaaatgtggtatatattgactcaaataaacaattatttcagc

SEQ ID NO: 16463 - DNA, 402 bp, Glycine max
tggtcgcgtgggtgaacttgccatgttaaagggggcgaggttagagcgaatgggggccttgaacaagatgaaagctgctaaggcatcgtcatcttccagtagcagcacgcttgctacggttttcactgttgtcttctgtattgtcgtattactccaaggcatgtcatctggaaaaagttcagtgacaagtttccagggatcacctgtacctgcaggactaatggagggtggtctgattgatgttcaacaccaactcaatccatcttcaagtgacccaaatgcacctagtttagagcctcacaaaattgtacagcaggtcactggtttagatttgcctgcaaaactgagaagaggtgcaggttaattaatgcaaatatagtgacaccagcaatgtcattgtca

SEQ ID NO: 16464 - DNA, 543 bp, Glycine max
cacgacttgcagtcagactctcacgatcttgtctcagaagaacagaacgctgacatgacaaaacaagcttcttcctaagcaatcctctttgctgctttgactcaccaatataaatatcaattgccgtatcctttgcttcacttcactccttctcttctcatattgcttccttcctttctcttcttcaaatggaaaaaaaggtccttttttttgtctccattctcttattcattgctctgctatttcatggaggaaaggttttagctttcaagagccaagacggatcagaggaatggggatacgttcaagtcagacccaaagcgcacatgttttggtggcattataaaagtccatatagagtggaagatccttctaagccgtggccaattgttctatggttgcaaggaggacctggtgcttcacgagttgggattggaaattttgaggaggttgggcctttagacacaagcttgaagccaaggaactccacatggttgaaaaaagctgatctcttgtttgtggacaatccagttggaaccgggt

SEQ ID NO: 16465 - DNA, 403 bp, Glycine max
actcgagccgaatcggctcgagggcgattgtttttgtttcttttttttctttagcatcatcaaggccagagcatcatcatgttaacccatttgacccactctcaatggtcctgcatacgtaggactcttacaccccttcttcagtttttctcattttctggttctgttctgttgttgcagacgctgacatgacaaaacaagcttcttcctaagcaatcctctttgctgctttgactcaccaatataaatatcaattgccgtatcctttgcttcacttcactccttctcttctcatattgcttcctttctttctcttcttcaaatggagaaaaaggtccccttttttttctccattctcttattcattgctctgctatttcatggaggaaaggtgttagctttg

SEQ ID NO: 16466 - DNA, 588 bp, Glycine max
caattttccatgaaacagatgatcgcagatttatttgcctcttggggtgtagattatttgaagtatgacacttgttacaatctgggcatccctccaaaagaacgatatccgcctatgcgtgatgctctcaatgcgactgggcagaagattttctattcactctgtgaatggggcgttgaggaccctgctttgtgggcagacaaggttggtaacagttggcgcacaacgggagacatcaatgattcatgggcaagcatgacaaccattgctgatcttaatgataagtgggctgcatatgctgggcctggaggatggaatgacccagatatgttggaagttggcaatggaggcatgacttaccaggaatatcgtgctcacttcagcatctgggctttagcaaaggctcctctattgattggctgtgatgtaagagatttgactgctgaaacacttgagattttgagcgataaagaagtcgttgccatcaatcaacactctcttggagtccagggaaggaaagttcacgtttctggagcagatggctgcagacaggtttgggcaggtcctttgtcaggaaaccgattggct

SEQ ID NO: 16467 - DNA, 438 bp, Glycine max
  unsure (1)..(438): unsure at all n locations
aagcaaggtattcctaaagccccatctggttggtcttcttcttccctctaaattcggcttgggcttccctcacacaaccaagccttcttcttcccttcccaccactttcttcatttcacacttctcctctgcccctctctcttcctacggaccctccctccacaagggaacaacaatcccctcccaatccctaaacgacgccgttctctgcgaagaagccttcacgcgagtcttccacctcgccgcactccgcgtcccctcctccgaatgctccgccctcgagagccgcctccgtggccacctccttaactggccccgcctccgcaatatcgcccgcgtccccggcgacgacatcgaccccaccctcgcccctctcttgcctcaaccaggtaacggagaattcgacttcgacgaanatgaagtagaagaaagacgtct

SEQ ID NO: 16468 - DNA, 482 bp, Glycine max
  unsure (1)..(482): unsure at all n locations
gaccaaaaagaaaggtgaaaaaaaaactaaacataagaatgcattcaacgcgttgagttgttgtctggaagagcttatgctgtttgttcgcaattcgcatggaaccatcagtttcagctccaccaaaaccttgggagaaagcagcatcatcatctgggccagcaccttttaaacccccatcagcaggtagcacaagtgatgtagttgaggcttcagggactgcaaaacctggcgaaatagttccagcttccgataagactgcaactgtcaataggaatgctcttgggagaccccttcccacaaggccatgggagcagaataatggaagtaccagctatggaggttatggttccacaatgaattataattctggatatggatcttatggtggagtgggagggttgtatggcggaggaatgtatggcagcagtatgtacaggggaggatatgggggcctctatggttcctctgngatgtatgga

SEQ ID NO: 16469 - DNA, 484 bp, Glycine max
cccacgcgtccgcccacgcgtccgttccattgttatctcgctaaagtctcaaacctttctgtgctctgctctgctgaggaaattctgtaacttgatgattataaagatgaactgtttcttcttcaaaaacaagtcaaaatccgacccagaattaccaaagcgaaggaagaagagaaatcaggtgggcaataatggagcaagcaagtcctcccccagctcgctaccatcgccgagaagcataaaagaattgtacaaagaaaaagagcacaatttcagaatcttcactttgcaagagatggtaaatgcaacacatggtttcaataggatgctcaagattggagaagggggtttcgggaaggtatatagaggaacaattaaacctgaccctgaagatggagctgatcctattctggtcgcaataaaaaagcttaacacgcgtggcttacagggacataaagaatggcttgcagaagttcaatttctc

SEQ ID NO: 16470 - DNA, 334 bp, Glycine max
ttaaaattcgggatttccgtttctttccacgggcttcattttctccgcttcaggcattacttcattttggaacataattgcttcatctttctggactgagaaaattctgtaagttgatgattagaagatgaattgtttcttcttgaaaaacaaatcaaaatccgacgcagaattaccaaagcgaaggaagaagaaaaatcaggtggggaataatggagcaagcaagtcctccaccagctcgccgctaccatcgccaaggagcataaaagaattgtacaaagagaacgaacacaatttcagaatcttcactttgcaagagctggtagatgcaaca

SEQ ID NO: 16471 - DNA, 744 bp, Glycine max
  unsure (1)..(744): unsure at all n locations
aattatttccaggtgggacgataggatgtcagcatctataccaaacgaggaggttttctacacagttggatttttgcactcaagtgggtttgatacttggaaagcatatgatgctcaaaacagtgaaattttggagttctgtagagatgctggcatcaaggtcaagcaatatcttcccaaccacagcacacaggaagattggacaaaccattttggtgctaaatggataaaattcttagaaagaaaacatcagtttgatccaagaatgattctatcaccagggcaaaaaatcttccacaaacaattacagccagcgttttaaatatttcccctaattaaaaaaagtaaatgttttatggtgggactaccccatttagatggctacctagggacaggtgtaaatacaatgagaccaagaccaagatggctttaatttgtatgttaaactttgcattgctagagaaattaataaggtgcatgagtactttggcacctattatgctacatataccttagatacgttataggttgacaaagtcgtactggtaggttcaagaagcacagttgtctctcacattgtctgtcacccaacttgctatagtgtgtggagaaattcggatcatattgaagatgttctaatgagttccagtccttcattaagtgtttaacgattctgtctttctttatataatttntgtttgcttttnnnnnnnnnnnnnnnnnnnnnnnnnnnnnnnnnnnnnn

SEQ ID NO: 16472 - DNA, 418 bp, Glycine max
agcaaattaaagatatatatagacattcacatagtaatcatcattaatttcagaagcgccaatatatgatgaatggtagtggcggttttatgatgctgacgcttaagtccggcggttttcctgtggaagtcaacacccaaaagctgaaacgcactgacagcagacaaacgggcgtgttctctgtggaaaggttcatcacatactcggtggttggtatgcagcgactcctttcattgaagataactaaggtaatcaaagccgagaaagtgaacatagtaaatcttagcttcgcagaaaaatctggtaagagctctttagccaatttgaaactgcagataataagaaatgacaggtaccgagttctatgtttcatggacaatgaattatctgggtcgtacgaattgcgcaagataaacta

SEQ ID NO: 16473 - DNA, 453 bp, Glycine max
aagccttccgacccaccacctctaccaaaaacaggactattggaggggaaaaggctagaacaacagatcctctcacgtgcacaaccatcagagggaaagagagagagactgtagtaattaatatgtttcctgtctccatgtctaattatgaccggatttcagagctgatatgggagaatggccagctatccattcatgggcttggtgggcttcaacctactaaccctactcaagaaaagcccatatcaagtggggcccacgacacattggagtctatcgctcaacatgccacgttacaacgttatcaaccgtcgaaattcactagggaagaaggccatgccccttcttgtaatagtaaaaacaacaactccattggtgcaccctattatggtggagaggttcaaggtgtgctatactcgacgaggaaaagaacatcgtccaatgctaacaaca

SEQ ID NO: 16474 - DNA, 785 bp, Glycine max
caacagcaacacgagagccactcagtgatcgcttctatcaatgatcatctctctgtgtcaggggtgaagttggttgcgtatgttcgtatttggttattgattggatcacactaatgttccactgcaagttttttgacatatattgttgacgggatatttcctagatggggggagcgtgttctaggaagcaagagcgggacaacaaagatagtcctaccagaggactatcacgaagatattgcaaaagcgggactttgaaatggtggacatcctctttttcttatccatctgtagattttcacctacgaaaaggagaatgtccaccactgttggacttgtgcatacagaaaataaatgaggatattgataaatataacacattttctatgctaccacgagatataagtcagctaattttcaataatttggtttactcccgacgtctaaccagtgcttcccttgaagcttttcgagattgtgctctccaggatctttacttgggagagtatgatggtgttaatgataattggatgggtgtcatctcatcccagggttcatctttgctttctgtagatctttctgggtctgatgtcactgattttgggctgacataccttaaagattgtgaaagtctcatttccttaaatctaaattactgtgaccaaatttcagatcgtggactagagtgtatcagtggtctgtcaaacttgacaagtttgagtttcagaagaaatgattcaatttctgctcaaggaatgagtgccttttctggtcttgttaacttg

SEQ ID NO: 16475 - DNA, 439 bp, Glycine max
ggcaaggtcagtggtggggtccttacccctttttttctcgcccatacaataacaatgtactattcacacccctccacttgtccttctccgcccgccacgtcacctcctccgccgtaaccatgccctccttcgaagtcctcggcggcgcacgtgaccgttttctccctgttctcccccacttgtctcgcccctatcatgcttttcctcttctcgccgccaaccgccacatcgaaaccatcttcgcctccttcttccgctcagtccccgacgtcaggctccgccgcgagtgcctcacgacccaggacggcggcgcgtcgccctcgactgggtctccggcgacgaccgtcgcttgccccccgattctccactcctcatcttgttgccaggtttaaccggaggtagtggggatgcttacgtgagacacatgttagttagagct

SEQ ID NO: 16476 - DNA, 1121 bp, Glycine max
  unsure (1)..(1121): unsure at all n locations
aacgtgggcagtttcatatatgggcataagcctttgaagtttaaagaaaggcatccctggggtttctctctctgtgtgactaacataaaataattagagagagagagagagagagaggatatgggttcgaagaggtatgcgctattgatgtgcggtgaggattcggagtacttggtgaagatgcacggaggcacctatggggtattcatgaagttgctccaagagcaagaggaaaagtgggacctctacaagctcgtccaaggagagttcccggagcagcatgacttgcctctctacgatggctttgtcatcagtggaagctgctatgatgcacatgccaatgacccatggatccttgacctcattgctctcgttatcaaattggactccatgcacaagaagatccttggcatttgctttggccaccagataattgggcgtgcattgggaggaaaagtgggtcgctctcccaatggttgggacattggtgttaaagctataaacgtgtcatcatctttacccttggctttctcatctcttaagctcccatcaaagctttccatttacaaatgtcaccgggatgagatcctagagctccctccaaaagcagaggtgattgcttggtcagaaatgactggagttgagatgtttagctatggagaccacatgtttggcatccaaggccacccggaattcacctatgaccttctcttgttctttattgaccgtattattcagcgaaatttggtccaggaagcgtttgctgtggatgcaaaggttaaggcggcatcgcaagagccagataaagagatattgaaaagattgtgcgttgattttctaaagggtcgattgtgactgacaattcaatatgaatagacaaataatatttttgagatattattattgtgtaagagggtttttattaattagaagaagcaacacttgggctgcgtgtggcctttgcctaatgttagccatgctattgctaggttggtatccattatgaacaatgactatgggtgcagtcaatgccccggtattccacaagaattatctaatttcttcattctaattcaattaactattagtaattcctagnnnnnnnnnnnnnnnnnnnnnnn

SEQ ID NO: 16477 - DNA, 562 bp, Glycine max
gagagagaggatatgggttcgaagaggtatgcgctattgatgtgcggtgaggattcggagtacttggtgaagatgcacggaggcacctatggggtattcatgaagttgctccaagagcaagaggaaaagtgggacctctacaagctcgtccaaggagagttcccggagcagcatgacttgcctctctacgatggctttgtcatcagtggaagctgctatgatgcacatgccaatgacccatggatccttgacctcattgctctcgttatcaaattggactccatgcacaagaagatccttggcatttgctttggccaccaggttcaatttcttatgcttaacacttcgcatccctatcaatcatcctttggatcttcattagttaattgccaaccccttctatattttttagtttcgcctctctcattgctctgccatcgtctcaattattattctctttttttttatctagttggaacatgtatattattacgggggcttatcgattggccgattttagtttttaaaatcttgagagagaaaaacatagtactgaagacaa

SEQ ID NO: 16478 - DNA, 685 bp, Glycine max
  unsure (1)..(685): unsure at all n locations
ccatcgttgaaatgcgtgcttcttagttcttcatcactcttaacattcgaagacgtcgttttagtccaacgatcaaacccacaattcagaaacaaaagccctatttctctctctctctctctgattcagaccacatcctcagaattccattctgctgcatattccagtttctgttttttctttgactaaatggaggttcaaactcacaccttggacattcatcagccccaatttcggagctctgaatacccgaatccgacattcccacactcccttcatgacccgccaatacaaacactcactcacgcgccgggacgcgcgtgcccccagacaaacgccgccctcaaggtgcaaaaggtctaccggagttaccgcacacggcggaggttggctgattccgctgtcgtcgccgaggagctctggtggcaagtgattgatttcgcgaggctaaaccacagcaccatttcgttcttcaatttgcctgagagtgctgcgtcacggtggagtagggtcaaactcaacgcttccaaggtgggaaagggtttgtccttggacgccaaagcacaaaaattggcttttcaacattggattgaagctattgatccacgccaccgctatggacataacttgcattattactatgaagaatggtgcnaaaccgattctggccagccattcttttact

SEQ ID NO: 16479 - DNA, 454 bp, Glycine max
gcgtgcttcttagttcttctctcttcactctacactctacacattccgacatcgtccaacgatcaaactcactgttcagaaacaaaaccctctctttctctgtgtgattcagaccacatcctcagaattcgattctgcatattctgtttctgtttttttgtcttttctttgactaaatggaagttcaaactcacactctctccaccttcgacattcatcaaccccaatttcggagctccgaatacccaaacccgacattcccactctcccctcatgacccgccactccaaacacccactcacgcgccgccagagcctcacacgctgggacgcgcgtgcccccagaccaccgcggccctcaaggtgcaaaaggtctaccggagttaccgcacacggcggaggctggctgattccgccgtcgtcgccgaggagctctggtggcaagtgattgattt

SEQ ID NO: 16480 - DNA, 362 bp, Glycine max
cttcttagttcttctctcttcactctacactctacacattccgacatcgtccaacgatcaaactcactgttcagaaacaaagaccacatcctcagaattcgattctgcatattctgtttctgttttttgtcttttctttgactaaatggaagttcaaactcacactctctccaccttcgacattcatcaaccccaatttcggagctccgaatacccaaacccgacattcccactctcccctcatgacccgccactccaaacacccactcacgcgccgccagagcctcacacgctgggacgcgcgtgcccccagaccaccgcggccctcaaggtgcaaaaggtctaccggagttaccgcacac

SEQ ID NO: 16481 - DNA, 750 bp, Glycine max
caacaatattatatttcatttcgtgttccttgcttcactctctctctcactgtcttccccgttattctctctccgagcttcactctctttcgcctctgccaaagggagaaaaatggggttctcctcctttctgggtcgtgttctctttgcctccctcttcatcctctccgcatggcagatgtttaatgaatttgatgccaatggtggacccatctcgaaagagttgattcccaaactcagtgtggtgaagaataatttatcctctaaattgggggtagcgctaccagatattgatgcccggcaattcattgctaccatcatatttcttaagggggttggagggattttgtttgtgtttggaagcacatttggatctttcctactgcttttgcatctggcgattactactccacttctgtacgatttctataactatagacccggcaagcctaagtacaatcagctgctgaatgatttcttgctgaacacagcactttttggggcattgctattctttattggaatgaagaactcaattcccaggagtcagctcaggaagaagacccctaaagctaagacagtttagaaaaaatagagcaaaagatgtattagtgtgccaaaatgcttagtttcggcattaagtatttgatcttcagctgagtttggaatagttacttagacctattaagattattttgtttatttgtcagatggattataatttgattattgatatgcttcccctttcaa

SEQ ID NO: 16482 - DNA, 430 bp, Glycine max
accaaattgacctcagtactgtagaacactgcgactcttcacacttttcttcttcccttcgtcttcagcttctgcttcttctcttgttgctgcttcaaaacagtgagaaaaatatggggttctcctcctttctgggtcgcgtcctctttgcttccctcttcatcctctcagcatggcagatgtttaatgaatttgatgacactggtggacccattgcaaaggagttgattcccaagttcactgttctgaagagaaatttatcctccaaactgggggtaaagacaccagatattaatgtgcggtcagtcattgcctctatcatatttctaaaaggggttggaggaattctattcgtgcttggcagtacatttggatcttatcttctgctcttgtatctggggctttctactccaattctatatgattttta

SEQ ID NO: 16483 - DNA, 446 bp, Glycine max
  unsure (1)..(446): unsure at all n locations
attccacgtggtagtgctagggaagaagcagtaagcactgagcttgaagtaatagatggacagcagtcgcaatttcttgcttagttctcatgtggcgccatccccacccgtcaaagtcaaagcacaggaaattcgggtatgcaccaaccgcacctgccgcagacagggctcatttcaaaccctagaaactctatctggcctcgctcctccaaacgtcgccgtgaagtcctgcgggtgcttggggcggtgcggtggcggtcccaatctggtggtcctgcctgatggcctcatcgttggccattgcgggacggctgctcgggcggcggaggtcatagcgactctgtttgccggagctggaggccatgacccaaagactcgtttagatgcgcttgctttgaggaagagagcggagattgagtttgcaagcgaaacttcactgangctga

SEQ ID NO: 16484 - DNA, 436 bp, Glycine max
ctcgagccgcataacacaaacacaacacaatacacaaaagcagtaaccagagaaaatggctagtgtcttttctgcatgttcaggttctgctgttcttttctacagcagaaactcctttccctcaaaaggatctttcattcacctcaaaaggcctctctctgccaactgtgtagcttctttggggactgaggtatcagtgtctccacacagtagacactttctggcagtggcttaaagaagagggtgttgtctctgccaagaccccagtgaagcctggtgtgctgccacaaggcctacgactggttgcactcaaggacatttctaggaatgaggttgtcttgcacgcccccaagaggctgtggattaaccctgatgctgtggctgcttcagagattgggaaggtgtgcattggattgaagccttggttggctgttgc

SEQ ID NO: 16485 - DNA, 1869 bp, Glycine max
gccgaggcacgagcagcatcaatactagcaggtttgagtttcactcctgagatgcagaagaaggcaacaaaaacattttctggaggatggcggatgcgaatagctcttgctcgtgcattgtttatagagcctgatatattgcttcttgatgagcctacgaatcatcttgatcttcatgctgtcttatggcttgaatcgtacttggttaaatggccaaaaacatttatcgttgtttctcatgctagagaatttttaaacacggtggttactgatataattcacttacaaaaccaaaagctgactacttataaagggaattatgatgcttttgagaagactcgagaagaacaagttaaaaaccagcaaaaagcattagaggcaaacgaacgtgctagatctcatatgcagaccttcattgacaagttccgttataatgcgaagagggcatcacttgttcaatctagaatcaaggctttggatcgaatgggccatgtggatgaaattgttaatgatcctgactacaaatttgacttccccactccagaagatagacctggtgcaccgataataagtttcagtgatgcatcatttggttatcctggggggcccattctttttaagaatttgaactttgggattgatctcgacagtcgaattgcaatggttggacccaatggtattggcaagtcaactatacttaagttaattgctggggatcttcagcccagttctgggactgtcttccgttctgctaaggttcgtatagcagtgttcagtcagcaccatgttgatggactggacttatcctcaaaccctcttctgtatatgatgcgctgctatcctgtgagttccttgtattcagtgataattaactgttttctgaatgttatgagagttaatcttaaattaaatgcttgactatcggagtacccatccttctaatcactgacttcttatatgggaagaatcaaggatttaaattttggttgtggttacattgtgggtcaatgtggtctgcaattgtgtattaatgcatctgtggcagctaccacaactgatatgttcggcatgctgtgatggagattgaagaatgagattttgaaaccttggaacaaattcaaggatgagcagtatagtagtttcaattcaattgtgtacatatgaaattataattgggacacggtgttttttaaaacttgtggatcaggtctatatgggatgctaggctgtaaacacggtgttttttaaaacttgtttagtacctgtgcttgcaattatgttatttaaattttcctattcgttatttttttgcagggagttccagaacagaagcttcgagctcacttaggttcttttggtgtaaccggaaatcttgcactgcagccaatgtatactttgtcaggtggtcagaaaagcagggttgcctttgcaaagataactttcaagaagccacacataatattgcttgatgaaccatccaatcatctggatttggatgctgttgaggcgcttattcaaggtcttgtgctgttccaaggaggcattctcatggtgagtcacgatgagcatctcatctctggaagcgtggaggaactatgggttgtatccgacggaagagtggcaccattccatggcacattccaagattataagaagatactccaatcatcttagaaaagttacattttgtggatgtatactggaagacacctggatcacatttttctgctcttcctcctctcagctgtcatacatgggaatatacaattttgcaatttatccaaacctatgtacaagtgacaccatttcaaggcaattttatgaacacaagaggttaaattaaaaaaaaaaaaaaaggcggcccgccct

SEQ ID NO: 16486 - DNA, 692 bp, Glycine max
gcgctttggttcagcagagtgtcttcagtcttggctcctaacactgtttgcaaccgtcctctgtttaaggactcactacctccgaacacgtaggtagaaatgtctgtgtctttctcttcaacctcggtttcgttctcggaatcctcatttgcattccaaagacctgctccagcacatctttgctcaaattcactcaccgttgcatcgaacaactttcattcagcaacaggtggtggtcgtcttgtgctgaatgttggaggcacctgcttgtgtcgaaagtttcgtggtttgaaactgtggctacttgagagactcagcttccaattccagccaccaaagcaacctaagaatagaaaccatcacttcaggaataatttggaaaatgaaaagggatcggtttctgattcatcttcaaatcttcgtgttcctgatgataaggtcactcccatggagtctccatctttgctgcagacaggtttgtctggtgctcccatggatgttagcagaaagccctctctttgtattgcagtcataggggccactggcgagctggcaaagaggaagattttccctgctttatttgccctctactacagtggcttccttcccgagaatgtaggcatttttggttatccaaggaaggatataactgatgaagacctgcaatctattatagcttcaacgttaacatg

SEQ ID NO: 16487 - DNA, 321 bp, Glycine max
ttcttcactcactacctcggacacgttgatgtctgtccgaatacgggaacacacaaactcgtaggaatgtctgtgtctttctcttcaacctcattcgcattccaaagaccagcacatctttgctcaaattcactcaccgttgcatccaacaactttgattcggtaccaggtggactcggtcgtcttgtgctgaatgttagaagcaccagcttgtgtcgaaggtttcgtggcttgaaactgtgggtacttgagagactcaacttccaattccagccaccaaagcaacctaagaatagaaatcatcacttcaaaaataatttg

SEQ ID NO: 16488 - DNA, 834 bp, Glycine max
cattggaccaacaacataaagtgattcctctgctgctgcttcttttccaagttctgcttgtagcatcacagacagatagtcaagattattctggcctaaattctcttacggaatcctggagtaacaagccacaaaattgggtgggtccagatccttgtggcagtggatgggatggaattcgttgcagcaattcaagaattacccaattgagactgccaggcttgaatttggcaggccagctgtcttcggcaattcagtctttatccgaactagatactctggatctttcttacaacacaggcttgacaggaacaattccacaagaaattgggaacttgaaaaagctaaaatccctatcattggttggttgtggtttctctggtcctattccggattcaatagggtctttaaagcagctgacatttctagcacttaattctaataagttcagtggaactataccacgctctcttggcaatctatcaaatattgattggcttgatcttgctgaaaaccagcttgaagggactattcctgtctctgatgaccaaggaagaccaggccttgaccttctccttaaggcacaacactttcatatggggagcaataagctcactggtacaataccagaagaactctttaactccagtatgcatctaaaacacctgcttttcgaccacaatcaactagagggtggtattcctgtctcccttagtactgtgagcacattggaagtagtgcgctttgataagaatgcattaactgggggagtgcctgcaaacttaagcaaactcggaaatctaagtgagatctatttatctcacaataacctga

SEQ ID NO: 16489 - DNA, 547 bp, Glycine max
cccacgcgtccgcccacgcgtccgattttattttgacgaatatgccctgaggctggggtggtgtgtagctgcgtgcctacctccatcgcatcatacgatatggatagggtgttctcagtggacgatatctccgatcacttctggcagccgcctatccctgtctccgccgcccaaacttcctcccagatgagccgcagcgcctccgagtgggccttccaacgcttcctccaggaagcttccgcctccgcaccctctcctccgtcttcttcctccgccgccgacgtcgtattcgtcgagatcgaagatcaacctaaacccgcccctccccctccgtcaaacggcgccgttctccccaatgcccctggtcccgtcccccttgactccgacgaataccaggccttcctcaagagcaagctcaacctcgcatgcgccgccgtcgccatgactaggggatctttggctaaatctcaagacccgtccccttcttctgacggtgcatcacagccgactaatccttctctagttgaatctcagactacttctaaag

SEQ ID NO: 16490 - DNA, 781 bp, Glycine max
cccacgcgtccgggtgaaacacgtagggccagtagctcaagtagagcagtgattggaaaggaatcgcttgaaggtttgaggaggttgcttgcagaagatacaccggttattcaaagggttgcaaccataatgcttgaaaaaatgggagccgtcgttgtagctgtaggtgatggacaacaggcagtggatgctctaaatggcatgcctggtgttgaagattgtataagggagtctctcctgaaggaaagaaacacaagatcatctcaaactgagattctcggttgccctccatatgatttgatcctaatggattgtcagatgccaaagatggatggctatgaggcaacaaaagcaatccggaaatcggaagtgggaactgacttgcacattccaattgttgctcttacagctcatgcaatgtcatgtgatgaagccaagtgccttgaggtgggcatggatgcttacttaacaaagccaattgacttcaaactgatgtgtccaccattctttcactcacgagaaggacatcttgacttctctctcataaggcccatcaaactaacaaagggttggctcaggcaactagaaatgtatagaagttttccgcatattattatataaacataaaagaaatcatagcttgacatatgcattctagaaatgtaatccaattttcctgactcttactctcatttagtagctatactagtgctctattgtgtgtgcatagagaagtgcaatgtgcagaaggcccaatttataagcctatctagtatttcat

SEQ ID NO: 16491 - DNA, 940 bp, Glycine max
cttacgtgttcgcccacgcgtccggttcaaggtcttgaaaatgtgaggctcattgctgttggagcatttcataatttggctcttcaagaggatggaactttatgggcatggggtaataatgaatatggacaacttggaactggagatactcagcctagatcacaacctattcgtgttcaaggactttctgatcttaccttggtagatattgcagctggtggatggcattctactgcattgacagatgaaggagaggtatatggctggggaaggggggagcatggcaggcttggcatttggctgataggtgacaaggagccagtagaaatgggtactcccacgaagggtgcaagcgttttagcctgtgagaagatatgtgttcagggtgtgcctgtaggaggtacctcacgtcaagttgcatttaacctcgggatcgggcaccatgtttatcttgttggtagaaggtgaaccatggacgtctgtggagtatgggaggaaagttcacctactggtctactcaattggatggtacctatatgacctccctcccccacaggatcccagtggcactgcaactgagggacattggatagctaaactagttgcttgtggtggccggcataccctggcaatagtagaatggaaatcaaatgaatcttaaaattgactcaaattctaaataaaacagaaactggaaagtggatgaggctaatgactgatttggaactcaattcaggtgctggaatttcactcgttctgcatgatatgatcttgcctttgtataatcatgcatatggcacaagcataaaattcatcaatatagtaacggggttgggtttgggatggtcttaatttgcatattcatgcaggcgatttttttttttattcgtaggaattgaaccctgttaaaaaaatttacaataattcacgtattttgttc

SEQ ID NO: 16492 - DNA, 390 bp, Glycine max
tggaggatatgaacggtttgaacgtgaaagactaaatggtcattatagtgtcactgcatttgtgattgggaacaccttttcagcaatcccatacttgttgttggtttcaatcattcctggggctatagcctattacctacctggtcttcagaaagactttgagcaccttgtgtacttcatttgcgctctctttgcttgcctgatgctagtagagagccttatgatgatagttgctagcattgtccccaactttctaatgggtatcataaccggggctggaattcaaggaatcatgattataggtggtggattctttaggttaccaaatgatcttcctaggccattttggaaataccctatgttctatgttgcattccatagatatgccta

SEQ ID NO: 16493 - DNA, 456 bp, Glycine max
ttagaagctgcttcttagtttctccaaacccaaactttcaccacaggtacgttttactttaaactattcaatattcatctaatcctctagcttcatccattcattaaatttatcttcgttcagaccatgatctgtgccttaaaccatggaaaattcagttagctgaatctgaatttatgcatgattaacgggaatctaatgttgattgattttgtttgaaattttgttttttttattcttgtggttatggtttgttggattggctttcatttaatgagatgtaaaaactgaaacgtgttcacaaggaagaggcaattcaactacgtgtaaggaggaattaatttggatttggaatctggatgcttctgtttaaaagaaaaaaaaatgttggattttttactgctatgacagagatttgcatgtttaagcaaattaggatgtgtagcattgatgtgg

SEQ ID NO: 16494 - DNA, 563 bp, Glycine max
taaccctctctcaaactccttcagaatccccctttcccagttcccaacttcatttcaaatcaatatgaagaaaattgtgctaaagttggaaatccatgacgacaaaaccaagaaaaatgccatgagggcagtatctggtattttaggggtggagacagtctcagtggacatgaatgacctgaaaatgactataattgggaatgttgatgctgtaatagtagttggcaagcttagaaaatgttgtgatcatgctgatatactatcagttggaccagccaaagaggagaagaaagaggaaccaaagaaagatgagaagaagccagaagacaagaaagatccaaaggaggaatatgctgaacttctgaacgccttttataatcagaccagacagcagcaataccccccttattatcacagaacagtggaagaggatccaactagctgtgttatttgctaagtattggaatatcatatggagtttgaaatgatggataataaaatgagatcaagaaaagatggtggctgcatggagttgaagaagaattatgtttcttttggagttc

SEQ ID NO: 16495 - DNA, 398 bp, Glycine max
  unsure (1)..(398): unsure at all n locations
cccacgcgtnctaaatgatttgataggagagaaaagtaatgatgtggctgcagaaacaaaggcagttgagccagaacctccagtttatgcaaataagatggaggctaaagatgcattcaaagcactcttggagtctgtaaatgttggatctgactggacttgggatcggtccatgcgtttaataattaatgataaaaggtatggtgccttaaaaacacttgttgaaaggaagcaagctttcaatgagtacttaaatcagaggaaaaaacaagaagccgaagaaaagcgtatgaaacagaaaaaagcccgggaggattttaaaaaaatgttagaagaatccacggacttgacttcatccgctagatggagcaaagcagtgtccatatttgaaaatgatg

SEQ ID NO: 16496 - DNA, 410 bp, Glycine max
accgcccggatccggtcgccacgttcctgctcgtctctgttatctctccacaaaccccacaaccagaaacctcaacttctcagttttaaaaccaaatgtgttgtcactgcgttcattctctcttcctcaaaaacactatcttcgtctccgtccctgcaagtgttcctccaccgcccccgtgtccaccaccacctacgagttttctgatggttcttcggaggtggagttaagattaaacataggaggtttggatgtccgaagctccagagatatattggttgatacaaatgatacctctttagctatcagagtgttgcggccaggatctcccatcacactcatagaaactaatcctctttttgatagggttaaatcctccgaaacaatatggtatatagatgatgatcaac

SEQ ID NO: 16497 - DNA, 620 bp, Glycine max
taaaagaaattggaccaaagggggataatattgtagaagttcagaaatggttcattctacctttttgacctattttgttgtcttttctgctgtgtttgaagggtccccggtttaaaactttgtttttgtggcagggagtgtacgtaggagcaaagtttgattggttgcaattgagttgtaattggttgttaagggtagcaaaacccatattaattcttcttccttgtaaactcagcctctcttctcattcgaaatgattgaggctgattggaagattagggtgtattataatacaggttctggagtctcctccttgtgtatgtaataatacaacttatagtgatctagcctaggcacgttacattttatgtgtattgatgcatgtatcacaagggcttgattcaggtgaaaggaagaaaattagcttcttggcatcaaaggaagctagcccatcatcaatctttgtatatgactcacaataaagatggtgattgatgtatcacaccaagcttgcttccttttgttcttaacagtgctggaattcggcttgcaaacatgtaactgatacattatactctagtgtttgagtgatccaccatttttttggcctatttgtacat

SEQ ID NO: 16498 - DNA, 1506 bp, Glycine max
  unsure (1)..(1506): unsure at all n locations
caacaaccaacctcactctgcatcttcagaattcgaggggatgactgcattaattattgacccaagatctgttagagcagaagtgtctggatatcacatccaacggcttggcattcatgttgaaatggtttcagatttaaaacaaggtttgtcaaccataagcaatgggaatgtagttgttaatatggtcctgattgagcaggaggtttgggatagagatttaggcttgtcatctcactttgtcaataacacgaggagaattgatcatggggttcctccaaagctgttcattcttgttaattctagtagttcttttaaagctagcgtaaacttgggtgttcataatcctactgtgatcaccaaacctctgagagcaagtatgcttgctgcctcactacaacgagccatgggtgtccaaaacaagggagctcctcatagagagctccaaagtttgtctcttcgccatcttcttcgtggcaggaaaattctaattgtagacgacaatggtgtgaaccgtgcagtagcagctggtgcattgaaaaagtatggagcagatgtggtttgtgttagcagtggaaaagatgccatctcttccttgaagccaccccatcagtttgatgcctgtttcatggatattcaaatgccagaaatggatggatttgaagctacaaagcgaattagggagatggaagatagtgtgaacagagaagtatctatggatgactttgagaatattacaaactggcatgtacccattttagccatgaccgcagatgtgatacaggctacacacgaggaatgcctaaggtgtggcatggatggatatgtttcaaaaccatttgaagctgaacagctgtatagagaagtctcacggtttttccagtcatcttgaaaagaaaatacggtgccgagttaaaccagaatatttgataatggaagcgtagctgtccgtaatccaggacactcccaagtgggcaaataggttccgaagtctcctgagaggagtgtacataagagccaagtttgattggttgcaattgagttgtaattggttgttaagggtaccaaaacccattaattcgtcttccatgtaaagtcagccgacatgattgaggctgattataagactagggtgtattataatacaggttctgaagtctcatctttgtgtatgtaataatgcaacttatagtaatctagcctaggcgcgttacatttttatgtgtagtgatgcatgtatcacaagggcttgattcaggtgaaagtaacaaaattagcttcttggcatcaaagggtaggaaggaagcaagtacacaccgtcaatctttgtatatgactctcaataaagatggtgattcgatgtatcacagcaagcttgcttccttttgttcttaacagtgctggaattcggcctgcatacatgtaactgatacattatcctgtagtgtgagtgagccaccattttttggccgatttttcaccttccacatttggatttcctttgnc

SEQ ID NO: 16499 - DNA, 378 bp, Glycine max
aatgctatctatctcatctgaaagataaaagcaaatggaacaaagggggataatattgtagaagttcagaaatggttcattctacctttttgacctattttgttgtcttttctgctgtgtttgaagggttcccgttttaaaacattgtttttgtggcagggagtgtacataggacccaagtttgattggttgcaattgagttgtaattggttgttaagggtaccataacccattaattcttcttccctgtagagtccgccgaagtgattgagcctgattagaagactagggtgtattataatacaggttctggagtctcatccttgtgtatgtaataacacaacttatagtaatctagcctaggcgcgttacattttt

SEQ ID NO: 16500 - DNA, 749 bp, Glycine max
  unsure (1)..(749): unsure at all n locations
ggacattgaggaaaaggccaaggaaagtaggaggaggggtttccaattctctgtcaccacagacgatgcagcaactgagtgctgaagtgactggcatgttccaagacgtaggtaagagtgcttgggacaagaaacaatggatgaggaataggaatgctgcagaagatggtcccagctcctcagcaacagccgctgctgatggtgatgatcttgatgacatagatgacgatgacgagttggacatggatgagttagatgaattggaagcaagcttatccaagacatccatcctaataaaggaaacaggagctgaagcttaatcctgagagtttgtcgcaatcttcatgtgatatttttatgcctctgctgaacaatagagcatttgcctgtagccactcgctctccttgcttccaggcagggtttttgaatgaaggctgtggtgataatgatattactatttgctgcatcgcatttggtatgaatagtggctgtttggtataatccactttccttttttgttagatctcttattggaccttagacagacatttttgttgtttgaaataagtagtcttgtgcagactgtacctgatttgtacatgagtttccttatgtcgaaaaggtgtctttagttgttgtcgcgcttgtgattttcttgaaaccatcaaagcataaagtggtatttgttatgttnnnnnnnnnnnnnnnnnnnnnnnnnnnnnnnnnnnnnnnnnnnnnnnnnnnnnnn

SEQ ID NO: 16501 - DNA, 409 bp, Glycine max
ctcgagccgtgtgtcaagagcaaagagccaagagggtgcaattacatgagctgaaagaagtaacgcaaaagcccctttattttttatggttagaacttagaagctgattgtgacaatggatgctcgtggagaagggtcttctacttcttactacaacgttcttggtgttagctcagattctaacgtggatgagattagacgtgcttataggaagctggctatgcaatggcatcctgataagtgcacaaggtcgccttctttgctgggtgaagctaagcgcaaattccagcaaattcaagaagcctattcagtgttgtctgatagtaagaaaagaactatgtatgatgcgggcttgtatgatcctcaagaggaagaggatgagggcttttctgattttgtggaagaaatg

SEQ ID NO: 16502 - DNA, 659 bp, Glycine max
tgcaaagtgcaaaaaccaaacctcgtcaaaggttttagtttgagtttgattcatcgtagtatctaagcatgactctctcccaatcttgccggaaaacaagccttcgaaaacggtgctatctggttgcaaagcagcagaagacgcgcttctacatcttcggacgctgcatagccatgctcctctgctggcacgaccacactgtttccgattagatccttcactcgcgtttcagctatgaaaacattgaaatttcgatttttctccatatgggtacccaccctcggcgtcacgttattgcttttgccacacccgacaacaaagagggatgtaggaaagtggacgattgcaatacaatgaagatcaatcactgcaaatgcaaattgggttgtcttgtgtctcttgaggttgaattgaagaattcttggggcacaaggtggaaaaaattgggtctttgaaactggtggcttatagggttagttgatcagggaaaagataaggtcttgaaattaattggacccgtttgagttgagtacccaaaagtttggttcttgattggcttcgctgccgtgtaattactattgtaattatctgaccttgttttggacaacagttttattgagctgaaacaagtgttctccaaaagtgctgctaaaaaaaaa

SEQ ID NO: 16503 - DNA, 475 bp, Glycine max
gacgacagatggggagagaagagaaggaagaggagagcatggcagagattcagattctaaacctcggaggcccgccaagcttaagtgcgaggaaactgccatgccattcgcattcccaaaactggacttgtttgcagcacaagctcaagtgcaacggcagattcctttgccttttctccgacaacagaaaggaggaacaagctagaaaagcattagaaggtgcactaagtgggaagaaaaatgaatttgacaagtggaacaaggaaattaaaagaaaagaagagctgggaggtggaggtgacactggtggaggtggttggtttgggtggggtaaacggtttggctggtctaatgatgataatttttggcaagaagcaaaacaagctattcttactatactcggtcttggtctagtatatctcctagttgcaaaaggcgatgtgctccttgctgtcatcttcaatccattgctata

SEQ ID NO: 16504 - DNA, 638 bp, Glycine max
tccggtcaatcattggcaaacgtcataaaattgtttttggttgggaggattggatgaccactgaagtaagaaaggcgaaattgaatacatatttatttgacctaaaatcatctttaaggcttggtgatctatctgaagtgggtctagaaaaggaatggaaccatgtggaaattacatacgcaagtctgatagagacctcactggttaaagcaaccggaatccatgtattcagacaggatgatattcgatatgatgatccctatggcaagagaaaattagagcatgatctcaacagttttgaatcacaaccactaattaaaaaccctaagttgttttgcaggttatcgaggtgggttggccctgaaagaattataaatcttctggggaatgctgcagatggagctttatttactaatgccgagaggagatatagccatacttctatggactcctcttgtccgcgatgccccgtgttggaggagacatgtctgcatgctcttcgtgattgtccagaggtggctgcattttggagaagtgtgttacctaagaaattagcaccaaagttttttaatggtgatgatgtgacagtgtggctggaaacaaatttatctttttcagaggcggcttttttttggcca

SEQ ID NO: 16505 - DNA, 379 bp, Glycine max
gaatcccggtcgaccacgcgtacgccacgcctaggccacaccttcgcccacgcctccggaataaagttcaggaaagcttggttggggatctctggagtttcgattagcgaggaatatatcaaggatgttcttttcatgcatgtgttttgtttcttcgtcaatgctgtgaaagcttttgctttctccctccattctgctgactaaactaacatctctggcgttttggcagggatgcacaggaatttaaattgagtgcttcggtagaaatggtctcattagttagtgctatgctatcatctggttttgttgaattgtaattttttgttttggtggtatgttgaacagcaattttactggatatattcaagtctatttgaat

SEQ ID NO: 16506 - DNA, 437 bp, Glycine max
  unsure (1)..(437): unsure at all n locations
cccacgcgtccccagatttcgaccaccaggacatttcaattgtaacacttatatagctatggcgtacttcaagatcaagggatcatcgttcatcaaacgaccacatgcaccttatcaacatcttattttcgtgttcatttctttcacatgtgcataatcgagtgtcacagttagataactgtcaatttcgtcaagccgaataatatttaagaattaaggaattaacattcaagacacacatgagaatctcaattgtcacttcctctatttggttttgaatggtcaagaagtgattacatatggacaccatccttttgtcttcatacctcgctcacatttagttaaattntgttgaccaaaaatcacttacacaattgtcacacttatttcaccgttatcaagtgaacatctaactaatagtttaacaatatttcact

SEQ ID NO: 16507 - DNA, 829 bp, Glycine max
atcagccatcgctgtatggtgattgaactgcagcgattccctttcttgtggaagcgcatggatgaagctctagggaactttttacgagaaggccttgaagccttggagaacatgattgcacacctaatagcaatggagttgaactacataaacacttcccaccataattttattggtggaagcaaagcattagaaattgcctcgcaacagaccaagtcttctatggtttctatacctgtttctcggcagaaggaggttctggaatctgacaagggatcagtctctgaaagaagtgtgaagtctcgggccattcttgcgagacaagctaatggagtagttactgaaccgggtgtccatgctgcatcagatgctgaaaaagttgtaccctctggaaacactggtggatcaagttggggtatctcatcgatttttggtggaggtgatagccgtacgactgtgaaggagaatgtagctagtaaaccacatgctgaaccagttcacagcgtggagcaatcattctctatgatccatttgagagagccacctcctgtcttgaggccatcggagagctattcagagacagaagctattgaaataacagtgacaaagttgcttttgagatcatactacggcattgtcagaaaaaatgttgaggatcttatccccaaagcaattatgcatttcttggtactttactacttcatatccttgtagaattttcaaggtaaacaacaccaagagagagctgcacaacgtcttcattaaaaagctatatagagacaacctgtttgaagaaatgttgcaagaacctgatgagatagctgtgaaa

SEQ ID NO: 16508 - DNA, 595 bp, Glycine max
cggaatcgacccgaccggcccgcgcacgcgtcgaggttttttgggtcttccttgggttttggtacctcggggggaaggcaccatgtgtgtcgggtgtcaaagcagcactgattccgtggcatcttatggaagagctttggcacacatttggtgtgacaatccttgcattgttgacaaacaaacctgttctcccaccgttggtgatgctgatcaccctgcttggaacgctagagggaaccacagagccatttggaaaatgtaatagatggctgagcactaatggtgttggaatagaatggctgagtatgaaatcatgaagctggtctagagctattgagaattgagatagttcatcatcatttggcattaggaatgtcaaatcattgttttgcagtgagttgggctggctgtttagtattttgaggaggatgacaaatccgtagtaggacaagcttctcatgtcggccatggctgcctgcaggtcggcttggttgaatgacattgtggactgagattcaccaatggcaaagagtgtaagaaggatcacaaaccagagagccattagggaaaggatgagaatttgcttgaatgttta

SEQ ID NO: 16509 - DNA, 896 bp, Glycine max
ctttcggttgcagaggagggtttaaattcgatacccaattttaaccataaaaggaataatcttagggaggagtcggcgtgttcacacttccaacccaatctggctgtcaaaacgacgacgttgacagcccggttctctggagatagacagatagatataggtacattcccagtttcaggtctggaattttgattctagataaggacaagggttgctacttgttggtgttgtgctgtagtattggtttgacaagcttttgcgttgagttgagttgggttgagtttagtatctgcaatgagttcgttttctggagccattcaaagacctctggtggcggctgccgcagttgctgttgcttctttctctgctgatctctccgataaattgccatcacgtgattgttctacctccgatttggcacattctactccttgtagcaacatacaagaatcagattcatcctgggtttctcatatttcggactctaaacttgctaacctatcttttgtgacccagattccggtgcctgtgcctaatgttcaattccgggtaccgagtttgggacagaattgtgtttcaaatttgtaccattcttcggttgcttcatcaccacttcttcggaatttgtatcactctgctgacttgcctagagtctcgaggtctgctgcatattcccatggtatctccaattcaacttctgaggctgaggtcatgtataaatggcatttacccgaactgaatgctttggatgattctagttgttcattgacaaagtcaaggacagtggtggtcttgctgggatggttgggagcaaggcagagacacttgaagaagtacgcagaatggtacacttcaaaggggtttcatgtcgttacctttacatttccaatggggga

SEQ ID NO: 16510 - DNA, 302 bp, Glycine max
aataaattcaattcaccttagggtttaaattcgataccccaattcatagagaggggggggcttgaggaggggtcggcgtgttcacacttccaacccaatcgggctgtcaaaacgacgtcgttgacagcccggttctctggaggtagtagatagatatgcccattcccagtttcagatagggacaagggttactacttattggtgttgtgctatagtattgctttgacaagcttttgcgttgagttgaatatctgcaatgagttcgttttctggagccattcaaagacctcttgtagcggctg

SEQ ID NO: 16511 - DNA, 484 bp, Glycine max
ccctcgcgtccgcccacgcgtccgcccacgcgtccggtagctgccactaggccgccacttgcactcatcctcatcctcaacctcaagtctctaagtaattagcacctcaactcaaattaaaacaacatcatcgctagtttgctagctgctaattaacacccattaattcttgttggtcaatactaaacagtactaaacatgggtgtctgctttgcttcgctcgctcgccaccaaacaccctctaaatccattccctacgcaggttcagggcgtgagtccttggggagcaaggatgagaatatggggattactgaaagcactagtagtgttaatggaggaagctgtagtagtcatagcagcaagaacattgtgtttcctagcgtggaagtgcggaacctgaaggagttcagttttgcgaatctgaaagcagccaccaagagtttcaaatcggatgcattgcttggagaaggaggtttcggaaaag

SEQ ID NO: 16512 - DNA, 496 bp, Glycine max
cccttgtcgaccacgcgttcgacccacctgggcatatcccttatggacagcacaagaagcatatcgcactagcaatgatagaatgtccagatcaactgccgaggctattgaccaggcaatgacccatgcggctgacacaaaagtcaaatttgttagtgtaaatctttctgtggaagcacaattacatgattggccagagaggactgaagcagatctatgtggtggatatcggcatcctgcttcaacttacagagatggtatacaagaagtggcaaggtcaggacatgacagtgatattgagtgggtgcaggtagtgttgaaagctgatcctggggttagaatggaagatatcgaggatcaagcaccaagacggcggaaggaacatcgtcgtgttccaagtacagtggcaatagaggaagtaaaggctgcggcagcaaagggagaagcaccccttggactccctttgaaaggtgctggtcaagattcatcagatgca

SEQ ID NO: 16513 - DNA, 853 bp, Glycine max
ataacagttcattcatgtgattctatatttggtgatgctgagactagactcctgatgcacatcataggattactcccttggctctgtcttcaacttagcaaagacatagtgataggtccagcttctccactccaacatcaatatcaaaaggcttgctccgtcgcggccaatgttgcaatctggtgtcgagcaaaatcttttgatgaattagctactgtatttatgatttactctcgtgttgagattaagagtgttgataattttctggcttgtgtttcaccacttttatgcaatgaatggtttccaaaacattcaactttggcttttggacacttattaaggcttctggaaaaaggaccggtggagtatcaacgtgtgattctacttatgctcaaagctctcctccagcacacaccaatggatgctacccagagtccacatatttatgcaattgtatcccaattggtagaaagcactttgtgttgggaggcactaagtgtcttagaagcccttctacaaagttgcagttcattgactggttctcatccatatgaacctgggtcattggagaatggaattggtggaactgaagaaaagttgcttgctccacaaacctcattcaaggcccgcagtggccctctgcagtatggttttggatcaggactaggctcagtttctactcctggacacgttgggtcaactgagtctgggatgtcaccaagagaggttgctctgcagaatactcgcctgataattggtcgggtattggacagaagtgcgttaggtaagagaaaggaccagaaaaagctagtcccttttgtggccaatattggtaacccatgattgtataatt

SEQ ID NO: 16514 - DNA, 626 bp, Glycine max
ataaaattgaccgtgttgagacaagcctcaaagaatctagccgtgacctgtctctcttcaagttcaagtctgggggtgtggtggctctggttctctttgtggtctttgggttgctgaattcgctcttcgaaggcaaggttgttgccaaattgcccttcaaaccttttgggcttattatgaagatgagccatcgagggttgcagggtaatgaccccactgattgttccatggcatttctgtacttcttgtgttccattagcatcagaacaaatttgcagaagttcttgggttttgcaccgccaagaggtgctggtgctggtgctggcctctttccaatgcctgatccaaagaccagttgattgggtttttacaatatttaaactttttatctcagttatttctaggatgaagatgagatggaactgaataacttcagtcatttatatttgatttggttctcttagggagaccagaatgattttaattggtgcaactgatactgatggtgattttcttgttaagttttgattcaagagtaataaagactcttctctatggtactatagaaaaggacttttcttcccttttgcccctctttccctaattccagaattttgttgcttccc

SEQ ID NO: 16515 - DNA, 405 bp, Glycine max
cttattatgaagatgagccatcgagggttgcagggtaatgaccccactgattgttccatggcatttctgtacttcttgtgttccattagcatcagaacaaatttgcagaagttcttgggttttgcaccaccaagaggtgcaagtgctggcctctttccaatgcctgatccaaagaccagttgattgggtttttacaatatttaaactttttatctcagttgtttctaggttgaagatgatatggaactgcaaaacttcagtcatttatatttttgatttggttctcttagggagtccagaatgattttaattggtacaactgatactgaaaacagtcaactccagttttacgatggtgattttcttgttaagttttgatttaagtgcaataaagactcatcgtct

SEQ ID NO: 16516 - DNA, 390 bp, Glycine max
gtcattttgcttcttccaatttttcattttcgcgctagtgcttcgttcttcgccatgagagggggttctccttcttcatcttcctcccgttgttcgcgtttctggtcgtcggcgctccgatcgaagcgcctcgtgtcgccggcggaaaaggccgcccgcgacagctccgacctcggcctctcccgccgcctcggcgttctcgacctcgtactcctcggaattggcgcctccatcggcgccggcatcttcgtcgtcaccggcaccgtcgcccgcgacgccggacctggagtaacaataagttttatacttgcgggagcatcatgtgttataaatgcactctgttatgctgaactagctacccgatttcctgctgttgttggaggagcatat

SEQ ID NO: 16517 - DNA, 469 bp, Glycine max
gaaagatacaaaagcatcatttgaagcttcttgaggaggatggtttaccctttcaaaagggaggtttcagacagcagagatcctattccagccacatcttgccggagtgcaagctatgggtcttcaccaagccatagctctttgtgtggaacattgccattctgcagatttagcatgtgacagtgattggtacaagactatagtcttatcgggggggactgcatgcttacctggtttggctgaaaggatagagaaggaactccatgccttacttcctccctacgtgtccaatggaattagagtcatacctcctccatatggtgctgatactccatggtttggagcaaagattgttggcaatttgagcacctttcctggtcattggtgcgtcacaaaaaagcagttccgtcagaagcctagactcaaccttatatggtgattgttgtgatacaaaatttatttcctcaat

SEQ ID NO: 16518 - DNA, 321 bp, Glycine max
tcgggcccacattcctcaacagcttctcacagaggtcctcccacgcattcaataaggaatgtgcgggtgcaccctgcccaggagcgtcacctcccgtggctgaatacgactgacctccacgatggtcatcttcaaggaaagcgtgttgtcacctgattactcttccaacatactccttgcctatctctttcaaacagtcgtgccccgaatgtacacattctcatgcgcttgattaagcgcagcatttcctgacagacgtagaagctgatgagaatggtacatacggccctagatgatataataaaccagctccttctagct

SEQ ID NO: 16519 - DNA, 456 bp, Glycine max
caggagctcaaaagggtattctctgcggcctgtgaacctcccggagctgggtagagcgggcttctcagggctgatgaaaccaccaagaagtgggtaccaaagctaaggatagatgtgaccttacggtgcgccagcacaagactacagaaactatgatgtcctgttacttggcggcctcgggataggagctacaccttttatcagcattctgaaagatcttctcaacaatattatcaaaatggaggagctggcggattcagtctctgattcaagtagaggttcacaccttagcactgggagtgcagatccaatatctcctaatatgatgtctcctaaacggaggaagacactgtagactacaaacgcttatttttactgggtaacaagagaacaaggttctttcgattggtttaaaggggtcatgaatgaagttgctgaacttgatcaaaagggtgt

SEQ ID NO: 16520 - DNA, 397 bp, Glycine max
tccatcttacacccacgcttccaaactgtttctcacaaacactagttctgtgtaagcccagttgtttttctccgaaattgctaggatgatttggatagcagcttttttagtttctcttgcttttctgtggttatggataagcaacaagaatgcaaagaaattaccacctggtcccatagggttgccaattttgggaagccttcacaagttgggtgcaaatcctcatcgtggcctgcaccaactagcccaaaaatatggacctatcatgcacttacgcttaggttttgtgcccaccatagttatttcttccccccaagctgctgaactgttcctcaagacccatgaccttgtctttgctagttgaccaccccatgaagctataaagtacattgcttgg

SEQ ID NO: 16521 - DNA, 950 bp, Glycine max
  unsure (1)..(950): unsure at all n locations
cccacgcgtncgctgagggcttccaaagctatgcaagataggttgattatcacgaatgtggcagagtgtttgacaatcccaatgtcgctgtgcacttcaatacagatgcagtggaccttgtaagcggcaccaaaggacagatgtctggcattttagtaagaaagattgatactggggaggaatatgtgcttgaggcaataaggctgttttatggcataggccattcgccaaataccgaactgttgaaaggccaagtcgaattagaccactctggctatgtacaagttcaggagggtactgcaaaaacttcagttgaaggtgtatttgctgctggagatgtgcaggaccatgaatggaggcaagctataactgctgctggatctggatgcgttgcagctttatcagttgagagatatcttgtgagcaatgatcttcttatagagttccatcagcccaaaactgaagaggttaagaaggaactaacagacagggatgtacacgagggctttgacattacacttacaaagcataaggggcagtatgctcttcgaaaattgtatcatgacagtccaaggcttatatgcgtattatatacatcaccaacatgtggtccctgtaggactctgaagccaatccttagtaaggtgattgatgaatttgatcagaatgtacattttgttgaaattgatatagaggaagatccagaaatagcagaagcagctggaatatatgggtactccatgtgtgcagtattttaaaaacaaggagatgctcaagactgtcttcaggagtcaaaatgaagagagaatacagagaattcattgaagcaaacaaataaaaaaaattcgagggtgatacccgaattctgtgattcaattttgttttccattttagccagctgaatagcgctgtcaattttgacaactattccttgaactaaacagcaactt

SEQ ID NO: 16522 - DNA, 453 bp, Glycine max
ccgtccggattcccggtcgaccacgcctccgcctgttggaagttgtgtcccatgggaggaaggtgccactgtttggaaggccagtgcttgggatggaaggcctggtgggtgccacaggattaagtccactgatcgattgttcagttactattggcgatcctggactgatatccgcattcgtggagaggtggcacggtgagactagcaccttccaccttccggtaggagagctgacgatcacattggatgatgtgtcgtcacttcttcatttgcccatctctggcgccttgcacagtttccatgctctttctatggaggaggccagatttttgctgatagagttgttggaggtgtctgccgaggaggccagagcggagacatcactcacacgtggggcatatgtacgactaaaatgggttcgagacatttatgagacaagatgtcaggcccggc

SEQ ID NO: 16523 - DNA, 1781 bp, Glycine max
cctaagttggacgctgataatgtaccatctacctccgggacagctagaacttgtgtgtttaaactacgtgacagggtaaaatatagttcatcttctgggggcttgtatcagcttcagacaatttctccaaggggtccggctaatggaagtcgggggaaggttgtcttactttttgatgataatcccttgtcaaaaattggcgtaagatttgataaacccatacctgatggagttgatcttggaggtttgtgtgagggtggtcaaggatttttctgcaatgtcaccgatcttcgattggaaaacagtggcattgaagaacttgacaaattacttattaatacattgtttgaggttgtggttagtgagagcagaaatgcacctttcattttgttcatgaaagatgcagagaagtctatagttggaaatggagatccattttcatttaaaagtaggcttgaaaatcttccggacaatgtggtcgtaataggttcacacactcacactgacagtcgaaaggagaagtcacatcctgggggtttgctttttacaaagttcggaagtaatcagactgctcttcttgatttggctttcccggatagttttggaagattgcatgacaggggaaaggaggccccaaagccaaacaaaaccttaactaagcttttcccaaataaagtgacaattcacatgccacaggatgagacacttctagcatcttggaagcaacaactcgatcgagatgttgagactcttaaaattaaaggaaatttgcacaacttacgcacagttttgagccgatgtggggtggaatgtgaaggacttgagaccttgtgcattaaggatcagacacttagtattgaaaatgcagagaagatagttggttgggctttaagccgccatctcatgcagaatgctgaaactgagcctgatgcaaagcttgtgttgtcctgtgagagcatccagtatgggattgggatcttacatgctatccagaatgagtcgaaaagcctgaagaagtctcttaaggatgttgtaacagaaaacgagtttgaaaagaggcttttggctgatgttattccacctaatgacattggtgttacttttgatgatattggagctcttgaaaatgtcaaggatacattgaaggaattggttatgcttcctttacagaggccagagctattttgcaaagggcaattaaccaagccgtgcaagggtatcctattatttggtccccctggaactggtaaaacaatgcttgcaaaggcaattgctactgaagctggtgctaacttcatcaacatttccatgtcaagtatcacatctaagtggtttggtgagggtgaaaaatatgtgaaagctgttttttctctggcgagtaaaatttcacctagcgttatatttgttgatgaagttgacagcatgttgggtcggagggaaaacccaggagagcatgaggccatgcgaaagatgaaaaatgaattcatggtgaactgggatggcttacgcacaaaggatactgagcgagttcttgtgcttgcagccactaataggccttttgacctagatgaggctgtcattcggaggctgcctcggagattaatggtaaatttgcccgatgctccaaatagagcaaaaatattaaaagttatactggcaaaagaggacttgtcttctgatattaatatggatgcaattgcaagtatgactgatggatattccggaagcgatcctgcggatttgtgtgtaactgctgcacaccggcctattaaagagatatt

SEQ ID NO: 16524 - DNA, 544 bp, Glycine max
acgaccactcgtccgattgattccagctgaccttgtttttctgaaaggcaaggaaatcattctcgtggaaggcctgaagcttgatgatgtacgcagcaggaatatatactggccatagcttacctcttaagttggctggtgctgagggatcacccataaaatgcattctcatcaaataataagtcaacagctagcagtccaaatgccgacacgacatgcagcagtggtttatgcttggaaatgggtcttaattacgagcataaggttgagtttcaatgtagttttcttaaatacgaataagttggaaaaataaatataaagtggtgtcccgtgtccatttggagcaaggtatcataaatgcttagcaaagtgcataaacgctcctacaaatcatttcagaaataaagcagtatggatattggatgatatataaagtactatgtaatatgcagtgaaggtataacaaatgtcaaatagcaattattcttgcgtacttttaaatacactatatggatggatgtttggaattattattttttaaaaa

SEQ ID NO: 16525 - DNA, 433 bp, Glycine max
ctgatgcttaatttgaagtctcatgaacctgcttctctcgttggtgtccttcttaaatatggcttgagtaaatcccagacacacccctgttaaattgtgattttcacacccccttttttcaccgatcggcttttgtctacccgttataaaaagttatagtgatctgattgtgttattgatatttcatacagaaaacaataaacttttttgtgcgattttaattgatttccatttgggtttattcaattatgattgtcttttaggtggtatgattttctttcttcagtgctgttcattgtttctgtgatccccggaagaacttacggatcgaaaatggcttcaagggtgtctcccaatctcaaatgttggcagttcagaaccccttattattgtgattcatggaagacaactcgtgcagttactgtctatatac

SEQ ID NO: 16526 - DNA, 632 bp, Glycine max
gaacagttcagtttgttgactggtgccctactggtttcaagtgtggtatcaactaccagcctccaacagtggtaccagcaggtgatctggccaaggtgcagcgagcggtttgtatgataagcaacaacacagctgttgctgaggttttctcacgcattgattacaagtttgacctcatgtatgctaagagggcatttgtccactggtatgtgggtgaaggaatggaagaaggtgaattctctgaagcccgggaggatcttgctgcccttgaaaaggactacgaagaggttggagcagaaggcgaagaagaagaagaagaacccgatgattactcaaagtagtcaatcattcatcaccagctaccttacctacatctaccttctttcctctgtctaatgtctatccttgtccattgaattttaagcatctttctgttgtgtgctagctctgttagtgttgggtgagataattgctttcctcatgagaagcagtggtttatttgtcagtttgaatcacttttaagtttcagtgaaagagcaaaataaaggatagcgtaggagtgctgcagtttccattacttaaaagaaatcagatgtttattttatcttttgcaataatatgtttaaaatata

SEQ ID NO: 16527 - DNA, 495 bp, Glycine max
cccacgcgttcgcggaaaccaatttatgggatacggctatgatcaacgacaaggagttcattatcagcaacaaggagttccatatattgaacggcaaatgtatggtatgtctgttagagacgatagtagtttgagaaacccttaccaagcttctaccacatcgtatgctccatctgggaagccttccaagccagaggataagttatttggagaccttgttgacatggcaaaagtgaagccaaaacccactccaggccgagctggtagcatgtaaaaactatattatcgggtttgcacatttcagttctattgctaacttttgtccccgattttccttgatttttatttttatgtttttatattatatataatttttttggttcttggttcatattgtttgcttgtctgggaattagcatttgattatgtacattcgttctagagaaaacattgagaagtaggggaaaaagggctaaaccattgggttggattgta

SEQ ID NO: 16528 - DNA, 978 bp, Glycine max
gaaggagatgacgaattgacgataggccaaagttgacgacatgtgtcatgtccatggccttatactatgttcaaatgatcctcttgttcccttgccctccatttttaccttcaacaattttctggttatctcccttacactttgcaacctctgattgaaccagacgttatctttcttcatcatcgcctcatacacacatacataccctttagaaagttctttgactcttcctagacatcgccactgcacttttgcgccacttcatagaactcaacaagctaggatttcctgttctgttgccccaaatgaagtgcaggtgccagctgtgaaaacctcggatcccaagagtaagcctgagtgctatggtgtcttctgccttacctatgatttgagggctgaagaagagacaagatcctggaagaaattaattaacattgcagtctcaggtgctgctggaatgattgcaaatcatctacttttcaagcttgcatctggtgaagtttttggcccagatcaacctattgctctcaaattattgggatcagaaaggtcaatccaagctcttgaaggtgttgcaatggaattggaggactctttgtttcctttgttgagggaggttagtattggtatcgatccttatgaagtgttccaagatgcagaatgggctttgctaataggtgcaaagcctcgaggacctggaatggaacgagcagacttgttagacataaatgggcagatttatgcagcgcagggaagagctttaaatgccgttgcatcccgcaatgtcaaagttatagtagtgggaaacccttgcaatacaaatgcattaatatgcttgaagaatgctcctaacattcctgcaaaaaattttcatgctttaactcgtttagatgagaacagagcaaaatgtcagctagccctcaaggcaggtgtcttctatgataaagtgtcaaatgtgacaatatggggcaaccactc

SEQ ID NO: 16529 - DNA, 394 bp, Glycine max
ccgatctacaaagtcagatgatgctcatggttcgcaattagtcatgcatcatcggctcatagacatatacataccctttagaaagttattcatactcttccagaagcagaaaaaagtgcctttttttttttacttcttttcttgaagactttctgtgctgtgctgccatgggtgtgacacagttgaaccccacttgctcaaaacctcgtcttcactcatctcagctctcttttctatcaaggactcttcctagacatcgccactgcacttttgcgccacttcatagaactcaacaagctaggatttcctgttctgttgcaccaaatgaagtgcaggtgccaactgtgaaaacccaggatcccaagagtaagcctgagtgctatggtgtcttctg

SEQ ID NO: 16530 - DNA, 546 bp, Glycine max
gaagaattgacgataggccaaagttgacgacatgtgtcatgtcgatggccttatactatgttcaaatgatcctcttgttcccttgccctccatttttaccttcaacaattttctggttatctcccttacactttgcaacctctgattgaaccaaacgttgtctttcttcatcatcgtctcatacacacatacataccctttagaaagttcttcatactcttccagaagcagaaaaaagtgcctttctttttttacttctttacttgaagctttctgtgttgtgctgccatggccgtgacacagttcaaccccacttgctcaaaaactcatcttcactcatctcagctcccttttctatcgaggactcttcctagacatcgccactgcactattgcgccacttctgctccgccattatcatgggcaaggtcaagatcggaatcaacggatttggaagaattggccgtttggtagccagagtggctctgcagagagacgatgttgaactcgttgccgttaacgaccctttcatcaccaccgattacat

SEQ ID NO: 16531 - DNA, 257 bp, Glycine max
cttcaattttctggttatcacccttacactttgcaatctctgaaccagacgttatctttgttcatcatcgcctcatatacacatacataccctttagaaagttctttgtaagtgttgcttttactcatacagaagcagaaaaaagtgctatttttttacttcttttcttgagactttctgtgctgtgctgccatgggtgtgacacagttgaaccccacttgctcaaaacctcgtcttcactcatctcagctctcttt

SEQ ID NO: 16532 - DNA, 1288 bp, Glycine max
  unsure (1)..(1288): unsure at all n locations
atttcatctcctcttcgtcaggatctgacccgaacccgaagcatggtatccgcttccgaaccagatcgatgctcgcgaacttcgcggactccgagccgcctctccagctcccgtagatcccaatcccacttttcttcgtggtatccaaggaaacgagccaaactgcttctctcgcttattgcttttctcgctttcgttttctttcacaattggtttatgcttctccgtttacaacatcaacccgatcctatacccaaacctacacttcgttcctcctccgtttcactttctcttcagcggaaatggaacaagccttcaaataagaaaaaatcacaaaaggggaattatgcaaggatgttggcattggctgcacatgccttggcagagaataaacgcgaacctaaagatttgtggcaagaacccttcgttcctgcttcttcttggagaccttgtgctgatcagcggaattgggaacccaatggtatgtgtggttgaaatttaacaatgattcatattgtgtatgtttataagtgtgcaactacaaaaggaaaataaaagttcaagctgatactcatagcctgctctcttgtactgtactccaatagagggaaaaaatggatacattttggttactgcaaatggtgggatcaatcaacaacgagtagctgtttgtaatgctgtcgttgtggctcgtttactcaattcaactttagttatccccaaatttatgtacagtagtgtatggagagatgtgagtcaattcagcgatctctatcaggaggagcattttattaactacgtgactcctgatatgcggatagtgagggagcttccaaaggagctacaatctttggacttggaggcaattagtagtggcgtgacagatgttgacatggagaaggaggccaagccaagtttttacttaaaacacatcttacctattatacttaaaaatcaagttgttcactttgttggatttggtaatcgcctggcttgtgatccgatagcatttgagctgcagccgtactatgctcttcctaattggggaacttcatatagagacttcgttgcagatgtaattttcatgccctgcaatntgttcccagaatacaagaaaccggtgctttgcttcttaaaagattgcgtgaacattcaagtcttgttggaccattggatcgttatcttgttggtccatttgccgaattaatgaaagagaaaagtgaaagtaatgccaagaaagcatccaagtatctagctttgcatctcagatttgaaattgacatgatag

SEQ ID NO: 16533 - DNA, 756 bp, Glycine max
ggcggggctgcggtgcggcgcgtggcgcgtggcgggggaggcgaacaacctgggcggctggaggacgattccggaggaatgcacggagtacgtgaaggagtacatgaccgggaaggggtacgcggtcgacctcgaaatggtctccaaagaggcggaggagttcgcgaggagtgtgcctctcggcggcgacgggaaggacgcgtggattttcgacatcgacgagactctcctctccaatctcccctattatgccgcacacggatacgggcttgaggtctttgaccacgagaagtttaacaattgggtggagaagggtgtagctccagccattgaacccagtttaaagctctatgaagatgttttgaatctgggattcaaggttattctactgcctggacggagtgaaaggcccaggagtgtccctgttgataatttgatcaatgctgggtttaaggactgggcccagctcatattaaggtaatttctaaaacatatttgctaattttagaatagaaaatgaagtttgtatattaaataaatgctataagattggaatatatgtgcatgttctgtttggcatgactgccccaatttaatgcttttgtaatctggataaattttgttattttgtgtttaaaccacccaaatccattcaaatggcattgtgcgttgtacttgttgctgaaagatttggcatgtttacatgaggaataatctgaaatgataaggttatagccccccctcctttatggttcc

SEQ ID NO: 16534 - DNA, 447 bp, Glycine max
  unsure (1)..(447): unsure at all n locations
ttanagctctatgaagatgttttgaatctgggattcaaggttattttactgactggacggagtgaaaggcacaggagtgtcactgttgataatttgatcaatgctgggtttaaggactgggaccagctcatactaagaaccttcagatgatcaagggaaaccagctgtgctctacaaatcagagaagaggggtgagatggagaaagatggatacaggattcttggaaattctggtgaccagtggagcgatttattaggttcttcagtatctgttcggtccttcaagcttccaaatcccgtgtattacattccttagtaaatgccccattcatttgcatataattgctgtttgaattgtacataacggtagtggctcaattcgtatactgaatatcatattgccaatgattcataaactgaatatcactgaaattctaataaaaaaaa

SEQ ID NO: 16535 - DNA, 314 bp, Glycine max
cccacgcgttcgcccacgcgtccccccacgcgtccgcccacgcgtccgcgatttattaggtgcttcaatatctggtcgggccttcaaccttccaaatcccgtgtattacattccttagtaatgccccattcatttgcatataattgttgtttgaatttgtacataagggtagtggctcaattcatatactgaatatcatattgccaatgattcataaactgaatatcactgaaattctaatacatactgactaattaaacttgtgttaaaacttatgtaacatttgccagatcttaacacgattgtgcaaaata

SEQ ID NO: 16536 - DNA, 451 bp, Glycine max
ggctggactgcccataagtacccggtggtctcctgagataaagaaggaaatcaagcaaagcaggattcgagtgaccggaaaggttgcagaattgataaacagtgcaccagacgatattcgacctaaagtttttgttagtgcaacagctgttggttattatggcaccagtgagacacaagtctttgatgaacaaagtccatcaggaaaggattacttggctgaggtttgcagggaatgggaatccacagccctaaaggtaaacggaggtgttagagtggctctaattcgcattggtgttgttcttggtaaagatggtggagcattagctaaaatgatacctatgttcaacttgtttgctggtggacctctaggctctggaacacaatggttctcctggattcatttggaagacattgtcaatttaatatatgaaacgctgtcaaatccatct

SEQ ID NO: 16537 - DNA, 496 bp, Glycine max
  unsure (1)..(496): unsure at all n locations
gcgggcgactgatgctttaagacaacatatgtgtttcccaaccagtctctgtattcttcgactcttttgtaattgtggctgtggtatccctttctctccaacctctgaatttgaaaatggtgaaaggaagtgagagcggtgcagttcccgaaccggttatggattcagtcaacaccactctctccaaccttcaacaactccgaacgcactttaacgagtttttgtctctctccgaccctcaaaccctctcccaaatgccccctcttcaacgggctcattccctcttcatcctcgccaaagtcacatctacccttcttgcattgaacctaaggtgtaccggggtccacccagatgatcatcccatcaaatcagagcttgatagggtaagcttgtacgaggacaaactggaacgtttgcttgatttgagtaaagctccattgcgaccttctactaccttgaattatcangcagctacacgcttcatagaacactctct

SEQ ID NO: 16538 - DNA, 263 bp, Glycine max
cctatcaagctctgatttgatgggatgatcatctgggtggaccccggtacaccttaggttcaatgcaagaagggtagatgtgactttggcgaggaggaagagggaatgagcccgttgaagagggggcatttgggagagggtttgagggtcggagagagacaaaaactcgttaaagtgcgttcggagttcccgaaccggttatggattcagtcaacaccactctctccaaccttcaacaactccgaacgcactttaacgagtgg

SEQ ID NO: 16539 - DNA, 728 bp, Glycine max
catatgcaaagctacttaatcagggacgtagcaaccttcagcccttttgtccaccaaaacctgatgacattgcaaccatttgctacacaagtggtacaactggaaccccaaaaggtgctatcttgacccatggaaactttattgcaagtgttgctgggagtactatggacgagaaattcggtccttctgatgtttatatatcctatctccctttggcacacatttatgagcgagcaaaccaggtcatgacagtacattttggcattgcagtgggattctaccagggggatagtatgaaattaatggatgacatagctgctctaagacctactgtcttttgtagtgttcctcggctatataacagaatatatgctggtattactaatgctgttaaaacatctggtggtctgaaggagagactatttaatgctgcctacaatgctaaaaggcaggctttattgcatgggaagaacccatctccaatgtgggacagattagttttcaacaagataaaagaaaagcttggaggacgagttcggtttatggcatcaggtgcctcacctttatcacctgatatcatggaatttttaaagatttgctttggttgtcgagtgactgaaggatacggaatgacagagagtacttgtgttataagctgcatcgatgagggtgacaaacttggtggtcatgtaggctctcctaatctagcctgtgagataaaactagtg

SEQ ID NO: 16540 - DNA, 467 bp, Glycine max
  unsure (1)..(467): unsure at all n locations
gacccactcgtncgnattatgtggggagtcatgaatctactgaaatgcaacgcctatgtactttgtgatccaagcgtgtttcaaattttaggggatgccatttaacaggatgttgcaaaactccacctatttcaagtgagtccattgcatttataacgcagagttcaccaaggtccaatggaggtaacttaaagtttccatggcaaggttcatatcagcaatatcctctattaactggtgtggaagggttgtagatgattctgatggagatgaaagtctttgttaggcttcctatttattagtgctatagctttaatctttagcctattcttgtggattcagatatttgttgtttctttctctgttggtaattttctgtttttcatgtttttttaaggtgtatcatttgtatagacaacttttatcagaaaactagaggtatatttttttaccttaaatttatatat

SEQ ID NO: 16541 - DNA, 698 bp, Glycine max
aaccgattcttgctaaagacaaagcacaggatgtttgggaagacaagttttcccccaatgcagcaaattctctaagaaatttatcaggaagtcatgatttctctactatccgatcgacctattgtgaccttgaggatgactatgagaaagagatccaaaaggaactcagatggctcagagccaagtaccaaatggagttaagggatcacaaggatcgacagtttgggcaatgctcgcatagttgtaacagtgagcacagaacagaaaatggctttttgtcaccttcactgacagaaacattaaaaggaggcaacaatgggactcggttgaaacccattactaccaagtggaattgtgattccagtagccaccctcatgtccatgaaagcagccccaattcggacacccaaagggcccaaaattgtgaggcgattgaatcccctggagaaggtatggttactgcaaagagtttttatacaggctcattgctgccgcactctttgcacaggacagtttctctcccagttgatgctgttgatatataattttgtgagacaactcattggatatcttttgtagaattatatatactccccatagaggctatctgatttctaaatccctccttatttttcataggattttcaatttacccacatggaaatcggtagccactagctataatccccccaccacca

SEQ ID NO: 16542 - DNA, 718 bp, Glycine max
ctaccttataagggtgatgataagccagggttcttgaagaagcttgcattgaagtttaaggagccagagaataccacattgtttattcttgacaaatttgatgggaactctgaactggttgcagagttggttaccgttaatgggtttaaagcagcttatgcgattaaggatggtgcagaaggaccgcgaggatggaagagtagtggtcttccttggatagcaccacggaaaacattgagtttggacaatctgacagatgctatatctgaagcaataggagataccactgatggcgtggcagttactcttggggttgctgcagctgctgctggacttagtctattagctttttctgagatagaatcaatcctccaggttgttggatcagctgcgctcattcagtttgcaagcaagaagcttttgtttgctgaggaccgaaagcaaaccgtgaaacaacttgatgagttcttgaacaccaaggttgcccctaaagaacttgttgatgaaataaaggatattggaaaggctcttctaccatcctctaccaataataaggctcttcctgctccggcagagaaaagttcagagcttgctacagctgatagcactgtacagagtgcagtagctactcccgagtccaaagctgaagcagtagcaactcccgagcccaaagtggatgcagtagctcctgaagtaaactctgtgcccaaactgaagt

SEQ ID NO: 16543 - DNA, 446 bp, Glycine max
accacgcgtacgcagagataccgctgaagttatacccctccacggctatatatggagactgagccgctatacttaagatcttggcgtcacacacactcgaatcaactctccatggaccaagatcatctacaccaatccaagctagctgccatacactatgacatgctgatgaccgagagcaaaccgtgaatcaacttgatgagttcttgaacaccaacgttgcccccaaagaacttgctgatgaaataaaggatattggaaaggctcttctaccatccctctaccgataataaggctctccctgctcctgcagagaaaagttcagagcttgctacagctgatagcactgtacagagtgcagtagctactcccgagcccaaagcggatgcagtagctcctgaagtaaactcagtgcccaaaactgaagtgaaggcagaagaatcatt

SEQ ID NO: 16544 - DNA, 729 bp, Glycine max
cccacgcgtccgatttgatcctgatacatgtgaatcacaagctaagtttggtcgttctggtatccctagttcatcctctatcctgaatttgacgtgcaactcatgcaatgtgggaacttctgaatgtctggagcaatcagggtcaactgccaatgaaggagatgaaggcaccatcttttcgaaccgagagcctgatattattggaactcctgctaaaggaaaaaaattgcctcaggaagagctttctctacaacagaaattatcagttgcagatgtgacttgtacgatgtgcaagcaactgctctttcatcctgtagttcttaattgtggtcatgtgtactgtcaaacttgtgtcatcaacatagatgacgagatgctcagatgtaaaggttgtcaaagtccacatcctagaggattaccaaaagtgtgtttggagttggatcactttttggaggaacaatttcctgaagaatatggacagcggagagatgccattgaactaaagcaaatcaaagtcaaacccgacaccccttcttcttgttcattggataatggtaaaagagtagaaaatatagattggtggtctgatcctgacccaaaagttcacattggagttggttgcgatttttgcgggatgtttccaataattggagatagatatagatgcattgactgtaaggagaagatgggctttgatctttgtggtgattgctacgcaagccgctccaa

SEQ ID NO: 16545 - DNA, 314 bp, Glycine max
gcaaaggatggcctcaaaccatcaaccttggcgttacgccagggagaaacagaggacaataccaagggaattagaacaagctctggcgtgtttgttagtgcttctgaggataaaccaaggactttagatgtcattgaggagaaaattgctagagcaacaatgattcccagaagtcacggagaggcgtttaatatcctacgctatgaggtcgatcaaagatatgattctcattatgatgctttcaatcctgctgaatatggtccacataatagccaaaggatggcgatatgtttgctgtatttaactgatgttga

SEQ ID NO: 16546 - DNA, 745 bp, Glycine max
caaacccctaagcaactgctttatgattgtgctaggatactttcagaaggaaatgaacaggaagccacatctatgataaacaagctccggcaaatggtctcaattcagggtgatccttctcagagaattgcagcttacatggtggaaggacttgcagctcgtgtcgctacatccggaaaatgcatctatcaagcattgagatgcaaggaacctccttctaacgatcgcttagcagcaatgcaaatactatttgaggtctgcccgtgttttaaatttggatacatcgcggcaaatggtgccattgcttgaccctgttagagatgaaaagaaggttcacataatagactttgacatcagccaaggaactcaatacataactctaatacaaacacttgcttcaatgccaggtaggccacctcgtgtgagattaaccggggtggacgatcctgagtctgtgcagcgttccatcggtggcataaacatcataggacaaagacttgaaaagctggcagaggaactcggattgccatttgagtttcgagctgtggcgtcaaggacgtcaattgtctcaccatcaatgctcaactgtcgtccaggggaagcacttgtggtgaactttgcattccagcttcaccacatgcgcgatgaaactgtatcgaccgtgaacgagagagaccaacttcttcgcaatgttaagagcttgaatcaaaattgggacagttgtggagcaggacatgaacacaac

SEQ ID NO: 16547 - DNA, 1008 bp, Glycine max
gatccaacaaatggcagctgggatgtttagggtaatttctggagtgtgcaggacaatgattatagctaacactggtggagccctcatgctccttcttgtttttctacttggaggcttcatccttccaaaacgtgaaattcctgattggtgggtgtgggcttactgggtgtcaccattgacatacggctttaatgccttgtctgtgaatgaaatgttagctccaaggtggatgcatccacagacttcttctgataaaaataccacattgggtctatcagtactaaggaactttgatgtttatgctaaaaaagattggtactggattggagctgctgctcttcttggtttcacagttctgtacaacgttctcttcacccttgcgcttatgtaccttaaccctcttggaaagaaacaagcaattatttctgaggaagatgcaagtgaaatggagtctggaggagacaccaatgaagaacccagacttgtaaggcccccatcaaacagagaatcaatgcttcgatcattatctactgctgatggaaacaattcaagagaagtagcaatgcagcgaatgggtagccaagctaccagtggattaagaaaagttgactcggcaaacgattcagctactggagttgcccccaaaaaaggaatgattctacctttccaaccacttgcaatgtcttttgacactgttaattactacgtcgacatgcctgcagaaatgagagatcaaggagtgacagaagataggctacaactgcttaggggagtaactagctcctttaggcctggagtcctaactgcactaatgggagttagtggagctgggaagacaactttaatggatgttttagcaggaagaaagactggtggctacattgaaggagatattagaatctcggggttccctaagaaccaagaaacctttgcaagagtctctggttactgtgaacaaactgatattcattcaccccaagttactattagagaatctttgctttactc

SEQ ID NO: 16548 - DNA, 604 bp, Glycine max
ctcgagccgttcagttttcaccccctattaataacaaaccattacccccacccctcacaatcttcatcttcagctcagctactcctatttacacccctcaaatctgctttcaactttcacactcacaccaccaccatgacccttcctcaatcatttggctgtggacttgtgcaagcacccttggtgacaagctctggtcttcttactaaagtttggagtgttatctcttctcgtgatgaagacatagtttcatactcaggaaataatggactgtccttgaaagtttctgaggattcgggtttgacggttgttgcgtttgaggtcaacccggattttgatcttcaatctacagttgtttctttctctgatcccaaggagaataatttgaaccgctttgagtttctttgtaccaagaaacatccagatttctctgtcaacaagtctgtagttgatcttttttctaaaaatcttccgaggcttgatgagttgaagtccaagattgatagctcccctcgattgattgttactggacgttgtcttggaagaccaattgcttttcttttcactttatcggtattaggtaaccagaatttctcttagaaaa

SEQ ID NO: 16549 - DNA, 283 bp, Glycine max
caaaagtgtggtgattggggagagttcttcagctgcagaggctcattcagcgtgactaaaaccattgcagctgggagcaggctgattacttttcttggggatactataaatagaagtcaaatttcctgatgattaattattgtagaaaaacaattataacgtttcagctgcatgaacctgtgttttatgctcttctttttgtatttttatgtaatatgattcattattcatcaatagttgtatgttcatgtcttcttaaacgctatttttttgaaaataacaa

SEQ ID NO: 16550 - DNA, 1435 bp, Glycine max
attcgtccggcaacttttgacagcacaatacatttttataacatgaagtcttccttgactcaaccacagatgttggtagtgtcagatctcgatgatatatttattccactgccagatgatcttctcgttagcttgtctagcctctagaaatgtggtagaaaccttcctagatagtttgccaaccatgttccaggacaatgtaaacttggaatcagcttttggtcctgctcttaaggctgcatttatggttatgagtcaacttggagggaaattgttaatatttcaaaacacacttccatctcttggtgttggccgcttgaagttacgtggagatgattctcgtgtttacgggacagacaaagagcatggattgagactgcctgaagatccattctataaacaaatggctgctgagttttccaagtaccaaatctcaacaaatgtgtatgcattcagtgataagtacactgacatagcctccttaggaactctggcaaagtatactgctggtcaagtgtattactacccagctttccaatcagccattcatggggagaaattgagacatgaattgaggagagaccttaccagagaaactgcatgggaagctgtaatgcgcattagatgtgcaaaaggtgttcgcttcacaacttatcatggaaacttcatgctgaggtccaccgatttgttagcacttcctgctgtagattgtgataaagcctttgccatgcagttatcacttgaagagacattgttgacaactcagacaatgtatttgcaagtagcattgctatatactgcatcttgtggtgaaaggcgaataagagtacacacaatggcagttccagtagttacagagttagcagatatctatcggctggctgatactggtgcaattgtatcactgttaagtaggctagcaattgagaaaacattgtcccaaaaactggaagatgcacggagtgctgttcaactaagagttgtaaaagccctcagggaatatcgaaatctttatgctgtgcaacatcgcttggcaaacagaatgatatatcctgagtctttaaagttcttaatgttgtatggattagccctttgtagatcaacagctttacgtggagggtatggtgatgttccactggatgaacgatgtgcagcaggacacataatgatgactgtatcaataagaagactgttgaaacttctctatcctagcttgattcgactcgatgaatatcttctgaaggcatctgtacaggctaatgcttaaaaaatggttaaaaaaaggtaccttttactggggaaaacctaaaaccctaaaggccttaaatttaataataatgcatccgggtcaatatatgggttggttaggtgaattcaccctgtatagcacagaaattactttgggcaaactttgctgaaaaatatcaaagactac

SEQ ID NO: 16551 - DNA, 289 bp, Glycine max
agatatggagcttctatttccatttgttgactcggctttacctttagcatatggtgtcttgggggttcttctgtttcatgaggttggacactttctagcagcatttcctaaacaagtaaaattaagcatacctttcttcattccaaacatcacacttggcagctttggtgctattacacagtttaaatccatccttccagatagaagtacacaagtagacatatcacttgcaggtccctttgctggtgctgtattatcattttcgatgtttgctgttggtcttcttctc

SEQ ID NO: 16552 - DNA, 596 bp, Glycine max
tcgcattattggtacagcacaggtcgaacttcctcgttgtgttctgttctgtttcgtgtgtacagctctttctgttctctctttcttctccaagcgattcattcaattttcaattcgattcgatcgcattcttcttctacattctcgattccttcctttctcaacaactattatattatgcatcttcgtctccctctctcaccaaccacctagggtttctctccgacgttaggttttttttttcgtttctcgccgggattttgggggcagacttaatctccggcagctatggcctccaacttgcagatgagccctcaggtggagcagatccacggtgaaattcgcgacaactttcgagccctcgcaaatggctttcagaagctggataagattaaagatgccaatagacaaagtaatcagctggaagaactcacggacaagatgagggagtgcaaaaggttgataaaggagtttgatcgtgagattaaagacgaagagggaagaaatcccccagaagtgaataagcagctcaatgatgaacagcaatcaatgattaaggagctaaactcatatgtggcattgagaaaacgtacatg

SEQ ID NO: 16553 - DNA, 470 bp, Glycine max
catcattgtattgtacagcacagccccaacttcttccttgtgttctgttctgttctgttctctctttctctttctcttctttttttccacgcgattctttcaattttcaattttgattcaatcacattcttcttttacattctcgattccttccttccttacttaaaaattcttatattatgcatcatttctcaccaaccacctagggtttctctccgacgttaggtttttttttctcgccgggattttgggggcagacttaatctccggcagctatggcctccaacttgcagatgagtcctcaggtggagcagatccacggtgaaatccgcgacaactttcgagccctcgcaaatggcttccagaagctggataagattaaagatgccaatagacaaagtaatcagctggaagaactcacggacaagatgagggagtgcaaaaggttgataaaggagtatgatcgtgag

SEQ ID NO: 16554 - DNA, 393 bp, Glycine max
gacccacgctccgcgatggaagaagatgatattaatgacaatacccctaccgattaataagggtccgaatgtctttaagggttaaataaggatttgaagctgttctccaagctatacatcccaagaaggaaagctgacaattttccttccttaccatagaaggatgaggaatcctgtttgattagggatgttatgtgcatgatagtgcatgtttgaaaatcacgtggaaaagttcgaagtacttttgccacaagattaggacccttaattttgcttttattcgtcggatctgcattagaatgagtgtcataacaatttcaactgcaaaccaaacgtgctcataaaccgtataaacatgtttatatatatatattttggaattttgctatccta

SEQ ID NO: 16555 - DNA, 392 bp, Glycine max
ggaaactctcaaagtcatgattgagataaagaaaaaaggaattaatgatagggtatcaccaaatgcagcccctcaaatcagactcaccgaggaaaaaggaaactaaaagtgggaacaaagaaacaaaacaagtaaataaaataaatgatactacaccgcacttcctatcttctcatgattttaactgataatatgaaaaggaagaaagctaatgcacaacttttatgatccttacttgcactgaacacctgcttcagcagctcgacggggcgtgcttttgcgcctgcttccattatgcctaaaaccattggtctttgtcaactcatcagtggtgctttgatccattgccaatgctattttctttctcaactgagtctaatttctctttacct

SEQ ID NO: 16556 - DNA, 316 bp, Glycine max
gaaagaatcgaattgttgttatggggttgtataccctgataaatacaattcaaaagatgatcatatgtgaaggagggaaaaaataatagtaatcggtaaggctctccaaagatgtcagtaaagcaatcaactgtgacattggcaagaaatcaaggattttttgactttatacaaaagataaaggcagaaatagttggccaaggatcaagaacttccactgaaaccttgattgttcttcatctttctcatttccatttcccttgtggtttggcggctctgtgcttcactacttgagcctgatgggtttaaaccatac

SEQ ID NO: 16557 - DNA, 266 bp, Glycine max
gaaggcggggaggaccccgcgtccgcgaacttgcccattatgcacgtcattgctaaaaccagctgatctgcggacctttggagagtggatcaacaagtctgttttttcagttgttttaagctcattttctttggcttgttgggtcatgtttttgagtcaaaatcttcctggaaaatgtcacctctggtttggtaaaattttccattaatgaaattgagatcgataaaagaatgaagatatataatatatatatatatatggccaaa

SEQ ID NO: 16558 - DNA, 479 bp, Glycine max
caccacttgcttggagtggttgtggaaactccatctccaactaataagatgtacattgtttttgtgattaaacctgacatgccatcctcagtggataatgcctcgagtagcggtaatatgcagggtaaaagtggtgcattcgaccaaggttattttgtaatgccgaaatcaagacgtgttgttgtagatgaatatagtacatctgtttctgcccgcaaagggaaaggtgtcatcaccatcagattgccctattctggctctgcctgtggaatgggctatgaagtccgagaagttgacagtaaagagtttctgtgcatatgcagtagcaaaattaaaattgaccgagttgggcttcttgaagatattagcagttctgtttattcgaagactgttcagctgctcatggatttgaaatcagatggaaataagtatcctccagctttggatcctgtgaaagatctaaagttgagagatgtgaa

SEQ ID NO: 16559 - DNA, 536 bp, Glycine max
cctagctagagaccggagagaatccaaattgcatttcatcaggcgccatccttttcctgctgagagtgagaggcgttaatctgaatgggttacatccaccatggaagaaccggtctcaggcacttattcagattcagaaccgccaccggcgtggtaaaaaactccgcgagatcgcaattacgcactgcatttctctcccattcttcccctatcctcggcaacaacgtggtttttttctccacaggcgacaaattcctgaacgaaattaccgcagaggtggaacgcgacaggcgcagggagcgaaacgagcgtttgcgcctcggcctcgacaccgccgacatcgacacggagtcggagcaggactacatgggcgtggggcccctcatcgcgaagctcgagaaggagatgctcaaggaatcccccgagctgaaccgctacgaggagcccaccgactccgacgacgactccgacgaggaaaccaaggacgaggcggacaagaagatgagtgacttcgagaagaaaagagacaaacacac

SEQ ID NO: 16560 - DNA, 1232 bp, Glycine max
  unsure (1)..(1232): unsure at all n locations
tactttcttcagtgagtcacccgaatttagttcgcctcttaggttgctgcatagagaagggagagcgtatccttgtttatgagtttatgcaaaagggaacactttctcagcacttgcaaagagagaggagtaaaggactaccgtggacaataagacttaccattgctaccgaaactgctaatgctatagcatatctccattctgcaattcatcccccaatttaccacagagacataaaatctactaatatactcttggattatggcttcaaatctaaaatagccgattttgggctttctaggcttgcattgacagaaacatctcatatctcaaccgccccacaagggactccaggttatgtcgatccccaataccaccagaactttcagctttctgataaaagtgatgtctacagttttggagtggttttggtagagataataactgccatgaaagtggttgattttgctcgacctcgaagtgagattaatttagctgcacttgctgttgataggattaggagaggtgctgtagatgagatcatagaccccttccttgagccacatagggatgcttggacgctctattctattaacaaggtggctgagcttgcatttagatgccttgcttttcatagtgacatgaggcctaccatgattgaagtggctgaggagctagatcttatcaggcgcagtgggtgggcgaccatggaggaaaccatatgcatggcttcttcggttgggtccgtgtgttcatcgcctcgaaatggaagtgttaattcacttagaggtgttagttttgagagagctgcaggacttgggagtgagacattgattgttccccacaagactgatgtttttttgcaatcaattgaggaggtgaaggacagctctcctgtgtctgtgcatgatagttggttaagtggaactagctcaccttcaacaaatagcttgttaggacatgtagttcagtgacatatatacttattttgggtggaacacctattatttgaatggcaaaggtcattaatgttttccttttctcttttgtagttgtaggatataaccattttggtgtatgattggcaccaggattctgctttcgtttttctctctgaatcgtactaactcatccaaggcagttaattatgtttgaccaatcctaagtaattaataaacagaattcactattctttgttcccnnnnnnnnnnnnnnnnnnnnnnnnnnnnnnn

SEQ ID NO: 16561 - DNA, 900 bp, Glycine max
atccccaataccaccagaactttcagctttctgataaaagtgatgtctacagttttggagtggttttggtagagataataactgccatgaaagtggttgattttgctcgacctcgaagtgagattaatttagctgcacttgctgttgataggattaggagaggtgctgtagatgagatcatagaccccttccttgaaccacatagagatgcttggacactgtattctattcataaagtggccgagcttgcatttagatgccttgcttttcatagtgacatgaggcctactatgatggaagtagcagaagagctagaacacattagacgcagtggatgggcatctatggaggaaactctcacggcttcaccgattgggtccactagttcatcacctcgtcatggaagtgagaagtcactgcgtggtatcaaaaaagctcggcaaggccaagggagtgagagattgattgttccgcagaagacggagagctttttgcaatctatggaggtgaaggacagctcccctgtatcagtgcatgatccaattccttggtcaagtggacacagctcaccttcatcaaacagcttgttgggaaatgtcatcccttgacatatacatacttggggtctatagcctccatcaatgtgaatactaaaggcatatagccccttgctttcctcgttcgcacttgttgctataggccatagctatttttgtgtatgattatcattaggtttctgctttactaacagcttccaaagattatatgcataaatcatcagtaatcaatatgcatattccctgtgcaggcaggatcaaaactacaaaaagttgctaacttcctatgtataattgtgaaaaaccacctttggctccaattgtctatttagtaatagcagct

SEQ ID NO: 16562 - DNA, 1115 bp, Glycine max
cgagggccatccttggcagaagttccccttatggaaatgctggattacaaatacttgataggaactggggagctggttggcaccttttatctttattgcttgctactaaaccttctcaaaggataagttgtttggatgctcttcgacacccattcctttgtgggccaagatggcgagtagtcccatcaatggatattatccgatggggtctgggttctactgcaatgcgtattagggagaagtacatctatcgtcagcctcagcaaagcaggcttgcccacttcattgacttaatggagatgttgaatccccatccacagccaaggaactggctggagcttcttccaggcaaatggcgtctattatactccactgggaagcatgtaggcctgaccctccgccaacctcctctccgtgtaatcgttggcgatgtgcatttaactgtgacaagagaatcaaaattgaaagctaatctttcattcaactctgacactggattctctgtcatgattggtcaggactggcctcatgacaaagctggtaagagtggaagattgcaggtgaattctttatttacactaagatccgggagacggttatatctgaaacaagacaagaccacagagaagttcttctttggcccttccagcaatgtggaggctttagctcagaaatttaagggcaagaaatggagaaagatagtccctttcaaggagtttccatcaagtcttccagcagccaagcttgcatctggtgatattgatgtgagaatgaatcttgatgatccattaaatcgaaacgttgatactgcgagaaatgttctacaagaactaagaacacaaattccaccagaaatatttgatttgtcaaggcttgtgtgtggaacatatgtggactcgaggatgcttgtcctacgaggtgttaatggatccgcgctcctatttacaaggtcttttgtggatagaaacggttctagttagttgttgctgtagcagattcaaaattattattcaactgtatattgtttcttttcgattgtatagcttggtcgattgtgatctttaaacattagatgtaaaaaatgtattttttttattaaattgtattttattgaa

SEQ ID NO: 16563 - DNA, 446 bp, Glycine max
cgagtttttcttgcagaggtatccgagttttcgccgggtccaatgagggagagagtcgttgggttgatagggaagaggagcttgcccaattggattaaagctgctagcttgcacaattggatatttacgtttgatgatatggataagatcatgaggagggagaaggaaggtcctgtcaagtcagtattttgggctttgtttggggctatctatctttgttttggtatgccagaagtgtatcgtgttctttttgaagtcttcggaatggatccagatgccgaagattgccagcccaaattgcgtagacaacttgaagatgtggattatgtatctgctgaggttgaaggcaagctaagctggcaagatatcgttgcatataagcctcccgcatatgttctgttggtacacccacagatattcagagcttgtgttcccacaggaatgca

SEQ ID NO: 16564 - DNA, 273 bp, Glycine max
cccacgcgtccggttttcatccttgtgcgcagattccatgcccattggtcagttgtgattattaaagaaagaaaattgtaatttcttttgggttgtcaagttgcaggatcaagtgtatgttacaacttactagcaacttttgtcattgtaggtatgaaaaattagaatagagctttatggaaataaatacaattctattgtcgattgtattatattgacttttgtagttatttctggaggtttggaaatcaatactatttgagtcatgcaaaa

SEQ ID NO: 16565 - DNA, 668 bp, Glycine max
aagaagtccaagcgccaactcaaacgcgaacgtcgtctggaacaaaagtcagcacgaaacggtgtgtcccgaaattgccaaaacaggggatgttagttcatgtccttataaagacaagtgtcgtttcagccatgatttggaagccttcaaggcacagaaacctgctgatctagaggggcaatgtcctttctttaaatctggaggcgcttgcccatatggtttagggtgtagattttcgagtacgcatgaagatggtgtgccttctgccaatctgaatggtcttaagaataattccgaggtgaatgggttgagcaaacatgttcaaaagcttttgtggaaaaataagatgagcttctccaaggcagatgcccaactcagaagtctaggcctcgtgggaacctctacgtcaaaaaggaatgacttggaaaataaagatgaaggtgacactggttcaaataagtgtgatcattctgattacagtggatcttgtgttgttacctccgactcatgttgtaagttggaatgccctgaagaagttatgaaagatgatgacaatgacatagatggaaaatctgaatctgatgtactttgcccccagaagagaagataaattgcagcacattgtggtcctatggatgcagaacatgaaagtgttagtgttactgagc

SEQ ID NO: 16566 - DNA, 381 bp, Glycine max
cagctctacaaggacttgactatccttcataacctgacttcgattcccaatagttcttctgacagctaatatatatccacatcatgtaacaaaagtcatggagactctccacaaccctgtacttcacgctctaacacaatgtagcgtgtaagtaaatgtcccctcctcgcaattcatctgcaatgactcctagtatgatgccttgttttttcttttctctttttaaattgttctctaaaggtgcttgtttcatgtcgaaatgaagggagcaatggggggcagggtggtgtgatgctggattgaggggctaatgtgtttatgttcccataatgataggaactgttttttgtcaagcaatgcaattttctcacctttcctttt

SEQ ID NO: 16567 - DNA, 627 bp, Glycine max
gctttagcaatgggcaaaattgttgtttgtgccaaccatccctcaaatgactttttcaagcagttcccaaattgttggacgtacgacgacgatgacggatttgttaaactcacactcaaggcactggctgaacaacctgcccagcctactgatgctcagagacatgacctatcttgggaggccgccacaaaacggtttcttaaggcagctgacttagacaagccgttagagagaaaattgtcaagaacaacttcaaactttctggctgcctccttaaatttgcaagagaaagtagatgaagcatcagcatatgtgcatcatgtagcttctgggtttgaagtatcaagaagaatctttggtgccattccagatagcttgcagccagatgaagagctacgcaaggagcttgggttgactgatgcttccacgaaataaagttaaagaaaaatgatgttggaatgctgtgatgttaattaaaatttgtagagattctatcttctatacatatataactaattagttacccttgcatttgaacggttgtgcttgtctttacccatgtttaccttttattgctgctatcttcaacatgtacatcatagtgaaaaaaacaataaattaactact

SEQ ID NO: 16568 - DNA, 345 bp, Glycine max
agatgatagaagtggtgtgttgcagcagggagggatgtttgtgttcagaggaaaacagctgctctatgcgaggaaagatgaagggacaggtggtcatgcccccttagatgatgtttttgatgtctgctgcaaagctccagtggcctaatgttggactttataaaattttccatttgcataagattaggaaatttcagtttaggaagatttgttttaggatacccgatttctctgaatgatatcggtggcaaaatattgccagttgtggatgatatgatttaatatcataaaccaatattataaagttccatctataaaaatgtttgtttaaaaaagtttactttt

SEQ ID NO: 16569 - DNA, 468 bp, Glycine max
attttgagtctctttaagaaaaagttgtttatatcaacaattttgactcatgatttacttaatttcctattaaatataggagagagaaccaattgagttagttaatagaaatttttattagagagaaaattcattaacctgtttaagatggacgcgacatgaattaagttacttgcataaaaatctccaagaagtatgctctacaggtgtgaatgagggcgaacttaagagagtgaagtttttatgtgccccattcttccaccaagagcccatccacccttgaatttatttgggtctaacagtgggatccacctagttggtggcatcacatggtcaaaattttattggtgaaggaaaatatttgccttaaaggacataagaattgtccaaaatgagatattcttaaggaaaatgtttcatgaatatccagccatactatttaatacctttaacaactagaaagagtaa

SEQ ID NO: 16570 - DNA, 566 bp, Glycine max
ctcgagccgctaaatcacattcggaattaacgagaaagtatttcggactagaggctgtatttatgcgcatagcaacagccagcaaggctttgtttggttttgtaaatcagattcggaaccaatggctgccaccgaacacagactaagcttggaacctgagaaaaagaaccttctcagacaccacaccgagaagcacttcacagccggcgaaatcgtccgcgacatcatcatcggcgtttccgacggcctcaccgtccccttcgccctcgctgccggactctccggtgccaatgccacctcctccattgttctcaccgccggcatagccgaagtcgccgccggcgccatctccatgggtctcggcggttatttggcagcaaaaagtgaatctgatcactacgctagagaattgaaaagagagcaagaggaaatcatcgccgtgccagatactgaagcggcagaggtagcagaaatactggctcagtacggaatagaggcacatgaatatgcacccgtggtgagtgctctcagaaaaaaccctcaagcatggcttgatttcatgatga

SEQ ID NO: 16571 - DNA, 442 bp, Glycine max
  unsure (1)..(442): unsure at all n locations
cccacgcgtccgcccactcgtccgcggactcgtgggcgacagaagggggtgagtgtggaaccttcactaaccctaaaattttccgattacgaaatggcatccaccgccggcgcagccgcgaggtctattttccgttcatgttccgctcgccgtgccgcgttccgtctcggctccgatgctaaagcggctcggtctccgttccgtgtcgcttccaacaaacctctctcgcaatctacactcaggtgtcccgttgaattgagcttttgtgtggaatccatgctaccgtaccatagcgcaactgcttctgctttgatgacttcgatgctatccgtctctcgccacagctatggttggcttcctgaagaaggtgaggggtcatgatgtgataactacagaatgcaataccgattatgctcaaaattactttgtgggaatcaaagnt

SEQ ID NO: 16572 - DNA, 337 bp, Glycine max
aaataagtccacatctttttctagatccattgttctgtttcagtgattgttgactctccaaggacttatgatgcacatattccgagagactatcaatcctatatacagagcagacagacattgaaatttatgttccatgtaaattatatcaaagtattgatgcttgtggtggcaggtattctgttggtacagttaattttcaccattattgagaaatgaggggttgatgctactgatcatgttcttgacatgactggccatgcatttgtttgttggtctagttagcttttatgtatatgtatctgcagaatcttcacagttttggtatcattatgaa

SEQ ID NO: 16573 - DNA, 917 bp, Glycine max
gtgggcatggattctctactggcgaactatgcctcttcagatgaagaagaagatcaacaacggccatcgccacccaaaacgacttcgttttcctctcttcctcagcccaaatcttctctctttcaatcccttcctcaacccaaatcctctcctttttcttctctatttcaatctcttcctccacccaaacaaccttccagcgaaagcgcttcactccctaaccctaaccctaaccctaaccctaaaccccaaatcgaagaaccacggcccaaacgcgtcgtgcaattcaggcccccaatcatccctctcccaaaccctacccaactcgacgatgacgacgacgacgaagaagaagagcgaaacagaagaaagaacaagttagagtcctccacgcaaacctcatcggtcaaatccttcctcgccagcattccggctccaaggaacaccgccactctcggcgttcaagcaagttccggttcaggccggagatccttcctcgaaaccgaatcgccgccaccggcttcgaattccggtggttccagcaatgttcccgtcgatcaaagtacaggggattatgaaaattatgagaattaccaatatgccaccgaccagtatgctaattattatggcaattttggttcgggtgccgagccagggagttcgggtaccgagccagaggctggggttgctgcttatggaactgaacagtatgggaattatggtgatgcctatgctgcctatggggattatggacagtatgggaataattggggtgacgtgtcagcggcgacaccggtgccggaagcgtctgggattagtgacagtgtgatgaggattcctgggaagagagggaggcatgagattccaactgaagtgattgaggtaagcagaagagttgattaagaaccggcaaagag

SEQ ID NO: 16574 - DNA, 385 bp, Glycine max
gggagctgatcatgtatatactgatcatcaagctgagttagcgtcagttgtgctgaattttataaaggaaacattgaaactggacaagcttaatgctagttaggtccttgatggaatctgcttcatgatgcaatattgcaacttggtaccttagagaactttgctcgtgctggagagagtcgtctttgattttattagagagaaccatttgtgctttgtggctgcaatatctatatcatatgataaataaggttggggacttggtgcctcctagttgtgtcctacgtttttaaagaatgaaaacattagcgtttgtttagtggatggactttgtagaatgatcctactcctacggtcgtaattagtcatgatatttttctttatt

SEQ ID NO: 16575 - DNA, 455 bp, Glycine max
ctctcacaaaggggtggattaatccttttgacctctaagtttactttcaatctcatgcttgtgaatctttagaagggaattctaaccaaacatcttcagccaccacattgataaggaaaatgggagtctcaggcaacaatgaagttttagtgacaacaaaggtagttgttgactatgatagagcaagtgagctcaaagcttttgatgacacacaagatggtgttatgggacttactgatgctggtgtcacaaagatccctcttatattccataaccccaaaaattctcatcatgatgaatctgatgatggttcaggtagcacacaactcagtgttccttcaatagaatcttgttggtggttgctgaagatccagctacaaggaaagtggtggttgagaaaatcagacatgcatgtgagacatggggttttttccaagttgttaatcatggaatac

SEQ ID NO: 16576 - DNA, 382 bp, Glycine max
ctcgagccgtttttattttcttccttcctaaagaacagaaatgaaaccgtccgtttccgtattgaacgtagccccccaaaaatgccgtccaagttccgattcctaaaactcttcactcaccgtctctctcctagaaccgccgccgccaatggctcgcaccgcttcctatacggcaaccctctctgcaccatggcggagtccccggagctccctccgtggctcaagttctccgacaccccgacccctccagacgctgactcagacgacaacttcgttatcccttcactcgctcactgggtcgacacccacatgctcactaccaagcccaaagtcctaacgcaatcacccaagcaagacaacctcgacgaactcgaagcaagta

SEQ ID NO: 16577 - DNA, 441 bp, Glycine max
caaagccctccacacctttgctttctcgaagtctcagctggtcttgtcccaattgcatccttttcttcaggccacaacaactccttctactgcctctctctagctagttccttcttcttcttcaaagattctgtactatataaaatcaaaggaagaaaagaggcctaattaagtagctttcagttgtggaatcatcatattgcagcgttgatggggcatttttcatctgcgttcaataggttggcaaagtcttttgcaacgaagaaagggaggagttctgatgaatgtaatggaagagaagcggcggtagcaatggcaaaggaagccaaaagaaatcacttcatgttgcatagctccggcacagttaatgttgatggttctaacaactttgcctcagttttctccaaaaaaggccagaaaggagtcaatcaggattgctgc

SEQ ID NO: 16578 - DNA, 561 bp, Glycine max
tgacgatggaggctcagagctcacattctatgctctcttaaaagcctccattttctccaaacattggttacctttctggagaagattcaatgttgaacctaggtcaccagaggctttcttcgctgcccataattgtagcaatagttgcactgagtataagccaagcatgggtatttatcaagaatttgggcaaagacatgtaaagtgagattgaatcagccgtagcaaggggcgaggttccagataatgcgatgattcagcacagaggattctcagaatggaatcccaaaaataccaagcagaatcatcaacctatcgtgcagataataattgatggaagagacactaatgctgtagatgaagacggatttcaactgccaagagtcgtatacatggcacgcgaaaaacgacacaactaccctcaccacttcaaagctggagcggttaatgcattgatacgagtgtcttccgagataagcaacgccccttcattctcaacttggattgtgatatgtactccaataatgcaaatacaattcaagaagtattatgcttcttctt

SEQ ID NO: 16579 - DNA, 602 bp, Glycine max
aatggtcaatgatactttggttcgccaggctgcaatggtactcaagtgtacattgttgatgtattacaagaacagcagaggccgaaattatcgtaagcagggtcaaatgctgactttagttgaatacctcctcctgctttaccgtgccttgttgccaacaccagtttggtatcgtttcttcctgaacaaagaatatggaagcctcttttcatcactgatgacaggattgtatctaacatttaaactcacgtctgttgttgaaaaggtgcaatccttctttgctgcagtgaaagcattgtcgcgtaaagaaatgcactatggggcttatgcaacatcagagcaggtcaatgcagctggtgatctttgtgctatttgccaggagaagatgcatgctcccatcttactacgttgtaaacatattttctgtgaagattgcgcatcagagtggtttgagagtgataggacctgcccatcgtgcagggctttggcaaaacccgcagaccttaggtcatttggggatggctctactagcttgtttctccagttattctgaaatcatatataaataccaaccaggaagtttttttctgctttgaagcttt

SEQ ID NO: 16580 - DNA, 487 bp, Glycine max
gtccatgttttgttgctctcacatcacctgactttgtcttgggacattggatcattgcttgagatctgcccttgttatgcttcttctggattcttcccagattatgaacattgaaaaaaccaccactcttcaaagccaagatatagcaaaagaatagaaatccttcaagtagttgatgcctatgttcatgaattgactttctgagagaaggcttgttcaacgttctcaagagatgcaaagatggagaagaaaagaaagattgtgcagtatagggagaggctggataggactcttgcctcacctgatcttgcaaatgatgagatgctcaaaaagcttgttagaagtcaactcccacctttagaacctgaagtagaaggatttagagataaattagtagaaaacaagactgcagaggtatctcactttcttgatatgttgaggagtgcttctcagatgatagtggaagatctaatacatcacacactga

SEQ ID NO: 16581 - DNA, 613 bp, Glycine max
tgaggaacaggccagctcatttacctatcactgtggggttttcattgtgcctaagactcgtgcacgtgaatggactttctattctgaagaaggacagtggatggtggtcagaagctctgaagcagctcgtctcataatggtttacttggatgccagccattcggataccagcatggaggagattcagaaggatttgtctccattggttacgcagttggcacctgcagaaaatgagaatggagctaaaatacctttcatgatggcaagtgaggggatcaaggagcgaaacatcattcacaaggtcacatcttcattaactggatcaattattgttgaagatgtaatttatgaaaatgttgatagtgaagtcagttgtatttttccttctagagagttggtgtttcgacgccttgtatttgagagagctgcaaatttggtgcagtctgaagctctgctaaaagatgaacagtcacctactaaattggttagtgagacaggcaggaagaaaaacaatgcatcttccaaatctagaaaaagtggatctcagagacacagtattggagcaagcagccagttgaccgtctatcatggctatgtagctagttcttatcat

SEQ ID NO: 16582 - DNA, 461 bp, Glycine max
cgcttcattgtttacacgaagccaagggcaaacccaatccaataaacaacactgttcagagacccgtgagtcttcgtcagttccaattcgttaccgcgaaaatgaacgaacccacgagaaaataccgcaagaagaacgaagaaggatcaagatcaacccagaagaataacaagaagaaagaactaaagagcatcctcacttcgctcttgttcgtggatgcaggagagaaaaatgaagaacaacacaagaaaaaggaggacttgatggacggttactacagcgaggtggaagaatccaattacccgaaaaagagaaagaaactcgccggcggtgactcggggagtctccggcgagtctgggtgaaggaacgttccggagcgtggtgggaggagtgtaacaaacccgaatttccggacaggaattcaaaaaagccttcaaattgcgaaggttaacttttgagc

SEQ ID NO: 16583 - DNA, 609 bp, Glycine max
cccacgcgtccgctcatcaactcatgattacatggtggtagcgatagtaaaatcgagactacccacgcgagtccattggttttctcttagaaccaattcctggagcttgtattgatcagtatccttttaaatccggtcgcagcttgctcttgaatggagctattcattggttggttcaaccctatgatagactctgtgttataattgcatttgatgtgatggaaaaagtgtttctttaaaggcactattctcttccactgcaacacgcacaatcatgttcttcttcttgtgaatatttaaccaaaaagggtgttctgttctgtgcttcaacagttttactgttttgaacatgtgattgtttctggagagacttctagattgttctgtatatatagcaaggaaggtttttgtgttttttggtttttgtgccattttggatatggctatagttgaatccgtggggaagattcctttgcaagacccacctgaggaggagttttgtgctgctgacctgacttggaccaagtttggtaatgctgagcaccatgatgaggttgccctcattccctatgacagagttgatgcttttataattggtgaatgtactaa

SEQ ID NO: 16584 - DNA, 698 bp, Glycine max
tgcaacaagtggaagagctaaaatgcttgctgagagtgatccccatttggttcgcaggaattttcttctacattgcaatagtccaacagaacacaatgctggtcttccaagcccttcaatccgacagacgcattctcagcaccaacttcaagatcctagcagcctcctacaccatcttccagatgctgagcctaaccatatggctacccatctacgaccgaatcctcgtgccgtcgctccaaagggtcaccaaaaaagagggtggcatcacagttcttcaaagaataggctttggcatgttcctctctatactatgcacaatggtgtctggtgtagtggaagaaagaagaaggacattggctttgaccaatcctattggattagagccaagaaaaggtgccatttcttcaatgtcaggtctatggttggttcctcagctaacactggcagggttatctgatgcattcgcgattgtgggacaagttgagtttttctacaaacagtttccagagaacatgaaaagccttgcagcgtctctatttttctgtggcctcgcgggatcaagttatttgagtagtttgctgatttctattatccatagggcgacagctaaatcttcaacttgggaatggttacctcaggatctcaataaggggagattggattatttttattacattataactgctctagaagtc

SEQ ID NO: 16585 - DNA, 907 bp, Glycine max
  unsure (1)..(907): unsure at all n locations
cgcaaatgggagcaacactgaccgaaaaaagtacttttgcaacaaacatggcaccaccatcgtttggtgtgctgcaacagcatcatcatcatcaacaaccaaatgggcaacccttcacgaaccagtacatgcacagtggccaccaccaccaacaacaagaggttaacatttctactcagtatagtttcggtagtgcaaatgggatgggtggagggagcgttgggatgaacggtgtggacatgttcaacgctattttggaccaaagcaaggctttgtcgaagatcatagagcagaacaacaatagaagcagtagtggaggaacaacaaatggaggttcgagtagtgctattaataacgttgctggaagtaaaggaagtggggatgttatgactcttgactttttgggaataggaggtggaggaagtggtagtggtgggggtgcacatggaaatttctatggtggtgctcaacaaggggaaactggtgcaccggatgaggtttggagaaactggtctagtaagaacgcaggctttgaatcattttcaacaacgagcagcatttgaaaaagatcacccgacaaggaataaaagtcaacttttttagagggtggaattttcagctgatttggtcgttatgtgcttctttttctttaactaattaatcctccctttcggccacatatatagaatagaaatcgtgcgacaaacgactgaacgtgtctttctaaagaggaagacgcattgagtcgtcgacagtgtggtcgagtttcgcagcaccagccagtgcaacagtgtagacccatatncttagaggatctcataaatgtgagttcaaatgttaaaattaaggataatgtcaatttctgaaacacttttttatagttcatttttttaatctctcttttaat

SEQ ID NO: 16586 - DNA, 441 bp, Glycine max
atggaggaagaggaagatgaagtgggttggtgttcttctgattcgggcgacggcgacggcgacgacgatgtcgaagaacggaaatctcagaatgtggatgccttgctcaggggcaacctcgtggtgaagagacaatcgttgctaccgcgacttctatcagtatcgcaaggagcggctgtttgtagaaagcccttcaaacctccatgctctaaatctcatgcttccgcttccgcttacaatcaagaccttactcgtaagctttccgctcgcaaaaggtttgttccctggggttcttcctctcctattcctattcctattcctagatctgccttagacgactccaaattcaatgttgctgttgctggtgctgatgttgccgaggagctcaagccctctttgcctcccgggattgatcctctcgtattgtggcaccctcaagac

SEQ ID NO: 16587 - DNA, 992 bp, Glycine max
gagaaaattctgcacttcgataaaatcaaaagttcaaaaagtgtacaaaatttgattcacactatttgacacgatatattcctagttccaacaaataatatatcaataaatcactactagctaaaattcaaagtcaatgctaacactatctgatattagtatcgtaaagttaacaagaaatgcggcctatagtttcgttatttaaacaaaacagtgagtacatgtaactaatcattgttggttcgtaccattttcactaccttgtgtaaagcaaacatttctttttcaacagttaacactattgtcccatttgtaaaaagaatgcttgaaggtaaaagcacatgcagggtccattaaagaaccttctgtcagtataaactctgaagcagtgaatattaaataaatagtatcaatttcgcctcatttttggtacatgggcacaggtatcaacatccgtaaaaaaaaattaagttggactcagcaaccaaaaacatcttacagtctaacactatgattttttataccttggaaattaaagtgcaacattctcatgttcaaacactagcccggtctttaccttctgctgcagcctctaatggctggagagctttgagaggattcataatgacaccatctatgagtccatattccttggcttcttttgcactcatgaaaaagtcacggtctgtatcctggttgatcttgtctaaactttggccagtgtgataggcgagatatccattcagatttgccttatgatgcagcatttcattagcctgaatatctatgtcagtttgccctccttgagcaccaccaagcggttgatgaatcattatccttgaatttggcaagctgtatctctttccttttgtccctgcgctcagcagaaaagctcccatactagctgctaatccaacacaaacagtagacacatcaggtcggatatgcctcattgtccccaatatagccattccagctgtaaccgaccctcc

SEQ ID NO: 16588 - DNA, 431 bp, Glycine max
cgactgaaaccctaaatctgaacaaagaaagctttccgcatctctcgttgcgtttcagtttcgttgaagaccagcggcgtcaccgaccggagcaacctcgcctccctcacagaacttaaaaaacccgactcttcaaatttactctacttcataccgaagctccatagtgaacaggaactcagaaacaaatgccattggatatcttaatcttgtgactgaaaaaatatataatgtctgaagaggctggatctatgttggtagttgatgatgatccctccgaccaacgctcactatctttggatgatgcaagcagcacagaggagtcacctgatgaaaccaggctctccttggaaacaacagatgatgctattccatatattggtcaaaggtttgccactcatgatgctgcttatgaattctatagtgaattt

SEQ ID NO: 16589 - DNA, 1018 bp, Glycine max
gccgggtaagttttttcgtgagaagatgatgaaggaaggaaccgtgatgccgatgcctgacatacaagataaaatgccggaaaggtcgtttttgccccggagcattttatcgaaattaccgttttcggtttcgaagattgatgagttgaagcaagtcttcaaggcttctgataacggctccatggagaagatgatgaaggactcgttggcggagtgcgagcgtgcaccgagccgcggcgagacaaaacgctgcgttgggtcgctcgaggacatgatcgactttgccacctctgttttgggccgaaacgtcgccgttcggactacccagaacgtgaacgggtccaagaagagtgtggtggtggggcccgttaggggaatcaacggtggtaaagtcacccaatccgtgtcgtgccaccagagcctgttcccttatctgctttactactgccacgcggttcctaaggttcgggtctacgaagcggatcttctcgacccgaaaacaaaagccaagattaaccgcggtgttgccatctgccacttggacacctccgattggagccccacccacggagcgttcctctcgttagggtcgggtccaggtcggattgaggtgtgccactggatcttcgagaatgacgtggcgtggaccattgtgaagtgagaaaagagaccatcagaataaggaaggaagaagagttacctctataggaaattaaagttaaattttttcaaaaaaaagcacttctgttctgctaagaaaatttagcagtctcgagaattatttgtttttaatttgaaaattaagtaatgtatttttcttttttttggatagaaaagtttaagtcatgttttttttactacatttggaagaagaaggtatattattatttactcatgatcattgttgttattattagcttggcaagatgtatgtaaatgtctttcctaatgattggaggcaatgaatcaagatttgatgctcttataataaaatgttattaattgctttttatcgctc

SEQ ID NO: 16590 - DNA, 652 bp, Glycine max
aattctgctcgagcttctcttccgcttgtgtctccattggacagatagcattttccccttcccactcagatccagtgctcttttttgagccaacggtgctgattcgttcgcgcggaatcttgctcggcgtcggcgtgtaagtcatctgtgaattcccttgggcaagatggctttggggaaatatgctagagtagatggtagaagatcgtcgagttggtgttcaacggtgactgttgtcatgtttgtggctctgtgcttggttggggtttggatgatgacatcatcttcagttgttcctgtgcgtaacggagacgaggcccaggagaataagaaccaagtgaaagaacaaacagagcagaggtgaaagaagcagtgagtgaggtcagcaatagcaatatgcggcagtttgaagataatccaggtgatttgcctgaggatgcaaccaaaggggacagcaatgtagcctctgaagacaactcaaacttgtcagataaacaagaagagaagtcggaggaaaatcctgtagagaggtcttctgacgatacaaagtcggaagacgtggaggataagaaaactgaggaggaaggttctaatacagataatgaatcaaactcagactctacagaaaatagcaaagacagtgatgagactt

SEQ ID NO: 16591 - DNA, 445 bp, Glycine max
  unsure (1)..(445): unsure at all n locations
gcgtccgctcttctcttctcttctgtctccattggacagatagcattttccccttcccagacagatccaagaaccacaggtactcactcttgagatcctgttttctctttttctcgttgcgtgtcttctgctgctcacacttaacgcgttttcttttttctccgaattaaacgcgaccttatcttcttcttgctctcttttatcagtgctcttttttgagccaacggtgctgattctttcccgcggaatcttgctcggcgttggggtgtaagtcatttgtcaattcccttggacaagatggctttggggaaatatgctagggtagatggtagaagatcgtcgagctggtgttcgacggtgactgttgtcgtgtttgtggctctatgctnggttggggtttggatgatgacatcatcttcagttgtccctgtgcgtaatggagatg

SEQ ID NO: 16592 - DNA, 407 bp, Glycine max
cacgtcgcttcgcactagaatcgaatcggctcgaggctccccacttgttatcaaccctaaccgtttctgagctggttcccccaccacgccaatgcgttttttcaacacaaccccctttccacaaacccttagggtttattatggaacccaagcatcagtatcgaaactccccgaatacgagatgccatcggtaacatggggcgtaatccagggtcgcaaggagaactcgtttcgcgagtaatcatcttcgattacctcaagtgtttgggaatcatccccgaccaactgcacgacctcgagcttccctccaccgtcgacgtcatgcgcgagcgcgtcgagtttctccaaaaattaggtcttaccgtctactacatttacaattacccttttaattttgggttcaattt

SEQ ID NO: 16593 - DNA, 417 bp, Glycine max
cccacgcgtccgcccatactttcaagtttcaactgttttcccctccgcatggaagggaaatccagggcacaggcacactttctctatcaactgagtgggaaatgctttgccctctatcatcatcttctctctaaactttcacttttaccattgaaccatacaacgatgcacacaagaagggtgtccaggtaaaagtctcaatattcaagaggaagattggaaattaatttgtgtaagtggttattgatattgaaaaacaagttcctgattgctgccagggctcaatagggttgaagacatgacagtgagatgaacctcatttttgcgtacaaaaccctgtcagaaaggcttatttctcctttgacagtgattttaattttgcaatcttatttattcaaattatgcacggataattgg

SEQ ID NO: 16594 - DNA, 422 bp, Glycine max
aaaactcaacatctactacgaccaagtggagggccacgtgtcctacgaggggatgaggttcgcctcggcggacctgggcacatggcgaagctcctgccgccaatgcacaaagagcacgaacaacatgagcggggttttcacggggcagcacgggttggtgttcgatggcgatcacgtgaaggatttcgaaaaagatgagagaggtggggtttttgatattgatgtgaagctttactttaacattaggtttaggcttggtgacttcatacgaagtagctcaagggttagggcgaagtgcgagcttcaggttcctttggtttcgaggggagtgtttcttcccaccaggtgccatgtcaaattctgatgagggtccccgtttcacgtgcattgcatttaattttgtcactcatgtttattaaatt

SEQ ID NO: 16595 - DNA, 659 bp, Glycine max
taacaaacttcttcaccctctctatattccaatcctttttttccattccctactattccctatcatctttctttgtgttctcatctttttccttttcccaagcaattgtactttttaggggcatacacgtaaagcagttggtttctggagtagttagagttacatgtgttttgcaggcacatggcaacacatgaaatggatcccgatgttgttcgctggggtcttcatctcctagatgtctgcacactttctcaccatggttcccctagtattgtaactcaatatgatcctgatttaagtcgagttgaatatgttaccgaaggcttttgtcagcatgagtacgtggataatgatgaggctgttgcacgagcatatcaagaagaattatcgcaacttgattccatgggagcttctgggatatccaattttgagaatgaaggaacgcccggatctgtctatacacaagactggcctcaatcctcaaatggaaagtataactttggcaatgagtcttgccagaactctgtagatgagtcctataatatgaaagaagtggagaattatggtccaacttcaagtgaaagagaaaatggcatgcatgaaaatgatggttatggttcgtcttctggatcagtagaggaacctgttattagcgatga

SEQ ID NO: 16596 - DNA, 409 bp, Glycine max
gttttatttgcttggttactgtgatattgtgcattttctcgtctagttttcttcagcattcaacaaacctcttcaccctctctatcttccaatcccatttttcattccctgccgtctttctttgcgttctcatcctttttccttttcccaaggcacatggcaacacatgaactggatcccgatgttgttcgctggggtcttcatctcctagatgtctgcacactttcccaccatggttcccctagtattgtaactcaatatgatcctgatttaagtcgagttgaatatgttaccgaaggcttttgtcagcatcagtatgtggatagtgacgaggctgttgcacaagcttatcaagaagaattatggcaacttgattccatgggaggcttctgggatatccaattttgag

SEQ ID NO: 16597 - DNA, 252 bp, Glycine max
cagcattcaacaaacctcttcaccctctctatcttccaatcccatttttcattccctgtcgtctttctttgctttctcatccttttccttttcccaagcaattgtactctttaggggcataatacacgtaaagcaagttggtttctggagtagttagagttacatgtgctttgcaggcacatggcaatatatgaactggatcccgatgttgttcgctggggtcttcatctcctagatgattgcacactttcc

SEQ ID NO: 16598 - DNA, 336 bp, Glycine max
gtttggttcagttggggctttgtgttaatctgtttttcacttttccgattatgatggacccggtgaatgaggtgatggagagacggttcttcgggtccaggtactgcttgtggctgaggtggatgatggtcttgatcataagcttggtggcgcttttggttcccaattttgcggattttctgtcccttgtgggaagcagtgtttgtgttgttctgagttttgtgctgcctgcgatgtttcattgtttggtttttaaggaggagttggggtggaggtgtgttctctgggatggggctattgtggtttttgggtttggtattgctgttactgggacct

SEQ ID NO: 16599 - DNA, 898 bp, Glycine max
gatgcttcagaggactacgttaatacagaaaatgttggctccagtggttatgtggaaatcagtactgtagcagcaattttatttgttgtgattgcttcttgcttcttggttatgctgtataaattaatgtcattctggttcgttgaagttctggtggttctcttttgcattggtggcatagagggtctacaaacttgtttggtggctctgttatcatgtttcagatggtttcaacaacctgctcaaacatttgtgaagatacccttctttggagctgtctcatatctgacagttgctgttactccattctgcatagtgtttgctgtggtttgggcagtttatcgccgtgcatcgtttgcttggattggtcaagatatccttggcatcacattgataattacagttcttcagattgtgcgcataccaaatctcaaggttggaactgttcttctcagttgtgccttcctatacgacatcttctgggtgtttgtctctaaacggtggttccatgagagtgtgatgatagtggtagctcgaggtgataggagtggagaagatggtatccctatgctactcaagataccacgtctgtttgatccttggggtggttacagtatcatcggatttggggacataatcttaccaggacttatagtggcattttcactaaggtatgattggttggcaaagaagaaccttcgggctggatacttcttgtgggcaatgtctgcctatggtttaggtctcctcatcacatatgtggctttgaacttgatggatgggcatggtcagccagctttgctttatatagtcccatttacacttggcaagtataattaatcagactcatttaaatctaaatagaaacacctatgatggcagctggtgtgtatcttta

SEQ ID NO: 16600 - DNA, 537 bp, Glycine max
atggtttaggtctcctcatcacatatgtggctttgaacttgatggatgggcatggtcagccagctttgctttatatagtcccatttacactaggcacctttttgtcattgggaaaaaagagaggggagctcaagattttatggacaagaggggaaccagaaaggcattgccctcatatccaagaggataaccaatcaattgacagccaccattgatcggcacctcacctgcaccctcctaggacattatgtaacatttgtaactttgttgtaacagaatttcagccaaattgtatgatatgatagcatggacttaaaagttataaatcagcagttaagatatgagagagatattacccagttattctgatattcaaggggacccaccaatctgtgtattgtaaccttattttttgtgagatagcagatggagattccatttcctggttgatgatggctttgcatcaaggagagtctgataaaaaaccatgtctttaccaagaagcaaagtgacatgcttaggaaactccaatcataa

SEQ ID NO: 16601 - DNA, 255 bp, Glycine max
ctcgagccgctcaagattttatggacaagaggggaaccagaaaggcattgtcctcatatccaagaggataaccaatcaattgacagccaccattgatgggcacttcagcagcagatttgtaccctcccaagtattagtttatagaagagtgatagggtctcttaggacattatgtaacagttgtaactttgttgtaacagaatttcagccaaatggtatgacagcatagacttaagagttaaatcagcagctaag

SEQ ID NO: 16602 - DNA, 636 bp, Glycine max
cattaatatcccattcgatttttgcttctctccctttcaacattataattagaaaattcactatccaacattgataagagagagagatttttttgtacacttgacatgtcttcatattttccaagctttgctacaaaaatcccacgtatgggaaagggatacgatgatgtgttgttcacagtgaccaaccaattagtaaaatcaggttcatggtccaacaactataaagtgccctgcaacctctcaaagcagcacattggttttgtatcgaaattcgaccaaatttgttcttctcctgtgatggaggacgagcataaaaagttggattctttgcctgaaattgaattatcagagtcagaggaatattccaaggaattggaggtggctgttagagcagtgcaaatggcgtgttccctctgccagagagtgcaggacactttgatttccaacgctgggacaaatcatcgtcaggttcagtccaaggacgacaattctccggttacagttgcagattggagtgttcaagcaattgtcagctggatgttgtcagaatgtttagggagtcaaaatgtctcaattgttgctgaagaagatgttcaaactctttccaaggctaatgcatccgaactgttagaa

SEQ ID NO: 16603 - DNA, 439 bp, Glycine max
gttaagttggtcatctgtggatggcatgacgaagatgcaccaaattatcgttcaattatacagaacccaatggacatggctaccattctgcagcatgttgataatggtcactatattacaagtgctgcattcctgcaggacatcaatctcattgtttccaatgcgaaagcttacaatggagaggattacaatggtgctaggattgttaggagagcttgtgagctccgtgatgcggtgcatggaatgctctcacagatggatccagcactggttgcatattgcgacaagattgctagccaaggtggcccaattcagttgtctgatgaattaggggattctactttccctgctactcctgttgtgcagctgggtcagagtactagaatgagtgctcgacttcgtcatgtccaaccagaggttaatatggatcagagttatg

SEQ ID NO: 16604 - DNA, 535 bp, Glycine max
atcactttctttcatgcttcttaggctttgatcgatctcctttttaccttctcatcttctctctttctccttccttctgccagttcgtcttgggacagggatttgactacaggataaaatgggtcgtgcaagaatcagcttgaaacatatctcaaatgagagatctcgcaagaaaactttcatggagagaaggaaagtacttataaaaaaaatctctgaattttccaccttgtgtggagttgaagcatgcttgattgtgtatgatgatgggaatggtgacattgaaccagtgacttgtcccaaagaccctgtattggcacactccatacttcaaaactatgagtttcaaaagaatcagagacctcccaagaagtttggtattcaggactttgttgaggataggaagaacatcattgaagctgagatttccaaagtgcataaagagatcaccaacatcaagtatccaacttcggatccaagtttcataaacatggaagaggatcaattgagggccttcattgctctggtggatgct

SEQ ID NO: 16605 - DNA, 704 bp, Glycine max
tctacgtcttcctcactcacgacggaactcaccgattcaaaatcgttgagcacggtggctggcccacctgggtcgatgatcgcactctttacttccaccgtcgaggccaaggccactggtggagtatttaccgagccattctcccctccaacgctcctttttcagttgactcggtcttcgtcgaacgagtcaccccaccgggtctccacgcgttcacacccgccacttcccccggcagcaacaacttcatcgccgtcgcaaccagaaggccaggctccaattttcgtcacatcgagctattcgacctcgctagtaacgaattcactgagctgactcggttggtctcgcctaattctcaccacctcaacccgttcatctcgcccgattcaacccgggtcggttaccataaatgcagaggagaacccaacgctcacagtaccccacagtttttcctcgagaatgttcggagccccgtccccggtctaactctcttccgcttcgtcggttctttcccggttttctccccctccggcgaccgaatcgcgtacgtcgagatgcccggagtttatgtcgtgaaccgggacggttcgaacctgcgtaaggtttccaacgcgatggcgttttcaaccgcttgggaccgggttcgaccccggtgtcatctacaccgcaattggagaaactttgctccggagagctcgcagttg

SEQ ID NO: 16606 - DNA, 719 bp, Glycine max
ttttagctcttgcccagaaattgtggcttgctggcttttcaaagggcatacaggaaatgcacagaaaggcatctttggttcttgaagatgcagttaggaatatttacactgttgttgcattttgtgctggtaataaggtgatggaactctaccagttgcagttaaataaaatatttaagcaaagctttcttcatggagtggccattggttttggatttggcttttcacagtttctgctctttgcttgtaatgcccttctactttggtacactgcaatatgtgtaaataagagttatgtggatctacctactgctctcaaggagtacattgttttctcatttgctacatttgcccttgtggagccttttgggttggctccttacatacttaagcgacgtaaatctctcatgtcagtgtttgaaattatagatcgtgtgcctaagattgatcccgatgatagctcagcactgaagccacccaatgtatatggaagcattgagttgaaaaatattgatttttgttatccttctcgaccagaagtgttggtgttaagcaattttagtctcaaagtcaatggaggacaaacaattgctgtagtgggagtttcgggatcagggaagagcacaataatatctttgattgagagattctatgatccagttgctggccaagttttgctagatgggagggatttgaaacaatataatttaagatggttg

SEQ ID NO: 16607 - DNA, 528 bp, Glycine max
cacacatcgctctcggacatcacggatctcgcgtccaatgccatggaggacatgaacgcgtttcaattgtagctcaattatgcccctgccttgacatgaacgagttggctcagttggataacattttggtggtggttcgatcgctgaaagggagcttggaaatgattaaggttgacgtgcaagcgatcaaggagagagagtgaagtgtctccagatttagctcaagacaacaacagcttcttcctccttctcctcctcttcacactccatgtgattgattctcctttttttttttcaactgtttatttataaataatttcacatggctgcttcctttttttttttaaaaaaaaaaaagatgatttgaaatcacaatgatgtaagttggagaggagtaaattatttgggggctttgatattattgttggtgttcagagatgagagatgggtcatgtggaagtaacctgatcacattgtcttcttcttgctggaacaacaaagctattctttctggccacatgtgaatga

SEQ ID NO: 16608 - DNA, 438 bp, Glycine max
ttcttgtaagagctattcaattcctgattcaggttgaaggttccatacatcaattttgtcattgaaccagttgaagtgatttcttctgatggcaagtcaaacatataccctgatttatctgtctacaatatggaagtttctctatcttacattactggattgattggggtatcattggaagcagaagaggtcactaagttcttaaatcggatgcagttgcatgccaaactgtctacatctgataataagcagtgtaactttgtggtatctgtacctccttctagaagtgatgttcttcacccatgtgatgttatggaggatgtggcaattgcttatggattcaatgctattaaggatcaagcagtagtagataataaaggctcaaagaggttggctgcttccttgactctacttcctctgaatgagctcagtgatctt

SEQ ID NO: 16609 - DNA, 641 bp, Glycine max
cccacgcgtccgcaaaacatatgtcgccgaagaactcttgttgccattggaactcatgatctggataaattggagggccctttcacctatgaggctttgccaccttcaagtataacttttacaccattaaagcaggaaagaaacttcagggctgatgagctaatggagttctacaaatcagatttgaaactcaagaaattcttgcatataattgaggattctcctgttttccctgttatatatgacagtaagagaactgtgttatccttacccccaattattaatggtgcacattcagccatcactctggagacaaagaatgtatttattgaatgtactgcaactgatctgacaaaggcgaaggttgttttaaatacaatggtaacagccttctcagaatattgtgaaaacaaatttgtcattgaaccagttgaagttatttcttctgatggcaagtcaaacatataccctgatttatctgtctacaatatggaagtttctctatcttacattactggattgattggggtatcattggaagcagaagaggtcactaagttcttaaatcggatgcagttgcatgccaaactgtctacatctgataataagcagtgtaactttgtggtatctgtacctccttc

SEQ ID NO: 16610 - DNA, 618 bp, Glycine max
  unsure (1)..(618): unsure at all n locations
aagggncggcccgagcgtcccgtccgttctgagaagactacactaggggattaccgcgttgtgttgtgattgaaaatggagagcgatgttgaagaatctatgcggaagaggcccagaaaatatcctttctccgccgattcatcctctcgcaagcaatttgaacaatattctggacggacatttgcaattatgggggaagtgaattttatgcaagatgatgataatcgtttggagattacccgaactaaatttggaagtttgcttaaaagacacggagatttgacagagcgtcttgctagggattctgacaagataatatttgagcgtctacagaaggagtttgaagctgcacgagcttctcaaactgaagagatatgtttagacggggaagagtggaatgatggactactagctacaataagagagcgggtgcatatggaggcagacagaaaagcaatgcatggggatgctgacatattagcatgtcctcaggataaaattacatataaaattggaaacaaggtaatttgctgtttggaaggggcaagaattggtgtacaatatgagacatcttttgctggtgaaccttgtgagttttaccattgtgtgctggagagt

SEQ ID NO: 16611 - DNA, 1545 bp, Glycine max
  unsure (1)..(1545): unsure at all n locations
gtgatanccttgacaaagcagtggaatgttaccagtttgctttttgaatcaaacctaactttttacagtcattaaacaaccttggcgttgtatacactggccagggtaaaaatggatgctgcggcgagtatgattgagaaagctataatcgcaaatccaacatatgcagaagcatacaataacctaggagttctttacagggatgctggtgatatcgctctagcaattaatgcttatgagcaatgtcttaagattgatcctgattctcgaaatgctggccagaaccgtttacttgcgatgaattacatagatgaaggaaatgatgacaaactttttgaggctcacagggactggggtaggcgatttatgagactatattcacagttcacatcatgggacaactcaaaagatcctgaacggcctcttgtgataggatatgtctctcctgattattttacacattctgtgtcatatttcatagaagctccccttctctatcatgactataccaattataaagtggttgtttattcagcagttgtcaaggcagatgcaaaaaccattcggtttagagagaaagtcttaaagaaaggtgggatctggaaagatatttatggaactgatgaaaagaaggttgccgacatggttagagaagatcaagttgatattttaatagaacttactggtcacactgcaaacaataagctgggaatgatggcatgccgacctgctccagttcaggtgacttggattggttatcccaatacaacaggattgcctacaattgattatagaataactgattctcgggcagaccctcccgaaacaaagcagaagcatgttgaagagttagttcgattaccagattgcttcctttgttacactccttcccctgaggctggtcctgtttgtccaactcctgctctttccaatggcttcgttacatttggtagttttaacaatcttgccaagattacacccaaggtactgcaggtctgggcaaagatactatgtgcaattccaaattctcgtcttgtggtaaaatgtaaaccgttttgctgtgacagtgtgcgacagagattcctttcaacactagagcagttaggtttagaaccactacgtgttgatcttctgccccttattcttcttaaccatgatcatatgcaagcctattctctgatggacatcagtttggatacatttccatatgctggaacaacaacaacatgtgaatctttatacatgggagttccatgtgtcactatggctggatcagtacatgcacacaacgttggtgttagtcttcttagcaaagttggactggagcatttgattgccagaaatgaagatgaatatgttgaattggctcagcagttggcctctgacatttccgcactacaaaatttgagaatgagtctgcgaaatctcatgtccaagtcccctctctgtgatggtgcaaaatttatcctaggtttggagtcaacatacagaaaaatgtggcaccggtattgtagaggagatgttccatctttaaaacgcttggaa

SEQ ID NO: 16612 - DNA, 303 bp, Glycine max
agccaagtgaaagtgagaaaaaataagaatcaaagagcataatgtcagggatcattcacaagagctggggagacccttcatgtgggagggcacaagaaggaggaggagcataagggtgagcaccatgctggagaatacaaaggggagcaccatggtgaacacagtagtgagtacaaaggagagcatcatggtgaacacaaagctggagagtaccatggtgagcacaagccagaccacacagaggggttcctagacaaagtcaaagacaagatccatggtgagggcggcgccgtcgagggcgag

SEQ ID NO: 16613 - DNA, 440 bp, Glycine max
agcctaccaaaatgggtattcagtgctccagactcatcccgtgctgtgtggattcacaagttaaggcctctgttattgaaactccagatgctgaaattgaggatagtagtgaggtcagtaactggcctacatttcgtgaatatacacttgagcaactcaagaatgctacatctggttttgctgttgagaacattgtatctgaacatggagagaaggctccaaatgttgttcataaaggaaagctggagaatcaaatgaggattgctgttaagcggtttaataggaatgcttggcctgatgctcggcagtttttgtaaaatcacccgcccaattgggttcttttttaaccttgctcttaactattaattctcctgtagacctgttcatgaccttgcattgcacagatgcattatttatgtactttgcattacttaaacact

SEQ ID NO: 16614 - DNA, 454 bp, Glycine max
catgaatttatatcaaaattcccagaaaaataccagacctttgttggagagcgtggggtaaggctttcaggagggcagaaacagagaatagcaattgctagagccctgcttatggacccaaaaattctcctcttggatgaagccaccagtgccctagatgctgaaagcgaatacctagtgcaggatgccatggagtctctcatgaaaggaagaacagttctagtcattgctcacaggttatccacagttaaaactgctgatactgttgcagttatatctgatggccaagtagttgagagaggcaaccatgaagagcttctcagcaagaacggtgtctatactgcattggtcaagagacaactgcaaacaacaaaagccgaaatctcggtttaacaagcaagatggtaggcttggttattcatgatttgcagagcaaagtataatgagtcaattg

SEQ ID NO: 16615 - DNA, 403 bp, Glycine max
  unsure (1)..(403): unsure at all n locations
gtgacattttagaccttgcttggtccaaaagagggtttctactgtcatcctctgttgataagaccgtgcgcctatggcatgtaggaatcgacagatgtcttagagttttctcccacaataattatgttacatgtgtcaatttcaatcccgtcaatgataattttttcatcagtggttcaattgatggaaaagtgcgcctatgggaagttgttcactgtagggttagtgattacattgatatcagagagatagtcacagctgtgtgcttccgtcctgatggaaagggcacaattgtgggtaccatggcaagcaattgccgtttctatgatatcgtagataatcatctgcaattggatgttcagttgtgtttacgaggcanaaagaagacatcagggaaaaagat

SEQ ID NO: 16616 - DNA, 489 bp, Glycine max
cccacgcgtccgtccaaaggctagaatatctgtaccgcaggcattagagcacaggtacttctcatctgcgcctctgcccacagatcctgttaagcttccaagacccgctcctaagaaggaatctaaggtttcagatgtaatttcaaacgaaggtcctactgtcttgtcacctccaagaaagtccaggagagtaatgccagggcgtgatgggtctgaaggcaattctttgcaaggagattagttcgatgacaggtgtggttagggtcagacaggccgctggtggataatacgggcaagaatgagcccagctccacatggcactagatttttctctttttggattaaaaccctccaattagacctactattaccagtgctgaccgatcacatttaaaaaggaaattagatccagagttctagcagccagaatgaatattctatgatggttccatcagtaagagaggggtctgatgcatttgagaaaattct

SEQ ID NO: 16617 - DNA, 906 bp, Glycine max
tttgtttttggacgcgtgggcggacgcgtgggcggacgcgtggggcatgacagtgacaagtatgagctggtccgtgatattgggtctgggaattttggggtggcaaggctcatgagagacaagcacactgaggagcttgttgctgttaagtatattgagagaggtgacaagatagatgaaaatgtacgaagggaaattataaatcacagatcactgaggcatcccaatattgtcaggttcaaggaggtaatattgacccctacacatttggctattgtgatggaatacgcttctggaggagagttatttgagcggatatgcaatgcaggacggtttagtgaggatgaggcacgcttcttcttccaacaacttatatcaggggttagctactgtcatgcaatgcaagtatgccatcgtgacttgaagttggagaacacattgctggatggtagtccagctcctcgtttgaagatttgtgattttgggtattcgaagtcctctgtgctacattcacaacctaaatctactgttggtacccctgcatacattgctcctgaagttttgcttaagaaggaatatgacggcaagattgcagatgtgtggtcttgtggggtgaccttatatgtcatgctggtgggtgcatatccttttgaggatccagaggaacctaaaaatttccggaagacaattcataggattttgaaagtccagcactcaattcctgattatgttcatatatctcccgagtgccgtcatctaatctcaaggatctttgtggcagaccctgcacagagaataagtattcccgagattcgaaatcacgagtggtttttgaggaacctgccggctgatcttatggtcgagaacacaatgaacaaccagtttgaggagcctgatcaaccaatg

SEQ ID NO: 16618 - DNA, 555 bp, Glycine max
ggaatatgtttgcagacttaagagacagactaacatgggaagatacaacaaacttggcctccttcttgggggagcagctacgccaccttcatcttttatcatatccacgtgtaaatatttcatctttctctgatattgaacatgaattaggcttgggtgaggctaatggttgcattgcaactgttcactgtaaatcccacgctacagcagaatggaggctctttaccagaaccttaacaaagatgaggaaggatgtgtcaagccgtttgaccaagtggggagatccagttcctagcaaactgatagagaagattgatgaatatatcccacctgattttgctgagctgctaaatataactgagaattttggaaatggtgcttgtaaaccttgctcctggatacacactgacattatggatgataacatttacatgaaaccaatattgggttggtttaacaacaatggggaatactgagaatcccaccttgggggccaagggttggttgagtaacgatgaagtaaaatcatggggtcctagaatattcctggattta

SEQ ID NO: 16619 - DNA, 583 bp, Glycine max
caactcagcaaacccctacaaaagctatagaatcactagagactggagaagatgccacagatgaaattggcacggccaagaaagaagttaaaacaagaaacaggaagcctgagtgtccccactcacaaatctctagcactattaactctaccatcatcggaggctggagaagatgcgacagatgagattggcaccctgggaaagaagttaaaacgaaaaacacgaagtgtcggtcgccccccgaagaagtcttttggactagttcagggtcgaccccatttaacacctgatcaagttgtgaatttggatgactatctagataccttggaggacatgcttgttatgcctgaaattgagactacaccatcggatcatctgactcctcctaaccgttttggatgataatgaaatgattgagagctgcaagaagaagctttcttcccttcttgctatagattttccttctttggtctctcgtagtgatgttgcagaagttgcaacccttgcagcacatattcgcgaagatcctagtcttagtgttgatcaactgtttaagttgaagttggtggaacaagttccgtta

SEQ ID NO: 16620 - DNA, 629 bp, Glycine max
tcccattcgtccgcggacgcgtgggttcttcttctttcccattcacctattacagggccattcacttaatgttggacatggaattcagcaccatattttgcatttatgcttcttttctattcatagttctctttaagtcattgctgacatcattctcttccaaacactagaaatagtcactccctcccaattccattggttggtctttacattagagaatcctttcaaatgcgttcccaacacccaaaacaatcttcttagtcacaaaaataaaaaaggtttatatcattgctttcacttgcaaacatacacatgcaatttcattattcattccttgtacagttgctagtggttcatgtgatgctcttttgcatattcaatgctattcagcaaaaaaatgagttatacttccattgtttggtaatttattttacttggcaatcacatgaactagttgaaggattcgagaggttctagataaaatggaaagtgagaatttgatatgtggcctttttatttttgtgacaaagcaaatgtttgggtttagagaatacatttgaaaggtttctcctatgtaaggtcgaccttggaatcaggtgcgagcagctactccaaggtttgtaagggta

SEQ ID NO: 16621 - DNA, 387 bp, Glycine max
ctttcccattcacctattacaggccattcacttaatgtttgacatggaattcagcaccatgttctgcatttatgcttcttttctcttcatagttcttttcaagtcattgctcacgtcattctcttccaaacactagaaatagccactccctcccggttccattggttggtctttacattagagaaacctttcaaatgtgttcccaaataaaaaggttcatatcatttctttcacttgcaaacatacacatgcaattccattattcatttcttgtaaagttgctattggttgtccatgtgatgctcttttgcatattcaacgctacttagcaaaaaaataagttatacttcttccattgtttgggaatttatattacatggcaatcac

SEQ ID NO: 16622 - DNA, 1216 bp, Glycine max
ctcgagccgctccagccgcctcggctatagcttcaatttataagaatggcactttctcctattcgttcttcttctttctcttcatcagctattgttgcattggctgtgttactgcttcttacagggacctcttcagctaacctctcaaagaacttctattccaagacatgtcccaacgttttcaacactgtaaaatctgtagttaaatctgctgttgtcagagaacctcgcattggggcatctattgttcgtctcttcttccatgactgctttgttcaaggctgtgatgggtcaatactacttgatgacactccaaccttccagggggagaaaactgcagctgctaacaacaattcagtgagaggctttgaagtaattgatgctatcaagtctgaggtcgagaaaatatgccctggtgtggtctcatgtgctgatatcttggacattgcttctcgtgactctgttgttcttcttggagggccattttggaaagttagacttggaagaagggattccagaactgccaactttactgctgctaacactggtgttattccacctcccacatctaacctcaccaaccttatcacaaggtttcgagatcaaggactctctgctagggacatggttgctttatctggagctcacacatttggcaaagcaaggtgtactagtttcagagatcgcatatacaatcaaaccaacattgatagaacatttgcattggccaggcagaggaggtgtcctaggactaatggcacaggtgacaacaatctagcaaatctagacttcagaactccaaatcattttgacaacaactacttcaaaaaccttctcatcaaaaggggactcctgaattctgatcaggtgcttttcaatggtggatccactgattcactggtaagaacttacagccagaataacaaggcatttgatactgactttgttaaagcaatgattaggatgggagatatcaaacccttaactgggtcccaaggtgagattaggaagaactgcaggagagtgaattaattagaagtgacacataaatttgtttgttgtaaactttgtacccttcaaaagggggaagttgtttggtcttttttgttgtttaagtgatttctcttgggttgggaaattgtgaattgtttgtttagttcaatttaacttgtccctgtgtaaccttataattttaatatggaataaattatatggc

SEQ ID NO: 16623 - DNA, 542 bp, Glycine max
tgaagtgcctggggcactgtgcaccgaagtagccatttgcccagagagagaggatgatgcattcagggaactgtggagtcagcagtttctccaggtcttagttcagcttattgtttggtgctttggggctatccttttggaggaaagtgcccattcttgcaaagactgtgtttgtccccttccacccctttcccttttgtgggctccttttatagtctccatgtatgtgccaacgtatttttgtttcatggatacgatttctgtaatatttgttgcctgtcacatagacgggtatgtagggtcgccaattgctttattggtaatttttggtgagggatgatataaaaaattttgtttttcttacatcctttttccggcattatttttgggttgagagtatagtccatgagtattgatgaaggcatcagttttgggttatacaaagcttttttaagggtccctttcttcgcaggttgttaaacaattatgttcattcattttttataaattttgggggaagcaaaaaaaataataaaataagg

SEQ ID NO: 16624 - DNA, 732 bp, Glycine max
gttttgggcagatgcaagatcaaggacttcttacagtcattttggtgatgcagttactctggacacaacatacagaataaatcaatatggagtgccatttgctccattcactggggtaaaccatcatggtcagatgattttgtttggctgtgcacttcttttggatgattctgaagcttcttttgtgtggctttttaagacatttctgacagcgatgaatgaccgataccctgtctctatcactactgatcaagacagagccatacagacagccgtttcacaagtttttcctcaaacacgccactgtataagcaaatggcatgtcttgcgagaaggccatgaaaagttggcccatgtatgcaacatgcatccaaattttcagattgaactttataattgtattaatctgacggaaaccattgaggagtttgattcatcttggaattttatcatcaataaatatgaactcacgaaaaatgattggcttcagtccttgtacagtgctcgtgctcaatgggttccagcatattttcgtgattcattttttgcagcaatatctcctaatcaaggatttgatggttcttttttttatggttttgtcaaccaccagacaacattaccactgttctttaggcagtatgaacaagctttggagtgctggtttgaaaaagaattagaatcagattatgatactatttgtacaacccctgttctgaagacaccttccccgat

SEQ ID NO: 16625 - DNA, 481 bp, Glycine max
tttctacgcgtccgggatcacatgcgtaaagctggtgatgtgtgtttttcgcaagtcttccgtgagcgtgggggggtgactgggatagttgatgatacgcaattatgatgatatgaaatatgctatcaggaaacttgatgactcagaattccgcaatgccttttctcgtgctttcatacgggtgagggaatatgatcgaggttattctagaagtcctagtcgtgattcaaggaggagctattctagaagcctcagccgcagtccatgtatctcacgaagccgcagccatagccgcagcagaagtcatagctatagtgacaggagcagaagttggtctccgaaaccaaaacactctcgacgttcaatatcttctttcaaggtcagtttcttaccaagtctgatacattatgcaggttttgtgctcttgtgtctttgattgttgaaattttaaagtttggttaatgtcattagtgaatgagta

SEQ ID NO: 16626 - DNA, 496 bp, Glycine max
ctcgagccgtgcttctcaattgtatgggcttctgcggttccatgaacattactcatacaagctcatctcagagaaagtatccagcggtaataggagagttgtgccatcaatgttctctggccgatcttaggaaatccaccaacaacttcgatcaaaacagagtaattggacgtggattatttagtgaagtatataaaggctctgtacaacataagggtgcttctgattatactgttgcagtaaagcgattcaatgaacgaggattggaagcgttcaagaaggaaatagaattgctctgccagctttttcaccctaattgtgtctctataataggattctgcaaccacataaaagagaagattattgtgtacgagtacatgtccaatggttctctagctgattacctacaaagtggagatgcagaagcattatcgtggaagaaaagactagagatctgcattggagtagctcgtggactacactaccttcacactgg

SEQ ID NO: 16627 - DNA, 984 bp, Glycine max
gtcttgcatcttcatgatgaagattttagtgtccgattagcctgtcggaataccctgaaacgagtttgcccattgatggaaattgaaggaatgcttgctgtactaaacacacacagtttcctttctgatcatcgaagtgattatgaggactttctccgagacattgcaaagcaatttactcagcatcttccctctagagttgatagttatatggcatcaacagtacaggcttttgacgcaccatggcccataattcaggcaaatgctatatacttctgcagcagcatgctttctctatctgacaatcagcatattttagctgtttatcattcacaggtcttcggtatgctggtgggaaaattgagtcgatcacctgatgctgttgttagagcaacaagttctgctgctctgggcttgttgctgaaatcctcccatttatgctcatggagagctgttgaactcgatcggttagaatcaacatcacggaaccatgatgtggagtctacgaaaaactagcaacaattctggaatatataccaaaatcatgattagctatgcgcttgaagcactgccttttgggaatggtcgagtggactagggtgctgctccgcatatttgtcatgtgaaagtcacccggatattggaagagatccctttgatgttcgtgtacagtgttgtgttagcaatcgcctcttccgtacttatccattcttttgttttgttgtaaagcttgaaatagaccatcgatttcttagtttttctttgaaatgtacatttatgttatgatcgtgtaaattgttgtatattagtcacactagaaactacatcgcggaggagatttttgcacatttcattattcgctttaataatttatattaaaaattgatggtgtccaagtactaatagatagccaaggtattttaaaaaaaaaaaaataaaataaaaataaaaaattttaaaaaaaatataaaaccccctttatat

SEQ ID NO: 16628 - DNA, 628 bp, Glycine max
ccttgagctttctcttgctttttgcttatccaactcctgaacttccaactccaagctttgagtatcacactgctttcgatggtgttgcattgggaattgtctctggggtgcaacaaacataccatcaatttcaccatgccaatgttcctcgtttgttctcgtcagagctgactatacctgtatttctgggaaggatgctattgggaatacctacaattctaattgtgaagttctgcagtaagactctcgcaaaatggaccattcctgtggtagcgaacaccttgggcatcccaataaaatcaaccggctatatacctacactgaatggatctgtgacaggtaaaatgtctgataagcttaaacaaggttacttgcaaaagctcctttcccagcacaaggcattcgatgttgataccggaattagatttgttcagtatgcagggcttgcctggtctgtagttgacctagtgccgtctcttttttcatacatgagcttgtgatgatatgcttaaattttttgaaaattttgtacagccggagataatccgatatcggtcatatccagtcaaaattatccatcagaacatataagtgtagatcatttacacgcgatgaaattttaaccgcc

SEQ ID NO: 16629 - DNA, 441 bp, Glycine max
atctgtgacaggtaaaatgtctgataagcttaaacaaggttacttgcaaaagctcctttcccagcacaaggcattcgatgttgataccgcgtggggatttgttcagtatgcagggctggcctggtctgtagttgacctagtgccatctcttttttcatacatgagcttgtgatttgaaaattttggagagccagagaccatcccatttcggtcatatccagtcaaaattatatatcagaacatacacgaatagagcatttacacgcgataaaattttgacgtgagaatcccttgtagacccataaaatgtctctgcaatctttgcaagccccaaaaatatataaagattatgttcacgtattaattttctgcaattaattttcatgcctgtgtcgtagcaactagacaaaggccttattcttatttcacgtcaataacttt

SEQ ID NO: 16630 - DNA, 469 bp, Glycine max
gaagaaacgaagatagaatgtgcacagccctaaagacgaattaccagcttagcgaggagatcggtcgcggtcgtttcggcaccatcttccgctgcttccacccactctccaacgaaccctacgcctgcaaactcatcgacaaatccctcctccatgactccaccgaccgcgactgcctccagaacgaacccaaattcatgaccctcctttcacctcacccaaacatccttcaaatcttccatgttttcgaggacgaccaatatctctccatagtaatggatctctgccagccccacacgcttttcgaccgcatggtcgatggtcccatccaggagtcccaagccgccgccctcatgaagaaccttctggaagctgtcgcgcactgccaccgcctcggcgtggcccaccgcgacattaaacccgacaatattctgttcgattcggcggacaatcttaaactggcggactt

SEQ ID NO: 16631 - DNA, 499 bp, Glycine max
ggatccctttctttctttcttttaagcacctacgcgaacagtgtcttcttttctctctcttctgtgtttgtttctcaacgaaaggcgaaatttcggggatggtgtgtccttgaccttcatagccgcgtgacgttatcattgcctctatccatctctgcttctttctttctttctttctctgctatgctattgctgctaacacccctttggaaccttccctgtttatgatgctttgacttcttcctaaattctgtcccacgttgattgattctctttctctctctctgggttctctggcatcaaagttcgtaccttttgtggtttggatggatctgatgccagtttggttttctggggtgtctgtgttccttaacccactttcctcctttttaggatactcgtctaattgaattttttttccttttttgctcaagttattttctgattttggttcttcagtttgcttatgctgttttggtggcttttggaagtttgaaca

SEQ ID NO: 16632 - DNA, 545 bp, Glycine max
ctgcccttatcttatcacattcacaaacttggtcacatcaacctttaatctcggtttttttttccctcactgaagcaaattgaaagtaaccccctcacttgccactataaagattcccatgacaaccaaatttagtgaccaactaacttcctaagtcctaaccctatttaacaccttattagctttggtagacccaatagttagtcatcagaatcccttcttctctataatatctatgatccattcactctgagccgtaacagttctaaactccaccatttagtgacacccttaacatgatataatgccatcggtgcattcaagcccgggttactcgatggaaaacccggctttggcgtcgctactccgtcacacgacaggggaaaacaagcgtagcaataaattgtcgagcggaggagggcttttgaaaatgttgaagctgtttcctatgttgagttcgggatgcaaaatggtggcactgctgggaagaccacgaaagatgctgaaggacagtgcgacgaccgggacaatcttcggttaccgga

SEQ ID NO: 16633 - DNA, 1554 bp, Glycine max
gcttacgcaaacgcaactcagctttccttcgatccctgaatctggacgttactaaagcagcccagccatccacgcaccattttaaaagccaacacagaaagcacagaaccaccacatcgttgccttcctctaaacgataaatttttgggattctgaaactagtgatacattttcttgcatgaaggcagcgtattgaggaattcagttagtgtattggaagatctagttcaacatgtcttctgtaagcaagggtgataggaaggcttccattgatgcagcatcatggctgttcaatgtggtcacgtctgtgggaattattcttgtcaataaggccttgatggctacatatggttttagttttgctacaactttaactggtctccattttgccacgacaaccttgttgacactcattcttaaatcgttgggatatatccagacctctcatcttccattatctgatataatcaaatttgtcttgtttgcaaatttctccattgttgggatgaatgtgagtttaatgtggaactctgttggtttctatcagattgctaagctgagcatgattccagtatcttgcttcctggaggttgtcttggacaatgtacgatattcaagggacacaaagcttagtattgttttggttttgctcggcgttgctgtctgtacggtcactgatgtcagtgtcaatgcaaagggtttcatagctgctgtaatagcagtttggagcacagccctgcaacagtattacgtgcattttcttcagaggaagtattctattgggtcatttaacttgttgggccatactgcaccagcacaggcagcaagtttacttctagtaggcccctttatggactactggttgactggcaaacgagttgatgcctacggctatggtttgacatccacgttgttcatcattctgtcttgcactatcgcagtagggacaaacctcagccagttcatctgcattggtaggttcacggctgtaacgttccaagtccttggtcacatgaagactatcctggtcctgatcttaggattcattttctttggaaaagagggtctcaatctacatgttgttctaggcatgatcatcgcaatagcaggaatggtttggtatggcagtgcttcttccaagccaggggggaaagagcgtcgtagcttttccctccccaaaacacaagattatagttcactacctgtgtcctctgaaccagatacgaaggaatagaaaataatagagactcattagagagaaagtgctgaaacttctggtgaactgcatggaaaaaatcaggtgcccattaggcgagctggttcattttctttataccaggagtgaattcccaattatttatagatcatggttatatcttttcttatgtgttaatgaattgtttgggagagaaatgagaggaaacagcgttgttaagggatggaaaaatctacgttatgttccttttttttaatgacagaaaatgttacggttacttttatagtaaaagtttaattccatttttcccatcagggttggttccgatgttaaccatg

SEQ ID NO: 16634 - DNA, 1124 bp, Glycine max
gtagtggccattttattgcttcaaacaataaactttcagctgtttcaagagcacaaatttcagcaccaccaggattttctgttccgaacagggcaccacctcctggtttttcttcccttgagagaatggggcaggcttttgactccctctctggagacattgaatttatggatcctgctattttggcagttgttaaagggagaattcaaggtgcacaaaacagcccagtgctggatatgcgatccaattaccctgaacagttaaattactttgaaaatgaggctagagttcaattattgatgcaaagatctctctcaccacatcaaaaccttcgattttctgaaattgggaattccttttctcagtttggtgattcttatggcatttcttcaaggttaaatcaatcacaagttagtaatctggcttcatttcctcagttatctctgcagcagtctagaaatgcagtcttgtcaaatggccaattggatgggcggaatggaaatggtctgggtgtggcagagcttttgagaaatgaaagacttggatttaacaagttttatagaggatatgatgattcaaaatatcggatgcctaattctatggatgtgttcaacaggacatttgggatttgagattgttgggtatattggccatggtaaagccaagtcagaaataaacaaacagaatttttctgcattgccaaaggtgatggggatggctcatgacataacctgtctattgggctacgaaaggatgaaactctcgcttatagctgcagctggttactgttcttgatttgcagaagcaagctgcgttgagatttaagaaatcaatcatggatcggaaagtatttggcaggtagatcttagttgagtggtttctcttagtacagaacatggaaacctgttgatcgatcgactatcaaataatctctcctattttgttaatgatattttttcttttaccgatattgtggatatagatagaggtttgattattttttaatatgtatattttgtatgaaatacgtcactttttaaagttggaaatcccttctgatatgtgtatgaaagagatcttttactaacgttggttctttgtgcataatttttataatgccggtt

SEQ ID NO: 16635 - DNA, 873 bp, Glycine max
ttatttcttattggttcctccatgatgcaagaaatgagcaccgcattggaagattagttagtgatgcagttaatattggaagtgatgctgttatggacaagggtgagagtagtataatttcaaatatattatcgatggagtttgatgcctgggatgactcgctggcatcacatgagagtttgaccaagttgttgggtgacaacactgacagccagaatggtccgttaaaaaaatctagttctaggaaagttcaaagtaacaatcaatcaagattttcttttgcatggcaggaggaatccaaattccaagccaatgtacctccatcttctggtgctacccagccatttccaaagaatggcgtcactcatccaggattttgtggaaagagacttttctttgaacaagctgggttttgcaaatggcttcccctccaataacctcaaggaatctggaaatcttggtcagtggtcatttcattgcttcaaacaataagctttcagctgtttcaagagcacaaatttcagcaccgccaggattctctgttccgaacagggcaccacctcctggtttctcttcagttgagagaatggggcaggcttttgactccctctctgggaattcattgctggacccttctttcttactgagaaattcttatcaaacaccctcaaatggaaatattggtggtccaggtgacgttgaatttatggatcctgctattttggcagttagtaaaggccctgaacagtttaactactttgaaaatgaggccagagttcaattattgatgcaaagatctccctcaccacagcaagaccttcgattttctgaaattgggaattccttttctcagtttggtgattcttatggcat

SEQ ID NO: 16636 - DNA, 751 bp, Glycine max
cccacgcgtccgacaggaagttcttcttcaccaagtgatgctgatttgcaatccctttttgagctccttcaacaaatttcgatgaaagtgtctgtttcacgatcagagaactcgtggctaaaggctcttaaattctatgcaaatcaacgacgatattttgataaatcggtggagatttctgttgttaccttggtcagagatggtggcagtgaaaatggattttccctttcttctgctatcgctagttctatacttcaaaaggatggaattcagaagaccagagatatctataaacgatttctagctttaccgcttcctggccttgctttagcgtccgattgcattgacctggaaacaaaccttgcatcaataggagataaagatggtcttataaatgccaggaaattatatgaatctgcactcgcaacttatgaccaaaatgtcagcttgtggcaagattactatcgcatggagaccaagatgggaacatcagaaaaggctaatgctatctattggcgtgcaaggaaagtactcaaagatgctagtgaatttgtcactgccacagatatgtgataatatttctaaattacgaccatggctattggagttcaattttgaccacttcatttatttggtttttctacagaaatttcttttcgaccagtctagtctagactcaaatttgtttttccttcccaagaggtgaggaatagagcttcctccttttccccaaaagctaattaactgtatt

SEQ ID NO: 16637 - DNA, 399 bp, Glycine max
gtctgtgttattacttgcactgccatccccgcattctaaagataccaaagatgagaaccagcaaccctctgaggcaactggtgttggtagaaactgggtgcagagtatgttcagccgaaataaaacaactagatccagctcatttagtcgcgttcatagatggacgtctgatggaggaaactcagctacaaatgagaatgggacttctcgcaaacaagatctgtcaagtggtggccagaaaaagcttcataccaatgttcgcatacttaggggtcataatggtgccattactgctctccattgtgttacaaaaagagaagtgtgggatttggtcggtgatcgtgaaaatgctggtttctttattagtggaagcacagactgcttaattaagatctggga

SEQ ID NO: 16638 - DNA, 537 bp, Glycine max
ctcaaatattatctatcaaaatcagaacggattcagaatacccacttatatgagttatttgggtctaaactatggttcaattgcaggcttgcttgctgcacgctactgaaaaagaaagaaagaaaatccgtttggatgaatgcgcgagaggaatcaacccaatcaagagaaactctctctcccttctacacgtttagagaagagaaagtgtgtctcatttctcaatcttgcccgcaccttttcgcgatttctcatttttctcctgctcctttccgtttccgtttctctgctgctacttccaactccttccattctcaactttctttcaatctctagggtttaattcgccactcatcgaatggaacctcgggttgcgaacaagttccgtcttggccgcaagattggtagcggatccttcggcgagatctatctcggtacgaatactcagacaaatgaagaggttgcagttaagctcgaaaatgtcaaaactaagcatcctcaattgttgtacgaatcaaagttgtataaaatacttca

SEQ ID NO: 16639 - DNA, 318 bp, Glycine max
gtcagtcgcaggcttcctgcacgctactgaaaaagaaagaaaatccgtttggatgaatgcgcgaggggaagagagactctctctcctcttccttctacacgtttagagagagaaaggtttaattcgccactcatcgaatggaacctcgggttgcgaacaagttccgtcttggccgcaagattggtagcggatccttcggcgagatctatctcggtacgaatactcagacaaatgaagaggttgcagttaagctcgaaaatgtcaaaactaagcatcctcaattgttgtacgaatcaaagttgtatacactactgcaag

SEQ ID NO: 16640 - DNA, 619 bp, Glycine max
caacaaccaaaacaaaccaaacaattccccacaaggaacatacattactttgttctttttctttttctcaaatcttcttttaaagacaatcttatttgtttatttctgcacgagaattcgaaccttgaacaacataaacatgggaataaacacacgtacactagaaatcaccgttatctccggcgaaaacctccgcgtaacggaggacgcgtacgtcgtcgttcgggcggagtccttaaactgctgcaccacgagaaccgccaaggacgacggcaccaaactcctctcgtggaacgagaagttcctcttggacatgcccatgcatgcaaggtccataaccttcgaagtgcaatgtaacaggttcaagggctttcggccgctcggggtggcccgaatcgccgcctccgatttcctcggcggcgccgtgccggaaaatggcttgcaggtgctgagttacgggctgagggactgggaagggaggcggaacggggtcattcattttgccgtgagggtggcggcgacgtcgtcgtcgacggaggagtgtttgaattcgaagcccgccgtggaaccggtggtgccgagaaagggttgcggtgatcgaatcaatgtcggtggcaat

SEQ ID NO: 16641 - DNA, 426 bp, Glycine max
cccacgcgtccgcccacgcgtccgcccacgcgtccgcccacgcgtccgcccacgcgtccggcggcgacgtcgtcggcgacggaggagtgtttgaattcgatgcccgccgtggaaccggtggtgccgagaaagggttgcggtgatcgaatcaatgtcggtggcaataagtccaatgaagttgctgttggtgttccgatatggtggaactaccccaacattatttagagattaattttttaaaatttacattatttattttttataacggtcaagcatcatagaagaagttcagtcttaattcaattatagattatagatattgtgagaaagttgacacactttgctaaaaagcttgaatgtcatccttgtctttttttaatttgttttgtttattcatggtatttatgtaaaatatttatttgtttt

SEQ ID NO: 16642 - DNA, 507 bp, Glycine max
taaattttacaaaccttaagaacactgaaacaacaaaccaatttccttccttctttctttccctccttcacactcatttccaaaacccaaacaaaaccttatatataaccatattaaccacttcttctgcttcacacaaacccaacaacaaaacacaaaccaaatagtttcccacaagcaacacacattacttcattttctttatttcttttgtttatacggttttttccttggaagagaattattcgaacctttaaaacataaacatgggaataagcacacgtacgctggagatcacagttatctcctgcgaaaacctccacggcgtaaaggacgacgcgtacgtggttgttcgggcggagtccttaaactgctgcaccaccagaagggtcaaagtcgacgacggcaccaaaaaacttctctcgtggaaccagaagttcttgttggacatgcccatgcatgcaaggtccataaccttcgaagtgcaatgtaacaggttcaagggct

SEQ ID NO: 16643 - DNA, 666 bp, Glycine max
gtttgtatatcctcgaaaatgatgaatgaagcggctggtgaaccctaattagttgtcggtgtttgttggaagagcacatctctgttttcttcgtcatcttcccctcccctccccaaccagagatgcgccccacaacagatacttactaaagctttcaactttccagcaccctttcagatgttagccaaggcccataacaaaggggatggatctaagtccctggctaagatactggcaaaatggaaagaatataatgcccagattgattccagcagtgatgcagataagccaattcgcaaagttcctgccaaaggatcgaagaaggggtgcatgaaaggtaaaggggggccagagaactcacggtgtaactaccgaggtgtcaggcaaaggacttggggaaagtgggttgctgaaattcgagagccaaacagaggcaataggctttggctaggtactttccccactgccattggagctgcccttgcatatgatgaagcggccagggcaatgtacggttcctgtgcccgtctcaactttcccaatgtttcagtttccagtttctctgaggaatcttccaaagattctccggctgcgaatcattgtggttcctcaatggcagtgtctgcaaacgtgcccatgctcccataacttcgggggaagggcaga

SEQ ID NO: 16644 - DNA, 2671 bp, Glycine max
tacgctgtcgattcggctcgattgactggattcctggggagagttgagtctgacacagagcttcccctcttgcaagtcatacaataataatcccgaagctacgtaggaaacatagatcacaattcacacacatgcggtgacagtagtagtgctagtgcagcagagacgatcatgaaccacgtgcacactctaatttccatcacacaggatcttttgtgtgaagaagactagaaaaccagcttcaattatcgagaattgtttgatgggttgatcaaaaatcgctctccaaaccagattcgtaacactgaaagtgtgaactagtaacaaaagcaagagaaagattttctccgatggcgacatattttcatagtaactcggaaattcaagctggtgctgacggccttcaaaccctcgtactaatgaaccccgggtatgtccaatactctgacacgccgccaccaccgcacggcggaaacctcgtattcctcaactccgccgccggaaacgcctccctacaaagtctcccccacgcgccgcccccccacacgcagcaatttgtcggtgtcccactctcggccgccgcgcatgagccgccggcgtccatgcaccacgacgtctccgccctgcatggcttcctgccgcgcatgcagtataacctctggaacacaattgagcacaacgcggcggcgcgtgaggccccacgcgccacccaggggctgtcgctgagtctgcacggggaccacatgcgcgcgtcaccgtcctcggcttccggggcctccaacggcggcggcgtggcggggattcagagcgtgctgttaagctccaagtacttgaaggccacgcaggagcttctggatgaggttgttaatgttaacggcggaattagggttgaacacgcgaagaagctgaacttcgaaaaaactaaggttgttggagaatcatcaaccgccgctagtggcgacggttccgttggtggagagggaagtgggaaacgtagctctgagttgtcaactacggagagacaagaaattcagataaagaaagccaagctaatcaacatgcttgatgaggtggagcaaaggtacaggcagtaccacaaccagatggagatagtgatatcatcatttgagcaagctgctgggataggctcagcaaggacttacactgcgcttgcattgcaaacaatctcgaagcaatttcggtgtttgaaggatgcaataacagggcaaattagagctgcaaacaagagtttgggagaagaggattgttttggtgctaaaattgaaggatctaggctcaaatatgtggaccatcatctaaggcaacagagggctattcagcaactgggaatgatccatcacaatgcttggagaccccagagaggattgcctgagagatcggtttctgttctgcgtgcttggctctttgaacactttctccatccttatcccaaggactcggacaagcacatgcttgctaaacaaacagggcttaccaggagccaggtttcaaattggttcattaatgctagagttcggctttggaagccaatggtggaggaaatgtacttggaggagatgaaagagcatgaactaaatggttctgaggagaaatcaagcaagagtggtgaagatcctgctacaaaaaccacaagtccacaagagaaacgtgctgcctctgaaattgaatccaaaagtttcaattccaaacaagatgtttccaaacaaagccagaacactccaattcttccaacttctccaccatcaatatcacctatagggggaagtgttaagaaccaatcaggattcagtttcatggggtcatcagaacttgatggaatcacacaaggaagtcctaaaaaaccaaggaaccatgaaattcttcactctccaaaccgtgtcccttcaatcaacatggatgtgaaagccaatgaggcaaacaatgagcaacaactctctatggatcttgagaggcagaatagggatggctacactttcatggggaaccaaacaaacttcattagtggctttggacaataccctattgaggaaattggtaggtttgatgctgagcaattcacaccaaggttttcaggtaagaatggagtttccctcactcttggtcttcctcattgtgacacattgtcaggaacacaccaaagttttctcccaaaccaaaacattcaacttggaagagggttggacattggtgaaccaaaccagtttggtgccttgaacaattccaattctcacaattcagcagcatttgagagtatcaacatgcagaacccgaagaggtttgctgcacaattgctaccagactttgtggcctaaataagacattgaagaggggataagatcatagttggtgacattggttatatgggtctctcatattttcttctaatccatgtgcttgtttcttggggagtagtgataaaatcttagtgtaaagaaagaaggaattttactctagtataggtttataccttgcatagaaccatttgagttctttagatagcttagagatttgaaagtctatggttatttgaggttgtatattatttttgtaatttttgaaaatgggatagatgggttggtgtcataaaatttcaattggtaaagattacaatatatcttcgattgagagtatatgcaatgtaatattttgc

SEQ ID NO: 16645 - DNA, 726 bp, Glycine max
tttcttgtttgcattcctggttataacatggatcatgcaaacaatgaatattggtaatggaacaggtttcaaattggttcataaatgctcgagttcggctttggaagccaatggtggaggaaatgtacttggaggagatgaaggatcatgaacagaatggatctgaggataaatcaagcaagagcaatgaagattcttcttcgaaaatgtcagccccacaagacaaaggtccttccaatgaaaccgaagctaagagttttaattccaaacaagaagtttccaagagccagaacactgctatggtttcagtttctagaccttcaacatcaccacttggtgtgaatgtgagaaaccaatcaggattcagcttcatggggtcatcagagctagatgggatcacacaaggaagtcccaagaaaccaaggaaccatgagatgatgcattccccaaatagtgtcccttcattgagcatggatgtgaagcccaatgatgaaaacagtgagcagctctcaatgagatttggggttgatagacaagactctcttgtttgatattgagctgttgaagattattccaaactgattgatcaaattttgaattgactgtcaaatatcaccgtcggaatgttgaggtctacttatttacagaggatgagaggatacatgcaaacaactgtcctgtagaaattttgttaatattgatattagatgcttgtgtcaaatgacc

SEQ ID NO: 16646 - DNA, 469 bp, Glycine max
ctcgagcgattatgtttctctttttctctctctacaccttcaaaaatcaaaagttccttgttgctcatcaaggggtgttatgttagatgatttgaaaagatagggtcaaatcaacagaagttcccctattttgatctgttcgcagttgggatggaattgcaggtgatttgagcctgacacagagctttcccgcttataagtagtagtgctagtgcagcagagacgatcatgaaccacgtgcacactctaatttccatcacacaggatcttttgtgtgaagaagactagaaaaccagcttcaattatcgagaattgtttgatgggttgatcaaaaatcgctctccaaaccagattcgtaacactgaaagtgtgaacaagtaacaaagcaagagaaaattatctccgatggcgacatattttcattgtaactcccaaattcaagccggcgctgacggcctttaaacttttc

SEQ ID NO: 16647 - DNA, 630 bp, Glycine max
cacgaggcacttcttgcctttgaagatgtttctaactgtcctgttggagagctgcttgacatatcacagcgtttaaagacagcaagtgaggtgaatgcagccatacttactagccagagccatgaaaaagacccaaaacttccaagcctgttgaagatgctgctatgcgcccaaaaccagctggatgagaaagctgcttatcctcgtgtcaatgatctatccaccgctacattagaagatcctgctgtttgaatacttgtaacgttttaatttcagttcggggattttaggtgctagatgaagatattgcagtgattagcattaaaaattgtgtatgtactttaatcgaaagatatctgttgaaattgaaaaaaaagaaaaaaaaactcgagtattcagcaactgggaatgatccagcacaatgcttggagaccccagagaggattgcctgagagatccggttctgttctgcgtgcttggctcttcgaacacttcctccatccttacccccaggactcggacaagcacatgcttgctaaacaaacagggcttaccaggagccaggtttcaaattggttcattaatgctcgagttccgctttggaagccaatggtggaggaaatgtacatg

SEQ ID NO: 16648 - DNA, 475 bp, Glycine max
  unsure (1)..(475): unsure at all n locations
aaagggccttggctcgcttttggattaaatttggagaggattcgattgcttctattaccgatttggttcttggaccctctaaagatgaacaagaaagagcaagtgcaaagaaaaaggcagaagaaactatcatggtaatggaagagcaaggcctaggagacaagaagttctttggaggcaacaatattggaatggtggatatagctcatggatgcctaagtcattggttagaaggcttggaggaaattgtggggatgaaattgagtgagccaaacaaatttcctcggttgcatgcgtggactcaaaatttcaagcaaagttcctgttattaaagaaaaccttcctgattatgagaaactgttgatccatcttgaatggcgtangcagggatatgttacatagtagaactagaaatcataaaatgggtaatgaaattatgactatagtctataggcctatagtgaataggagttta

SEQ ID NO: 16649 - DNA, 307 bp, Glycine max
cccacgcgtccgagacaaggcactggaaatggctgtagactctttgggattcagctacttgggaattctaatgcagaaggaagatctacaaacagtcactttggcaggaagggtgggtgatgataggtcggttccatctttagatgctgagtctgatcaactttctgaaccttcaaaggccaaccgacctgatattccttcagttagttgcgatgctgaaaaatcatgcctgcagtctccccaggagtcacaatgcacgcaattacggagctctacaaaggttcacatgcaaggaatggctgttggg

SEQ ID NO: 16650 - DNA, 342 bp, Glycine max
acggaaacctgaaaccctaacaatccctattcaatgacttctcgcgccgacgatttcgaaaaggactaagctctccgcctccggcgacgacgacgacgatgatgacgacggcctcaaggaggacatggccgcgctcgcccgagcctgcacgatcgccgtcccgcgccccgacgataattccaccgccgaagacgatgttccggcggaggacccgctcctcctcgccggcgactccatcgttcccgccgccaccgacgactacgacgaccaagacgacctcgagtgtcttaagagagtgcagagcctctaccagcccctgtccattctttcgccgctgacacc

SEQ ID NO: 16651 - DNA, 556 bp, Glycine max
gagggcggtcctcaggtcacgttcgacgccaacgcgcctctgcgcgagagaatattcagctgcagccgcgaagcgattgagaagctcaaagccatggccaacaaccgccgctggccggaaaacaacaactacaacaacatcgccggcgagttgttgcggaagcaaagcaacgataatctactaaaggagaacaaggcgacgactattctcgagacctggttcagggtgaattcgaatccgctttcagttaccgcaaacggtggagatttcgtcgtttcaatcggtgtgcgcgcttctgtggcgcggggtgacgcgggcgaggaaactgccttcgtccaaaacgacgacgtttagaatggcggttaactgtcgccaccggttagaacccaaactggaagcgtactacttcgggaacgcgattcagagcgtgcctacttatgcttccgcgggtgaggtgttgtccagggatctacggtggtgcgcggagcagctgaacaaaaacgtgaaggcgcacgacgacgctatggtgcgacgcttcgtagacgattgggagcgc

SEQ ID NO: 16652 - DNA, 490 bp, Glycine max
cgcagtccatcattggaatacatagagaaagagaagagcttatggtggaaggttgaagaaagagatgagtggaactggaacattcttctacggttcggtaattcagccgttgattcgctaccactatctatcaccaccaatccctattcgtcccttatgctgcatatcccctctcatcacctccattcactccaacgacgccgtttctccgcaaaacggaacgcttcgcttccagacagagcatcagcagcacagcgaagaaccgcttcccgttccgtcactctctgccgctgaagaaaacaaagcaacaacgaagcttcgaaagaagaaagaagacgacgtcgtttccgataaccgcttcaagctccgcaacggaagagaggtttttgaagaaaaagcgtacctcgtaggcgttgagcgcaagaacgatgttcaggatttcggcatcgaagagtctctgagcgaattgtcgcagttagctgacactgct

SEQ ID NO: 16653 - DNA, 352 bp, Glycine max
ggagaatcatctattttggagaaatacaaacacagaaccgctctcttgggacacccgaatcaaaatagctattggtgctgcacggggcttggctttcttacacacctcagaaaagcaaatcatatacagagatttcaaagcctccaatatactacttgatgaggattataatgcaaaaatttcagattttggcttggcaaaattaggcccttctggggaagattcacacgtgagtaccaggatcatgggaacatatggctatgctgctccagaatacattgcaacaggtcacctttatgtaaagagtgatgtttatggttttggtgtagtgctgcttgaaatgctgacaggg

SEQ ID NO: 16654 - DNA, 304 bp, Glycine max
attggggtaaaaaaccaatccgtctgtaactgtcacgtacacacgcagtgtgtctcgtctcggcttagcaggtatcgctgattcattcatggaaccctttcgatttcaattgatgccaaattccctgtgcttactcgtttgccgcttcaaatgacgattaaggataatcttattttctcaatctctgaatgtgatgtcctttgcaataagaccaaggtgtgtggtttctgctgatgtggagaatcctggaaataatttgtatgttacaggcttgtccacaaggataactgacagtgatcttcac

SEQ ID NO: 16655 - DNA, 998 bp, Glycine max
ggaggaatcaaatgttgatggcttttttgaagatgttttggtgaatggtaaaccatggactggtggagtcccggaggtgtttagtggttcacatgtgtatgtatgtgctcatggaagtcgtgacgtgagatgtggtgtttgtgggccagttctcatcaagaagctgcatgaggaaattgagcttcgaggtttgaaggatcagatatctgttactgcttgttctcatattggtgggcataagtatgctgggaatgtaatcatatacagcccaagagcagatggaaaaattatgggtcactggtatggctatgttactcctaatgatgttcctgatttgttggaccaacatattgcaaagggagaggtcatccaacgacttttgaggggccaaatggggccatctgttgcagatggcaaggaagcagatgaccagaaagttgctaatggggaggagactggcaaggtcaagaaaaacaatcacgttgaaagcgacaatctgagcagcaaagaaaacgtgggtggttgttgccagggtgttaatggagtttcttgttgcagaagtgcaagtcttgagcaaaacaaggagattgaagaaacacctgaaacacataagaaggggagcaaaatctgttcgaattggcctcaactgcagcagcgtgatattcgcacagctgttggtgtgcttggacctgtaccagttgttgttgtggcttacaaactgtacagaagggcagcgtaggttactctttaacccatgttttttaggttgcttggaagtttattacccaatatttttttttgtcgaggttcaataaatttaagaaacaatcacgaaaactactattaccaagtcatacatagacacttccgcatgttgcatggaaggatagttaaagtctagcaacagatgtagtgatgaaaactttatcatcttttttgaagcgcacagaattatgattatgctgctgaatgtttaattatgttgtgtctctttactt

SEQ ID NO: 16656 - DNA, 684 bp, Glycine max
cccacgcgtccgagcaaactggcttctttggaaagtgaaaatgaagatttgaaacggaaaatgttagaagccgagagcaaaagttcccagtcttttagtgaaaatgaattactggttggaacaaacattcaactgaaaaccaagattgatgaacttgaggaatcattgaaccatgctctatccgagaaggaagccgctgctcaagaacttgtgtctcataagatcagtataactgaactgaatgatttacaatcaaaatcctctgaaattcaatgtgcaaatgaagctctcattctaaaagtagaatcacaattacaagaagcattgcagaggcatactgagaaggaatccgaaaccaaagaattgaatgagaagctgaatacactagaaggccaaataaagcttttcgaagaacaggcacgtgaagcagttgcaacttctggaactcataaagctgaactggagcagagtctcataaaattaaagcatcttgaaattgtcattgaggatcttcaaaacaagtcactccaccttgaaaaagaaactgcagggctgactgaagagaactcaaagcttaatcagggaatagctagctatgaatctaaattaagtgatttacaggagaagctctctgcagcacttgttgagaaggaggaaacagttaaagagctactcaccttgaag

SEQ ID NO: 16657 - DNA, 614 bp, Glycine max
ccaaagagcccagcatagccagaatatgaaacctcacgtttctggtgaaagctctaatttggccaaggagtctagcagatccgtcggagagaagctccaccaggtttgtaaggctgccatggtggcaatcatcaccgatggatccaaccaacctagcagtagtagtaggcttctcaccaatcaaaggttgagcctccaatcagaagacccaattagaaccttaatgttcttggtctcttggagtcacacatagctaattaaatacactcaaaatcgtgaaggaatagatcgattgaaccaaactcttctaagtttggagaaaattgaataaaactatatgggtgggccaaaattcattcatatatgttgtcacatatctatataatattactatgtcaatatatacatgcagggagtggcgtaaaaaatcttataaggtttcatagcctgatattatatacaccgcacggcagcaacctaaggacaaaaaacactgaatcgggctacatctgtatatatatgtgtgtacacacaaaacaaaaatctgcctatttatgtatgctcgcggctagctgtaaaatgctctgttataaattagattccctttgatttct

SEQ ID NO: 16658 - DNA, 629 bp, Glycine max
gtgaggtttcttcttataagctattgcctttccgcaattggcttctccactgactcaattctatagtctagcttctctctctttcttatcacatatgccaaatccaattttgacccgcaatagactttcaatattctaatgctactttacttcatcacttgcatctccttcttcttgtttttaaagtccctccttctcaagcctctcccatcatgggcatctgagatgtggctgtttccccttttgttttctcaagagttttctatgagcacaatctccaagctgttcaggaaccggttttggattggttttctgtgtcaaattcccataggaatgtctctggtgaggaagagtctgacttcaagagtggagaatgttgaggaaagccttgacatgtcagtgttggacttgcctgagttggccttggattgcattcttgagaggcttcccccctcttcgctgtgtcgaatcgccgccgtgtgccgcaccttgagggagaggtgtgtgagtgatcacctttgggagaggcacatgaagcagaaatggggtagagttattggccctgcttcttataaggagtggaaatggcattttgcttccaaaatgaatgttgggggtcttaagcatgg

SEQ ID NO: 16659 - DNA, 668 bp, Glycine max
tcgcccacgcgtccgatcctagatgctaccaacaaatttgatgagaagctacttcttggtgtcgggggttttggaagggtttacaaggggacccttggagaatggaccaatgtggctgttaaaaggggtaacccgtgatccgagcaagggcttgctgaattccggacagaaattgaaatgttatctaagcttcgccaccgtcatcttgtgtccctcattggttattgtgatgagaggtcagaaatgattcttgtgtatgaatacatggctaatggacccctccggagtcatttgtatggtacagacctgccgcctctgtcatggaagcagcggcttgagatttgcattggagcatcaagaggccttcattatctccacactggtgcagctcaaagcattattcatcgagatgtaaagacaacaaatatcctgttagatgagaactttgttgctaaagttgctgattttggcctctccaagactggtccttctctcgatcaaacccatgtgagcactgctgttaagggtagttttggttatctcgatcctgaatacttcagaaggcaacagcttactgagaaatcagatgtgtattcatttggggtggtgttaatggaagtgttatgcacaaggccagccttgaaccctgtccttccaagggagcaggt

SEQ ID NO: 16660 - DNA, 579 bp, Glycine max
ctgcacgaaaccgataacctcacgcaaccacacacgtacttagtcctacccaccctcatcatcggaaaattcaaccaccacgccgtgaaatatggaggctccggcggtggctggcggcgatcttgggatccaattgacgttgtcttgccgctacttgtttggaaactctaagcgtatctgctagtacaactacaaatgcaaattacaaaacctaagcaaaagcaactttacttagcatagttttcaagttattccatgcttcatctcataaccccgaggcagattattattatcactatataataatacgagagggaaaaaaaatcgaagaggcttgctctgatttcagcgtctacagttttgggcagagaacattaatttttttatattttattttttactttttcctttttctggatttttctgactttctccgtcctcaaattttaaaaacgaagacggagaatcgagaaaggtgattgcgcagaacttagaagtttaattgctttttacacagtttttgtcttctgagttctcaagaatcggtaatggaatagacgaacaagtgagagtgtgagt

SEQ ID NO: 16661 - DNA, 1134 bp, Glycine max
accagtctcactgtattcttttgtgggattgtcatgtctcattatacctggcataatgtgactgagagttcaagaatcactaccaagcattcttttgcaaccttgtcttttgttgctgagatctttatcttcctttatgttggtatggatgccttggacattgaaaaatggaaatttgtcagtgatagccctggaacatctgtagcaactagttcagtattgttgggtctaattcttcttggaagagcagcttttgttttccccttatccttcctatccaacttggctaaaaaatcaccaaatgagaaaatcagcttcagacagcaagttatcatttggtgggctggtcttatgagaggtgctgtttcaatcgcacttgcatataatcagttcaccatgtcggggcacacttcactaagaagcaatgcaatcatgatcacaagcaccatcactgttgtgcttttcagcacagtggtgtttggtctgttgactaagccactaataaggcttttactgccccatactccacatcataaagaatcaagcatcacgataatcacagatccatctactccaagtccaaaatcagtcactgtcccacttcttgggagtgcccaagaatctgaagtcgatattgatggccatgatattcatcgtccaagcagcatccgtgctttactttccactccaacacacactgttcatcgcttgtggcgtaagtttgatgatgcattcatgcgtcctgtttttggtggcaggggttttgttcctatagaacctggctcaccaactgaacgtaatggccatcaatggcgttgagaaaaaagccaagaaatatgtaatttgtttgtaaactgcataagttttgtggagtgagcaatgcgtgtataagaatcctgtcctgagattttgtttagctctttgggtagtgagaaggctgtgcaatgcaccataagcatctcaactcatctctacgtcttccgtaaaatgtaatatttgattattagatttcttgtactaaaagtttgaatagctaaagctaaattatttttccaagttgtaaaaaaaaagaagggaagatggaaagaaaagaaaggggtggcctcttctcaagtggtcctttgggcagggtat

SEQ ID NO: 16662 - DNA, 601 bp, Glycine max
ctgcacgctcaccactttgggcctctccatgatgggcttcgggcccgtttggtccaaaagaaaacacgacgccgttccgtcgaagactctgaacggcaataacggctccgaagactcgtaatcgaaattctccgatgtgggcctcgagaatttgcctttgccctgcgtcttgaggttcttcgtggagaacaaattcgggtacgcggtggagagaagcgccgcggcttcgttgtaggtttggttgggtcgcttccgcggcgttctgggcttcttcgttgagattgccagcggcgaattgctcgattcggagatcgttgaggaaggtgaagaagatgtgtgcgatgtgaaagtagatgaagacggagatttaacgaattcgaaatcgaatccataggttcttcccccggctccactcagacacgaagaagacattgtttctatgtttggatctatataatcgcaaatctagaaatgttcagaagtggagaggcatggagttgaagttgaacataggcttgccacttgtgtgttttagctaaagggggtgcaaaaccctaaacccaaaaagtacaagcaacaaaagttattgccttattttttt

SEQ ID NO: 16663 - DNA, 637 bp, Glycine max
cacagatctccccccgattgaaaagaaaagaacttcgatcatatattcctcaggtcactccgacctatgactatatatgacatataatggaccatgcatctctgaggaaagaattgagctgggaatcaagcagcaaaaacggtccccaattcggatatattaacaaccaccaccctccaaaacaaaatttcaccctttcgttttccttatcccatacccctcaaaagaaaaagctggcgattctccaattctcctcttggttcgtgtcctttactactccgaatcctcacaacactctctgtagtacacactactaacccaaaagtcactcacctctagaaaacctcaaatctcaaaacccatcaagattttagcacaaagactcaaaactttcacaaaattaaagagacccagttgatttttttctctttagactgaagtattttgaagcatcgaacatgctacaacggcggcttctggagacggagctgagcatgccaccgtcgtacggcggcagcggcggaaacaacacgcgcgacacgttcatcagcgacgcgaacttcgacacaaacatggtgatcaatcctggcggcgctgctgtgcgctttgatatgcgcgctgggcctgaactccatcg

SEQ ID NO: 16664 - DNA, 512 bp, Glycine max
cccacgcgtccggtacatatatggtggaaaccacaatggtcgttaccttaatgatctccatgttctagatttgagaagttggacttggtcgaagattgaagctgaggttgttgaatctactaactcatcctcaataacattcccttgtgctggacattccttgattccatgggaaaataagctcctatcaattgctggtcatacaaaagatcctaatgaatgtatacaagtgaaagtgtttgatctgccaaacgctacatggtcaactctgaagacttatgggaaacccccggtctcacgtggcggacaatcagttacctttgtgggtacaagcttagtaattttctggtggagaagatgcatagagaactctattgaatgatttacatattcttgatttggaaaccatgacatgggatgaaattgatgctgttggggtgcctccttctccaaggtctgatcatgctgcggctgttcatgtggagcgatacttgcttatctttggtgggggt

SEQ ID NO: 16665 - DNA, 543 bp, Glycine max
ataaatctcaccacattctgctgagactaattactcaaatagaggcaaaaaatggaatctaaagagtccatctttgtgaagcttttgctgattctgcatttgtccgttctctgggtttcacaggattttgatttctactactttgttcagcagtggccaggatcatattgtgacacgacacagaacagctgttgctaccctacaactggaaaacccgctgcagattttggcattcatgggctttggcctaattacaaagatggttcatacccatctaactgtgattcaaacaatcgttttcagccatctcagatatcagacctcactagtagcttgcagaggaactggcccacactagcatgcccaagtgggaatggggttcaattctggacccacgaatgggagaaacacggcacttgctctcagtcagtccttaaacaacatgactattttgaaacagctctcgatctcaagcagagagccaacctcctccaagctcttacaaatgctggaatacaaccagatggagggttttacagccta

SEQ ID NO: 16666 - DNA, 527 bp, Glycine max
ggctatgcagttttgaggaactggattaagtggaaacggtggggggtacagaggcagctccagcaacaaaggcaagcggtgagtgatgctgaacctcaggtggatgatgagattgaagatgttccagatggacaattatgtgtgatatgtctgatgaggagaaggcgttctgtcttcattccctgtgggcatcttgtgtgttgccaagggtgtgccatatcagttgaacgtgaagttgcacccaaatgtcctgtttgtcgtcaggagattcgagattcagtgcggacttatgaatcttgaacagacacaggcctgattgttctgttctctctgcggcaggaatcttttatgccttgctattgagaagaatgttgtttgctttttatttcgataagatatggaatgtggagttgtagggaaaacttgcctttgctcttatttcctgtgaacattcatctggggtagataataggttgtcgaggttaattcgaagccttctcacttctcactctgccaggtcttttggg

SEQ ID NO: 16667 - DNA, 402 bp, Glycine max
gcttttgcttggagttcgactcgatgcagggacggttttcaccaccacaactgtgtttaagagcctgcaggaacctattaggaccttccctcagagtatgatatctctttcacaagcgctggtgtcacttgggaggttggataggtacatgtctagcagggaattgatggatgattcggttgagagagaagaagggtgtggtggacacactgctgtggaggtcaaggatggaaccttcagctgggatgatgatggccaacttaaagacttgaaaaatattaacttgaagattaataagggggagcttacagcaattggtgggactgtacgctcatggaagtcttctctccttgcttcaattcttggcaagatgcacaaaattttctgggaaggttcaaggtt

SEQ ID NO: 16668 - DNA, 424 bp, Glycine max
cccacgcgtccgatcatcatcccccctttagccaaggtgtcattgagcaagatatacaagatggagttaaaccattaaagaaggaggaaattcatcagggaagttgtgtagagagtacttttaagaccgaggtagcctcacaaaacagtagtcagaaacctctttcacataccaagacgggacatgtttcagttaataatagttctgactgttgtgagaaagctgaagctgatgtgaagtctgaaattttcgaatgggataataaatttgggaattattctaatagattagtagaaacacgtgaaaaatttagggtgtccactcatggtaacataaagaatggatttaaatgggaacaggaggctggaagttcatgcattcggggatcaaatttagctgataagtgtagtttggaggatcactt

SEQ ID NO: 16669 - DNA, 660 bp, Glycine max
  unsure (1)..(660): unsure at all n locations
ggacgatacaaggcgtagggtattaagccgtatggcttgagcctttcccataaacacaaacacaagcactgaattgagttcactgtccacaagtttcgccccaacactcaactcggctcgtcgctattgttgttgttcttcttctccatatcaaacaaagtatagataaaatatcattgcagcttcattttcatcctccaattaattagcaatggggcacacatcccttttcactccctcttcctctcttaggttcaactctcttcttgtttcctccaccccctcttcttcttcacgctccaacagcgtttctttccccgccctctccaggaacataaggaaatcggtagaagatagaaagattaataaaaattctgctgtgaaagcagtgtatggtgatgaattttggacacctgcgaggagttcacctcaggatatttggtccataaggagtgatttgcaagtcccatcttccccttatttccctacctatgcacaaggacaagggccaccccccatggttgcggagcgtttccagagtgttataagtcagcttttccaatacaggataatccgttgtggtggagcagtttatgacgatatggcaaacatcatagttgctcagctcctgtacctcgacgctgntgatcctaacaagga

SEQ ID NO: 16670 - DNA, 486 bp, Glycine max
cttctttctaaggttccaggatcagatctcgttccctcgccactcatcctcggccgcgcgtcgctcgccacgcgccaccatcaaccgcacctctcgccgtgaatgatcaataatatattcaatattttattgcaacttggaactagcaatggcatctgaagaagttctgaaggctgttttccctttcctggacggtgttgatcttgcttcttgtatggctgttgataagcagtggaaagacatagctagcgatgatttcctttggaaatgtctgtgtgccaagagatggccttcgatctgcaagcaacctaatccttctactttaacctactacaagttttacaaaacctttcataaacgccagcaccgtagaactcttctccctccgagaatttcttttgatgatttggagttcttcattgacatttgggctgaaaacacattactcttctcggaagtggtgcctggctctgtccttcaagcagg

SEQ ID NO: 16671 - DNA, 587 bp, Glycine max
gttgaccaattcagcagtttggttttccagacagtgctgagggtcttggcaggcgatgatgaagagttgttacatgtgattcctatccttcttggctgcaaggataagaataatgcagaggacaattttataggcactagagtagtagcggagctcaagaatttgttaaaagaatctaaatttagccatctaatggaggttgttttggaagtatctcctgaggccttattcaatgaattattcactaaagtattcaggaattccttgtttgagttatcatctcatcaacatggaaactttgttgttcaagcattaatttcttatgcaagcaatcaagatctgatggagttgatttgggaagaacttgggccaaatttggagggtcttttcaaaatgggaaggtcaggagttgttgcttcacttgttgctgccagtgaaaggcttcatattaatgaacacaagtgctgtcaagtccttgctgaagcagtgtgtccagtggatgagtctccaaaatggattgttccaagactattgtttcttgatagctgtttcacaagtgaagataagtccaattgggagctggaaaa

SEQ ID NO: 16672 - DNA, 1114 bp, Glycine max
gactactgcatccccatttccgttacaccatggaaatcaacgcgcttgctcgcgaggccctgataaacggcgacggaataatcgaaagcagtttctctccggggaagcactccatcctcttaagctcaatcgcctacgaccaacaatggcaattcgacctgcaatccctcccaaaggacctcatcagcagaggcatggccgtggaggaccccaccgcaccccacggcctcaagctaatcatcgaagactacccttacgccaacgacggcctcgtcctctgggacgccctcaaaacctggttcaccgaatacgtgaacctctactacgccgacgatggttctatagtgtcggacactgagctccaagcctggtgggaagagatcagaaccgttggacacggggataaaaaagacgaaccttggtggcctgtcttaaaaacaaagttagatttgattgacattgtgacaacaattgcgtggacgacttccggccaccacgcggctgtgaacttcggacaattctcctttgcggggtatttcccaaacagacccaccattgcaagaaacaacatgccctcggaggacccttcggacgccgaatgggagctgttcttggagaagccggaggtgattatgctgaagtgcttcccgtcgcagattcaggtcaccaccgtgatgacggtgctggacattctgtcaaaccactcgccggacgaggagtatctcggggagacagtggagccggcgtgggaggaggagccgcttgtgaaggccgcgtttgagaagtttagagggaagttgattgagcttgaagggattatcgacgccaggaatgcggataggaccaggaggaaccggaacggtgccgggattgtgccctatgaacttctcaagccttcttcggagcctggtgtcacaggaaagggagttccttatagcatctctatttgattctgagttatgcatgactgtgtatcgtcactagcctctctgctagtattaaggtgtattatttgagacacatgtgacttactaataaataaaagataactcatgagaatagtgattataaaaaaaataatacttattaatatgaaataaagttttttcttctt

SEQ ID NO: 16673 - DNA, 447 bp, Glycine max
cccacgcgtccgcttctccgataatgatgaccgttccaaaaccgcattcgcctccgacgacggtcccgtggacttcaccgtccgttccatggcggcgcgtgtggccacaatcgacgacgcgctgctgctcaaaacctctcccttaagagaaggatggagcgactggttcgacaagaagagtgtgtttttaagaaaggatagaatgttcagatccaacttcgacgtgcttaaccctctcaacaaccccttgcttcaagatcccgacgccggcgccgccaccaccggactcaccaggggggacagaattgtccagaagtggtggatccatgagttcaagaaagttccattccctggtatcaagaagaaggctcctcttaatgtcaatgtcaacactctcaccaaagttggcatagaacgcagaactttgaatcataaccacaacaacaa

SEQ ID NO: 16674 - DNA, 307 bp, Glycine max
attttcttccttacatggagtttgtcatgccttcactgcttcaatctgcttcacttaagcgggatgtaaccattacatcagcagattcagacaatgagattgaagattctgatgacgaaagtatggagactattactcttggggacaagcgaattggactcaagactagtgttctagaggaaaaagctacagcatgtaacatgctttgttgctatgctgatgagctgcaggaaggattctttccatggattgatcacgctgctggaactttagttccactccttaaattttatttccacgaggcggt

SEQ ID NO: 16675 - DNA, 297 bp, Glycine max
ggaaatttgcaaggggctcgacaaattcgttattggacaagagagggccaagaaggtgctttctgtagcggtttataatcactacaagaggatatttaatgaaacctcttggcccaagtggcctgcaggagattcagataatagtaatgtgaaggctgatgctgctgatgatgatagagttgaacttgagaaaagcaacatccttctaatggggccaacccgatcagggaagtcatcactagtgagacctctagatagggtagctaatgttttggctggaaataatatattgtactt

SEQ ID NO: 16676 - DNA, 828 bp, Glycine max
tcgcccacgcgtccgcccacgcgtccggttccaaatcccatatggaaataccataaatatgatgggttattcaaacccaaccaagaaggttcatgatcaaattcagctgtatggtgatgtaaaagatcttgatgatttttgtttgaaggctcaactagttaactacatacaatatagagctcttctggagggatggacttcgcgcatgtggaaaaaatatacaggagtattgatttggaagacacaaaatccttggactggtctgagaggtcaattttatgatcatcttcttgaccaaacagcaggtttctatggctgtcgatgtgctgcagagccaattcatgtacagcttaatctggctacatattttatagaggttgttaatactacatccgaagaattgtctaatttagctatggaagtttcagtgtgggacctcgaaggcacatgtccacactacaaagttcatgaaaatctcactgcgctgccaaaaaaagtaacacctattgttgacatgaagtatctgaagtcaaaaaatcctaagccagtctactttcttcttctcaaactctacaaaatgtcagataatacaattttatctagaaacttttattggttgcatcttcctggtggagattacaagctattagagccgtataggaagaagaaaatacctctcaagataacatccgaagttttcattgaaggatccacttatatacttcaaatgcatgtgcaaaacacatctaaaaaaccagactctaaaagtttaacaatggtacacagttcaacagctagacaaagcagtggctgctttgttacagactc

SEQ ID NO: 16677 - DNA, 1257 bp, Glycine max
  unsure (1)..(1257): unsure at all n locations
gggattcgggtctagctctcaatgcatcaagaggaagggttttcggggatatgtctggaatggcattaaacaaatccttggaagatcgaatacgatgaatgcaagtccgttagttgccaagaagcatacttcaaacggcgagattaggcaggcgcggcttcaagaatttcttagatcaagtgacacagtaagactaatgttaaaagcttcaactgtgaagctatcttcgtatcgagcatggccaaatatgcatgacagtcggtttgcgctttacaagttgccattgcgggttcccaaagatgaccaagaatatgctggtttatggggaggaacttttggttggcctcctggaaagccttctgaagacaagcctggaaaggctttattctttcttctgctctcttatgaggagttccagggacaacagcttctcattgcaacaaaaattttggaaggcacacactatgtgttacatcctaacggttcagcaatgtttacagcaaatatcaatgatccttcatccgaaccctttccctgggacactgatgcagactcggttccagtgaatatcaagcaagctttcgtgggagagggtattgcaagtggttacgggttcagataccctggatcaaagcctggttccctctttgttttagaaaatggtatccttgccttcatttggaaggagtcaagggctgttttgaacttgcaaagacttaacttgcaagaacttttgaagaagggtgaaagggtaccttctctgcctccggttaccaatttttcatatctgacaaagtcctactcgaatgtgtttgctggcttccctagctcttccaattttttgtcttcacacatgaatgcacaatactagtatattagtggggcctaggatgtgggcccagattagtatggattgacaaagagactatatcctataagcttcctagctgtcggtggtttcgggaattgcattgcttgtggctgtcagagagtacacttccctgctgttatatttacatgttgttgcttcttgtgagaccaaagatgtaggtaacatttgtcaagtaatgtattatgtattgcttttgttgtgaattagaatctcatgttttatagggtatatcaggctgtttgttgtgatatatgcggaagaaagtataaattgagaatcctcataggctttctctctacatttgatatataatttgacataatttcaccnnnnnnnnnnnnnnnnnnnnnnnnnnnnnnnnnnnn

SEQ ID NO: 16678 - DNA, 458 bp, Glycine max
cattaattgtctacgtggtcattcctgtatcatactggggcctcaatgtgtacaatgccaataggtttcccattttctcctcacacttgttcaccgcccaaggtcaaaaatacaacatacctaagattgtagacaaccattttgagctaaatgttgcagagtatgaaaagcaaggtagaattcatctcagtgtgtttttcgctctcacttacggctttggatttgccaccatagcatccaccctcacacatgttgtctgcttctatggaagggagattatggagcggtatcgtgcttcttccaaaggcaaagaagatatccacacaaaattgatgaccagatacatagacataccttcttggtggtttcattcattgctgctcgtgacacttctggtttctctcgcactatgtatctttctaaaggaccaggttcagatgccctggtggtgacttctc

SEQ ID NO: 16679 - DNA, 887 bp, Glycine max
  unsure (1)..(887): unsure at all n locations
ctaaatctaatcaattgatctcattttccaaattttctgtctctgacattgcctccgagtggctctcaaaaaagagaagatattttggtggaaaaacactcaatcaacacacatgattgaagtgcaagcaaatgccatggagcagagttggtgggccaatatgcctcacgagcttctcagagaggtcctcctccgaattgaatcgtcggagtccacgtggccgctgcggaggagcgtcgtggcttgtggcggagtgtgccgcacctggaggaggctcatcgtcaaggagattgtcaagccacctcaattctcttccaacataaccttccccatctctctcaaacagcctggcccgagggaacatctacttcagtgcttcattaggcgcaacagtgcctcacagacatattatctgtttctcagtttatctagtgccctagtagctgatgatggcaagttccttctggctgcacgcaagttcagacgccctacctgcacagattatattatctcccttgatgcagatgatatgtccagagaaagcaatgcctatgttgggaaattgagatcaaattttttgggatccaagtttacaatctacgatagaacaagttgttccactgagctggtggtgaattcaaaacaagtttcacctaggcccagggtcccaacaggcaactatccagttgctcacatctcatatgaactgaatgtactaggctccaggggcccaaggagaatgcactgtgtcatggataccattcctgcttctgctattgaaccaggaggggtagccgtagcagncccatcacaganctgattttctgntagtaacagagatacttcattcccattttttcagacaaactcaactagtctgggaaact

SEQ ID NO: 16680 - DNA, 427 bp, Glycine max
tgggatgattgaagtgcaagcaaatgccatggagcagagttggtgggccaatatgcctcacgagcttctcagagaggtcctcctccgaattgaatcgtcggagtccacgtggccgctgcggaggagcgtcgtggcttgtggcggagtgtgccgcacctggaggaggctcatcgtcaaggagattgtcaagccacctcaattctcttccaacataaccttccccatctctctcaaacaggttcagtgctctttctctctattcaaattaaatcaattttgtttattttcttgctttaaatttggcagcctggcccgagggaacatctacttcagtgcttcattaggcgcaacagtgcctcacagacatattatctgtttctcaggttatctagtggttagtacttagttaatactacttgagcttata

SEQ ID NO: 16681 - DNA, 482 bp, Glycine max
cgacccaagcgacgcgtccaagccacgcgtaacggtaaaaaatattgcctacatttctcggaaaatgggatgacagcatgtattagattaatggagactacagtgggaaagggaagggttatgaatctatgtcagatgcccatctactatggaagcggagcaagcctcccaagtttcccactagatataactttactcggtttgccatcacattaaatgaacttacccctggattaaaggtctttttttaactgatactttcttttgtgttgccagtttatcttccttttttttttctttataatggaaaaatgtgctatattttatacctttttaccaccattattagtgcttgcatcactaaggaaacgttttgatcatttctatatcatggaggagctatataaaataatttaaatttaacataaaaggaccaaaatattcatatcactatattttgcatattgtgagtgcttgtgctc

SEQ ID NO: 16682 - DNA, 422 bp, Glycine max
cccacgcgttcgcccacgcgtccgcccacgcgatcgggagaaactgcgaaaatggcatcggagtcaggtcaaagtcccaatccttcttggtttacgcccaaaaggcttcttatgatattttgtctcattaacatgctaaactatgtggatcgaggagctatagccagtaacggtgtcaatggaagtcttgcaacttgcactgactctggaatttgtacaggtggcagtggaattcagggggattttaacttgaacaattttcaagatggagttctgtcatctgcatttatggttggacttctaattgcttccccaatatttgcttctctggccaaaaggtgaattgcttcgtgttgtgtcacaatccattccggcttattggtgttggattgtctgtttggactttagcgatagctggatgt

SEQ ID NO: 16683 - DNA, 394 bp, Glycine max
ggagaaactgcgaaaatggcatcggagtcaggtcaaagtcccaatccttcttggtttacgcccaaaaggcttcttatgatattttgtctcattaacatgctaaactatgtggatcgaggagctatagccagtaacggtgtcaatggaagtcttgcaacttgcactgactctggaatttgtacaggtggcagtggaattcagggggattttaacttgaacaattttcaagatggagtcctggcatctggcttttatggtgggacctctaatggctttcccaatatttgcttctctggcccaaaggttcaccatccattccggcttattggcggtggattggctggttggaccttaacgataactggatgtgggaggtcggtccaattttgggcta

SEQ ID NO: 16684 - DNA, 491 bp, Glycine max
aaataaaacatctgtggagacaaaatctttgtgaaagcaaatatgggaggcaactggttatgaggactgatgattttgaaaagcctgctcaaacaaatgtcctctgtagcaattggaaggaatggaagcaacctatcatatggtttcaaggaactacagatgctgtggcagctcaatttttcttgaaaaatatacactctcagatgaggattgctgcttttgatttatctggtgatccacaagttctgggatctcagccgaatgtatttggagagctcttgagagttctcatatctccttcaaaagatgttgaagcagctgtcaattgggttattggtggtgaggagaatcctgacatctcattgcatatgcggatgcttatgaataggtccataagagctgtacaggctgcattgcattgcatcaaaaaagtcatagagagtcagcacctaacttctagaccaaaggtgggtgtggtgtcagatacacct

SEQ ID NO: 16685 - DNA, 475 bp, Glycine max
ctcgagccgcaacaacaacagtaccacggtcctgccttaccgatgatgccaaccccactccaagttcggaggaggcctgtctttgaatttgatgatgagcatcttcagaatcaaaagcccaccattccaatggaattgcagattgtcagttcccaacaacattttcgtcttcccgatggttgggtggtcgagaaaaagccccgtccctctcacgagtctcgttttgacaaggcaccggaaggaaatttcgttctttgctatctgttcagagacatctagcaggagaaacaagagactatgttgttgctaacacaatgatgtcaaaaaatgaaaacactgtgagttctaattccatcttttgcaagtttctgtgccttttttggaaatgaaatctgtctggatacaaacacaaagctgaagttacaaacagggcatttctattttccacactatgttgtctggggtacattctgat

SEQ ID NO: 16686 - DNA, 400 bp, Glycine max
ctcaaggttcctcatcttccattgccattctgaatttggtatcatctgcatgcaccagaaaggggaaaaagtatcgtgaagcagcactttcctctctcgaacaggttataaaagccttggggaatccagagttctttaatatggtttttcccttgttgtttgatctatgcaattcagagcccctaaagtccgggcaagcacctttggccagtgatgctgctggatcagagttgaacagtgttgaagagatttctgttccacataacaaaatagttgactgtttaacctcttgtatccatgtggcacatataaatgatattcttgaaaagcaaaagggcttagcacacatgtatacagcattcttgttacctgaaacataaatggactgtcaaaactacag

SEQ ID NO: 16687 - DNA, 541 bp, Glycine max
caaaaaccaaaaccaaaaccaaaccaaaactttatccatccatcccaaaaagtttgctttggttaatgcccctaacaaatttccatttttattttccctgtttgtgactagagagttgggttcccatgccggttgatttggacaacgcttccacagcttcaggggaagccgccagcgtctcttcctccggccaccaaacaaaacccgccgtcccaaagaaaaaacgaaacctcccgggcatgccagatcccgaggcagaggtgattgctctatcgccgacggcgctcttggcaacaaaccgtttcgtgtgcgagatatgcaacaagggattccagagggaccagaatctgcagcttcaccggcggggccacaacctgccgtggaagctgcggcagaggtcaagcaaggaggtgcgaaagagagtgtacgtgtgccccgagcccacgtgcgtgcaccacgacccttccagagcgttgggggacttgacggggattaagaagcacttctgcagaaagcacggcgagaagaagtggaaatgcga

SEQ ID NO: 16688 - DNA, 553 bp, Glycine max
tttccgtaaaactctggaggttgaccggtggatattagagtagaagaagaagaagaagaatcccaaaaagagaaaccaactcaaacttgttttatccatgggttgatcatcccaaaaaagtttgctttgtttgggtaaatgacccttaaccctgtttgtgaataataatagagttaggaggttccgatgacggtcgatttggacaacgcttccaccgcttcaggtgaagcagccagtgtctcttcctccggcaatcagacaaaacccgccgctccaaagaaaaaacgaaacctcccgggcatgccagatcgttgtagtaaaagtaaaacaaactaacaaacacgcaccaatttcaattaaatctcttctttattccttttttcttatcagatccggaggcagaggtgatcgctctgtcgcccaagactctcttagcgacgaaccgtttcgtgtgcgagatatgcaacaaaggattccagagagaccagaatctgcagctccaccgccggggtcacaacctgccgtggaagctgcggcagaggtctagcaagga

SEQ ID NO: 16689 - DNA, 607 bp, Glycine max
gtgattgagaaggagattgagaagcatgctgctgatgggcttgggagagtggattatgctcttgccagcggcggtggtacggtggtgaagcattcggaggtgtttgatctggggaggggcaattggttcttgaagtctgctagaaatggtgtccaccccaacgccgagaagatgttgaaaccgagctttggcgagcctgggcagtgtttccccttgaaggatagtagagggtttgtgcagattaggctccgcactgccatcattcctgaggctgtcaccttggaacatgtagcgaagagtgttgcatatgatagatcaagtgctcctaaagactgcagggtctctggttggctgcaggagcataatgctgattctgcaattaatactgaaaagatgcatcttctggcagaatttacatatgaccttgagaagagcaatgctcaaacattcaacgtgttgaattcagcagcttctggtgtcatcaacacggtaaggcttgattttacgttcaaccatggaagcccttcacacacatgtatatatcgctttagagttcacggtcatgagcctgactcggttctatgttgcactggagttataatgttgc

SEQ ID NO: 16690 - DNA, 445 bp, Glycine max
acgaggcgaaatccccaattaacaccgaaacctctgctacgcaaacactccctccaatcgaactccaaatccctatgcatgcggtggcgtgaatctctgatccgccaaaaatgactggaagtggaagaagtaccgttcggagcagagcgagatccgatgccgacgccgacgccgattctcgacgacaaaagaggcctccgttcaatcgacaaagagagagaagcagatacggaagctccattccgatatacaacaatgccaatctcaaagtgctgctcggtatctgcttcgtcgcattcttcatcatctggtttatgatccaccacctctccaattccgtaacggagccgaagcttcctcgcgccgtcacgccatttcccgcgccaaagataatggaccttcctcagtttgaaggtgagcaccaggagagtttgtattggggaac

SEQ ID NO: 16691 - DNA, 707 bp, Glycine max
cgcaagtggatggctatcaacccaaaggaatttgtgatgatgatgagattggttctgatgatgaagccacagataatgggaagatcaagcaccatattgaagaagaggaataagaagaaagataagaagagtgtgttggaaagaacaaattagctggctttttgggagagctgttttcatacactccactggcagttgtgagaagaactagaactaaaagcaagatttggccaacaactatgcccaaatgtatacttggtagttttagaaagattagaagtattgtatgctttggcaggaagaggcactattctcggagacttccatggagaccgcattaacaaatggtgttttctaaccgcacaacatatccaatgatggcagcagatgaaaaagccgaggtgtgaaaattttggttcctatgcaaatgatgtgcgtgtgaaaactgtattgctgttttgactgagatggcagcaagatgtagatcatctttttaatggttctattgtataaacaaacggtttggagttggagtttccaatgtgcgtccgttggttcttaggattagaaacatcaatgtcttaagcaatgatatttttagcaaaatatcaagttaaggtatttgttgtcacgaaaaagagagtttatttctgaacttcaataattgttggttaatttgatccttaaatctaaaaaaaaaaaaaaaa

SEQ ID NO: 16692 - DNA, 409 bp, Glycine max
cccacgcgtccggtttttccgactgtggcccagtttgccagctattgtagaatatactggcacatatacatatgaaggaagtggctttaaggctactgcagcccagcagtatggtgcatctcctttcttaagtggactgaaatccttgtcttccaaaccattccacatagtttgttcacctattatccgcacggtggcagggttcgagatgtgttatgctgccaaaacttggcatggtggcttcttgggcatgatgatttttggtgctagtgaagtgagtagaaatgtggacttgggtgatgagactacaaccatgctgtgcaagtttgtggttcgtgcatccgatccatctattaccaaggagatcggatcagaccttcagggttggttggatgaccttactgatggt

SEQ ID NO: 16693 - DNA, 735 bp, Glycine max
gtttgagatcatgctggagagaagatgttcttgtcctttcttgttctgacagattccttcggctatccttgcagcttccttctagatactcaagttggctgtcttctggactgactgctcgcaaaaaccataacacaagcactagccctgggtgtgaatgggccgtttcagctgtcatagatgactttatttttgttattcatgatataagatatttggaggagcaggttcatggtgattaccttcaacatgtgcttcagcttttgtcttcatgctcccctgatgttctggaatcaataaggcagagcattttactgagtggtcaatcattaaaatctgtagaaccgttagtcattaaagcagtggtggagtcactagttgaaaagtcagttgaggacttaagacaaatgaaggggataacagcaacctataggatgactaataaacctctacctgtgaggcattcaccatatatttcaggggtattacgtccccttaaggcttttttgggtggggagagagctacaagatatttggtcagtgaaactaggaatgaaatactcctctgtgctgcaactgagattactgaccgttattatgaattagctgctgaccttgttagcgtggcaagaaagacagagtcttcactccagaaaattaggcagagtgcacaaagacgagctggagccagttcagatatcttagataataatgtgtctgatactgataaaatct

SEQ ID NO: 16694 - DNA, 854 bp, Glycine max
cgcaacccaaagagggtgaccacaacctttaattcaatccatttcccctctctctctgttcaaagccacaatctaattaatttcccattcttctccaacaacttagggtgtcccttttcccaacaacaatgccacccattccctaattagtaattacgctttttcttttcctattaaattcatttccccgacatggacggcggcgggtccactccggcggcgccgattccgaacgcgaacgcgccgccgccttttctgagcaagacctacgacatggtggaggacccttccaccgacgcgatcgtgtcgtggagcgcaacgaacaacagcttcatcgtgtgggaccctccgcagtttgccagagaccttttgcccaaatacttcaaacacaacaacttctccagcttcgttagacagttaaacacttacggtttcaggaaggttgatccagatcgctgggaatttgcaaatgagggttttttgaagggtcaaaagcacttgcttaggagtattacacgacgaaaacctgcccatggtcaaaatcatcaacagcctcagcaaccgcatggacagagttcatcggtaggggcatgtgtagaagttgggaagtttgggcttgaggaagaggttgagaggcttaaaagagataagaatgtgctcatgcaagagcttgtgaggttgaggcagcagcaacagaccactgataaccagctgcaaacaatggttcagcgccttcagggaatggagcaacgacagcagcaaatgatgtcattccttgccaaagctgtccagagccctggcttctttgctcagtttgtacaacagcaaaatgacagcaataggcgcataactga

SEQ ID NO: 16695 - DNA, 1222 bp, Glycine max
gggggtgcaggatatattggttcacatgctgctctacgacttctgaaggagaactatcgtgtcaccatagtagacaatctgtcacgtggaaatttgggggccgtcaaggttcttcaagacttatttccagaacctggaaggcttcaatttatgtatgctgacttgggagataaagaatctgtaaataaaatatttttggagaataaatttgatgccgtgatgcactttgctgctgttgcatatgtgggagagagcacacttgaccctcttaagtattatcacaatattacatcgaataccttgttggtattggagtctatggctaaatatggtgtgaagacattaatatattctagtacgtgtgcaacatatggggaacctgaaaagatgcctattatagaaacaacagaacagaaaccaattaatccatacggaaaagccaagaagatggcagaagatatcatccttgatttttccaaaaattctaagatggcagtaatgattctgagatacttcaatgtgattggatcagacccagagggcagattgggtgaggctccaagacctgaacttcgtgaacatggccgaatttctggtgcctgctttgatgcagctcgtggtattacaactggcttaaaggttagaggaactgactacaagacaccggatggaacatgcatacgagactacattgatgtaactgatttggttgatgctcacgtgaaggctcttgagaaggcacaacctgctaaagtagggatctacaatgttggaactggaaagggtagatcagtgaaggagtttgtgaatgcttgcaaaaaggccacaggggtggacatcaaagtagactaccttccacgtcgacccggcgattatgccgaggtgtatagtgacccttctaagatcaacagggaactgaattggaccgcacaatacactgaccttgagaagagtttgcaggttgcatggaaatggcaaaaagctcatcgtaacggttacggtatttcatctgcaatctgagtttctagccattcagccaagcagttggccatcaactgctcttttacatggtgctcaggattttttttttctttttctttttggtcgtccttagggagtttggtagttgattcgttatacttacatgtgtattcaacatacaatgagtcaataataataaataatataatgcccagcctctggttggtatagcttttcttct

SEQ ID NO: 16696 - DNA, 507 bp, Glycine max
attcaatccattctaaacaactttcctcatttacaatgcctccacttacaaaaaagaaaaaaaagcaccatcaataatctgtgaacaagggaaaccacacacatagctttaatttgatctaatttcttcatggaggaccaaccattatcatcaaaatcaaagactgctgctttggatcaaacccttcattcaattgggtttgaaattgaagacttgtcaccacaaaaaatctctggtcgtctccctgtcacccagaaatgctgccagccattcaaggtgcttcatggaggggtatcagcattgatagcagagtctttggcaagcatgggagcacacatggcttctggttacaaaagagtggctggaattcaactaagcatcaaccatttgaaaagagcagagattggtgacttggtctacgcggaagctacacctttaaatgtcggcaaaaccattcaggtgtgggaggtgagactctggaagattgatgcttcaaattcacaaaac

SEQ ID NO: 16697 - DNA, 1465 bp, Glycine max
gttcaattgcctaccaggagaaacattgcacctcatgttattgatattaatggtggcactctggttgctgaaacactaggagatacaatcgtagtcaaacagcaagatgcttgggatttgactttgaatactaaacaggtttagttgaaagctggaaggttaaaggagtgcatgttatgaaaaagggcatcctcccatgtttctggcgagctcctatcgataatgacaaaggaggaggttcagccagttatttgtccaggtggaaagcagctggaatggactgcctccactttattactgagagctgttctgtgcaaaatattacggagaactcagttagaatattggtggtttttcttggtgttaccaagggcgaggatggttctctctccaaccaagacaagtcaaaggttttatttacaacagaaatggcatatacaatttatgcttctggggatgtcattatagaatgcaatgtgaaaccaaaccctgatcttcctcctttgccacgtgtgggaatcgagttaaatgtggaaaagtctttggatcaagtaacttggtatggaagaggaccatttgagtgttatccagatagaaaagctgcagccctggttgcagtctatgaacataatgttagtgagttgcatgttccttatattgttccgggggaatcttcaggtagggcagatgttagatgggcaacattcagaaacaaagatgcttttggaatatatgcttctaagtatggtagctctccacccatgcaaatgagtgcaagttactacagcacctcggaacttgaccgtgcgacacacaatgaagagctcattgaaggagatagcattgagattcatctagatcacaagcacatgggattgggtggagatgatagttggtcgccatgtgtccacgaacagtatttgattcctcctgtgccatactcattctctgttaggctgtgcccagtaaatccagccacttctggtcatgacatctacaaatcccagtttcaaaactcttgatttcttggatcacatgacttgttctattcaagaataaacatcttgtagaagaccgaagaccgaagaccaaagactggtgtgcttactaaggactacaaagaaacttggaagctattggtgtaaagatcccatgcaatcattttggttggaagcttgatttaataatgtggaaggtgaataatcttattgtacaaatttgttccattacccaaggaaccaagcagacaatttcacaacttgtttaataaatgtgctgtaactgtgatatgaataatttactgttcttatttgaagatcaagggcaatgaaatgaacaaaaaataatcctcgattgtgtaagtttgttcgggctcctttgaatttgcttgtgtggcatttatgtaagaaattgttataaattcagtatttcataaacattaattaaaattattatttttatcaac

SEQ ID NO: 16698 - DNA, 469 bp, Glycine max
  unsure (1)..(469): unsure at all n locations
cccacgcgtccgcaaaaacactcatcactctatctctctcaaaagtgaaaatgtgtgggggtgctataatttctgatttcatagacgtgaatttgaacagtggtcggaaattgaccacccacaacacccatcatcagcttcacactttctctgatttccacgccacctcttcttccaaacatcaaccatcctaccaggatccaaacctccctaggcctcctccgcttccaaacaaccaaggagtgaagttgaaggctttgactttgaacactggtcgagtacggaagaacgtgtacagaggaataaggcaaaagccatgggggaagtgggctgcagaaataagggacccacgtaagggtgtgcgtgtgtggctgggtactttcaacactgctgaagaagctgctcgtgcttacgacaatgccgncaagcgcattcgccgagacaaggccaagctcaactttcccgacag

SEQ ID NO: 16699 - DNA, 829 bp, Glycine max
aaacgaacaacataaacatttttttgctaacgcagtgaaactcaaaaacactagctagttaacactctctatggctggtgcccaattcctgaatctcttcaactcctcttcacgatcttccttggtcaagccctctaggccacttctctacaaccccattaagaattatgggcaagcaagcaaaggaaagcatagccgtttgatggaagagagggcaccttccacagctgaagaatttgagagggttgccgaggagaaggccaaggaagctcaaaagggggtggcaagtcagagtcttggcaaggcaattgatggtgcagaagaggcttcaataggtaagtcaaaggttgaatcagctaagaataggtacaaagggcatgaatgaaagcagggtttggttaccacaggagggggtgattattatatatataggaaccttttgtgctagctgacttgaaactgtgacatatatagctgttgtatatgcagccagagaataagggagtgtcttgtatttccaaaaagcttgtttaattgccagtgtttttgaagcagaaagagaccaaacaattgaaaacttttagtctgtttagttaattcgtgtcggctcattggatcttggaaagttctatgtaactaatttggaattctgggtttggggggtgcttaagcttcattattttggttgaatgattgagacttcttgtggctttaccaacatggtgtggaatggtcattacttcccttaagattaggggttcaatccctaagtcaagaacatctattgaaagatcaattctttaaataaatttctttattttgaatgatt

SEQ ID NO: 16700 - DNA, 717 bp, Glycine max
agcaagcaagggaaagcatagccgtttgatggaagagagggcaccttccacagcagaagaatttgagagggttgcagaggagaagaaggccaaggaagctcaaaagggggtggcaagtcagagtattggcaaggcaattgatggtgctgaagaggcttcattaggtaaatcaaaggttgaatcagttaagaataggtacaaagggcatgaatgaaaactgctgggtttggttaccacaggagggggtgattaaacatacatatatatatgtatatatatatatatatgtgtatatatatatatatatatacatacatagacactcacacacacttctgtgctagctgactttgaaactgagatatatagctgttgtatatgcagccagagaataagggagtttcttatatttccaaaaagcttgtttaattgccagtgtttttgcagcagaaagagaccaaacaattgaaaacctttagtctttgtttagttaattcgtgtcgggctcattggatcttggaaagtttatgaatatctatagtattgattcatgaatatgtaactaagttggaattctgggtttgtgaggcttaaaaaaaaaaaaaaaaaaaaaaaaaaaaaaaaaaaaaaaaaaaaaaaaaaaaaaaaagaaaaaaaaaaaaaaagtgggaccgctcccaaaaaagccactctgcccggggaaatttttcgccgagg

SEQ ID NO: 16701 - DNA, 830 bp, Glycine max
cggaagcggtgtttcggtgaaggaagaagagataacaacgatgcctgcagcctcagaagagataacgatggaacatagtatgagtgacccaccttctgaaacctcggacattaatcctagttcggagtcgtcggaggaggaccacttgaattacgaatgtttcaacaacaacagcgacgactgtgtcgtcggaggatccgccgcagcatcgctcttgcaagtggacttcatgaaagacggttcttccgacagcgacggatcaagcgcgattttgaacgaagacaacatgtactctcccttgaaattcaacaattgctccatatcaacctcgccgtcatcgtcttcgatgatgaactgttttcagttccagaaaccgtatcatcaccacgcgcagtacgtgaagatggaggagcacaatttcctcagcgcggatgaggcctgcaatttcttctcggatgaacaagcaccgacccttcaatggtactgtccagaacagtggagctgagaaaagaaacatggaaattaaaccgcttttagaaatttttgtttgaaggtagaaaatgaaatactgtgcaaaagaaaaagagagaacagagatcaatggctgcatggcgtggggtcggagatggaaggttgattattactactctcgaccgtgcggcagggggtaatattaataattattcaatcgtaaagcaaaccatgctgtaaaaacaaatttccattcaagtatggaataacggtgtagtacttttttaataaataaaaaaaacaacaacaacggtgtactacttataggaaagaggaacaacaagagattaattaaatcg

SEQ ID NO: 16702 - DNA, 765 bp, Glycine max
gaaacctcgaacattaatcctagttcggagtcgtcggaggaggaccacttgaattacgaatgtttcaacaacaacagcgacgactgtgtcgtcggagcgatccgccgcagcatcgctcttgcaagtggacttcatgaaagacggttcttccgacagcgacggatcaagcgcgatcttgaacgaagacaccatgtacttgccgtcttcgatgaactgttttcagttccagaaaccgtatcatcacgcgcagtacgtgaagacggaggagcacaatttcttgagcgccgacgaggcctgcaatttcttctccgatgaacaagcaccgaccctgcaatggtactgtccagaacagtggagctgagatagaagaaacatgggaaaattggaaaccgctttcagaaatttttgtttaatatgttgcacggttgtgttgaacactgctcattgaggtaaaagttgtaaaaaaaggttgccacttgccaacagaggctgcttgaaggtagaaaatgaaacactgtgcagaagatagagttacgaaagagagaacagagatcaatggctgcatggcgtggggtcggagatgaaggatgacgattaaggttaattattactctcgatcgtgggtaatatcaataattattcaatcgtaaagcaaaccatgctgtaaaaaacaaatttcaattcaagtatagaataacgatgtagtactttatcaaacagaaaacgaaaaaaaaaattataaatctgttaaacaataaaaaaaaa

SEQ ID NO: 16703 - DNA, 410 bp, Glycine max
ttgaaaaacagagaaacacaaacacgagcgagagcagccagcgaaggaaaggaaaaaacagcttgttcgagaactgaccccagagatcttctctttacgtgctcatgtgaggacccaattcttcttctccttcttccggtgcttggatctgcacttttcggtgttttctttcattctcgcaagcgaactcggtcacgggttaattccaattttgcgcgctggtttttcccgcacgacaaaaagctttcgggaagtatttgttgggtggtcgaaggtcgagaaaggttctagattgacgtggctttggttcgtttgaatcctgaaggggtttgtttgttcgatacccacaattcggccacttcatcttatgaaagattgactcatggatcctgaatgcataaagtttgtat

SEQ ID NO: 16704 - DNA, 456 bp, Glycine max
atttgctggtcctcttcctcctcactatctgcgccgttcttcctcccctgtttcgttccactgagcaacacgctatcagttgcatgacataatacagagtgttcaattagagcataatgggatccaaaaatgcaaatgggaagaaccacaaggacaaaaggaacaaatttaaggataatttgagttctagttattcatcacccagtgatgccaaggttatcctcatcagtgatcctcgatattcaaaggctcacacggatcctcggttccgtgaggctccaaagcgtgaaacgaaggtggctgttgactctcgcttcaaccgcatgttcactcacaagagttttttgccctcttctgctcctgttgacaagagaggcaagcccaagaacaacccaacctctcagcttggttctctgcgccattactacaaaattgatgaaaaggaagttgagcaga

SEQ ID NO: 16705 - DNA, 556 bp, Glycine max
catttatcagagtctcctggtagcctttcctgtcaggagttccagaataaccaacatgataactgcactcatctgcctttccatcctagaagggtagaagtagaattaccagttcgtgtagattttgttgggggttggagtgatacccctccatggagcattgaacgtgctggatgtgttttgaatatggcaataagcttggaaggttttcagccaattggcaccatcatagagacaactaaaacagaaggaatattatttactgatgatgcagagaaccaattatttgttgaagattatacatctatttgtgcaccgtttgatggagatgatccatttcggctggtcaaatctgcattacacgtgactggaattattcatgataacattcttgtagatatgggcatgcacatcaaaacatgggccaatgtcccccggggcagtggattgggtacttctagtatcttggctgctgcagtggtgaaagggcttctccaagtaattgatggggatgatagcactgagaacgttgctagacttgttttagtgttagaac

SEQ ID NO: 16706 - DNA, 1022 bp, Glycine max
atcatcaagttctattaacaagtattcttatcaaaaaaaagaaaaaacaaaaagacccagaaatctcatcatcaagttcttcccattgcagaagttgaaaagaaagttatggcagatagttcagtatcctttttattggacaagctgagttcgttacttgaagcagaagtgaaactacagagaggggtccgtgaagatgttcagcacatcaaatatgagctggaaggctacaagggcatcttgagggtggctgatgctctggaagacaaaaaccctgaactcaaagcatgggttaaacgagtaagagatgttgctcatgacatggaagatgctatagatgaattcagccttggccttgttgatcaacatggacaaggcaacaattcttcgtttcatatgaactttttcacccggcataagattgcttcaaatatacaaggtatcaaatccagattggacattatatcccagaaacgtccagacatacctcggataggctcacgctcaagtcaacgattgtcatcaaggcttgatagccaaggtgatgcacttctgctagaagaagctgatcttgttggtattgacaaacccaaaaagcagcttagtgacttgcttttcaatgaagaagcaggtagggctgtgattcccgtttatgggatgggggggttggggaaaaccaccttggctaaacaagtctatgatgatccaaaagtgaagaagcgtttcaggattcatgcttggatcaatgtttctcagtcttttaaactagatgagctcctgaaagacctggttcaacagctccacactgtcataggcaaaccagctccggaagcagttggacaaatgaagagtgaccagctcaaagaggtgatcaagaacctgcttcagcgaagccggtacctggttgtgctggatgatgtgtggcaagtcaaggtatgggattctgtcaaacttgctttgcctaataacaaccgtggcagtagagtgatgcttaccacacgcaagaaagatatagctttgca

SEQ ID NO: 16707 - DNA, 507 bp, Glycine max
ggagaaaatagttcaacttctctgtctcaatcatttcattatagttttctctcccttccaatcacagcgatctccagaattagggtttcgtgatttctgtctcactggaaaatcaagaagaagaattgtttatctacatctgagtccatgaagccgcaatcatcctctttgaatccatatgcagcctcatatgttcctctctctaaaaggggggcagatggtagaatacctttgacagaaaaagattccaagacttgtgatgggacaatgtggtttcagatgactcatcagggtgctacaaatgacccgcaacttatcaacactagcttggaatggctctcgaaacccgaagcttttccggcaaaaagccagcctgcttctagttcctacacaggctacacttcatcatcacagaatgtggcagagttgacggataatcagttggtagatgaagaacttgatatggatttggagtatcttaggatgaattttcctggtatatcttat

SEQ ID NO: 16708 - DNA, 430 bp, Glycine max
  unsure (1)..(430): unsure at all n locations
nnnnnnnnnnnnnnnnnnnnnnnnnnnnnnnnnnnnnnnnnnnnnnnnnnnnnngtaatcggtaatctaaatagtaacccgtcaaagtttctaaatttttctccatttccacttttagttatcaagtaaatatgttaactaattacataatagcagtaaattgtcatctcataaaaaaatttggcaaaaaattcatgtgtaatttttttagataaattaaatttttaatctcttgtcttgaagaacaatttatgacatcatactagtaaatgagagattaaaaacataatttaacaaaaaattatatgtatttatcctattaaaattcttgatgacatgataagctatgggcgataaatagtatgggtatgttattagttagtattggtattttacatcatcgactataagtcattaccaaaaaatttaa

SEQ ID NO: 16709 - DNA, 914 bp, Glycine max
aaaaaccctaagtaaaataaaactctagggttacatacattactaacccttccgcgttctctctctctctctctctctgttgcgaaatccgttcccctatctgcttttcgagttgttgctaaagagtgatggactcaccgcccagcaatcaccacgcggtcgacggagacgccaacgacgtcgttagatccttttcccaccgcgacgacgacggcaagccccaacccctcaccggggacggcgccagtcctggaaagatattcatagggggtttagcgagagaaacgacgattgcgcaattcatcaagcactttggtaaatacggtgagataacggattccgttatcatgaaggaccggaagaccggccagccgcgtggtttcggcttcataacttacgctgatccctccgtggttgatacagtgattgaggacactcacattatcaatggcaagcaggtggagattaagcggacgataccgaggggggctgctggctcgaactcaaaggacttccgaacgaagaagatttttgtgggtggaattccttcgactgttactgaagatgaatttagggacttctttacacgctatggagaagtcaaagatcaccaaataatgcgggaccactctactaatcgttcacgtggatttggctttatcacttatgactctgaagaagctgttgatgatctcctgtccgtggggaacaaaattgactttgctggagctcaggtggaaatcaagaaggctgaaccaaagaagccaaatccaccagctccatcatccaagcgctataatgactcccggtcttcatatggtggcggatatggagatggttatgatgggtttggtcgtaattttggtatgggtggctataggtcaggtggtgcctatggtggtaggggaagtgca

SEQ ID NO: 16710 - DNA, 755 bp, Glycine max
gttctcaacatcagctagctagccactcactcacaataaataaaataaaaagggttttacaaaatataaacaatatctagggtttctctttctcttttgcattctctctgaattcgtatgccatggagtcacccggtaacgagcatgtggtgggtggcgcagaacccaacgacgtcgttacgcccttttcccacagagaagaacctcacaattcccaacccctcaccggcgacggtgccagtcccggaaagatatttataggtggtttagcgagagaaacgaccattgcccaatttatcaagcactttggtaagtatggtgagatcacggattcagttatcatgaaggacaggaaaactgggcagcctcgtggattcgggtttataacatatgcggatccctctgtggtcgataaagtcattgaggaacctcatgtcatcaatggcaaacaagttgagattaagcggacgataccgaggggagctgttggctctaaggattttaggacaaagaaaatttttgtaggtggaattccttcaaatgtgactgaagatgaatttagagacttctttacacgctacggcgaagttaaagatcaccaaataatgcgggaccactccaccaaccgatctcgtggctttgggtttatcacatttgactctgaagaagcagttgatgatcttctgtccatggggaacacaattgactttgctggagctcatgtggcaatgaagaaggctgaaccaaagaagcca

SEQ ID NO: 16711 - DNA, 525 bp, Glycine max
cgttctctctctctctctctctctgttgcaaaatccgttcccctatctttctgcgtttcgagttgttgctgaagagtgatggactcaccgcccagcaatcaccacgccgtcgacggagacgccaacgacctcgttagacccttttcccaccgcgacgacgatgaagacggcaagccccaacccctcaccggcgacggcgccagtcccgggtcggtaactagctccgtacaaaccattcaactttatccttttctttttcttgtactttttcttgattgtatcctcgaaatttcttagatttggttctgtctaattaccctggacccgttgactgcagaaagatattcatagggggtttagcgagagaaacgacgattgcgcaattcatcaagcactttggtaaatacggggagataacggattccgtcatcatgaaggaccggaagaccggccagccgcgtggtttcggcttcataacttacgctgatcccttccgggttgatacagtgattgaggacactcaca

SEQ ID NO: 16712 - DNA, 554 bp, Glycine max
aaaaaaagaagcatgaggggcaagtgtggaaattaaaagaaactggtgcgtcgaccacctcgtcattgcttcctttccattttcatttctcggtgttgttgttcttcatccatggcttttcctcagcaccacttccaacagcactaccaaacccaacagcaacaacagccacaaaacaaatccttcagaaatctgcaaacaatcgatggtcagatgtcacagcaggtggcgttttacaaccctactgatttgcaagatcaatcccaacatccaccctacattcctccatttcatgttgttgggtttgctccgggtcctgttcctcctgctgatggcagtgatggtggagttgatttgcaattgcaatggaattatggtttggagccagagaggaagagactaaaagaacaggattttttggagaacaattctcagatatcttctgttgatttccttcaaccacgatcagtgtcgactgggttgggcttgtcactagacaatactcacctgacatccaccggagactcagctttgttgtcactcatcggtgatga

SEQ ID NO: 16713 - DNA, 304 bp, Glycine max
gtggaaattaaaagaaacttctgcatcgaccacctcgtcacttcttcttcctcttccatttcaactagcatttctcggcgttgttgttcttcatccatggctttccctcagcaccacttccaacggcactaccaaagccagcagcaacaacaacaacaacaacagcaacaacaacagcagccacaaacccaaaacttcagaaatctgcaaacaatcgatggtcagatgtcacagcaggtggcgttttacaaccccactgatttgcaagagcagtcccaacatccaccctatattcctccgtttc

SEQ ID NO: 16714 - DNA, 432 bp, Glycine max
gttacgacccgcacgaaaggcgtaacgatctgggcactgcctcggagagagactcggtgaggtagacatgtctgtgaagatgcggactacctgcacctggacagaaagaccctatgaagcttcactgtttcctgggattggctttgggcttttcctgcgcagttaggtggagggcaaagaaggcctccttctgggggggccagagccatcagtgagataccactctggaagagctagaattctaaccttgtgccaggacctacgggccgagggacagtctcaggtagacagtttctatggggcgtaggcctcccaaaaggtaacggaggcgtgcaaaggtttcctcgggccagacggagattggccctcgagtgcaaaggcagaagggagcttgactgcaagacccacccgtcgagcagggacgaaagtcgg

SEQ ID NO: 16715 - DNA, 427 bp, Glycine max
tgaagatatctctttctcttcaataactcatttttctcttatcatatttggatactcattgccgtctgcacagaaagttgttgaatttggagccatagttactgggtccaaggcctaaagcttccaactttgttttatttcctggtaaataacactgttttcgatcaatttggctttctttttgttgtcgattcagatgggttcgtgccaggaactgtttcttcgttcctaactcctatattcagtgttccggagaaagctttcaagtgttatagttgttaattgctattcttctttcttagtttctgctatgctatgaggctctgagttctctgtaaagtgggatagacattttatgagttaaagttgaattaaacatctttgagcaatgaagattctgctggttttatagcttgaaatgttttcc

SEQ ID NO: 16716 - DNA, 1008 bp, Glycine max
aaccccaatgacagagagggcgcacgcgtccatctgctcgtccctcttctccctcctcatcttctctccccattcggcaaacatacagcatccaaaatcgaatctttgtttgaaacatggcttcctcctccttcctctgccccgcagcatttaccttctcacagaagccacttcaatccacttttcttcattcctcctctcttctcactctaagcattcttcctaagaaattgagaaaaccccaccaactgagaagcctcatagtggccaaatccaatggcagtgactctgctgatgttcctgaccgtttgatttcagcactttgctacttttaccctttctttgatggcatacagtatggaaaatatgtaatcacacagttctaccctgttcaagccattgttcaaccattggttcctgcaataagagtcttcaagagcttcccttttaatgggttccttgtgtttttgaccctttattttgttgtggtgagaaaccccaatttcagtaagtatgtgaggttcaacactatgcaagccgttgtccttgatgtgctcttgattttccctgacctccttgaaagagggtttaatcccaaagatgggttgggattggatttgataatgagtttggatagcactgtgtttttgttcctcttggtgtgcttgatttatggttcttcttcttgcttgctgggtcaaatccccagattacccattgttgctgaggcagctgataggcaagttctttgaatcaccaatccgttattgagataatttaattgtatagcaaagcaacttcagcctaagtagtggaaaagtttgcattttcactgccttaatagttactatcttggaaagtttctgcaaaacggattttagttgtttcttacattgctggattctagtacgtctttctaaatcaggattaaattattgtaagatgatgagaaacttccctttctccattgttaattgaattcgatgaaaaatctaaaaggatttactg

SEQ ID NO: 16717 - DNA, 360 bp, Glycine max
agggatccaaaatcgaatctttgttggaaacatggcttcctcctccttcctctgccccgcagcatttaccttctcacagaagccacttcaatccacttttcttcattcctcctctcttctcactctaagcattcttcctaagaaattgagaaaaccccaccaactgagaagcctcatagtggccaaatccattccctcatatttaacttcctcctttgatgaattcctgtgtccaatccatctctgttctctgatgtggcattaattacttctagagtagttttgtctttggtttcagtatccactttaaaaagcaattgggatttcatatttgcattgttatactctcttcattattta

SEQ ID NO: 16718 - DNA, 708 bp, Glycine max
ggcacacgtcagatggtcacggtccacatcctggaaacttgaagccgtttgacattacgacataccaatccgcagagactccaatttccggttgccacctcaccggtgatggctataggcgtacagtttccggtatgtacacgctcactccaactctctcttcattcaagcaccccacgcgcctcttctcacgcgctgctttcactgcaaagcttccacttcaatttcgagcttcttcaacgtccttcatcgacaccgaaaccaatccaagagaatccaacgtagtagtagttgaaaaggacgtaagcagtagaagcagcaattcgttggcttgtcccgtatgttacgattccttgacatggaacggtgatcctggtttctccgtagatactatcactggatctagttttcaatgcagcacctgtcagaaaacatatattggtaaccaaacgcatctcgatctcaccgctacaggtggagctaagagctatggtgaatcgatgccagcttccacagagcttttcagggtgccattgatatcatttctctatgagaggggctggcgtcaaaccttttctgtgtggggtggttttcctggtcctgagaaagagtttgaattgatgaagggtttcttaaagccaatattgggaggaaatatcattgatgctagttgtgcaagtggattattttcaagattatttgcaaaaa

SEQ ID NO: 16719 - DNA, 1300 bp, Glycine max
cccacgcgtcccaaattctcaactttcctaactttagcaaccatccaagaagttgatcagttccttgtctctccttgaattataaaaccattcacagtcttgaacccaatttcactctttgcacctcaaacaccttataagcctcaatttcacaaccaaaaatgcaaagttcaatctcacaatctgagatttgcatcactgattaccttctaccccaagaagttccatctcaatttcaatttccagatatgagcaacaataacataccaatgaaccataccaaccttcaaatgcctcaaatcacatctttctccaagcctccaaggtcctcatcaaatctaagcaaccgcaaaccgtccttgagaaacatcacaatcccttccataacctcaggtcttacaacaactatgtcacaaacaacagcaacaacaacaacaatagctacaaccatgtataacaacaatcaagttacttcttcttctttttcttcagatgaaaccaacaacaccaaagacgacaagcactatagaggggttagaagaaggccatggggcaagtatgctgcagaaatccgtgaccctaatagaaaaggctcaagggtgtggcttggaacctttgacacagccatagaagctgccaaggcttatgacaaagctgctttcaagatgagagggagcaaagccatattgaatttccctttggagattggagagtcagaggaatcagtctcaagctgcatcaaggttggtgtgaagagggaaagagaggaagagagtaaaagcaacaactatgagaaaagtgagtttaacaacaataataatagtaataagcatgtgaagaaagaagagtgttctcccaaagctgtttgccctttgactccatcatgttggaaaggcttttgggacactgatgttatgggaactatctttagtgtgcctcctttgtcaccactatctccactaatggttgtttgagattgtggactttcgctatttcaatgatggtttgaggtaaccaaattaaggagagatgatgctggggattgtcctctctgatttaggttggtaatttgcgtaaatcaaaatggtagtactaattaatctactaatagattaatttgcaagtgaagatatatgggtttgtataatgtaaatataggatagtatgaagcaagatttttttgtttgttaaaaaaaaaaaagctctcatgcttatcttcttcccttagttatgtttcatttggtcaagaaatgtactgtacttgaagcaacattgaaatttgtttattcgtttattggag

SEQ ID NO: 16720 - DNA, 616 bp, Glycine max
aaagaagagtcatcatcatcatcatcatcagtttcaagcagcagcatcgtcatcaaggttggtgtgaagagagaaagagaggaagagagtgaaaggaagaacaactatgagaaaagtgagtttaacaacaatagtaatagtaataagcatgtgaagaaagaagagtgccctttgactccatcatgttggaaaggcttttgggacactgatgttatgggaacaatctttagtgtgcctcctttgtcaccactatctccactaatggttgtttgagattttgtggaacttttgctctttcaatgatgttttgaggtaacccaactaaggggagagagagacatgatgctggtgattgtcctctctgatttaggttgctaatttgcctaaatccaaatggtaggactaattaatctactaatagattaatttgcaagtgaatatatatatggatttgtataatgtaaatataggataggactatgaagcaagatctttttgtttgttgaaaaaaaaaacaaaaaacccatgcttatcttcttcctttaggtaaaaaaatgtactgtacttgaagcaatattgaaatttgtttattcgttaattggagaaaatatgttgt

SEQ ID NO: 16721 - DNA, 467 bp, Glycine max
cggctcgagcggctcgagctcgagccgtctcaactttcctaactttagcaaccatctaagaagttcagtcccttaattatctctcaccttgaattagaaaagcattcaaagctttgaacccaatttcactgtttgcacctcaaacatcttagaagtcccaattgagtctcaattccacaaccaaaaatgcaaagttcaatttcacaatctgatatttttatcactgattaccttgtaccccaagaagttccatttcaatttcaatttcaagatatgagcaagaatgacaacaacatgccaatgaaccataccaataataaccttcaaatgcctcaaatcacatctttctccaagcctccaaggtcctcatcaaatctaagcaaccgcaaaccctccttgaaaaacatcacaatccctttcataacctttggtcttgcaacagctatgtcacaaacaacagcaacaac

SEQ ID NO: 16722 - DNA, 2352 bp, Glycine max
tgttcttctaagctatccaggggtgctcgagtaccattggaatatataagctacatggatcgtcatcgaaggaagtctgtgttagtgacggttgatcggcatgaatggtatgcaccacctcagatatacactcgtgatgacagtactggtctttggaatgctaagcctgcttttaagcttgattcccccttcctatcattgggtgctaaagatgttgacaatctgtctagacagccagtttcactaactggtgagcgggcttgtgggggacatgtgtgtggagataacagtcaggagttggttgatcggtgtcactagcatggaaaccaattgtgaagatccctcagagtgtgtatctcaccacaatgcatctgatggtgtggtgaaaaaacgaaaagtggaggaagatttatcagctgatggaaatcttgttgctgatttttccttaaatgataccagggaaactaagctagaaaaatcaagtattatacaggatgacatgttaatggactatcagggtgcaactgcagctacagcaaatgcgtcagttgctgaacgtgtgatcgagcctacacttgtgatgtttgaggttcatgttcccccatcttgtatgcttgatggtgttcattcacagcacttttttggaactggtgtcataatttatcattcccaagatatgggattagttgcagttgacaagaatacagttgcaatatctgcttctgatgtaatgctatctttcgccgccttcccagttgaaattccaggagaggtggtatttctccatcctgttcacaattatgcccttatatcatatgatccctctgcattgggacctgttgggggttcagttgttcgtgctgcagagttacttccagagccagcattacgccggggggattctgtttatcttgtggggttgagtagaagcctacaagcaacttctagaaaatcagttgttaccaatccttgtgctgcattaaatataggatctgctgattcccctcgctatagagcaaccaatatggaagtaattgagcttgatacagattttggcagtacattttcgggtgtgctaacagacgaacaaggaagggtccaagctatatggggaagcttctcaactcagctgaaatttggttgcagcacctcagaagatcatcaatttgtgaggggtattccaatttatgcaataagtcaggttcttgacaagattatatcaggtgcaaatgggtcacctcttcttataaatggtgtcgaaaggcctatgccacttgtgagaattctagaggttgaactttatccaacattgctttcaaaggctcggagttttggattaagtgatgattggattcaagcacttgttaagaaagatccagtaagacgtcaggttttacgtgttaaaggttgtttggctggatcaaaggctgagaatcttttagaacaaggggatatggttttagcaatcaacaaagaaccagtcacatgcttccgtgacattgaaaatgcttgccaagctttagacaaatccgacgccaatgatgggaagcttcacttgactattttccggcagggacaagaggttgaactttttgtgggaacagatgttagggatggaaatggcactgctcgtgcaattaattggtgtggttgtattgtccaagatccacatccagcagtgcgtgctcttggatttcttcccgaagaaggtcatggtgtatatgtggcaaggtggtgccatgggagtcctgtacataggtatggtctatatgctcttcagtggatagttgaaattaatggaaaaccaactccaaatatagattctttcgttaatgtgacaaaggaactagaacatggcgagtttgttcgtgtaaagacaattcacctcaatgggaagccacgagtcctaacattgaagcaagatttgcattactggcctacgtgggaattgagatttgatcctaatagtgcgatgtggcatcgcaatataatcaagggattgaactgcagtacggtctgaatgatcggagcaatgtaattctttcaaattcctatggacgcagctgcgctggagtataaaaaatcttgtggaaggcttcttctggttcagaattatggtttaccagtgctgcctcgttgcaaatttgatgcgcttcgtccaaagatattctattgcattgccatgattgataatttatgaggcattcgattcaggctggcaattatttattcggttatgtaccgcaacatatgacttgtaggttaattatattggatgctggaaagcttggataataaaagccccctgaaaaatatttatagctttccaaaaaaaaacaaaaaaaaaacaaa

SEQ ID NO: 16723 - DNA, 563 bp, Glycine max
gtgtaaggacaattcacctcaatgggaagccacgagtcctaacattgaagcaagatttgcattactggccaacgtgggaattgagatttaatcctaatagtgcgatgtggcatcgcaatataatcaagggattgaactgcagttctgtatgaaatatgaatgatcagaccatgtaattctttctaattcctatgtacgcagctacacgggagtatagaaaaatctcgtggaaggcatcttccaggttcagaattatggtttaccagtgccctcgttgcaaatttgaggcaaatttgatgctttgccgttaaggggtctacttcaattggttgaacagatggagagagatactataaaacattttgtccaaacatattgtattgcattgccatgattgataagttatgaggcgttcgattcaggctggcaattatttattcggatctgtaccgcaacatataacagtaggctaattatattggatcccggaaaggtcggataataaaagaaaaatgaaaaatatttatagtttatgtattgaaggaaaaaaaaaaaaaaaaaga

SEQ ID NO: 16724 - DNA, 499 bp, Glycine max
gtgacagtgggagaaagttaaaacaagaaatgaaaatacaaggtgacaaaataaggatacaaaatgatttgatgggatggattatgcatcctcctgttcaattttctaatgctacaaccataggagtgttgaatcctgacaagctggcagaacaagtacagaatattgctctggagacaagtaactatgatggtgcaggaggactggatgttcagccagatacttcacaacatagatctacatttggggatttgcagcagctctccactagtcaagttggtattcaaggctcagatcacttcattccagcaagaaattagagctgtagatgtgctttagcactatgttttttggagagctctcaagagggacacgggaagcaggtatctaagaatggtctcagttttttttctcatggcacaatgggaaatgatatgcctcgaagcatatttagtaaggataaaacatgattgagaaacggaaggaaaatacctagtat

SEQ ID NO: 16725 - DNA, 647 bp, Glycine max
  unsure (1)..(647): unsure at all n locations
gacgtgagaggagggtggacggaagcttctgagtctgatggagacggagacgattttacaaggaagatctgaaattctgaattcttaactggaatcagggttttggttttttttcattatcttcctcagtaagcaatgtcttctcccgcggagttttatcactctcttccgccaataacgaaggcatatggcaccgtttgcctgttggctaccgcaacttaccatcttggattatatcatccagcttacattgcactattctacgataaagtgttctacggttttcaggtttggaggttgttcacaaacttatttttccttggaccattctctatcaattttgggatccgtctcctaatgatagtaaggtatggtgtccaacttgagaaaggaccatttgatcgacggactgctgatttcttgtggatgatgatatttggtgcctttgcactattggtattgtctgctatccccatatatcttttgcatcttatgattatttatgtgacaattttttccttcaaaatggtggcagctntattctgtagaatctattctagtggttctggtttatggatctggacaagaagatgacaaaccttctttttggataaaaatgggaaatttgattggtctaatttaatttg

SEQ ID NO: 16726 - DNA, 419 bp, Glycine max
accagctctcttccgccaataacgaaggcatatggcaccgtttgcctgttggctaccgcaacttaccatcttggattatatcatccagcttacattgcactattctacgataaagtgttctacggttttcaggtttggaggttgttcacaaacttatttttccttggaccattctctatcaattttgggatccgtctcctaatgatagtaaggtatggtgtccaacttgagaaaggaccatttgatcgacggactgctgatttcttgtggatgatgatatttggtgcctttgcactattggttttgtctgctatccccatattttggtccccatttttggcagtaccacttgtttttatgctcctttatgtttggagtagagaatttccaaatgcccaaatcaacatatacgggcttgt

SEQ ID NO: 16727 - DNA, 2213 bp, Glycine max
  unsure (1)..(2213): unsure at all n locations
agatactggaggtccagcatctgaatcatcatcatatgtgcttccattgtctgttactatctttccaccacaatttatatgaagagaatataagcacatatgatgatgattcagatactggaggtccagcaagatttcaccgaagtggaacaaaaaattgggcatatatcaatactggtaactttatggataatgacgctggcgcctattatatcgtgcaaaataaaactttgctttctatggacaatgttgacctatacatggatgctcgagtttctcccatttctcttacttactatggattttgcctgggaaatggaaactacacggttaatctacattttgcggaaatcatgttcattgatgatcaaacatttaactgcttaggaagacgagtatttgacatctatattcagggagcgctagtgaagaaggactttgatattgtagaagaagcaggaggaattggtaaggcagtcatcacatcattcactgctgttgtgactagtaataccttggagatccgcttgtattgggctggaaaaggaacaaccagtcttccatttagatcagtatatggtcctcttatatcagctatatctgtggaacctgattttacacctccttcgaaaaacaaaagtagcatatctgtaggagttgtggttggagttgtggcagcaggagcagttgttatcatccttgtacttggtatactttggtggaaaggctgcttcggaaagaaaagttctttagagagagagctacaaggtttagacctgcgaacgggtttgtttactttaagacaaatcaaagcagcgacaaacaactttgatgttgccaataagattggagaaggaggttttggtcctgtgtacaagggatgtttctcagatggaacactaatagctgtcaaacaactttcttctaaatcaaggcaagggaatcgtgagtttttaaatgagataggcatgatttctgctctgcagcatcctcatcttgttaaactctatggatgttgtgtggagggagatcaactattgttggtatatgaatatatggaaaacaatagtcttgctcgcgctctatttggcgccgaagaacaccaaataaaattggactggacaacaagatacaagatttgtgttggtattgctagaggtttggcatacctccatgaagaatcaagattgaagattgttcatagggacattaaggcaactaatgtgttgcttgatcaagatctcaatccaaaaatatcagactttggtttggccaagcttgatgaagaggacaacactcatattagcacccgaatagctgggacatttggatatatggctccagaatatgccatgcatggttacttgactgataaagcagacgtctatagctttggaattgttgctttggaaatcataaacggaaggagcaatactattcaccgacaaaaagaagaatcattctctgttcttgaatgggcacatctgttgagagagaaaggagatataatggatctagttgatagaagattaggtttagagttcaacaaagaggaggcgctagtgatgatcaaggtagctctcttatgcactaatgtgactgcagcacttaggccaaccatgtcatcggtggtcagcatgctagaaggaaaaattgttgttgatgaagagttttctggagagacaactgaggtattggatgagaagaaaatggagaaaatgagattgtattaccaagagctgagtaactcaaaggaagaaccatggacagcttcatctacttctgtagcagatctttatcctgtgggcctagattcttcttacttggagaagagagattaaagactttggagaaaagttgctttaattttgtattaattattttgttgtgagtttatgtgcaaaattcatttctttcttgtaaatctatttgtgattgtttgaacgtgtgcaaatgtatgcatcagtagctttggttttttattttttatttttatgtttaattatttaccaagttttaaggagtttgttgttaggttgtctgattgttatgtgtgagtaacttagcagcttaagcttagttgctgaagtttagctagttagttgttattttcagtttttcagttttttaacttaatctatttaagcaatatctgatgcaatcaataaaagtgtgcatttttgttaaaaaaaaaaaaaaaagggcggccnngc

SEQ ID NO: 16728 - DNA, 485 bp, Glycine max
caggaacttgtttgctagctctatgacgcacaatgactcaggaacagttgcatgcttaggaagcagtgtctgtcaagaaacgttatattctcttcatataaattgtggtggaaagatagtaacagacaatggaagcacatatgatgatgattcagatactggaggtccagcaagatttcaccgaagtggaacaaaaaattgggcatatatcaatactggtaactttatggataatgacgctggcgcctattatatcgtgcaaaataaaactttgctttctatggacaatgttgacctatacatggatgctcgagtttctcccatttctcttacttactatggattttgcctgggaaatggaaactacacggttaatctacattttgcggaaatcatgttcattgatgatcaaaaaaacatttaacagcttaggaagacgagtatttgacatctatattcaggtatatatatactcaacatttttt

SEQ ID NO: 16729 - DNA, 493 bp, Glycine max
tgtgaagagacttaaatatcccttgttcacactacttgtttttgattcaagacaacatgcacttcctgtcgcatgggtcattacacgtagctttacaaagcccgatgtgtctaagtgggtgagggctttaattgatcgagctcggagtgttgagcctggatggaaagtcagtggatttttaattgatgacgctgcagctgaaattgatcttttgagagatatattttgctgtcctgtcctattttcactatggcgtgttcgtagatcttggcttaggaatattgttaagaaatgtagtaacattgagattcagcgggagatttttaagcgtcttgggagaatagtgtacaacatttggggaggtattaatgcatcgcttgccttggaacaattcttgctggattttgttgaccaaactgctttcatggaatatttcaaagtcatgtgggttgcccaaagcgttgaaatgtgtggggccctttcaacgatgaga

SEQ ID NO: 16730 - DNA, 443 bp, Glycine max
cccacgcgtccgataacgtcgattttctctctggtctccagcctcagccaccaggtattgatgtcaaattcaatggggcgctggcggagcccgtggcgccgccgccggagcatccgttgcgattcaattttaaccctgcggtctcggatccgagcgcgattcagcgccagttgcagcaactgcaaattgcggagaacgagcaagctgcgcatcggaggaagggtgaggataattaccccgccggtgattactacgttcaaaaagtgcctgagaagttccccccaccgaattttctggcaagctcgccgggttattggcctgaaaaacatgtttccggcgacgtttatcctccggctgtgacggctacgtccggcggaggggaaaccgtcggttttatatgggtttttccggcgccggggacgttctatcatgcaccggttatg

SEQ ID NO: 16731 - DNA, 744 bp, Glycine max
atccacttatcctcaatggtcagttgctaattggaaattgcattgcccgaactttaagcaatgttgcagatgatttgttgagctcggtgcatctcacagtaaaaaaaatccgggatagcgtaaaatatgtgaagacttcagagtcacatgaggaaaaattcctggacctcaagctgcaacttcaggtccccagtgaaaggaacctttttattgacgaccaaaccaagtggaatacaacatatcagatgctggtggcagcttctgaactacaggaagtgttttcttgtttggacacttctgatcctgattacaagggtgccccatctatgcaggattggaagctggttgagaccctctgcacatacttgaagcccctttttgatgcagcaaacattcttaccacagcaactcatcccactgttattaccttcttccatgaagtttggaaattgcagttggatctgtctcgtgccattgtgaatgaggatcctttcatcagcaaccttactaaacccatgcaacaaaagattgataagtactggaaagattgcagtttggttttggctattgcagtcgttatggatcctcgtttcaagatgaagcttgttgagtttagtttcactaaaatctatggcgaggatgcccatgaatatgttaagattgttgatgatggaattcatgagactgtttcacgagtatgtagcccttcccctacgactaaccccggcttatgcagaagaagga

SEQ ID NO: 16732 - DNA, 1892 bp, Glycine max
atcagtattaagattatgcctgttgggattcacatgggtcgaattgagtcagttatgagaatggcagatgaggaatgcaaggtaagggagctcaaacagaaatttgaaggaaaaaccatcttgcttggtattgatgatatggacatttttaaaggcataaatttgaagattttggctatggagcagatgctcagacagcatcccaaatggcaaggaagagctgttctggtccagatagttaatcctgctagaggtaaagggatacatctggaggagatacatgctgaaatacaagaaagctgcaacaggatcaacagagtgtttgggagacctggttatgaacctattgtttttattgatagagcagttcctattgctgaaaaagttgcttattactgcattgctgagtgtgttattgtcacagctgtaagggatggaatgaacctaactccttatgagtatattgcatgtagacagggaatatctggttctgaatcatgttccaatgtcaatgaccctaagaagagtatgctagtaatatcagaatttattgggtgttctccatcacttagtggggcaatccgtgtcaatccatggaatgttgaagcaacttcagaggcaatgaatgaggccatctcaactggtgatggagagaaacagttgcggcacgagaagcattaccgttatgtcagcactcatgatgtggcttactggtcacgtagtttcttgcaagacatggagcgggcttgcacagaccttctaaggaaaagatgttggggaataggtcttagctttggatttagagttgtggcacttgaccctaattttaaaaagctctcaatcgatgctatggtttcagcttacaagagggcaaagaatagggccattttgttggactatgatggtactgtgatgccacagaactccattaataagagtccaagcaaggaggtcttgtctattttggaatcacttagtgaagaccccaaaaatgttgttttcattgttagtggacgggggaggaatagcttaagtgactggtttaattcctgtgaaaaacttggaattgctgcagaacatgggtacttcttgagatggtcccacaatcgagaatgggaaaattgtggtaagagctccgactttggatggatgcagattgctgaacctgtaatgaaactctatacagaggcgactgatggttcctctattgaaagaaaagaaagtgctttggtctggcaataccgtgatgcagaccttggttttggatctgctcaggctaaggaaatgttagatcatctagaaagtgttttggccaatgagcctgttgctgtgaagagtggccagtttattgttgaagtaaaaccccaggatgtgagcaaaggcttagtcgccgagaagatattttcgtcaatggacgggaagggcaaacaggccgactttgtgttgtgtgttggtgatgacagatcagatgaggacatgtttgagatagttagtagtgccatctcaaggaatattcttgccaccaatgcttctgtgtttgcttgcacggttggacaaaaaccaagcaaagcaaagtattatttggatgatacaactgaggtaacaagcatgttggaatctttggctgaagaatcagatgcttcaccctacatagaagaaactggagattcctctcggaggcaagtgtgagttgaggttgaggtttctcttattttaggtgatgattttttttttaattgggatgtaatattcgtggtgatatttggggcgtttgcagagtatgttttcataatatttttttttcttttttggtttttcttctattatatattacatatatttttgggagaatcccgtcattaaaaaaaaaaaaaatttttttttttttttaa

SEQ ID NO: 16733 - DNA, 473 bp, Glycine max
catcacttaccaccaaaataaaatatgaccaaaacattacttctatggatttttttattgatcagcatcctcatgttttcaactactgggagcacatttactacaaaaattgaagatcttgggacttccaggcaacaaaaggaaaccaaaaccatgtacggtgtgatcatggaatcaagcaaaccaaacactcaaagaagaacaaatctaggattgcatgttgttcaacacacaaaggtgtcacagaaagcaaagacaaatggtggagggaataacgtaaaggatcataaggggaagaatagtgcaagcacctattcaatcaacaaatcttcatccttgttcattcccgtgatgcttttgtttggttacttgttttgaattccaaggcttaaatttatttacagtgaaggcacaactagtgatgcttaataacatgatgccgctagtggtactttggatttgtataatacatg

SEQ ID NO: 16734 - DNA, 441 bp, Glycine max
gttacttcaggaggaattactccgccgtggctgccgcagcggcggcggcggaggctgatgaggaggaagatgaggatgaggcggaggatttggaggaggaggaagaatgtgaagaggaagggagggggagcgaagtggaggaaggggataaggagagggaagggatgaggaggttggcgaaggcgatagagaggtttggggaagtgtatgagagagtggaggcgcagaagctgaggcagatggtggatttggagaaacagaggatgcagtttgctaaagatcttgaagtgcagaggatggagatgtttatggacacacaggttcagctcgagagaatcaagcgcgggaaaagatctggctctaacgatatgtatagctagccaagtgggcgatggttcgttgacggtgcttgaaatgctgtcttgctttggtgagaaagta

SEQ ID NO: 16735 - DNA, 2090 bp, Glycine max
aatcaaaatatctatcaaaagtaaaaagcgaagagaagggaaaaactttaatttttttatggtaaaaaattcaattatacctgttatttcacaagaaaaaaaagaaaaaaacccaggatcggttgaatttcaaatattcaaatttaccgatagaatacgaagacttacttcacattttgaattgcaccgaaaagactatttatctcaaagaggtttacgtaaaattttgggaaaacgacaaagattgctgtcttatttgtcaaagaaagatagaatacggtataaaaaattaataaatcagtttgatattcgagagtcacaaattcgttaaattgaagagtaattctcaattattcgatttattagatcttgaattttgatgaacttttttttttaagcgattcataaaaaaataaatcgaggaaaaacctatgaatatctcaactacaagaaaggacttcatgatagtcaatatggggcctcaccacccatcaatgcatggtgttcttagacttattgttactctagacggtgaggatgttattgattgtgaacctatattgggttatttacacagaggaatggaaaaaatagcggaaaaccgaacaattatacaatatttgccttatgtaacacgttgggactatttagctactatgttcacagaagcaataactgtaaatggaccagaacagttgggaaatattcaagtacctaaaagagccagttatatccgagtaataatgttggagttaagtcgtatagcttctcacctactatggctaggaccttttatggcagatattggtgcacaaacccccttcttctatattttcagagaaagagaattaatatatgatctatttgaagctgcgacgggtatgagaatgatgcataatttttttcgtatcgggggggtagcgactgatctaccttatggttgggtagataaatgttatgatttctgcgattattttttaacaagaattgttgaatatcaaaaacttattacgcgaaatccgatttttttagaacgggttgagggggtaggtgtagttgatataaaggcagtaataaattggggtttatcaggacccatgcttcgggcttccggaatacaatgggatctccgtaaagtggataattatgaatgttacgaagaatttgattgggaagttcaatggcaaaaagaaggagattccttagctcgttatttagttcgaattggtgaaatgatggaatccataaaaattattcaacaggctttggaaggaattcccggcggaccatatgaaaatttagaaattcgctgctttgatagagaaaaagagccagaatggaatgagtttgagtatcgatttattagtaaaaaaccgtctccgacttttgaattgccaaaacaagaactttatgtaagaattgaagcccccaagggagaattgggaatttttctaataggggatcaaaatggttttccctggagatggaaaattcgtccgccaggttttatcaatttgcaaattcttcctcaattagttaaaagaatgaaattggccgatattatgacaatactaggtagcatagatattattatgggagaagttgatcgttgaaatgataatttatttaacagagatacaagatatccatttttttttcagattggaatcttttaaagagatatatggaattatatgggtatttgcccctattttgattcttatattgggaattacgataagtgtactagcaattgtatggttagaaagggaaatatccgcagggatacaacaacgtattggacctgaatacacaggtccttttggagttcttcaagctctagcagacggaacaaaattacttttcaaagagaatcttattccatctagaggagatattcgtttattcagtataggaccatctatatcagtcatatcgattataataagctatttagtaattccttttggctataactttgctttatctgatctgaatattggtgttcttttatggattgctatatagagtatagctaccattggactacttatgtcacgatatggcgcaaataataaatattccttttt

SEQ ID NO: 16736 - DNA, 423 bp, Glycine max
catgtatgccaagagggcatttgttcattggtatgtgggtgaaggaatggaagaaggtgaattctctgaagcccgtgaggatcttgctgctcttgaaaaggactatgaagaggttggagcagaaggcgaagaagaagaataagaagaacacgacgattactcgaaatagagtcaatcattcatcaacattttcaccagctaccttacctacatctcccttcttttctctgtctaatgtctgtccttgtccattgaattttaagcatttttctgttgtgtgctagctctgttcttactattgtttcatgttaaagtgttaagtgatacaattgctttcctcatgagcagcaatggtttatttgtaagtttcagtgaaagagcaaaataaaggacagcgtaggaatgctgcaattttcattactt

SEQ ID NO: 16737 - DNA, 613 bp, Glycine max
atcggcgacgtcaaagccctaggccgctgctgcgtcgtctcgcgccgcttccactccctcgtcccgcaggtcgaaaacgtcgtcgtccgcgtcgactgcgtcatctccgacgacgactcctcttcctccgccgccgcctccgacaagtcccgcggccccttctggaacctcctccgcctcgtcttcggcggaatcgtgaaacccatccaaaccctcggtcagttcctcggccccaaacgcccctcctcctcctccgtcacgtccccttcctccaccacctcctcctcccccctcgccgtcggaaccgacgacgactccgacgccggcgtcacccaccactccccgacgcaagtcctcaaaaacttcaacgagattcgcctcctccggatcgagctccccagcggcgagctaggcatcgaagacggcgtgctcctcaaatggcgcgccgatttcggatcaactctcgacaattgcgtcatcctcggcgcctcctccgtcttccaccccaaagacaacctaaccgaccccatccacaccaccaattgcaacgcatacgacgacaacggaagcatccctgattccttctacaccaacggcggtctcaaactgcgcg

SEQ ID NO: 16738 - DNA, 1132 bp, Glycine max
cgcatcactcgatctcactaatcctttctcttctcagttctctcgttagtattcttccaatctccgtcgatcaccactaacaccaccatgtcgtggctcctccgatccaccaagtcaaaactcctctcttcctcatcttcactttctagaaccttcccctctctctcacgctccggccccacacttgacctccctcagatcggagccatctctcccctccccgatctcttccaccgcaacaccgctaccatgcctttcgcgaaggaaaacgcttccggtggaaacttggccggtcttcccaaagttcctgcgaatacgcttggcagtgactctaatgcgatcaattctccgaggtacaaagcttctggactggacacgaatgtgctggctggagctagatgtgtctctggagtttgggctgcacagggtcaaatgccattgggagtcaatactgtgatggctagaagttttgagagaagtatggaagctggcacattgggaatgattggtcataaacgttttatgagtgacatcccaagtaaaaccagtgagacaaacccatctggttttcgtccgctatctcctcatcttcctctttatcagccccaactttcttcgaccctctcaattgtcaatagaattgctggagctttcctagccggtgtcattttgcgtttttatatgatctatatgaagttgggtttggttagcctcacctatgactctttctaccagttcatattttattcatcgaaactcaacctacttgtcatggagatttctgccttagccgtgtcctatcatctgtatagtgcaattcgtcatttgttcttatgatttgaatcagcaactgacgcctgaactgtacgtttgaacctgaggtggaactttgcataattcgaccttggaggcatgcatccatatgtctgtcagtcataaggaacttcattaagaaatgtgaatttgctttattgtagttatgtattattgacttaataattacaattctggcacaactttctgtttagtgctgagcataactgcatctattttgcacctgacacttggtcatgcttttttgcagccctctcaaattgctgtaagtaaatgttgcatttaataaatgcatttg

SEQ ID NO: 16739 - DNA, 454 bp, Glycine max
acttcacccccactcgatctcactagtcgctttctcttctctcgtcccgcaagtattcctccaatctccgtcgatcaccaccaccatgtcgtggctcctccgatccaccaagtctaagctcctctcttcctcttcctcttcttctctttctagaaccttcccctctctccctcgccctcagatcggagccatctctcccctccccgatcttttccaccgcaacaccgccaccatgcctttcgcgaaggaaaacgcttccggtggaaacttgaccggtcttcccaaagttcccgcgaataagcttggcagtgattctgatgcgaccaattcttcgaggtacaaagcttctggactgaacaccaatgtgctggctggagctagatatgtctctagagtttgggctgcacagggtcaaatgccattggaagtcaatactgcgatggctagaagtttt

SEQ ID NO: 16740 - DNA, 487 bp, Glycine max
gctttctcgtccggccacgcgtccggtcttcagaactggaacccgtcacaaccccagatgaagaagaaatcatgacaaagctcaaaaaccctcaacacagtgtaatcgaagaagcgcttatctctctcagaaaactaacgagaataagagaagaaacaaggcttcaactttgcactcctcggttactctccgcgttacgttccctcgttttgtcgaagcacgtgaacgttcaggtgaacgctcttgcatcggtggtgaacctatcgttggagaaaagtaataaggtgaggatcgtgcggtcggggatggttccgccgttgatcgaggttttgaagtttggatcctctgaagcgcatgagcacggtgcgggcgcgttgtttagtttggcattggatgatgataacaaaaccgcgattggggtttgggggggtttggcaccggtggcttacatgctccgatccgagagcgagcggacttggcatgactc

SEQ ID NO: 16741 - DNA, 613 bp, Glycine max
caaaatatttctagttcctaagtaaaatcaaacaactacacacgtgtttatttatttgtttgttcagaaaaatgatgaggggtgcggaatacgagcgtgtgctaaggtacttcgatgaagacggtgatggaaagatttcaccctcagagctaaggaacagaatagcaatgatgggtggtgaggttatgttgaaggaggctgagatggcgatcgaggcgttggattcggacggcgacgggttgttgtgtttggacgatttgatgaatctgatggaggctgctggagaagaagagaagttgaaggatttgagagaagcctttgatatgtatgatacggagaggtgtgggtttattactccaaaggccttgaagaggatgctgaagaagttaggggaatctaagtcaatggtagagtgcaaagtgatgataagtaggtttgatttgaatggggatggcatgcttagctttgaagagttcagaattatgatgaagtgactacgatgatggtggggatgattatgatgctacatggacattgattctggcacttggttgcttgcttcatgtgtctattaggttggttaggttggaggggtttcaatttggattgatta

SEQ ID NO: 16742 - DNA, 1197 bp, Glycine max
ttttctctaactcaaaaaaaggcaaatacgttattgagtattgacaccgaacgaaagaaacgcaacagcgtctatctgtgagctatggcggaggaggaggaagacgacgagagcttcggcgacttcacgttcgcgtcgtttccgagtcaaccgacctcaaacgacaccaatcccgtcgacgacgacgacgattggggcgacttcatgaaccattccaatcagatcaacggcaaacccttcgacgcgttcggggttcccacggatcccacgaacaaacacgtgaacgacaacaacggcgttgccgttcaggccgaggcggcgaaaaagcctaaaggagctatcccgctttcgatcttcggcgaggaggaagaagaagaggaagagcaacaggagaaacccgcttctgccaatgttttctccaacggtggtgcggtgaaaaggggatccgattcgaacgggtccgttggaatcagcgatttgatttccagtttgtataaccagcagcgccctcaggtggattctcacaacaaccgatcggtttcggtatccaatgttgatgctcccaattcgacgaactcgaacggaagcaaattgaattccgatgaggtggatgaggatgatgatggatgggaattcaagtctgcggaatgggaaactggaaccaagagccaggatgttaaggctgaaacgccaaaacatgatagtggtgctcttgatgtcggtactgtgttggattcatccaatgggatttcagacaaagctggcggatggcacgtggaggttgagttcagtccacgttctgcatcgcaagatcatattaacccacaaccaagtccaaaaaatgaatcaaatgacattggaactgggtttgccatgtttaatcaaaattttggggagtttagttcagggtcagggccagggccaaatcaaaatttggaagcaccgaagaaggctggcatttgtgccactaatatggaattactgaaatttgaaggtgcaactccccatggtactattgattcatctctcacatcagaatctaatcaacctgatggatggaactttggatttaatttcaattctagttctgtgggtgaagacaatcatagttcagattcatatttcaaaaccaaaaacaatcaggatgataacaacagacacaatgcttccccaactaatataaatgttgattcacat

SEQ ID NO: 16743 - DNA, 874 bp, Glycine max
  unsure (1)..(874): unsure at all n locations
aaaccctctctctctctctctctctctctgttcactctcactttttgttttcacctcctcctaatttccaagcacactttctttgtttcttatttcttcctgtctcaattataagtaaaagaaaaacatatttttaaggagattactgggacagctagatgacgcgagcgttcagaattctcgggtccgcggacaacgccacctcgctggcagcggtagcggcgccgccggaggcggtggcgcttgagtcggacttcgtggtgattctcgcggcgctcctctgcgccctcatctgcgtggtggggctggtggccgtggcgcggtgcgcgtggttccggcaaggctccggcggcggaagctctccccggcaagccttggcgaacaagggcctaaagaagaaggtgctgcagtcgctgccgaagttcgcgtacgtggacagcaaccccagcaagtgggtggcgacatcggaatgcgcgatctgcctcgccgacttcgccgccggcgacgagatccgcgtgctgccgcagtgcggccacggcttccacgttccctgcatcgacacgtggcttgggtcccactcttcttgcccctcctgtcggcagattttggcggtgaccaggtgtcagaagtgtgggcgttttccggccaccggggccggagcttccagaacgcctgcgaccgaacccgaattgaagtccagagaagacaacaatgtcgctagtaacagtagtaacaatattaataacaacagcgacagcggtggcaataacagtaactgtaacatagaacatcatcacagccatcatgtgaatagtgggttcttgccatgaacatagtagctactatgtattagctntttttttttttttttaac

SEQ ID NO: 16744 - DNA, 504 bp, Glycine max
gcgttccattcaccgtttaagcaattggctgcgtaaaactaatcgaaagccattgcttgcagctctagagaagatgaaagaagagttgatgttactcggatttatatcactcttattaacagctgcctcacgcatgatagccaatatttgcattccatcaaagttctacaacagtgcttttgctccatgcactagatctgagattgacgaagaaatggaagataatggctctgaagagcgtaaattattgatggcttcttcttatccacacttagttagaaggatgttgaatggaataaatagcagcacctgcaaagagggttatgaaccatttgtttcgtatgaaggcctagagcagttgcaccgattcatttttgtcatggcggtaacgcatatatcttacagttgcctaactatgttgttggccattgtgaagattcacagttggagagtgtgggaggatgaggctcatatggatcggcataattcattaactgaaattac

SEQ ID NO: 16745 - DNA, 464 bp, Glycine max
gcccgttctctctttctataacaccaacaactaacaaccaactttgtcacctctctcgttctccctgctgagataacactctctcgcgagttcgcgatgctcttagctctctcttatttccatcgatggatgcagaaacggtagatctactcaatctctatccaacaggacaagacccactttcccttattcctccatctctttcaatttccctgcacgtgcgaatctattcgcaaattgcacactaaccttttccctttcccttttccttttgcttttcgtatttgtagagttggggttgtagataatgggaggggcaggaatttgaggggaagcgaaaacaaaatcagattttgattagtggggggttcgagaaagtggcgaaaatgaacttgggtgcagccgatgaagaagaatcggctgcacaagttcgtgttcctgcggaaatcgattggcacaaactc

SEQ ID NO: 16746 - DNA, 740 bp, Glycine max
ctttaatcaatcatcatatttatctttgcaactaaaatggcgtcgtcacaaccagagatggagcatccaaagaaggtttttggttgggctgctcgggactcatctgggcttctctccccattcaacttctccagaagagaaacgggggagaaagatttggtattcaaagtgcaatactgtggaatatgccactcagatctacatatgttaaagaacgagtggggcaacacaacctatcctctggttcctgggcacgagattgctggtgtggtaacagaagttggaagcaaggtgcaaaagttcaaagttggagaccgggtaggtgtggggtgcatgattggatcctgtcgttcatgtgaaagctgtgatgaaaatcttgagaattactgccccaaaatgattctcacatacggtgtcaagtattttgatggcaccataacacatggaggctactctgacttgatggttgcggatgaacactttgtggttagaattccggataacctaccacttgatgctgctgctcctctcctctgtgctgggatcactgtgtatagccctttgagatactatggacttgacaagcctggtctgaatcttggtgtggttggtcttggtggacttggtcacatggctgtcaagtttgccaaagctcttggagctaatgtcacagtgattagcacatctcctaacaagaagaagtgacccattgagaacataggagctgactcattcgtggt

SEQ ID NO: 16747 - DNA, 967 bp, Glycine max
acgcgtccgcggacgcgtggggtgctgtctcatatatatcaacccttctgtgctatcctgagagacacacttaattattataatctcttcctcttgtctttgaaatccttttctaattcaaatattatataacgattgaaatggcagcacaagctgaaattgagcatcctaggaaagcattcggatgggcagctagggattcttccggtcttctctcccctttcaatttctgcagaagggaacccggtgagaaagatgtggcattcagagtgttgtactgtgggatatgccactcggacctccacagcataaagaacgaatggggtacttccatctatccaatggttcctgggcatgaggtagctggtgtagtaacagaggtgggaagcaaagtagagaagttcaaagttggggacaaggttggtgtgggatgcctggttgattcctgccgcacctgccaaaactgttgtgacaatcttgagaattattgtcctcaatctacgttcacatatggtgccaaatatagagatggaaccatcacatatggaggctactctgactcaatggttgctgatgagcattttgtggttcgcattccagatagattaccacttgatgctgctgcacctcttctttgtgctggcatcactgtgtatagccctctcagatattatggacttgacaagcctggtctgcatgtgggtgtggttggtcttggtggactaggccatatggctgtcaagtttgccaaagcttttggtgctaaggtcacagtaataagtacttcaccaaacaaaaaggaagaagcaatacaaaatcttggagctgattcctttctaataagccgggaccaagatcagatgcaggctgcaatgggtactttggatggtattattgacacagtttctgccgttcatcctctcttacctctcattggtttgctcaagtctcatggaaagcttgtaat

SEQ ID NO: 16748 - DNA, 975 bp, Glycine max
ataggattgcaagagcacaaacactgatagcattgtgcagcaccgtgccagggtactggtttacagtggcctttatcgatatcatgggccgtttcgccatccaattgatgggtttcttcttcatgacagtcttcatgtttgctcttgctataccttacaatcattggaagaaccacaacaatattggctttgttgtgatgtactctttcaccttcttcttctccaattttggtccaaatgccaccacatttgttgtgccggcagagattttcccagcaaggctgagatctacttgtcatggaatctcagctgcggcaggaaaggcaggagcaattgttggtgcatttggattcttgtatgctgcacaaagtacgaaccccaacaaggttgatcatggttacccaactggtattggggttaagaactccctcattgtgcttggtgtgatcaacttctttggaatggtattcaccttgttagtaccagaatcaaagggaaaatcactggaagagttgagtggggagaatgaagatgatggtgctgaggctatagagatggcagggtctgctaggacggttccagtttaaccaaagtctctgatcaacaaagtacttagttcataattctagtgatgctattattgtgtgacaattttacttcgggttttctacagctagatgctcaataatgatgtagatatatgtttctcggtgctgtctgtaactttaaatcaattacaaagtgcgtgtatttcattcttgtttttaattagaagtgttgtctaaatcatacgtgtatttatatgtagctaaaaggtattagagaaaagttttgtctcgagttcctttgttttataggtgtcctctgtctatgcatagttcttcacgttatggtatggtatcatatgtatgcatacttcaaccgagggacaaattctacaatcttaatgcaattataaaacaattttatttcaaa

SEQ ID NO: 16749 - DNA, 604 bp, Glycine max
cttgttagggcactggattctggaattgtagctcaggcggctcttgatgttttcactgaggagccaccacccaaagacagcaagttgattctgcatgagctcgttactgcaacacctcatcttggtgccagtaccatggaagctcaggaaggtgtggctattgaaatagcagaagctgttgttggggcattgaaaggggagcttgctgctactgcagtcaatgcaccaatggttccctcagaggtgttaacagaattgaaaccattcattgatcttgcagagaaattgggtaggctagctgtccagctggtagcaggaggaagccgggtgaaaacagtgaaggtcacttatgccacctctaggggccctgatgatctggacactcgtcttctccgtgccatgataaccaagggtctgattgagcccatatctagtgtttttgtgaacttggttaatgctgatttcactgccaagcaaagagggatcaggataactgaggaaaggttattcttgatggttcacctgagaatccactggaattcgttcaggtgcagattgctaatgtggaatctcgatttgctagtgccatatcagattctgggga

SEQ ID NO: 16750 - DNA, 443 bp, Glycine max
cagaaactggaaattggcggaacctggaaactaatggaaagcataagttgactaagaaaactatgcaaaaagcacacatggttccatgaatcttcttccttcatcaaattcctgtgtgtttatgatctttgcccccaccaagccaagagtgagaaatggaagcaccatgggccacaacaagttcaagcatagtttttgtgatagtgatacttgctctaacatcatgggcatggaggatgttgaattggctatggataaggccaaagaggctagagaggctcctaagggaacaaggccttcaaggaaacccctacaggatattggttggggacttaaaggagattgtgaagttgcaaatggaagctagatcccacacccatgattccctcccatgatattcctccacctatgtttacacatacgcctgaagaaaccctacgacg

SEQ ID NO: 16751 - DNA, 522 bp, Glycine max
ggcatggaggagggggtttttgctatggataccgccaatgaggctagagaggctcctaagggaacaaggccttcaaggaaacccctacaggatattggttggggacttaaaggagattgtgaagttgcaaatggaagcaagatccaaacccatgaatctctcccatgatattgtgccacgtgtgtttgcacatctgcatcagagtgtcctcaaacatggcaagaattcttttatttggtttggaccaaaaccaagggtgaccctcacagatcctgagctgatcaaagatgtacttaacaagatcagtgatttccgaaagcctgaagcaaatccacttgccaaattactagctactggtcttgtaaactatgatggagaaaaatggaacaagcacagaagattaattaatcctgcattcagtttagaaaaattgaagattatgttaccaatattcttcaaaagttgcaatgatctaattatcaagtgggagggaatgtggcctaatgatggaccatgtgaaat

SEQ ID NO: 16752 - DNA, 1158 bp, Glycine max
gtacttggttggcattatatacgaaatagcacttgctctcttccacttcttgtgctgcccttatgttcttcttctagttcttctaccctcttcttcactcttgttccatcactgctttcagagcttcctatttctctttgaagaagaggggcacagacccatgaagaggctcgtaagtagctgtgcttttactcataatattaagcactgctctggaaagcaatggagaagatgatcatgaaccgtgtaaacaggaagcggtggatcctaggcctcacagcgtgtcaatcttagagtttggggcagttggagatggaaaaacactgaacacagttgcattccaaaatgcagttttttatgccaagtcatttgctgacaaaggtggggctaaactatatgttccatctggcaagtggctcactggaagttttaaccttaccagccacctcactctctttcttgaaagaggcgcaaccatcatcgcatcacaggattatgcacactggactgcaatggatcccctaccctcctatggtcgaggtattgatgttcctagtgggagatatcgcagtttaatttatggacagaacttaagtgatgtggtgattacaggtgataatgcaattattgatgggcagggttctgtctggtgggacctaatcggtactcattccttaaattacagcagaccacatattatagaacttgttggttctgataatatcacaatctcaaatttgacatttttaaactctcctgcctggagcatccatccagtatattgcagtaacgttcaaatccagaagataacagttcatgcaccaactgagttcccttacacaagcggtatagttccagattcttctgagcatgtttgcatttacaacagcaatattagcactggtcatgatgcaattgtgctgaagagtggttgggatcaatatggagttgcctatggcaaaccaacctcaaacgtccacatcaggggtgtttatctacaatcgtcatctggtgctggcctagcgtttggaagtgagatgtctggaggcacatctgatataattgcagagcagctccatattaccaactcaacttttggcattgaactgaagacaactaggggtagaggtggctacatgaaaaacattttcatttctg

SEQ ID NO: 16753 - DNA, 731 bp, Glycine max
gtgcaataaagttggcaactggcaagcaagcaaagcactagaaaaactaggaagagagaagaacccagttgcaacactaattttctctttccctttttttggacttatccttctttctgcaactccaaaatgggttccaaaggggcaaaaaatctagcactctcttcagccttgttgctccttttggtcggttttgcaacctcagacatcaatcaagacaaagcagaatgtacggataaacttcttggtctagctggttgtctttcctatgttggtggtgaagccaaagtccccgccatggattgttgctctggtatcagagaggttattgacaagagcaagaggtgcctctgcatcctcatcaaggatcgtgatgaccctaatcttggcctcaagatcaacgtcacccttgctctaagtttaccagatgcttgtcaaacacccaccaatataactcagtgtgttgatcttttgcatttggcacctaactccacggaagctaaggtgtttgaggggtttaaaaatgccttgaccaacaaaactagtccctcctcagtccctggtgctaataacgcgactgctaatggaacaagcacgagcgcgaacaacaacagcagtagtgggtggggaaagaggtggttggtgacagaggtgctttgtgggattttaccgtttgttttcatttcccatttattcctcttcgtagtttgaaccgagatcaagagtactag

SEQ ID NO: 16754 - DNA, 476 bp, Glycine max
cagaaccctagccctagccctaacctaaaaccaaaatctcgttgcagtgttttcgcctttcctctcacaccaatggccgactctgtaatttcgattcagtacctcaaagatttcgttaattctcaaatctatgacgatgagaaatgggccttcaatgcgaaattgctgcgtgctgctggattgttcgcaggatcaatactacttatgcgaaactatggtgaccttatggcaatctgaaagtagaagaactagttgtctgtcatgagttactattatctactttaccagtaatatgatgtttatgctttttttccctttctttttatcagtaatttgaaaatgaagtggtttttttggtttgaagcttttggtgaacgatggcaatgcttttccgattgggtttactttaatagtaaattctcacatactctggctaagatgtgttggatatgaaatacagtaactattttcgatgt

SEQ ID NO: 16755 - DNA, 446 bp, Glycine max
ctcgagcggtaaactgtgtttgtgttgtgtcgtgtgtcttgttcagtgaggtaagggtaactcgtccccatcgaagagcttacttgacctcacaccaccgaatcattccctactaattcaactcaacaacactacttcaccagttagaaacgcgcgttcgttccaataatgtctgaccccgctgccgaagaggctgctttcatcgagaagctctacgaatacggcgagcagctcaacaatgccaaggacaagtcgcagaatgtgcaggattaccagggaatcatagatgcggcgaagacgagtgtgaaggcgaagcagctcgccgcgcagctgattcccaagttcttcaagttcttccctgacctctcgagccctgctctcgacacgcatcttgatttggttgaggctgaaaaacttggggttcgggtgcaagcaattagaggtct

SEQ ID NO: 16756 - DNA, 361 bp, Glycine max
ctctctctctctctctctctctctctctctctctctatatatatatatatatatatatatatatatatattccctcaaaacacttcacaaaaccctctttttattttcccttttcgcgttgattttgttcttcaatttccaaatcgacgttacaatcgcaatcgcaaattgcagaaacgcgcgttcgttccaataatgtctgaccccgctgccgaagaggctgctttcatcgagaagctctacgaatacggcgagcagctcaacaatgccaaggacaagtcgcagaatgtgcaggattaccagggaatcatagatgcggcgaagacgagtgtgaaggcgaagcagctcgccgcgcagctga

SEQ ID NO: 16757 - DNA, 394 bp, Glycine max
tctcgagccgattcggctcgagtgtgtttacgttgtgtcgtgtagcgtgttcagtgaggtacgggaaactcgtccccatcgaagagcttacttgacctcgcaccacggaatcgttccctactaattcaactcaacaacactatcgtctccattcactagttagaaacgtgcgttccaatgtctgatcctgccgaagaggctgctttcatcgagaagctctacgaatacggcgagcaactcaacaatgccaaggacaagtcgcagaatgtgcaggattaccagggcatcatagatgcggcgaagacgagtgtgaaggcgaacagctcgctgcacagctgattcccaggttctacaagttctttcctgacctttctagccctgctctcgatgcaca

SEQ ID NO: 16758 - DNA, 491 bp, Glycine max
cctcacgcgtccgcggacgcgtgggctcgttttagtttgtgtttgtgctaccttcttcgctcttcacttttgttgtctaacatggcgttggtgaatccgtttctgtctccccctcgaactcccctctctctgcgagtttcagctccgccaaaccaagcactactacgttggactctctgctcccaatattcattcaaaccatcatcactaagatcgaagcacgccatgtgtggcgccactgccgacatcaaggctgcacctttagctgatggagaagcagatcacgcggttcttgtgggccccgccagcgaggacgagagaaaaggagactatgactggacacaggaatggtaccctttgtatctcactctgaatgtgcccgaagatgcacctttgggtcttagagtgtttgataaacagctcgtcttgttcaaagatggcaatggccagtttcgctgttacgaagatcgctgcccccacaggttagcaaa

SEQ ID NO: 16759 - DNA, 465 bp, Glycine max
cttttcctgtgtttcttcctcgtttgagtttgtgtttgtgctatcttcttcgctcttcacttttgttgtctaacatggctttggtgaatccgtttctgtgtaccactcgaacgtccctccctctgcgagtttcaggtccaccaaaccaagtcctaccacgttggactctctgctcccaatattcattcaaaacatcatcactaagatcgaagcaactcaggtgtggcgccactgcagacatcaaagcagatcacgcggttcttgtgggccccaccagcgaggaggagagaaaaggggactatgactggacacaggaatggtaccctttgtatctcactcagaatgtgcccgaagatgcacctttgggtctcaaagtgtttgataaacagctcgtgttgttcaaggatggcaatggccaagttcgcttgtacgaagatcgctgcccccacaaggtagcgaaactat

SEQ ID NO: 16760 - DNA, 397 bp, Glycine max
gaaaccgcttctccttaatccctcccacttgttctgtttcagaattagaaaactaaagaacaagaagagaacaacggaaactaaacgtagtacacatcactaactctaacaagaaggaaggaaggaaggcagaatcagaaagccctaatcgattttcggttattatggagagatgaaaatgaaaaggcgtgggatcagcgcggaaaggataatcgtattcgtagatgcttctctcgggaggagtgtccgatctcaaatggatcctccaattcgtattctacgcgttcgtcttggcgattggactgcacgcgcttctcaagaacaccgcctccaagtacttcgaccttgacgccactttccacgctcacgctattcctggccttctcatggaccattc

SEQ ID NO: 16761 - DNA, 892 bp, Glycine max
cagcagctataggaaagaaaggttcagaggcaggtccaactcatgtgcttgttgtccgtggattggatgaaaatgctgatgaggaaatgctccgctatgagttttccaaacatgctccgattaaggatctgcgtcttgtgagagacaagtttactcatgtctcaaggggatttgcatttgtacacctttgattcggtggaggatgctaccaaagctcttgaggcaacgaatggaactatgcttgaaaagaatgggcagattctaagagtggcgtatgcaaaaagtatcctgggccctggatcaggaacatcaggaacttcccaatcaagcagtcttgcagctgctgctatcgaggctgcgacatttgcccaacagtatgattctgtgggatgggctccaaaagaatacaacccagatgccaaacaatctactggtccagagcaaactggtgcagaagttggtgctccacaatcaggctttgtttgggatgaagcatcgggttattactatgatgctgcttctgggttttactatgatggaaatactggtctttactatgatggtaataatgggatttggtattcatatgaccaccaaactcagcagtacataccttgcactgatcaaaatcagaataaagcatctaatgagtctgaaccttctaaggtatctgatggttctggaagtaaaaaggtcatttctgcaccagctactgctgttgcaccggttgagaagccagcttcattggcagatgctgtccaggctgcagcaactgctgctttagctgcagagaagaaagagaaagaaaaatcaaaggaaataaaacttgcctcaaaaagcagtatactggcaaacaagaaaaaaatgaacaatgtgttgacaatgtggaaac

SEQ ID NO: 16762 - DNA, 1263 bp, Glycine max
tggagccttcagaagaagcttttgacattaactctgtgcctaaggaggtcaagttccagcctcttgcagaaaagaaagcccctggtaaaaagccaactggtttgggtgctcccccaagtggtcccccatcaactgcagatgcatatgagaggatgctttcaaccattccagagtgtgcaaactttgggaagcttttcaagtcctcagcacccgtggagctcactgaagctgagacagaatatgctgttaatgtcattaaacacatttttgataggcatgttgtgttccagtacaactgcacaaacacgataccagagcaattgttggaacatgttattgtgactgtggatgcttcagatgctgatgaattctcagaggtgttctccaagcctctcaggtctcttccttatgattcacctggacagacttttgtggcatttgagaagccagagggagtgccaacagttgggaaattttctaacgttctgaaatttattattaaagaggttgacccaaccacgggtgaggctgaagatgacggtgttgaagatgaataccagctggaggatctggagattgttgcagcagattatgtgttgaaagtgggggtgtctaattttaggaatgcatgggaaagcttgggccctgattttgagcgtgtggatgagtatggtcttggtcctagagagagtttggctgaagctgtaaatactgttatcaacctacttggcttggagccttgtgagggcacagaggaggttccacccaattcaagatcacacatatgcttattgtcgggtgtattcacagggaatataaaggtgcttgtacggttgtcttttggacttgatggtccaaaggatattgcaatgtaattgtctgtcagatctgaggacgaaactgtcagcgataccattcatgagattgtggcaagcggctagtccatgagtcaagaaatattgactcaattgggccccttttttggttaatgaaattggagtttagcaggcatatagatgttgacgtttgtaaagaatttcaaaattgtccttcttcactcactgcattcttgttagactagcaacgatactgcaagtatcgcgtcgggtttactgcggtacacttcctcagaatgatacttcatttttcggtgtagtcaatgtaagatgaattttggggatttaacttaaatcaatgtttgtgtcctcaatgaattggatatttgttgaacagcaatagataagtacagaagacatgtttctt

SEQ ID NO: 16763 - DNA, 594 bp, Glycine max
tatgccaccacctccgccttatcatcaatacccacaacctccatacaatgctgcagcggctccatcccagccacctgctgcggctccatcccagccaccagctgcaaatcatccttatccacattctatgcagcccggttcttcataatcaggatcttcacaggctgcatctgccccagctgaaactggaacatcaacatcagagtcacagcagcaataagattgctcgtgtactgatgtttctagttatgtttaattattgttcaaagtttttccttaaactgaccgtgctgacagggaagatattttcactcaagctgtctatttactatctctgctagctcaatgttgatcgccttgtggcttgaacaagttattttattttgtgcttttgtaactcttggcttcctggttagatcagagtgatgctcagctttagtatattactttgcactgaattctaatgttacaacttgtgttttggtatatagcatttggtaaagatgttcaattaattttatataaaattaattgaacatctttaccaaatgctatataccataacacaaattgggtattaagggcctaaggcta

SEQ ID NO: 16764 - DNA, 379 bp, Glycine max
agaaatatctccaagactccaaccgtgcttcaaatatcaagcactttcttgttgtacttgcacttccactttttttttccaggttctagttgagtagccggagttctccccttgcgccgccgcaccaatgtcgaccacaactgtatccggcggcgaccctccttctcgcggttttgatacgccgtcgctggaccgggaggcggcggcgctgctccacgcgatctccgagcatggcgggtacccgctcgtgagcatggcggtgctggcttccggcggcgacattctcgcggcggaggcggctcgggagatggcgtgggagcagctgcactcgggtccgtggcactcggtgctgccggtgtggcgcgacgcctactccatg

SEQ ID NO: 16765 - DNA, 463 bp, Glycine max
gccaacgttgagggcaatatcctcatcgaacgtttcgtttcgtgcccaaaattaataactcaactacgtgggaaactagaaaactgatacggtcctaagctaaagagaagggaaagagaagaagataagtctgagagataagctttttctgatatcctttatttccctttcatattacatttatagtttttcagttaacagaatctaactgaatcctaactaactaggtactataacggattctggaattctggaaggttcttcaagtcaaacgcgagtcaatgactgaggccgcgagcctgcaagcacttatacgaagtcccccagttttcatggagttcctgcagaggaagcgtctacactggcgttctttcttggttaaactaggagctgacaatcttaagggtgtaaaaaatgaagaactcctagttgcttgccataatgtcagaagtgatctttgtga

SEQ ID NO: 16766 - DNA, 329 bp, Glycine max
cccacgcgtccgggaaaactaaaagaggcaaatgcattgtagtaacgagttggatatgcaagaaccgagcattgagacggataagcttagttacgaaatcttctccattctcgaaagcaagtttctcttcggctacgacgatccaaagctctggttccccaagcaaatacctcccaagccggaatctcagactccggcagctaccgccgccgtggactgcgtctccgcagtcaagaaccagcgcggcaagatatgcattctcgccatcgacggcggcggcatgcgcgggattctcgccggaaaagccctcgcctacctggaagccgcgc

SEQ ID NO: 16767 - DNA, 1617 bp, Glycine max
aaaaaacaacaacagagaacacgagtttgcagccataaaaaaaccccacacattcagacattgttgtgttgtgtaatgctatctccgatggctctctctgcgcatatttgccgtttccccgccacacgcgctgacacttctttgccggagagtctcaccagaatccggtgccggaaacctctctccgtccgatgctccggcgattccacttccggctctgtgggttcggagttcgatccgaaggtgtttcggaagaaccttactcggagtaagaattataaccgcaaaggatttgggtacaaggaagagaccctccaactcatgaatcgcgagtacaccagtgatatcattaagactttgaaggaaaatgggtatgagtatacatggggtactgtcacggtgaagcttgctgaagcctatggattctgttggggagttgagagggctgttcaaattgcttatgaggccagaaaacagtttcctactgagacaatttggcttaccaatgaaatcatccacaaccccactgtcaataagcggctagaggagatgaatgttcaaaatattcctctcgaagaaggtggaaaacaatttgatgttgtcaacaagggtgatgtagtcatattgccagcttttggagcggcagtggaagagatgttgactttgagcgagataaatgttcagatcgttgatacaacttgcccatgggttgcaaaggtatggaattctgttgaaaaacacaagcaacgagattatacctctgtaattcatggtaaatatgcccatgaggaaactgtagcaactgcttcttttgctggcaagtatataattgtgaagaatatgaaggaggctgaatatgtttgcgactacattcttggtggtgaattgaatggatccagttcaaccaaggaagcctttttagagaaatttaaatttgcagtttctgagggctttgatccagacagagacctgattaaagctggcattgcaaatcagacaacaatgctcaagggagagacagaagacattgggaaactattggagaggactatgatgcacaaatatggtgtggagaacatcaatgagcacttcatgagcttcaatacaatttgtgatgctactcaggagagacaagatgctatgtataaattggtggaggaagatttggatctaatgttagtagttggtggatggaactccagcaatacttcacacctgcaagagatagcggaggaacgtggaatcccttcttattggattgacagtgagcaaagaattggtccaggaaacaaaatagcatacaagttgaaccatggagagctggtggagaaagaaaactggctgccagagggtccaataccaattggtgtaacatttggtgcatccacaccagacaaggttgttgaagaatgcactcatcagggtttttgacttgaaacgggaaaaggcaatgcaacttgcataaagtcggtctgcatgcatacattggcaatgtataaatgaatcgaggaacttaatccatagaatctataacaggcttacagccccatgtattgtggaatgtatcaataacaaaagttcaagagctcttataaatgttgccagttgcagtatcat

SEQ ID NO: 16768 - DNA, 777 bp, Glycine max
  unsure (1)..(777): unsure at all n locations
gaataatattagggttttcgataagagtcctgtgatgttgtcgccggtgaatttggtgaaacacaacagtggtttcgttgggacccccaaaacccctcgcctcgacgattcgctgtcggaatcgaagcttgagtctctccccatggatttgttggttaaaattctgtgccacctgcaccatgaccaactgagggctgtcttccatgtttctcaaaaaattagaaaagctgttataattgcaaggcagtttcacttcaattatactactccagatcgctctcggcaggagatgttaagtacaatgactcctcgtcctactgagcattggccttttttgtgcaagggtgatgggaagggagttaggattccaagcccacacacacctaaagcacctagacatggccctcgacctccttctcgcctaaaaatttcagagatgaggcaggttacagctgttcttttcccagagtcagcattcccttctcattgcttggtgccatcagttatatcaaagcccctatgcaaatccttggcttcgaatagagttctcttctatgaagatgaactatgtcaggcagttgctcagaataaactacgctgaagcaattgtcttcaaaattcctttttcttcactgcctcatagtcatgtttctctgctgtgtatattctctttcggtctctctagcaaatgttaggatagtaaaaatgcaattttgtagtctgtcttgnggcagtttagctggtgtggatatttgatatgtctaaatagatgtggag

SEQ ID NO: 16769 - DNA, 419 bp, Glycine max
ggctgtttcgcgctgccattgccccgcgagtctggtattccgctccgaccgactctagtgttcgtttgggtcagactttgacgctaaagagcttcgagaattcatggattggaactaaagttggggtttcgccatgcagtctcaatcttagacctgtcgtgtccgtttcccggcggcgcccgctcgctgctaccgtctccttcagcctccccaccgcaaagccagagcgtgcttctactggccaagaaattcccaagtgagtagtatcgcccaaatgtgtttgtcggactctacttttttctcgttggtcccttgctaattgtgtttgatgaaagcaagatggttttccaaggctataaaatcatttgcaatgtctgaattggaggcaagaaaactgaagtatctgaccactggcactg

SEQ ID NO: 16770 - DNA, 665 bp, Glycine max
acgaggctcatttcacctttcccagagtttttttatttttgaggaagaagcatagcgatgatggcatgcagtagtagcacaatgcagagtgtgtacccgagggtgagtggagcgaatttccacgttccgctatcttccccttctctcgttcctatttacaacaacaacctctccttttcaaagctacgcaattcaattcatctcgcggcggtgccattgccgccgttaaccaaagcctctgcggggaacggcggccccaccgacgagggagtgtctttagggacgatgaagcttcctttggacactgacctccagagattcgattccttgctctttcagtgggcaaacagcctttgccagggagccaatctgccccttcctgtgcctctcaaggtggacaaaatacctggtggagctagattgggttttatcaccattggggatgggaaaactgaagttcttgtgtatattgattgcttggtttttccaccaactgaaaactctgctccaattttccgtgccattagaaatggtcccttgaaggataaggcaccaccaggtgagcccagaattatgagaagccttcttcaagctcttcagaagtcagttgaaatcgccagattgtgaatattttgtttgtttctaacgtccttgtaattgtaagg

SEQ ID NO: 16771 - DNA, 1067 bp, Glycine max
  unsure (1)..(1067): unsure at all n locations
ctttcatatcaaatagttgactctttgatttggctcggaattcgcgacatgattaatgatcttaggaagaaaaagttgaagctacgaccagtcacatatttaagtggctcacaaggctctgaaactgatgttccacatgcatatatatggagtcctcatcttgttcctaaaccaaaagattggggaccaaaaattgatgtagtagggttttgctttcttgatcttgcgttaaactatgaacctccagagtcccttgtaaaatggcttgaagaaggagacaaacctatttacattggatttggtagcctgcctgttcaagaaccaaaaaagatgacacaaataattgtagatgctttggagatcactggacagaggggcatcatcaataaaggatggggaggtcttgggaatttggcagaaccaaaggactctatatacttattggataattgccctcatgattggcttttcttgcgttgcaaggctgtggttcatcacggaggtgctggcacaacagctgcggggctcaaagctgcttgcccaacaaccatagttccttttttcggcgatcaaccattttggggtgagagagtacatgctagaggagttggtcctccacctatcccagttgatgagttttcacttcccaagttggttgatgcaataaaacttatgctggatcccaaggtaaaggaacgtgcaatcgaacttgcaaaggccatggaaaatgaggatggagtgacaggagctgtgaaagcattttttaagcagcttcctcaaaaaaaatcagagtttgatgcagatccgcaaccaactggttttttctctgtaagaagatgttttggttgttcctgattcaaatgcagtttattaaaccccactttttggtaattaatagtgtaaatcacaaatagttactgcatctataggatgtgctggacttgtcaccctgtcatgtgattgtataatttcatgcatgcttgtatttgtactatttaacttgagattcagtttgtatgtaaatttactgttgcttttaattgataaaaannnnnnnnnnnnnnnnn

SEQ ID NO: 16772 - DNA, 947 bp, Glycine max
aaatttttgacagatgccaaattggctatgagtgaaacatatcaacagactgatgctaattttctggattctgaaaaggacaccttcagggatgatggatctacagcttcgacagcagttttggttgataaccatctttatgtagcaaatgttggagattctaggactataatatcaaaagctggtaaagcaaatgctctctctgaggatcataaaccaaatagaagtgatgagcggaagagaatcgagaatgctggtggtgttgtcatgtgggcaggtacttggagggttggaggggtgctagcaatgtctcgtgcctttggtaaccgtatgctgaagcagtttgtagtagcagaacctgagatccaggaccaggagatagatgaacaaattgaactgattattcttgcaagtgatggactctgggatgtagtacagaatgatgatgctgtttctcttgcccgcacggaagaggagcctgaggcagctgcacgaaagttaacagaagcagcattttctcgtgggagtgcagataacattacatgcattgtggtgcaattccaccatgagaaagcagaactagctaatcctgacaaagcagaagcagctagtgctcagcatgagtagatgatgtgaaagcacaaaatgcatgtgttggttatattcgcgtcaaattgaatgaattgaggtcagcatatgcatgatggctcactctgcatgtcaaggcaatttgtttattcattagttttcttatgtaagtcactcttgttcttgtattgggatttttgcatcgtgttcttctgatgatttcagcgtgtgtccgtatatatttaaagttttcctgtttgtagagaaatcaagttggtatttttgttctgatctaataaatgcaatatgcatttttttttatcaccctgatatgtgataaagtagaaatcaatttattt

SEQ ID NO: 16773 - DNA, 919 bp, Glycine max
gtggcccaatcctccaaaatactcggatatgcatgtaagcaaatctgcacaatatacacataggtctgcttcttgtgacaaccttcactatattactaaaagtactcataaattccgattttctccctggaaaaatggcagcctctgccggcggccagataactctctcgtcaaccgtgcagttacatggagtggcctgtagtaggaattggaagctagtgaagttctgtaatggggaagtcatgggacgtaagcttgtgttaaaaagtgcttatggtggcagcactaaggatgttaggcaccaccaacaacaacaacatatatgcatgtctctcacagctgacgtttctactgaatccaagttgagagacctagatatggaaagaaggaacccaaggacagtgttggcagttatactaggtggaggagctggaacccgtctcttccctctcactaagcgacgagccaaacctgctgttcctattggaggtgcatacaggctcattgatgtaccaatgagtaactgcatcaacagtggtatcaacaaggtgtacatcctcactcagtttaactcagcctctctcaacaggcacattgctcgcgcttacaactctggtaatggagtcacctttggagatggctacgtagaggttcttgcagcaacccaaactccaggggaggcaggtaaaaagtggtttcaaggtactgctgatgcagtgaggcagtttcactggctctttgaggatccaagaagtaaggatattgaggatgtcttgattctttctggagatcacctctaccgaatggactatatggactttgttcaaaatcatcgggagagtggtgcagatatcactctttcttgtctgccaatggatgacagccgtgcctcagattttggtctgatgaggatagacaa

SEQ ID NO: 16774 - DNA, 419 bp, Glycine max
  unsure (1)..(419): unsure at all n locations
tcgcccacgcgttcgcccacgcgtncggaatcttactagaaagtaaataaaatgaacgagtgccaaatccgagagccatgtccgtggttgatatgttgaattgagaagttagtagggttccttcattcgactcaaacacacaatgagtttgtctctcattcaaggttattcttccgccgaagacgaagaccaaccccaaccccacgattccgacctcgaagattccgacgatgaagccgccgccgccgcctcctggaccgccgccgcaaaccacccttctctgggcgacagatccatcttcgaccacgttccgaatcctccttctgccacgggtcttccttctgcattcgacgctttctccgaaattgcagaaccgccacaatttctgaacaacagtgtggaagagtataacaacaacc

SEQ ID NO: 16775 - DNA, 602 bp, Glycine max
cgtggatctaagattcttgcttgtgctgcctcaaatattgctgttgacaacattgttgagcggctagttccacatagctggtgagagtgggtcatcctgcacgtttattgcctgaagtactggacagtgcactggatgctcaggtactacgaggtgataataagagtcttgcaaacgacattcggaaagaaatgaaggcattgaatggaaagctgctgaaaaccaaagacagaaatacgagataggacatacaaagggaacttaggactctatccaaagaagaacgtaaaaggcagcagcttgctgtaacagatgtacttaaaagtgcagatgtaatagtaactactttgattggggctttctctaaaaaactagacagcacttcatttgatttggtgattattgatgaagctgctcaagcacttgagatagcatgctggatacctatactgaagggttcaagatgtatacttgcaggggaccatcttcaacttcctccaaccattcaaagtgttgaagccgagaagaaaggcttaggaagaacgctctttgaacgacttgcagaaatgtatggagatgaaatcacatcaatgcttacaatc

SEQ ID NO: 16776 - DNA, 1070 bp, Glycine max
gagggatcatctatttcagatcaaaaagcaattaaagagaagaagaagaaagcaaaacgatcgagaaagaaacagcttgttcaggaagaggagaggattagaggtagagtcagcatgaaggtgtatctttcatacatggcagcagcatataaaggcttattgattccactcataatcattgcccaaacattatttcggttccttcagattgcaagcaattggtggatggcttgggctaaccctcaaacagaaggagacctgcccaaagtaactccctcagttcttcttcttgtttatatggcccttgcttttggcagctcatggtttatatttgtaagggctgttctggtggctacatttggtcttgcagctgcccagaagctatttttgaaaatgcttagaagtgttttccatgcaccaatgtctttctttgactctacaccagctggaaggatcttgaatcgggtatcaattgatcaaagtgttgtggatcttgacattccttttagacttggtggatttgcttcaactacaatacagcttattggtattgttggtgtaatgacagaagttacatggcaagttttgctcttagttgtcccaatggctgttgcttgtttgtggatgcagaaatactacatggcttcctcaagggaactggttcgtattgttagcatccagaagtctccaattatacatctttttggtgaatcaattgctggagcatccaccatcaggggttttggacaagaaaaaaggttcatgaagcggaacctctatcttcttgattgctttgcacgaccattcttctgcagtctttctgcaattgagtggctctgcctgcggatggagttactgtcaacctttgtatttgctttctgtatggtattacttgtgagttttcctcgtggaagtatcgaccccagcatggctggacttgctgtgacatatggcctgaatttaaatgcacgcctatcacggtggatactcagcttttgcaagcttgaaaataaaattatatctattgagagaatttatcagtacagccaaattcctagtgaagcacccac

SEQ ID NO: 16777 - DNA, 364 bp, Glycine max
gtgttgatcatacacactcttcttcttcttcttcttctctcttcttgcttgcaatatggacatgaattcctcaggtggtgcctgcggttggctttatgattatggctttgatatccctgttgctggttctgacttcatggcttcagactctggtggtttcagttgggggccccagagttacaacttcaagggtccttcaaatatgagcttggaaatggaatactcactggattcaactgtcatggaaaatggtccttcaaagcggttaaggactgaatcatgtgcatctggctccaaggcatgtcgtgagaaattgcgaagggataaacttaatgagaggtttctggaattgagttcgatcttg

SEQ ID NO: 16778 - DNA, 446 bp, Glycine max
gtaattttgacgtgattctgttcgcctacaattaactagtgaaatttgtgattaattaccctcggtgtgtcttttttttctgatttgtcacctttctctgctcttcaggttaaggactgaatcatgtgcatctggctccaaggcatgtcgtgagaaattgcgaagggataaacttaatgagaggtttctggaattgagttcgatcttggagcctggtagacaccccaaaacagacaaagttgcattattaagcgatgcggctcgagtggtaatccaattgagaaatgaagccgagaggctgaaggaaatgaatgatgaattacacgcaaaagttaaagaattgaagggtgagaagaatgagctctctgatgagaacaataagctgaacgaagagaacgaaaagttggagaagcatgtgaaactgacaaatatacaacccagctttc

SEQ ID NO: 16779 - DNA, 395 bp, Glycine max
cccacgcgtccgcccacgcgtccggaacaacaacaacaaccgagttccagcacagtatgattggcacaataatagaaggttactcactcatcattgccctaaccggagtttcaatcaggtcgcgagagcgaagcaacagtgtggttcggattggggaaggccaaccaagcctaataactatttggttcagcagcaacaggttaaggttcagagtagagcgcgtgagtttgggcacgagagtgtgaatgcgaaatgcactcgtccatctgcgtggccccctttgcaagttcagcagcaaaacaaccgggtacagtttggcggatccgggtctagggttggtggatcttctgtgaaaagggggtgtggtggaactggggtgttcttgcctcgccatt

SEQ ID NO: 16780 - DNA, 493 bp, Glycine max
tgttgctcagttatggtttgcttgcatggttggacctataggtgtgtggattagatggttcttagccaggctcaacgcgcgcggattgggaaaggcagggctggttaaatggattccgtttggaaccttaattgccaatgtatcagctgcttgtattatggctgcactttccactgtgaagaatgcagtaaacaccagggattgtgatactgctgtagcgggaatacaatttggtctgatggggtgtctgagtactgtctctacattcgctgcagagtttaatgcgatgagagaaagcagtcgccctatgagagcatatgcatatgctatcattacagtttttttgtcattctctttaggaatcttgatatactgcatacctgtttggacaaaggggttagatattgacacatagcaattgagtaaggcaatcatgttttttgggccctttattggttgaaacatagctgccctcctgattttaaagataacg

SEQ ID NO: 16781 - DNA, 256 bp, Glycine max
cccacgcgtccgaattaagattacgtgaatttttaggtttttagggggtgaaaaaatggggggaggttgtgttgtatcatccccttgccttgatattaattgtgataattttaggtttggaatatgcgttgtggtttgagcatctgttactgttatggttgggtttttgacatctgataatgaatctgtgtactggaaggattactgggtcttggtcatccagattgaaatacctgaaaatccttgctacttatac

SEQ ID NO: 16782 - DNA, 454 bp, Glycine max
atcaattaaaaaagataaacagtggagaggagaggagaaggcgatgcaacccacatccggcggcggcgggctggcaaggttccgttcagctccggcgagctggttagaatcagttctgttgaaggaagaggaagaagaagaagaccccttaagcttcactcaactgctttccactatcgatgatgctccctctcattctcaacaccaactctatggtgccgctctctcaaacaaggataaaacacctgaaatcttcatgttagaagattccgttccttgcagagtgagggctaagcgtggctgtgctactcatcccaggagtattgctgaaagggttcgcaggactcgtatcagtgaccgcatcagaaagctgcaagaacttgtgccaaacatggataagcaaacaaatactgcagatatgttagatgaggctgtagcgtatgtcaagtttcta

SEQ ID NO: 16783 - DNA, 458 bp, Glycine max
aagacgacagaaggggaaggtgtccactgaactgaaatggtgtccttcatgggatcttggaattgaaacgaacgaagggacgtgtctgtctccgatggcttcctcataccgtgaccgcacgtcggagttccggttattattggagactctgaagaagatcggaagtccggtgcaacccgagaatgctccttcgacctctcatggcgagtcgtattcgagatccgaattcaaccgaaaggcctcgcgtatcgggttggggatccacgagacctcgcagaagatcgcgaggctcacgcagctggcgaggaaatcgtccatgttcaacgatcccgcagtggagattcaggagctgactgttctgatcaagaacgagatcacggcgctcaactcggctctcttcgatttgcaaaccgttcagaacacggatatggctgacggcggttactcgcaggatacga

SEQ ID NO: 16784 - DNA, 447 bp, Glycine max
cccacgcgtccggtaaaaaaaaaaaacaagtgtagaaccgaatcaatggaatcgtactttgttatttccgttagtttcgatttgcttcctcttcttcttcctctgcgcttcacatcctcagacctcaaccatcagcaccaccataccaacaacatcatcgcggcgccatcaccaccgtaccaacaacatcatcgcgcgatccaagcaacactcacaccaacagatctatgcgccacaacaccaccgcgcaacggagaagtcgcgcgcgcgcaggaagcctcaaagattgattcgcgcacacagatggaggtgcaatgatggtgtgacggcggcgcggtggtggctggtccaaggcggcgacgcgtgacgttattcgagaagaaaggggtcgcgcacgcagatctggagtctggagcgaaggacatgggcgacactgatttcttgggc

SEQ ID NO: 16785 - DNA, 524 bp, Glycine max
ctcttctttccctctttcactctctctctccaacaccaacaataagaacagaacaagagttaagaaacagagcatagagtgatttggtgggtggagagaggaacagaacagagcaacatgaagccaccaacgaaacccatttcgagccctggtcgaaccgagaagtttccaccaccgttgatgagattcttgagaaacaatgcctcaagcagaagcagaggaaggtcaagaaccaccaccgccatgtttctgagaaagaagaacaccaacaatattgaaacacaagaaccctcttcccccaaagtcacttgcatggggcaagtccgcgttaaacgctccgcctccaaaagggtgccctccgccggcgccggaactccgaccaagtttcggtgctgctcatgggtcccacatgctctgttttttcaccgtttaataaaacccgaagtttggttcccctttcagtgcaaacaaagttggcccaaattgagggtcttacaaagaaagaaaagggattcaaagtcacg

SEQ ID NO: 16786 - DNA, 614 bp, Glycine max
  unsure (1)..(614): unsure at all n locations
caagagcctgcgcaactcaagaatgcggtaaagttccacgactacgccttgcggttcaagaagcacgccgagaaggggaagcttccgaactacgtggtggtggagcagaggtacttcgatgtggaggtttttccggcgaacgatgaccacccctcgcatgacgtggcggccgggcagatgttcgtgaaggaggtgtacgaggttttgaggaagagtccgcagtgggaggagatggcggtgctgattacttacgatgagcatggtgggttttatgatcatgtggcgacgccggtagaaggggtgcctaaccccgatgggatcgttgggccccacccttattactttcggtttgataggttgggggtgagggtgcccacgtttattatctcgccttggatcgacaagggtactgtgattcatgaagcccaggggcccacaccatattctcaatatgaacattcctctatccctgccacagtaaagaagcttttcaatttaaaatccaatttcttgacaaagagagatgcatgggctggtacctttgaaaagtacttttacattcgagatactcctcgtgatgattgtccagaaactcttncagacatcaagatgct

SEQ ID NO: 16787 - DNA, 374 bp, Glycine max
ctctgtcactgtctcataacactctttgaaccaccgcaactaaaataacaaccccacttttcttctagccaaagcttccaagtttcgaattttctcatcttttcggaaaaagatcaacaccccagataaaaatagaagaaagccttttctgggttaatttggtaatttggtttttttcatgggtaacataggaagcagcggctccaacagccgctggagacacggcggaggcggtggcagcgggaggcggattcacccgccgcctccgccggtgatgtcgccgccggaggtaacggcgaaccgattcgtgtaccctccggccgtcacgccgtatcacaactaccccgggtactacccggcgtcgaccaccatgc

SEQ ID NO: 16788 - DNA, 604 bp, Glycine max
cccacgcgtccgctagcatcgccgcttgttccttttcaagggttttgtgttctcctttgctccgtatttgattctctctctcttggtgtttttgtctctgtcttcaccaaaatttctatctttattcacattcggcaattgggttcgcttccaatttttatttcgccttcgaccaccttcggaacctttcttcccttccttcttctgcaaattagggttttatttccaattgggtaatttttaatttgggaatctcgtttattcaatttggatcaagtaatccgcgacaatgcctccgagaatagtgaagagaggtgctgcggcaaagagggcatcgaggggatcctcaaaggctgcacctgagaaccagcctgagcctgaaactgcggaagtggtcgtgaaaaataatcaagaaaatcctgttgttgatgctgtggtggaagaaaagcccgttgatgtggagcaagaacatgaggaagtgccaaatgggtcggctaaggtggaaaacaatgaagaggagattaaggagtctatagatgaatatgaaaaagatgaacacttagattttgaggataattatcctgagtatgaagcagaggaatat

SEQ ID NO: 16789 - DNA, 709 bp, Glycine max
gaaagaaaaaggtagagaaggagagagagagagagagaaagaaaactgaaaaaaaaaaaaagaggataagactaattaactacatttttggtttggtttttcttcatctcgcaggagacacgaagagacaagttacatcacatgagaaatttagctttagctttgcagagatgtcaggtggtggatgcagcagcatagtgtggttcagaagagatctgaggatagaagacaatccagcactgacagcaggagtgagagctggtgctgttgttgcagttttcatatgggcacctgaagaagaaggacaatactaccctggcagggtctctagatggtggctcaagaacagtttggctcaccttgattcctctctcaggaatcttggcactcctctcatcactaagcgatccactgatactctttcttctctatttgaggttgttaagtccactggagccactcaactcttttttaatcatttatatgatcctctgtcacttgtcagggatcaccgagcaaaggaggttctgactgctcagggcataacagtacgttccttcaacgcggacttattatatgaaccatgggatgtgaatgatgcacatggccgaccattcacaacttttgctgctttttgggaaagatgtcttagcatgccttatgaccctgagtcacctcttctcccacctaaaaggataattccaggtga

SEQ ID NO: 16790 - DNA, 410 bp, Glycine max
gacaagaaaagaaaaaaagggagagaagcagaaagagagagagagagaactgaaaaaagaaaagaaaagataagactaattaacgtttttttggtttggttttcttcaacacgcaggagacacgaagtaaagagacaagttacatcagatggttaaaacttgttaaaagagtttgtgtatgtgtgtgaaagtagtttaaggttgtgggggtggttgaagaagttttttagctttgtagatagagatgtcaggtggtggaggcagcatagcgtggttcaaaagagatctgaggatagaagacaattcagcactgacagcatgagtgagagctggtgctgcggttgcagttttcgtatgggcacctgaagaagaaggtcaatactaccctggcaaggtctctagatggtggc

SEQ ID NO: 16791 - DNA, 407 bp, Glycine max
caagaaagaaagaaagaaaaaggtagagaaggagagagagagagagagaaagaaaactgaaggaaggaaaaaaaaagataaggctaattaactacatttttggtttggtttttcttcatctcgcaggagacacgaagagacaagttacatcacatggttaaaacttgtttaaagagttttgtgtttgtgtgtgtgaaagtagtttaaggttgtgggggtggttgaagcttttagctttagctttgcagagatgtcaggtggtggatgcagcagcatagtgtggttcagtagagatctgaggatagaagaccatcacagcactgacagcaggagtgagagctggtgctggtgttgcagttttcatatgggcacctgaagaagaaggacaatactaccctggcagggtc

SEQ ID NO: 16792 - DNA, 541 bp, Glycine max
tatttgctgatattcaaataaggagacagctaatttccagtgccaagttgttgatggagtggactcggggacaaaacattgtattttctagtgctgctcctacggtgaatgagcttagagggccctgtgatgttgcaaacttgttgtcattgtttgggctttccaaggagcgagctaatgcggctatttctaaaaactgtaggattcttttagctaattctttaaggaaaaagcgattttacaaagagacaataagagtagaagttttatcatcagatgcagcatctcattctaaggaagaccggtatcaagagttactaaagtgggaccctatctccagtggtgaaggtgatatcctgttggatgatatgcaaaaatcttctctagtctcctgtaaagcatcaaaacctgcaaaagccattgactttgcttccgtggtcaaaagccttccatctcatggttttgaaatcaaggatattttacctgcaaataatgctttccctgtctctggagccaataaaataaatttcccgccagttcc

SEQ ID NO: 16793 - DNA, 569 bp, Glycine max
gtaacgcgcatgctgaaattaaaacctgaaaaaagcccggcaaacactgtttgttcactgtctataaatatatccctcttcttccttcttctctccttagtattattatgaagtttcccacatttctctattttctagtatttggcacatagtgcattgtttgggccattattaatcaaccaaggaaaaacaccaccttttggcttcttctgctgttccaactgtgcattttgtgtgctgtttctttcacaaacacgcagcaacagcagccagaatgagaacggggaacctcttctggcttggcattgttgcagcacttgttttcagcttctgggttgatgccttttctgcctatgaatatcaccacttcaatgaaaccgagttctctttgttggagtctcaagaacaggtacattcatccctccttgggagaacttctctcatggttggactcacagttattcaaagtgctgctggcaaaggagcagtttgcttggatggaacattgcctgcttatcatttgcatcggggatatggatcaggagcaaacagctggatcgttaatttag

SEQ ID NO: 16794 - DNA, 461 bp, Glycine max
  unsure (1)..(461): unsure at all n locations
ggtcattgctaattgattgcgtcactctttcactgacgatcacaagaatcacaagtgtgaatccctttcccatatagaccccttcattctccccaagaggcgactgtcatgacatctctggccacttattcaacctgaaagtatggaggcagaaccatcgattccctcagattcactccgggcccagatttccaaattttctaccatgctcactgaagcacacaaaagaaagccaatccattattggattcttcttgctctcagcatcttggcaatgctatgtggcatttcctgcttccagcattctgtctcggtgtttattatgataacggtggccagagcaagtggatcatatcttgggtagcagttgctggatggcccctaactgccttaatactngttcctgtatactttatcaagtaaaccctttctacttctttgaacttaaaaactgagtctgg

SEQ ID NO: 16795 - DNA, 274 bp, Glycine max
cgaacacaagaagcacatgtgtgaatctctttcccatatagaccccgtaggcgattgtcatgacatctctgccactgcttcaacctgaaattatggaggcagaaccatcaattccctcagattcgctccggagtcagatttccaaattttctaccatgctcactaaagcatacaaaagaaagtcaatccattattggattcttcttgccctcagcatcttggcaatgcttgtggcatttcctgcttccagcattctgtctcgtgtttattatga

SEQ ID NO: 16796 - DNA, 458 bp, Glycine max
gacagagaaaccaaagtttgatgtaagtcctttttcttttcatatttcgtgaatttcgaaattcacgtcaaatttcaattgcgtcatctcatttttccgcccaaaacaaatcctccctccgcgctcgtcaaggggagaaagagaaaagacaaagcgagcagagaaaaggacggaaagtgaggtgaaagtgtaagaaaatgggcaaagagaagagaggtagaagcttcatcgccttcaccggagctgcggcggtgcttggaattgcggcgaacctagctatcaccgcaatcaagtaccagaaggcaaaaaatgctaagaagaaagatcttgcaggttccaaggtgcgcgttgatctctctgcatcggagattcttaagcgggctgagcaaatcattgctaactcaaacaaggcccataaatctgttgcgtcggtgcctctcgacaagggtacatatgca

SEQ ID NO: 16797 - DNA, 895 bp, Glycine max
ctttggacgttccaagctccaaccttcgattctttcttgtcagacgaagcccttatataactgcctctgtcacaaagccaacacctctttccatcaagacagtgcaccccgtagtttccttgtcttcagatgattacaacaccaaacacacccttaagcttaacaacactcaggcatggatcatatacacctcctctccaatctacttgaaccatgttccttctgaggttacatccaagccattttctggcatcattcgtatagcggctttgcctgattctgattccaagtatgtggaaactcttgacaagttcagttcttgttaccctgtgtctggtgatgcagcactcaagaaaccattcagtgttgagtataaatggcaaaagaaacgttctggggacttgctcatgctggctcaccctcttcatgctaagcttctgtcatatgatcgtgatgttactgtgctgaatgattttaagtatagaagcattgatggtgaccttgttggtgttgttggagattcatgggtgttggaaaccaatcctattcctgtgacatggaattctaacaaaggtgtggagaaagagtcttatggcgagattgtcacggcgcttgttaaggatgttcaagcgctgaattcttcagcaataggaacaaattcatcttatttctatgggaagcaggttggaagggctgcgaggttggcgttgatagcggaagaagtgtcttaccctaaagtgattccaaaggttaagaaatttctgaaggagactattgagccctggttggatggaactttcatagggaatgcttttctctatgaaagaaaatggcgtggacttgtttctaaacatgggtgtcagattcaactgctgattttgggtttgggatttac

SEQ ID NO: 16798 - DNA, 771 bp, Glycine max
gccactgtctgttaacttgagcaatcactctgttccttccttctctcgttcgttcatggaacttcagaggcgccaagatcagagcctctcccagcggaagggccagaaacggaagctcgacgaggagcagcaccacgaggaccgccagatcttgccggcgccgcccaccgccgacgagcgcgccgcactcctatccgacgtcgccgaacaggtgagcatcctcgagtcgactttcacgtggaacgaagcggacagatccgcggccaagcgcgccactcacgcgctcgccgatctcgcgaagaatgaggatgtggtgaacgtgattgttgaaggaggcgcgattccggctttggtgaagcatcttcaggcgccgcctctcagtgaccgtgtccagaatccgttgccgttcgaccacgaggttgagaaagggagcgctttcacactaggacttcttgccgtcaagccagaacatcagcagttcattgttgacagtggtgccttaacacatcttgttgatcttttgaagaggcacaggaatggcttaacttctcgtgctattaatagtctcattcgtagggccgcagatgctattactaatcttgctcatgagaacagcagcattaaaacccgtgtcaggatggagggtggaattccaccacttgttcatttgcttgattttgctgatgcaaaggtgcaacgagcagctgctggtgctctgcgaaccctggcttttaaaaatgatgaaaataaaaatcatattggtgaatgcaa

SEQ ID NO: 16799 - DNA, 415 bp, Glycine max
cccacgcgtccgctctcacctcgttcttccaacccctctagatttgaatcaccaaacttccgcgttccttctctctctctctctctctctctctcttatatttgtactgtacccaaaaaaagcacttcacaaagttgaaagctgaaacctcttcttcaatctacttcacgatggcggagaagcacttgcgggagctccttaaagaggatcaagaacccttccttctgaaacactacatttgggagcgtcgcaggcagctcaaaagaccttccccaaacagccctttacaacaacaactgaaaaagaaaaactcaaacttcccacttaacaaatgcttcctcacttccctacaaaacgccacaaaatccccactcttattgtctccaaagaatagtacttctcccctgctcagacc

SEQ ID NO: 16800 - DNA, 759 bp, Glycine max
gctgctgaaccagatattaccatcacaaggcttgatatccgggttggcctcataataaaagctcaaaaacatcctgatgcagatgcactatatgttgaagagattgacgtcggtgaagaacagaccagaactgttgtcagtgggcttgtcaaatttataccactcgatgaaatgcagaaccgaaaggtctgtgttctttgcaacctaaagccagtaaccatgaggggcattaaatctcaagcaatggttcttgctgcttccgatggtgatcacaccaaggttgagttggttgagcctcccagttctgctcaaccaggagaaagaattacattccctgggtatgaaggtaatcctgatgaactcttaaacccaaagaagaaagtttgggaaacattgcaagtcgatttgcacacaaatgaggaactggtggcatgctacaaaaatgttccactcaccacatcagctggcgtttgcaaggtttcatccataagctgtggatccataaggtagacaacgagttcaaaaagagagaaaaaaaggaaattaaaaaagaaaagaatttgcttttttatctgttgcctttttttttttttgccgtaaatgtagaatttgcttcgtgtaatttgacattttgacgtgctttcttcatcttcatttttactgcccatatgttgggtgagctgtagccaaattatttgcattgttttttattaaactttttaatttaatctacagacttcgtaagcataaaaaaaaaaa

SEQ ID NO: 16801 - DNA, 705 bp, Glycine max
accaggtgatgtgaaaatagtagttggtaataattttgatgaaattgtcttggatgagtcaaaggatgttctcctcgagatttatgctccctggtgtggccattgccaatcactggagccaatatacaacaagcttgcaaaacatcttcgcaatattgattctcttgtaatagccaagatggatggaacaacaaatgagcatcccagggctaagcctgatggattccccactcttctcttcttcccggcaggaaacaagagttttgaccctattactgttgatacagatcgtacagtggtagccttctacaagttcctcaagaaacatgcatcaatcccattcaagctccagaaaccaacctcaacttctgaatccgattccaaggggagctctgatgccaaagagagccagagtagtgatgtgaaggacgaattatgaggagttaagtgatatatttttatttatagaaactatgattcagacagatgatgacatagtgactgaggtaaaaaataccaagttacttctcacccctggtcaataaaaaacaaacggggagtggggggagagagacaaatgcgaggcacacatgtattactattaacttcaatttgtacaacagtgggtaatttagaattttgattttgggttgagacttcaataaattcaataatatttaaattaaaaaaaaaaaaggcggcccg

SEQ ID NO: 16802 - DNA, 420 bp, Glycine max
tgctatccttgcggccttctacatttatgaggaagcttccacctaagcgtggtatcacacaatatcacccaattcgctgaaaaggggatttatcaatcgttcactattttcttgaatgattatcactctccaagggtaattttttagagtagagacaagtcagtcttctatgttcggtggcaaagcttgtatgctttgtctctagaacattatggtttagttttgcgatccagcatttcgacacgatgataattgggagaaggggatatagtgatatcttgtataattagtgttttgaactgctacgagttcgtaaaatgtattgcccctttgatttctcactcatattaacttactacattaatttctccactaaagaaatgaaattagggatatagtggagctttagtttttgttttt

SEQ ID NO: 16803 - DNA, 406 bp, Glycine max
ttctacctttcaatccaaacaaaacttcaaaccaaactttctctctctctctctctctctctatctctctcaatgcatcgatcactgaaagtcgcggtgatcggcgccggcgtctcgggcctcgccgccgcgcgcgaactccgccacgagggccacaacgtcgtcgttttggaaaagtccaatcacgtgggcggcatgtgggcctacgacccaaaaacagattccgacccattgggtctcgacccgacccgcgaaaccgtccacagtagcctctacctctcgctgcgcaccaacctcccgcgccagctcatgggcttctcggactttccgtttgtaaaaaacgaatcgggtgacccgagaacgttcccgggtcacgaggaggtgctgcggtttctggaagggttcg

SEQ ID NO: 16804 - DNA, 527 bp, Glycine max
caagaaaagaaaaagaagcccttgctgcagaaggggggtggacagttgttgtgcaccataagggtagaaagaaaactactgattctgagagtggaattgcagtgggctctgttgctcaagctgctgtagagaataaaatgaccaaaaagaaacataaagaagttggtcaagatttctatcgctttcaaagaagagaagcacagagaaatgaaatcatgacactgcagagcaaatttgaggaggataaaaaacgtctgcagcagatgagagctgccaggaaatttagaccttattagacaatgtttttggcgtacaaggttcacagtagtttttttggtggatttggcgtacaaggtacttatgtagtcttgaacttgagttatgccattgctcttaaattcaaaacgaaagttcatttatcattccaattttgtcgaaagtatttgtacaattagcgtaggtagtagttattgagttgtagtatgactttgcagggttgacaatgctcataagcccctttcgttccg

SEQ ID NO: 16805 - DNA, 917 bp, Glycine max
caagaatcggcgtacaatgagacatcgtttgctggtgaaccttgtgagttttaccattgtgtgctggaaagcaagtcatttcttgaaaagatgactgtccttgaacacacagttccatttttcctgccaatacgagaaatagaaaatgatctccattcatccaatgcaatgaaactcatagatcatgttggagatctattgcaggcttttgtggatagacgggaacaggtagattgcccatgtcagacttataaaggagctgtatggaaatcacattagagagctgtatcatagccttccctaccatatggtcgaatttgtattggatgattctgattgcaaggtgacagtcagccttagatatgcagatctcatttcggtgcttccaactcgaatttcagtgctagcctggcctatgttcaataaaaatactatggctactttgagcaggaaggaagatggactctcaggaagtcattcttctccaattcgcctaacctatgcagaagatgccttacgaaccatgagtttacccgaagcatatgcagagattgtattaaacttaccacaggcgattcggcagacgtatcatcaaaaagccaccgcttagagctttgccctttcagtagcctagatgcatctgtaaaaattcttggtagagatgttaaatattagaaaaacaacttcagaattattacctattctcctagccaaattgctcataggttgagttcattttgctgtaatattgtcatatagcatttagcatttgtacttcggcctctctggcctcgttattccttcaatacctgcgccggtgtcttgtatcattaatacaacagggctaggtttacatctattcaaactgctgtcattcatcttttcttcataattcaatatgtatgtaatttgatttt

SEQ ID NO: 16806 - DNA, 597 bp, Glycine max
agcctttgttgtgtactcaagcatctgctgcaatgaggccagccatgtctgaagtagtagtcctactcagtagcaatgacttacttgaacatatgagaccttcgatgcctatcttttttgagtcaaatttaaggccccgcaaagatatatctgctttcaactgattcctttacgactaatgctactacctccaattctattgtacctgcttgatgattaagtacatgattatatatggagtgcttgagtaagcgggaaacgaggagcgaattgagactacaaaaggcttattttcttcagcaataaagcaacatattcatattgcaaaagaaagatgctaatagaaaggaaaattaacaactaattaactgatggatccatggtgcctacacaatatataaatttaaatatgtttttttttatctctaataaatatctgatttttgttttgctttgtaataattttttttgtattaagtttttagatgatagttgatagttgatagttttagagaattgttttagaaagaaggctaagtcattcatttcttagattgatcaattacaacaagacaattgcctaagaaaaaaaaaaaa

SEQ ID NO: 16807 - DNA, 263 bp, Glycine max
acgaaatgcagcgattaaggagttccttaaaaaaaagtatctcaattcacgggctgccattgaagatacttatttttccaccaaggatacttttgagagacatcgcgtggttttcaccgttggaacttccattgcttccgttgccactgcttggttcggttattccttgcgccatttacatgacaccaaagttgatcaaaggcttcaatctatcgaaaattctatgaaaaacaattccaatctccaacattcccaaatcaaag

SEQ ID NO: 16808 - DNA, 567 bp, Glycine max
gtctaaagcaaccacttgattacacacttgtatcgaacagtgcatctatggagattgacgaagatggtcccatctatggttggctaccaacagcacctcaaggttataaagctgtatgctatgttgtcaccacaacacccactaagccttcacttgacaaaatcaggtgtgctaggttagacctcactgaccaatgtgaggcaaattcattcatttggggttcagacaacttcaattattatgattgtagaccaagcaatagaggaactcatgcacctggtgttagagtaggcacctttgttgcacataatgggagtcctaaccctccatctattgtttggttgagaaacaccgacgctttaccaaaatacatgcctaatctaccacaaatcaaggcaattctccaagtttactctccagtcatgtccttgcaccctgatgaagaattctttccatcttctgtggagtggtttttctccaatggagcacttctatataagaaaggacaagagtcaaagcctgtgtcaatatcaccaaatggggctaaccttcctcaggatcctaaca

SEQ ID NO: 16809 - DNA, 506 bp, Glycine max
cccaagctgaggaagaaagaacctttcttcgctatagtcagtgataccgagccgtcacctccattcattcatgccttcatggggaacactggcatggaatgctctctaatttatgactcgctcttggaacgttgctgctgattcttgattgttttctatctcaactttacgtctgaagtgtcttctgagcaaggtgatgggtctggaaaagaatcctcgtgtgtttttcgatgtctcaatcgacggggaccctgtggaaagaattgttattcagctttttgccagtatagttcctaggacagcggagaattttcgggcactctgtacaggtgagaagggcattggagaatcgacggggaaacctttgcattataaaggaacaagctttcatcgtataattagaggttttatggctcaaggtggtgatttttcaaggggtaatggcacaggtggagaaagtatatatggagggaaatttgtagatgaaaatttcaaactaacacatg

SEQ ID NO: 16810 - DNA, 369 bp, Glycine max
agcccacgcgtccggttcctaagctgccattgttttagtatcatcacttcatcatactcatgggatacgtgtgtcagaaagacagcagctgatcacaacaagattcacaagactgagtgtaagactcccaccaccaataatccacgcccttctcccccagagagcttgcgtgaaggaaacagtggaagaaagaggtgcgcgtcctcaaaacaacagcgttccaaagcttatatagtacacgttggatgagccgagaagtgcgaccagaaacttcagaccagacacggtcctaggcgagggtggttttggacgtgttttcaaagggtggattgataagaacaccttcaagccctcaagagttggtgttgg

SEQ ID NO: 16811 - DNA, 474 bp, Glycine max
tgatgagtacgtttttcttcaaatttattttcatcttttgggagcggtttttcttcaagccactcaaaagcctccgaagaagtgttagcaacatcacatatgcaacccatcaattcaaataccagaggtaccactctctacttcatcgtaattcagatctcaatgaccacactctcatctttgacgtagaaggtgcgttgttgaaatcctcttcagtgttcccatttttcatgctcgttgcgtttgaagcacgagggttattaagagctattgttctgcttttagtgtacccttttgtttgtttagttggagatgaaatgggggtgaagatgatggttatgatatgcttctttgggatcaaagaagagagtttcaaagtgggaagaacccgtttgccgaagtttttgttggaagatgttgggtcaaaaatgtattaagtggttaaaagaagttgccaaaaagtgggggttaacc

SEQ ID NO: 16812 - DNA, 727 bp, Glycine max
cacctatgcatatctgaagcctttgtttccatgaaagggaagggttatcagtgccgtagagatgctcacggagggttccttgatccatgaaatcgtaaaccagtatcatctcgttgttctcgtagcaataaccgatgagggaaacaagatggagatggcgaagttgagacagcatttcgatctcgttcaagaactcgttcagaccttgttgagaaccgggtttgagccttttgattgcgacacatgttgaaccgtcgtcgatgtagcctttgtacacgttgccaaagcctcccaatccaaccacaaagagttcgtcgaagttgttggtggcggctctgatttctgcgattgagaacttacggcagaggttggttggtagcgatgatgagccaccgcctcgagaagttccaccttttttattggaaccttcatcgacggccacgttcttcttgcgtttgatgaggaagaaagcaacagtaagggataacataacgacaccggaaactgcgcctgcgacggcggcagttagggttctcgtgctgcctttgcttttcttgtttgagctcagaagaggaacctcggaggtctttggatgagagtcggggtaggtccagcgaggttacctgttgcgtcgttgattttgaagagttcaattgcgtttatttgagcgtccttggccaagctttgagggttaggatgcattttcagtgaaagattaagcgtttcc

SEQ ID NO: 16813 - DNA, 362 bp, Glycine max
aacacgcgtacgattccttcttgcaacccgcgagacggtacgagatcttgttgcttgactcgtgacgctataataataagatggccgattgtggtgctgaaagcgaaaggaaagttacgatacgaaacaatcatggcgaaaatctcgtcgggatcttacataacgcggcttcaatttcgcttgttatcgtctgccatggcttccaatcttccaaggaaaggattcccatggtgtaccttgccgctgctctgggaaaagatggatttagttcttttcgcttcgactttgcaggaaacggtgtaagtgaaggttcatttcagtatggtaactactacaaagaggttgaagatctgcgagctgta

SEQ ID NO: 16814 - DNA, 477 bp, Glycine max
cttggtcatccagtgcgagacgaacatcagcatcaagacatgcagctggacatgcactgccatacttcagcaatcgagatagcgtcataagtgctgcttgaaaaagataaacatatatctttggcccattatctatagctactttggattcacagagatgtttatcactaatctactttctctttttggcgggagaaatataaaacatgttaaaggaaaagatgatgaattagatccttctgaaggcaaggtaataagtcatgagaccaatttgatccttctgttccttgtacagaccatggaaaggtcctgtcatgtttttgtttattgtttattggccacttttatgtttgtagttactataactgaaaataaccaagtacttcctgttaatttttaatgaatataaatatggttaaccaatgatttttacaagctttcctaaatatttaaagaaaaaaaaaagggcggcccctt

SEQ ID NO: 16815 - DNA, 439 bp, Glycine max
ccggtatgctgatgaaagttattctttccagaatgtgaaggaaaaatatatagcttctacatcatggcatcggccacttcaaattccggactatgctgtgtccttggatgataaagaccacctctttgccaaggttgtgagccagaaagatagtagcttaacacatatagtgtggaatccaggatctgaatttgcattctgtgattgttcttggtcaatgcaaggtaacctttgcaagcatgttgtcaaagtaaacatgatttgtgaaaatcttaaaggttatcaaccatccatgtctttccggtcttttcaagaggttttgatggatctatggaaaaagccagtggatgattcttttgcgttggatctgtcattggcttggacccatcagatgctagatcaaattcaaaaacaagttgaactgaataattctactgat

SEQ ID NO: 16816 - DNA, 438 bp, Glycine max
acggtccacggctggagggcgacgaaaaggaggagcattatcaatagcgtcataacacacctctgcaattggatccgccacaaatcgaagagcataaatggcgttgaagttgcaaatttagagatctgaacattaatcataatcaccatcactgttcatgctcttctggttgcgctgattctcaccaatggacaagtcaagtgctctggagtacatcaaccagatgttccccaacgaggtgtctctttctggcgtggaaccgctgatgcagaaaatccagaacgagattcgcacagtcgatgccggaattctcgccgccgttcgccaacagagcaactcaggaactaaggcgaaggaggatctcgctgctgccacacgcgccgtcgaggaacttatgtataagatccgagagataaaaactaaagcggttcagagtga

SEQ ID NO: 16817 - DNA, 478 bp, Glycine max
agataagtaaagggccaagagtgaggaagaggaagatgggttggtcttccgcaacagcatgtgcgtcgctctcctcttcgactccgctgcctcgacttccaccgtctcgcactggcactcccattcctggttcgctttcattttcatggctttcttcatttcccactttaactttaagtgcttctcgttctcgctcctccggaataaaccctcccaatccctcacgttccgatgattccttcattcgagctgcctggacccgaagatctcgaggtgaagctgcaaagaaacctaacaggaaatcgtggaagcagaggacagacatgtacatgagaccattcttattaaatgttttcttctccaaaagatttattcatgcaaaagtggtacaccgaggaacctgccaagtgatatgtgttgctaccacaaacgccaaggatcttcgaaactcccttccatccttgatagatcataacgc

SEQ ID NO: 16818 - DNA, 302 bp, Glycine max
gaaagggctaagagtaaggaagaggaagatgggttggtcttccgcaacagcatgtgcgtcgctctcctcttcgactccgctgcctcgacttccaccgtctcgcactggcactcccattcctggttcgctttcattttcatggctttcttcatttcccactttaactttaagtgcttctcgttctcgctcctccggaataaaccctcccaatccctcacgttccgatgtaagtgtaactgctttccttcctttatctgtttaattatcgcttctaattcactttagtctgtctgatttgaggg

SEQ ID NO: 16819 - DNA, 624 bp, Glycine max
tgtttccttgatgatagattggagatattacgtttgtacccagctgcaccacggaatgtgccacacgagtcctaagaagatgcaccggggggtggatatcatgtccaaactggcacgcctcttgtggactaattttcaaaactttaacgagacccttcattataccctaatccattagaattttggccagagagattcttgacaacccacggggatgttgacattaaaggtcaacattttgaattaattccatttggggcaggtagaagaatgtgccctggaactttctttcggtcttcaagtaatgcatctaacgcttgctactctattgcatgggtttgacattgtaactagtgatggggaacatgtcgatatgcttgaacaaattggactaaccaacattaaggcctctccactccaagtcattcttacaccacgtctttctggtcatatttatgatgaaatttaaatactaaaaaaataagataacatgtcatgcatggataaattaggaatgcttggcttttatcgttttgaataaattacgaatgctaagattttattatttaaataaaataggaatataaaacctgggattaaggaaaagattagtcaaatcctgag

SEQ ID NO: 16820 - DNA, 551 bp, Glycine max
cttctacgcgttcgaaagaattaaagtagcaacaaatactcttccctacacttggcagaaaaaaaatggttcaacaagaaatccgaaggggtccctggacagaacaggaggactacaaattagtgtattttgttaacatgtttggagatcgtagatgggactttatagcaaaggtatcaggtttgaaggtggagggagactgtaaataaaggtatgaatatttggacatgctaagttatacatgaagcacccctttaaccacctcactttgttgtaggtttgaatagaacaggtaagagttgcaggttacggtgggttaattacctccaccccgatctcaaacgagggaagctcacaccccaagaagaacacctcgtcatggaccttcattccaaatggggaaataggtttgagaaccatgcagaaattattaaactataagctacctacctgctgatcatcactcatatttttaattactcttttcctaccctatatacagtactattagtattaattagttctttgtcttatgtttttgttttttaata

SEQ ID NO: 16821 - DNA, 1353 bp, Glycine max
ctcgacttgagagaaaaaatattccatttccagaattagtagcactagtgctctcttttgtttcgaaaaaaatggttcaacaggaagtgcgtaaaggtccttggacagaacaggaagacttcaaattggtgtcctttgttggattgtttggagaccgtagatgggactttatagctaaggtatcaggtttgaaggtggcgggagaaagtaaaataggcattagacaaaaaaaataaaaaaatcaatgcttatttgggcatcatgctacaaaaaatagatttatggaagaagcagctagcctttaaccacctccttttgttgtaggtttgaatagaacaggtaagagttgcagattacggtgggttaattacctacatcctggcctcaaacgtggaaagatgaccccccaggaagaacgccttgtcttggaacttcactcaaaatggggaaataggtggtcaagaattgctcgcaggctaccagggcgaactgacaatgagattaagaattattggaggactcacatgaggaaaaagagggctcaagagaaaaagcatgcatcagcagcatcgcctgtttcttctagttgtcaatcttcactgtcctcaaacaaccatgttgtggattcacatgcttccaaagaggctggagaagagagttgttatgacacaggtggatatgatgatggcatgatgatgggtttaattggcggtgaaaaggggtactccatggatgatatatggaaagatattatgtcagaagaagagaacaacatttataatactaatcttcaacctgtctatgaagggcatagtgaagagggatgcaacttctcttgtccaccaccaccaatgattatgccttctccaccatcatgggatcagtacaacatttcttctcaacccttatgggtgatggatgaagaagaaagtaataagatgttattccctacactaagtgaccaatattttccttactatgaacaagggaacgcatttctaactggctaatcaggagattctttttttcttttgtccttaaaaaaattatcaatatctttgttcttatgtgtgtgccatctgtcacaataagaaggcttaagtcttaacctgtacagcatagtatctttgagctttcgccatggtcctcctccatagtgtgacacagctgtaatcgatctcaaatgtcactgtagtctatgtcaatgtgtttgtggttttactttaaagaaaaatccaatggggaaagtggtcatgttatgaattatgtaaaatactatacatcaagcacttgtgcaaatttaagttttaatctgaaaaaaaaaaacaaaaatggagaataaaagaacgaaaa

SEQ ID NO: 16822 - DNA, 380 bp, Glycine max
gcttgagagaaaaaatattccatttccagaattagtagcactagtgctctcttttgtttcgaaaaaaatggttcaacaggaagtgcgtaaaggtccttggacagaacaggaagacttcaaattggtgtcctttgttggattgtttggagaccgtagatgggactttatagctaaggtttgaatagaacaggtaagagttgcagattaaggtgggttaattacctacatcctggcctcaagcgtggaaagatgaccccccaggaagaacgccttgtcttggaacttcactcaaaatggggaaataggtggtcaagaattgctcgcaagttaccagggcgcactgacaatgagatcaagaattactggaggactcttatgag

SEQ ID NO: 16823 - DNA, 409 bp, Glycine max
aaagaattaaagtagcaacaaatactcttccctacacttggcagaataaaaatggttcaacaagaaatccgaaggggtccctggacagaacaggaggactacaaattagtgtattttgttaacatgtttggagatcgtagatgggactttatagcaaaggtatcaggtttgaaggtggagggagactgtaaataaataggtttgaatagaacaggtaagagttgcaggttacggtgggttaattacctccaccccgatctcaaacgagggaagctcacaccccaagaagaacacctcgtcatggaccttcattccaaatggggaaataggtgggcgagccttgctcgcaagctaccagggcgaactgacaatgaaattaagaattattggaagactcacatgaggaaaa

SEQ ID NO: 16824 - DNA, 682 bp, Glycine max
gaagccaaagccgtgggcctttggcggctttacctggcctgcaacggtaagttactgtatccaacgaaactcccaacttgtttcccctgtcttctagatccttccctcggtccaccccgaaaccactttcacgtttcccttttatttttttgttttcccacttcgctggaatttcccatatatagtcacattgattctggaaccttctaaactctccatacccatcctcaactaccattattattgccacccccactcgcgagtgtattggattgagatcttaaaagaatattttggcagaaaaaactcccgcgtggatctttgctcatttgaaattcgatggcgaagttcggcgagggcgacaagcggtggatcgtggcggagcgccccgacggcaccaacgtgcacaactggcactgggccgagaccaactgcctcgagtggtccagaacctttttcaacaacaatttcagtaacgtcgccgtcggtggcggcgacggcgatgccaccatcacgatcaagaaggtggagaagctcgatggcgaggcctacgtgaacgtccgcaaggggaaggtgatccccgggtacgagatcagcgtgaggctcgcgtgggagggcgaggcgcgggacgccaacgggaaggttctgcagagagtcgacggcgccgtcgagatcccctaca

SEQ ID NO: 16825 - DNA, 1014 bp, Glycine max
ttgttgttctctcacttactcacccttctcagttagttctcatgttatgattcaatctcacagagaatcttatgattctttgagtgagcagagagagagagagagagagcaagacacccctccctctaagaaatgcggtcaattcctctgggaacctcagtatctccaactcctataaacacctcaaagttatcacctttcagtgttaattttaagaaaccaaccactttcccatcttggggttcaactcctcctcatgaattctctctctcccaatcaggattatgtagagcaagtcaagttgttgatttgttcccgactgtgtctcctgaaattattgtgcgggaggccaggctagaggactgttgggaagtggcagagactcactgcagctccttcttccctgaatattccttccctttagattttgtgctgaggatggacagattggtggccatgatggcaggattcactctaccaaacggttgcaagagaatttgtttggttgctgttactggcaactcatttggtgaaactgtattatttggaagtgaagatttcaaggttggtggttttgatgggaaaatcagcctcaacaagggatatgtggctggtatattaacagtggatactgttgcagactttctgcctaggaagggaccattgcgacagagaaggactggaattgcatacatatcaaatgtggcagtccgagaaaaatttaggcggaagggaatagctaaacacttggttgcaaaggcagaatcacaagctagaagttgggggtgtcgcgctattgcattgcactgtgatttgaaaaaccctgcagccacaaagttataccaaggccaaggtttcaggtgtatcaaggttccagagggagctaactggccacaaccaaagacctcaccggatatgaagtttaacttcatgatgaaacttctcaacagctcaactgtttctaaatgaacttcagagtagggaataattatgttctaaaacataatgtatttt

SEQ ID NO: 16826 - DNA, 859 bp, Glycine max
cctcgagcctgattcggctcgagctgagcctctgtagaaatttgtgatggcatccgctatggtgaatcgaggtggttctaggatcatcaaatcagtgtctgcagctcttggtacgaggttttacgccaaggttgcaacagggactgacatagtctctgccgcacccaatgtttctctccagaaagctcgtacctgggacgagggcctggcttccaagttctccaccactcctctcaaagacatcttcaaggacaagaaagttgtcatctttgggctcccgggtgcatacacgggagtttgttcaaacaaacacgttcctccttacaaggagaatattgataagtttaaggctaaggggatagattctgttatttgtgtggctattaatgatccgtacactatgaatgcgtgggctgagaagcttcaagccaaagatgctattgagttttatggggactttgatgggagctttcacaaaagtttggaattagttactgatctctctggtgcattgcttggaactcgatctgaaagatggtcagcatatgtggtagatggaaaggttaaggctcttaatgttgaagaagctccatctgatgttaaagtttctggtgcagataccgttttgggacagatttgaagtttctgttggtttgcatgtaggtagtaataagttttcaataaaatgtacctgatacttccagctgattcaatgttttgactcagattttttgttgagttttggacttctttctgttgtaactggtaactactcctttcttccctggatgcatggttatttggttgaacgcaatcaagatgtaaggaaaattttggttctctttaaatgactgtactt

SEQ ID NO: 16827 - DNA, 443 bp, Glycine max
cgttgattgatttcatcagtattgtaatggaaggaacatgaacagaaacacgatcgattgatagtctcattcggggttagaaatgtgacatttccatggatgaaaaccctaacccctcaatccctcgcgcctcttcctcttcctctcaggaattcctcaaacaagtccaagctgccctaaagcgccatcgccctctcggtactacgcaatcgcataacgtgaggccgaagcgcgccatggtggctctacgaaaggccacgaacaagctcgaggaggatccgccgtcgatctccgacacgtgcaccggcgaaggctgcaaaaatgagccctctttgctgctggaatctctgagtgttggtgcacacaacaaggttcagtttttaactgagatcaacaatgccactgcacagccgcaagatgaagcatcgattggattcaatcaa

SEQ ID NO: 16828 - DNA, 444 bp, Glycine max
aaggctcacttaactgcttctggttctaatgctgctgggcggccatctccagatgttgatgccagaaccaggtttgttagcaatgtccattttgctgccaccaaagatggcctgtctcggcattttaatcccatctgcggatgtccttaaaagggattctcgttacagatgcagcggcagggcagccaaaaggggcacctcatgttgagttcatgcgatatgaagcggcggacaatgcattatctctggataacacttctttcatgtcaagaattctcaacgttattaagaaaagtgctactcctcatgaatcagctccagccatggcatggccacgctttgttaacggttctccattcccttctgctaggttttccagacatccctttccaagaggtattcctggtgtgtttagagctcgacccccaattaaactgggtgcca

SEQ ID NO: 16829 - DNA, 309 bp, Glycine max
gtgaaatatgaaaaagctgttgatcctcaatatcttccaacacggtctgatgttcagaaggttcttaatggctctatgaacagctttaggatttataatgtttatccaagatatttccgtgtcactggttcaggcgatgttagacctttggaagaggataatgctcttagtgctgatctcattttgaatcgcgagcaacttgagtggtggggccttccgagattctaatccatcaaatttgagtggactttgtggaggtttgacgggacctatggcaatcatagtatctgaggagacaccaccgcagga

SEQ ID NO: 16830 - DNA, 441 bp, Glycine max
ccagtatcttttatgaaattgatctgaacttcttttccattcttaatttatcttcaatcagcatgaagaagatcacttcctctcaatttcttctcttcctttcactccttgctttatggttcacatcgattgcttttggagctgataccactcacccagaagaagtgcaagctctgaaagatatgggcaagacgcttggtaagaaggaatgggacactgacatagatccatgctcaggacaacctccctggttcacatctaaggagaacaacaatgtcacttgcaattgcactatccccggtgaaaacttctgccatgttgtaataatattgctgaaatcacaaaatcttcgaggcatgctcccacgcgaactgataaggttaccttaccttgaagaaattgacctcacacaaaactaccttaacggtactatacctaccc

SEQ ID NO: 16831 - DNA, 704 bp, Glycine max
gtggctgatcagggtgttcgtgctacatcagatgttgaaaaagtagtgacctctggaaacacaggtggatcaagttgggggatctcatccattttcggtggaggtgataaccgtgtgtctgtgaaggaaatgacagctagtaaaccacatactactgaaccaatgcataatgtgcagtcattctctacaattcatttgagagagcccccttctgtcttgagaccattggagagcaattcagagaccgaagctgttgaaatcacagtaacaaagttgcttttgaaatcatactatgacattgtcaggaaaaatgttgaggatcttgtccccaaagcaattatgcacttcttggtaaataacacaaagagagagcttcacaatgtcttcattgaaaaactatacagagaggatctgtttgaagagatgttgcaagaacctgaagaggtagccaagaaaagaaaaaactgtcgagaactgctccgagcttatcaacaggcttttaaagtgagtgcttataatactttaatcagcattgtctagctgaagttctggattattctatatgaagtttggttctcctttaaaggtagttctacgcctttgagttcctgtggaaatgctcatgaactttgttgctcacattggtctactcacctataaaaaaagggcagccttgtgctataaaactccgtttatgcatgggg

SEQ ID NO: 16832 - DNA, 886 bp, Glycine max
ccaaaattgtaaaaatcttcacaccctttcagggttatgggtagctacagcacaatatctcccagttctgtactctgcatgcacgaatctaactttcttgaattttagttatgctcctcttgacagtgatggccttgctaagcttcttgttcactgtcctaagcttcagcgcctctgggttgtggacactgttgaagacaagggactggaagctgttggatcacactgtccattacttgaggagctgcgtgtttttcctgcagatccctttgatgagggcattgttcatggggttactgaatcagggtttattgcagtctctcaaggatgcccgagacttcactatgttctctacttttgccgtcaaatgaccaatgctgctgttgctactgttgtccaaaactgtcctgactttactcatttccgactctgcatcatgcaccctggtcagctagattacttgacccaagaatcaatggatgaggcctttggagctgttgttaagacttgcactaaactccagaggcttgcagtatcaggttatctgactgacctaacttttgagtatataggccagtatgcaaaaaacttggaaactctttccgtggcttttgctggaagcagtgattggggcatgcgctgtgtgctggacggctgtccaaagctgaggaaacgagaggtaagggactgtccatttggccacggagctcttctgtcaggcttgggggaagtatgagtcaatgagatcactgtggatgtcagactgcaatttgacaatgaatggtgttagattgttggcccaagaaatgcctaggttgaatgttgaagtcataaaggaagaaagctatgagactcatcaagctaaaaaagtttatgtttatcgatc

SEQ ID NO: 16833 - DNA, 447 bp, Glycine max
accgaaccgcaatttccacccaggcgtccgaattgttaaaggaagcgaaagaaagattgatcaaattatcgcagaggaattgaagatgggttggagagggatactgggttttgaatatggtatagttcaggccccattaggccctgatatctctgctcccccacttgttgctgcagttgccaatgctggtgctcttggacttcttagggcccctgattgggaatcgccggattacttgagggaactcataaagacgactaggaccttaactgataaacccttcggggttggcgtcgttctagcttttccttttgaggagaatttgaatgtcattttggaagaaaaagttgcagtcttgcaagtttattggggtgattgtacaagggaattggtgaataaggctcattccgctgggatcaaaagttgctcctcaagttgggaatattg

SEQ ID NO: 16834 - DNA, 744 bp, Glycine max
ggaacctaataaacatgttgtgacctgtgaagcaagaatatagagcagagaagtgaaaaagaattttacagaacccacccccaaataaaaaaacaaaatgtcgtcttccaactccaaaacccaaacccaaaccccttcttcactctcactctgcacctctaagcctcaggaaggtaacatggcattggaatcccaaccgcagaagaacaagtatggacacggggtgtttggagacgtctccagcatcatcaaagagatggagattgatcatcataacaactctacctttgattttcactttcccccaatttcagaattttctgggctctagagaggttcgcgagtttattagcggggccctttcaggggctatggcaaaggctatacttgctcctcttgagaccatcaggacaagaatggtagttggtgttgggtcaaaaaatattgctggtagtttcatagacgttatagagcagcatggatggcaaggactgtgggctggaaacatgatcaatatgcttcgtatagttccaacacaggccattgcgctaggcacatttgagtgtgtcaaacgggctatgacatccctgcatgagaaatgggaacgcaatgaataccccaagttgcagataggtcccatcaatttcacctattctttatcttggatttcaccagttgccatcgccggtgcagctgctggaattgctagcactcttgtatgccatccccttgaagttttgaagg

SEQ ID NO: 16835 - DNA, 412 bp, Glycine max
ctgtacgcgtgggcggacgcgtgggtcacacttcacttccccaacacattcttctttttttttttttttcacactcttcactcacttcgatcaccatcaattcatgtacacggcggaggttttccgcgtcttcgccgtgcgcggcggcgacgcttcgccagcagtggcccccgccaccaccaccaattgcttaaaaatagtagctttcaacacacccactttccgtaacggcttgaatgcgaggtgggcgaaggcgttgacgctctgtcgctgcagcgttgactcaaagtccgtcggcgacgaagttttctcggtgactcagtcgaacaagtccgatgtggactacctcggggagagcaccaaaagtgatttgaacgtcaagttggagcatcttgaaggctttggaattgat

SEQ ID NO: 16836 - DNA, 821 bp, Glycine max
cctttgctgccgcccacgcgtccgtgtatgcatggggggctctctcctgaattgcacggggtaagtcagattagtagtttgccgcgtccaacagaagtacctgagagtggtctactatgtgatctcttgtggtctgatcctagtaaagacattgaaggttggggagagaacgaccgtggagtttcatatacttttggtgctagcagggtcacagaatttcttggaaagcatgatctagacttgatttgtagagcacaccaggttgttgaagatggatatgagttttttgccaatagacaacttgtgactatcttttctgcacctaactactgtggagaatttgacaatgctggagcaatgatgagtgttgatgagacactcatgtgctcttttcagatactaaggcctgcggaacacagaaagcctaagtttgcttttgggagcaaaactacattcaaggcaattcttgatgctgctagagtatgaccccattgagctgacttagatcaataaagtttgtaacatagcaaaaaattgacatggacaaattgatatccgtgttcactccaatgtgaaggaagggtattacaactaccaatataatgaagaacgtaggaatattatctctgctttttcttttcaagtatagctgaaagtgtttttctgtgctggcgcattctcaatatgtaccatgttgtcaacacagatttagggggtcaggttccatttttcttttctttcagctttttgatgtgagagacagttatgcaattctccttttcatatctcctgttgtattataaatggcagcatacttttcg

SEQ ID NO: 16837 - DNA, 537 bp, Glycine max
ggaaatctaaaatccccgttcgatctcacggagacggacctctctctcgcgcggacgcgttgcgtgggctcgctcactctcagactctcgcgcaacccccctctcgtggacgcgttgttgcagatcctcgttcgttctcgctctctcgcgtgagtttttgaatttgttggtctatgtgcaggaccagccccgaactcctgctcaatccccatcgatttatccctggaagaaagtaaacaaaatcctgtagaatagctctttgtggcttttaaattgaatcgaggatgggagacgaagcaagtgaagagcatcaaaggtcgctagcagctcctttcatatttttcgtggttctcgcatttcagtttgcttctcattggattgatcactttaagaagagtggatctgacaaagaaaaagaaactaagttgcgtggagaaataaaagagcttttgaaggaggcaagctcactgtcacagccatcaacctttgcacaagcagcgaaactcaagagactggcagctgcaaaggagagggaac

SEQ ID NO: 16838 - DNA, 704 bp, Glycine max
tgttacattccctgtgaccttgagagcctggcaggttggcttggtggatgctgatgctggtgcagggaagactgtctctgggaacaatatgaggcattccaaagatggaagcagcccatcactgttgatccactatgctggtccaatgaaaacctctgaagatactccaacaaatggatctactgtgccccctggcagacgccttgttgttccactgcagatttgtgttttgcagggtttgtcttttgtgaaggctcagcttctttcaatggagtttcctgctcatgtcggtgaaactcttccgaagttggatgacttaaataacaagtctactgatgttgaatcagaaacaaaaatggacagattggtgaaaatagatcctttcagaggaagttggggactgcgattccttgaacttgagttatctaatccaactgatgtcgtgtttgaaatcaatgtctctgtcaaactggagaactctagcaacgaggacaatcattttgctgatcagggtgctacagaatatgtctatcctaaaacaagaattgatagagattgctcagccagggttctagtgcctcttgagcattttaaattacctgttcttgatgactccttttttatgaaggactcacaagcagatgggaatggcggaggaagaaatgcatccttttctgaaaaagacaccaaagctgaactcaatg

SEQ ID NO: 16839 - DNA, 773 bp, Glycine max
  unsure (1)..(773): unsure at all n locations
cagagtagtgctattagaggtttttggggaaaacatcttttccaaatttgtgctctctggaagtttttggggaaaacatccagagtagtgctattagaggtggtgcaagtctcaatgaatccataccattgagtaagcaggaggatcttattgtctggatgcgtactgctgctttgccaacttttaggaagttgtatggaaagatagaggtggatctcaatgcaggtgatcaaataaatgtaacactgcaaaataactacaacacatacagttttaatggcaagaaaaagcttgttctgtcaactactagctggcttggtgggaagaatgacttcctgggcattgcctatctcactgttggagggttgtgtttctttttggcattggcttttaccgttgtatattttgtcaagccaaggcaacttggagatccctcatatttgtcatggaataggaatccaggagggcgctgagcaaagaaactcactatgcttgttggtcatttccatgattataggccttgggtatgctacaaatgcgggtgtagttttgtacatgtatgttaacccaattactagtagtacttgtgaatttaggtgttcttatccccccctctccccaacacaagaaaaccaaaacacttcttttttctgctttttctgtgttatgcatcagaattgaaatatcttgcatgttctgataatatatagcgtcccaatatatgttgttctagttgcagttcanaaaaaaaaaaagaaaaaataaaaacaagg

SEQ ID NO: 16840 - DNA, 443 bp, Glycine max
gtttactaccagcttgacaacttttaccagaatcatcgccggtatgttaaaagccgaaacgatgaacagctgagggattctggaaaagcaaactccgtaagtggttgtgagcctgaaaataatgcaaatggaaaggcaattttaccttgtggtcttatagcttggagcttgttcaatgatacatacagcttctcacgcaacagcaagaatttgacagtgaacaagacaggcatctcatggaagagtgacagggaccacaaatttggaagtgatgtttttcctaaaaatttccaaaatggtcctataataagtggtggtggcctcgatgaaaatgtacctttgagtctgcatgaggatcttattgtttggaatcgaactgctgctttgccaacttttaggaagttgtatggaaagattgaggtggatctaaaaaaaggcgatgt

SEQ ID NO: 16841 - DNA, 361 bp, Glycine max
ggaggactgagcttctttttgtcaatggcctttaccgtcgtatatcttgtcaagccaaggcagcttggagatccctcttatttgtcatggaataggagcccaggagggcactgaccaaagaaacttgatgttcccaagatttacattgcttgtgcattatgcaaactacagttgcgtttgtaattttgtacatcaatactcatacatgctaatagttaggtgttattattatcctctaccccaaaaaaacaaaattcttttattgtttttcggtcttttgcatcagaattggtatatcttgtattttaagacaaaaattggcctatacctatatatttgctaagtacttttattcaatttg

SEQ ID NO: 16842 - DNA, 270 bp, Glycine max
caagaatttgactgtgaacaagaatggcatctcctggaagagtgatagagagcacaaatttggaaaagatgttttccccaaaaacttccagagtagtgctattagaggtggtgcaactctcaatgtatccataccattgagtaagcaggaggatcttattgtctggatgcgtactgctgctttgccaacttttaggaagttgtatggaaagatagaggtggatctcaatgcaggtgatcaaataaatgtaacactgcaaaataactacaa

SEQ ID NO: 16843 - DNA, 304 bp, Glycine max
aagaaattgcagaagcagctagcaataccaattgcagcctgtgattttgcagaggggaagtggctcgtctctgaggaagagaaaacagtgagcacttctcaaagatgaggtgttatatttttgcgacttgtttaggcaccaatgcagtttccatgctccatgttttattcttcatattgcttcttacctattgtacttattgacaatacatgagtacacattagaagcttccttgcattcccttcagtcatcactctggaaatcttatgtctatgtggcactgcaataaaatctattatttttt

SEQ ID NO: 16844 - DNA, 625 bp, Glycine max
ctttgtcccaagatatcagattttgggcttgccaagttgaggaaaaaagacgacatggtgaccatgtctaggaggaggggcacaccagggtacatggcaccagaatggatcactgcagacccaattacctcaaaggctgatgtgtatagttttggcatggtgcttttggagcttggtgagtgggattaggaactttgagatccaaggttctgtggttaggagtgaggagtggtacttccctagctgggcctttgataagatgtttaaggagatgagagtggaggagattttggatgggcaaattagggatgcttatgatagtagggcacactttgagatggttaataggatggtgaagactgcaatgtggtgtctgcaagataggcctgagttgaggcccactatggggaaggtggccaagatgttggaagggactgtggagatcactgagcccaaaaagcccactgttttcttccttggtgaagagtagattcatgataaagtttctgtgtgatgttcagcctttcttgtttaagtttctctcgttatatctcttgtaccggcatggtagcatgtatgctcaatagttggaacgatggcaaataaattgggtgatcaagtgtat

SEQ ID NO: 16845 - DNA, 629 bp, Glycine max
  unsure (1)..(629): unsure at all n locations
cccacgctttctcccacgcgtccgcgggttcgcagctgaggagcagggcatatccatggcagaaccaccaaagggggatgaggaggacggcggagctgctttcgttctccaatccaaaggtgaatggtggcatgcggggtttcacttaacgaccgcaattgttggacccacgatactaaccctgccatacgcgttcaggggattggggtggggacttggatttatgtgcttgacggtgatggggatcgtcaccttctactcttacttcctcatgtccaaagtgctcgatcactgcgaaaaatccggtcgccggcatattcgtttccgggaactagccgctgacgtcttaggtgcgtcattactatgcataatgctaccatggttacgttacttggtttgtgtcaccgcacaaacaagaaaactttaactttcttgtttctccttttcctcgctttcagactgcgtgttaggttcatcattaactgtcttcttgacttgtttaatcaattcttttttattacttttccttaaagactcttagatttaaataattagaggcttgtgacaaattcggattgcaaaatcattntaaaggtgcaaaggtaggaattgtgaaatatgatatttta

SEQ ID NO: 16846 - DNA, 1070 bp, Glycine max
gtgtagagtccttgaagtacagttctgcagtgtcaactcttcttgcagtggcatttgttggcatatgttgtgggttggctatcacagctctggtgcaaggaaaaacacaaactcctagattgtttcctcggctagactaccaaacctcattctttgatctgttcactgcagttcctgttgttgtcacagccttcacatttcactttaatgtgcaccccattgggtttgagcttgccaaggcatcccaaatgacaacagcagttcgattagcattattgctttgtgctgtgatctaccttgcaataggcttatttgggtacatgttatttggggattcaacccagtcagacattctcatcaattttgaccagaatgctggttcagcagttggttccttgctcaatagtttggtccgtgtaagctatgccctccacatcatgctggtgtttcctctcttgaacttctctttgagaaccaacatagatgaagttctcttccctaagaagcctatgctagccacagacaacaaaagatttatgatcctcactctggtgctgcttgtattctcctaccttgcagctatagcaatcccagatatttggtacttctttcagttcctgggatcctcatccgcagtgtgccttgccttcattttccccggctctattgttttaagggatgttaaaggtatatcaacgagaagagacaaaattattgcactgataatgattatactagctgtggttacaagttgtgcttgccatttccaccaacatatataatgcttttagtagcaagtcataaatacaagctggttctctcatttctccccttctattgtttgttttatatgtatagaaaattttatttggggagagagggtatggctggggagattctagaggcatttggttgctgtggcgattgtgttacttttgtattttggatcccttgttgtttattgtagaattcatgtcttgtggcagcatttctatgtaaaataccaaatattaaagaaatgaaatcaacttgatggggtgacgtattactttacctttactctcgctaaa

SEQ ID NO: 16847 - DNA, 814 bp, Glycine max
tgcattttctgcttcctcccctctttccctgccttgtataattcttttctttgaccctttacacactctcttggccaggcctaggggtcttttctgcttcttcttctctttcaccataaaactcttctccatcacacacacacacaccactgtgctgctaaccatggcaaatttcacttctttttcttcatctctgacacacattccacccatttcagctccttcttcttctgcagctttcgacgattcttccgaagactcctgcagtatatgcttagagcccttcagcgttcatgacccatctactgtcacctgttgcaaacatgaatatcatctgcattgcattattgaatggtcacaaagaagcaaagagtgcccaatctgttggcaatcacttgctttgaaagatcctgccagccaagagcttctagctgcagtggaagatgagaaatgcatgagatcaagaaacattgctaattctcgtgccccccttggacaacttaatgaaagccacgatgatttcttgctcagatgactctgattttgatgatcagattatgaagcgcctagtttctgctgcaagaagagctcattttgttcagagacaggaaaggaagagatcacctagtgctggtccatcagaggctcttggtgttaactcttccatgcatgtttctgaggtgcaaacaactcttacaacttcatcatctgggggtagtttgccagcttctggtgtaccatctactgttagcattcaacctccagcactaaatactactcctgagagtgcaaggagaccaaacacttctgagat

SEQ ID NO: 16848 - DNA, 519 bp, Glycine max
taagctccaaatgttgggtcagagagatatttaaggcatggtggctaggggaatatgcatcacaaggagctcaataaagccagatgtatcaaattgctcggtggtgtatcctcctagatctttgtatcctgaacagttgacatcaatcaaagctcttcagataggatcaaatcttgctgtttgtcctgcaagaacctttattttatacttttccactatgtgcaatgatgccgatgaaggaaagaagctactaaaagcagccatgaatgctcttcttacactgcctgtatctggaaactctgaaagtattccaagtgttcaaagtgatagtgaagatataaaacccattgtgctctggagtgcattttatattcagaaattaattatgtgtaaacttgaatttatcagctccactcctacaccggatggaaatctgaactacaatgcccttttagatgcgaccgagaagctatttaatcagatgtaccccaatgaagaattctttccaaaggcaacatc

SEQ ID NO: 16849 - DNA, 435 bp, Glycine max
ctcttttcaattttcaactctctttggtatttaacttccaccccaactctcctgggactggtgcatttcctgttggctcccatagagtgtggccgtcacatcccaggatcattatgagttgtggctgctttggagcctcaactctcaagaggaaaaggaatccttctcgtactcctaatgagattgatggctttccacttgataatgttaagaatttctctgataaagacctgagactggccactgataactataatccaagcaaaaagctaggacgaggaggttttggtactgtttaccagggaactttaaaaaatggacaacaggtggcagtgaagacactttcagctgggtcaaagcagggagttcgtgaatttttaactgaaattaaaactatatcaaatgttaagcatccaaaccttgttgaattggttg

SEQ ID NO: 16850 - DNA, 945 bp, Glycine max
acgaagacagatttctgcaattatacggcaacgtataaagtgctgtgttctgcggctctgttggctgtgatgcacttccggcaccgctgtttcccatagtaaggttatttccacacactcagttgtatgacacgtgtctcttgatctgtcagatttcgtcgtcgtcgtcagtacgcctccctcggccagtaaataggaaaacaagggttcacaatgtccggcccaggggtacagttgcacatccaagatcaccatgtggtgatggataatggcatagtccaagttaccttatcaaatccagatggaattgtcactgggatacgatataatggtgttgacaatttgcttgaagttctcaacaaggagactaatagagggtactgggaccttgtttggagtgcgccaggaagcaaaggaatgtttgatgtgattaaaggaacgtgttttaaagttatagttcaaaatgaggaacaggtggagctttcatttgcaagaatgtgggatcattcactagagggaaagtttgtccccttaaatattgacaaaagattcataatgctccgtggttcatcaggcttctactcttatggaatttatgagcacctaaatggatggccagattttgatattagtgaaacaaggatcactttcaagcttaggaaagacaagtttcaatacatggctatggcagacaataggccaagggttatgccttttcctgaagatcggttagcaggaagatgccaaaccttgggctacccagaagctgtcctgctagtcaatcccaaggatccacgattgaaaggagtaaaagagtggatgacaagtatcagtattcatgtgtagacatgaatcaatcgagtccatgggtggatatctttcagtccaccagtgggattctggcagatcacacctagtgatgagtttcgttctggtcggcccctc

SEQ ID NO: 16851 - DNA, 606 bp, Glycine max
actcgagccgaatcggctcgaggtgacactgacgagccttatctcacggctactctgcctcccgctcgagtgcacatcatcacaaggactaaaaaaactcaaagtacttcttttgcaaacactgttccaagttccaaactctccacctctcataatggtttcaaattcaatgtttattgcttcttctctgcattcaccatcaccttgcaccctcttcagttcccacaagctttgttcgtcttcgatcaaaaccatctcaaaacaaagccacacatttctccatagaaatccctctctccatcgccctttgagtttgggttccaaaagggttcttccttcagtttgcttctttaatactggagacaaatctgactccaaggaatcgggatggcctattctcaggcgatgggaggtgccttggcaatggcaaacagtttcactgacctctcttgcctgtggattgggttttgtgttgacaggtttgactgaagcaattgccttaccatatctcgggatcaaacctcatgtgctaagtttagatgacaaggcagagatacttttattcgatcagagcatcacaactgctgttgtacttggaatcatata

SEQ ID NO: 16852 - DNA, 503 bp, Glycine max
  unsure (1)..(503): unsure at all n locations
cttccgcagctggtagtaacccccttaggatgcatctgaattaagtacacacaatctaaaacaaaggtgaacgtaacttgtgggaagagtcttagttcaatttctatataatacatctttggtgagggatgaacttgattaagcttcaaatcaaggattaatcttataagttatctaattagtcgaaacttatgggatactttaagaattgtaacggtggttaaaaaaaaactgacgtatgagggaagagtcaagtaaatatattgagtcccattctctctctatttaatttgtatcgataaatataaaaggtgttgttgattgactttttgtggttcgtttggtttcgattgaagaacccttcttttgctccacgtttcctcactctcaaccgttcgactcgttcgatatcaaccgagttgactcagatctctaaggaaggtgcagcactgaattctctacttctngttgtgctatggaggagcaattcatacttagagttc

SEQ ID NO: 16853 - DNA, 323 bp, Glycine max
ccctaatcagctcacagacctctctttctcgcgtctttggaggtatagtttccaagtctcctttccttcgatccaagcgctattgttcccaatcttttttcataccaattgctgttccagcaaaattttatggaggagcaattcatacttagagttccacctaatgtggcagagcggatagagcgtcttctgaatgaaaacaatgcttcttcatctgaggacaagtcactagatttgtcatttagagaggatggaagaagtggtacgtttatgattgggaatgaacaattcccagcttctctattggatctccctggggtagt

SEQ ID NO: 16854 - DNA, 285 bp, Glycine max
tttcgtttcgattgaagaacccttcttttgctccacgtttcttcactctcaaccgttcgactcgttcgatatcaaccgagttgactcagatctctaagttatggaggagcaattcatacttagagttccacctaatgtggcagagcggatagagcgtcttctgaatgaaaacaatgcttcttcatctgaagacaagtcactagatttgtcatttagagaggatggaagaagtggtacgtttatgattgggaatcaacaattcccagcttctctattggatcttcc

SEQ ID NO: 16855 - DNA, 291 bp, Glycine max
cgcaaagcctctttctcctttgtcttcctcaccctatctcctcctccgcacactgtcgtctcgcaccaaacctgtaactgcactgctgaacctgcaaacgagttggggttcgttactatcacgattaagttatggaggagcaattcatacttagagttccacctaatgtggcagagcggatagagcgtcttctgaatgaaaacaatgcttcttcatctgaagacaagtcactagatttgtcatttcgagaggatggaagaagtggtacgtttatgattgggaatgaacaat

SEQ ID NO: 16856 - DNA, 279 bp, Glycine max
ggacaagcagagctctaatattcgcgacaattgcaaaccctaatcagctcacagacctctctttctcgcgtctttggagttatggaggagcaattcatacttagagttccacctaatgtggcagagcggatagagcgtcttctgaatgaaaacaatgcttcttcatctgaagacaagtcactagatttgtcatttagagaggatggaagaagtggtacgtttatgattgggaatgaacaattcccagcttctctattggatcttccttgcgttgttgaa

SEQ ID NO: 16857 - DNA, 466 bp, Glycine max
cccacgcgtccgactgaatctaacacgaggctcatgacggaatatgtcttagagaccagtggcgttgaaaccgagaagtgaatagtcttgcggcaatgcattagcccttcattccctctgctcgaacaggagctagggcaatgtatatgtacaggaaagaactcgtctacatggttttcgaccaattttatactccagtattggcatggctatgattaaaaaaaaaaacagttagatcataaaatggttgggatcacgccgccgtacaaattgttaatgaacaaaatatattgttaagccgcgccatgataattttgggatacttggagcaccaaaattatagtggtaatgttttcaaggcttggttctgaagacagctttgaccaatttgtgtgtaatcaattttctttacatctgaaagtgaaaatactgtccaacgatgaaacaagcaacaagcattgccatc

SEQ ID NO: 16858 - DNA, 718 bp, Glycine max
cttttcctttctttttctctcattccattcacattctcaacccaacacacaacttccaaccatattctctcgccacttcctcacatggacgcaaagagaaccctagagctcacggttttatcgttggaggagctccacgtggactggaagcacgccgcggagagcctctacgtggtggtacgggcagagtccatcaccagctactccacgggcacggccaccgaaagcggtggcaacccgtcgtggaacgagaagctggtagttgacgtgcccgtgcatgcgaggtccatcacgctggaggtgaagtgcaaggacgcccccagcgtgaaggacctcggcatcgcgaggatagccatctcggatttcctcggtggcggcacgatggcgccggagcagtgtttgcaatttttgagttacaggttgagggattgggaagggaggcccagtggggtgattaatttttccgttagggttagggctacggagaaggcatgttcttgctccggggacgttgttattggcgttcccattttgtggaacaggtaaaggtgtgtttggagttccggtacggtggtgccaaatcgatcacgttgaagcactctttattttcacttccgttttttttctcacgtcgaaaacacgatttcttccacccatgggtgtatatggcccaagtgtctacaattattaatagaatagtgtgagtccatttatcttt

SEQ ID NO: 16859 - DNA, 1744 bp, Glycine max
cctctacggcatatcctttctccttcttcctgtatcctctgacttaatttactacaaacaggcaacaaggctcaaggaattagtattgtttccatcatgggaatttgtttgagcacccaaattgaagctgggctgaattcaaagcatgtgagtgtcgatgcaaaagatctcagcagtccaagcagtaaaattacaaaagatctcagcaatccaattagcaataaaattacagaagatctcagcacaccaattagcaataaaattacagaagatctcagcacaccaattagcaataaaattacagaagatctcagcacaccaattagcaataaaattacagaagatctcagcacaccaattagtaaggtcgcagagatcttagtgcctctgactcctcagattgagggtgagatcttgcagtcatccaatctgaagaactttagtttgacagaactcacagctgccacaagaaatttccgtaaagacagtgttttaggaggagaaggtgattttggatcagttttcaagggctggattgataatcaatcactggctgctgccaaacctggcactggcgttgttgttgcagtgaaaagacttagtctggatagcttccaaggtcagaaggattggttggatgaagtaaactatctaggccagctttctcatcctcatctagtgaaattaattgggtattgctttgaagatgaagaccgacttctggtctatgaatttatgcctcgtggtagcttggagtatcacttgttcatgagaggctcgtattttcaacctctttcttggggtctccgtttgaaagttgctcttggcgctgccaaagggcttgcatttcttcacagtgctgaaacaaaagtgatataccgagatttcaagacctcaaatgtcttgctggattcaaattataatgcaaagcttgctgatttggggctggcaaaggacagaccaacacgtgagaaaagtcatgtctccaccagggtaatgggaacctatggatatgcagctcctgaatatcaaaccacaggaaatctgagtgccaagagtgatgtcttcagttttggagtagtcctgctggaaatgttatctggcaggagggctgtggacaagaatagaccatcaggacaacacaatttggtggaatgggccaaaccatacttagccaacaaacacaaacttttgcgtgtgttggataatcgccttgaaggccaatatgcattagatgaggcatgtaaggtggctaccctctctctgcgatgccttgcaacagaatccaagttgagaccaaccatggacgaggttgtcacggatttggagcagctgcaggttccccatgtgaatcaaaatcgttctgtgaatgcctctcgcggtcgtagaaaaagtgctgatgattttactcatggtagaatcgccacagcttctgtttccccgctctcacatgacattgcaaatacacgtccttgaaagctgatgcatgtttccacatgaactcaaacacgttcatatcatgcacacatgctatctaataggttttacgtatgtatatatttcaggttctgtttgtaatatgtagtcaaaatagctggaactactgcaggtactgtcttatttggctctggttagctcaattttgttgttttttatattggtataaagttttccaactttattttgttacacttgcaatgtgcagttttcacatatatagaacttgaagcaaaacttatagttg

SEQ ID NO: 16860 - DNA, 723 bp, Glycine max
acgaggaccaacacgtgagaaaagtcatgcctccaccagggtaatgggaacctatggatatgcagctcctgaatatctagccacaggtaatctgagtgctaagagtgatgtcttcagttttggagtagtcctgctggaaatgttatctggcaggagggctgtggacaagaatagaccatcaggacaacacaatttggtggaatgggccaaaccatacttatccaacaaacgcaaacttttgcgtgtgttggataatcgtcttgaaggccaatatgaattagatgaggcatgtaaggtagctaccctccctctgcgatgccttgcaatagaatcaaagttgagaccaaccatggacgaggttgccacggatttggagcagctccaggtcccccatgtgaaacaaaatcgtagaaaaagtgctgatcattttacccatggtagaattgccactgcttctgcttccccgctctcacgtgacattgcaaatacacatccttgaaagctgcatgtttccacatgaactcaaacatgttcatatcatgcacacatgttatctaataggttttacatatcttagtacattgcatgtatatatttcaggttctgtttgttatatatatagtcaaaatggctggaactgcaggtactttcttatgtggctctggttagctcaattttgttgtttttgatatattggtgtaaagtttcctactttattttgtt

SEQ ID NO: 16861 - DNA, 725 bp, Glycine max
taactttgctaccaaacaggttcttcttggccttttcttttcttcatccttcatgttttgccttctttccaattcattatcatggcttttgctggtcctgatatatgacccttcttgcttctttcctgatctataggcaacaaggctcaaggaactagtatcctttctatcatgggagtttgtttgagcacccaaattaaagctgggttaaattcaaagcatgttagtgccgatgcaaaagatcacagcagtccaattagcaataaaattacaaaagatgtcagcacaccaatcagtaaagtctcagaggtatcagtgcctcagactcctcggattgagggtgagatcttgcagtcatccaatctgaagaactttagtttgacagaactcacagctgccacaagaaatttccgtaaagacagtgtgttaggaggagaaggtgattttggatcagttttcaagggctggattgataaccactcactggctgctgcaaaacctggcacgggcgttgttgttgctgtgaaaagacttagtttggatagcttccaaggtcacaaggatcggttggtgagtttaatattcttctttaacccctttgatttgctcctgctaattaagaatcaaacactgcctctgttacatgtttaatttttaactgcgtttgagaatttttaccatataggcaaggcacggtatgactcatgaagcaagtcttgaggtgc

SEQ ID NO: 16862 - DNA, 280 bp, Glycine max
ccctcctccccggccggccctttctcctaccttcttcctctatcccctgacttaactttgctaccaaacaggcaacaaggctcaaggaactagtattgtttctatcatgggagtttgtttgagcacccaaattaaagctgggttaaattcaaagcatgttagtgccgatgcaaaagatcacagcagtccaattagcaataaaattacaaaagatgtcagcacaccaatcagtaaagtctcagaggtatcagtgcctcagactcctcggattgagggtgag

SEQ ID NO: 16863 - DNA, 529 bp, Glycine max
ccctcgagccgcatcggctcgcgtctagtttctctcatacaaaactacactcaccgtgttaatcaaaagtacttgttttctagttgtccataccatccccatccatcaacgtgacaattaagatttgtgattataagaagattgaattaatgtgttgtacctcttgctatctccgcctatgcacctataagagtatgtagtttctactttgttgataaccacatgctctctacatcttacaaagaagcatcctctatagactaatgggtttgttcagaagtaagggtgtgatttataggccagtgaaggatgttaacttaggtcctgatagcactgaattctatctccaagccaatgtcaaagctccccgcatgactggaatcctggtcaagattttcacttggttcttggagtctccaatacttggacccttgctattgtatatattgaagggaaacaatcttattcataaacttattacaaatgcagacttagaagagtcacccctctatgttccctcacatcattt

SEQ ID NO: 16864 - DNA, 361 bp, Glycine max
cccacgcgtccgcccacgcgtccggttgctttaattgaatacggtcagtctcttgaagaggggggaattaaaaatttggaggaaattgagaagaaagttcagttgcataggaaacggctgcaagtggagtatgggttatcagattctggtgaagatggtcaaggcaatagaagaacttcagagaggagggataggcatgatgtttcaaggaaacggcaccgaagccgtagtccaagtagtagtccacagccaacattatctggcaaagacagagatagagaacacgatttagaaagggatcgagacagacacagagattgaagtcatgatttcgatagtgaaagatgaagggaccggcaca

SEQ ID NO: 16865 - DNA, 408 bp, Glycine max
cttttattgatgtattctgctaacattgagagattaatttgatgaatttttcaaatcttgaaggattgtcacataatttctaatactttagggactatttgtataatctcattagtttaaggactatttagggatcaaattgatagattattcgtttttgttttagtcatagaattttgcatcacgattgatattcctttgtctgcgactgcttttaacctcacatccttgttcaactgatgaaggttcaacatgttgctaatttattttgctcatatatacttgggtttggcttttttttatgtttcttttttgggatctttgttgtaattttggcgtggttaatgtttgtgtggtgctgtgtttttaattgaacggattgcttgcacatgagcttatcgcccatgc

SEQ ID NO: 16866 - DNA, 492 bp, Glycine max
atcccaaccctatccctcttctcagattcattccatcatggctctctccaaagccaccttcttgacgcacctcagaaccctctccaattctcaccgccgcccttcctcgtgcgtttcaatccgcctcctctccttctcctccccggaggaggccgcggcggagcgccgccgaagaaagcgccactccgcatggaaccgcccctctccgccctgaaccgcacccaaaccgctccaaagcccctacaatcaccctattatctaaaccctaacaaccccaagctcccggaacacgtgtccgccctcaccggctaccggctgaacctgcacaaccccgggaaaaatcctaaccctaatccgcgagaacgacctcgacgaggcggcgctgtacacgcgccactcgatctactccaactgccgccccaccatcttcacgatcaacgccgtcctcgccgccctcctccgccagtcccgctactccgacttcctctccct

SEQ ID NO: 16867 - DNA, 636 bp, Glycine max
gtggagcaggaggcgaacgccaacacggcgccgttcgtggcgcgcgtgtcggagttgtgcgcttattacggcgcgctgtttgactcgctcgagtcgacgatggcgcgagagaactcggcgcgagttaggatcgatgagggactgactcggaaggtggggaactctgtggcgtgcgaaggaaggaaccgcgtggaacggtgcgaggtgtttgggaagtggcgagcgcgtatgagcatggctgggttcaggttgaagccgctgagtcagcgagtcgctgagtcgatcaaagcgcgactcggtggcgctgggaaccgagtcgcggtaaaagtagagaacggtgggatttgctttggctggatgggaagaactctcaccgtcgcatctgcttggtgttaattagttaactctactttttactttttattttctatggatattgtatacacattgttattatattttaatgttacatagagattatggaaagctaaaaaaaccatagagttggaaaattgtgttaaagtataccccactcctcttccttctcccaaccaagcaatagtaaaaagtgtttggattccgagaaaatttatgtgacttgatgcagcatttatgaatataatgattcatttatgt

SEQ ID NO: 16868 - DNA, 730 bp, Glycine max
ctcccaccaattgtctctatagtaaaggaaacaacatcgatgccttgtaaggccagagagcaggccccgttttgtgtttctgtttcctgacaagatatttatagatagcctttattatcattatcattatcataagaagaagaagaaaagcaagtaaaaaggtttcaagttttaacccatttgttttgctttatctttttcacttttcagatcctttttctctcaattctgagcagaaaacttatatccttgtctgaggttaacttttttcatcggtaatcccctccctccctacggatcgtgtcttttctttccctcattacattcctttaaagttcaaaccactcctccaaccgcaccctttttcttgtaggacacaacagacaacaaccagagcaagaagaaccagtttttgtttgtgtgtctatttcagctgccaaatatggataggagcgggcaaataccagcgtttgggaactgggattacgcgaacgagttgccaatcactcagtacttcgagagtgcgagacaagctggtttagttcgttacagttcctcctccggcgaaagtgacccttacgtgcgtgcagatcgagacctctacgccgttgattttaagaaaccaccgattcgcaacatgccaccttctactcttaaaaaggcgacgaggaacacgggaaggaggtgtgttgtggttaaggaaaaggaaaaggaaaaggagagtgtgaag

SEQ ID NO: 16869 - DNA, 515 bp, Glycine max
gaagagctatgacgacgcatgcacgcgtccgtaacctcggatttcggcttcgagccccacttttgcacaagcaattgcaacaaaccaacgttgaatagtgtctctctctttttctttttcttatttttctctcatagtgtctctctttttctttctcttatttttctctcatagtgtctctcttgttcttcaatcaagagaagaaagaatacaccctgaagccatggaaggtggtgtgccagaagctgatatgtctgccttcagagaatgtttgtctctatcatggaagaatccttatgttcttcgccttgctttctctgctggaattggaggccttctctttggttatgacactggagttatttctggggctcttttgtatatcaaagatgaattcaaagcagttgataggaagacttggctgcaggaagccatagtgagtacggcacttgctggagcaatcataggagcttcagttggtggatggatcaacgatcgatttgggagaaagaaag

SEQ ID NO: 16870 - DNA, 386 bp, Glycine max
cccacgcgtccgtctatctctctgacacacactcatcattttctagcaaactctctagcctcttcaaatgggctaggaaggttgaatacaaagaaaacaaaccctagcttaattaattaacttgcttgtgttgttaattaatttgttcaacatggaaggaggagtgcctgaagctgatatctctgcctttagagaatgtttgtctctatcatggaaaaatccttatgttcttcgccttgctttctccgctggaattggaggctttctctttggctatgacacaggagtcatatctggatgcccaaacaattttgtacatcatagatgatttcaaagaagcagatagaaagacgtggctgcaagaagctttaatgagtatggcactt

SEQ ID NO: 16871 - DNA, 356 bp, Glycine max
gatccgtatctcaaactaaacagcacaacacttttgcacaagcaattgcaacaaaccaacgttgaattgtgtctcactctcttttttctttttttctttctcacagtgtctctcttcttcttcaatcaagagaagaaagaacacaccctgataccatggaaggtggtgtaccagaagctgatatgtctgccttcagagaatgtttgtctctatcatggaagaatccttatgttcttcgccttgctttctctgctggaattggaggccttctctttggttatgacactggagttatttctggggctcttttgtatatcagagatgaattcatagaagttgataggaagacttggcta

SEQ ID NO: 16872 - DNA, 1793 bp, Glycine max
agataatcggaatttagtagttagttcggtttttagttacttaaccgcttaacgatataaggaaataaataaaaagaagcgcgacgatgttagatcttaatctcaatgcggagtggaccgattcgtttagtaacggtgagtcgccgttaccgttagagaagtttccagacggtttgaggaaccaaatggccgagtcagggacttcgaattcctccgtggtgaatgcggacgggtccagtaacggcggcggcgacgaggactcggactccacacgagctgctgatgacgtgtacaccactttcaatttcgatatccttaaagtcgaaggcccgaacggcgtcgtaacgaaggagctcttcccggtgatgagtgaaggagctaaaggacacgctacgtcgtcattttcagcgaggaatggttttgtggatctctcgttcgatcgcgaaggaggggacagtgagatgaagatgcttcagcctcagaatcagcctcagactcagactcagactcagcaaccagcgaagaagagtaggagaggaccgaggtctcgaagctcgcaatacagaggggttactttttacagaaggacgggaagatgggaatcgcgtatcggggattgcgggaaacaagtctatttgggtggatttgacacggctcatgctgctgccagagcctatgatcgagccgctattaagttcaggggagttgatgctgatatcaatttcaatctgagtgattatgaggatgaccttaaacagatgcagaatctgtccaagcaggagttcgtgcacatactgcgccgccacagtaccggtttctcaaggggcagttcgaaataccggggagtgacacttcacaaatgtggccgttgggaagctcgaatgggacaattccttggcaagaagtatatatatcttgggctattcgacagcgaagtagaagctgcaagggcttatgacaaggcagctatcaagtgcaatagaagagaggctgtcactaactttgagccaagtatatatgagagcgagatgaaacctgaagctattaatgaaggtggcagtcacgaccttgacctcaatctgggcatagcaaccccaggacatggtcccaaagaaaataggggccatcttcagttccagtccatcccttacaacatgcatcccggaagaagttcaaggatggagactaatgttaattcggttattggtgatccttctttgaaaaggctggttgtaactgaagagcgtccttctgtatatcccactttctttcccaatctggaaagagcagagagaatgggcatagatccttcaaaaggagttccaaactgggcgtggcagacaaatggccaggttaatgccaccccagtaccaccgttctctactgcagcatcatcaggattctcaatttcagctacttttccatcaactgccatctttccaacaaaatccatgaacccaattccccagagcttctgtttcacttcacacagcacaccaggtagcaatgcacctcaattctattacgaggtcaagtcctcgcaggcaccatcccagcctctatcttgtaatacaagtataaatggtagcccaccacacaagttctgaagttcaattctcaaaacgacagttaaaactttttttttttttttcctgtttgcatgatttagggatcggtacaatgttgttgctcatggtatgtttgtatgtgatgaaaagatttttttcttcagagagaaagtgaaaagaaaaaatgcatgatgtgttttaacaaaaaaaaaaaaaaaaaaaata

SEQ ID NO: 16873 - DNA, 955 bp, Glycine max
tttcttgtaaattaagctgaatgaggtggatagcactttttatgctctcatgttagggtgcgcttgattgatcgttaatcgttcagttctatttaacagcaatgaccatagagatatggattgacgttagaagtgcattagaaagtgggagacgaataaaacaatgacacttaatttataacataactcttcatatcatgataactgttgagaatgcttgtctggctgtaacatttttgtagctttcgtgggttttccttgtagctaattacaacctgtattcctttgatttccttgattttttgtggaacttttggtttttggtattgttttatcaactctagatgtcatatattaacatggttctctttatctgcagatggaaaccaatgttagttctggaattggtaatccatctttgaaaaggatggttgcaactgaagatcgtccttcattatggaatggcatgtctcctaatttctttcccaatggggaaagagcagagagaatcggcgttgatccttcaagcggactccccaactgggcgtggcaaacacatggccaggtcaatgctaccccagtaccaacgttctctgctgcagcatcatcaggattctcaatttcagctacctttccatcggctgccatctttccaacaagttctatgaactcaattccccagagtctctgttttacttcatccagcatgcctacccgcaatgcatctgaatattattactaggttaagcccccacaggcaccaccatagctgattttgcagtacagattaaagacaaactaaaacaaaagtgttttcggtccaaattctttttataattcagccactgattggtgtatactgagattcgacaccttattgctgtctcttgcttaaactataatgccccatgtttggatacatcatctttgaagcaaatgctatttttagtgcact

SEQ ID NO: 16874 - DNA, 987 bp, Glycine max
ttttgtaattatttggtgtagggattgcgggaaacaagtctatttgggtggatttgacacggctcatgctgctgccagagcctatgatcgagccgctattaagttcaggggagttgatgctgatatcaatttcaatctgagtgattatgaggatgaccttaaacagatgcagaatttgtccaaggaggaattcgtacatatactgcgtcgccaaagtactggtttctcaagaggaagctctaaataccgaggagtaacactccacaagtgtggccggtgggaagctcgaatgggacaatttcttggcaaaaagtgaggacatatttttatatatcaacttacgtagtgatctactgtggttatgaaatattatgaatttaagcacctattgggctgcaaagtgaaattggtttcagcttaattctcaatgcatctttatgcttttttccatgtttggagaaacatgtctaagatagtaatatagagatgcgttttggttatagagattgcaatgctttcatgcaggtatatatatcttggactattcgacagcgaagtagaagctgcaaggtcctagtgatacatgaattacattctacccgcactgaatttatttacatgaattatcaaagctcattaggctccatccaacacgtatctcccttttgattttctggaaatcagggcttatgacaaggcagctatcaaatgcaacggaagggaagcagtgaccaactttgagacaagtacttatgaaggagagctgaaatctgcagccattaatgaaggaggcagtcagaatcttgatctcaatttgggcatagcaaccccaggacctcccaaagaaaattgggggcaacttcagttcccctccttcccttacaatacacatggtggaagaagttcaatggaataattgaaactcatcttcatttattttaagaaacagtaaattaagctgaatgaggtgcatagcactttttatgc

SEQ ID NO: 16875 - DNA, 504 bp, Glycine max
cttggactattcgacagcgaagtagaagctgcaagggcttatgacaaggcagctatcaaatgcaagacgcgtggggcagtgaccaactttgagccaagtacttatgaaggagaaatgaaatctgcagccattaatgaaggtggcggtcagaatcttgatctcaatttgggcatagcaaccccaggacctggtcccaaggaaaattgggggcaacttcacttcccctccatcccttacaacacacatggtggaagaagttcaaagatggaaaccaatgttaattctggaattggtaatccatctttgaaaaggatggttgtaactgaagatcgtccttcattatggaatggcatgtctcctaatttctttcccaatggggaaagagcagagagaatcggcattgatccttcaaaaggactccccaattgggcgtggcaaacacatggccaggtcaatgctaccccagtaccatcgttctctgctgcagcatcatcaaggattctc

SEQ ID NO: 16876 - DNA, 264 bp, Glycine max
gcagaatttgtccaaggaggaattcgtacatatactgcgtccccacagttccggtttctcaagggggagctcgaaataccggggagtgacactccacaagtgtggccggtgggaagctcgaatgggacaattccttggcaaaaaggcttatgacaaggcagctatcaagtgcaacggaagggaagcagtgaccaactttgagccaagtacttatgaaggagagctgaaatctgcagccattaatgaaggaggcagtcagaatct

SEQ ID NO: 16877 - DNA, 459 bp, Glycine max
aagtggggagtcaagtggtagagtgtacacgtggcgaacagttattggttagctgagagagattctaaaattggtattgtgtttattaaatacaaaaaatacaatactcttttgtaattatgtgaggtgcgtgtgtagtcctatacccatcatccaactcaatcttgcaacagagaaaaaaaaaaggtgaaagatgagacaggtgattttagtatatcaaatttcaaatggtgagtggtgaacccaccacgggaagaaaaaaattgaaagatgatgatgagtgatgacagaggtgaggatatgtaatttagctttgtgaatactaccaaatttgtttgttcaacattatgaattatgaatgggtcagtgctggcattccttggttggattttaaatcatgatccttgaggagcaaaagaaaatctaatcatatgtacctgttggaatgaacaaaataaa

SEQ ID NO: 16878 - DNA, 445 bp, Glycine max
ttctttagacaatgaggtgcagccaaattcattagacactggggtgcagccaaaatcgttgagcaatgggctgaagcacagtgcatctcgcggtaagagtcagggaagactaactaggaaggatttgcgcttgcataagttggtatttgaagcagatgttgtgccagatggaactgaactagcctactatgctcatgggcagaaactgttggttggttacaaaaagggatgtggaattttttgtacctgctgcaatgagcaggtcagtgcctctcagtttgaagctcatgctggctgggcatctcgacgcaaaccttacctgcacatatacacatctaatggaatctctctccatgagttgtccaatctctttatcaaaagatcataggaggttttccaacaatgacaatgatgatctctgcatcatatgtgaagatggagggga

SEQ ID NO: 16879 - DNA, 596 bp, Glycine max
ttaaagcatgatgtactgccatatctagtccggagccaactggttagttgttaaaggttggggcagagataggctagggaatgttgtacttttaaggattctaaccttgttcatattttctaaacgagagttagaaatcagaagtattattaaatggcataccacatgcagaagaaaacagaactgaaaaggttatttctcaaagcaatcaacaaatgctatctcaaatactcgctaatgcatctgaaccaacctttcatctacgacatgcactgggtccttatggttctacttttgatcgaagaacccacaaatgctgtgtgtatattgctggaagcagcaaatactgtgctcgcttaaattctatacaagcatacagtgacattaaccgtgatgtgataggagaggctagtcgcttatcagggtattccttctctactctaaacaacattatccatccttctgcagagcttggggcaaaaacaacagttggaccacattgtatactgggggaaggttcacagatgggtgacaaatgcagtgtgaaacggtctgtcattggccgacattgtcggattggtgctaatgttaaggtt

SEQ ID NO: 16880 - DNA, 238 bp, Glycine max
cgcaaacaaaaaacattgcgacagttgcgacttattggagttcattcttcgcactctctcggaaaccgcttgtttccaatcatctaatcagacgatagcagactcaagaaagacgtttccttcccagatccttctagaccatttgcaaaccgtctccttccccgaatccattctccaaaccctcgatccttgaggagctccaccaccgtgacggcgcttcggtctccggcgtcaattg

SEQ ID NO: 16881 - DNA, 331 bp, Glycine max
cgaagattgtgatgagaatgatgacaaaaatgatgaaaacattcctgttcataccaatgccgaaaatgaatgattcaggacatgagtatttcagtttcctttagaagttcaaattacaattctgatttctttgcagcctgttttcggcgtatttggggttgaatgcaaattttggttaagttgtatctttagtttgttcgcctatgggtgggggcctcttgtttcattgtatttaacttttgaagtataatctttgttattaattttttatccccccaatgctacctgattcctgctctgttctgccgagcatgcccatcagttttttttt

SEQ ID NO: 16882 - DNA, 587 bp, Glycine max
aacaaagaactcactcaaactcaacatagagagagagagagagagagagagagagagagagagagatatgaccgattacgaagagagatacgaagggaacggagaagaagaggaacttcacaattctcatcatcagcctcatcctgattcctctcctttacccacccacgacgatctcaccgattccaaatctcgccatggatctcgcgattatgacagagattcttccagaagcagagataaggagcgggagaaagggagagacagggagagaaaaagggaaaaggggagggacagggaaagggagaaaaggggtttaatggatagggattcggagagaagcagggacaaggacagagatagggataagagcaaagacagggagagggaccgggatcgtgatggtgagaaggaaagggaccgtgacagggaccgccatcatagagatcgacacagggatcgtggtgagagaagggaaaggacaagggatagagatgacgatgatcatcacagaagtcgtgactttgacagaagaagggattatgatagagaggataggcataggcacaggtctcggtctcagtctc

SEQ ID NO: 16883 - DNA, 1189 bp, Glycine max
gggaaaaacaaagggagaatgtgcttcctgttgcagatcaagactccccctcaaattctcatctatcttatgatgaccagcgccgcacccaactcttccttaaagatcaaattcccacatggtttgcaatttctggttatgttgctattgctgccatctctactgccactctgccacacatcttccccgaactaaaatggtattacataattgtcatctacctaattgctcccaccttagcattttgcaatgcttatggttgtggactaacagattggtcccttgcttccacctatggaaagctagccatctttacaattggagcatgggccggttcatcaaacggtggagttctcgctggcctagcagcctgtggggtgatgatgaacattgtttccacggcctcagacctgatgcaagattttaagactggctaccttacattggcttcgccacgctccatgtttgtgagccaaataattggcacaacaatgggttgcataatttctccttgtgtattttggattttctacaaagcgtttcctgaccttggggttaaaggtaagtacaagtgaatatcctgccccatatgcaattatataccgtaacatggctatattgggggtacaaggttttggccatctaccaaaaaactgcctcttgctttgttacatattctttgctgctgccgtcgcaataaacttgattaaagatttccttggcaagagagggaggttcataccacttccaatggccatggcaatacctttctatatagggccatactttgccattgatatgtgtgttggaagtctgatattgtatgtgtgggagaggattaacaaggctaaggcagatgcttttgcaccagctgtagcttctggtttgatatgtggcgatggaatatggactcttcctgcttcaatacttgctcttgctggagttaagccaccaatttgtatgaagttcttgtcaagagcagcaaatgcgagggtcgatactttattagggaattaaggtcaggtttgaattggatcttgtgaaaagttactgccttgtaaatctgtgaaacatcacttaaatctgtggttttaagcttttgctgccatagtagaactagacaacatagaaggaaaaactattttgtattatatatcagaaaggaagtaaatgttttatgtttagattg

SEQ ID NO: 16884 - DNA, 740 bp, Glycine max
cttgctagattgatgaacccgattgatacacatttgagtacttttgtgaatggggagtttggggatttaggttatgttgctcctgaatatacaaaaactttggtggctactcctaaaggggatatttatagcttcgggaccgtgcttcttgaattggtgacaggtgaaagacctacccatgtggctaaagctccagaaacttttaaaggaaatttggtagagtggattcaacagcaatctagcaatgcaaaactccatgaagtcattgatgaatcactagttgggaagggtgtagaccaggagcttttccaatttctgaaggttgcaagcaactgtgttacagcaatgccaaaggagaggcctaccatgtttgaagtataccagtttctaaaagccattgggattaattacaatttcacaattgaggatgagatcatgctccctatagacactggtgatgctgataacttagaagaacttattgtagctcgagagggacataattgaaaaggtatgcgagatataattagggcatgtaatcaattttaatatgtaagtatctcttgccttgtggtcctaaaataaatgttagtgctatatataggttttatggtccagatccatttgtgtgctatcaatattgaaacatcaatttaatatcatcaaccatgaatgccattatatataggtgactttgttataatccctattttgctctaatttccttgttctctcccttg

SEQ ID NO: 16885 - DNA, 1832 bp, Glycine max
gacagatttttctggtttagggatgaggaatttgctagacagactgttgctggtctcaacccgtatagtatacgattggtcacagaatgtccattgaggagtaaacttgacccagaaatatatggtccaccagaatcagcaatcacctcagaaattatcaacaaagagattggaggcataatgtctgtagaaaaggcgattgaaaaaaagaagctgttcatgttagactaccatgacatacttttaccctacgtcaacaaagtacgcaaactcaaggggaaaacactgtatggttcacgaactttgttctttctaaactcagaggggacactgaggcctctagccattgagttgactcgaccgccgtcatcttcaaataatacgggccaatggaagcaagttttcacaccttcttggcactcaaccagtgtttggctctggaggtttgccaaggctcatgttcttgcacatgactctggctatcaccaacttgttagtcattggttaagaactcactgtgtgacagagccgtatgttattgcaaccaacaggcaacttagtgagttgcaccccatatacaaattgctacaccctcatttccgttatacaatggagattaacgctatcgcacgagaagcacttatcaacgctgatggcaccattgagagctcatttgcaccaggaaagtactccttagagattagctccgctgcttatgctctcgaatggcggtttgacaagcaggcactaccagcagatctaattagaaggggaattgctgttgaagatccattttctccacatggcttaaagcttaccattcaagactatccttttgccaatgatggactccttctgtgggatgctataaagctatgggtcactgactatgtcaaccactactaccctgaaccaagtcttgtagagtcagatgaagagttgcaggcatggtggacagagattagaacacttggtcatgctgacaaaaaagacgagccatggtggccacgtcttaaaaccccaaaagacctcattggaatcctcaacacaatcatatgggtaacttctggtcaccatgcagctgtgaactttgggcaatatgtttatgggggatatttcccaaataggcctacaattgccaggactaaaatgccctcagaggaccctacagaagaagagtggaaaaagttcattgaaaagcctgaaagagcacttctgaagtgctttccttcacaacttcaagcaactagagtcatggctgtcttggacatactctcaactcattcaccagatgaggaatacataggagaaaagatggaaccatcatggggtgaagatcctgtcataaaggcttcctttgaaagatttagagagagactgaagaaactagaaacactgattgatgagaggaatggaaacacaaagttgaagaacagaaatggagctggcattgtaccgtacgagcttttgaaacctttctcaaagccaggtgtgactggaatgggggttccctgtagtatatctatttaagttgacaaagtcaaactgatattatgtgtgaagtatgatcctaaaccggtatgggtttttaatttaaacataagatagacacatagtcacataaactggtgcctaaaccaccagaatttccataaacacatattactagtgtttctttaggatgttcttgaaccaatgagataattttttttagcttattttctttttcgaaattaccagaattagtcctaaacaacactactgcttaaccagaatttcattcaaaaacagaacactgcgaaaacccaaggggttgctcttgattaattgcc

SEQ ID NO: 16886 - DNA, 278 bp, Glycine max
attgggattaattacaatggcttttagaaactggtatacttcaaacatggtaggcctctcctttggcattgctgtataccagtttctaaaagccattgggattaattacaatttcacaattgaggatgagatcatgctccctatagacactggtgatgctgataacttagaagaatcccttgtagctcgagagggacataattgaaaaggtatgcgagatataattagggcatgtaatcaattttaatatgtaagtatctcttgccttgtggtcctaa

SEQ ID NO: 16887 - DNA, 420 bp, Glycine max
cttgacggatgctctttcaagcaaagtgcattaaacacatggaagcttttactcaaagggttatatctagatggtgggttacactttacgctcgttactctgatactcctcagaagaagtctaagcttgctcctttgcaggagagaagaatgatggaccagtgtaagatatttgcaaaagcaggtgatggaggcaatggttgttctagcttgcgcaagggaagacctgatggtggcaatggggggagaggtggtgatgtgattctggaatgctctcacagagttcgggacttcagtgggttgcagcgtcacctgaatttaaatggctgagaaaggaggacctggatcatcaaaaaagttgataggtagcaggggtgctgataagaactgcaagttcattccaaaatcatatgctttattt

SEQ ID NO: 16888 - DNA, 474 bp, Glycine max
cccacgcgtccgtggacgaatcacaaccaaaaaacaaagaaacagaggcagagatatatgattatgaatttctcaacagaaccctctgcctcacgcttaccattctgatctccacttcttcgctgtgcgacgaagtgaaatttcgttgctgcaaatagtgagaatttgctgtctttggtcagagttgctccgagtgatcgcttcccctggtgcgacgaagtgaaatttcgttgctgcaaatagtgagaatttgctgtctttggtcagagtggctccgagtgatcgcttcccctggtgcggaaaatcgtgaagtgaaatttcgtcgctgcaaatagggagaatttgctgtctttggtcagagtggctcagagtgatcgcttcccctggaaaatgaggccagaagggactgagctgcagaaggagtatgacaagtgtgtgtttctgagttgatgtgtgtgttattcttttaattga

SEQ ID NO: 16889 - DNA, 468 bp, Glycine max
  unsure (1)..(468): unsure at all n locations
gtgtggaaacattctgctatggtttgcgctgcaatcacaacacaccaatatgtatctgcggagcagattgtgaatggcatgcatcaggcaaaggcagaacgagctgatatagtggagcttacgcttgactgcatcaccaatttccactctcaccatgacctcaaaatcattctccaaaataagccactacccgtgcttattgttaaccgaccaaaatgggaaggtggtttgtacgagggcgatgagaacaagcgggtggaagcattacagcttgctgtggaattgagtgctgatttcatttaaaaggtacgttgagctgaaggcagcttcttgtcttccaaccttggtggaacatatgagaaatcataatagtcatggcaaaatcattgtttcctgctatgtggatggcaccacccctccgcatgaagtactacttcaacttgttgaactaatgcangctactggagc

SEQ ID NO: 16890 - DNA, 597 bp, Glycine max
atcttctccggcttcactcccattttttcaaaacattcaacaatgtcgtatttttcaaggggacgtcgcgacgacgacgacacggtggacgactacgacgagtacgaccccaccccatacggcggcggctacgacattcacctcacctacggccgccccgtctctccttcagaagaaacctgctacccactcggagcctcttccgatgaaaacttcgattacgatcgcccccagtacacctcttacgctgaaccctctgcttatggcgatgaagccctggccactgagtatagcagttactctcgccctaagcccaggcccgctcctgcaggcttcaatcccgccgccggatccgggtatggtaggaagcaggagtcggaatacggatccgggtatggaaggaaggaagaaggagaatacgggtcaggatatggtggaagaaaggaggaatcagaatacggatccgggtatggaaggaaggaagaaggtgaatatgggtccgggtatggtgggagaaaggaggattctgaatatggatccgggtatggtagaaaccaaaaaaaactaggagtaggagggaagaaaaaatgaaggaag

SEQ ID NO: 16891 - DNA, 1095 bp, Glycine max
  unsure (1)..(1095): unsure at all n locations
aaataattatgtcctattggtggccataactccaaaagtggtggtgtgaacgcttgacaaagagtggttgcagtggcaaacaaactcatnagatcctccaaacctcaagcttaggctataaatactcaaatttgtggccatgttatgtactagaatacgaatagactaaaggggtgttttgaaaagatggagcagaaagaaaatcatgctagaaggaaaaagggagggctcatcacaatgcccttcatctttggtaatgaggtttgtgagaagctggctgtggtaggtttcaacacaaacatgattagctacttgacaacacagcttcacatgccattgaccaaagcagctaacaccctcactaactttggtggaactgcaagcttgacaccattgcttggtgctttcattgctgattcttatgccggaaagttctggactgtcacccttgcttccattatataccagatagggatgattagtttgaccctatcggcagtgctaccacagtttaggccacctccctgcaagggtgaagaggtgtgccagcaagcaagtgcaggacagctggcaatcctctacatctcactcctcctcggggcactcgggtcgggtgggatccgaccctgcatcgtggcgttcggggcggatcagttcgacgagtctgatccccaagcagacaacaaggacatggacctacttcaactggtactactttgtcatgggtgtagcaattcttgtggctgtgactgttttggtgtatattcaggacaatattggttggggaattggccttggaatccctaccattgcaatgttcctctcaattattgcattcattgtcggatacccgctttaccgtaactcgaacccgtccggggagcccgtttacccggttagtgcaagtggctatgactgcatttcgacagagaaaggtgccaaatgtgtcacaccctactttactctaacgaaatgatgaactaaatgcctctatttctatggcagggaaagcttgttcacaatggacagatgaaacttatggacaatgcatcaatagttaccgaagaacatgacatcataaacactatcttatgg

SEQ ID NO: 16892 - DNA, 478 bp, Glycine max
ggcttcagcaagaaaagagggttttcggccgcggttaaggtttttgaggagctgatttccgagggctatgaaccgggtcaagtcacctatgcttcggttataaatgcatattggcgtctcgggcaatatagcaaagcagaagaggtgtttttagagatggagcaaaaggggtttgataaatgtgtttatgcttactcaaccatgattgtgatgtatggaagaacggagagggtgagaagcgcgatgaagttggtggccaagatgaaagaaagagggtgcaaaccaaatgtgtggatctataactccttgatagacatgcatgggagggacaagaatttgaagcagcttgagaagctgtggaaagaaatgaagagaagaagggtagcaccggataaggtgagttatactagcatcattggtgcttatagtaaagcaggtgagtttgaaacctgtgtgaagtttttcaatgagtatagga

SEQ ID NO: 16893 - DNA, 371 bp, Glycine max
tggagaattgcagtgagtgagatgagttcagcggatcatgactccgaccctcccatccgactccacttgcctcctctctcaccgagcctcttcgattccgaaccaccggagctctctcacggatcctccgcccgaccctcctccgacccctccagtcccaccagcagcggttacgccgctgaaaggggcggcagcagcaccgccacaagcgtctcccaggtcgatgacgtcctccaccacgaaattcaagagatcaccatccacgattcccaaccttcctctcactcctcctggcttcccggaaaacgacacggcgatgaggatgatgcttccatttcatggaggaaaaggaagaagcatttttttgttct

SEQ ID NO: 16894 - DNA, 886 bp, Glycine max
ctttctgttcttgttgggctgctaatgctatccctgttcggctcgctgcagtactcaaactcgctcattgcagctacactcaacaccgtgtttggatggaagcctaagttttgcggcaactttggaaaatacttcaaaagtgcgttcaagtctcacaaaacggtgcattggaacacgtgtcaatggattaaaacggtaaaacgaacacacccttgttacttggacgtggaaattcacgttcgcgctcctttttatcttggcattgcgtttgtgtgtgtgtgcaatatcacacaacccaaccttattcgttcttctgttgttctgaggcgagccatgacggacggtcatctcttcaacaacatcaccctcggtggccgtggaggcaccaatccagggcagataaaaatatatcctggaggaattgtatggaagagacagggtggtggtaaattaattgaagttgataaatctgacataatgggggtgacatggatgaaggtaccaaggagtaaccaacttggtgttcaaatcaaagatgggttgtactacaagttcacgggatttcgtgaccaggatgttgtaactttgaccaattttttccaaaacacctgtggaatatcagtagaagagaagcagctttctgttagcggacgtaattggggagaagttgatctaaatggaaatatgctggctttcacgggtggttcaaagcaagcttttgaagtgtctttagcagatgtctctcaaacgcagcttcaagggaagaatgatgtgatcttggagtttcatgtggatgacacaactggagctaatgagaaagattcactgatggagataagtttccacataccaaattccaacacccagattgctggtgatgaaaatc

SEQ ID NO: 16895 - DNA, 590 bp, Glycine max
gtttgtttgtttgtttgtttttttttcttctttctgttcttgttgggctgttattcccttttcggctcattgcagcattctacactgaacggcgtgtttggatggaagcctaaaaattgcggcaattgcgaaagctattactaatcacttggacgtgggacattcacgttcgcgcttcttttttctcttggcattgcgttaacgttgcgtttgtgtgtgcaattaacatcacacaacaaaaccttgttcgttcttctctgaactctctcattagtgtgagccgagagtcatgacggacggtcatctcttcaacaacatcaccctcggaggccgtggaggcaccaatccagggcagataaaaatatatcctggaggaattatatggaagagacagggtggtggtaaattaattgaagttgataaatctgacataatgggggtgacatggatgaaggtgccaaggagtaaccaacttggtgttcaaatcaaagatgggttgtactataagttcacgggatttcgtgaccaggatgttgtaagtttgaccaattttttccaaaacacctgtggaatatcagtagaagagaagc

SEQ ID NO: 16896 - DNA, 670 bp, Glycine max
ggatcagcaaagataattctggcaatgttattccagaatacttggtcaagtggcaaggactatcttatgctgaagcgacttgggaaaaggacattgatattgcttttgctcaacatactattgatgagtataaggctcgtgaggctgctatggcagttcaaggaaagatggtagattctcagcgtaagaagagcagagcaaggttgcggaagcttgagaaacaacctgaatggttgaagggtggagagctccgtgattatcaacttgagggtctgaattttcttgttaacagttggagaaatgatacaaatgtcattttagctgatgaaatgggccttggaaaaactgttcagtcagtatcgatgcttggttttctacagaatgcccagcaaatccatggtccttttcttgtagttgttccattgtccactttatcaaattgggccaaagaattcaggaagtggcttcctgatatgaatattatcatatatgtaggtactcgtgcaagtcgagaggtttgtcaacaatatgaattttataatgagaaaaaacctgggaagccaataaaattcaatgcactgttgactacatatgaagtagttttgtaggataaggctgttctctctaagataaaatggaattatctgatggtggatgaggctcataggct

SEQ ID NO: 16897 - DNA, 790 bp, Glycine max
gagctgtgctaagaagaagaaaatggcacttccccttcttcgaatccccggcatgccactcaccaaccaacaccaatcattcccttccaatacccgccgcaaagccacgacggcgaaggcggagctcgggacggcggtggcgcggacgggcggagccggttaccaatctccgtccgtcgacgttcccacgcataaggtcacagtccacgacagacaacgaggaatcgttcacgagttcgtcgtgcctgaggaccagtatatattacatactgctgaggcccagaatattacccttccattcgcctgcaggcatggttgttgtactagctgtgctgtacgtataaagaagggacaaattaggcaaccagaggcacttgggatatctgccgaattgagagacaagggttatgcacttctttgtgtgggcttcccgacctctgatgttgaagtggaaactcaagatgaagatgaggtatattggcttcaatttggacgttattttgcccgaggaccagtggaaagagatgactatgccttggagttggccatggctgacgagtaagcaatgcgagcaaagaatgtgaatattttgtttccccttcttttctccttttttttcttcttcatatatctactatgttatctggtctttgtttatttttcccatctatatatactattgtgtgaattctaagtaaagcctcatgctatatgcgggttcgtgtttaaatgtttcaaagctttaggggagtatattgaaagattaatttaatgtaatttgttcaatctt

SEQ ID NO: 16898 - DNA, 422 bp, Glycine max
acggaggaccagtatatattacatactgctgaggcccagaatattacccttccattcgcgtgcgggcatggttgttgtactagctgtgctgtacgtataaagaatggaaagattaggcaaccagaggcactagggatatcggccgaattgagagacaagggttatgcacttctttgtgtgggcttcccaacctctgacgttgaagtggaaactcaagatgaagatgaggtatattggcttcaatttggacgttattttgctcgaggaccagtggaaagagatgactatgccttggagttggccatggctgacgagtaagcaatgtagaaaatctgacaattattggagcaaagaatgtgaatattttgtttccccttcttttcttcttctcatatatctaccatgttatcttcttgtcttgg

SEQ ID NO: 16899 - DNA, 375 bp, Glycine max
gcggctctttccgatcagcttttcaggaagaggcatggaggaagcacaataagcgcatgcacgaggagtgagaggaggagatcgaaagagtggaacgaataaggcgcatgcaaagtgtgtttaacagagaaaggaataagtacaaaagaagctatgagagctggaggggaagtggtcctggtgcatatcatcagcattcccaaagagaagattggtgctggaaggctgatacatcctttagagacaagaggactaattatcgagaaactccaagagagagtggaaactatgcattatcacatcactactcagttttgggtcttgacaaggttagaaaaactccatattcagaagctgagattaagacagcattta

SEQ ID NO: 16900 - DNA, 698 bp, Glycine max
cccacgcgtccgccggtgaatctcctagaattgttgccacgatggataataatgacggcttcaatgttttggtctatccccatgcggactacgcattcatagtggcactacttatgattgttagcgagatgaaacattattttgacgaaatggtgtatttggccgccggaatggcaccacttggagttggtatgaatcaaaggagctcccaagtaattttactcaattatggacctatttaaaattaaatcatgggcttgatttctgttatagaatagatagggtttggctttcattttcagaggaatgtttatttccacctcattgcatgaatttgagagaacaaacaagcgttgacaaagtctggttggatggatgatgccaaataacatttgcatcttcaatgagccacgaccaatcaaagaggttccttgctacactctcttgagcacgaacactctgtcatgcaaattccctaatcaaatcatctatcttctttgtgggtaggtcttgtatcatacaagcatagttttaaattgcgatcccggtggtggtttctagttacattgtagtgagtcagaaaacttttatattccaagtaattgtaggaaaatatgaaaaatatgactgatgcgatcataattgtgattgtaattgttgcattgtgatgagttaatatattttgacattaggaccgc

SEQ ID NO: 16901 - DNA, 368 bp, Glycine max
acgcgtccgcccacgcgtccgcccgcccctccgctcgtcggagtacactcgccggaaaacactcctcggcgtctcttctcaaacaaaatttaaaaaccaaaaaaaactaatcctcgtggtcacagtgggtttgagtgaactaaaaggaacaaaggcaatacatagagggcaacgcgattttcattcttcacaactgctatttccttttacgacgtcgttatgggaatcaaggttatgcaattgtcgcaacccgttcttcctcattccccttcttcgtctcataccctagcttccgcaatcttgtccccttcttcgtcaaaatcgcgaaccctagtgtgtcgtctcgtgcaccgctcgagcctctttcc

SEQ ID NO: 16902 - DNA, 792 bp, Glycine max
gttttctttgtcgttttctgagttgcactggcatgtatcattggaattgctgtttgctgtggcctgccctgtatcattgcacttctttatgcagttacagaccaggaaggggcatcaaaggaagacattgagcagttgtcaaaatttaaattccgaagaattgaaagcaatgagaaacttaccggtactatacaaggacctgttggaggaataatgaccgaatgccaggctgattcacctattgaacatgctcttgctgaggaggatgcggaatgttgcatctgcctttcttcttatgatgatggggttgagctaagagaacttccttgcggtcaccattttcactgtgtctgtgtggataaatggctgtatattaatgctacatgccccctctgcaagtataacatcttaaaaagtagcaacctcagtcaagaggaagtgtagaagatcgatgtcaggaaagtttttggcgcccatgttgaggaatctgcacactttcgattcacagccatgttaatatactttgatacaggcctatacagttgctcctgctgccgtgtgctgttatcatgtaatgatagcttttttgattgtttgtagttattgtggcttcttactggttgtgcatatcagtgttgtccagtgcataccggctataattatctcaagaggcaatttggttgtcatttttattgtcctcatcattattgtatatggaaccattatgtctcgcctaagccactgtggaatggtttatcatgtctcagtatatgttacaaaaatgtttattcc

SEQ ID NO: 16903 - DNA, 726 bp, Glycine max
tagagagcgcaacccttaccgcaaagtgctgttcttggagccaaggatttgccgagaactattcttagtgatcacatagaacagcgattatttaaacggctaaagcaagaaagactagaaagggcaaggcttcaaggaaaaagttatgatgagattcctggggctgatgcgtcttgttgtaagagttgtgtcatctgttgacaaaaagttagaagtgaaaccgcggtttctggagatttttcaggaagagaattacccaacagaatttccatataaatcaaaggtagttttgctgcttcaaaggatagaaggtgtggaagtttgcctatttgagcatgtatgttcaagaatttggatctgaatgtcaatttcctaatcagacgccgcgtgtacctttcatatttggattctgtgaagtattttaggcctgaggttaaagcagtgacgggagaggctcttcggacttttgtttaccatgaaattctgattggatatcttgaatattgcatgaaacgtggttttacaagctgctatatctgggcttgtcctccattaaagggggaagattatattttatattgccatccagaaattcagaaaaccccaaaatccgataagctacgtgaatggtatctggccatgttaagaaaagctgcgaaggagaatattgtggtcgacctcaccaacttatacgatcatttctttgtatctactggtgaatgtagg

SEQ ID NO: 16904 - DNA, 432 bp, Glycine max
agatcctaatgaaacaaagcgtttagaagttgagaagatagcggaagtgaagaagggaagggatccattgcaattccatggcggcgtcgtggtcgtcgtcgtcttcaaactgaacgccggagagagtcaccgtggtcacttgccggagccagagagagtcaacagaacagaacaatctcatccctttcctctcaatccaattttcattcctttgctcaactgtgtgtagcaaggtcgtattttgttagaagatgaaacgcaagcgtgggcataagaaagggaaggcaaaaggcaccactaaccatggaagcagtagtgctaatgctaattctaaggaagaagaaacctctgggttggatgataaagatcactctggaatggaagttgacacaccttcttcgacggggacggatcagcagcataattacaatg

SEQ ID NO: 16905 - DNA, 938 bp, Glycine max
ctcctgaaactcaaccttgtgcagaaagcacttctgctcaacaggggtggagacaggttgctgatgcattatgcaaggttgtatctgcatctcctacgaaagcagctatggcagttgttcttcaggccgagaaggaattgcagccatggattgccaaagatgacaatctaggtcagaagttgtggagaatcaatcagcggattgtaaaattgataactgaactattgaggaatcatgataatttggaatcattagtaaattgtggcaagtgcatcagatttactactacgagccacagatggaatgctggtggatggagaagcttgcactttaccacagctgaagctattggaagcaacggcgaaagcggttcaaccagtgattgagttgggagaatctggacttggagtggcagatgggctttcaaacctgttaaagtgtcgcctaccagctacaatcagatgcctttctcatccaagtgcacatgtccgtgctctgagcagttcggttattcgtgacattttgcatactagttcaattggatcgagtcctaagccactgcaaaagaatggcatccatgatcagtacttaaattttgatgtcattgactggcgagctgacgtagaaaactgcttgacatgggaagctcacagccggctttcaaatggattgtctattgaatatcttaacacagctgcggatgacttaggctttgctatttctatctgaaatgaaatgagaccatatgtaatcatcttagtaatttatgtttaggaacttaaattaagcttttcatgacagatattatctcaagatttgtataaaaccttgatgtaatctatgtttaggaacttaaatggtttgcaaataagtaaaccttctcattctgctaaaaaaaaaaacacctaccaaatctacaccatcaagcaaaacataaa

SEQ ID NO: 16906 - DNA, 567 bp, Glycine max
cccacgcgtccgagaattcagaatggacgtgaaagaacgaccactgaaactttactgcatggcataccttgccgcgggtcacatgatccctctatgcgacatagcccagttcttcgcctcacgtggccaccatgtgaccatcatcaccaccccttccaacgccgaaatccttcaccagtccaaaaacttccgcgtccacaccttcgacttcccttccgaagaagtaggcctccctgacggcgtcgaaaacttatccgacgtcaccgacctcgaaaatgcctacagaatctacatcgccgccaccacactgctccgcgaacccatcgagagtttcgtggagcgggacccaccggactgcatagttgccgattccctatactgctgggtggaagacttggcaaaaaagtccgcataccgtggcttgttttcaacggattctccctcttctccatttgcgccatggagtccgtcaaaaagcaccgcatcggcgatggtcccttcgtcattccagatttccccgaccacgtcaccatcaaatcaaccccacccaaggacatgcgagaattc

SEQ ID NO: 16907 - DNA, 397 bp, Glycine max
  unsure (1)..(397): unsure at all n locations
gttcgacagcccaatgagctaagtgttttctacaagtttttgtatatctcacttggccttgctgggtttcttttggtcatgatcatagttcagaagcaagtgcatttctcacaaagtgagtatggtgtcagtgctggggttgtgctcttcttactatttcttcctcttgctgttgtgtttgttgaacaatataagatcagagagagtcaaaagctagcattcattgacccctccccggtcaagatagtagctgaaggagagtctgcanatggtaatacctctaacacgccaatttcaacagagattgaagaaactagatgggggcaaaaagtgttaagtccaccgnctcgaggtgaggactatactatacttcagccctattcagcttaaatatgat

SEQ ID NO: 16908 - DNA, 372 bp, Glycine max
ctagaattccaaatgggtattgataattttcccattaggtagggttttgctttctgagtaggctagattttggagttggggtttgggggatacatagacatgggttcaaaagatgagaatagtaaagcatggaaatggggtttgggtttggtatacatatttgccgtggcaacaatttggatagctgctagctttgtagtgcagtctgttgtagaagctggtgtgtcaccattccttgttacttacatctgcaattctttatttgtggtgttgattccaattgttgagattgggaggtatttggaggattcttatgggagtttatggttttggaggagtgagaagagtaatccacattcgaaaggaagggta

SEQ ID NO: 16909 - DNA, 486 bp, Glycine max
tgctcttatttacccatcaagcctaaggcacttcacttgttctgcattgaccatagcttctctctttctttcctaattaatccttccatgcaaacaaacgctctctctcatactcatagtgacacacacagcttagtttcgttgtattgtatgtgtcctttctcaattctcatcatatatctgttcaagtaccattatctttctatgttgagtgtcggcattttttgagtttctcactaccacttgttctttttttctgatacatgcatatatatacgtccagatatacagtctattcactcaaattcagtgtcacaagttctcaagattgttgtccggcactatctgcagcaccattcaattcttcactctatattggatacacacacttctagtatataccaagtgattgatgatgttgtcagcaaaatctgaatcggatatcacaagcttagctccatcttcaccttcaaggtcaccaaagcg

SEQ ID NO: 16910 - DNA, 762 bp, Glycine max
ctgtttttctctgttccatctttgagttgaaatcgatattatcagctatttctctccgtgttactcagcaacacaacttttgttttactcttcccctttgattgaattgtatcatcaaagtttctgtgcttatcaccttgagagtttcatagacgctgtatcgctatatggatgctgagtactctttcttctgtttctgatacgtgtgttttgggtctcttcaaattttggttttctctgtcactttggcttatccctcgggcttcttggattcttacccttcaggaagcttttccttgtctttcccttttttcacctaattgattttttttaaggtagaaattccgaattacaatatttcatttctaggatacaattgttttgggcaatgtccttcaatttaatatttttcaatccactcttattctccttgctttggttacctggatattcctaactaggctaattttatgtttcatgtgttgctcttaatttaacaccttttaatttatatttacttggtagaagaagaaaaaaaaaaggaaagaaatattttgttaccagagaaagaaaaaaaaaatccatttttgtcttccttaagttatccttcaccatgaaatttctcactttcccggtggatttgtgatatctgttcttttacttgagggtttctgtgtttgcgggtcacaagaaaaaaaaaatgaaggaaaagttggattccccagttacagtgcttgaggactatttcaggagctcagattc

SEQ ID NO: 16911 - DNA, 668 bp, Glycine max
ttgataggaggcccatacataaatgcaaagatgcaaaaaaaagaaaaaaatttgaaagggagaaataaataaaggtagcgaaaagaaggaacataaatacaaacgcatctttgttctgctgtctgatgcatgcacgtctggtcctttgatcatgaccactgagggtctcttcacatgtcgtttttgagccccatcgtgattctattctcagacacaggagagcggaggccgagaaagccggggaaaaaagtcacctttctttctttttcattttccattttcatttaaaacattaaaaaaaatctattttttctatatctgtttctccacttcttttctcagtggtttggattggaggtcacagagggagagagaggtttctactttctatacatggaaacttgtttccaatttgcagtttttcccttttcttcttctaagccttcacagaatttataggtgttgcctcttcaaactgatggcagtgtttggttggcaaccttgtcctttcaggaaacataaaaataagctatggtgagtgagtgaatgagtgagtgagagaaaaacaaaaaacaagtggtctaatggcagattcagaaaagtacaacaagaaaccctcttcatcatctttcttcagttctccgaggttgttcaccaatttcactccg

SEQ ID NO: 16912 - DNA, 403 bp, Glycine max
cgtggaggtcacagagggtgtgagaggcttctactttctatacatggaaacttgtttccaattagcagtttttccctttttcttcttctaagccttcacagaatttttaggttggtgattttggtgtttgccgcttcaaaactgatggcagtgtttggttggcaaccttgtcctttcaggtgattcctatgatctttcagtcacacacaaacacaaacatcaacactgttatgagcactagttcaacaacttaaggttctcaatttgtggcatattctgtgtcttggtttcaggaaacataaaagtaagctatggtgagtgagtcagtgagtgagtgagtcagtgagagaaaccaaaaaacaatggcagattcagaaaagtacaacaagaaaccctcttcatc

SEQ ID NO: 16913 - DNA, 629 bp, Glycine max
cccacgcgtccggtttcacacttccaaaatcgtaacctcaaaaaaaaaaaaaccgaaccaactctgttcctatttccacactctttagtcttttgattgataatgtcggcgtcgacgggaagcagcaaaatccggcgcatagttcgggtgaggcaaatgcttctccggtggcggaggaaggcagcggcggacgttccggctggacacgtggcggtgtgcgtggggcccagcaggaggaggttcatcgttcgcgccacgcatctgaaccacccgattttcaagatgcttcttgtgaaggccgaagaggaatacggtttctgcaaccacggtcctctcgctataccctgcgacgagtcactcttcgaagagcttcttcgggtcgtgtcccgacccgtacccgtacccggattctccacgctcgaggatttccagagacgctgccacctggatgtttccactggctttgacgtcgtaggcgaatcgtggcacgttgcttcgtgacgagccaatttgctgaaaatacatttaatcgttaatcactaactacttttttttgggtttgtattttttaccctaattattgatttccggggtgttttttttttagttattagggaaatgatgaaaag

SEQ ID NO: 16914 - DNA, 329 bp, Glycine max
aaaaaaaaaccgaacccactctattgagttgagtcttttgataatgtcgtcggcgtcgacgggaagcagcagcagcagcaaaatccggcgcattgtgcgcgtgcggcaaatgcttctccggtggcggaggaaggtggcggtggacgttccggcgggacacgtggcagtgtgcgtggggcccagcaggaggaggttcatcgtgcgcgcgacgcacctgaaccacccgattttcaagatgcttcttgtgaaggccgaagaggaatacggtttctgcaaccacggtcctctcgctattccctgcgacgagtctctcttcgaacaccttcttc

SEQ ID NO: 16915 - DNA, 435 bp, Glycine max
actcgagccgattcggctcgagcttaagggaaaatcatacacgtaaacggagggtgtttaccgacgaacttgaggcaaaaggtacctattgatgttgccagaggatatactcttggatgagaattacaaggctcttgttgctgattttggtctctcaacgcttgttggaaaggatgtgagtcaggttatgacaacaatgagagggacaagagggtacttggctcctgagtggcttttggaaagaggggtgtcagaaaaaactgatgtttacagctatgggatggttctgttggagatcattggagggagaaggaatgtgtcgagggtagaggatccgagggacaggaccaagacaaagtgggagttctttcccaagattgtgaatgagaaagtgaaggaagggaaattcatggagattgtggatcgtaggttggt

SEQ ID NO: 16916 - DNA, 454 bp, Glycine max
ctcgagccgcttgtcggagtcaggcgctctatcccgtgcagctcacgttgcttctgatatgcgtactcacagggataggcagtggacaaagcattgacatgattaaacactatcttttagatatgtctgcttctgctaaatagcttttgaaacttcagttagcaatattattatacttctacaatacataaatcctgtttggataattgtttggataaacacttatagaagtaaggtaaaatgaattgagcttctctcgtaagttaaaatcaacttatgcacttaacttttataaaagatttttcatttaacttttctgaaggccgaagtacataagttgattttagtttatgagaaaatcacatttcattctactttcttgtaagtatttatagagaaatttatcttaacaggatcatagtgcatgtacttatgaaataatctaatgtatgcc

SEQ ID NO: 16917 - DNA, 553 bp, Glycine max
cccacgcgtccgcgtaacttttgctcattgctgactttctggcttctgggttttctccctttggtcggttgagctaacagtggcattatcatcatcacaattaggttcaaaaaccaccactctgtgtgtttttttccttgtgtttctctcccatgtgtctccttctttgctgagaattgttgtggcagacaagggagtagcttcttctttctaagttgacatatgcacatggcttctcttggggatataggacttgcagcagcaataaacatccttagtgcatttgccttcttactggcttttgccatacttcgaattcaacctataaacgatagggtgtattttccaaaatggtatttgaagggtttaaggagcagtccattgcaagcagggatatttgtgagcaagtttgtcaatttggacttcaagtcatatataagggttcttgagctggatgcctgcagcattgcaaatgccagaacctgaactaattgaccatgcaggcttggactctgctgtgtacttgaggatctacttacttgggctgaaaata

SEQ ID NO: 16918 - DNA, 489 bp, Glycine max
  unsure (1)..(489): unsure at all n locations
gcgtccggggcagcactcagtctttacttcttccagcctaaagtccccccttcttccaattcaccaacgaacgcagagctcctgccccttcaccctgaaatcccttttgtatgtgatcataggacccttcttgtccctcgtaatatgtctctttgtcaacctcgatgcttgccgtgattgcttgggtctattcttggtgggtcaccgccgccgtgcctcttccggtgacctccatgtgtcccaagttcaacagagcggtggttctgacggtggtgtacgccacccccattggagggatcagcacttcacaatttgctctgatacaatttttagaatgtaagtttaggcctaattcaacccaaaagctagctctaagtattctaacttggctttacttttagcggatgtgacttgggtttttctcaacatggttcttcttcggttntcctgttgccattctcttcctcttctcttttggtgcatcgtctg

SEQ ID NO: 16919 - DNA, 598 bp, Glycine max
gtttattaccaataatagcggagaataaaaaatatcaaggacaggataaactccctgtcattgtttgggtgataactcaggcttctcaaggagatctagttatggggttgtacttgtgggtatatcttctattgccaatgctgagtgtgaagtctggttgtaatccacagtcaagagacttgatattacagttggttgagagaattatcacatctcctaaagctcgttctatcttgctaaatggggctgtcagaaggggggagcgtgttgtgcccccatgggcacttgattctctattgagagttactttccctcttccttcagcccgggtcaaggccactgaaagatttgaagctgtttatccaacattaagagaagttgcccttgccagttcccctggaagcaaagcaataaagcatcttgcacaacagatactaagctttgcaattaaagctgcaggagaagctaattctgacctatcaaaggaggcaagtgacatttttatttggtgtttgactcagaaccctgaatgttacaagcaatgggattttctttatatggataaccttgaagcaaagtgttgtgtattgagaaaact

SEQ ID NO: 16920 - DNA, 377 bp, Glycine max
aactctcgtcacctcatttcatttcaccacctatctgaatttacaaggaactcaactaacatggaagcatgttttctctcccacaattccttcaccaaaaccactgatcaactcatccccacaatcagaaacgggtctctaccacaccacaaacgatcttctcaacatttccactatagaaaagctagaattccacttcccatatcatgctgccacatgtcatcaccatcaccatttgatgatgatgacaaatctaccctaagtggtgattggcgatctttccgtgcaaaattggtggcaggagaacaattaacaaggcatgttgaggaggtgaatgatctagacactgttggggatcattcttcactgatcaccat

SEQ ID NO: 16921 - DNA, 1020 bp, Glycine max
tgaatttacaaggaactcaactaacatggaagcatgctttctctcccacaattcctttaccaaaaccaccgatcaactcatccccacaataagaaacgggtctctaccacaccataagcgatcttctcaacatcttcagtgtagaaaagctagaattccacttcccatatcatattcctggacctcctacttcaaaaggagaaactatagagaacaacaagaaaattggtctttgggcagtgaagttaccttcagcagattcaattgtagttcgacgaacgctagggattctaacagaaaacctccatggtctccctgggctgaacgagagtgctgagacagttgagaaaagggaagccttctggtcatctgtgaagccagctcattttggtgtgaaaataggctcaaaatctttcttgggcattctccgaatcatcatggttggagttttcattggtctttttggaagtattggttttggaaggcagcttcttttgaaatttcctgaaatattcagccttggttggttcaggaagaatggcccctctgaagaggaggtggaaagtgcttccttcaagatgtggtttgttggacatggttatagtgatgggagcattgcttcacagggaaacacaaaacctgacatggagattgtaacaagggttatgggacctgaagttggatatctgaccacaccaataattcttattcagtgtgctcttgttcttctctgccaacgtgacaaccttccaaaaggaggagtttaccctcctgggatcatctttggtccaactgatctccaggaaagacttcaacaaaatggaatatcctttgatgtcatctcaaaaagcaccatttcttgacttttgcagtttagtagaaacaagtactgttcataaaactgaattattataaatgagtggggatagactatttcttttgtttaactaagttttataaggatatactacgatttggcttgatatgcgtttggatcaatgaatcatatttttttctgct

SEQ ID NO: 16922 - DNA, 466 bp, Glycine max
cggatctcggtgttgccaatgcgcaccaggtgcagcatctcagaaggtcacgcccaagaaaggctaccaagaaaacctaggcctcagattcctggacctcctacttcaaaaggagaaactatagagaacaacaagaaaattggtctttgggcagtgaagttaccttcagcagattcaattgtagttcgacgaacgctagggattctaacagaaaacctccatggtctccctgggctgaacgagagtgctgagacagttgagaaaagggaagccttctggtcatctgtgaagccagctcattttggtgtgaaaataggctcaaaatctttcttgggcattctccgaatcatcatggttggagttttcattggtctttatggaagtattggttttggaaagcagcttcttttgaaatttcctgaaatattcagccttggctggttcatgaagaatggcccctctgaag

SEQ ID NO: 16923 - DNA, 471 bp, Glycine max
tggaccgacccgtccgacagcataagccaaattttgagtaaactagtgtgcacactatcccatgcctagtgggggtggggatcctctcgttgttgggggagtaattggggatgtattggatccttttgaatattctattcctatgagggttacctacaataacagagatgtcagcaatggatgtgaattcaaaccctcacaagttgtcaaccaaccaagggtaaatatcggtggtgatgacctcaggaacttctatactttgattgcggttgatcccgatgcacctagcccaagtgaccccaatttgagagaatacctccattggttggtgactgatatcccagcaacaacaggggctagtttcggtacgtatatgatgtttttccatttttaaaacctataattgtctgtgcttaaagttaaacctattcaaaccattatttttaatttaaaattagtgagttttattta

SEQ ID NO: 16924 - DNA, 872 bp, Glycine max
ggaagcatgacacccagttcttttgaagctgcacttcgtcagaaggagggtgaacttgcttcatacatgtcacgcttggcatcactggaatctattcgcgattctcttgctgatgagttggtcaaaatgacagaacagtgtgagaagttgcgtggggaggctgctgtattacctggcttacgatcagagctagaagcactaaggaggaggcactctgctgctttggaattgatgggcgaacgtgatgaagagctggaggaacttcgtgcggatattgtagacttgaaggaaatgtacagagaacaagtgaacttgctcgttaataagatccagacaatgggtccatcaatgggtagcgactagtttgggcgaagaaagtgctggcttggggaacggaaagtttagtgttcaataactatttgagaagaccatgaccatgaccatgaccatgtccatgtctctgggctgcgtgtgatgtacattggcacagtaataatatattggagaatagtgccatcagcctctgaagaatgattcgttcaggtttccatcggcagatatatattttgtttgcctgggcagcagatacggatagtctcccttgttaagggaatgttgtatagtcagtcttttaaaacgtattcatgcttggagagatccagagaatattctggctgagtctgttgacaatacagggttttcttttcctccccaagtgtgtgtaacgtaaaacgagttttttgtttggggctattttttttttttattattgttgaatgaattttatatgggttttatttaaaactttggatttattattgagaattatataaaatttacctcatgataaattaatattctgattttatccg

SEQ ID NO: 16925 - DNA, 913 bp, Glycine max
gcaaaacttcagggatctgaattaaaatatggtccatatgaaaatcttcctccattttcatacctgccaagagttgttcactttgagaataaccaacccttcgctgttgctaaagagttggtgcgagagatcgaaatttcccattggggcaatatacagatcacagagcattacagtattatccatgctggtgctcagagcaaaggagaattttctaggcttgactatcagaccaggcaatttttaagaggtgcatcagcctttaggcgtcttgttgccaagctaccaccaagagctcattctgtgtactacagggatgaaattggcaacatttccacttctagtttatggggtgactcaaaaaagacagaactggagattgaacctaggtaccctatgtttggtggctggaaaactgcctttaccattggatatggcttgccacttggggacttcttatttggatcggatggaaagcgcttccttaacatctcttttggtgcccctattaatgagttggtcattgacacactatttgtgaaggttgttttgccagagggttctaaagatatttcagtgtctgttccatttcctgtgaaacaatcggaggagacaaagctttcccacttggatattgttggtagacctgttgttgtgctggagaagaacaatgttgtacctgagcataatgagcattttcaggtctactataagttcaacagtctttctatgctcagggagcctttgatgttgatttctggctttttatttctgtttgttgcgtgcattgtctacacgcatgcagatatatcaatctccaaatcttctgcatcttatttggcaaagctccagtgggacgaggtgcaagcaactattcagcaggtccatggtatcattggccgctgcttaactg

SEQ ID NO: 16926 - DNA, 1004 bp, Glycine max
gatctttagaagtagactgtttactctgtattgttggaatgaagttatggatggaatgttcacagttcacttgctgcagtcatgttcctagaggaaataaatggaaaacttcgtaaattgattttgtactttaaatcattatacagtatcataactaacatctgttatgcaggacggacatccacctttgggttggcaagatactgcagcatatcttgttttacctattcttcttgtcgtttctcaatacgtttcaatggaaatcatgaaaccacctcagacagatccttctcaaaagaatcaacttcttattttaaagtttcttccactcatgattggctacttctcattatctgtcccatctggactaacaatttactggtttataaacaatgtcctgagcacagctcaacaagtatggttgcgaaaattgggaggtgcaaagcctgttgtgaatgaaaatgctggtgggattattactgctggacgcgctaaaagatcagatttgcagccagtaaggaatggtgaaaggtttaagcagttaaaagaagaggacaagaagaaaaaggtaagcaaggcactgccagtggaagaagttcagcccctggcttctgtgtctgcttctgatgatggctcggatacagaaagtgacaataagggacaggaagatgcagaagaagcatatgcttctaaagttggcgaagaggttcaaaattattctagggaaagaagaagcaagcgttcgaagcggaagcgtgctgtataaaggaccgcatacaattagtttatagtgagttttgtatatctcaagagattatagcatttttgggttggctattaattaaatatatgtaatttaattcactaaaatatctttgttacgtttaagttccacatgttagctaaagcaatttgtcttgtgacgtgtttaattttattaagatttatccccccttgaaactaggagtataaaaacttatactccttctgatccaaaataatac

SEQ ID NO: 16927 - DNA, 464 bp, Glycine max
gacgcgtccgcccacgcgtccggacgtcaaggctatatcggcaggctggggttaacccattggcaggttgtgtaccaactctggctacaattccagtctggattggtctctaccaagctttatcaaatgtggcaaatgagggactgctaaccgaaggtttcctttggatcccctctttgggtggtcctactaccattgctgctagacaaagtggagctggaatctcttggctttttccatttgtggacgggcatccacctttgggttggcaagatactgcagcatatcttgttttacctattcttcttgtcgtttctcaatacgtttcaatggaaatcatgaaaccacctcagacagatccttctcaaaagaatcaacttcttattttaaagtttcttccactcatgattggctacttctcactatctgtcccatcaggactaacaatttactggtttataaac

SEQ ID NO: 16928 - DNA, 699 bp, Glycine max
gggatgaggatgataatggggagactggggatgatgagatgggggtcgaagatgatggggagtttgaagatgacgatgaagaagaagactatggtgctgggtatcttgttcagccagttggacagtctgatgctctcaatgctggaggagctgatgtggatggtggaaatgatgacgatggtgaagaggaggatgaagttgatgacgacgacgatgatcaggtgttgcctcctcctgactcttcccacaagaggaagagggatgatgaagaggacgtggactacgatgacgatgtggtagcattcacgaagtcacccaagaagcatcattgacttctattatatatatcaatgttcttgttctgtttcaggcttccatgtgttggaagcagggaaacctcagttttagatagaagaacgattgattaggttttaggaatttagctctctcatgaacagaggacatattaggggaaaaaaaaaagaattgtatgttgggtggaaatgtgtttagttcaaaaagtcgttagtgttttttccctcttgcctttcacatagagccgttactctattaaatattcaaatggcagttatcagaggtttaccgctcggtcatgtgctcgatgctggtgttgttggcttgtaaaggaactggctggtgcttggagggaaagggtgggaaccttttcaattttttttt

SEQ ID NO: 16929 - DNA, 421 bp, Glycine max
atgatgaggacgacgatgaggaagaagaggtggataacgacgagggtgattttgtggagccggagggtgcccgggggttgcctcctcctgaatcttcccaccttaagaggaagagggatgatgatgaagaggacgaggacagtgacaatgatgatgatgaagatgtggtagcattcacgaagtcacccaagaagcatcattgacgacgtgttctaatatatcatgttgttgttctgtttcacgcttccatgtgttggaagcagggaaacctcctcagtttagatagaagaacgatggttagtttttaggaatttagctctctcatgaacagaggacatattagggaaaaaaaagaattgtatgttgggtggaaatatgtttagttcaaaaagtcgttagtgttttttcccccctgcctttc

SEQ ID NO: 16930 - DNA, 673 bp, Glycine max
ccctcgcgtccgacaaaatctagcagaagcaaattcacttctaagatacacatattaagttcaccagagagagagagagacattaatcaagatgggtacgtggttcacaaatgcaaggccgtatctgctgttagtggcggttcaatttggctcagcaggcatgttcatatttgcgatggatgctataaagaagggtatgagccattacgtgttcatcgtctatcgtaatgccatcgcctctgtatctcttgctcccttcgcattcgttttagaaaggaaaattaggcccaagatgactttccgggtattttcagagattatggcactggctttcttcgaaataatactggaccagtgcttcgccctcttgggcatgaaattcacgtcggcatctttcctatctgctgttatgaactccgctccctctgttacttttgtgatggctgtcattctaagaatggagcacatgaagattaaggaggtggcatgtcaagccaaagtgattggcacagtaaaacatttggaggcaccttgcttatggcactgtacaaaggacccgttcttagttttatgcgatcttcaactagccatcctagccaacctgagaatgtggccacagaaactggtaaccattgggtcatagggacattgttcctcctcattggttgtgctg

SEQ ID NO: 16931 - DNA, 414 bp, Glycine max
cagataaacacaaaatcaagcacacaagcaaattcacttctctgttctgacacacatattaagttcccgagaaagatctagagagtaattaagatgggtacgtggttcacaaatgcaaggccgtatctgctgttagtggcagttcaatttgggtctgctggcatgttcatatttgcgatggatgctataaagaagggtatgagccattacgtgttcatcgtctatcgtaatgccatcgcctctgtatctcttgctcccttcgcatttgttcttgaaaggaaagttaggcccaagatgactttccgggtattttcagagattatggcactggctttcttcgaaataatactggaccagtgcttcgccctcttgggcatgaaattcacgtcggcatctttcctatctgctgttatg

SEQ ID NO: 16932 - DNA, 327 bp, Glycine max
  unsure (1)..(327): unsure at all n locations
acgcgtntcgccacgcgtncgaataatcaaaaacaaacacaaccaaacccagagcccattcgatttggatccgatgggtgatatagtgaaacaaatattggcgaagcgatccagctggcggaccaagtaaccaaagccgccgacgaagccagctcctcaagcaggaatgcggcgagctgaaggcgaagacggagaagctggcggcgctgctgcgtcaggcggctcgtgcgagttccgatctctacgagcgtcccacgcgccgcatcatcgacgaaacagaacacgtcctcgactaggccctcctctgtgccctcaagtgccgcggca

SEQ ID NO: 16933 - DNA, 408 bp, Glycine max
cgttactaacactccttccatttcatcagccaaataaaaacaaaaacaaaggctccttccatttcgccacactctctctctcttacccaacaaatgtaatttaactctattttactttcgtcattttaaaccactgcttcaaatctattttactctctctccctctaatctgcgtctcttttcgtttcacgggccacattgctgcgttctctggtgtctttggcctttcaaggaaaaatatggcagaggcaaaaccagacacaccgttgatgccaccatcatcgcggaaccttccagatttcaagaagtccgtgaaattgaaatatgtgaagcttggttatcattacctcataacacatggcatgtacctctttctttcccctctggtggtgctcattgctgcacaag

SEQ ID NO: 16934 - DNA, 790 bp, Glycine max
ggtctcactaagggatgaagcatataagcagtctcaagcacattcaagtcttcaaggctcaagcacaaaaatggtaaccattgtgggttcttacaatgtcactcctaatcaaccaactccaaaggatccttcatggctatccgatagtgaccaaatcggtgtcctaggtcatgtagccattgtctacatatacgaagcaaatcccaacagcaacaccattgagagattgaggaactctcttagcaagcttttggtgtactactatccattcgctggcagattcagcttgacaaaaagtggtcgcatagaagtggattgtaacgcaaagggagtgacattgattgaagctaaaacctcacacacacttgatgattatggagacttttcaccttcaaagttgaccgaggaacttgttccagatattgattatactccacccatagaggagattcccctattactacttcaattcacaaggttccattgtggtaaaggccttgccattggagttgttatctctcaccctatgactgatgcaaccggcctcactcagttcatgaatagatgggcaaagctggctcgaggagaagaactaaaccctaatgaaattccttttctcgatcgaacactactcaaatttccacaccagccatcatcccaacgcgttgatcaaccagagttgaagcctgtactacaattagagcaaaagaagaatgcaagatggagcggtgcattgttaaaactcaagtcaagccaagtggagaggctaaagaagaaggctaatgatgaa

SEQ ID NO: 16935 - DNA, 794 bp, Glycine max
ctcgagccgcaaatttcgaaatgaacttccagatccaagtgctcaacctaagcttatgtccatcaagaaagataaagatcaatatgcaaaatatacaatcacgtctctggagaaaatgtacaaacccaagctttttgtggagccagatctagggatacctctggacctgcttgatctcagtgtttataatcctcccagtgtcagaccaccccttgctccagaagatgaagaattgttgcgagatgatgaagctgctactcctattaaaaaagacggcataaaaagaaaagagaggcctactgataaaggtgttgcatggcttgtcaaaacacaatatatatctcctctaagcatggagtcaacaaagcagtctttaactgagaaacaagctaaggagctgagagagatgaaaggaggtcgtggcattttggacaatctcaacagtagggaaagacaaatcagggaaattgaagcatcatttgaagcagctaagtctgatcctgttcatgcaaccaacaaagatttgtatcctgttgaggttatgccattgctgcctgattttgataggtatgatgatcagtttgttgttgctgcatttgataatgctcccacagctgattcagaaatgcatgctaagatggacaaatctgttcgtgatgcctttgaatcaaaggcagttatgaaaagttacgttgcaacgggttcggatcctgctaaccctgagaagtttttggcttatatggccccagcaccaggagagctgtcaaaggatatatatgatgaaaatgaagatg

SEQ ID NO: 16936 - DNA, 1062 bp, Glycine max
gattgatatcattatctcttctatgtggactaaagataactaaactcccagatatttgttcacttcactttctcagtgcagttgttgcctaatgcaatggaggaagaagccaaggtggttttgttgggtgcacggttcagtatgtttgagatgagagttaagatagctttggcagagaaaggaatcaaatatgagtacatggaacaagatctcaccaacaagagtactttgcttcaagaaatgaacccaattcacaagaagattccagttctcatacatcatggaagacctatctgtgagtccctcataattgttgagtatattgatatggtttgggacaacaattgtcctttgcttccctctgatccctaccacaaagctcaagccaggttctgggctgattttgtagatcagaaggtagatttcataatttgagcatacgaattattatatataacatgtatgttctagaaagttattagtaacaaactaacaacttatgtgctaagaaatgcaggtgtatcatgcttctaagagagtttggatttcaaagggagatgagaaagaggtggcaaaaaaggacttcctagagagcttaaagcaattggaggagtttcttggaaacaagccttattttgggggtgacacatttgggtttgttgatgttgctcttattcctttctattgctggttttatacttatgagacttttggaaacttcaaagtggagggagagtatccaaaacttatctcctgggccaagagatgcatgcagaaggaaagtgtatctgaaactcttgcaaatgagagggaggtttatgaggctgttttggattataaaaaccaatttatattgaactaagggaaccctgtgaagtgtttgttaaagctgtgagagtttgcctgtgagatagacctagtactacagattctgttagttatttttatattagttagctattgtgatcccaataaaatctcaagtagttgaggttattattacccaatttccaaattattataaatttccaattggctctaagtgtatgaaaaaaaaaaaaa

SEQ ID NO: 16937 - DNA, 682 bp, Glycine max
acgaggttgcctaatgcaatggaggaagaagccaaggtggttttgttgggtgcacggttcagtatgtttgagatgagagtgaagatagctttggcagagaaaggaatcaaatatgagtacatggaacaagatctcaccaacaagagtactttgcttcaagaaatgaacccaattcacaagaagattccagttctcatacatcatggaagacctatctgtgagtccctcataattgttgagtatattgatatggtttgggacaacaattgtcctttgcttccctctgatccctaccacaaagctcaagccaggttctgggctgattttgtagatcagaaggtgtatcatgcttctaagagagtttggatttcaaagggagatgagaaagaggtggcaaaaaaggacttcctagagagcttaaagcaattggaggagtttcttggagacaagccttattttgggggtgacacatttgggtttgttgatgttgctcttattcctttctattgctggttttatacttatgagacttttggaaacttcaaagtggagggagagtatccaaaacttatctcctgggccaagagatgcatgcagaatgaaagtgtatctgaaactcttgcagatgagagggaggtttatgaagctggtttggattataaaaacaaattttattgaacta

SEQ ID NO: 16938 - DNA, 1132 bp, Glycine max
gcaaaaacatggtggttttaaagtccacttctctcacttgccacttcttcaacctctcttcctcctcctccaaattcacctccccacaacactctctccgccaccaccaccaccaccaccaccaccatgctcaccccaccaccacgagactcacttcaagagttgcacagttcactgttaaagcctacatggagaaccccaacacgttaggtagtttcgccaacagggtcattggtgcactccccgtggtgggactcattgccaggattctcagtgatgaaggtggcgttggagatgacctcgtggattttgctgagttcagaaggcgcgttggaaagaagtgctccgaaactgattccactgccttttatgagttccaagaccgacgaggaaaggcaggggatcctctctatgttctgttatgctgttggctagcagccattggtgcaggtcttctcaaaaccgaggatattctggaaggggtggctcggctccggatctccaatgacattgaatttgaggagcagagtttcatggctttgatgaatgagtcaaaggagagacgggcaaggcaaaacgctgatcctcctgctgtcccaatggagattcgagctgggaaggctcttgatgctatctatgtgtgttgctttggaaaggactccatagaggaagaagacaagagactgttgactgcaatgcttggcgctgttttcgcatcagttcaacgcgaagagatccggcgccttgtcaaagacaaggcagagaaagtagcagcaggagttgatgatgaatatgtttcagaactcaagcctctatcaaaagaagctgtggaactacaaatgaaagaccttcagttccttcaacaaaatagtgagacttaactaggtgaagcctgtgatttccactacacagtgatgcattgaatgaaattatattttgtgaactaagccgatttagcctttgggggctactcaaagaaaaaagacagtcatcatagatcacactattatttttcagatacatgttgaaatgtggggtcatgacttttctgaaaatgcagaaatttcatgtaacttatgttagcattataaatggacaagtaatgcatgtctccaatgccattttattattt

SEQ ID NO: 16939 - DNA, 348 bp, Glycine max
cagcaagtggataacatatataaaggagaggccaagaaccacaaactcaaccaccttcactcgcaaaacatggtggttttaaagtccacttcaccactctcatctctcacttcccacttctttaacctttcttcctcctcctcctcctcctccaaattcacctccccacactctctccgccgccgccacttccaccatgtccactccacttcaagagttgcgcaattcactatcagagcctacatggagaaccccaacacattaggcagtttcgccaacagggtcattggtgcactccccgtggtgggactcattgccaggatcctgagtgatgaaggtggcgttgga

SEQ ID NO: 16940 - DNA, 484 bp, Glycine max
cccacgcttccgcaatttttaacttaactttcacacactttctctctctctctttctttctcatgttctgcataaccatataacacccgcgtgaacgttcactctttttattgttttctttcttcgttcttgttgtggaacaaataaccaaaggattgaaccttcgaagagcaccatggaccctgacgtcatcgagattcctcccccaattcaccaccctccaagattccgcgagcagaacaaggtcattttgcatgatgtgattgacattgatgacgactctgaggatgtagtgataattggtgaaaaagttaataatagtaacaaagggaagacaattgacgccgttcatgatgatcatcaagttgtgaaaacggctgattatacttactctctgcctggtgtggaaaattttggatcagttagtgggattgcatcttctaacaattttccttcagtgtcaaataatatgatcaacattgat

SEQ ID NO: 16941 - DNA, 745 bp, Glycine max
tgccgaagatcattgttggcctcgcttctctctctctgcgatgcattcatttcttcgttcttctccaccatttaatacatattattatactacaaaaacataacctccagaacacatttatatattcccttgttgcatatatactttgttgttgttgttgttgttgttcttcttgtaaatggcgaatgcatctgggttcttcagcccttcggttccccacttcaaagtgagggttaagcctctcaccactgccattggattctccgccaaagtcgtttgcgttggaaacatcgaaggagctgaaaaacatgcttccaccgtttccccttcttcccaatctccaatacccaggcttgtcagcaaagggtgcaagttagttggatgtggctctgctgtgccagctcttcagatttccaatgacgacctttcgaaaatggttgatactaatgatgaatggatatctgttcgcaccggaattcgtagacgacgagttctttcaggcaaagataacttgacaagtttagcagcagaggcagctaggaaagctcttgagatggcaaaggtagaccctgatgatcttgacctaatattgatgtgcacatctacaccagaggatctttttggtagtgctccacagattcaaaaacagcttggctgcaaaacaaatccattgtcttatgacattacagctgcatgtagtggatttgtgttgggtttaatatcagctgcttgccacattagggga

SEQ ID NO: 16942 - DNA, 366 bp, Glycine max
cacaaatgaagatgctgcaggagagtcctcaactcagtcccaagtcccaaatgatgctactgtgagcagcaattgggactcaactcactttatcttcctcatcccaaaatacttggcccattctagtttttggccctgtgcgactcttgattttgaaagggtttttttggaggggatggtaggataggttgattcctttctacggtgactgagatcgattttggtagcaattgaatcaaatagggaaataaataacaattctttggaattattatggcctaaaaagataaagaatattaacgagaactaatttttaataaataaaaattataattttaaaaaaattataatttttatttttaaaat

SEQ ID NO: 16943 - DNA, 447 bp, Glycine max
tttgtttgtcacacactgagactcagaagaaacacacacttcctctctcttcctctctctcttcggagctcaatttggccgtcaatggcggcctccgaggctctcaacggcacaaccaccacctccatcaggcacgcgttcggcaacgtcctcgcgttcttcatacttctcatgatcggcgttctcgccttctcgatccgtctcttctccgttataaagtatgagagtgttattcacgagtttgatccttatttcaactatagagtcactcagtttttgacaaagaatgggatatatgatttctggaactggtttgatgatcgaacttggtatccccttggtcgtgtaattagggggactggttctggtgactgcagagccctatgggtctgatcatacaacctctagtgaactgtgggtatgactatatttgcttgtatgcactat

SEQ ID NO: 16944 - DNA, 787 bp, Glycine max
cggattcgtgggttggccgtcaatggcggccttcgaggctctcaacggcacaaccaccacctccatcaggcacgcgttcggcaacgtcctcgcgttcttcatacttctcatgatcggcgttctcgccttctcgatccgactcttctccgttataaagtatgagagtgttattcacgagtttgatccttatttcaactatagagtcactcagttgttgacaaagaatgggatatatgatttctggaactggtttgatgatcgaacttggtatcccctcggtcgtgtaattggtgggactgtctatcctgggttgaccttgacagcaggcaccttatggcgggtactgaattccctaaacatacctctctcagttgaaactgtttgtgtgtttactgcacctatattctcagcctttgcttcatgggcaacttatcttctgacaaaggaggttaagggtgcgggggctggcttgacagcagcagttcttctggctatggtcccttcgtatatatctcgatcagtggctggcagctacgacaacgaagctgttgctatatttgctttgatattcactttctacctctatattaagacgctcaatacagggtccctcttttatgccactttgaattccatagcatacttttacatggtttgctcatggggagggtacacttttatcattaatcttattccaatgcatgttctcttgtgcatagtaactggtcgctattcttctcgactgtacattgcatatgcacctcttgttgtattgggaacattattg

SEQ ID NO: 16945 - DNA, 673 bp, Glycine max
  unsure (1)..(673): unsure at all n locations
ttgcgtgtcgcgtgggcttgcctttgcacaacagacacgttctcctatcctagctacttactctctcttccttcaattcctcaactctctagctcttatggaaactcaacaccaacaacccaccatcaagtctaggttcagacgcatctgtgtctactgtggtagcagccctggcaaaaaccccagctaccagctcgctgctattcaactcggaaaacaactggtggagaggaacattgacttggtttatggaggaggaagcatagggttgatgggtctaatctcacaagttgtgtatgatggtggacgccacgtgttaggggtgattccaaagactcttaatgcaaaagagataactggagagagtgttggagaagtgagagctgtatcgggcatgcaccaacgcaaagccgaaatggcccgacaagccgatgcatttattgcactgccaggtggatatggcacccttgaagaactactggaaattatcacctgngctcaactaggtatccatgataaaccggtggngttgttgaacgtggatgggtactacaactcgctgctggcattcatggacaaagctgtggacgaaggtttcgtaacaccagctgcccgtcacattattgtttctgcccacactgcccaagatctcatgtgcanacttgangaatat

SEQ ID NO: 16946 - DNA, 322 bp, Glycine max
ctcgagccgtttgggttcaaagtgattgctgactccttatttcctagttccgtctttcctttgcacaacacagcgtgcaccgtcgcctatagctactctctcttccttcaattcaattcctcaactctctagctcttatggaaactcaacaccaacaacccaccatcaagtctaggttcagacgcatctgtgtctactgtggtagcagccctggcaaaaaccctagctatcagctcgctgctattcagctcggaattcaactggtggagaggaacattgacttggtttatggagggggaagcataaggttgatgggtctaat

SEQ ID NO: 16947 - DNA, 309 bp, Glycine max
catgaatgatatgaagatatctcgggatgttgtcttcaatgaagacatggtggttgatgctaataaaagagaaaaaccacatcagaactttcagccagaaggtttttacttaaattctgaagagcataaaggatttggagatcctttttctaacaatggaggtcttacacaggatatcttgtatggccttggggaacttgatttgtggttgctacccctgcgtttatctgatgaccacagttttgaggagttcatgtatttgcaaggaaatcagcctaatgactattacaaaaatgcattgaaatattt

SEQ ID NO: 16948 - DNA, 525 bp, Glycine max
gaaggagagagggttcaagaaaagccccgaacagtgtaaatgcgggtggaagaatctcgttaatcgctacaagggaaaagagacatctgacccagagcatggcaagcaatgtccattttttgaagaattgcatgcggtctttacccaaagggcacataatatgcaacgattacttcttgaatctgaaactcgttcagctcataccaagaaaggggtgaaaagatcaagtggagatcggtcatcagacgaactcgcaggggatgacaatgaggttgaatatgatactgaagaggaaaaaccttccagaagtaatacccgcaaaacgaaagttgacaaagttggagtggagaagtcttcaagggcaagcaatccatcaaattctgccagtaatagtactagtattcacgaaatgctcaaggaatttttccagcaccacttaagtatggagatgcattggagggagatgattgaaaggcgtgcttatgaaatacaaatgtttgaacagatgcttatcatgaaacttaa

SEQ ID NO: 16949 - DNA, 587 bp, Glycine max
gcggtggatcagtaccaccgatacgaagaagatatacaactgatgaaggacatgggaatggatgcctatagattttccatttcttggtctcggatttttcccaatggatatggccaaatcaatcaggcaggagttgatcattataataaactcatcaacgcgttactagccaaaggaattgaaccatatgtgactctctatcactgggacctgcctcaagccttggaaaacaagtacagtggatggctaaacgcttcaatcataatggactttgcaacttatgctgagacatgctttcagaaatttggggatagggtgaagcattggatcacattcaatgagccacatacatttgccacccaaggatatgatgttggtctacaagcgcctggtccatgctccattctccttcacctgttttgtagagcggggaactctgctactgaaccttacattgttgcacacaatgtcctactctctcatgcaacagtagcagatatttataggaaaaaatataagaaaatacagggaggatcactaggggtagcttttgatgtcatttggtatgagccactaacaaataccaa

SEQ ID NO: 16950 - DNA, 1534 bp, Glycine max
tggtaattcatgtaataaaattcaatttcagttactaagatgaaactaattggaaaactcagaactacaccgaaagtatttaaaaaagtgaatctaattgtcagcgtctaagatttgatggccttgtttctggggtgtcttagaaggtgatgtaactgtgcagggaaaaacagtatctctataatcgtgccaattgttgtcccaattgtcgttgtgattgtacttttcattgttggagtctgcttcctacgtaagagggcaagcaagaagtataacacttttgtccaggattcaattgtggatgatcttaccgatgtggagtccttgcaatttgatttggctacaattgaagctgccacgaatggattctcggatgagaacaagattggccaaggtggatttggggtggtttataagggtgtcctccctaacggacaggagatagctgtgaagaggttgtcagtaacctccttgcagggtgctgtagagttcaggaatgaagctgctcttgtggccaagcttcaacatagaaatttagtgagactattgggattttgcttggagggacaagagaagatccttatctatgaatacataccaaacaaaagccttgatcgctttttatttgaccctgtaaagcaaagagagttagattggtcaagacgctacaagattattgttggcattgctcgaggaattcagtatttacacgaagattcccagcttagaattatacaccgtgatctcaaagctagtaatgttctattagatgaaaatatgaacccgaagatttcagattttggcatggcaaaaattttccaggcagatcagactcaagtaaatacaggaaggatagttgggacttatggttacatgtctccagaatatgcaatgcgtggacagttctctgtgaaatcagatgtgttcagctttggtgtcttagttttggagattgtgagtggcaagaagaacactgagttttatcaatcgaatcatgctgatgaccttttaagccatgcttggaagaattggacagagaaaacacctttggagttgctggatccaacactgagaggttcttattctagaaatgaagtcaacagatgcatccatattggtttattgtgtgttcaggaaaatccatctgacaggccttcgatggccactattgcacttatgctgaacagttattcagttaccatgtcaatgccacgacaaccagcatcttttctgcgcggaagaaatcctaacaggctaaaccaagggcttgactctgatcagtctaccacttgttcaattccatggtctgtgaatgaagtatccattacagacatataccctcgctaaaggattgttttcatgttttctttgaccaatccaggatatgtttaaatgtgtcaaaccatggtgttgctgttatacaatcctagtgcatatatattgtaaatattaatagttaaaagaattctgtcaaatacttcttggatgaacacatacagtagctaaaacatgatgccccgggagagaccagatt

SEQ ID NO: 16951 - DNA, 532 bp, Glycine max
cgccgagcaacagtgaatttggccaccataagagcgcgcgcgcaaaggattagagtttcgaagatagcgattttggagcttccatttcgatttcgacttcgacttgcgcacaatcagttactttcgcttctcttgctgtagttcttaataatgcacaatttcgcaggctttactatttttcttttatctcgtaaattcgtaatcttgcgaaagaaatagaagaaatcatgtgcccttagttttattgatattccatgagattaactaggctattctacgtagcaaatcgttcaattggaaccgtttggtagaggtatggttcttagacagcacattatcgtttgaaatttcgtagtaaaggctctatatttcatagggagcagtaacattgtttttcatatctcaaaagaactgagataatatgacgtatcttagtctccaataaaacctagttaaggagggagagctttggagtagaatgtattgctctttagtttttacttttaatttatctgcctctctatattatcta

SEQ ID NO: 16952 - DNA, 394 bp, Glycine max
atgggaggagttgctgagggttaggaaggagcaagaggacgtgttggttccgcttatcggacgcgggaatcaaaggcgaggcacttaatgtggctgattaagagacgatgatggcttcgttgtttcctatgttgacacgttgttggatttggaattgcctgaggagaaacggaagctgaatgaagaggaactcgtgacgttgtgtagcgagtttttgaatgcgggtaccgacaccactttcacggcgttgcagtggataatggctaatttggtgaagtacccgcacgtgcaagagagggtggtggaggagattaaggaggtggttggtgagagagctagattttatggtgataggaaaacccaatcaacagatgaagctcctcctatcttttat

SEQ ID NO: 16953 - DNA, 444 bp, Glycine max
ataagcttgtccaggttagtctttctcagaatcctatagtgaaggtgaagttagaggatatgatggctgctactagtaatttcagcggggagaatgttcttttcgcgacgaggaccgggactacgtataaggctgatcttccggatgggtccacgctcgcggtgaagcggttgagtgcgtgtaggatcggggagaagcagtttgggatggagatgaatcggttggggcaggttaggcaccctaatctggcgccgctgttggggtactgcattgtggatgaagagaagttgttggtttacaagcacatgtcgaacgggacattgtattcattgttgcataagaatggtggcggcgcattggattggttgatgaggtttaggattgcattgggtgtggccagggggctcgcgtggctgcaccatggctgccaccctccgattatac

SEQ ID NO: 16954 - DNA, 530 bp, Glycine max
atgatcttctgagcttgaacagttgttgtggtccggggtcacatggagaaaagcacagaagcccaagatttccctatcgcaaaggctgccatttcattcttgcaggataatgtcccatcatcctttacttttcctggatggaacaaaggtcgcattgtttgtcagcagtcacagctgagacgaattctctcgggcactgaatcatcttctagtaggaaaaaaatggataaattagtatctttaagtaataccccattgactactgcaggagccataacatccaaatgtgatgcgcaaagtggtaaagctaatggtgttgattctagaaccgatagtacaagaacagagcttctaacgagtgcaatttagattagattagaaagtatagaatttacattcatcactttcccatgccctgttttggtgggtttggaattaagattggggcttatttgaaacccttccccgaaatatttccaagtgggaatagacttatacaggtcgaagaaaaaaaaaaaaaaagcgcggac

SEQ ID NO: 16955 - DNA, 413 bp, Glycine max
accagccctaacctaaagctgctacgccgtgactctgtggtcgacggtataaaatgaaggtgaaaaagcagaagaggcacaggaagattttgacgttttacactgcttgcttcggttttcggaagcctttcaaggttctatgtgatggcacattcgtgcatcaccttcttgtgaatcgaataacccctgctgacacggccattggcaatgttctcagtgctacggtcaagctctacacaacaagatgtgttctagctgagttgaatcgactcggtagctcgtattctgaggctctggaggcagctcataaacttatagttgcaagatgtgagcatgaaaaatgtaagagtgcagatgcttgcatcatggaggttgttggaggaaaaaattcttagcatttctttgttgctaat

SEQ ID NO: 16956 - DNA, 403 bp, Glycine max
acgccacgcgtacgctttaacaacaccaccaacaatgggagcacgaaagagactctcttcttccgaacctccttcttcttctcctcccgcaacaaatgaaaacacaaacacaactgccaaacccaccataacagaccctccaatcgcgcctcccaaatggggtcttcttctgaagctctctctctttttgctcccttacttgtacctcctctttcaccactaccccatcgagccggagctccgaagttcgatcctcatcaacgccggaatgagcctcgcggggctcttcgtcacggacaagatgatccccgtcgcgtcccgctacgtccagaagcggaacctctttgggtatgacatcaacaagaagggcacccctcagggaaccgtcaaagtgcctgagtca

SEQ ID NO: 16957 - DNA, 517 bp, Glycine max
atttttgcatctttatatctctagccaacccttctctaattccacacgccaattctaataagcaggatcattccaatatgggcaacagaattgttatgggaaattcccttctctttatctctttcttcatcttcagctttagtttcttggaggctcaaaaggctccagcagtttatgtgtttggagactcacttgttgatgttggcaacaacaattacttgagtctctccattgaaaaggcaattcttcctcactatggcattgattttccaactaagaaacccactgggagatttagcaatggcaagaatgctgcagatttaattgctgaaaacttgggcctacctacttctccaccttatctctccctagtatctaaggtccacaacaacaacaagaagaacgtatctttcttgggtggtgttaattttgcctccggaggtgctggaatatttaatgcctcagataaaggatttgggcaatcaatacctttgccaaagcaagtggactactactc

SEQ ID NO: 16958 - DNA, 624 bp, Glycine max
aattttagtttagtccttttggcacaaagtttgtttttgcagatatacaatgagccaatcatggatttgttggatccaaatcagaaaaacctacaggaatggagcaaggaacttatcctccttgggcacatggtcccggttatgtggtctcagttgatatcacgaggacgatgtccaagaaattcagacataaccatttgaagaagacgttgcaatgggaatctggatcgcagtcatgaagaaggaaggtctagaagtttgctatgagaatgagatcagagtttatctcgaaggttgtaaggatggttatgtggtttcccattaccaaggtcccagggagatgctctttttgtggcagaaacttctggtcgataaacatgcaaaatgttgtggtgatagtaggaaatgattgaggactgaccaggttacaacttactgaaaataaataaaagaaaaagatcccccttttgaatggctggggagcttgtataatgattagaatagttagctttagcctgaaattattagaaatggttaatggtagggcatattcttagtcattaattcgtttaagaaaatctgatgattgttctatgcagagagagagagagagatttgtataga

SEQ ID NO: 16959 - DNA, 444 bp, Glycine max
acaccacacccttcttcttcaacttcaactacattacatgttctctccggctctccgattctctctctgagatccaaaagccttcctttttcgccctctcaattctccattctaatctctagaatccgcttcttcaattcccagctttctccacaccaacaaaacgaatcttattcggctctcaaatcccaccaccatctccttcttttctctctgtctctgttttctattttttattcgttcccttttgccccgttagtgatcatcgccacaagattagttttttccgctgattcccagcttagttgattagaataactcgttttccagcgtgatctgcaactggggcatttacagctacattgttggtacttccgccaaattgtctatgttgttcttgtttcctcttccgaattctccgtctcttatacaatacagtgctat

SEQ ID NO: 16960 - DNA, 456 bp, Glycine max
cgctctagatcgcgggcgaccgcaaacactgtctccgtctggatggcggcatcgcgaatcgtggcccatcctccgccctatccccaccgtcaatctccgccgtcagatgccccgccgtccctcaacctcacacttaatccaaaacggtaccgtaacctcggcattcgcgcctcccttcgcggccacgaggagaagaacaagaacgatctcgccgataaaccccactccgtcgagttgcgagccaccagcacccccgacgacgtcgtttcccgagatctgctctctcttccgcggcctttgtcttcgactcagttatctgcttcggtgtccgatagctctcgccttcgtgttgcatatcagggggttcgtggtgcttatagtgaatcagcagcacagaaggcctacccaaattgtgaagctgtgccttgtgagcaattcgacaccgcatttgatgct

SEQ ID NO: 16961 - DNA, 506 bp, Glycine max
tcaggattcactttctactttaaccctgttgatttattctggtactgggatccatattattataggaggcgaaggctacaagctgatgatgacaagatgaacttcattgaatcggtcttctcctttgtatttggagatggtgatcccaatcaaggaattgaagaagagagatggaagttgattgggcaatacatagcatctaatggtggcgttgttgcagctgaagaacttgctccatatcttgatatagattccacagagggaattaaggatgatgaatcctatattttacctgtgctcttacgatttgatggtcaacctgatgttgatgaggagggaaatattctgtataggtttccatctttgcagaggacagcttctcaaaagagtaagagaaaagaatatgttggaaggagatgggcagattgcgttggaattgagaagtttttcaaggagaaaaaatggcaattcaagtaaactggcacgccagagagagcaatggtcat

SEQ ID NO: 16962 - DNA, 502 bp, Glycine max
gtttgtgggagtactgcttatgttgcacaaacatcttggattcaaaatgggaccatcgaagagaacattatctttggtttaccaatgaacagacagaagtacaatgaagttgttagagtttgtagcttggagaaggacttggaaatgatggaacatggggaccagacagagattggagagcgcggaatcaacctaagtgggggtcagaagcagcgcatacagcttgccagggctgtgtatcaagactctgatatatatcttcttgatgatgtttttagtgctgttgatgcacacactggcactgaaatattcaaggaatgcgtgaggggggctctgaaaggcaagaccgttattcttgttacacaccaagtagacttcctacataatgtggatcttatagtggtgatgagggacggaatgatagtccaatcggggaagtacgatgatctacttgcgtctggaatggattttagtgctcttgttgcagcacatgacacctcta

SEQ ID NO: 16963 - DNA, 637 bp, Glycine max
cagatctcatttttgcaagttcttctattaattcggcaaatggagcccggcaacacccaatctggggctgctaaggtttcaatattaatgattggtcagcaagccatagtagatgcttatctttgccttacacatttgactgcaggaatactagttgaatccctgttcaatgcttttgcaactgctgcatttttcaagtttgtggttttctcaatatttgagatgagatatctccttgccatctggaaggcaagtaggcctttgagcaatggtgaaggttgggagacaatgagacgtgaattgtcagttttatacagccgtttctatgggatcctattgggaggcatactgctcatgtatgaattccacaatcatttgagacctattcttcttcttatatactcgttttggatacctcaaataatcaccaatgttattcgcgattcacgcaaaccattgcatcctcattatatcttagggataactgttactcggctcgcaatcccattatatatttttggttgccctaacaacttcatgcgcatagagccagacaagagctggtgtgtgtgtttggctgtatttattggacttcaagctgcaattctcctacttcagcactatcttgggtcacgtt

SEQ ID NO: 16964 - DNA, 1793 bp, Glycine max
  unsure (1)..(1793): unsure at all n locations
aaaaaaggaaacgtatagaaaaagcttctccaaagaatttgaaggagaaagattcattcatgttcattttttccttttccccttcgtccccatcaagtttctgattctctcttttcacttcctttctctttcttcattcttctttctcttttcaactattttctttacatttttttctttttctctcgcttttttcgcgttcactttctctactctgttttacgcattttatttattgttttgttagttaattttgcgattcgagtaattggtatgcttgtgttttctagaagacgatattttcacgacgattaagctgcgttttcgccggtgtcgttttaccgcaagatggtgtcgttttcggaaatatgcaaaaagggttgaagttctttcttcagcattgaatctttgattacataggttggtttctttggaactcaattcaattcaataattggtcctccctttttgtggaactcaattcaattaggttagtggaaaaaatatggttgaatcaattgctgcaacttcactccttggccaccgcccaatttgtggtggaagtttaaccagggatgtttctgctaaacgcaaatctttgaatactgttcggttcccaacaactgagtttcttggtggtggaaggattgtggtttctctggctttgcctaaatctgataagcaagataggtttgtgttttcatcaattaaggccttggctgtggagttaacaagagaagcacatgcttatagggaagagaaattgcccaacagggataccaagattgatcgtggatttgatcaaaggcctgattcgtggcctcctgcgaatagggcagataaaccgtcgcttcggaatcccttgctccggcatgagaggatgggatgtggttggttgggtgctatatttgagtgggagggtgttctaattgaagacaaccccgatttagagaagcaggcttggctggcactctctcaggaagaaggcaaaccctctcctcctgcttttatcctcaagagaatagaaggcatgaagaatgaacaggcgatttcggaagtgctgtgttggtctagggatccggcacagctgagaagaatggctaatagaaaggaagaaatctaccaagctttgctgggtgggatatatagtttcttgtctgggtccaaggagtttgtgagtgttttgatgcattataagataccaatggcattggtttccacgcggcctagaaaggctcttgagtctgctatgggggagattgggattgaggacactttcagtgttattgtagcagcagaggatgttcataggggaaagcctgatccagaaatgtttgtgtatgctgcacagcttttgaacttcatacctgagagggtcattgtgtttggtaactccaatctaacagtggaggctgctcatgaagcccggatgaagtgtgtggctgttgctagcaggcatcctgtatatgagcttggggctgcagacttggttgtcaggcgccttgacgagctttcagtggttgatttgaagaatcttgcagacattgaaatgactgaatttgggtctgtggagcctgagatggagctggaggtggaaaaagatcatgatacatcatcacttgatgacaatttctggtaaatcctataaatgtacagttgattgaactcatctgattgttgatgatattagttacaggttagttacttgtgtatatggtaaacagaataaatggggaaaaaatgataagtggtatgcattgaacattgatgtttctcctnnnnnnnnnnnnnnn

SEQ ID NO: 16965 - DNA, 517 bp, Glycine max
caaaaatcagaacaaaaataaaataaaaaggaaacgtatagaaaaagcttttccaagaattggcaaaaagagaagaagggagagagattcatgttcatattttccccttcgtgcccgtcaagtttctgattctctttttcaattcctttctctttcaggtgattttttctccacgataaagttgcgatttcgccggtgtcgttttgccgcaagatggtgtcgttttcgggaatataaaatcagggttgaagttctttcttcagcattgaatctttggttacataggttggtttctttagaactcgattcaatttcaaataattggtcctccctttttgtggaactcaattctattaggttagtggaaagagaaaaaaaaacatggttgaatcaattgctgcaacttcactccttggccaccgtccaatttgtggtggaaatttcaccagggatgtatctgtcaaacgcaaatctttgaactctgttcggttcccaacaactgtctttcttggtggtg

SEQ ID NO: 16966 - DNA, 1158 bp, Glycine max
tggagctgctgtttttagactggactacaaaggtcaacctgcatgcctggcccagtcacctcagcttcacaagcaaatgtctatctgtggagattttggccgtgtttttgagattggtcctgtgtttagagcagaagactcctacactcacaggcatctgtgtgagtttacgggccttgacgttgaaatggagatcaagaagcattactttgaggttatggatttagtcgatagattgtttgttgcaatgtttgacagtttgaaccagaattgtaagaaggatctggaagctgtggggtctcagtacccatttgaacctttgaagtatctgcggacgacactacggcttacatatgaagaagggattcagatgctcaaggatgttggagtagaaattgaaccttatggtgacttgaatactgaagcggaaaggaaattgggtcagctagtctcagagaaatatggcacagagttctatatccttcaccggtaccctttggctgtaaggccattctatacaatgccttgctacgacaatcctgcatacagcaactcgtttgatgtctttattcgaggtgaggagataatttcaggagctcagcgtgttcatgtgccagaatttttggaacaacgtgcagcagcttgtggcatcgatgtcaaaacaatatctacatacattgattctttcagatatggggcaccaccacatggtggctttggagtagggttggagcgtgtagtgatgctcttctgtggcctgaataacattcgcaaaacatcactctttcctcgtgacccacttaggattgcgccatgagaaaatcatatcccaacagttaattgctcaaatattgagtcttttcaattttcattatatgacaagattttatttttttatgttgaatcccgaaaacattatttaaattctcagtcttggagctgatacttaaatccaccgtgataaaaacaaatgttttgactggctgtattgccactgtgtattgaattgacccactttagaaagtccatctttctcctctaatcagaaaccaggtgaatcaatgataaatttgatcccatgaacatatttcagctggacatttggaactgggaatgacttgtatgcattcaaatcaagtagcattttgttaaaaaaaa

SEQ ID NO: 16967 - DNA, 462 bp, Glycine max
cccacgcgtccgttcaccggtaccctttggctgtaaggccattctatacaatgcgttgctgcgacaatcctgcatacagcaactcgtttgatgtctttattcgaggtgaggagataatttcaggagctcagcgtgttcatgtgccagaatttttggaacaacgtgcagcagcttgtggcatcgatgtcaaaacaatatctacatacattgattctttcagatatggggcaccaccacatggtggctttggagtagggttggagcgtgtagtgatgctcttctggggcctgaataacattcgcaaaacatcactctttcctcgggacccacttaggattgcgccatgataaaatcatatcccaacaggtaattgctcaaatatttagcctttacaatttttttatggtgaatcctgaaaacattatttaaattcctagccttggagcttatacccaccgtgat

SEQ ID NO: 16968 - DNA, 1114 bp, Glycine max
  unsure (1)..(1114): unsure at all n locations
ttctcgcgcgccgcggctcttctcttttcagcaccttaccttattccaatccaatagcaaggaggtaccaaaatagtgtgattcatggctgcaacgaatgcgtcaatctttgcatcttccacgcaaccatgcttgcctgtgcctcctaccattccaaacacgcttgctactccttttctcaatgtttcgtcaccaagaagttaccttgtgaagaaaaagcatgtgaaatttagcaaaaaaatcagtgctgctgctgttgcaacaacaacaacaactgaggaaattcaagagtacaagcttccatcatgggctaagtttgaaatagggagggctgctgtctattggaaaaccatgaatggcctccctccttcttcaggagaaaagctaaaacttttctataatccagctgcaactcaacttgtccctaatgaagaatttggaattgcttttaatggaggttttaatcagccaattatgtgcggtggtgagccaagggccatgcttagaaaagatcgaggcaaagctgatgccccaatatattccattcagatatgcattcctaagcatgctttgaacttgatcttttcatttacaaatggagtagactgggatggtccatatagactacagtttcaagttcccaaggcattacaaaacaagccaattgacttctttaataagccttggctgaggaactgagtaaagaaggagcatgtgagcaagcaatatttccagacacaaataaaattataaccaaatgtgctatgattggtaatttgtcaaaagaagggggtgatcgctgcgatctgaattttgttttaggatgcacagatcctagttcgcacctgtacaacccgctagccaatgtagatgatggaacatgtacaattgaattggattcagtctgaagaatagcattatactttgcataaatattcatttcgatcatactttatgttggttttaagtacacagtgtatattgtaaattccactctcaacattggacataggcaattgctggcctgttaccttatttctctccttaatctgttactatagaaacaagtttttctctttccttgtctnnnnnnnnnnnnnnnnnnnnnnnnnnn

SEQ ID NO: 16969 - DNA, 617 bp, Glycine max
ggctcttctcttttcagcaccttaccttattccaatccaatagcaaggagtcaccaaaatagtgtgattcatggctgcaacgaatgcgtcaatctttgcatcttccacgcaatcatgcttgcctgtgtctcctaccatttcaaacacgcttgttagtccttttctcaatgtttcgtcaccaagaagttaccttgtgaagaaaaagcatgtgaaatttagcaaacacatcagtgctgctgctgttgcaacaacaacaacaactgaggaaattcaagagtacaaattccccgtcttaataccttttccatgatctacttttgtctttccttcacttcacaatgatagtgtcacctgcaatgggaaaaaagagcatggaaattaaataatgaataggtgatggggatggtattggagttgtagtgtttgtgctttaagaattttttgattctccagaataaaagttaattgtggataacattattacaataccattatctacaatcattgtttacaggtacaagcttgcatcatgggctaaagttgaaatagggagggctgctgtctattggaaaaccatgaatggccttccttcttttttaagagaaaagcttaaactt

SEQ ID NO: 16970 - DNA, 589 bp, Glycine max
ttttttaaaattttaaccaggtttctatatccaagaatgtaccaaatgccaacaagtactaaagaaaagaaaatgacatactgaatttagtaaaagtctcaatctctagaaagctgatgtctctatttattttctctacctatttggctgtgttcttttctcaatgtttcgtcaccaagaagttaccttgtgaagaaaaagcatgtgaaatttagcaaaaaaatcagtgctgctgctgttgcaacaacaacaacaactgaggaaattcaagagtacattgctcccatcatgggctaagtttgaaattgggagggcggctgtctattggaaaaccatgaatggcctccctccttcttcaggagaaaagctaaaacttttctataatccagctgctactcatcttgtccctaattaagaatttggatttgcttttattggaggttttaattatccaattatgtttggtgttgagccatttccttttgcttaaataattttcaagccaaaacttaatcccccaattatattccatttcatatattcaatttcttaataatcttttttactatcattcttttcttttacaaaa

SEQ ID NO: 16971 - DNA, 1635 bp, Glycine max
cccacgcgtccgcccacgcgtccgctcacaaagacacagagtgcgttcgttgacgacaaacacacacaaacacacaacaaaagctcgccggaaaatctttctccggcgacctggaattccgacgaaggtagttgcggctccttcgtcccgaaactgaggccctcaaagtataaactttggtggtggtgggtaggatctggcggtgtatgatgggatcttgcatatgcccgttggagactccggcgaggttgctttggaccacaagcttcttccgtcataagcttatgatcttctaataattaataattcacgcacacaaacaaacaaacaaacaaacaaaaaacacttcataacaacaacaacaacccttctgaaattctcaacacaagtttcaaaaaacagagtaaaagaaacagagcaaaaacacacacacaaaaacacaaacacagacaccttttaagtattaaggtgtctctttctctccccggaaagtttctccgtcggcggtggtgattgaccggagtgccatggagtctggacggattttctttggtgcctctgcttcaagcggcaacaacatgctctttctcggcaacactgaacttgcttttcgagggagatcgattatgagcatggaggaagcctcgaagaggcgacctttcttcacctcaccggatgaactgtatgatgaagagtattatgagaagcagtcgccggagaagaagcaccgcctcagttccgaacaggtccatctgttggagaagagctttgaggaagagaacaaattggagcctgagaggaagacccagttggctaagaagctgggattgcagcccaggcaggtggctgtgtggtttcagaaccgcagggctcgatggaagaccaagcaacttgaaagggattatgatgttctcaagtcttcatacgataccctactttcatcctatgattcaattatgaaggagaatgagaaactcaaatctgaggtggtatccttaaatgaaaagcttcaagttcaagctaaagaggtgcctgaggaaccattatgtgacaagaaagttgatccaattccagtagatgaagatatggctccgattttcggcacaagggtggaggaccacctgagtagtgggagtgttggaagtgcggtggtggatgagggtagtccacaggtggttgttgacagtgttgattcatacattctagctgacaactatggtggatgtgtgggcccggtcgagagggttcagtcggaggaggaggatgggagtgatgatgggaggagttacttggatgtgtttgtggtatctgaaactgagcaccaaaaccatgaggaaggagagacattgggttggtggactaatatgtattatgttggataaaatggtaatgcagcagtgctttcgaaattagatgcttaattaagaaaacgtaataatattgtataatgtatcatgtgggcgagggaggaaaaagtaaacgcctggattgggtggcttggacccctaggaggagttgaagtgtccttaacccgagtttaataaataaagtctagtagtaatttggtcaatggtgtcttgtgttggttaatggttgtactgccaaaattaaagtaagtatatttcttgttcaagt

SEQ ID NO: 16972 - DNA, 536 bp, Glycine max
ataacactcacaaagacacacagagtgttcgacgacgacacacacacacaacaaaagctccacggaaaatcttgctacggagattccgacgaacgtggtcgcggcggtgctcctccttcgtcccgaaactgagggcctcaaagtataaactttggtagtgggtaggatctggcggtgtatgatgggatcttgcatatgcccgttggagactccggcgaggttgctttggaccacaagctttcttccgtcataagcttatgatcttctaatagttactaattcacacacaaacaaaacacttcataacaacaacccttctgaaattctcaacactagtttcgaaaaacagagtaaaacacacagaacaaacacacacatacaagagcaaagacaccttttaagtactaaggtgtctctttctctcgccggaaagtgtctttggcagcggtgattgaccggagtgccatggagtctggacggattttctttgatgccttttgtttttgcgggaacaacatgctctttcttggcaacac

SEQ ID NO: 16973 - DNA, 1851 bp, Glycine max
cggcctgagaaggagcttcagcgggctaagtcggaaattcttcgacgcaaattgaaaattagggatctatttcaaaatttggattcattgtgtgccgaaggaaagtttccagaatctttgtttgattctgcaggagagattgacagtgaggatatattttgtgcaaaatgccagtccaaagagttgagcactaataatgatataattctttgtgatggtgtttgtgaccgtggatttcaccagctctgtttggatcctccgatgttaactgaagacattccacctggcgatgagggttggttatgcccaggatgtgattgcaaagatgactgcatggaccttgttaacgactccttcggaacaagtctctctattagtgacacctgggagagagtctttcctgaagcagcatcatttgctggaaataatatggataacaactcgggagttccttctgatgattctgatgatgatgattataatcctaatggtccagatgatgtgaaagttgaaggggatgagtcaagttctgatgaatctgagtatgcttctgcttctgagaaattggagggtggttcacatgaggatcaatacttgggccttccatctgaagattctgatgatggtgattatgatcctgatgctccagatgttgaatgtaaagtcaatgaagaaagttcaagctctgatttcacttctgactccgaggatcttgctgctgcaattgaggataacacatcccctggacaggatggaggcatcagttccagcaaaaaaaagggtaaagttggtaagtagctatctctgcccgatgaactgtcatctttactagagccagattctggccaagaggctcccactcctgtttctgggataagacatgtggcaaggttggacgacagatagctgtatgagcagacgtatcacagtgatacgagtgatgatgaagattggaatgacactgctgctccaagtggaaaaaagaaactcactggcaatgtaactcctgtgtcaccaaatggaaatgcttcaaataattctatacatactcctaagaggaatgctcatcagaataatgttgaaaatacaaataattcacccactaaatcgcttgagggctgttcgaaatctggttccagggataaaaagtctggatcttcagcacacaaaagactaggagaagccgtagttcagagacttcacaaatcttttaaagaaaatcagtatccagatagaaccacaaaagaaagcttggcacaagaacttggacttacttatcagcaggttgccaaatggtttggcaatacacgttggagcttccggcattcatcacaaatggaaaccaagtcaggtcttaatgcttcacagcaagttactgatggcagagctgaaaatgagggggagaaggaatgtgaattaatatctctggagttcagtggagaaaaatcaaaaaccccaaactctagaaaaaggaagcatttgtcagaacccctatctgaagcacagctggatatcaatggctcagcagcaagttcaccaaatgttcatctaacgcaaataggcaataaaatgaagacaaggaaaaggaaatgatgcttagttgagaagtcgggtttaaccttttcctaaggcttcaaattgcagtatccatccttttgtgagattgagatcccatgagatgatcagctcagatctcgatggatttgtttccatttaggaaggtaatcctaggtgccattgtattttttaaaaatagctttccaggtattgatctctggtgagttgttttgcctctcttgcaaacactaaaaatagttcagttattagtttttaaatttttataatatttat

SEQ ID NO: 16974 - DNA, 454 bp, Glycine max
caaggaaaaggaaatgatgcttagttgagaagtcgggtttaaccttttcctaaggcttcaaattgcagtatccatccttttgtgagattgagatcccatgagatgatcagctcagatctcgatggatttgtttccatttaggaagggaaccctagtaaatattgcagcttatgtgtttgactgttcacaatgtatggatatggctctcatcttgcattgatcgtgtgtggttcgacattcaaggtgggttgttttcgggaatcatgaagctgctacgttggtcaattgttggcaatccccatttcctttaaacaaaaatttgtcatggatctgtgatttgagtaatagagtggggggatgggagcatcatatattccaattgctgcatgcacattgcttaacttaataacctattattattgtgaggaatggaagtaaaataacccattgaggg

SEQ ID NO: 16975 - DNA, 733 bp, Glycine max
gatatacatatacatcaaaacacgcagaagaagaagaaccttacaaagggcttttgaattttcgtgttttgatcagaatcagaggaaaaaatcacataatttcgaattcaaaatttgaattttcgtgtataaaacgaagagaagagaatggaatcggaggatttggtgaagcaggaattggaggaattgcagaaacaattggggaagaagctaaaatttgaagcctctatttcgtctctaaaatctcttctccaacgcacttacccatcagcttccccagcgcttcgcaaatccttttatttggttatatgccgagttgctactgtgttgaagaccaggtatacagcaccaggtttctggaatgctggactgggcctttttgagcaggctcatttgcttgtttctgatccttctgagaaggagaagttgaaggcttgcattgctcaggccagggaacatttgcatctagaagataacccatcacaaactttacgacctgcagataatcaggcaaacagagggtatctttttgagggccaccttacggttgatcctgagccacctcagccgcaatggttggtgcagtcaaacctcttgaccacagctgctacactctttgctgctggatcctctcaagctccagcagcaaatgaaaccactcaagatgatgccccaaatatgcttcaagatcttctaaatagattggaagaagttgtgcccttgatggtggatg

SEQ ID NO: 16976 - DNA, 912 bp, Glycine max
ggcatttattattcacctgagaattgtatgaatcaggatggatgtgattcaccacctgggatgcacaaagaccctggaatgtcatctttggaagcatgccaacatcagacgttacgaagcataggttctcatgtgaatcttaggatcaagtcatttagagtgccagagctttttatagaggttccagaaactgcaacaattgggtccttgaagaggacagtgatggatgcagtgactgctgtgcttggaggtgaattgcacattggtgtttttctccagggaaaacaagttaaggatgacagtaaaactctacttcaaactggaatttctcatcataacgagttggatgctttgggtttcaccctggagcctaattcttcacaaagcctaccgattgtatgtgctgcacattctccccgtcctaaagctgacataactcagcctgtaataaggtatccctccagtccagctgtaattcatcagaggattcaaggcaactctgacatgttacctgagcatcaagtaaccagtttaggtagacattttgaaagtgaccatgattcagcaccttctcctgtcaatgcgtctgttgacaaaaatatgaaagattccaaagaactggttactgttcctgaaatggatgaggaactagctatggtacctgtacaccagaagccaaagcgatctgagatcgtccagcgtcgaatacgcaggcctttttctgtagatgaagtagaagcactggttcaagcagttgaaaaactaggaactggaaggtggcgtgatgttaagctttgtgcttttgataatgcaaagcatcggacatatgtggatttgaaggataaatggaaaacactggtgcacacggcaagaatatcccctcagcaaaggaggggtgaacctgttccccaa

SEQ ID NO: 16977 - DNA, 623 bp, Glycine max
gataccacacaagaagagaaagaggagaaaagaaaagtaaaaaggaaaggaaaggaaggatctttggggaattgggaggcaaggaaagaaagatgcaggattaggtgtgtggatagggagggtccagcgtacgtactacctggcttctgttctttctacccacgacttttctctcaaaccaaccacatcattcaactattgcactgccaaggtttggacagtgttacgtgcttcacgaaacatgacctctgctcacgaccttactgataatgaagatgatggacagcagcagtcagaatcaccaatgcagcccccatctgtaaatggaatatctgatccaggtattagtacccagaatgtcaatgtacagtatgcagcacctggccagcttggaactgggcatgcaatggtaccacatgtgtatccatatccagatccttactatagaagcatctttgctccctatgatacacaaccttatcccccacaagcctatagtgggcagccaatggtccatcttcagttaatgggaattcagcaagctggtgttcctctgccaactgatgcagttgaggagcctgtgtttgtcaatgcaaaacaatatcacggtatattaagacgta

SEQ ID NO: 16978 - DNA, 1390 bp, Glycine max
ccatcgttggcagtggaccatctggcttggcagctgctgatcaactgaataaaatgggccatactgtaactgtgtatgaaagagctgataggattggagggcttatgatgtatggcgttcccaacatgaagactgacaaagtggatatagttcaacggcgggtcaaccttatggcagaagagggaattaactttgtggtgaatgctaatatcgggcatgatcctttatactctcttgatcggcttcgggaggaaaatgatgctattgtcttggctgtaggagccacaaaaccaagggatcttccagtacctgggcgggagctgtcaggagttcattttgctatggagtttcttcatgcaaacactaaaagcttgcttgatagcaatctccaggatggtaacttcatttctgccaagggaaagaaagttgtggtcattggtgggggtgacacgggcacagattgcatagggacatccattcggcatgggtgtagtagcattgtaaatctggaacttctccctcagccaccacaaactagggccccaggcaacccttggccacagtggcctcgcatataccgagtagattatgggcaccaagaaggtgcagcaaaatttgggaaagatccaagatcttatgaggtattgactaagcggtttgtgggagatgaaaatggagttgtgaagggacttgaagtaatacgtgtcctctgggagaaggatgaaactgggaggtttcaatttaaggaaattgagggctccgaggagattcttgaggctgacctagttttactggccatgggattccttggccctgagcctacaattgcagagaagttgggtattgagcgagacaacaggtcaaacttcaaggcagagtatggtcgtttctcaaccagtcttaaaggggtgtttgcagctggagattgtcgacgtggtcagtccttggtggtatgggcaatttcagagggacgacaagctgcagcacaagttgacagtttcctcacaaatgaagatttagagcacaatgttgccgggagtccagacgaacttatcaagaagaagcagcaaccaagggacactgtggcagtggcaaacaaacagtgattacttaggagccttctgtggtttttctattcttaaaagatggaataataaaagatgactgctggagattcattgagcattgttggttcgtagttggtgccccatataaatgtaagggggaaaataataaagaagcgatctaagggtgcaaggttagtgcacagtagaaaattaggaatgttcataggcttcgtgatggaaaggttagttcttagttaattattgtggcattgtgtggaatgaaatgtacagtttgataattaatgatttaggttattgtttcc

SEQ ID NO: 16979 - DNA, 688 bp, Glycine max
ctcgagccgaaaataagaagaaataaagacaagtgtagtgtagggaaatcaagaggttgttgaggtgttgggtgtggaccgagacaacaggtcaaacttcaaggccggttatggccgcttctcaactaatgtcaaaggggtgtttgcagccggtgattgtcgccgtggtcagtccctggtggtgtgggcgatttcagagggacgacaagcagcagcacaggtcgacaactacctcgtcaaagaagacaaagaccaccggaatcaggatggccttgtcaagagacagcagggcctctacaagaagcagcatggaagcagcaaacacacggtgatgacttataggtggctcctctgatttttcatactcataaagttccaaaaggaattgcacagaataaaattgttccaagtttgagcaggagattcattggtttactttaaacgggaaaaataagaagaaataaagacaagtgtagtgtagggaaatcaagaggttgtttcggtgtttggtgtggtttcagggtataaagttgttgcagattcgagtgttcagttgttcaatgattgttttattcgggcttttattgttgggaaggttagcttttagttggtaatggtgatgacgattatatgtaatgaagtgtacagtttgataattattatttagaagtgacatcgtttcgattct

SEQ ID NO: 16980 - DNA, 528 bp, Glycine max
ttctattctaatattcagaaacccagtgtcagtcactggaatgtgggttactcactcacagtctttggagtatactctacagtgaagccaaaaagagacgcaagtgatactataatgcatcatcattcatgctctcggctgcagtgaaaggacaacctttagttataccctacaattacaacatttagttttcgttactgcacagtcaacctcaagatttctgaaggaaaatttgtttagcatgctagtgatcagaatccagagttttctgactataatatacattttttttacccacacgccagacctcaacgagtttctcgttgtattagcaatgatcgatgcagaaatagcccacagaacaaaattgctataaatgatgtctctctactttacctgtgttgggataattgagtactttttgtcatttattcttggaggaaagagttgtaaaattggatatctacacatctattgttcaactctatttacattcgtttattaatgatagaattcatactttaaccc

SEQ ID NO: 16981 - DNA, 480 bp, Glycine max
  unsure (1)..(480): unsure at all n locations
tcgtatgatttccggcaagattacagtgagattggaagattctactctgaactccatttttttcttaccgtttcggcttctccttccacgaggaaaacatagtgtctccctcctcagatctaaaatctactctctttttcccttcacacggaactgtgacgatgtcgagcgacagcgacgaagacgagcttctccagatggcgctgaaggatcaagcgcagcgagatgtcaactacggcaaatcctcctccaattcccggaagcctgtcgccaactacgttcagcagcccaagaaacccgctcctccgccgaaacagtcgctgggcaaaggcagagtcgccgccgacgacgatgattccgaaatcgagatgctcagcatctccagcggcgacgaggacaacgtccaatatccggttgctgcctncaggaacaaaggcgccacggctgccgcaggcggaagaccggtgcgcgaagacgatc

SEQ ID NO: 16982 - DNA, 495 bp, Glycine max
ctctcttcatttaactctctcaactatgactttgctttccgcgcgattcaccagctaaaccaatttcaatttgcttccccagacacacattctttttctttttccatgtctcaaatgatcagaaaatcaatggaatgaagaaaatgactatccatctatctatgtagtcttgctttcaataatatctacctagatattatattatcatctcttttcccagcacaagcaccggttatagaggctagcttctaacatgctgctttttggttttatatatatttgttttggcagtacctgcttcctcaaaactactatcggttttggaatttgccccaggtagctagtttaggacacacgatttttttttctcttcaaaaatgatgtctgaagaaaccttttctgttcctcccaactccaccattagagccacctccttggttcatcatgttcatgttcaacccccaagcccaaaccctaattcaaatccagcttaga

SEQ ID NO: 16983 - DNA, 1060 bp, Glycine max
tctcgagccgattcggctcagggcgacaatcacaaggtcatgatgagacttatgtgaaacagctttctgattatataataccaaatttggtggaggctttacacaaggagccagaagtagaaatttgtgcaagcatgttggacgcattgaatgaatgcatacaggtctctggatcacatctagatgaaaagcaagttcggagcattgttgatgagattaaacaagtccttacggccagttcatcaagaaaacatgaaagagcagagagggccaaagaagaggactttgatgctgaagaaagagaactactcaatgaagaaaatgagcaagaagaggagctttttgatcaagttggtgattgcttgggaactttgataaagacattcagggcatctttcttgcctttctttgatgatctgtcctcatacctaactcctatgtttggtaaagacaaaacctcagaggaaaggagaattgccatttgtatatttgatgatgttgctgagcatggtcgtgaagctgctcttaaatattatgattcttttcttccattcttactcgaagcttgcaatgatgaatatccagatgttcgacaggctgctgtttatggtgttggtgtttgtgctgagtttggtggatctgttttcaaaccccttgttggagaggcactttcaaggttagatgctgtgataaggcatccaaatgcactacattctgataacataatggcatatgacaatgctgtctcagctcttggaaaaatatgccaattccatcgtgatagcataaatgcagcacaggttgttcctgcctggctaagttgcttgcctataaaaggtgatttaattgaagccaaggttgtgcatgaccaactttgttcaatggttgaaagatcggatagagaacttataagtcccaacaatcaatatctttccaaaattgttgcagtttttgccgagattttatgtgcgggaaataatctggcaaacgaacagactgttagtcggatgattaatttattgaggcaacttcaacagactttaccaccttctacacttgc

SEQ ID NO: 16984 - DNA, 507 bp, Glycine max
gggctcgagggcagaacgaacctgtttaattcccccaaatcggaagttgatcctgaaaccctaaatagcccttaacgttgtgtctatgtttttgaattatggacgcgaaggatatcctgggattgcccaaaaactcgttcccatctctcgagaagaaatctcgtcctcccaaagagtctcaaagaaaaccagatggcatttcgcgcgaggtgtatgcgcttacgggcggattggcctctctcatgcctgcaattgaagcctctcagttgaagaaaaagcctcttcctctcgaaaaaatcacttggcagtggcttcctttcaccagttctgctcgtaaagataatcttcatctttaccattgggtacgagtcatcaatggtgttcctcctacgggggactattcttttgccaagtataataagtccgttgatgttatcaaatacacagatgaggagtatgacaagtatttgtcagatcctacgtggaccaaagaggagacagatcaac

SEQ ID NO: 16985 - DNA, 798 bp, Glycine max
tgtgtgtctatccatccatatccgattctagatagccatgagagcacagttgacagttgacagcgttgcattctgggcgagtcttagaaattgaggcaattgaacatcttccacacttggctttagattgaaggagtatgtccctactccagaagggcctgtgctgtgtctttgacatccgtaaccataataatgtaagctcactgaacctctcaatcacaaattaccatgccgcaaaaccgctatccaaaacagccacatattctcctctccaatacgtgacacgtggcaaaccccggaggaggatgctgaaacctatatccgcagctcttcccgatccaacgacgcttgacctcacagaaaataacgtgaaacaggttttagacgacgctcgaaaggagctgggtcaaatctttgacacctctgtaggtatgacaggagtggttgaactagctgacttggatgggccttttgtgaaaattagccttagtggtcggttttggcacaagcgttccactgtcctgccagagtcgctaattatctcaaacagaggatccctgagattttagaggttgatatagaagacgagaaacaattggatgacagtcctgagaatttttaagagcttgccgctctttggattttcttctattcttttgttttggttggtcttctactagccgattccctaaattaagataatttgtttagtgtggatgagaatctgtagaaaaataatcactatgggaatatctgtgttattgtgctatctttgttacatgttattgttacttactc

SEQ ID NO: 16986 - DNA, 653 bp, Glycine max
agatagcgggctaattcgtgggctggcctagtccaccccgcgtaacttgttttgggtctaaatactgggccaccttacaacatggctgaatgctaagcgtgctagggttcatcaggtgttgtagagagacacatctattgacactgtaatggtgccaaattaagtgcccatttcttcttgtagtggttattagaggatttgctcgctatcatatcacagtatatatcttcttatttgtttaatttttatgtttcttaggtgaattactcaagagggctcgacaatcccacaaagtagaaaaagaggttatgttatggcgggcaaaggtgttagttcggtggctaaggcggtagcagaatatcagtatccttggcgtgagaagttggggaaatataaggatgagcttgccaagggtgtgtggggatactgggagctgggggcatggaagccgctgagtatcagtgctcggcatcgtgctagaattcgcaaggaagtcctccttgctggggaagattggccctacgatcctgaaaggaaggagatgaagaccaggaggaaaggacacaaatgtgataggatttccgccgagaagcgcgcaaacactgccaagttgatggagaagatgccccagatgttgctggattacaagaaga

SEQ ID NO: 16987 - DNA, 325 bp, Glycine max
ggttgcagagagacatctattgacactgtaatggtgccaaattaagtgctcatttcttcttgtagtgattattagaggatttgatcgttaacaatttctcttcttatttgtttaatgtttttggtttcttaggtgaattattcaagaggacccgacaatcccacaaagcagaaagagaggttgttatgttatggcgggcaaaggtgttggttcagtggctaaggcagtagcagaatatcagtatccttggcgtgagaagttggcgaaatataaggatgagtttgctaagggtgtgtggggatactgggagctgggggcatggaag

SEQ ID NO: 16988 - DNA, 600 bp, Glycine max
cggctcgagctcgagccgattcggctcgaggcaatttatccttgacacgaaaattgaaatggcgctgaggctgactactgttgtttcaagtgttggtcattcggggaaacccaggtttaggttcagaatcagaagtgttgctgccacagttagaaacatggccttcagtgcaacctccaaggtaattgattcccatctccacgtgtgggcttcacctcaagaggctggcagattcccttattctcttggacaagaacctactttaccaggaaatgccgagtttttgctccagtgtatggaggaggcaggagtagatggtgcactcattgtgcagccaattaatcataaatttgatcatagttatgtcacaagcgttttgaataaatacccaacgaaatttgttggttgttgccttgctaatccagcagatgatggaagtgggcttaggcagtttgaagatcttgttttgaaggacggttatcgtgctgttcgattcaacccatatttgtggcctcctggagaaaagatgacaaataaagttgggaaggaaattttccaaagggctggagaactcaatgtgccagtgggcttcatgtgtat

SEQ ID NO: 16989 - DNA, 446 bp, Glycine max
cttgacacgaaaattgaaatggcgctgaggctgactactgttgtttcaagtgttggtcattcggggaaacccaggtttaggttcagaatcagaagtgttgctgccacagttagaaacatggccttcagtgcaacctccaaggctggcagattcccttattctcttggacaagaacctactttaccacgaaatccccagtgtttgctccagtgtatggaggaggcaggagtagatggcgctctcattgtgcagccaatttttcataaatttgatcatagttatgtcacaaggtttgtttcacattttgccccagtttatgcaagaaatactgaaatggcagttggtgtctatggaagatgtagtggtaatatatgatctcagcatttgacctgttttccatgctggacttgctagggatataagagaataaggtacagattgaactg

SEQ ID NO: 16990 - DNA, 480 bp, Glycine max
ccccgcaaagcttgcaactaacgcttacctcacttcttcgttcttccaccctcttctctttgtttcccactcctcatttctttggcgatgaaaccaaactcaaacccaagtcaatttcagtgactcaatttgaatttcgttcaatctgattttcgcttctctggttacaatgttgcacattgctttagctgcaccggtctctcccaccgtcgtcgcttttcaccgcggagcgaagcaatggagcgcgctaattccgaattttcggagaagcaggggaatcggttcgtccgtgttctcaagttctctcaggaaacgattgcaattgcggtttttcgcttcgggagaaaatggcggcaatggaggtgttctggaggagatatctgaacccgaaaaggagcctacgaattctgcgtggccggataacaagaaacctatgtttgcatattaggcggaggatttgggggcttatatactgcttta

SEQ ID NO: 16991 - DNA, 201 bp, Glycine max
ggcatatatatgtatacatatacctataccccgtgcttatagattatagatggagaagaaatgggcattgttctgcatgagccatatcatgccctatatatatatttttaatgtaatgaacagatgatgggttaattttgatttcatatacaacttaattgttgtgcagaaaatgtcctgatgcatcgtgagatgtttttc

SEQ ID NO: 16992 - DNA, 1940 bp, Glycine max
ggaaaaaaagacaaagaaaatccactactactctcactaagtcactatagtgaaccgtggctatgctactactaaacctggtttgagtggtttcctcatcttctccctcttgaatcagcgtcactcactttctctctagcataattttgtgcctaccttcttctgaaatgaaaaataaatataattaatattattatattgatcgatggaaacaggctgacatatttaagcgtagatcggcatcgtggtgctgtatccacttgtcaatcgcaaattcggaaaccctagctagctagctagcagcagcagcagatctgatctcacgttcgttcgtggttatggcgccaaggaaacctcgcgagcgtgaaatgctgctcgactccgtcatcgcgctcgtcttcatcctcgtcgcctgcgtcgacctctgcgacggcgccaccgtcgtcgacgtctaccgcctcatccagtacgacatgtccggcgtccccttcggatctcgactcgccagcctcaaccaccacgccgcctcgctccacttctctccgcacgccgatctctctcgcaccgtcctcctcataccgcttcgcgaactcaacatgtcttttgtcaaagagtatattgctgaaagcaagcctcttgggggtttaatatttttgcttccccggatgttcagttttgaaaacaaagatggtatgggaagtaatcatcaagatgagagtaaagaaccgctgaagaatgtattggatgaacttgaaaaaatacttatacatgccaacttaccttatcctgtgtatcttgcattcgaggatgatagcattgatgctgtgttaactgatatcaagaagaatgatgtcactggtcagcctgctacagcaacaactggcggatacaaatttgttgtttcggccacagaaccaaagaaagttgtatctcctcccattacaaatattcagggatggttggcaggactgaagacagatgatgatgctcatcaattacccaccattgcaatagttgcttcatatgacacctttggggctgctcctgcattatcagtgggaagcgatagtaatggaagtggcattgtggctcttcttgaagtagctaggttgttttctctcttatattctaatccaaagacaagaggacaatacaatctgctgtttgggctaacgtctggtgggccttataactacaatggaacccataagtggcttaggagctttgatcaacgtctgcgtgagagcattgactatgctatttgcttggatagtattggctcttgggaaaatgaattgtggattcatgtatctaagcctccagaaaatgcctttattaagaaaattcatgaagatttttcaagtgttgcagaagaattaggctttaaagtgaatctgaagcataagaaaattaacatttccaatccccgagtagcttgggagcatgaacagttttcaaggctgagagttactgcggccaccctttctgaactctctacagcacctgaattgctagggaagactggtggtttggttgatggcaggcattttgtcaatgaagcggctattgtcagaagtgtgaaattaattgctgagagtcttgcgaggcatatctatggacatcaaggaaagaacattcagatctttgcagacaacagtaacttggctgtcaatccttcttatgttcaatcatggttagatgttttgtcccaaacgcctcgagtagctccatttttgtcaaaaggtgatccttttgtaatggcactgaaaaaggaattagaagaccatactgatgaggtaaatctacatagagatgtgcttgatgggatgttcactttctatgattcaaccagggcaaagctgaacatatatcaggttgccagtgtcacatttgacttgctgttgcttctagtgctgggatcgtatttgattgtgctcttc

SEQ ID NO: 16993 - DNA, 1573 bp, Glycine max
ccctcgagccgaatcggctcgagcggctcgaggttcaatcatatgagcttctccctcattggcctccatttggatctaattaactaatcccacgctctgctttaatacaaaaatttgtgttcgaggtagccattgatattctgctaatgactatggtgttcaaaaacacaaaccagttagaggaaagtatggattccacttatgacaggaaggctgaagtgaaagcctttgatgattcaaaagctggtgttaaaggtcttgtagagtctggattgacaaagatccctcgcatgttccattctggcaggttggatatcattgaaacctcagtcagtgactctaagttcggtatccccatcatagacctccaaaatatccactcctatcctgctctgcattcagaagtaattggcaaggttcgaagtgcatgccatgactggggatttttccaggtgattaatcatggaattcctatcagtgtgttggatgagatgattgatggaattcgtagatttcatgaacaagacactaaggtaaggaaagagttctactctcgggatataaagaaaaaagtttcgtattattctaactataacttgtaccatgacaatcctgctaattggagagatacatttggttttgttgttgctcctgatccacccaaacctgaagaaatatcatctgtgtgtagggatattgtgattgaatattcaaagaaaataagggatttgggttttacaatctttgagttgttgtctgaagctttgggacttaatccttcttaccttaaagaatttaactgtggtgaaggactctttattttgggtcactactatccaacatgccctgaacctggattaactatgggcactaccaagcacacagatagtaacttcatgactttacttctacaagaccaaattggtggtcttcaagttcttcatcaaaatcaatgggtcaatgttcctccgttacatggagctcttgttgtaaacataggagatcttctacagcttatcacaaatgacaagtttgtcagtgtgtatcaccgtgtcttatcacagaacacaggcccaagaatatctgtagcaagcttctttgtaaattcgcatgatccagctgagggtacatcaaaggtgtatggtccaattaaggaactgctttcagaagaaaacccaccaatctaccgagacactaccttaaaagagtttttggcatattattatgcaaagggccttgatgggaactcttccttgggccccttcaggttgtgaatcgaacaagggaatatactcttcattctcatcgatcgtatctggatataatttatccaaacaacaagcctctacttttattgagaatgtttaacaatttgtttgttaaaaagacattaccgcctataagaaatatgaaacacttacattattatttatatatttgttactatatccaattaatttttaaataaaaaagattagatctagctagataaagattatgcatggggccatacatacatctataagaccttttaatgtataaaagcatgtaaaataaagtatacatctacgtt

SEQ ID NO: 16994 - DNA, 519 bp, Glycine max
tggtagccactgcatttctgcttgttttctctgaacatggtagtcacaaacacaaaccagttaggggaaaccattgattccacttatgataggaaagctgaacagaaagcctttgatgattcaaaagctggtgttagaggtcttgtagagtccggagtgacgaagattcctcgcatgtttcatgctggcaagctggattggatgtcattgaaacctcacgtagtcacaccaagttgagtatccccatcatagacttcaaagacatgcatgctaatccagctctgcgttcagaagtaattggcaaaattcgaagtgcatgccatgagtggggatttttccaggtgattaatcatggaattccaatcagtgtcttggatgagatgattgatggaattcgtagatttcatgaacaagacactgaggcaaggaaggagttctatactcgggattctaagaaaaaagttgtgtacttttccaaccttggcttgcacagtggcaaccctgttaattggagagata

SEQ ID NO: 16995 - DNA, 873 bp, Glycine max
aaatactctttatctttatttcttcccccattttttctctcttccctaacaatccccaacaacgccttttgttatatatataaaaaaataaacaaaattctgacatatccgagaataatgctcaccaacagcatatcttctttttgccttctcactccaacaattccctaatcccaaactcttcactcttcttcaccctcttcttttgctttcacaccaatctcagacaaaaaaaaaaactaaaaaaaataattaagaaaccctagaaccgtgtttgggtggaggaaaacatggccaccaccaccaccagtctcggcggcggcgtcggcgtcggcggagacgaccgcgtcctcgccacggctcagcagatcgtgaagagtctcagggcggcgaaagaggatcgcgaagacatgcttatgatcttctccgccttcgataaccgtctctccggcatctccgacctcatcaacggcgacgattcgaagtcttctgatgaagaagacctcgaccgctttgaagccgcggagaaagtgattctcgctgatgcctctctctccggcgagccttcgcgtcaatccacgtcgctcttcaaccctccgaacaatcccgcggagtacttctctgccgtcgacgagatcatacactggatggagcagttctcgatcgcgccgccgccttcatccgccctgggacgcaccgtccatgtcattgcggaccgcgccgagaacgcgattcagctcgccatgtcgcggctcgaggaggagctgcggcacgtgctgatttgcaacacgatccccctacgacgccgtgagccgctacggctcgatcaagagggtttcgctctcgttcggctcgcacgacggcgcaatcgac

SEQ ID NO: 16996 - DNA, 508 bp, Glycine max
ctcgagcgaatcggctcgagatatagatagatactcatgttatacatgcgaattcgtcaactaacaacacatttccacttattcttctcatttcattcttcttccttcttttgtcttcccttagcttagtttgaagatcatggggagaggaagggttcagctgaagcagatcgagaacaaaatcagccgccaagtgacgttttccaaaaggagaactgggctgcgcaagaaagccaacgaaatctctgtgctctgtgatgctcaagtagcactgattgtgttcaatgctaaagggaagctttttgagtattcttctgaatccagcatggaaaacgtcctggaacgatatgagagacatgcccatatagggcaacttgttggagatggtgatgaatcacagggaaactggtccttacaatgcttcaagctcaccggcaaagttgaagtcttagagaggaacttgaggaaatcagtgggagaagatctggatcccttaaacttgagagag

SEQ ID NO: 16997 - DNA, 448 bp, Glycine max
ggatcgcggttctccctctcctatcgtctttctcttctcttcggatctccctccattccttggagtcacaatctcaatcactgtttcttctcttctacctcgtttccctattctccctcaatttttctttcgcttccaatgacatacttttaatttttttactcaataaatcactctttttcgtggatatctatgatttttttgactaaaacattggtctttcagatctaacgtatctatgccaacacccattgcacaacatcatcttctcgttttcgtgtatcattttccaattaactgatacccttttgcctgttttattaatttattccttcttgaccggacttgattcatcacacaactgcattttttggttggttggttggttggattctattattcttttacctgaaaaataatggttatggtgaatctgggaatgcttcat

SEQ ID NO: 16998 - DNA, 599 bp, Glycine max
ctcgagccgctcgagccgactcggcttcttccaacttctgttaaacttggcatattctccacctctcactcaagtaattaatcctaatttttttatttttcttcaaatctgtatactctctacactgacagaaacccttctgtttcttgttcttttttctttttcagaacctgctctcttttttctttttttttcttctgattttcacagatccgatccaaactatagagaatgtcagaaacaccccaaaggaagaaagcgagccttcccccaaaacgaggtcagatcaaggctcaaatttttactagccttgtgaattcagtggcctccactatctcaaaaacaggggaatcgcttcgaaacgtgattggaaatgggggcggttcaggttctgcatcttctaccccacccccaagtagtggctacaactctgaggccaactcctccgatgtcacctagaatcaatcaagtggcttttttctacgtggcttaaccaatgtttttgctggttgaccaggaacttttccgtaaactctgctactgctagtgttgtttttgagagatcacagatcttagggagcttacttcctaccctgttt

SEQ ID NO: 16999 - DNA, 440 bp, Glycine max
cggacgcgtggggttttctttgcagacatatcttggatcccatttccatcaggtcagtgcctatgtacttttttcagaaaggttggtggtgactggtgattgttgaagagaataatggcaacttcaactatggatattcttcatttccaccacactcctttttattgtgaggagaatgtatacttgctttgcaaaaagttgtgcaatgatggaatagcaaatgctgatggatctgatctttttgttgctttcatttccaacgaaaagaaacagatcccactttggaatcaaaaggctagcaaaagagctgatggggtgattctatgggattatcatgtaatttgcattcagaataaacaaggagctgtccctccactagtgtgggacttaaattcgactctttcttttcctttacctttaccattatatgtggctgaaac

SEQ ID NO: 17000 - DNA, 738 bp, Glycine max
ggagtaaacgagctttccactttgattctttccgaaatcgaagctgtaacgaaatctctgccacgggacagcgacaccgtacgaccttcccattgtttcctcaacgtgaacaatacaacaccacaccaccacccactaacaatacctaaagcctaacgaaccctaattcttgatcattgctcaattctttgttcccttcccatctcggagacacgaattcgccttcttcctcatttcccaaacaaatttcccctccgcactcccccaatttattctttttttcgcattttattttacccttttgaacctgtggcttcttttcgacgccccccatgtatcagaatggattactgtcaattattggaaggtacctatataaaagcatgggcagtagtgacatggacaaaaccccgaaagaggagtctaagacacctccagctacgtcacaggagcagtcatcaacaactggcatgccaacaactaatcctgactggtctaactttcagacgtattctcctatacctccacatgggttcttggcatcaagcccccaagcccacccatatatgtggggcgtccagcatattatgcctccctatggcactccaccacatccctatgttgcaatgtatccccatggtggcatatatgctcatccatctattcctccgggatcttatcctttcagtccttttgccatggcttctccaaatggtattgcagatgcttcgggaaatg

SEQ ID NO: 17001 - DNA, 524 bp, Glycine max
cccacgcgtccgcccacgcgtccgcactactcaacacaaaaaatagtcttaattagttagtgtgtcaatttgtgcctcaaattgaaactagctatagatatggccaattcccttaataaccacctgtttgttgtagtatctattctttctctcttagccttttctagcaacgcacaactatctcccaccttctatgccaaaacttgccccaaccttcaaaccattgtgcgcagtgcaatgaggcaagctgttgctaaagaagccaggattggtgcctctattcttcgcttgttctttcatgattgctttgtaaatggctgtgatggatcaatcttattggacgacactgccaccttcactggcgagaaaaatgcaggacctaacagaaattcagcgaggggcttcgaagttattgataccattaaaaccaacgttgaagcttcttgcaatgccaccgtttcttgtgctgatatcctagcacttgccacaagagacggagttgtgctgctaggaggaccctcgtg

SEQ ID NO: 17002 - DNA, 869 bp, Glycine max
acgcggacactgacccttatgttactgaaaaccttatccctcacacctacatggtagtggacaggcttgaaactggggagcaggtcactcacaatgtgaacactcctgtggagaataaaaggaaaaccacaaatggatcttccttgactagtaacccccaatccaaggatgctgcaacagaaaggaaaaacaagacacatatgaagaacaatggtgggttgaaagaagaggacaaggcaaaagaagagaagaaggatcagagaaagtgtcctgaagagcccccaacaggctatatccacgtcagagcaagaaggggtcaggcaacggatagccacagccttgctgaaagggtgagaagagagaagataagtgaaaggatgaaggtgttgcaacggcttgtgccaggctgtgacaaggtgactggaaaggcccttatgttggacgaaataatcaattatcttcagtctctacagaatcaagttgaggtccccccaatatactcttttttatttacctagttacttcacctcctcattagttatatgtataatgtatatgctaacaagctagctatgcctctaattttctgcagttcttgtcaatgaagcttgcttcggtgaatcccatgttttatgactcggcaacggatctagacaccctcttggttaggccagagaaactaaatagcatggcatcaccatcaccactaccatcaatgtcacattgcaacagccccaacaaccaagccacaacttttgctgatacaaccaccatgacccccaccaacatcttccacactactagtgactctcttttggataattcagtctcattttttcttcaagggcagaggccaaatgtgttatctg

SEQ ID NO: 17003 - DNA, 428 bp, Glycine max
cccacgcgtacggttctgcaagattgtatctattggggcgtctttcgctgcctcccgcgggatcttgtgaaaaaatatcgaatcctcaaagtgcccatcctcctaaatccaatgtttgctctttttagcccttctctccctatatattttttcacaagcacctctttcaattctctccgtttcactagctcttattccaaaccataggaagaagaaactgcagactagtctaatatggagaccatgaatgttcaggtgatgagatgcttatcacatatggtaattaaaaaaggaccatgcactgaggaagaagattctgttctgatcaactatgtcaacgtccacggccaatgccactggaactcccttgctcgctcttcaggtttaaagcgaacgggcaaaagctgcagactaagattggtcaacta

SEQ ID NO: 17004 - DNA, 429 bp, Glycine max
aaaaaaactaacatttttaggttgtgctcgaaattgaatgaaaaaaaatgcagaaagaagaacaagaaaaagagtatttagaatcgttgacgtgtccaagcttcaactgctactccaccgatgaactcccaggtatcgctcaaagcaggattcaaaaggacgacgcgtcgttttcggcctctcaaaatgacgaccctgacttcgagttcgccgcgtttcgagacgacgccttcgagttctccaacgacgacgccgttttccctctcttcaacagcgacgttgcgagggaccgccggaacagtgtctccggcggtctcgattccgacgcggcggtgctccggtttccgataaccggcgaggagcttcgaaggggtgagcacgatccgtcactgtcgccgtcgtcggagtcgtcgtcggaggcggatgagt

SEQ ID NO: 17005 - DNA, 530 bp, Glycine max
cctcgagccgattcggctcgaggcaaaacctgggatcaacaatggcggaaatctccaattcgccaccgacttcaaatcccgtcgaagaaaacacccaaactccgaaaaccacgcgaaacacaaaacccggcgtcaaacgcctcatcatcagcgtcactgtgctcttctcattcatcctaggttttcctcttctgtggaaatccgttaaaatctaccgcgcgccgctcccgttcgatcgagtcgactccttctcctcccaaatcgaatccaaacccttgtccttcccatgccgctttctagccatattcatcggcttcgatttcatggtttcaaacggaaatgtaggagccgcgattgagagaaaaatgtcggacctaagtcacggcggcgattgcggcggatgtggtggtaactactctgtttccgtggcggtgggcgggggaggcattgatgcggtctattttggcgggaagttgcggggtaatgacgaggatgctgatgaattggtgaagagtgtggtgagtgagtat

SEQ ID NO: 17006 - DNA, 538 bp, Glycine max
gcgctgcaatacttcttgcactcggttttatcttttacacactagcaaatgcacagtggtcttgtaattacagtatgatgggtgttattatgatttctggagcattgggcatcgattcttttctgggaaatcttcaagaagcaatatttaccatgaaccctgagaccacacagatggagatgctcttttgctcaactgcggtgggtttgcctttcttaatcccacctatgcttttcacaggagaattattcaaagcatggacttcattgttcacagcatccctatgtgtatggagtgctagtctttgaagcaatggccacattcataggccaagtttctgtcctctcccttattgcgatctttggtgctgccaccacagccatggtaaattgctttcacatgattttactgcctttattgtcatgtcagttttggaccaatttacagtgccctaacattaataagacccatgtgaaaaaacaaccgccatgcgccatgccgtcttaccttaaatgtcattgaatgaccaaatgtctag

SEQ ID NO: 17007 - DNA, 731 bp, Glycine max
aacttcccatcatcatgtagtgtgtatgtagtacgaagcatgcaccaccgtgtgttaccttgttctctcttctcttctccatgccactgaaagcttgaaacccacatagctagccatcaatggaatacagcaattgggctgaatctcttcaaaccgaaacccctctcccttctttcccacaaccctcatcatcatatcctcctacctattacccctcttaccctcaaaaccctaaccctaacccttcttcttctcttccccttaaccctcccggggttgatccccaaaccccattgaaccctattagctatgcggctcatgaacccgttcctggtttggtctacgctcagagccttgttggggatgattcatcttctgggtattgcttggaccataattgggttgccagagaggctgttaggcaatttggtactgaccctactctttatgcaccttgccatctcttttgccaacccaatggggctcagaacagttggctattggcaaatcctagcttctttgtggtggacaaataccaccactcaaacctcatgtcaatggaacacctaagaaaacccataggaaaactaaagtgtgcaacctgcatttggcgagttgcaagatgaatgcaccggccaggagtgctgacagcataaattagaaaagagcccagaaagacgtgagaaacctaaggatcattgccccttaacaagtcaaccatctggcatcta

SEQ ID NO: 17008 - DNA, 646 bp, Glycine max
  unsure (1)..(646): unsure at all n locations
taaagatcttgcatttcattcaattgcaccagaggcactgcttccctatttccagaagctagatatatggcctattaatgttcgggtggattacagtcccaatcgtgtagatctagcagcattaagtcatggaaagtatgtagaacttgtaaatcttgtcccttggaagggggttgagcttaacctgaaacatgttcatgcttctggcatctatggttgggccagtgtttgtgaaactactgtaggggagtggttggaagatatatctcaaaatcagattcgtaaaatactgcgggggcttcctactgtacggtcattgattgcagttggggctggtgctgctaagctggtttcatcaccagtacagagctacaaaaaggagcggagagtgctcaagggcgtgcagagaggtacgatggcatttcttcgaagcatttctctggaagctgttggacttggagttcatctagctgctggagcccatgatattcttctccaagcagaaagtattcttgcaagcataccttctccagttcctctgcctgtaaaagacaaatcgaanacagatgttcgatctaatcaacctaaagatgctcaagaaggaattcaacaagcttatgaaagtcttagtgatggcttgggaaaa

SEQ ID NO: 17009 - DNA, 453 bp, Glycine max
  unsure (1)..(453): unsure at all n locations
cccacgcgtccgctctgaactctcaatccacaaaaaagcaacatggcttcaattcgcgccttcttcacagccattgcttttgtggctcaatcatttcaaaactacatgatccagagtctgcacaaactttacaagcattatggatatgctgctgaagtgaaggacaatgaagagaaagaaagtgattattgttctgtgtgtctaagccaaatttgtaaaggggaaaaagctaagtctcttcccgtgtgcaaccacagataccatgttgattgtattggtgcttggttgaagaatcataccacatgccctctttgtaggaacaatatcactgatcatatcacccaaaaacataaacaggtgaagagcttangagaatctttgttcaatctcattcagagtttctctgatctattggtagctattctctacatgatgcttncatctaccatcact

SEQ ID NO: 17010 - DNA, 551 bp, Glycine max
ctcacgcgtccgcggacgcgtgggtcgggatccgacgggtcacattgacccggtacgtttctcaactggttcccaaaacgcgttggcacccacacgacggcgcagcctccattgccggtggcgacgaacgtttaatttggccagcctcctcttggaatcgcgacggtgacgcactgagaccagtggcgtcgatcctatggcctcaaagctgcttttgcagagaaggctctttaggtttctgcaactgtcaccaccttttttttcttccattcatgcagccccaacaatcctttctgcaaaagcttcagaattcatgtttctctacaatgtgaatgcccttcttcctcctctctctccttctagaaacttctgctctcgcagttttaaccttcatgaatctcaaggccccctgactattgattacaggtctctcctgcacgtccgtgttttccacagactggctgattccacaatacatagcctacaagagaaattagaggactatggagactcagttgaagttgatggatttgacatagattatgggaatg

SEQ ID NO: 17011 - DNA, 447 bp, Glycine max
cccacgcgtccgctctcgtgttctggctgcgttttctcaattcgttcccaaaacgcattggcacccacacgacggtgcagcctccctgtagctgcctcacctcaccactgcagcctcctcgccggcgaaacctccatttccggtggcgacgaacgtttaatttggccagctcctcctggaatcgcgatggtgacgcactgagaccagtggcgacgaagacacagtaagcagccggcagcggcgacggagacacactgctgaggtgacaaaagctatggcctcaaagctgcttttgaagagaaggctctttaggtttttgcaactgtcacaaccttctttttcttccattcatgcagccccaatcctttctgtaaaagcttcagaattcatgttcccctacaaggagaatgcccttcttcctcctctctcttcttcttctagaaactt

SEQ ID NO: 17012 - DNA, 441 bp, Glycine max
cccacgcgtccgcccacgcgtccgcggtcgcggggctgaagattacatggcaagaagctcaaggtctgctccgaccccctcctagccacattccaagtattgtggtgattgaaggttttgaatttgaggaatatgaggaagctccagtgcttgggaagccaacaatttttaccagtgatagtgtgggtgaaaagatccagtgggctcaatgtgaagattgtttcaagtggcgcaaattgccagcaagtgcgcttcttccatcaaaatggacgtgttctgataattcgtgggatccagaaagattttcttgttcagctgcgcaagagctgacagcagagcaacttgagaatttgctacctccttgtaattcagctgttcccaagaaaatgaaggccaccaaacaagatcccgataatgctgaaagctttggaaggacttgac

SEQ ID NO: 17013 - DNA, 549 bp, Glycine max
catatatgtaattaagacccggactagaatgaaaaattctgcaagaagtgtaattttgaacggagattttgatgttttataccgacagtaatcccagacataagctgtggctgacaagaaaaaaacaatggtccatgtacattctaatttgttgttatttgctgcaggcagtaagcatttttatagatatggatgagtcgggtgctcgttccaacgagtggatctacaaatagaatgtgttactgatttgaaatcctaaagttagtcactggtttccagataacagtgaaggaaaagtccataggcagcaggtccaccacttttagtgaatttcgttagtttggaatttattacacttggatcttaacatctacagaagcttttctgacgtttctgttggcaacttggcatcaggcctaggcaactatatttttggttctgcccttctttttttcctttgttcatattgatgtaaaatgagttaatataagaaaaagcattcatattaaatttctaacaaactttctcttcaaattagaggagaccctg

SEQ ID NO: 17014 - DNA, 1031 bp, Glycine max
gacccttcaaccccagaaaaactaaaaaattaaaaaaaaacatcaaccgaaggggtcatttctcccaatccgctagcttctgctttctgtcttccagtgcgtgaaggatacgatgaacatcatgtctacccaccagtgtagttggcctgtgagaattcaggatcatcctgacaaaggaagtattaacaaggctccattttccagaggatcggaattccttaatgttggataccatgctcaaaaatatggtcatagtgccagaaaatgtaggcccgttttttccagttcagtgagcaacagtacggatccttcagattcagatgacactgataagaaaaaacctcagaatggtgaaatgggaggagtgaatagtgaaatgcttagagagagtctcgagaaaatagttggaaaagatgattccacgtttagtggatttgaccttgctacccttatcaggaacaaatatgggaggtcttatgatgttcagttgataaagaaggagttcatgggaagaaatctccttgcgatgaatgtcatgtggaagtacatggagcagagatccttcccattgaccgaagaagagtatattttgaggcttgatgatattgcaaacaacttaaaatgttggggagctgtgtctcatattcggatcagcctagaaaagtcgaaggaacgacctcggatagggaaggcagtaagcatttttatagatatggatcagtcgggtgctcgttccaacgagtggatctacaaatagaatgtgttactgatttgaaatcctaaagttagtcactggtttccagataacagtgaaggaaaagtccataggcagcaggtccaccacttttagtgaatttcgttagtttggaatttattacacttggatcttaacatctacagaagcttttctgacgtttctgttggcaacttggcatcaggcctaggcaactatatttttggttctgcccttctttttttcctttgttcatattgatgtaaaatgagttaatataagaaaaagcattcatatt

SEQ ID NO: 17015 - DNA, 472 bp, Glycine max
aaaatataaaaaactaaaaaaaacatcaaccgaaggggtcatttctcccaatccgtttctgtttctgtcttccaggaacactgtcagtgagtgaaggatacgatgaacatcatgtctacccaccagtgtagttggcctgtgagaattcaggatcatcctgacaaaggaagtattaatagggctccattttccagaggatcagacttccttaatgttggataccatactcaaaaatatggtcatagtgccagaaaatgtaggcccgttttttccagttcagtgagcaacagtacggatccttcagattcagataacactgataagaaaaaacctcagaatggtgaaatgggaggagtgaatagtgaaatgcttagagagagtctcgagaaaatagttggaaaagatgattccacgtttagtggatttgaccttgctacccttatcaggaacaaatatgggaggtcttatgatg

SEQ ID NO: 17016 - DNA, 620 bp, Glycine max
tttacaccaactgcaacgcgaattttggtggcaaacatggaatcaaactcctcaaacccaaagttgttgtattagcattcacaaagagagcaccatcatccaaagaacgtcaagattctccacattcaaaaccattagattcatgggttttctaactctcactaattacttgatttttttgctcatattttccagcttctatatgggtgtaatctctgtgaatgataccatcacatcaaccagattcatcagggaccctgagactataatctcaagcaacggtgacttcaagctaggattcttcagccctgaaaaatccacacatcgctatgtagctatctggtatctcgctgaaacctacatcatatggatagccaatagagaccaaccacttagtgatttatctgggcctggggtgttcaaaattcacaaggatgggaatcttgtggtattgaatgcacaaaatagggtcatatggtcaacaaatgtgtcaattactgctaccaatacaactgctcaacttgatgattcgggaaatctgatcctgcgtgatgtcacaaatggaaaaacattatgggacagtttcacacaccctgctgatgctgcagtgccatcgatga

SEQ ID NO: 17017 - DNA, 751 bp, Glycine max
  unsure (1)..(751): unsure at all n locations
tgctttttgtaaaattgtaaacaggaagcgatgatgaaagacacattggaacgagctacagatcccaactttaacttaaaagcttaccttcagaatgcttatgttcatccagttttcaaagctagcctttttgatgaggacgaggacgaagaggtaatgagtctaaagttggaaactgcagacgttgactgtacccacaaaacggcaatctagtaggatcacaccattgcctagctgaattagtggtgcatcatctccttctctgcctgatcatggcatccgaaatcataatccagagccataaatcatggaccaaggattcatatcattgttattggcccggccacatatgtaacatacaatgggctacacatgcttccagcataatctgagagaagcaagctagtgtgatcggcacaaactgtaaggtagagattctttgatatattattatttccgattttgttaatagtgaatttgttcccttacaccacggaatgctgtaaattatcccagaacttgtcatggtttagatcgtgtgtatatttttttcttcttttttttaccttatgcttttccttcggattcagctcagtttatatgaggaaaaaaagtgtgtttgcacttgtgcacgtttttaagttttaacacaatcaatgaacgactttcctttacgtttnnnnnnnnnnnnnnnnnnnnnnnnnnnnnnnnnnnnnnnnnnnnnnnnnnnnnnnnnnnnnnnnnnnnnnnn

SEQ ID NO: 17018 - DNA, 438 bp, Glycine max
cccacgcgtccggtgtggcgtgggtagataaagagtgtatctggattctgatctgaatatattggcacgcataaaagggaacgaacgtaatggctgcagcagcgttgctcgaacttgatcgagttctcaagtccaagaaggaaatgttgacgcctcgggaagcaaatattcttctatcgtggaaatctaaatctctgatggatctcgctgccggtgcacttggtgggaccgcagctgcaggggctgcaacttggaaactcaatggactatttcgaatatgcctttcagcaggatttggtacttactgtggaccgtggatgtttaatagatcctcgtattctcatgcagatcagattcttacaatggatggtagtatattacagaaggagttagcgaatataacggtgacaaaataccagaatgatcctttgctaatgc

SEQ ID NO: 17019 - DNA, 494 bp, Glycine max
agacgacagaagggggagagaggaaaggtgtggcgtgggtagataaagagtgtatctggattctgatctgaatatattggcacgcataaaagggaacgaacgtaatggctgcagcagcgttgctcgaacttgatcgagttctcaagtccaagaagggcgtgttttgatatccgatttatgaccaaatatctgcctttctaggaaatgttgacgcctcgggaagcaaatattcttctatcgtaggtttctaaatctctgatggatctcgctgccggtgcacttggtgggaccgcagctgcaggggctggtttgtcatttccgtatccttaatgaaagaagatgctttcttctttctcttctagttattggcttaacctgggagatttatatgtattttatttagtctaccatagttacagcagattatcatcagtgcgtatgacgataaccattataccttcattgcagcaacttggaaactcaatggactattt

SEQ ID NO: 17020 - DNA, 439 bp, Glycine max
ccacgcgtccgtaacctccgaagcatggcaactcgaagagtaagatgcatgcagtgcggaaggcccctgctagtgccaattgaagttgcctatagcattcctttgatgtgttatggatgccaagctagcagacccaattatcattttgcaaacaatgttacacctccatttgttaattatcaccctgctcctggctatgcacataggatacgacgtaaccaattcaattatcctcggccattgccactgacgccgccaccaactccattgaaccctccttcttcctatggcaacaagagggctgtcttagttggcattagttattgcaatcagattaacaaccttaaaggttctgtcaatgacgctcagagcatgaaatactttctcattaacaagatgggtttccctagtgactccattcgcgtcctcacagatgatc

SEQ ID NO: 17021 - DNA, 542 bp, Glycine max
gtcgctcgtaaaagtgacaagtgacaacaaaaccccactctaccagtccccctatcttaagaaaactaagcataatccattttcccaacatcgcatattgcacgacacgagcgttgagacagtaaccacgatgtccaaactatagacaagatgaaaacgttggaaatgagtctattagcaggtgcttacgttcaaccccgcttcccttgtaactacaacccaacgctttccgcatcttgcagaacccaaaagacagcaacttcactaaccgtaacaactcccaagaaaacagaaaaggcgttattcactgagtcattcgatcaaacacgtgacgcgcaacctctccccgaaaagaagaagagggtgttcttcttagacgttaacccgctctgttacgaaggaagcaaacccagcttgcactctctcgggcggtggctctctctgtttctcgagcaagtcagccataccgaccctgtcattgctgtaatgtcccaactctactcatttttcaaaagatgacatttagatgcaaatgcttactt

SEQ ID NO: 17022 - DNA, 440 bp, Glycine max
ggatcgtgatgggatttccaggctgggcagtagatgcttgtcagctgtcagtgcatacgataatactctagagaatatagagacattagatgctgcccaggccaaattcgatgatatcctcaattactccttctattgatattgctcgtcagaagatcaaaagcttagcaaaggcaaaggaacttgattcttcattgatattgttgataagcagtgcttgggctaaagcaaaagaatctacaacaatgaagaatgaggtgaaagatataatgtaccaattgtacagggccacaaagagcagcctaaggagtattactccaaaagaaataaagctactcaaacatttgttgaacatcattgatcccgaggagcgattctctgcattggcaactgctttcacccctggtgatgaacacgaagccaaggaccctaatgctcta

SEQ ID NO: 17023 - DNA, 710 bp, Glycine max
gtttcttaaacccctaaaatcactatgcaaaattccaaagtagctagagtcggagcttcgatcgttaaacagctctgcacaaggaattgtacatccttgtgtggagtaggatatattcgaagcgcaagatatcattacaagcaacctctgtttcaacatcattcatttactaagttatacaagggagccatgatagaaaagcataatttcctttcaacaatgactactaacaacactaccaaggaaaggagtgaacaagaacaagcgatatctgtaacttttattgataaggacggtgaggagaagcatatcaaagtccctgttggaatgtctatgttagaagctgctcatgaaaacgacattgaactagaaggcaagagctttgattttataattctattatttcacctcaagatttcggtcttctgaattctgcttttttttttctcttttaaatgtttgagatagccagttggtcatatttgatccatctagccaccccacctgttgggttaatttttatttttttagtttttttagttttgctagaattacttttcattttgatagtctgcctttactttggaaaaagctcgccaaaaatgagactgtttctaataggtttagactcactacacttttacttgcctactttagagacaagttcacttgagaagaacattatctcctcctttgcttatgatggatat

SEQ ID NO: 17024 - DNA, 448 bp, Glycine max
attttataatccttctccatcttttctcttgatgccttccttcccacaccaatcttctccaccacttcacgcaaccttaaatccaacccaaaaccaaaagaaacacacacactcagaaacaccaagagaaggtacttgtttttttttcttttcttttcttttctctgttctgttctgtcacaacttagtacttcacatcctttgctttgttatcttcttcacatgttgcttttgttgcttgtcttgtcctttgagctgagtgatgattgattccctttcagtagcagaaagatgggttgccgttagtttctatgactttcgatgttatgtatgtgtgagtgtgatagaaagttagaaactacaacaactcatgtttttcttttaaacctttttatttggtatgtttttcttcttcttcctagctagttaatttgatctcttcctgatt

SEQ ID NO: 17025 - DNA, 812 bp, Glycine max
ggagataactattaatcatgacagattgtgtcatctgcaattgacaaaatgccgtgtgatgcgaatagcagtcaggtgcccacaacttgaaactatgtcgttgaagcgcagtaacatggcacaggttgtgcttaattgtccacttttgcatgagcttgatattggctcttgccacaaacttcctgatgccgcgatacgcgctgctgcaacttcatgccctcaactggtctcactggacatgtcaaattgttcatgtgtcagtgatgaaactctgcgtgaaatagcattgagttgtgctaaccttagttttcttgatgcatcatactgctcaaacatatctttggagtctgatagactgccaatgttaacagttttaaagctccatagctgcgaaggcattacttctgcctcaatggctgcaatagctcatagttatatgttggaggttttggagcttgacaattgcagcctgttgacttcagtgtctttggatcttcctcgtttgcagactattagattggtacactgtcgcaaatttgctgatttgaacttgaggactatgatgctttcttctatactggtatcaaactgccctgcactccatcgtatcaacatcacttcaaattcacttcaaaaattagccttgcaaaagcaagatagtttaaccatgctagctctgcaatgccaatctttacaagaagtggacctctcagagtgtgaatctttgacaaactctatatgtgatgtttttagtgatggtggaggatgccctatgctgaaatcactagttcttgataattgtgagagcttga

SEQ ID NO: 17026 - DNA, 1036 bp, Glycine max
ccggaaggtttatcgcgactcaactcttgatccaaggagaaaggcataccttgtgcagaatctaatgacaagtcgctggatagccgcccaacagaagttacctaaggctctatctggggagtctagcgtacaaatagaaggacgctcaccatcatttcgggacccagggaaacatgtatttgggtgtgagcactataagcgaaattgcaagcttcgagctgcttgttgtggcaagttatttacttgcagattttgtcatgacaatgcaagtgatcactcaatggatagaaaagcaacattggaaatgatgtgtatgcagtgcctaactatacagccagttgggcccctatgcatgtcaccttcatgtaatgggttttcaatggcaaagtactattgcaatatatgcaaattttttgatgatgaaaggaatgtttatcattgcccattttgcaatatatgccgtgttggacaagggcttggtattgattattttcattgtatgaaatgcaattgttgcctggggattaaatcagcatctcacaagtgcctggagaaaggtttagaaatgaactgcccaatttgctgcgacgacttgttcacatcaagtgcaacagtgagagctttaccttgtgggcattacatgcattcatcttgctttcaggcatacacttgtagccactacacatgtccaatctgcagcaaatcactgggagatatggcggtttactttggtatgcttgatgctttattggctgctgaggagcttcctgaagagtacagggaccgctatcaggatatactctgccatgactgtgatagaaagggcacttcacgcttccactggttatatcacaaatgtggatcttgtggctcatacaatacccgggtaatcaagagtgaggcagcaaattctagctgcctttagtatgcttattttttgtaatgaaagtacagagcttgtaaatatttgtatagccaatccaattttccccaaaccaggaaactggttacctttcattttatacacaatgcgagt

SEQ ID NO: 17027 - DNA, 526 bp, Glycine max
gatttgtaggcttctgtacattctatcaagagtcgatatcccaacatctcaagtttacgtgaatttttcattgccaaataccaagaaaattctcccagttttaaacttgcccagaggaactttgttgaaagtatggcaggatattccctggtgtgctactttctgcaggtgaaggataggcataatgggaacctcctattggatgaagaaggtcatatcatacatatcgattttggcttcatgctttccaattcacctggtggtgttaactttgaaagtgcacctttcaaattaacacgtgaacttcttgaggttatggattctgatgctgagggtgttccgagcgagttctttgattattttaaggttttatgcattcaaggcttccttacttgccgcaagcatgctgagcgcatcattcttcttgttgagatgttgcaggattcagatttcccatgctttaaaggtggtgctcggacaatacagaacctacgaaagcgattccatctcagtttaactgaagagc

SEQ ID NO: 17028 - DNA, 714 bp, Glycine max
cttgtgttatctactgttactgatcctttagatgacttcaagaaagccgtagtatccatcatagaggaatatttcagtaatggggatgtcgacttggccgcatctgacctcagagaacttggctcaagtgaatattatccatacttcattaagcgccttgtgtccatggcaatggacaggcacgataaggagaaagaaatggcttctgttctgctttcagcactgtatgctgatgtcatcagccctgcacagattagggatgggttttttatgcttattgaatctgctgatgatcttgctgtggatatactggatgcagttgacatccttgcattattcttagcacgagctgttgttgatgacattcgccccccggcctttcttgccagggctaggaaggctcttccagacatcttccaagggagttcaggtaatccaaactgctgaaaagagttatctctcagctccacaccatgcggaacttgtggaaacgcgatggggtggtagcactcacataactgttgaagaagtgaagaagaagataggtgatttacttagagaatatgtggatagtggtgacacattggaggcctgtagatgtatacgtgagttgggggtttcattcttccatcatgaggttgttaagagggctttgatacttgccatggagattcgttcggcagaacctctaatgttgaagttattataagaagc

SEQ ID NO: 17029 - DNA, 872 bp, Glycine max
  unsure (1)..(872): unsure at all n locations
gcaatgttttacaagtacctgttactttctcttcatctgttggtgaatctgctgtttttaaatttggctcttctgactcaaagccgataagctcaatcagctcaactactgttcctggtgctgttgattcaatgccaaaagctcttgattcagacaatgctggtgctaagactaatataatagctggtttctctgctcggttatctgaaccagctgtttcttctgtggcatcgatgccatcgttgacatcgcctgcaaatttatttacctttggcaacaattcaaatcaaaataatggacctgctgcttcaagccctacattttcctctccattcccccctctgacaaacaatcttacgggtcagaatatattcagtagctcatctcttgcagcaagcaacagcagtgttagtgcatatgtagcctccactagcatgggcatgacaactagcacccctgctgtagttgccgccagcaatagcagttcctccacccaagtctcatcttcatctcccacaacttcatttttcaaatttggatctaccccttcagcaccaacaagtttacctgtgtcatcttctggctcagaaccgctggaaaacaagagtggcacagggagtggcatgtttggaagctcttctgctgcaattggaagcacagggagtggcatttttgggtttagtaccccagcaatgacaactggaaatagccagtctctgggttctgtctttggcactacaagtgggtctgtccctggtactcangtatcttctggtactagtggtttttccacttcatctgagagtcagtcggtggcatttggttcatctgcatcagcctcattgtttgggttgactgggagcacaactttt

SEQ ID NO: 17030 - DNA, 701 bp, Glycine max
ggaaattttgttcgagtctggtaagttatcattaaaggagaatgatggaacagatgatggaaaacaaatgaagacaagattagatatgccacaatcacgttttctgtatcttctccaatgttcaaaagagacagacaattatgcagcatttactgattatattaaaggattatctccgtcaactctggatatggagcttcgaatgtttcagatcattgatgatgatgatgatcagcaagaagcagagaagagacctgagttggtatccattgaatggcttctggattattttattcatgagctttcctgcagaaataattttgagtttctacaagctgtcatcaggctatttttgaagatccatggtgagacaattcggcagcagtcatgcttacaagaaaaggcaaggaagcttctagatattcaatgcatggtatggcagagagtagataaattatttcaaagttcgaggtgtgtgattgcctttcttagtaattcccaaatttaggtgacaaaccttcaacttgcaaccctcgagagatagcaaaggcaacttgtgaggtcatgtatttggtttggacttctattcactggaatgatagaaaagtagggcagcaaatttgttaaaagctggtggataaggttatgtattaggctaaaatatgtttttcaatcttgtaaaattatcaaagtttggattt

SEQ ID NO: 17031 - DNA, 379 bp, Glycine max
  unsure (1)..(379): unsure at all n locations
cccacgcgtccgcaaacatcatgggcatcagcagcaggagcaggaaccgcaatcacctcaggggggacaatgatctgtttatgttgtaatggttcatggcttgctctttgaggatgttttaacggatctttcagctggcaagtaatcgtgtttgtaggagaagccttggctggtttacttgctgcatttgtgcaggctctgaggaagatggcttcatttttataattttatttagttttctttttcctggcatattaggattttttagtgtgtaaaccttcgaacccaattgtgcgcttgtaaaattgttactttgaagaaacaacttttgaacgtttaatacattatcgacgtgcatgcatttncttgaaaannaaaa

SEQ ID NO: 17032 - DNA, 645 bp, Glycine max
ggaggatattcctctaactttcctgatggtggtggtgggaggaaccaagctaatcgaagggaaaatggagtcaatcacattgcagagagaagtcatgctccctctactcagccattttcacagaaaactaagactaatacaacatctcaagctacaagagtttcagctgttgcaccccaaggtgctgcaaatcaatccaatgggaagtcaggtcatgattctgctggccaatctcccatagttagtgtacctaaaagtacttcagctgctaaggacactggccatcaagaaaatgtccaacctcaagcagctgttgttgcagcagcatcctcccctagtcaaacctctggctcagttactaccactgaccaaggaaagtctgtgtcaagttctgatcaacttcaaacttctgtatccaatgtccattcctctttggatcttgtagtagcatcatctgtctcccggaatcctggtgtgagtggtgcaattagtagggaagttgggagcaactggatatctgccggaccaaatcatgttaaaggaaataaagttggtcatgaagttaatgatttatcggcatccaagaatgaaaaatatgggtccatgaattcaacgagcaaaacaaatgccccacagaagtcaaat

SEQ ID NO: 17033 - DNA, 625 bp, Glycine max
ggagaaccaaacacgacgctgcgccttgtgtagttgcccaacgccgcgaccaccagatagttacgcttttttcttcaactcacgagaagagcgtccatggagaatgcagacatccctgagaatgccaacgagcattgcccaggtcctcagtctgaatctgctggaaaatccgatgcatgtgaagggtgcccgaatcagcaaatttgtgccactgcccccaaaggccctgaccctggtactcttcatctttatcttattattttatgcttcttcccagaaaccatcaacttcttcaaaatggcattatttatctatgtgaaatatatgatttgatatgttttaattacaacagtttagtatggaattattttccttattactcattatttagtttccttattttgtaaacctccttcattataaataagagtatttcatgtggtctgatatgacaacacacaacagtaaataatccttacgatctatataagcatgctgtgatgccacagctaatgattctagaatttgggactgtttctcagtatgttgtgaccctagcgtgcctatttagtagacaatgctagtagtatgatttctccccagctttgtttatgtggtttgatta

SEQ ID NO: 17034 - DNA, 651 bp, Glycine max
ggattaaatcaattaataaaatcacacttggttttgtgttgaaaaccttgagatttgagaaccaaacacgacgctgcgccttgtgtagttgcccaaccgcgtcaccacagatagttacacttttttcttcaactcaacagaggagcttccatggagaatgcagacatccctgagaatgccaacgagcattgcccaggtcctcagtctgaatctgctggaaaatccgatgcatgtgaagggtgcccgaatcagcaaatttgtgccactgcccccaaaggccctgaccctgatctggttgccattgcagaaagaatggctactgtgaaacataagatattggtcttatcaggaaaagggggagttggcaagagcacgttctctgcccagctggcgtttgctttagctgcaagggattttcaggtgggtcttcttgacgttgatatctgtggtccaagcattccaaagatgcttggcctagaaggtcaagagatacatcagagcaaccttggttggtcccctgtctatgtagagtccaaccttggggtcatgtcaattgggttcatgcttcccaatccagatgaagctgttatatggagaggcccacgcaaacatgcacttatcaagcagtttctaggagatgtctactgcgga

SEQ ID NO: 17035 - DNA, 715 bp, Glycine max
  unsure (1)..(715): unsure at all n locations
cttcggtcacttatttattatttaggtaaccaccccaaaaaaggaaagaaaaaggaaaggaaacagtcacaacaaaaaaagaacaaaaaaaatccaaatcatcgatgggtggtaaatctggcgtggtttggattttgctggcgttgatcgccgccgcttggtgtctgttaactccagcgagggcgaattcgacgacaatatatgaggagctccgggcgcagggtcttccggtggggcttcttccaaagggaatagcgaagtactcgatgaacgcgacgagcggggagttcgaggtgtggatgaaggaagcgtgcaacgcgaagttcgagaacgaggtgcactacgactccaatataaagggtgttcttggctacggtcggatcggggaattatccggtgtgtcggcgcaggagctcttcctgtggttccccgttaagggtattagggttgatgttcccacgtcggggctcattcatttcgatgttggtgttgcggataagcagttctctctttcgctctttgaagatcctcctgattgtaacccccaggcccaggttaatgttggtggtgaaggtgagcaaagggctgtttggtagaagataggaggaatgttgctgcatttcanattatacagctcaatcggcccctctatgcctgtggttgggcctcatggatatatatatatatatatatatatatatatatatatatatat

SEQ ID NO: 17036 - DNA, 754 bp, Glycine max
aaaaagtcaccttcttttcgcaaatccctttcccttttacactctcccttctcttcttcggctccctctccgtctccgcccaaagcggccaccgcgacgacgacgacgacgacgacgcggacgccggaggcgacgccacccccaacctccgtgctcggtccttgattctcgcaaaggtgtggtgtttgatcgttattttttttgctacttttgtatcgggcgtttccccctacattctgaaatggaacgaggggttcttagttctggggacccagtttgctggaggagtgtttctgggaactgcaatgatgcattttctcagcgacgctaatgaaaccttcggggacttaactcgcaaggagtaccccttcgcgttcatgctcgcgtgtgcagggtacttgatgaccctgctcgctgatgctgtcatttcctcggttttgaagaatacggggcgtgaccaaccgcgtgatgctgaggatgtccaagttcaaggggctgatgtgagcaaagtgagtaacaacagtgttagatctcagtcacaacaccggagccattctatttctagctctgatcatcatcacttagcaaaccctgcacttggatctgtccgttcgcttggagacaccattttattgattgttgccctttgtgcacattctgtgtttgagggcttagcaattggagttgctgagaccaaagcaaatgcatggaaagccttatggacaatctgtctgcacaagatatttgcagccat

SEQ ID NO: 17037 - DNA, 552 bp, Glycine max
agaaaatagaattgaattaaggacttggtaccattccatggtgggagttgagttgagtagagagaaagaagatggtggcgcgcaggtttcaggtgatccacgacgattctgactttgatctccattacgacacagacgacggcttcgaagtttttcaattccagctctattccctctcttccgttccacctcatcaacaaaagattttcggagccgaacaagatactccagtggtcaatgactctgatctcgtcgccatttctgacaaactacgactagtctcggtcaacgactccgaaccggaaccaagcgctgccgatttgttgaaatccgatgaggaattggcccgactcttgcaggcagaggaggaagcgctaatgttgcagtagtatgtggcaagccaaaatcctcgagaatttgatagtggagtacggccctacgttagtcaagtcctcatgttgcagcagtatgggctatatttttttgcggaatatgatattaaatgcataattgactttcatgctgttcttggttccagaatgggatggagca

SEQ ID NO: 17038 - DNA, 277 bp, Glycine max
acgactccgaacccgaaccaagcgctgccgatttgttgaaatccgatgaggaattggcccgactcttgcaggcagaggaggaagcgcttatgttgcagcagtatgtggcgagccaaaatcctcgagaatttgatagtagagtacggccccacgttagtcaagtccgcatgtatgaggatgcaacgcggcaggaggctgctcggaagtccgttcctgtggaagagctcgaggagaaagctttggtctctttggccaaggaggggaacttcaagccatc

SEQ ID NO: 17039 - DNA, 416 bp, Glycine max
gaccactacatcccatctctcaaagctttacacgcttttaacactctctagaaaagtggtgttcttttttctttctctgaggactcgttgcttttcctttttcccattctcttcttaaatccatggacacggctcagtgggcacagggtattggagtggttaaacaaccgatggaaggttcaaagcctcctcctcctcctcctcctcctatgttggagagaagggcaaggcctcaaaaggatcaagctttgaactgcccaaggtgcaattcaacaaacaccaaattctgctactacaacaactatagcctctctcagccaaggtacttttgcaagacatgtagaaggtattggactgagggtggttctctcagaaatgttcctgtgggtggtggctctagaaagaacaagagatca

SEQ ID NO: 17040 - DNA, 412 bp, Glycine max
ggttgaggtgaccattgcagatgcttgatcttgatccaaattttaactgctgcacatgttcagtcagaacgggcgaccaacacctgccagcaattactgaatgtcaacaacattccatcattagctgagcagagctcaaaggaaattcaaacctccatgactcctgcaagttttaatatttctagtgaaagggagcaatcggctccattaatgtacacaccacaagtgtcattttctcaaaaatctggacacattgaggaagatccacgcaagtctgcagctgctgcagtggcagcaaaactgactgcttcaacatcctctgcgcagatgctatcttatgtgttgtcatccctagcatcagaaggtgtgataggaaatccaatgaaagaatcttcagcagattatcactctg

SEQ ID NO: 17041 - DNA, 387 bp, Glycine max
  unsure (1)..(387): unsure at all n locations
gtaaaaagtcactgtctactgatgctcatttttcaagatcatcaaagttggaggaaaaagagaaagagcacaagcgggatttggatggagctaaagagaaggaaagatacagggagaaatacatgggaaaatccattcaagaacttgaccttagtgactgtaaacgttgtactcccagctaccggcttctgcctgcagattatccaattcctacagctagtcagagatctgagcttggtgctcaagtcttgaatgaccattgggttttttttacttttggaagttaggattacttttttaaacannnnnnnnnnnnnnnnnnnnnnnnnnnnnnnnnnnnnnnnnnnnnnnnnnnnnnnnnnnnnnnnnnnnnnnnnnnnnnnnnnn

SEQ ID NO: 17042 - DNA, 540 bp, Glycine max
ggatttactgctgaacattttgtgaagtcagatgtgattgacacaaatgcagtggcttcaaaagtccaagataatttttccaatgaaggttttgaccaaactgaaacagagagggaaaatgccaaacctgatgactccagagaatcaatagtgtccagtgaaaacagtgacgggaatgataaggatgggtccgttgatgagaccacattaaagagtacactcgattctgtgcatgaagagcaagggtttatagctggacttgttcaaatgtttgatgccgaatttgatgcagcggcttcaaaagttgaagacaagggttctatgtgacggttttgatgaagctgaggcacacagggaagacgccaaacttgagagctctagtaaatcaataatttcctgtaaaaacagcaatggtaatgatgaatatggatcttgttatgagatcacatctaacagtatgctagattttgtaggaatagattaaagactttttccttaatattttttataattttgtttcttttttatttattttctctt

SEQ ID NO: 17043 - DNA, 462 bp, Glycine max
cccacgcgtccgaacagagtaacatacactttaaaaagctggattaaaaatgatcgacaaataaagaaaagaagggcgtccaagcaaatatataataagaccagtcatggctaatgagaaaaacaatatgataaattgataccctttgcactgttggttatatcagatagagatccccagagcttggaatctatcctttgcaaaaacaaatcaaagcttgccacaagctctgtctgtctccctctgttgtgctctgcttcaggagccaacaaaatccaatatcaaaccttgatattgcaatattacaaatatcctaatccaatccaaacttggcaaagcctagtggagtagagtagccaatggaggctgaaaggcccccacttccacaacacaactctcacacaaacaagaagcccttctctcgactaaaccaatacgtagccacaaccagagttgggaaat

SEQ ID NO: 17044 - DNA, 604 bp, Glycine max
gagaaaagtccaggtgaaacagagagttctggttcaatttcatctctttcagaaagattctctgatgaacaggtatatccaacccaagctggtttttctcctgaagtcacgtctaaggctgcaccgaatgaagaagttagtacccccaaaaaaagtaaagaagaagatacagatgtgaaaattattacagacaaattagctgctgctctgctgactattagtgcaaaagaagacttagtaaagcagcattctaaagttgcagaagaagccgtctcaggctgggagaaggctgaaaatgaagtgtcatctttaaaacaacagcttgatgctgcaaggcagaagaactcaattctcgaagatcgagttggtcatcttgatggggcactcaaagagtgtatgaggcagcttcgacaagctagagaactgcaagagcaaaagatggttgaggctgttgtgaatagttctcgtgactgggaatccaaaaaatctgaacttgagaggaaagttgcccagtttgaggctcaacttcaaacagctaaagcagatgctgctgcgtcaattccatttgatcttcaccagagactagaggctgtgcagaatgaga

SEQ ID NO: 17045 - DNA, 408 bp, Glycine max
cggacgcgtgggcggacgcgtgggctgaaaatgatatgtttttactgacaatgacagatacaggagagggtaaatttttgtaaagcacatagaacaaaaacaagaagaattatatcagagagatacttgagaagggtattctgttacatctttgcacctcacctcacctcacatgctgccatggctgttcagatcagaaatgcattccttcctgtttcacacgactggtaggttgtacaaccaaaactgaaaaggctgccctatgaatttctggttttaatctttctaagttgactgctcatctcaaaatttcgaagacacaactggcctttttctggttcctggcttgtgccaagttatgcatggctaaatatgggctggtactctgggtatgcagaggatacattg

SEQ ID NO: 17046 - DNA, 536 bp, Glycine max
aaaccctggcctatcatcattcaccactgtcaacagtcgataccataaaccctatcaaagggaagcacttggcagcctccatcactccctccccagacagaaaaaatggaccccaaaaacgtgaaatcggacctggttctcattctcgattacggttcccaatacacccacctcatcactcgccgcatccgcagcctctcggtgttctccctatgcatctccggcacctcctctctttcaaccatcaccgacctcaacccctccgtcgtcattctctccgggggcccccactccgtccacaccccggactccccctccttccccgacggcttcctccagtgggcccattccaatggcgtcaccgtcctcggcatctgctacggcctccagctcctcgttcagcgcctcggcggcgacgtccgcgtcggagacaagcaggagtatggccgcatggaaatctgcgccgacaaaccctccgcgctcttcggccccgagaaagttcggtaaacgacaggtcgtttggatgagccatggcg

SEQ ID NO: 17047 - DNA, 582 bp, Glycine max
ctcttacattagcaaaaaccaaaacccgaaaaaacgcacagcacagcatcgagcacagcaacacctgaaaaaggaagggttagtgagtgtgtgtgtggaaattgtcatcgctcgcaagagcaacaacaactagtacttaaagagacagagagtgtgcacatcaatgtctgctcaggtcggtgtcaggacacgagcccaagccgcattagccatggaagctgttagttctgctgaaccatcatccaagagaaagaagatcagcaacagtactaaccaagagccaaaactctccaagactccgagaacgagttcttcctccgctgtcaaaccagcgacggtgacggagatggttcagccggtgtcgccggagatggttcagcaacgctgcctgagccctacctccagtgaaattccggcgtcttgctgctccagcaacggatccattggcctcgatcaggacaggatcaagctcttagatctggaggtggagagcgcgcaagttgaaacgtcgacgtgcaatggtggtcatgaaattgagaggagagagatgaaacgttccagcgagcttcgcgagaattctca

SEQ ID NO: 17048 - DNA, 515 bp, Glycine max
acgagcccacacacacatacactcaaaacaaaagcatcaacttccacagaaattagtttctcttgtactgaacgtacatgttattgagcatcatcaaatatggcaccacccactgaccgcagagtgatagcttcggaaggctttgatctgatagacaagttttgtggaccatcagcaccaagaaggcccaataatatgaatggggtatttcctgcaagacaaggacgttgggtggttcaagtgcccaatgatgagttggaagagcctatgagtgtcatcaatagcagagaggctgcagctcgctatggtgggattatgattgtgaattatcccaaaaagccaaaacttggtagatcattcaaaccttgatcattttggtttagatataatatatacttattgcttctattagactataatgggtctgtttctagtataggccatctcatatttaaattatattaatgtatatgatgatcagcatatatataaaatactatgtatataggaagcac

SEQ ID NO: 17049 - DNA, 967 bp, Glycine max
  unsure (1)..(967): unsure at all n locations
taaaaaatttgggggnaaaancccaaaatttttttttggggaaaaaggggcccccctttggggaaaaaaacccccttttgggggttttcccccggggggggggggggnaaaattttggggnccctttggttttccccaatttgggccgaaaagggaaanaacccctttccctttttttttnncccttnttaaaatttggggnggnnccctngggnncttnnttggggnggtttnncccaanaanggntnntngnnantntnntaaaaggnatttnnnccttttncccnctttgnannaanggccccannccncttngaaagnaaaaagngcaaagnncncncngttnctttttcccctnnccccaancttncccccctttggttttgggaaattcccccctttttaactcaagatatgggcccanaagccgaaggaaattaaagccccccacctttattccaaagggggctccagaaaagcgaccaccccaggaactctctcttactttcttgggtttgacccttctgccatttattggctttttggttgggctgttacgcctgggagtgaacttgaagaattttccttcttcagcagtacctgctgcatatgccatcttattccagcttggcattgccactgttctattgctttatgtacttttcctcggttgaagctggacttgttcactacactcaaaactgtaggatttttgggagcttttctgttgtttgtgggacacagaattctttcccatctcgcgtcaacatcatccaagttgaagtctgcataagtaaaaggaagattgtctatttataaagacatgacatgataatgtgtttttccttgaaaaaatggtaccaatccaattttgtaggactttgttgtactagttcgtgacgaatttagagctcaattatatcaagagaaaagttttatcttgatcttgccttatcttaatgaaag

SEQ ID NO: 17050 - DNA, 1364 bp, Glycine max
tattaatcaaggctctgagccaaagtgatggaaggtggcgttatagttctaataatccagagtctagtacctatgctgctggattagcacttgaagcactggctggagtgatctcattagcatcttctgaaattgatcagtctagggtgaatacagtgaaaaatgatatattgaagcttttcgacagcattgagaaatatgatgatggaaccttctattttgatgagaaatttgttggtggacgtgagcatcagggttctctttccacaacttcttctgttgttcgaggggttacagcatttgctgctgtaacttctggaaaaataaatcttccaggggataaaatattgggtttggcaaattttttcctgggaattggaatcccaggagatgccaaggacttcttcaatcaagttgaatcattagctcttctagagaacaacaggtgtttccatcccattggtactgtcacttcctgcaacggtttattcattatccaaaaaagatcagctcaaggttagggtgaacactgtacttggttcagctgcaccacctttaacagttaagcttgtgcgagctttccgcctgacgctaaagattcagctattgagagcaaggagctccaatatgatcaaaataatggaattcatgtcttggaagctttcccaaacaatgtggatgtgggaacttatgcgtttgtttttgagattgcacttcatgattctgctggtgaaaaagtttatgctactggaggccaaattcatgtaccaatatatgtcactggcattatcaaagtcagcaatgcggaaattgctgttcttgacagtgatcttggaagtgttgaaacccaaaaaacgctagatttggctggaaatgatgttgtttcactctcagctaaccacttgcaaaagttgcgcttttctttccaattgacaacacctcatgatcatgcttttaagcctcttcaggcatttttcaagttgaagcatgagacaaagcatgaacacatctttgtggttggaaatactggcaagaagtttgagattattcttgattttcttggtttggtggagaaattttattacctctcagggagatatgacattgagctgactgtcggggatgctgtcatggagaactctttcttatggctgcttggtcaagttgatttagatcttcctgaagcacctgagaaggcagcccgtcttcctccactccctgttgatccttactcaagatatgggcccaaagccgagatagcccacttattcagggctccagaaaagcgaccaccccacgaactctctcttactttcttgggcttgacccatctgccattaattggctttacggtcgggctgtta

SEQ ID NO: 17051 - DNA, 362 bp, Glycine max
cccacgcgtccgctaactgctccatatattgttgggcgtcattcctttccttattttcttcttagcatacaatgaatcacaaggcacctagtttttttctggggatggatgtgaagagaatcatgggtggtgatagagatgggaacaccaattgggtgattaaggaagatggtgaagaagatagcaatgattcatcatccattggactcaactcaatggactctatgtgctcgtcttcttcatcagagctgagcgaggacgctttatctttaacatcattaacacattcaaatggacctttgtttgaattatcataccctatgagccaccttccttatgaaagaggcttatctattttctat

SEQ ID NO: 17052 - DNA, 489 bp, Glycine max
aaaatattataggaagagagggagaaactaatagagagtcctatgctgggggactcagcagtgttgggaacaggaggaggaggctctggtgatgcagtggcagcagcaccacctgctgcatcaggaggagcacatgatggtggtgttgacggcggtgacggtggcggtggcggatcaaattcaggggatgatagagttgaggaaggtgagaggagctttggtgggaacaggtggccgaagcaagagactttggctttgttgaagatacggtcggatatggacgtggcttttagagacgcaagtgtaaagggtcccttgtgggaagaggtttctaggaaactggcagagcttggctaccacagaaatgccaagaagtgcaaagagaagtttgagaacgtttacaagtaccacaagagaaccaaagaaggtcgaagtgggaaatcagatggcaaaacatatcgtttctttgatcaactacaagcccttgag

SEQ ID NO: 17053 - DNA, 578 bp, Glycine max
ccgaaagagactatgctcggggactcagctgtgctgggagcaggaggaggaggaggtggtggccgcggaggaggagtagaaagtggtgcctccgccgatgcagtggcggcgacggtgaccgtgacacatgatgtggcgacgacaaccggaggaggcggtggtggatcaaataattcgggggacgatgagaggggtagaatcgtagaaggtgaacgtagcttcggcggtaaccggtggccacgacaagagactttggccttgttaaggatacgctccgatatggacgtggcgtttcgagatgcaagtgtcaagggtcccttgtgggaagaagtatccaggaagatggcagagcttgggtatcacagaagctccaagaagtgcaaagagaaattcgagaacgtgtacaagtaccacaagagaaccaaagaaggccgaagtgggaaacaagatggcaaaacctatcgtttctttgatcaactacaagcccttgagaaccacttttcaacaccccaattttccaacccttcaacaaaaccctcacaatcagcaccatcaagagtagtagcattatcggtgtc

SEQ ID NO: 17054 - DNA, 438 bp, Glycine max
ccctcgcgttcgtaaacacaccctcttcaaaactaggatcactcctctagctagccagaaatggttctgaaacttgtttatagcgaccggtgtgatgatagggcggatgtatccattaacatgtgcacaatatcagaatcaggctataatatctgcacaaaatcagaaagagactatagcacgattcggttgcgattcgaaatgtggaaatgtttccattccttaccctttcggaatgcgcaaacccaaatgctatgcaagcgagccgtttgaaatagaatgcagacacaataaaaatggttctcaaggtgagaaactgatcgcaccctacctcaagtatataaatctagaggtaatgtacattgatcttgaatacggtacggtcgggatcaagaatccaatttttcaccctggttgcgacaacactagtacaggcat

SEQ ID NO: 17055 - DNA, 523 bp, Glycine max
  unsure (1)..(523): unsure at all n locations
ccaatgaaaaatactcccatcttgcttcatgaccacaatgagcacttaaaggatactgtgttcatgaagggaattcaggtatacgagtctctgataagttccttgagtacatttacagaagcttcacattaaaggcctgagttgctgatctcaataggagaacaatgcctaacttttgtagggaaaatctgagcgattggataccccacctccaaataataagtggagtaaaagcataaatagcaacgttgttatcggaccccatgaaaaaaggaagaaaaaaagtcctctgttgttccaattcgctcatggtggggactgggaatggtacaacttattaattattattgtacctttagaaattgtaatgatcaggaattattttctgtgaagtttatttggtcctttgtgttaaatcatcgatggttgcctatcatgggccaaggattcaactctctactgttgtctataagttgcatccttaaatgctnnnnnnnnnnnnnnnnnnnnnnnnnnnnnnnnn

SEQ ID NO: 17056 - DNA, 520 bp, Glycine max
ggcgacccacgcgttcgcgcacacagaaatgcagagtgccctgcgattccatttccaagcttcaaacccaggcatcgttgttccgcacacgaaccacgctttcgccaccaaccttaactcacaccgtaccctctcctgcacaaaacgccgttcccttcccctgtgctccttcaccgcacaaccttcgaaccaaacctccgccgttggatctccatcgcttcaacactggaacctcaccaatcgccacgtcaccgttctcaacgtctttgcctgcgcgacggcgatatgtgcaacgtggctgttttgctccgcgattccgacgctcctggctttcaagaaagcagcggagtcgatggagaagctcatggatgccacgagggaggaacttcccaacaccatggccgcaattcgattatccggcatggaaataagtgacttaaccaccgagctcagtgatataggccaagagattactcaaggtgttagaagctccactcgtgcagttcgcttggcagaggag

SEQ ID NO: 17057 - DNA, 402 bp, Glycine max
aaatgccatggatgcaaaaggcgattgcgctgatcctatcaattatttctcatcgattgaacgttgaagccaacttgggtgagtttaatgaattcaccacacctctatttgatgacccagaaggttcgctctcttttgtcatgcctggatctttcaaatctggaggagaatctagttctgacaatcttttataacaatggtactacgattggttctgtaataacttaatatctatgtttctcttaatcgtgaagatataactgtccggtttgtgttaaatttgcaaagccggtttaatttcatgaccatgcaaatccttaagaaggatgcgtgattgttcttgatgattttataaattataaatggcgccgtcactttaatccattttttatttccaaattc

SEQ ID NO: 17058 - DNA, 511 bp, Glycine max
cggacgatccttctgcatcatcacccttcgtataataccgtctctccccttttgctttttcctctccatcattgacttctgccaagtctttcaaaaagctgtgatctaaggaataataacctacacgaggtcttcgtggaagaagataccattgccacttgccacatgccaagcgatcaggtgaatgttacttatgatgttaattactctacgtccatctcactcttaatttcttaacacgagtcctttagtcaattgctttttagtttttaccccttttgaaattccaatctcattccaactttgcacaaacatttttcctagcggtggaaaattggattttttttttttttggatatatagaaatattggtgaagtggtctttattaagagttgatggaacccaatgcactaggtggtggaatatttcctaacataagttgtggtttgctaggagtagaaaaccctttacagccgctacaacaacaacaacatcctaacctttaaaacc

SEQ ID NO: 17059 - DNA, 420 bp, Glycine max
cggacgcgtgggcggacgcgtgggtggaatttggggcagctcagtggatgccaggcgaggaatttgctgatcaaccgttttaatcagatgcatgaacccttcaagtacatgattgaattatgcttggcaaaggttgaaaaagtctataatggattctctccgcgacccatctcatcatatttcgtggaggagttgaattatctatatttgaatagtcattgcctggacaagtcttcttaagttttacaaatcaaccttggtcgtcatccataaaagtttagtttgatatttctttcttgtaaggatttaattaagctttttctccttaaatttaggttacttctgtttttggccttcacatttattttttttaggtcctaaaattatgaaagatgttctttttacttcctcttgcggttt

SEQ ID NO: 17060 - DNA, 845 bp, Glycine max
ccctcgcgtccgatgcagtaaacttatcaatgttgctgtgcctgggactatagatgaacggaccatcaattgcaaacggaatcctagtttttgggaggtaaacgagaaccatactctatgcctcaattcagccaaggctattggctgcacagtggttaacattggcgcacaggacttagttgaaggaagacctcatcttgttctagggttgatttcccaaatcataaagattcagctgctggctgatctcaaccttaagaagacacctcagcttgtggaattggttgatgacagcgaggagatcgaagagcttcttaatttgtctcctgaaaaggttctactaaaatggatgaattttcatctccagagagcaggttacgagaaaactgtcagaaatttttcttctgatgttaaggatggagaggcctatgcttatctgcttaatgtccttgctcctgaacattgcagtccggccaccttggataccaaggatgccagtgaaagggcaaatctggttcttgatcacgcagagagaatgggctgcaaaagatacttgaccccaagggatgttgcagagggtacttcaaatttgaatcttgcatttgttgcacaattgtttcatcataggagtggtctatctacagacactaaaaagatgtcctatgctgagatgatgacggatgatgtgcaaacatctagagaagagagatgcttccgactgtggatcaatagtcttggaatttctacacatgtaaataatctgtttgaggatgtcagaaatggatggatacttttagaagtgttagacaagatatttccaagatcagttaactggaaacatgcaa

SEQ ID NO: 17061 - DNA, 526 bp, Glycine max
agtacacaaaattttggtctataattatatgcaacctccctctcttcacaatcatcacatcccttactcgcacgcgaacacaaacactctctctttgcctcttggcgcaattcgatcgaagctatctacccttccatggcggcaggactctccaccgccgcaatcttaaagccctacaatctcgtccaacccccaatccctctttctaaaccaaccacatcactcttcttcaaccccttaagatgtttccatcacagtacaatccttcgagttcgacccagaagaagaatgagcggcttcaccgtttgcgtcctcacggaggattccaaagagatcaaaacggtcgaacaagaacaagaacaagtgattcctcaagccgtgtcagcaggtgtggcagagaagttggcgagaaagaagtcccagaagttcacctaatctcgttgcggctgtcatgtctagctttggcatcacctctatggcagtctttgccgttaattatagattctcctgcaaatggagggtggag

SEQ ID NO: 17062 - DNA, 443 bp, Glycine max
gaaggaagagaagaagttcagaacaaaaacacatcaattaagaagtaactctctttctttctttctttctttctttctctcggggtgaagttgttctctttaatggcgaagtcaaagaacaatgctaagaagttgtcctacatatcagttccatctcagatcatcaactccatatcatcatcttctctgcaatctcttcttgactctcccaagaagtcttcaaggaacaccaacaacaacaggttctttatcttcttcaccaacagcaccagcaccatcatcttcagaaaacaaagactctggtttttcacactctttctccttggtttccttggcatgctcaagtttggcctcacccttcacacccctttccccccctacccatgtgccaccacaacccttctgccacagaacatgatcttaaccaccccacattcaaagtc

SEQ ID NO: 17063 - DNA, 426 bp, Glycine max
ttttgtctctctctctcctcacgccaaaccacaccagcttcgtcccttcatctcctcactttctcatttgtggaattacttttgtctcttcctctctgatcttccacaggctcctattatcccttttgctttcccaatccttttcgcgaaaaaaaaaaagttcactttctattttggcccccttttgtggttcctgaaacgcgttaagggttctgtttgtgttattgggtcaataatggggtcctgtttttctaaaattacggcctcaatttttgcggtctgggggtgattgattttgtggtgaaggaattgtactggaggagggggttctgtgttctcaatttgaatttcatcctctttcttcaaagggggtgttgttaatttcttaaatttgattccttttttgtttaccctttgtcctggatg

SEQ ID NO: 17064 - DNA, 526 bp, Glycine max
tttctacgcgtccgcccacgcgtccgcccacgcgtccgtccacgcgtccgcccacgccccccagcaaggctagcttcgatgctcccttcaccaagttgccttaatactctgaaatcatagatcacttccttaaacacctttcagatgatgtttccttccccacgcttcaaaccctttctctatctgaactcactcacaagaacaccactgcttcaacttcaaaccccaaaatcgaatcaaactttcccaccatcactcactccgaaacacacctcaaccacttcacagcaccacccattcaaggtttcctacctcgtaagcacttgtggcttctccgtagaaaccgctctcaagatctccaagttcacccaattcaaaacccccgaaaaacccgattcaatcatcgccttattcagaagccacggtttctccaacacccagataatcagcattattagaagagcacccaatgttctctcatgcgacccccacaaaaggattttcccaaagtttgaatttttacgct

SEQ ID NO: 17065 - DNA, 460 bp, Glycine max
cccacgcgtccgctttgtcttcttttgggaacggtggatggacatgcagttgccaacacagtactacacagctctgctttacacgatcactacgatcgtattactactgctaatagtatattatgactacatcagcagatggtacaaacatcgtcagaaggtcaacctcgtaagggatcacgaagaagagaaaaaaccattgaagccaccgaaacccactaacaaatctggaatcccaataccaaatggctcacccaaggcagcacctagacaggagtactattatatgtcagcaagatcattggctgggagtggcactccaccctggggaatctacatgagagctgctaaaagtggtccttcagcccatcgaatcgatcgatgactcttcttccgatgacgaagcacctcctgcttcctcaaataattctgcatcccaagctatgccaatcccacgttc

SEQ ID NO: 17066 - DNA, 547 bp, Glycine max
caggtctaattcttccttcactgccctcaagtgcgcgttttcaaaaaaattcatcactggtaaatggtagcagttatttagttggctgaccgaaaccatttatagtttctacggagcacaatgttgttccatgaaacttctgcaatcaatcttcttcgaaaattgcaacaaaaatacatacaacggaactcatccaatttcaatggttgcgagagctaacggaattgagtgtgtttgaagtgattatgggtcctatgaggatgctgaataacagaaagaaaggacagcagaagaagttttgttaacctataccgtatttattatatctatatttaccaatttttttcttgccattccatacgatagagcgaatagttcgtagtaggtgtttttaacccccacgcgatcttattatggatggtccaaccagcattatatgattgggaataacatcacaataggggatgatgatgatgatgatgatcgccataactgtctccatactcttgggaaatgttcagagcttcgaccgccggtagtttgtgtg

SEQ ID NO: 17067 - DNA, 428 bp, Glycine max
gtattctttgaggtcatgactattcttcacattcagcatgaaacaagacaccatatgagatgtgaattagtaaaagatgacagtgaaaaacaaagaaagaaataaaagaaaagaaaagaaaagaaaaggagtggctttgcagtatatcatctgtgacatgcaaggcaataacatttcaggttccacccaataagtaggttttttctacataacctctgaatttactggatggtgggaccggagaatatttcatgtttaacaactacaatccatctcaccttgaaatctgggaacctagcattctgcatggtattatgtcggcatctagatgatacggcccgaacctgctgcctccttggtattaaaagaggtaagccgtatttctaaagtcaaaaacgggcctattggctgaacttttattaattttt

SEQ ID NO: 17068 - DNA, 497 bp, Glycine max
ggctcggaaccttcgacaccgccatcgaagccgccatggcctacgaccgagccgccttcaggctccgcggctccaaggccatcctcaacttccccctcgaagttaacaccgcggcggagaccgtctccgtcgccgccgtcgacgtcgagaggaagcgccgccgcgaggaggaggaggtggtggtggaggatgtaaaggcggtggtgaagaaggagaaaataacggagcatgatgtgagttgttttagggggatgccgttaacgccgtctatgtggaccgggttctgggacagtgacgtcaaggatattttcaacattccgccgttgtcgccgttatctccttttggattttcaccgctcgtggctgtgtgaaattccaatttaggactgcgttttttcgtgttttagtacttacagcgtcctcctgttcagggatgagtacattgtacatttgacgaatttgtttattcaacaatcttttattcacttttatttgct

SEQ ID NO: 17069 - DNA, 455 bp, Glycine max
ggtcaagagattgcaggaatctcaatattcagagaaagaatttctgtctgagatgaatatactagggtctgtcaaacatcgtaacttggttcctcttttaggtttttgtgtggctaaaaaggagaggcttttggtctataaaaatatgccaaatggtaccctccatgatcaactacatcctgatgctggtgcatgcaccatggattggcctctaaggctcaaaattgcaattggagcggccaaaggattagcatggcttcatcatagctgcaatccccgcattatccaccgaaacataagctctaaatgcatcttgttggatgctgattttgagcccacaatttctgattttggccttgctagattgattaaccctattgatacacatttgagtacttttgtgaatggggatgttggggatttatgttatgtcgctcctgaatttacataaactt

SEQ ID NO: 17070 - DNA, 721 bp, Glycine max
gcgttttgctgctgttattatgaggatcagggaaccaattactactgcactcatttttgcatctggcaagatggtctgcactggagctaagagtgagcaacagtctaaattggcggcaaggaagtatgctagaattatccaaaagcttggtttcccagctaaatttaaggattttaagattcagaacattgttggctcttgtgatgtcaagttccccattcgacttgagggtcttgcctattcccatagtgctttctcaagttatgaaccagagctgtttcccggactaatctatcgcatgaagcaacccaagatagtcttgcttatatttgtctccggaaaaattgttctgacgggagccaaggttagagatgagacttacacagcctttgagaacatatatccagtgcttactgagttcaggaaaaaccaacaatgattactgtcaagagagcaggagcaaggtttcctggtagagaagattgcggaacaccggcttgaattgattgaactgtaaatatgaagacaagagatatctgtaatctggattgagttttaataagacatccctttttgttcttgtctttttctctctttaaaaaaaaaaggatcctgctttagtaaagtggaaggaaaaaaaactgtgtattgaatttgacactgaaaaaaaaagagatttagaagaggcagaatagaaaagaaaaagtgagaaattctaagc

SEQ ID NO: 17071 - DNA, 397 bp, Glycine max
ctttgaatgaggatgctgctaataatgatcaattggatgctctggacagcccacaagactgaagcaggaggtatatactattatagggcggtgacaggagaatcaacatatcataaaccttctggctttaaaggggagtctcaccaagtttctgctcagcccactccagtttcaatgattgatttgcctggtactgattggcggttggtctccactagtgatggaaaaaaatattactacaacaatctaaccaagactagctgctggcaaatcccaaatgaggtggctgaattgaaaaagaagcaggatggtgatgttacaacagatcatttaatgtcagttccaaatactaatgtattctctgatagagggtctggaatggttactctgaaatgct

SEQ ID NO: 17072 - DNA, 679 bp, Glycine max
ccggaagagtccctccctcggtccgctccttctggaacctacgacactttaatttctccggcaaccgcttcctcgacccctctctacaatcatcctcaccagacacaattctctctagacgttttctatcagaagacggtgatggtgatgttcctgcacctgctcctgcacctaataactcacagaagaagaaatccaatgcttctactcatgctgctgctgctgcacctggtcctgcacctaaccataccaataagcacaagcacagtaagagaaaactcttggggtggattctggggtttgtagcaggggcactggggggaaccttatcaggattcgtgttttctttgatgttcaagctcgctctcgcgttgatcaaaggaagaggaaggaaagcggggcctgatatctatagtccattgatcaagaaagcagaagatttggccttcttggaaaaagaagaaggaatcgcgtcgttggagatcatcgggcgcggtggctgtggagaggtctacaaggcagagttaccgggaagcaacgggaaaatgatcgctataaagaaaatcgttcagcctccgaaagacggtgctgagttagcagaagaggacagcaaggttctgaacaagaaaatgaggcaaattcgatcggagatcaacaccgtgtgacaaattatacacag

SEQ ID NO: 17073 - DNA, 411 bp, Glycine max
tctctcggacactgtttctcaagctgtctagtctgggggtaatatttaaaataggatacgtttaggttaattttttccgtgggttcatggtttaattaggtatttccgtatttgttataaattattaaatataattgaagtttcatttataaatggaaaagccttcttctcattacttggtttcaagtgagaaaaaatggacgagggtttacactcaatcctataatattaagttcttggaaagccctgttgggatggaggattacatttttttgatcatagttctatcattagactcctctttttcaaataaactcttgatttgtgtttattttttttttttttggtctaatctagaatgtattgacattgaatctttttgaagtgcaataaattctagaaatgtgcaat

SEQ ID NO: 17074 - DNA, 680 bp, Glycine max
cccacgcgtccgggggtttatttaagtggttcttctcagggatagaggactgtggattcgaacagttccctaccttcggattgcaagcttggaagcaaacattctacttcgattttagtatgacttttgtgggagcagggatgatttgctcccatcttgtgaactgttctttgctccttggagctgtgctctcttttggggtcatgtatccgctcattgatcggcttaaaggagactggttccctgacaatttagaagaaactaacatgaagggcttatacggttacaaggtttttgtttccattgctcttatcctgggtgatggcatatacaatttcaccaagattctaatttctacagtcctcaatgttaatgaaagaatgaggagcaagaataataaaaatgtagctgctgatcggcacgagaatcctaccgaggaccttaaacaaactgatgaatttctaagggagaccattcccctgcggattggagtcattggatacgttgttttcacactcatttccataattataatcccacgcatgtttcctcagctgaaatggtactacgtggtggtagcttatatatttgctccatccctggcattctgcaatgcttttggagcaggtctcacagacataaacatggcatataattatgggaaagttgcactctttact

SEQ ID NO: 17075 - DNA, 492 bp, Glycine max
gatgcacaattgagttatataatcgtctataatcatatctgtgtatcaattttctctcaacatcctagcttgctgctgtaaacatctgatcagagttcatatatatggcgaataaactgaatataaggctaggagaaccaactctggtgccaccagcagaagaaacggaaaagggtctttactacttcctttcaaaccttgaccagaacatagcacatccagttcgaacggtttacttttataataagtctgcatgtagagggaacgaggaagcagcacaagtaataaaggatgctttgtcgaaggttcttgttcactattaccctatggctggaagattggccataagttcagaagggaaactgatcatagagtgcacaggtgagggtgttgtgtttgttgaggctgaagaagcaaactgtgtgataaaagacctgggagatttgacaaaacaacctgaccttgaaactcttggaaaactggtttatgata

SEQ ID NO: 17076 - DNA, 417 bp, Glycine max
aagccattggtgagttccaacttctttcatgtgtttctttgcttgtagcttccctgagggatatactatcatatatctcagtatatcctttttcttttgattttttgtttagttgaagttggatcagtgtgccacaatgttaaacacacttcacttgtgattgggatcgggatctttctcttatatccactattccttgttttatttaatgtggatttagtgatttactgaggaatacacccttcattcttcctcacttgcttacttctcattcggttcaatgatctattggtttttgtagtcggtacttccccctctttgctttccgaatgcttttgtgattattactatagcaaatttggaatatttagttacttggaaaagctaaaaaaaactcaacttttggtatgggtaagt

SEQ ID NO: 17077 - DNA, 438 bp, Glycine max
cttaaaagaaacaaatgtttctctttctctctctctgtgtttgaagaacaaaacacacttcttctcaatttcttctttcttctgagagagaaagaaagtgagggacttggagagaatttctgtcataacagcacattgagtcaccaatcaaccatgtctctggggtatgccgagaagctttcctacatagaagatgtgggcaacgttggaatggtcgaatatttcgacccatcccatgttttgcgagagaaaatagatcaacttgctatcatgataaaaagagtaagcatctagtggtgtttactggtgcaggaatatcaacttcttgtggtatacctgattttcgaggtcccaagggaatttggacacttcagcgtgaatgtaaagccctgcctgaagcatcactgccatttcatcgtgcatcgccaagcatgacac

SEQ ID NO: 17078 - DNA, 423 bp, Glycine max
cccacgcgtacggactggttcactgtacttggatcttttcccattacagtcacgcacaccatcaacgtcccttctcggctcttcttccctcatctctactgtacaccctacgcttcatttcttctattctctcttctacttctctctctgcaaaagttcaagccatttatcttcacttcgtttcatctcatagtcctacacctcttcacaattccaacaactcttacaccaaacacacatgcttctttttaagttcttcatatctcaacctctggttctggttctccaccatgaaccaataactacaacctcgtacttggcgtttgtttttgtgtttgtgcctgtcttgctacatggcgtaccatatccacaacctttcacagcaagacctttcactccaccatttcccgaaccaatccatat

SEQ ID NO: 17079 - DNA, 1501 bp, Glycine max
acgagcgaatatgacctcagagccattcctggtattgcagcctaccctcctcctcctccacaagacaacaacaacaacaacaacaacctcgacgaaatcgaaacagctaacaacatcaacaagcgtctcaagccatctccagttgaatcagcagactccgcgtctgagcccacgcgcacggtgctgctcgttgaccatcaggaagccggcgtgcgtctggtccacactctcctggcgtgcgcggaggccgtccagcaggagaatctgaagctggccgacgcgctcgtcaagcacgtgggcatactcgcggcttctcaagccggcgccatgaggaaggtggcttcctacttcgcccaagccctcgcgcgtcgtatctacggaatcttcccggaagaaaccctcgactcctccttctccgacgttctccacatgcacttctacgagtcctgcccttacctcaaattcgcgcacttcaccgcgaatcaggctatcctcgaagcatttgccactgctgggagagtccacgtcatcgatttcggcctcagacaagggatgcagtggcctgcactcatgcaagcccttgcattgcggcccggcgggcccccgactttccgtctaaccggaatcggcccgccgcagcccgacaacaccgacgcgctgcagcaggtgggcttgaaattagcccaattggcccaaatcatcggcgtccagttcgaattccgcggcttcgtttgcaacagcctcgcggatctcgacccgaatatgctcgagatccgacccggggaagccgtggcggtgaattccgtcttcgaactccaccgcatgctcgcccggtccggatccgtcgacaaggtcttggacactgtcaagaaaatcaagccccagatcgtcaccatcgtggaacaagaagcgaaccacaacggaccgggttttctagaccggttcactgaagccttgcattactattccagtcttttcgactcgcttgagggttcgtcttcttcttcgaccgggttgggctcgccgagtcaggatctgttgatgtccgagttgtaccttgggagacagatttgcaacgtggtggcttacgagggcccggaccgggtcgagcggcacgagactttgactcagtggagggggagattggactcggccgggttcgacccggttcatctcgggtccaacgcgttcaagcaagcgagtatgctacttgctctattcgcaggcggtgacggctatagggttgaggagaataacggctgcctcatgcttggctggcacactcggccactcatcgctacctccgcctggaagcttccctccccgaacgacttgcactgtaaactgtagattaattggctcctggatgggtggtaaataataaaaaatggtttggttgaacttgttggagtggagtgaatcaatgacccagtgagtcagtgagtcagtgagtcagtgagcgagccagcgaggccccaagagcataaataaatgagagggt

SEQ ID NO: 17080 - DNA, 596 bp, Glycine max
tttgcaacgttggtggcttacgagggcccggaccgggtcgagcggcacgagacttttgactcagtggagggggagattggactcgggccgggttcgacccggtttcatctcgggtccaacgcattcaagcaagcgagtatgctacttgctctattcgcaggcggtgatgggtatagggttgaggagaataacggctgcctcatgcttggctggcacactaggccactcatcgctacctccgcttggaagcttccctcctccagcgagtctagtggcttgactcagtgaatgtaaaactatagattaattggacttgttccagtgaactgagtcagtgaccgagtcagtgagccttccaggcagcaagaggataaataaatgagagggtgaacaaaaaaaaaaaaaaaaagtaaaaagaaaacccaaagaaagactgtaatttgtaatttgtgctctcataattaccgtttctcctctttagtgttttgttttcctttctctaaattattattattatataaattggttaattcttcaggattattatgtccttttcgttttttttaatattttttatttccattttattttttatc

SEQ ID NO: 17081 - DNA, 429 bp, Glycine max
gtggaatccgctcatggacccttcttctcctttttcaggggcctcaagtgaacatcaaaggttaaaactggcaaatcgacaacgctgccgaactgaagttttaagctttgatggcagcattcttagatcttatgctttaactcctgtttatgaagctgctacatggcccattgatgaagctactcatgccaacacaataaaagctgaaacagatgagtgtgatagtaaagaagtaatccttcctggagtaaatcttatttttgacggttctgagttgcatccgtttgatataggtgcctgccttcaggcacgtcaacctatttctttaatagcagaggcaacagctggctcatcatctttagcataccaaatagttctgcagttaacataggttacaccacttcgaagtgcatgaatggtaatgctact

SEQ ID NO: 17082 - DNA, 521 bp, Glycine max
  unsure (1)..(521): unsure at all n locations
tccttataatatgttgcatcaaagggattggcctcaccttgctcctaatgataaatgaacctataaggtcagccatcaccatcatatgcaaaagattcaaaggcttgattattggtagtatagctttctgagaagggaggagctgcattgatgattaccctgtaattcactcaaaaggattattgaggaagtatatgaagaagagtatatggagctagattacaatcttagtcagtagtgtgtatcctgtgggagatttacaaacttattggtacacatctctaattcctgtcacctaattgtatgacgagaattctggcttatttcttctggtctgcctagacagctgattctaaagtaaattcttaactggttctctgattcataaattatagattcctattatattgtgtaatcctgaatgtgttaactctctttttcagaaccattgaataaaagaaagaccggacaacatacaagaaacatttattggttggtctggccnnaaaaaaacttaaaat

SEQ ID NO: 17083 - DNA, 463 bp, Glycine max
ggatgatctatgtatattatgaaactggagaagattcaagcctagaattttgcaagcctataagtttctcaatgtctaactccaatttatttcaatgtcatttatcagataaaactatataagtataatagaaaaggtcattggttttatccaggcctttttccttttttttttttcatctggtgattgtgagcctaaacgttgatatgattttcttaatgctgtcactgcctttattactctgtttgtgtgctggttttgagcttatatgctgattcgagtttctgacagaactgtagaactctcttggaattgatggttctggataaacacctaattgtgaagaagatgcatcaaaatatgttagatgggggaccctccttacttccggaacttatcggaagcaaatccagtcaaccgaagttgatatgccgagagcatttcttcgccaatcccatgagta

SEQ ID NO: 17084 - DNA, 546 bp, Glycine max
cccacgcgtccgagcaaaacagacttggcttatccagagtcaatcataagaaagaaactctggaattttcttctagtaaatcatgtgtgccaatattgccatgggtcaatggagatggaatattggcccacatgatttacagggtactcagacgtcgtgttcttggaatagtgatgcaaaaccctgggatattggaggatggtattctacatcatatgcacgtgttgaatccacagaactgtagaactctcttggaattgatggttctggataaacacctaattgtgaagaagatgcatcaaaatatgttagatgggggaccctccttacttccggaacttatcggaagcaaatccagtcaaccgaagttgatatgccgagagcatttcttcgccaatcccatgagtacttccttgttgtagggaatctgtggtattgacattagacattagtacttgttatataaaaaacatatttataggaaattttggatactggtttaagttatatttgggaagaattgtaacttaagcaatcctagtaaat

SEQ ID NO: 17085 - DNA, 446 bp, Glycine max
ggattctcaccaaccagtggccccaaaactctcctcgctttagggaaacattgcaggagtatgctcgagaagtggaaaagctagcttacaagttgttggagctgatttcactgagcttgggtttggatgctgaaaaattccatggctgtttcatgaaccaactcagcatggtgaggctcaattactatcccacatgccctttccctgatttggcacttggtgttggtcgccacaaggactccagtgctttaactgtgcttgcccaagatgatgttggaggattacaagttaaaagaaaatcagatggagaatggattccagttaaacccaccccaaatgcatttattatcaatgtgggggatatagttcagggttggagcaatgacaagtttgagagcgtggagcacatggtggtggtgaatacagagagggaaaggttttcaatt

SEQ ID NO: 17086 - DNA, 728 bp, Glycine max
caagaaagaagcgatagatatgctaaaagcagtggctgcgtgtgcagtgttatgctcaaactcttccactagcgctataaggacagatgagtagtttctcgcctgcgtttcccaagttcatatccgtagaaggcgcagacatacattccagaactaaacctgacggcttcagattcagtcttgtttcgtataacatcttggctcaggcttatgtgaagagctcactgttcccacactctccttccccaagtctcaaatggaagcttcgttcagacactattttggcagttctcaagaacttgggagctgattttttctgcctacaggaagttgatgaatttgacagcttttacaaagggaacatgcaggacctaggatattcttctatttatatgaagagaagtgggctaaagcgtgatgcgtgtgggctgttttacaagcataaccgtgcagagttggtcttagaggagaaaattgaatacaatgatcttgtaaagtcagttcccgatgggaactcttcaaataatgatgtacacaccaatatccagacagttcagccagataaacaaaaggatgtgccccccaaaaatggatctaaatcgaattcaaaagatcgtggagatcccaatgatccttgtgtcagactaaagcgtgattgtgttggaattatggctgcattcaaactcaaagatcgctctcatcatattgttattgtggccaacacacat

SEQ ID NO: 17087 - DNA, 430 bp, Glycine max
ctgacgcgtgggcggacgcgtgggtggtcttagaggagataattgaatacaatgatcttgtaaagtcagttcccgatgggaactcttcaaataatgatgaacacaccaatatccagacagttcagccagataaacaaaaggatgtgccccccaaaaatggtgaatgcaaaataaaagtacataattctgtttgaaatatagatttcccgcttcatattaaggacgggcaatcttgtactcttgagcatatactgttttgactttgttatagactagatgaactggcagaagttcaattctatttcttctacttcatttctattgctgcagtgttcccctgttttccttttttctatatattttcttttgggatgtttttttttctggtttttttttcctgcattcattggtttaatacacaaagaaattg

SEQ ID NO: 17088 - DNA, 485 bp, Glycine max
atttttcattatttacttctcccagaactaacttggttttgtctcctgtggacagagaatgccatcacgcgtccggctgatttcaaagtctgcacgccaggtatcagatcttagactcagaaataacccactgcaaaagatatggcaaggctcactaccaatcccagatttgtgcttcagtaaattgcactccttgattgtggacggctgccaatttttatcagatgcagtactacctttcaatttacttcgtttgttaactgaattggaaacattggaagttcgagactgcgattctgtgaaaaccatatttgatgtgaaatgttcaagacaagacagaatattgacaactttggaaccaaccatcttccccctcccttttcctctcaagaaattggttttacagcggctgccaaatctggagaacgtttggaatgacgaccctcatagaattctcaggatgcaacttctacagcaagtacatg

SEQ ID NO: 17089 - DNA, 581 bp, Glycine max
cccactcgtccgcccactcgtccgtgaagatgatgatgcccctttgttgacagctgatgacaacataaaacttgaggttaaagaatgtgtaaacagactactttcccggtttaacgactcattaacagctttgttctgtggttccacagaatcactctctgaggctggaaatattcagttgtttaaatcctatttgactgatttgtcatgggcttgtcagatattgagtaagttggaaattatgagggagtttgttgagtattggtttgatgcatcggataagattgtcaaggtgcttgaacaaggaagttctacaactgaagtaattgagataaaattaagagctattgaggtgacatcaaaggttttagaggcaattgggtatggcactgttatattgccaactgcaaaacgccttcaggtcttgaaagtgtggcttccatttgtgagggttacaaaaccattgattgattctgtcaccatgaattgtgagaatgccatgctgcttaaattagatggtgaaatgtggcaatccttagaatccacatttgtctccatcattcttgcattgccatcagggg

SEQ ID NO: 17090 - DNA, 666 bp, Glycine max
ggtgagattggtgtgctttgttataagccacagcttttcacagctcgaacgaagcgactaagtcagttgctcaggctaaaccgtactacgttcttgaatattgttcaggccaacgtgggagatggaaccataataatgaataatctccttcagcatttgaaagagatcaacgatccaatcatggagggagttttggtggatattgagaacatgttagctcgtggtaggatggacctaccagcgagtgtgtgctttgcggcagcaagaggagatgacttgttgttacatcaattactcaaacggggcatggatccaaatgaatccgacaacaatcgaaggacagctttgcatatagcggcatctcaaggaaaagagaactgtgtttcgcttctgttagattatggggcggatcccaacattagaggttgttctacgtgcagatttggaaggtaatgtgccactatgggaggctatagtggaaggacatgagtcaatgagcaagctgttatcagagaatggagcaaacttgcaatgcggggatgtgggtcaatttgcatgtaatgccgttgaacaaaacagtctcaacttgctgaaggaaataatgcgctatggaggagatatcacgcttccaaacagcaacacatggaccacagccttgcacgttgc

SEQ ID NO: 17091 - DNA, 814 bp, Glycine max
cgtgtgagtaggaaacagaaaatatctattctagttttattatcagctatgggtttgaatttaagcgaaattctagagaatgtttgttatcctgaaattttcgtttcttttctaaatgataaggataaaaaaaaaatagggtcaaaagaaaatgccattttggagttttatcgacaatttgcttgtgttggtggagatccagtattttctgaatctttatgtaaagaattacaaaaaaaattttttcaacaaagatgtgaattaggaaggattggtcgacgaaatatgaaccaaaagcttaatcttgatatacctcagaacaatacatttttgttaccacgagatatattgacagctgcggatcatttgattggaatgaaatttggaatgggtatacttgacgatataaatcatttgaaaaataaacgtattcgttcggtagcagatctattacaagatcaatttggattggccctggttcgcttagaaaatatggttagaggaactatatgtggagcaattagacataaattgataccgactcctcagaatttggtgacttcaactccattaacaactacttatgaatctttttttggattacatccattatctcaagttttggatcaaactaatccattgacccaaatagttcatgggagaaaattgagttatttgggccctggaggattgacggtgcgaactgctagttttcggatacgagatatccaccctagtcactatggacgcatttgtccaattgacacgtcggaaggaatcaatgttggacttattggatctctagcaattcatg

SEQ ID NO: 17092 - DNA, 445 bp, Glycine max
cccacgcgtccgcccacgcgtccgtaggcacccagagaggtattcaatatgaaaggaagggttgacgaaatttgcatcgatgagctgaaatatttaaaatcagttgtcaaagagacactaaggttacacccaccagctccacttttacttccaagagaatgtggacaggcatgtgagattaatgggtatcatataccagtcaaaagtaaggtaattgtgaatgcttgggcaattggaagagatccaaagtactggagtgaagcagagaggttttatccagagagattcattgatagctctattgactacaaagggactaattttgagtacattccatttggtgctggaagaagaatatgccctggcagcacttttggtttgatcaatgttgaggtggcacttgcatttttgttgtatcactttgattggaagcttccaaacggaa

SEQ ID NO: 17093 - DNA, 450 bp, Glycine max
cccacgcgtccggttccgaagtctgaaccagaatcctacgaatgacatgaagagatgagggaacaaagttttggagataagatgcatggaataacaactctcgctctcactgcaactgcaaacacaaacacattcctttccttgtcctctaagatctcttctaccacttacccctccatcgaattcttgcatacccacttgtaaattcagctatggaattcgtttcaaccattctcagtggaagcaccaaaaaacagaaagatggagcaacagacatagaacgatggttgtgagagcaaggcgtatcgagtctccgtatgaagttttgggcgtgtctccatccgcaaccgtcgaccaaataaaaaaggcctatcggaaacttgctctcaagtatcatcccgatgtcaataaagaggataaggcacaggagaaagttatgaggataaaaca

SEQ ID NO: 17094 - DNA, 596 bp, Glycine max
atgagttccatacatagttgacacgaacagatatcatcaagtgtatacaatctgagaaagtaaggtttcgaggggttaatctttccggccttgacctctctaaactggatttatcttatgttgatttcagctatgcttgtcttaaaaacgtgtttttttcacgagcaaaccttcaatgtgcaaagtttcgagatgttgatgccgagggctccatctttcacaatgcaactttgcgtgaatgtgaatttactgcggcaaatcttcgtggtgctttattggctggtgcatgccttcagagtgcaaatctacaagatgcttgcttagtagactctagcttctgtggagcagatctgcgtactgcacatctacagaatgcagatcttaccaatgccaatctagagggagccgtcctagaaggagctaatttgaagggtgcaaaactgaacaaagcaaacctgaagggtgcaaaccttcaacgagcttatctttgtcgtgtcaatcttcgagatacagaattggaaggtgcgaggctcgatggtgcaaatttgcacggagcaattagatatagtttgtgctgacaatgaaaaaattgggaa

SEQ ID NO: 17095 - DNA, 1444 bp, Glycine max
  unsure (1)..(1444): unsure at all n locations
acccaagaaaatattattcggaatctgtattttctctttttttctttccatacctaaatccctataatttgaacagtatctgtgtgttacctttgtagtctgtcttgccactattctgctgccgagttccttttccttggctgtatgatacaccagccttactttcaaatttcaatttgaaaattcaaattattttgggttctcctaagttcttttgtagcttgaagcacatgccattcttgatttttggagaagttgtagttctttctgaatatattttgcttgccaggaaatttccactaatgatcattacaatgtaatatcttcttccttgtttatgtaacagtccaataagctcttcagtttagtctgatttttgttccatgcatcaagtgtttcctattgcctgtgcacattatgggattagtattttgtgatgctgatatgtattgtatccttcttattaaatatggtatgaaagctaacaattttgcttgatctgatgcttctgtcctctccacatgagtctttttggctacttttagatactgggatacaaggcagtcaaatccagtgcacacacagcaactcccagagcgctgctatgctatgacagtgagacatcctctgatggttgttggcactgctgatagaaatcttattgtttacaacttgcaaaaccctcaggttgaattcaagagaattgtttcacccttgaagtatcaaacaaggtgccttgctgcattccctgaccaacaaggtttcttggttggatcaatagaaggaagagttggggtgcatcatttggacgatagtcagcatggtaaaaacttcacttttaaatgccatagagagggcaatgaaatatactcagtcaactctttaaacttccatcctgtacaccacacatttgcaacttctggttctgatggtgctttcaatttttgggataaggatagtaaacagaggctcaaggccatgttgagatgcagccaacctattccttgcagtaccttcaacaatgatggttcaatatttgcttactcagtctgctatgactggagtaaaggggcagaaaattctaatcctgcagcagcaaaaacctatattttcctgcatttgcctcaggaatctgaggttaagggcaaaccacgcattggtgctactggcagaaagtagagatgatcctgctgtgtgatactgttctattatgtaaatagttggcttgtcctggtatatggtagaggcaaggtattagttgatatcaaaatatagaagttgaatgggctggtcgtacttggaagattttttttttttttgtgcgccatgcttggaagaaattatcaactaattcttggtgagaaattctatatccaatgtatatgtgtataaagcatatgttgtgtnnnnnnnnnnnnnnnnnnnnnnnnnnnnnnnnnnnnnn

SEQ ID NO: 17096 - DNA, 450 bp, Glycine max
gaaaacccatctcttattttccattctggttatggcttcaaccctcaaatgccttagaagccatattccccagttaccacacctttgccttctgtaggtggagacacacagttatactcccctcagcaatttccatacactgggccaccttattatcatcagctggttcctcctagcttaccatatcttaattcacctactccagtttcacagccagagctcaccagcctggtaggtattgaccaacaagttgataacatgttttttggaccaagagcgggctatccgtcagtgggatcttttggtagaggcaactttcctgtagcacctggttcctttggctttcatgaatcccaacaaggatttgaaggatcaagatctggtggaatctggtcagactgctcaaaaccatctgaaagacagagatctttgatgcctctatcgccatct

SEQ ID NO: 17097 - DNA, 469 bp, Glycine max
attcaaaccaaagagaagttgagactgttgatgatgactcacatcatggcaaaactcaagatgattcatctgcagtgcaaactaatattgctgaatcatctataaaaaatatgggtgatgacaagagagatcctttacaagcacaaacttataatcaagatttggaatcttctctgatggataaagaagctgttgtggacacacaaactctggatcgagacatggttgggagtgatgcacatcatctggataaacccctttgttcaatccccacagaagaaaatttggaagggggtgtagttgaaggtcttgagactgggttaagtagtttagagggttccttaacaatggaatctgttgctgcttctggctcgccgaaagttgaaaaaaccagtgaagatatgtgtttcagtgctctgtctcagaacaatgtaagtgaagatgtaatgttgcttaacgatgtggaaat

SEQ ID NO: 17098 - DNA, 500 bp, Glycine max
gaccgtccggattccggctcgcccagctcccattctttagatgtgcgttgctttgagcatccataatttgcaaacaggcgggtctagggtatcaaatcatgtcatccaccctggtaccaccttgaaggcatcacacagttgatgtctgccacatgcagttgctgatactaagttagcttctagaactgaagagcattcacattatagtacagaaggtgggaataatggcatcctatctggcactgctacttcaaatcctaaaaatgacctgaaaacatctgttctaaaagtttctggtcaacttataggatcaaggttgtctaaaccctttccatcagctgttgggagttatattactggaaaatacagtgataagggtctttttccatatgatttgattgtcaagctttataattggaacagagaggagttggaaccatttggccttataaactgcggaaacagctgttatgctaatgctgtactccagtgcttggcat

SEQ ID NO: 17099 - DNA, 898 bp, Glycine max
ctcagttttccttataaaacccttgtaagcgcctcctttctctttcgctctctttcgctcgctcgtgctgaagcagaagggttcctcactctcttcatctgattgaacaaaatgtacacctcgaggaagaaaattcacaaggataaggatgccgagcccactgaatttgaggagacagttggacagtacttgttcgacttggagaacaccaatcaggatctgaaaagtgacttgaaagatctctacataaaccaagctattcaaatggatgtggctggtaatcgcaaggctgtagtcatctatgtgcctttcagattgaggaaggcattccgcaagattcatcttcgacttgtcagagagttggagaagaagtttagtgggaaggatgttgtcttgattgccacaaggaggatcgtgcgaccgccaaagaaaggctctgctgttcagcgaccccgaacccgcactttgaccgctgtccatgatgccatgctggaggatgttgtgtatcctgcagagattgttggcaaacgggccagatatagaattgatggctcaaaaataatgaaggttttcttggaccccaaggagcgcaacaacactgagtacaagctggagaccttttctggagtttacaggaagcttactggaaaagatgtagtatttgagtatccaatctcagaagcctgagatgctgctgcttggtttaatggagtattgtttttttggcagatttttctgttagaattacatatttatgttaaacaataaccaaaattttgacttctggaattttatttgatgcttcttcaccttgatgacattaaaatcaccaagggagagtattttctgtggctatacttggatttaaaaaactgagactagttctctctctcctggt

SEQ ID NO: 17100 - DNA, 188 bp, Glycine max
tgcaaggggaggactgaagtttactgtttgcaaaacatgggattgaagggtctactattttaggcttgtaagttatattaacttgttaactgccagcacaaattgaagctaggtaggaatactattggaatgcacaatctgattactatctttatggatcaattttgtaaacttttgaaagagtatat

SEQ ID NO: 17101 - DNA, 527 bp, Glycine max
cccacgcgtccggtttccaatattatgggtgttgatccaaaaccctttgatcctaaaacatatgtggaagaggatacttttgtaactgatgaatctggaaccagaaaacgcatacgtttggagaacaatattgtacgctggaggactactagaaatcctgatggcacaacatcttgtgaaagcaacgctcgctttgtgagatggtctgatggcagcctgcagctattaattgggaatgaagttcttgacatatcagtacaagatgcacagcatgatcaagcacatcttttccttagacatggaaagggaatcctccaatcacaaggaaggttattaaggaaaatgaggtttatgccatcttccttgtcatcaaattctcatcggctgctgactgcccttgttgactcaaggcataagaaggcttttaaggttaaaaactgcattactgacactgatcctgagcgggaaaaagaagaaaaagagggcgccgaaagtcaaaatatccgtgctaatgtgcttcttaaccg

SEQ ID NO: 17102 - DNA, 475 bp, Glycine max
cccacgcgtccgtcaacccccaaacgctccaaacgatgttagctgcaaaccccaccttaaaaatcgaagctttatgatcaccaccctagtgttgtgttggtgatgaatcctaggagcagcttgtgttcttctctgttcatgttcatcaccttgttggggcttcatgtgtacttcgcttcgtcgcaggtcgaagactacgtgagatgtctacggggcatcgaggacactgtctccgaccctcaggctcggctcgccacgtggaggttcgacaacacaacctccggtttcatctgcgacttcgagggcgtgtcatgctggggccgaagggagaaccgtgtcttaggtttggacctccgagatacgaagctttcgggtaataagatccctgaggctttgaagtactgtggaaagagcattcaaaggttggatcttgcttcagattcttttacttcgaagatcccacgtgagatatgca

SEQ ID NO: 17103 - DNA, 360 bp, Glycine max
cgcagagccgctttctttgtttttggtactgagagattaccaaaccaaacccacgaattttgggtgtggcagttcacgattcctcagaaaactgtaatggctttgatgtcggaggtcaccatgaccttctctcactccatggatgatgaatatgagaaactcttccggagaatgaaccctcccagggttgtaatcgataatgaagcctgcaagaatgccaccgttatacgggttgatagtgcaaacaagcatggaatacttcttgaagttgtacaaatcctcactgatctaaacctcatcataactaaggcttacatttcttctgatggtggatggttcatggatgtttttaatgttact

SEQ ID NO: 17104 - DNA, 602 bp, Glycine max
agattctgtttatataatacttgaagttggggccgttaacgccacgtcttttggctaactaccccacatggctctcctccacaagctcgcacctttcacctctctctacaccaataccccccattccccaccaccccgccgccacgtcatcatctccttctccgtctcacccttcaccgagaagcactccacagagcgctaccagagggaccaatgggtctaccagagcaccactcaagagggtcaacctcaaacgacgccgtttcctcctctcccgtgcgattcagcgtccttaagagacgacgacatagcgttgcagctgccagagctgaagaagctgcttcaggttctgagggagaagagggagtgtatcaatggagagggttgtgagccggggaatgtgttcttggtgggaacgggacccggggaccctgagcttctcactctcaaggctgtgagagtcatcaagagcgctgatttgttgctctatgacaggatggtgtccaatgatgtgctggatttggatggccctgatgctaggcttctctatgtgggcaagactgctggctatcatagcagaacacaggaggagatacatgagc

SEQ ID NO: 17105 - DNA, 553 bp, Glycine max
aattgaggggtggacccacgcgtccgcccacagcgttagacgaagggggctgcggcggttgtggtgctgcatgtggtgggggctgagggaatttgattaagagtactggctgcggaggtcgtggtggtgatcttatggatagtaaatgtggtattgatgaacatctcaatgaagagctaaagtatgcgaatgaagaagcagtcactgcatgaagcatgtttcatgattatgcattggcactattgtattgtatgtatgaacgtgtggctatgagcttctcaatttcgcttctctctcattgatgtctttcttagacagaaaacgtagaaaaataagcaggagagttaaatgtgtaataatcaacttggaggtaatgattctcagttagttacctgtgtgtgtccttatgcctttctgtttatgcatgcttatggatattaagatattttcatgtggtatagattctactctttttttttattagtgtggtataaactctcttgtgtcgcaaagtttttctccctcgtgatggaatatatggattttgatagcc

SEQ ID NO: 17106 - DNA, 572 bp, Glycine max
  unsure (1)..(572): unsure at all n locations
agctgtggaaatttgattaagagtggtggttgtggtgctggttgtggcggaggctgtgcgtggtggtttggangctgtggaggagggtgtggaaataggttggagagtagtggctgtggtggttgtgggggatgttgtggtggtgatcttatggatagtaaatgtggtattgatgaacatttcaatgaagagctaaagtatggttcatgattatgcatgtcactattgtattgtatatatgcacatgtgtctatgagcgtctcaatttagcttctctcccattgatgtctttcttagacaggtagaaaaataagcaggagagagttgaatgtgtaataatcaagcagaggtaatgactctcagttaattacctgtgtgtccttatgctttttctgtttatgcatgcttcgatatgtatggatattaagatattttcaggtggtatagattctaccatttttattttttttaaaaaaaaaaattgagcacccaaaacaaaattctattcaatctaataaaggttaaagtgatgcaaaagcaagattgggtcaagccttatgcatacctctata

SEQ ID NO: 17107 - DNA, 572 bp, Glycine max
ctttgtttttcccacaaactccaaagattatatacatcgcgtgggaaggactgctcgtgcagggcgctctggggtcgccatttcccttgtaaatcagtatgaactggagtggtacattcaaatagagaagcttataggcaagaagctaccagagtatcctgcacaagaagaggaagttctgcttttggaagagcgtgttggtgaggccaaaagattagccgtcatgaaaatgaaggagactggagggaagaagaaacggaggggcgaagaagattatgatggagaggatatagacaagtacttgggtctcaaggaaggaaaatcatccaaaaagtttagaagaagatgagatcatatcactgccaatgagtgaattaatgcgacggataaatgaatcatatgaagccatgaaaaattgaggatagactgagatgtcaagcaacttgtgcgttgtagtacaattttgagcaaatttttgcattaaattaaaaaaaattgtatactaattgattgactatataaacaattttctagttatatttttgcgaaaaaaaaaacaatacaaaagaaaa

SEQ ID NO: 17108 - DNA, 449 bp, Glycine max
tatgaaaccaaaaaccaaattcaacaccgcccttttaatacttttctgttttcagagccccagcctcacacaagttcaattttttgtcacccttttctgattatatccttgtcctcttctccgagcaataaaaaaaccttcttctttctctttactgcgtgctcctctgcgtgaaactgggacacccctttagccctctttcgctctttgcctgccaaaggctttaactttgtcactttagctccgtacaatatgtgccccatgtcacttctttggtctaattcctcaaattgagcaactgggtcgtgcttacttggtttttgttgatggctgagaacgtttgacttgtgtttcccacaagtttgattcttttggttttgttctttttccctttttaatccttcggtttataggtgtattagttcagtttttctgcttggtataccctg

SEQ ID NO: 17109 - DNA, 464 bp, Glycine max
gttcttgccaaacttgaagatggtatactgtcgggtcctttccacagaagatatacttatggggagtcttatctcataaatatggattctgaaagcatcagcttgccagagaagattcggttagtcttgtttagcctatgtgatctactgatgacaacagttactcacatttcttcttatcatgttaaacaacaagcagaatttctgtggcagaaagtagggaatgatttgaatgtaatgactcttcaatggttaaaacaaaaatcagaattcagccagaaccaaaacctggacattttggaactggggaacatgaaagataactattcaggtaatcaggtattatgggatcgctgtgcggatccccaaattgatatctgattgctttgcacaggaaaaactcaattggccaaatgatttggatcagatgaatactaaaggatggaatgatttgtctataatta

SEQ ID NO: 17110 - DNA, 408 bp, Glycine max
ctccatattaccaactcaactattggcattgaactgaagacaactaagggtagaggtggttatatgaataacatcttcatttctgacgcaaaattggttgatatttacttgggtatcagcatgacgggaagctctggctcccatccagatgacaagtacgatcctaatgcagtgccggatgttgggaatgttacttttgagaatgttgattggttcaaatattgctattgctgcgaagttttcacgaatagttgattcgccgttcactcctatctgtcttttgaacgcgacctttttcttccagttctgagtcatcatctccttcatggttttgttctgacataatgggaatctccgaggaagtgtttcctgagccatgtccctgactgcagaacacgtattcaaact

SEQ ID NO: 17111 - DNA, 483 bp, Glycine max
gcccggatcccggtcgccacccacgcgtccgcccacgcgtccggtgattgaagctagttagaacaagatgttgcagctactctacactgcgattttctccgaaatgcttttgattctcacgctcgtcttcaaaaccccactgagaaaactcgtcatcgtttccctcgatagtgtgaagcgcggtcgcggtcccgtggtggtttccaccgtgggcgccacattgatggtggttctcgcttcgagcctctacagcatggccaagatccagcaacgcaccctcgaggccggcatagtcaaccccaccgaccaagtcctcatgtccaagcacatgctcgaagcttctctcatggggtttctgctgttcctctctctgatgattgatagattgcaccattacataagagagcttcggtcactcaggaagaccatggaagctattaagaaacaaagccgaagttttgaagatggtaaaaatggaaattc

SEQ ID NO: 17112 - DNA, 471 bp, Glycine max
tggaaaacgaaaaattccaaacacatgtaacggtgtgccgcctcattggaccagcccagaccctcaccgaaccgacacccttctctcttttcctctcttctcttctattcctaaattgtagttctgttttgccagtgattgaagctagttagaacaagatgttgcagctactctacactgcgattttctccgaaatgcttttgattctcacgctcgtcttcaaaaccccactgagaaaactcgtcatcgtttccctcgatagtgtgaagcgcggtcgcggccccgtggtggtttccaccgtgggcgccacattgatggtggttctcgcttcgagcctctacagcatggccaagatccaacaacgcaccctcgatgccgtcatagtcaaccccaccgaccaaatccttatgtccaagcacatgctcaaagcttctctcatggggtttctgctgatcctctctctgatgattg

SEQ ID NO: 17113 - DNA, 529 bp, Glycine max
acgtgatccagtgaggcgcatttcaaccaatcatggtgttttttccgaccaaaagagaaggcaatgaataaattaatgaactcaaactaaaacaccaaggaaaaaaaaacacagaatataaaacacaaaacacaaacaaagagagagaaagaacaaagactgttttgtttctctaagttgttgttgcagttagcttcccgagcaccgtgtggtcgggtattgtattgtattgagagagtgatttgtaggttctttctgatcactgtggtgcgtccattgaagaggaaacatcaaacatgggttggattccctgttctggatattctggcactaagaacaaggttgagaagatggaagttcaggatagtctcgttggtcagatcaaagccaccccaggaaagttgaaaaggaattcatccacgaaatccaaagatacatctaaaaatgggaaccctgatcacattgcagcacagacatttgcgttccgtgagttggcaactgcaactagaaattttagaaatgattgtct

SEQ ID NO: 17114 - DNA, 836 bp, Glycine max
cccacgcgtccgccgaaatctcatatctggaaaaactgccgctgagagtttggacattaactttaaagtgagctctgctttggtggaaatagtgaaaagaataactacaaaacctcgctatataattgcaaagggtggtggtacgtcttcagatctggctgcaaaagcccttggtgcaagatgtgcgaaaatagttggtcaagcacttgctggtattcccttgtggcaattaggccctgaaagtagacaccctggagttccttacattgtcttcccaggtaatgttggtaacagcacagcattggcagaagttgtaaagtcctggactagtccaatcagacttacatcaacaaaagaaattcttaataatgcagaaaagggtggatatgctgttggagcatttaatgtatataatttggaaggagttgaggctgttgtatctgctgcagaggaagaacaaagtcctgctatattacagatccatccaggtgccttgaagcaaggaggaattcccttggttgcttgttgcatttctgctgcagagcaagccagtgttcccattactgttcactttgatcatggaacttcaaagcaggatcttgtggaagctcttgacctgggattcagttctgtgatggttgatggctcacatctttctttcaatgaaaatgctgcatacacaaaattcataacattactggctcacccaaaaaatatgttggttgaagctgagctaggaagattgtcagggacagaagatgatttgactgtagaagaatatgaagccagactaacagatgttactatggcatcaaaattcattgatgagactggca

SEQ ID NO: 17115 - DNA, 697 bp, Glycine max
cttgatcggatgggagcagatccatggaaagtgttaaatcaggctagatctaagcttcggcatcatagtgctgccatacaagttccaataggattggaagatgattttaagggactagttgatcttgtgcagttaaaggccttctatttccatggttcaaatggtgaaaatgttgtcactgaagaagtgcctgcagatatggaagccttggtggcagagaaaagacgtgaactcatagaaaccgtgtcagaggttgacgataaacttgctgaagcttttcttggtgatgagaccatatcagctgctgatcttgaggaagcagttcgtagggctaccatagcccagaaatttataccagtattcatgggtagtgctttcaaaaataagggggttcagccacttctggatggtgtaattagttatttgccatgtccaatagaagttagtaattatgcccttgaccaagctaagaatgaggacaaggttgagttgcgtggaagtcctgatgggccacttgtggcattggctttcaagttggaggaagggcggtttggtcagttaacatatctaagaatttacgagggtgtgattcggaagggtgattttattcttaatgtaaacactggcaagaagatcaaggttcctcgtttggttcggatgcattctgatgagatggaggacattcaagaggctcatg

SEQ ID NO: 17116 - DNA, 396 bp, Glycine max
ccaccatatcattagacaactagttaatctctttttctactagagatctcttttctctagctagtgtaatatcattaatcaatggctggcactatctttggataccctttcagacacttcatctggggtcacccaccaattttcaaagaatggtccggctcaacagccctcttagattggctcgaatcacccactgcccacatcttaaaaattaacgttccaggattcagcaaggaagacataaaggtgcagattgaggatgggaatattcttcacatcaaaggggaagtttggagagaggagcctcaagcaaaggagaaggatactgtttggcatgtggctgagagaggcactgggaagggagggttctcatgggaaattgaattgccagagaat

SEQ ID NO: 17117 - DNA, 424 bp, Glycine max
cccacgcgtccgtttgtcctttacagtgggaaccatgagcgagattggcctggaacaggatccttttatgagaacatggattctgggggagaatgtggtgtgttggcacagactatgttctacacccctgcttctaacagggctaagctttggtatggcgacatgacttcatacatttcttcaaattataatcaataaattagcgaattgttagatttttcccgtttagaaaggttatcttcttttgggtttaatgatttgagcatgaagaaagtgaatcaccaagaattacaaatgccattcaataaagagtaaataatcaaattgaggctttgaaataattttataccaaagtccaccaatgcttttggtattaaagctttaggtagaaaatacttcacagaattaatcagggttttggaaa

SEQ ID NO: 17118 - DNA, 526 bp, Glycine max
aatttggattcaagaactgggaaatgttccacttctggaaagcagtcatcaaaagaagagcttagtagatgtaaaaatatctgtgcctacccgtcttataagatttccaaagcattctggccccactgggcgtatcggatgtttgactcttattcgcttgcacaaagggctgcagatatgtggaagcgaatagttgggatgcctgacatggatagtctcattaagaagcctgatattttatcatttcacatagccagtaaaatacctgtgtctgagtctacaaggcaggagcttttggatattgatggcattgcatataggctgcgcagggaaattgaattactagagagcattgatcttatccggtgtaaaagctgcgagactataattgcaaaaagaagtgatatgttggtgatgtcaagtgagggtcctcttagtgcatatgtgaatccaggtggttatgtgcatgagataatgactctttacaaggcaaatggtttagctctcgttggatcagcagcaacag

SEQ ID NO: 17119 - DNA, 416 bp, Glycine max
aagagaatggttgggatgcctgacatggatagtctcattaagaagccgggcgttttatcagttcacatagccagtaaaatacctgtgtctgagtctacaaggcaggaatttttggatattgatagcattgcatataggctgcgtagggaaattgaattactagagagcattgatcttatccggtgtaaaagctgtgacgtaatcattgtctaaccaaagccccacagttttgcacttcttattgccttgtgaataaatttagaggcaatttgggattgttcaattctgtttcaactttcatcaaatgcagaaaatactgtttcttcctctttttttaccttaatatttgcagactataattgtacaaataagtgattattttatcatgtcaagtcatggtcctcttaaagcatatt

SEQ ID NO: 17120 - DNA, 434 bp, Glycine max
ctgatccttgtcctcttccatctgccgcaaaaaagaaaggactgcgtgagggggataagttattctatgctgccatgtctggccttggggatcttttgtacgacaaagatgctgtatacataaatattaatgatcaccttgttcaattctcaaaagttgatgaaaactctgctatgacgagtaaaggaaagggtggagatattggggaggatttggtgaaatcgctacagaatatcaaatactcaattaatgaaaaactagagaacagctttatcaatatttttggtcaaaagacaaatgtgtcatcagaagctctaggtgatgcacatggcacaaacaaggaagttgaaccaaatggcaaaacagaagcttttgataaatatcatcctgaggctgttataactggtgaagataataacaaaatggattttgat

SEQ ID NO: 17121 - DNA, 730 bp, Glycine max
aggtcactcccaactttcatgccatctgcattgcctatcctcctctctggttgaagtcccaaaacaaacttgataaaatcttcaaattaatagtgccagaaacaccagtcaataatttccccaacttcgaaatcacgaattttgaaactgaagagaaaatattctcaaattgcgtttgaatatggctataagctgcaacaaacaagaattcttgctacgacccgtttttcacgctagagaatccaccacagcgtttctacctccactaagcctctcacttaaactcccaccgcaatcacattcaaaagtcaggagggttgttaaaatgtctgcaactgaagtcacaagctctaggatatcatacgagtcctttgcaataaagcctcctgagcacccaacttatgatttgaagggcattatcaagctagctcttgaagaagatgctggggatcgaggtgatgtaacatgcttggccaccattccatttgacatggaagtggaagcttattttttggcaaaggaggatggcatcattgctggaatagctcttgcagagatgatatttcatgaggttgatccttctctgaaggtggagtggagtaaaaatgatggagattttgtccataaagggctacagtttggaagagttcgtggacgggctcataacattgttgtagctgaaagagttgtgctaaactttatgcagaggatgagtggcattgcaacttta

SEQ ID NO: 17122 - DNA, 280 bp, Glycine max
gcaaacacaaacacgtctctctccaaaagccttacgtttcagtaatttggttcatttcttacagcctctcacttaaactcccaccgcaatcacattcaaaagtcagattgatttgttttaaattgtgtacaagggcaggagggttgttaaaatgtctgcaactgaagtcacaagctctaggctatcatacgagtcctttgcaataaagcctcctgagcacccaacttatgagttgaagggcattatcaagctagctcttgaagaagatgctggggatcga

SEQ ID NO: 17123 - DNA, 526 bp, Glycine max
cccacgcgtccgaggttgaccagctgttgaacaaccctttctttggcgcggtatagggcatatgaacgaagcttatcagatatttccccatctcatggatgccaatggaaactcaattaaagccaaagcaaagttaagtgcgctagttgagaggtatttattttccctccaaccattccaatactaactaactgtatttattttcttgctccctttcatttccgccattcgatactcttccatggaccttccgcttctcagcaagagtcttcaattctctctaagaaacaaaaactaccttctcctaattgccttgttcggtgcctccggttacgctgcctacagtgcctacaattcaccctatgtcgctcagaaacggcgccgtattgccaagctcctcagagccttcgtttccctcgccgagttaatttccaactccgcggacatcgttgccgttatctccaacgactgtgaaccgtttcctcgcttccgaatccgacgatatccccaacagtttgaagcagtt

SEQ ID NO: 17124 - DNA, 356 bp, Glycine max
gacagagttaagagcctgtcaaaagggaacacctctagaagggatcctctttcttcctcaaaccttagagactctactgtgttgcctggctcttcagttttatctcatgatgataccttggaggatgaaacaacatatgtttccagtgacaagaatcgatttggttggcccaaacagctagaaagggaaccctctcctccgaataatgtggaccgtgttccaagtggtagaatggggggaaatttgataccatctgtgtattctgatccacaaaatggatatagtatgcagattaatttggcattactgcaaatgaatatgattacctatgaccaacatatgaacaggatagaacg

SEQ ID NO: 17125 - DNA, 1387 bp, Glycine max
gcccccacgcgtccgcggacgcgtgggttgaaaacgacccgtttcctccctcgcacggatccacccgaaatctgagattccttcgaattgttaactctctttcagtttcaagttggaaactttttcgattttcgctttctggaggtgtgaattgttgtttgaaagtcacaagcaatggtgaaggacactgcgtattatgacatattaggtgtcaattatgatgcatctgctgcagagatcaagaaagcttattatgtcaaggctagaattgttcaccccgataaaaatcctgaggatcctaaggccgcagaaaactttcagaaacttggtgaggcttaccaggttttaagtgatcctgggaagcgtgcggcatatgatgagcatggaaaggagggagtaccacaagattccatgatggaccctacaactgtatttggaatgatttttggaagtgaattttttgaagaatatattggacaacttgcactggcttctttagcatctatagaaattgaggaagactcacaggatcctgaagttttgaggcagagaattcaagaaaagatgaaagcttggcagaaggaaagggagcaaaagctttcaacatttctgaaagatcgcctgcaaccatttgttgatggtcgagaagatgaatttacagcatgggcaaaatcagaagcacgtagtctttctaaagctgcttttggagaagccatgctacatacaattggttacatctacacacgaaaagctgcaagagaacttgggaaggatatacggtatatgaacgttccctttttggcagagtgggtgcgaggcaaaggacactgtataaaatcacaagtaacagcagcctcaggagctgtctccctaattcaaatacaagaagaactcaagaagctaaatcaaggagaaaacaaagaagaaagcatagtcaaagctattgaagataagaaggatgccatgattaattctctatggcagatcaatgtgattgatattgaatcaactctgtcacgtgtttgccaagctgttcttaaagatccaagtgcctccaaagatgttctgaagtctcgagccaaagcattgaaaaagttaggaactatctttcaaggtgctaagtctgcttataacagagaaaacagcctacgcaaggaaagtgacaaaacatcagatgctgcttcctcatcatagtcatcttgttcagtttgtcatgagcggtattcttatggccttctgactcagtggattttgaacattgtttcttacagtgctgttaataggcatggtatgtaatttcacttggacttatggattggattaagctgccataattgcactctcttgtccttaataaaaatcaaggaaggcatattgatttcatttc

SEQ ID NO: 17126 - DNA, 592 bp, Glycine max
atcaaagttcaactcttgatacttaatttaactggtttcatgcttatggaggttgctgtggaactggaagatgacctattttttgcagacttgagcaagcaaatttctcaactaattatggatgaagatgaagacccccttcctacttgtcctcctgattctcttcagacttttcctggatcaatctatcctcctccacagtctggtttcctctacgagcaggctttgataagacaaagcaaagggacaggggtgtttatcccccaatctacacagcctagaaggaagcacaggaaaggaagatcaagctcaaacgctaagtatcaaaagcagactcaagatacaaaaacggtttctcaagttcctataacaagttctttcaaacccaaaaatggttgaggatatatatattttcccacaaattaaactgcataagttctattgattaattactttgccaagtttaattacttacgggtctaattctttagtctttaggcaataatgtgtggttatatagtttgaaggattgatgtataggtcaatatgcgttgactaatgaagtggacaaattaatgtacataattaagtg

SEQ ID NO: 17127 - DNA, 463 bp, Glycine max
cccacgcgtccgagcagctagccatggcttctcactctcatagttgcatcattttggctttgttcattgctatttccttctcaagcatggacatggcattagcaacacgccatctctcacctttcccaccactgccacctttgccagcaaccccaccattattgccaccattgccacctgtgccaacagtcccaatcccaattacactgccacctttgccaccaactccaccattgccaccaactccacctttgcctaggattacaacctagctcctgagcacttgcagttggatacatacataacatataataagtaaacaaataaaagcactaatctcttctctccatttcgattcagttctgctttcctgcatgcatgccgtttcctgctttcaataagtgatatatacatatacacacacatatgctgttcttttcttttcaatcttccgcgtattttc

SEQ ID NO: 17128 - DNA, 454 bp, Glycine max
aaccaaaacctcagaacacaaaaccatggtgtcaccaatttcacacttagtaactttaatcctcttattatcagtttcattggcagcttcagcttcacttgaagaaaactttgtccaatgtctcagcttctattcagacaaagcagctccattttatgcatcaatttacactccacaaaatgcatcattcaacaagatccttgaatcctctgcacagaacctaaggtatttggtgccttcagcgccaaaacctgagcttatattcacacccttgactgattcccatgtccaagtggcagtgacttgctcaaagaagcttggtattcatctgagaattcggagtggtggccatgactatgaaggactctcatatgtttctgaagttgagtccccttttcataattgttgatttggccaagcttcgtgccatcgacgttgatatagaagacaacac

SEQ ID NO: 17129 - DNA, 485 bp, Glycine max
ctccctcactcatccgttccgttggttcagaatattcatcaccatcgggcccaacaccaaaccccttcccctctcccccaaattagggtttctctctgggaatgtgattcagcgcgcggcagcatcaatggcggagaagagattcggcgtgatagggtacgctctggcgccgaagaagcagaacagcttcatccgcgactcgctggtgagcctagcgaaatcgcgagggattgagctcgtgcgcgtggactccgacaaccccctcgcggatcagggccccttcgactgcgtcctccacaagctctacggcgacgactggaagcgccagctccaggaattccacaccctctacccaaacgccgtcatcctcgacgcccccgaggcgatcgagcgcctccacaaccgaatctcgatgctgcaggtcgtgtcggagctccgaattgaggaccgacccgagacctttgggatccccaagcagattgtga

SEQ ID NO: 17130 - DNA, 411 bp, Glycine max
gcgcttgagctattttatcattatcaccgccattgccaattctcctctatagcttgtgtgagtatggaaataagagatggaagacagagcgagcggatcttgccacctcttaatggctccataccccaggcagggtcacataaacccaatgctccaattcagcaagcgcttgagcaccaaaggagtgagagtcactatgggcacaaccattttcatttccaagtccatgcatcttcaatcttcttccttgttaggaaatgttcaacttgatttcatatcagatggctgtgatcaaggtggttttggtcaagctggtagtgtgtcaacctatttatctcgcatgcaagaaataggtgccaataactcgagggaacttataaaaaaatacaactcttcagatcaccctattga

SEQ ID NO: 17131 - DNA, 406 bp, Glycine max
gcgcaacgaaagagaaaatgagtaggtgtgtatcttgtggtagcgggtctgcgctgattcacaataagaatttgttgatatcaccaattcataatgcattaaaggtgaggggcaacaatagaagttgtggcttgcgtgttcaggtttctatggtggactcttcctccgctgatttcaccagacgcatcgaacgagcttggtcaatttctaagcaaccaaggccaatcgtgtgttcgtcttgcgactcaaaagggcatattgaatgtaaatggtgtgcgggtactggtttttttattcttggtgataacatgctttgtgaagtcccatccagaaacactacctgcattatttgcactggaaagggatcgatgtgctgttctgattgtcaaggaacaggctttcatgc

SEQ ID NO: 17132 - DNA, 534 bp, Glycine max
  unsure (1)..(534): unsure at all n locations
ggaaaanccggggcgccgccacgcgtccgctttatttagagatgcgaccaaagcctgggcccgttccgacagacaagagcgacagggttgtttttgatggcagaatagagaaacaagaaagtgaagcgtgttagttagttagtagttggtgcgctgcgttgtgagttcgaaagtgaatctaggagaagaaggagtaaacaacacaaccaacaaacatcttcgatcttattctagggtttcaattgtgatgtgaatctaatgaatgtaacgggaaaagactgtagatagatgagctccagcaatttgacggggtttgtgttggccgtgctttccagcgctttcattggctccagcttcatcatcaagaaaaagggtctccaactcgccagtgccaatggcccacgtgccagtgttggtggctatggctacttgcttcaacctctctggtgggtcggaatgattaccatgattgttggagagattgctaattttgtagcctacatttatgcccctgctgttcttgttactccactc

SEQ ID NO: 17133 - DNA, 450 bp, Glycine max
gtcattgaccatgttgtcacagataaaaggaaaactccgctacttaaagggtgtggttcaatctaggcaggagcggcgattccaaagtccaactagttcttcattcacacgagagacaactgcatcgccaaactctacagaagagaaggatgcacttttatctaaaagtgacgacgaaacatgcccaatttgccaagaaaagctcggcaaacagaaaatggtttttcaatgtgggcatgtcacatgctgtaaatgcacgaattatatgacgaaactttatattatcattctttagctgcggttatagacttaataaaagtcatttgtcttcacctagcaacttaagctgttaggagaattagttcttgacattgttttagagcctcaatgatcaagtaacgtagagtttgatccttgttcattcttctaaacaaaactttgaattttaca

SEQ ID NO: 17134 - DNA, 1024 bp, Glycine max
ccattctcatgagtcttttggtcctttgcaacgcagcagtagagtagccaacatggccacccaatcaccgcctcctcccactcccaccgccaccgaccaaaaccaaggttctgaagtcgtgcaagcaacaactgtagatcagcaaaatgccagagaagagcctgctaaacagagttcaactacatcagtctttgtgaactcgcaactgatgcgagaagaacaaattcagaatgctgtgaaatttctatcacacccaaaagttagaggttcacctgtcatgtataggcgatcatttctagagaagaagggccttacgaaggaggagattgatgaagcttttcagcgtgtgccagattcagctccaactgtgcagacaggtggtgtaaatcaagatgggcaattgaaatcgtcatcaaacattcagcaacaagcccaacaacaaactttgcagccgggtttacctgcttctactggtgttaatacttcatcgggaaccttatcacgctccagatttcactggtcccatgcccttattgcagttggattactggctgcttcaggtgctggaacagctataataattaagaattctgttctccctcggttaaaatcttggatacgtaaggttgtcttagacaatgatgatgaacaattaaagaaaactgacaacaaaccgacactgatggaagaagctgcgcaagctgcaaaatcagctgcagctgcagctgcagatgtggcaaaagcaagccaagaaatgctggcttcaaaaggtgaagagaggagatactttgtggaagttgtgagccttttagataaacaagtacaagaaatgaagtcaatgacaaatgccataagaaggttggaagggcaagaagatcttcaaatcagtcaaacaagttcgaagcaactgattgtgaatggaaaagcagactacgacttgcgttcagtgagatcttcatccccacctacatctgttgaaccatcaagtggtcttcatccaaaggcatatgcggagataatggcc

SEQ ID NO: 17135 - DNA, 1667 bp, Glycine max
ggcaagggatcagctcatcgagcagaatgttgcattagatctagcaagaagagaagcagaaactgcaattcgtgctcgtaatgactttttggcagttatgaaccatgagatgagaactcccatgcatgcagttattgcactctcttcattactacaggaaacagatttgacagctgagcaacgactgatggtggagacaatattgaaaagcagcaatttgttggctaccctcatcaatgacgttttggatctttcacggcttgaagatggcagtcttcaacttgaagcagcaacatttaacctccattctttgttcagagaggtccttaacttgattaagcctgttgcatctgttaaaaagttatcactcacttcacatgtagcctcagatttgccaatgtatgccattggtgatgaaaaacgtctcatgcaaactattctgaatgttgttggtaatgctgtgaagttctcaaaagagggttgcatttccatcactgctttcgttgcaaagcctgaatcctttagagatgctagaattcctgactttcttccagtgccaagtgataaccacttttatttgcgagtacaggtaaaagattcaggatcaggaattaatccactagatatcccaaagatattcactaagtttgcacaaaaccaatcgttaacaacaagaaatcctgctggaagtggacttggcctggcaatttgtaggaggttcgtaaatcttatggaagggcatatttgggttgaaagcgaaggtattggtaaaggatgtacagtcacttttattgtaaaacttggaatcccagaccgatcaaatgaatttaagctaccttttgtacctaaagtaccaggaaatcatggatctacaaactttgctgggctcaaagttcttgtcatggatgacaatggggttagcaggacagtaacaaaaggacttcttatgcatttaggatgtgatgtaacaactgcaagctcaagtgaagaatgtctgcgtgttgtttctctggaacatgaagtggtcttcatggatgtttgtacagggttagatggttatgaacttgcagtccgtatacatgagaagtttacgaagcatcaagatagaccactgatagttgctcttactggaaacaccaaaaaggtaacaaaagagaactgtatgagggttggtatggatggccttatattgaaacctgtttctgttgacaaaatgaggggtgttttatcagaactattggagcgccgagttctgttcgaaagtgtttaacctgttagattgttgtacatagctatatcaaatttggagaagagcacaaacttatgaagcaatgaggcaattgacattagttgtcatcctttttgctgttttgagatcccggcaaaaggaacaacgattgagtctgcgttgttaaataattttttgtgaacacaagttcgtatatgttgtgtattctgcattttatagcagactttcgatgttttgcaatggcggtaaaattgcatttatactgtcctagactgttttgattaattgatttaagtttaattactgtttagatctctaaacctgtatagtctttgttttagtctctacattcaaaatatttggtttagcccttacgcataagtacctccgttcctatggataagacttttttcatttt

SEQ ID NO: 17136 - DNA, 667 bp, Glycine max
cttacgcgtccggcaaagcactatccattccattccacgttccaagctaagatctgggctttggcttaaaggaatattccgtggggtgatcatagtttttaccctgttcttatgatgggtgactcagaggtggcaaagttcggcttaaaagtcgggaagaatgagaaaaatgggttcccaaggggactagatcctgcaatatccaagttttttgtgcagctccaaagtgttgttaagtctcgacttagtagattagcaaaacaggatggaatgagtttgatgagttctgtccaaagaaaaggggataagtctttcagttactctgaagctgaactaaatgagcaactgcaagcatggagagaaaatccatcttgggttgacaagcctccactaataaaggtcactgctcccaaaggttctctttgcaaccttgatgtagaagttgatgttggcctaccccctgatgcagtatataatatagtgatagatcctgacaataggagagccttcaaaaatatcaaagaagtggtatccagaaaagtgttggttgatgagggtcataggcaagtggttgatcttgaccaagcagccatttggaaatttctctggtggtctgggactatatcaatcaatgttttggtagatcagaacagaaaagaccattctt

SEQ ID NO: 17137 - DNA, 465 bp, Glycine max
gtctctgccgtcacaaaaaagagaaaagtctccgtgtcgtcgtgactaacagtgtgagtgagtgtttgtgtaaatcggggaaattgttgggctattcaagagatcggcagcggcgtcatgggtggagatggagccacggcaaacgcggaggcgcagtacgccacggcgaagatatcggtgtggtgggacatcgagaactgccacgtccccaagggttcggatccgcacgcgatcgcgcagaacatcagttccgccctcgttcgcatgaactactgcggccccgtctccatctccgcctacggcgacaccactcgcatccccgcctctgtgcagcacgcgctctccagcaccggtatctccctcaaccacgtccccgccggcgtgaaagacgcaagtgacaagaagattcttgttgatatgctgttctgggcagtggacaatcctgcacctgctaattttttatta

SEQ ID NO: 17138 - DNA, 414 bp, Glycine max
ggcacgcatcgtatagaaaagatagaggaaagtcgccttgtcatcattaacagtgtttgcctatatcggagacattagggtattgaagacgtcgctcatggccggagatggagcgacgacgatcgcggaggcgcagtacgcgacggcgaagacatcggtgtggtgggacatcgagaactgccacgtccccaagggttcggatccgcacgccatcgcgcagaacatcagttctgctctcgttcgcatgaactactgcggccccgtctccatctcctcctacggcgacaccacgcgcatcccagcatctgtacagcacgcgctctccagtaccggaatctccctcaatcacgtcccggccggtgtgaaagacgcaagagacgagaagattcttgttgatatgctgttctgggcact

SEQ ID NO: 17139 - DNA, 670 bp, Glycine max
cggctcgagagaagcaactacccaagctggttgttgggttattgttaattggagcagggcttgtgctctacacaaatagaacagagaggagtgcccagctgcttcagcagccagaagtcattgcaaccactgttgaagaagtttcttcaactgcaaagccattggttagagagcttcaggagcttcccaggagaattaagaatattattgcatcattacctgatcaagaggtgaatgaggaggaagcctccctctttgacatgctctggttactacttgcaagtgttgtatttgtgccaatatttcaaaagattcctggaggcagtcctgttcttggctacttggctgctggtatcttgattgggccttatggtctctccatcattcgtcatgttcatggaacaaaagcaatagccgagtttggagttgttttcctgttattcaatattggcctggagctctctgttgaaaggcttagttcaatgaagaaatatgtctttggattaggctctgctcacgttttggtgactgctgtagttgttggcttggtggctcattatatttgtggtcaagctggccctgctgctattgtcattgggaatggcttggcattatcatcaactgctgttgttctgcaggttttacaggagagaggtgagagcacatcacg

SEQ ID NO: 17140 - DNA, 551 bp, Glycine max
gcaaacatcaaccagcgctctatggttggttcaagggacaccgagattgcaatgggtgcgtaccaacctcatcatacctgggcaagaagccagtatcatcctcgtgggcaaatccatggatataggatgtcactttgggctgaacatacgggtacgattgaagactgcttcttacaaccagagagccttgaatgtgttagtaggattagaacaatgggtgagctgaactggaagcaatttgcatcaaatgatgtaacagaaatgacagggcatctgctcaagtacccggtagaagtcgatcgaaagggtaaggtaagatccctcccgggccacgaagagtttccggatgtgggaggaaagattgtaggatcattcattgccattcaggagaatctaaccatttgattacttttttacattcactttgctggccattaggataggaataggatgaatgtaaatcactggtgtgcatgtaacttaattaaatgataactcttttttgggccaatcatcattcatataaataatcacacacgttaacatttaac

SEQ ID NO: 17141 - DNA, 413 bp, Glycine max
agagactgcagaaatgaaccccactaatggtattgaggtagaaaagattccagcaaatcatgccaaggagaaactagtgattgaggatgatggtaaattcaatcaagaagaagcaaaagggatcgaagaagcaacaaaaacactgttactaaatactgcaacagagagcctaacagaggaagaagtccaggaaatattgcccactcctgcaattgtccaacgtgacacaaagcaaatcatgcaacaacaaacacttcacaatgatgaatcagaagcaattgataaggaaaagagctgcataccagaaaatgaacttgacagaaagttcattgctggtgaggaatctgatcaacctgaaaccaaggccaatgctggcatagtaaaagaagaacaagcagacaaccaatcacaag

SEQ ID NO: 17142 - DNA, 786 bp, Glycine max
ctcgttttctctctcctccctcgaagctcagctcagctccagcttcgagggtccatggtccactttctggatctcaccgtcacccccacaacaccttctgcctcctaatgctccttcttcattctgtctccttccccgtgactcacccgcacgggaagatatcactcgctccccatcccttccatttcgatctccattctccctgacactcctctctctgtatccgagttctagggttttggggatagaaagcataaatcacgtacacgacgtcgtttgatttgagggcggcgcaagatgccggggcaccgctcgaagtcggagaagcacgacgtcgacggcggcggcggtgagaagcagctccggcgggacccctacgaggtcctcggcgtctcgcgcaactccacggatcaggaaatcaaaaccgcgtaccgcaaaatggcgctcaaatatcatccggacaagaatgctaatgatcctaaagcagctgatatgtttaaagaggttaccttctcttataatatcctgtcagatcctgataaacggcgtcaatacgactcagctggctttgaggctgttgaatcagacaaccaagagttggagttagatctttcaagtctgggtgctgtcaatacaatgtttgcagcacttttagtaaacttggtgtgccaattaagacaactgtatctgccacagttttggaagaggcactcaatggtttggtgaccattcgtccactgccattgggacataatatatctaaaagggttgagaagcaatgtgcac

SEQ ID NO: 17143 - DNA, 451 bp, Glycine max
ctctaatagaaatatttctggacgtgaatgaaatatgatccagtatttcttataaacaaccttttattatacccaccactgcctccatttttgtgccttttaaatcagtgtaacaaaactgtggaccttcttgttatactctgttggccttgacaaccatctacaagttttcaaggaaaagattcactatattgccctatctcatgccaatttctgaatcattgtgtggctattttttatgtgcatgatgtttgcataaagagatataatatgattctaagctgcatgagtctattatgtctacaatatcttctttttgcaggatggagaggcttatgcttacttgcttaatgctcttgccccagaagtggcaggcccatctgccctaaacacaagtgatccaacagaaagggcaaacatggttcttgagcaggcagagagattagattgc

SEQ ID NO: 17144 - DNA, 1592 bp, Glycine max
  unsure (1)..(1592): unsure at all n locations
caaactctccgtcaaagcctcgcatatctccgaaatcccggcccgcgtggcccaggttctcgattgggcccaatcggcccggcccggtggctgctacttagatctccccaccgacgtcttacatcaaaaaatctccgagtccgaagcagagaaactcttatccgaagcagaaaataaccgttcgatttccaatcctaaacccgaacctcctcttttcaattcaaagattgaacaagcggtttctcttctcagacacgcggagaggccgttgatagtgttcggaaaaggagcggcgtatgcacgtgcggagcacgtgttaacgaagctggtgaattccactgggattccgtttctcccaactccgatggggaaaggaattttacctgtcacccacgcgcttgcggctactgcagcaaggtcactagcgattgggaagtgtgacgtggcgcttgtggtgggagcgagactcaactggcttctacacttcggtgagccaccaaaatggtcgaaggacgtgaaattcatcttggtggatgtgagcgaagaggagattgagctgaggaagcctcacttagggttaattggtgatgctaagcacgtgattgaggttttgaacaaggagattaaggacgatccgttttgcttggggagcacgcatccctgggtggaggcgatttcgaacaaggcgaaggacaatgtggcgaagaggaggttcagctgaagaaggacattgtgccgtttaatttcttgacgcccatgaggattataagggatgccattgcgggtttggggagccctgctcccattgtggtttcggaaggggcgaataccatggatgtgggaaggtctgtgttggttcagaccgagccccggacgaggttggatgccggcacctgggggaccatgggggttggtcttggttactgcattgctgccgcggttgctgagcccgagcggcttgtggttgcggttgaaggagattctggatttgggtttagtgctatggaagttgagacgttggttcggtaccagctgcctgtggtcgtgattgttttcaacaatggtggtgtatatggtggtgaccgtagacgcccagaggagatagatggacctcacaaagatgatcctgcccccacagattttgtcccaaatgcagggtaccatgctttgatagaagcttttggtggaaagggctatcttgttgggacgcctgatgaactcaagtctgccctttcagaatccttctctgctagaaaaccagctgtagtaaatgttgtgatcgatccctatgctggttcagagagtgggaggatgcaacataagaattgatttcccttagttgcctaatgctctatagcatcccttcacatcattttctttttggtttaaaatatcacaaagtgtactcctatgactttttttttttgcttgaattatccggtgcagcatagctatcatcaaatatatattttttaacttcaatatagtaaattctctttaccctaagggtttcaatatccttcttatgtggatcaatagtaatttgacatttgtaccttagccgcctacntataaaaaaaaaaaaaaaagga

SEQ ID NO: 17145 - DNA, 1324 bp, Glycine max
gcaggagcagcatcaatacgagctttcgatcaggaaggccgtttcatatacacaaatcttctccttgtggatggcttctcaaggccatggtttcataatgtgtctgcaatggaatggctttctttcaggttgaatttactttcaaattttgtttttgccttctcactggtcatgctagtgagcctccctgaaggaataatcaatccaagtattgccgggttggcagtaacatatgggatcaatctgaatgtgttgcaagcttcagttatatggaacatatgcaatgcagaaaacaagatgatatcagttgaaaggatccttcaatatacaaatataacaagtgaagcacctcttgtgattgaagacagcaggccgcctagcaactggccagatactggaacaatatgtttcaaaaatttgcagatacgttatgccgaacatctaccatctgtattgaaaaacatcacttgcacatttcctggaaggaagaaagttggtgttgtagggcgtaccgggagtggaaaatcaactctcatacaggccattttcaggattgttgaaccaagagaaggaagcattataattgacaatgtggacatatgcaagattggtctccatgacttaaggtcaaggcttagcattatcccacaagaccctgccttgtttgaaggcactgttagaggaaacctggatccactacagaaatactctgacattgaagtgtgggaggctctagataaatgtcagctaggtcacctagtaagggccaaggaagagaagctggattccccggtggttgaaaatggtgataactggagtgtgggccaaaggcaattattttgccttggaagagccctgctgaagagaagcagcatattagtactagatgaagcaacagcctcagtggattctgcaactgatggggtgatacagaacatcataagccaagagttcaaagataggactgttgtcacaatagctcatagaatccacacagttattgatagcgatttggttttggttctcagtgatggaagagttgctgagtatgatgaaccatcaaagttacttgagagagaagattccttcttctttaaacttataaaggagtattctggaagatcacataacttcagcaacttggcaactcaacatgtccaaagcaaggagctattataggacttcaatgatattaattaatatattggagaggtaattcttgggaaaacaaaggctccatctaaactatttgaaccacagcttcaataaaaccaccaatgatacatataaaggggtttcaggccccgaatgtgatgtgaaataa

SEQ ID NO: 17146 - DNA, 445 bp, Glycine max
ggtggatagtggtagtcgtagttggcatggaggaggaagcggaagaaacgaagagcgcagtgagaatattcgtcggaggattggcgggagccgtgagcgccgaagaccttcgaagcttattcgcgtctctgggctccgtccaatccgtccaaaccatccgaaccaaaggtcgcagcttcgcctacctcgacttcctatccgaccccaaatccctctccaagctcttcagcaagtataatgggtgtctgtggaagggtggaaggctgaggctggagaaggccaaagaagactatcttgtgcgtttgaagagagaatgggaacaaggcgctctagatgatgctactcaaaaaccacctgctgctgctattgaggaggaaattcccagcaccacacactcttccgagtcaaattccaaacacctcaatattttctttcccagattgag

SEQ ID NO: 17147 - DNA, 460 bp, Glycine max
cccacgcgtccgcccacgcgtccggagataattcctccatcatttaacaacctcacaggctggtctaagttcagggtggcgcataatcgcttagagggaccaattccaactggagggcagtttttaagcttccctagttcaagttttgagggcaacctggggctttgtagggaaattgattctccttgcaaaattgtcaacaatacaagtcccaacaattcttctggttcttccaaaaaacgtggtagaagcaatgtccttggcataacaatcagtatagggatagggcttgcactgcttcttgcaattattctgctaaaaatgtcaaagagggatgatgataagcctatggataactttgatgaggaactcaatggtaggccacgcaggttatccgaagcacttgcttcctcaaagttggtgctttttcagaattcagattgcaaggatcttacagttg

SEQ ID NO: 17148 - DNA, 640 bp, Glycine max
  unsure (1)..(640): unsure at all n locations
gcaccacttcccattgggtttgccgtcttcatggttcacttggctacaatccctgtcactggaaccggcattaaccctgcaaggagtttcggaccagctgtgatcttcaacaacgacaaagcctgngacgaccaatggatttactgggttggaccgtttgttggagctgcggtggctgcaatctaccatcaatacattcttagaggttctgtctcattccaacaaaaaaccaaaccccaaaacagcagagcaaccaacaaagtcataatagtattacccacccgccgcagactgaaaaaacaaaaccagatacaatcgcagaataataatgccagaacactcttcatagttgttcatacagtacatagttattctcacaccaaaaccacgtcaacaaattcaaaaactgtgtcaccttccttggtgtgttaatgttaatgcatcaccaccacaagccagagcttcacatcggaaaagagaacccccacctctcttccgatgacgccgccacttcaactccacaaacccatttctcaattcaggtttcaccttgctcgccccatccacctccaccaaactcaccaaacacgccgttccaccatgaacgcttctccaacaagagaataatacccatcatgac

SEQ ID NO: 17149 - DNA, 487 bp, Glycine max
aaaataatggcgggagctactccgtcctgtgttttctgtgcgattgccgccaaatccacctctagcaatactcttctttactccgacgataaggttgttgcttttcaggacattaatccatccgctttcaggcattacttggttgttcctgtggcgcacattcctactgttaaatatcttcagaggaaaactgacgactattctttggtgagtcacatgttagaggtggggaagacgttattaaatagagatgcacctcagtcccagcagtacagatttggctttcatcagcctccgctgaactctgttaaccacctacacctccattgtttggcgctaccatatacacccagatggcgatctataaaatacttgtctcttggaccacttggcttcattgaagcagagaagtttctggaaaagataaagccattgtcagttcagtcaaaagtatgacggtctgtttgatttccggttaccccaacgt

SEQ ID NO: 17150 - DNA, 448 bp, Glycine max
cccacgcgtccggaaacttttaggcattacttggttgttcctgtggcgcacattcctactgttgaatatcttcagaggaaaactgacgactattctttgggtaaagaaactgatagctgttgtcacttcagattataagatttatgtatgcatatgttcaaatttctactgtttcaatctatttcatgattgcctattttatacagtgagtcacatgttagaggtggggaagacgttattaaatagagatgcacctcagtcccagcagtacaggtattttagttgcttacaacttacatgggcaatgcttattatttttgtttgtcgagtttcttgtgaaattagattattgacacatgatgttggtttcaattgcatttgctgcccctaattaatgattgcacttataaggttatataacttcttgtgcacattctgttttacactc

SEQ ID NO: 17151 - DNA, 334 bp, Glycine max
gaatctctcatgaggttattctctgccaaccaaaataaccaaaccaatcaataatacatcatgctcataatcgaagctcccatcgccgtcagattccacgccaccgccgccattcgctccgccgccgcaccttcacctcataataaccgttcaatgtggagcgccgatgacgtgaacggtgtgcgttatgccgcttcgtgcaggctcgcatgcagctgcggtttcgacgcgccttgggtaagaagtaaaataaattcaggcactccgttcacaagaagaaacaaacttgtaaaaaatagaattagggcatcatcagagcatctgggctccgctc

SEQ ID NO: 17152 - DNA, 406 bp, Glycine max
gcaaaacatgctgctggatttaaataagaaaattccaattagacggatcagtaaaagcttggattttgacagtttgaatatcagattcagggagaactgcagattggccaagagtagaagtcattcatcaagtagaagcaaggagatatcttttaataggattttctctaagcttccagtcattgattttgatattgacaaagaaagagcattgaacgtgattgacagactggatgtggtcagataatttgaaagtttgcccgatcgcctttgaaatgaatggaaaggagaaataatacatgtagacatggtagtgggtttcctttctgtgcatatgcaacgttcttgctgcaagcgttgaatgccatatttttgccgcacctttggtactttggattctcattgg

SEQ ID NO: 17153 - DNA, 706 bp, Glycine max
cccacgcgtccgcttgtatcatttataaagagagaggaagtgaaattttcgtgagagacaacaaaacaaaaaccattcaattcaaagatagtaggctgccaggcaccgcacaccgccaccgcactttctccgatcctcacaattttgcctccggcatgtctccggccgccggagtcagcgtccccctcctgggggattccaaaggaacgccgccgccggcttccgtccccggcgcggtgttcaacgtggccaccagcatagtcggcgccggaatcatgtcgattccggcgatcatgaaggttctcggcgtagttcccgctttcgcgatgattctcgtggtggccgtgctggcggaactgtccgtggacttcctgatgcggttcacgcactccggcgaaacgacgacgtacgctggcgtcatgagggaggcgttcggatcgggtggagcattggccgcgcaagtttgcgtcatcatcaccaacggtgggggtttaattctctaccttatcatcatcggagatgtgctatctggaaagcaaaatggaggggaagtgcatttgggcattttgcaacagtggtttggaatcactggtggaattcccgggaatttgctttgcttttcaccttggtctttgttatgcttccattggtattgtacaaacgtgtagagtccttgaagtacagctctgcagtgtcaactcttctt

SEQ ID NO: 17154 - DNA, 623 bp, Glycine max
aaattatttacttcaatttcattagctctgacaagatttctttatatatcgtcatattttaatcattctttagtctatcagttaatatttaatacgcatgatttaacccgttttaaccctatagttacacgcctttacaattacatagacaatgaaatagtaccgtgatgcatttctgaggaaagaaagatgttttttaacggatatgggtatcaagggacatcatcatttgagcagacatttcgatgttactctgcttcgtttattgaaaagcccgaaattgaaaatggtgataaaattataatgcctccttcagtccttgaccgtctagcatttctacgtatggattatccaatgatgtttgaactcagaaatggtgcttctgagagggtttctcattgtggggttctggagttcattgcagatgaaggaactatatatatgccatactggatgatgcagaatctgcttttgcaagagggagacatcgtaagagtgaaattcgtatcacttccaaagggaacatatgttaaattacagccacacacaaaggacttttttgatatttccaatccaaaagctatcttagagaccactttgagaaaattttcctgcttgactac

SEQ ID NO: 17155 - DNA, 434 bp, Glycine max
gtgatctccaaaatgcagagcacagttttctctctctccccttccctctctctcccaaaacaacctctcaaacgctctgtctctgtttccacttccaaactcaacgtcattctcactccctcttcattcccatgtcaaccatgttctcttgcttattctccatctttcaaactcgctccctcacactttcaccccttccatgccagagcaacctccgtgccggagagcagcgccggcaacactctgctcaatactctggaacttggagccctgtttgggctctggatcctcttcaacatctacttcaacatctacaacaaacaggtcttaaaggtctaccatttccctttaaccgtaagcacccttcagttcgctgtggggtctctcttcgtagcattcatgtggagtttcaatctctataagagacctaaagt

SEQ ID NO: 17156 - DNA, 1119 bp, Glycine max
taacttttttaatttaggcttcatggttaagtacttgctacctcacatttcttctccaatttgttgttgatttttcaagctctaccctcccttccctccactttcctccctcttcttcttttgcttctgtttttgaggcgaagaaggatggaattgtaatgctgggaatataattggagaattgggggaggagtaagggaggaaatcatacacaatgcccgagttccccttgagctcgaggttggaaagggtgcaaaatagcttgagagagaatggttctctggtgtatctcaatgtgtatgatcttacacctgccaacaattatctttacgcctttggggttggaatctttcattcgggcatagaagtgcatggtatggaatatggctttggagcacatgaatacccaacaagtggtatatttgaggtcgaacccagaagctgtcctggcttcatcttcaaatgttcagtattgttaggcaggaatgatatgtcttattcagaatttcgttctttcatggagcgcctttctgtaaaatttcatggagacagctaccatctgattgctaagaattgcaaccattttactgatgaagtttgccaacagctaactggaaagcctattcctgcatgggtaaatcggctggctcgtgttggttctttctgcaattgtcttctgccagaaagccttcaggttgctgctgttagacatctccctgaacatcttgcactttctgacgatgaaggactggaatctgatggcctctcggattcagaggagagtgaagacgaggattccaatcaccatctgctaactacaccaagtggcggtgaactcaccattataaaggaaaaaccaatgactctagcacgggacctcctatgatttttcattaattacttgccattcttattctttcttccttgtactgtatgtgtgatattagctttcaaggtgtaacaagctttctcaactgccatgtatgtgttacaaagatgatatttgtctatgtggtcctgtatgtttcagaatgtagtggctgtcttttggatgtaatattaaggtacaaacaaaaatgttcaggcaccccgttaatctgattctgtggagttcatatt

SEQ ID NO: 17157 - DNA, 860 bp, Glycine max
ttgttcacgcgtccgcccacgcgtccgcccacgcgtccgtccacgcgtccgcccacgcgtccgcccatttgtctcttcccttctttccagaacaacaccacaacacaaacagagcaaaaaaagctccaccaatggcgggttacagagccgacgacgactacgactacctcttcaaggtggtcctgatcggcgattccggcgtgggcaagtccaacctcctctctcgcttcaccaagaacgagttcaacttggagtccaagtccaccattggcgtcgagttcgccacccgcaccttgaacgtcgattccaaagtcatcaaggcccagatctgggacaccgcaggccaagaaaggtatcgtgccatcaccagtgcatactatcgtggggcagtcggtgcacttctcgtgtatgatgtcactcgccatgcaacatttgaaaatgttgacagatggctgaaagaattgcggaaccacacagacgccaacattgttgtgatgctagttggcaacaaatcagaccttcgtcacctcgtagcggtgtcaactgaagatgggaagtcctatgctgagaaagaatcactttacttcatggaaacctcagctctggaggctactaatgtagagaatgcatttgctgaagttctgactcaaatctaccgcattgttagcaagaaagcagtagagggggctgaaaatggaactgcatctgtgcctgccaaaggagagaaaattgatctgaaaaatgatgtgtctgctttgaagagagttggttgctgctcaagctaaaattggaaaacatagttcaattggttggtatcggctctgttgtatgtgtaatattctgagaaatacgaactagaa

SEQ ID NO: 17158 - DNA, 461 bp, Glycine max
atcactggtaaagaatatgcaagaaacagtgtattattagaaagtacataaaattactgtatcatttaatcataaatcagtcacatttgataacttttataaaagcaactttcaaaaattatttttgaggataatttctgatttatggataatgtaaaactttttacaataaaagtgtatgaaaaataaactcctacaatgataaaaaaaaatgtgcaaggagtgtattattagagactctgttgcatttctcatcatatatataatatatataagtaaaaataatttcatattaattaaaaaaagcaattaacataatttacttttactaatcttaagtaaaaaaaaagttatttttaaaatgtctttcattataaagtactttatatcatgaataaaaaagtcattgaaaataggattagaattaaatgaaaaatattttaagaataataacattaaat

SEQ ID NO: 17159 - DNA, 461 bp, Glycine max
ctttagtggaacttggtttaagcaaatgcgttggagtgaccaacaagggaattgtgcagctagtatctggctgtggctatttgaagatacttgatttgacttgttgtcgcttcatatctgatgcagcaatctctactatagcagactcttgtccagaccttgtctgtctgaagctagaatcttgtgatatggtgactgagaattgtctttatcaacttggattaaattgctcgcttctcaaagagcttgatcttactgattgctctggtgttgatgacatagctctaagatatctatcaagatgttcagaacttgtaagattgaaattaggattatgcacaaacatatcagacataggattggcacacattgcttgtaactgcccaaaaatgactgaacttgatctctatcgatgtgtacgtattggagatgatgggctagcggcactaacgagtggatgc

SEQ ID NO: 17160 - DNA, 468 bp, Glycine max
cccacgcgtccgcacttcaccaccaccttctcctttctccttcttcctcctcctttctgcttcttcattctctccttccctcttgagcttttctttttagcacggaacatgtgagtgccacaaagggtttgagactttttgaggctttctctcactctaataagtcctaacctcattcacctcttgggtggtgtggtctataatgtaatttatcatttgtgcaaattttttctcagatctatccaacttctcttttttgtccttttattctgtttggaaatcgtcatcatcaccatttgatttgcagggccataatttttctgctttggttttcaactcttccacaccattttccattttttcttcttcttcttctctgggttttttttttcctgtgaaaaaaaaattgagttctttttggctaagcctccaagcagatccaactagggaaatgtaaaattttcaatt

SEQ ID NO: 17161 - DNA, 554 bp, Glycine max
cccacgcgtccgcccacgcgtccgcttgcctgatgaatgagtcatctgctgggacagatactatggacatggatgctttacataacaattatcctcccggtgatgttccatttcaaacaaataagtgctccaaggatagtcaaaactcgcttacgtctcaaggtgcaacaatttctgctagagagaaaactatagcaaaatcagtgaatacaacaatactagatataaaccaagagcctcaagagcttcttactgaggaaagtcctgtggttgacagggagactagcacatcaagaacccacagccttgatttggatcactttctttctcatgcagatgagcatgctatgtcaagttctggcaatagttctttaagaacagacccaagcagcagatgggtcaaaagactcaagttgtgcacattgggctctgctcatggtactgggagtacaaaaattggagaaacttcttcacatgaaaaagttaacaatatatatggcaaaattatgaaagatagcagaactagtctggaacccaaaatggtacatcatgct

SEQ ID NO: 17162 - DNA, 432 bp, Glycine max
acataactatcttgtgtgtcaaacggatgcatactggatacaggtgtggaggataacatacgctaatacaacggaggaacggtttctgaccattgcgttgagcagggctgaggcttattgaattatttaaattggaaagccagattgaatcaacggtacacatttattaatggaacgaacctatacgcttcctactgagaatgtttggtgcatgtcactcaatctagaacgtataatacttgatgcgatgattctcatagcatagtgacaagatcttatatggaaaactgatgatgtgagccttaacagcacttatgaatgctgtattaatatagcacagagatgtgctcaatgtgtacgaaacatgaaacatgtatttatacaggtatgagtcctggtggttggaaggtactggttgaatactatgatagc

SEQ ID NO: 17163 - DNA, 466 bp, Glycine max
cccacgcgtccggtaatttctttctgtaacctcatgccatgctcactcagttactcatttttcttgcaccgcctattgtgcgtgaaatgaaatatatcatttgcggaatctctccacggagcaagttttgggcaggtttgagttttagtgtttgaagcattcaaatgatcttgagttggagttggagttggttatcttagtggcttggatgttagatgcctgaagcctgcgttggaggattgcaattgcatactaaagagggttcattgttcatagcttaacaccaaaaagtgtgggcacatgctacagctacatacccgaaaaaaattacatattctttgtatatgtgttatatttgtgtttgataattccattggtaaatgtgatttttctaactcgtgtgcagaaaaccagttataggatttgtctcattggcgacatgaacttctgagaaagtttatagaaa

SEQ ID NO: 17164 - DNA, 448 bp, Glycine max
ccatggaaggccaaaattccgccatataaacatgccattgcagcctatagtgttgccatagcgggcctcccttcacaaactgtctatggtggttggcaaaaatctgcaatggcgctgccatttaacaacattgacacttagtagggtaaacttgttagtaatttgtataaaggtacgattttcggatctaagccgcaccagctgtcacatttgggatcataattgaatattatcattaactatatcttgttttgatattttggcttaaaaaaaagctatatcttattttattgtataatggtgttcattattttcgggatttgctggggtcggtgaatgttttattttttggttgatgcacgcatgggagtgctctcctgggaaagagttcgcatggaacttgttatccctctttactacttctggaatgctgtttctagaaatgagc

SEQ ID NO: 17165 - DNA, 564 bp, Glycine max
gaagccaccctctcaacagaggcaaagggcaaaaaccatcgatgatgtttctctgagtctgaggattcacgcgttactgttactgttactcaactcttattcccttccttgattccaattctccgcacttcatttcatttgaattctgaaaaattagggttagggttttctttctttcagtgaaaaaagaagaagaagaaaaaagtggttttggagaaatggttgagcaatcggtgctggtgctcgaaaagcaagggccaaatccagtgttatcagaaggaatccacgattgggtgtttgagtgccatgggcttttgcacaatgcggttttgatcatcgcttcttttcttttcgtcttgtacttagcactgcaagctaaaaagagcttcctcagactctcccatggccgctcttatatcattatatcctattacgcttccctctggcttgtcagcatccttaatcttctttggtgcttttcccaggcatgggagtgctctcctgggaaagagttcgcatggaacttgttatccctctttactacttctggaatgctgtttctag

SEQ ID NO: 17166 - DNA, 509 bp, Glycine max
cagcaatagcctctgatttcttctttcactttctttaggttatggttttctcagaagattgaacttaaacaaaaacaacaagaaagaaagaaagaaagaagatgggaattgcagtgggaggtgttgatttgctgagtgaaaaagcggcgatgatgagagagtgtctgcagaagagtgaaaccatcacagacaacgtcgtcaccattctcggttccttcgaccaccgtctctccgccctcgaaaccgccatgcgtccaactcagattagaactcactctattaggaaggctcatgagaatattgataggactttgaaggctgcggaggttatattggctcacttcgatcaatatcgtcaggcagaggcaaaaatacttaaagggccacatgaagacttggaaaactatcttgaagcaattgataagttgagaagcaacattcagttttttggtagtaagaagggtttcaagagtagtgatggcattgtcgtgcatgctaataatttgcta

SEQ ID NO: 17167 - DNA, 744 bp, Glycine max
ctcgagccgctcgagccgaatcggctctcactagcctaatttgctcctttagcctcactcctgctctcttctacgtcaaatcctaagaaacccatttgaaattttaaatctcgttctggctaattccatgttcattgtttactatacctcaccactccaagggtctcataaatttcttctgcttccaactctgctgcagaaaaagaaactgttggttctagatacaagtgggtttccagagtagaagtgaggctattgggcatgagataaacagcaagcaccatcatctacgacccttttgactatattataagcaacacaaaaatggagagtgacttgagctgggagcagaacacgctcataaatgagctaattcaggggatggaggtagcaaggaagttgaaggcagacttgaggatgccgtattcagttgactcaagagatttgcttgtgcagaggatattatcttcttatgaaaaggctctactgattctaagatgcatgcatcatcaacttccgagttgcaggccatgagtcaagcaacaccaactttgctacccgagtccccattatctgtccatggaagtcctctgcgcgaggacgttgatgggaccatcaagtgatcaccaagaagttaaacatgattcacagccaaggaaggctacgcccaaatggatggatcatgtaagagtgagctgtgaaagtgcgtcttgaaggaccacatgaagatagctacagctggag

SEQ ID NO: 17168 - DNA, 682 bp, Glycine max
tttgcctaattcgctctcttctaccacaaaccactcaatcctaagaaatccatttgaaatttcaagtctcgttctggctaagtccatgttcattgtttactatacctcaccactccaaggttctcgtaattttcttcagcagaaaacgaaactattgcttccagagaagagcatcatctacgaccattttggcaatattataaaacaagacaaaaatggagagtgacttgagctgggagcggaacacactcatcaatgagctaattcaggggatggaggtagcaaggaagttgaaggctgacttgaagttgccgtattcagttgacacaagagatctgcttctgcagaggatattatcttcttacgaaaaggctctactgattctaagatgcagcaatgcatcaacttccgagttgcagggcatgaatcaagcaacaccaactttgctacccgagtccccattatctgtccatggaactcctctgcgcgaggacgttcatggggccatcaaggatcaccataattcaaagaaaagaaagataacgcccaaatggatggatcgtgtaagagtgagctgtgagagtggtcttgaaggaccacatgaagatggttacaactggagaaaatatggtcagaaagacatccttggagccaaatatcccagaagttactataggtgcac

SEQ ID NO: 17169 - DNA, 393 bp, Glycine max
ggaagaaggaaaacctagctgagattagaaaaagcatcaaatggcatatgagaatgccaaaagttctaaaatccttaacaaaccccccagcaacgtgcacgtaaataaaacccataagtcataagccccctaatcttcacctcatctcgatttgggaagcgaaaaatcataaaaccaactaagaacagagcaagttttgcttctgcgtcgtcccctgattccggcaattgtatcccgtgaggtgtgacttgtaagctgctacagtaagaaaaggaacagaagaaacccgaattgttatatttttttgccgaaggattacctggaagcaatcatggatgttgatgcacagccaacgatggatgaaacaattttggttggtgatgatttaatgac

SEQ ID NO: 17170 - DNA, 817 bp, Glycine max
agctatactcagagacagagagtgcttacgcagttttcactcactgtttcagtagtagggtttttctttatccccttttttcttctctcttctctctttcgttcaccacttcgacgctaagctaatatttcattcgttttcgtgaacgcgctaacggagaacgatttcggttatagagagagaaactaggagagatagagagcgattgatcatatatggatacgcacgcggtgcatttggccttggcggcgatcgtcggagcctccgtcgtggccgtgtcggcgtattacatgcaccgcaagacgctcgcgcagctgctggagttcgcgcgcacggtcgagagggaggctgacggcggcggcggttccgacaccgaaccgcctacggcgcatttgaagaagcgccttggcagctccaggaggcgtggcaacggcggatatcggcgtggctccgcgtcgctgccggacgtcacggcgatctccggcgggttcgacggggaagagaagcggaacgggccagtgcacgtcgacgggattcctgtggggttgccaaggttgcacacgcttcgtgaaggaaaatcatctcaatctggttcctttaagagaagtcttttaagaccaacttctcccaagtcccctgttgcaagtgccagtgcctttgaaagtgtagaaggatcagacgatgaagataacatgacaggcgaagttaaactggatactacgtatctgcacacaaatgggactgttgtgccagaaggtaaaatcccatttgagactttacccaatcatgttaatgctaacggagagcagatggcaat

SEQ ID NO: 17171 - DNA, 435 bp, Glycine max
tcgagccggtcgagccgcagaaccaaacaagccccattttcaaccacatgaccactatggagcctaagttccctgctaaccatgcaactaaagcatatggaggagcaccaaatttgggttattgcttagaccctttatcttgtgacagaaaaatgttaaaagctgttttgaatcaaatcacaaagatggaaaggaatccacttaaccaaagtctaaaagggtcaccaagcttaggagaaggaagttcagagagttatttatctgaagtggggatgccccacgtgtggaattactgatgtgagactttagtacttaaaccctctcctccacctatgccaccatgaaattttttttttaaaaaaaaaacaagaaaaaaaaagggataagggggaagataaaatcaatccattgttttaagtcatggtgagtacttat

SEQ ID NO: 17172 - DNA, 690 bp, Glycine max
cgaccgacgcgtccgcccacgcgtggggtgcactgtttgaaagggctgttagtctgagcctcccaccgaaaaagaggaagttcttattcaaaaggtatctttattatgagaagtcccaaggtgatgaagaacggattgaatctgtgaagaggaaagcaatggaatatgtcgagagtactagggcttgatataaattcaccactgctttagttttgaattcttcaacttgcagccactctggagtctaagctggatatcttaagaccaagctttgtgttagataaggcatgacaactaaacagtacatgttttcccaaatcacctggagacagtatttgatcttggttgcctctgtaaatggagtggttctaacactacctaatagtgtgctgctaagtgctaatgtgctttgtgcagcatagggtgagttgtgaatgcgtcaaatgagcacgagaaaacctttgagatgaaatataggtctttgtattgtcttttgcccgtttattgcatttgggctgtaattttttggtttgacacatgatttgtcatgggcgcagaggttaggacaatgttgtaacgttggtatagtgttaggttataacgaaattttgagaatgtaaccattactttatatattcttatatgcttatgctccaaaaaaaaaaaaaaaaaaaaaaaaaaagggcggcc

SEQ ID NO: 17173 - DNA, 402 bp, Glycine max
cccacgcgtcgcgcccacgcgtccgctgatacttgctctggtcatagtttgctgtttttgtcagtgcttaagttctggcggcgataccattacaccaggccaattcatcagagatcctcacactctcacctcagctaatagtgccttcaagctaggattcttcagccctcaaaattcttcaaatcgctacctgggaatctggtatctctctgactccaatgtcatatgggtagctaacagaaaccagccactaaagaagagctcttccggaactgttcatatttctgaggatggcaatctcgtggtattagatagcaacaaaagggctgtttggtcaacaaatttgacacataatattgcaaccaattcaactgccaaacttttagagactggaaatctagt

SEQ ID NO: 17174 - DNA, 474 bp, Glycine max
cccacgcgtccgctagatcgttcacggccaccaccaggtaagacgcctcccaacatccccaatttttttttttttttttttcttgatgagcttcttttttgcagtgataaatgagagtttgatttgatagactttcatcacatgtccatgaatataacatttccagtaatttgaatctgactaaagactgttttattaattttcagattattttttaatttatttttaatgaactttagaaaaaaaattagtttattataggaaattttacggtgaatttcagaataaattttcatatgatacgactttattaaataaaaagtatctctatactattttattgctaatttacaaatatctcatttttttatatttatggaaaaaaaattggtttcttattataagaataataatttatatttataatataaaatatttgagtagttaatgaacttgtttgttaagattaagatg

SEQ ID NO: 17175 - DNA, 458 bp, Glycine max
gtccgcggacgcgtgggccgccaaatcaaataaaatggatactgaaatcgttgagagcattgatgtcacagatgatgcaaggagttttagctgggcagtggacagcgccataaggagtgagactgggtccatttttggagaatctcgtgtccgtagctttgcttcgttagtggacagtgccataaggagtagtagtgctactgaagcagatttggaatcatcccctgtccaggcagaagacagggcgatgaggagtagtagtagtggaactgatttgggaacatccccttttcatgtttttgctacggcagcgggtatgaggactgttgctgccacccagagttaccgagaattatttaacctgttagagcttatactgataatacttttattgattaatgagtttgttaaacaagcttatgggattgtgttacgcatgaattaagaatgccatacac

SEQ ID NO: 17176 - DNA, 367 bp, Glycine max
tgtgctctgtgcctccgccaaatcaaataaaatggatgctgaaatggttgagagcattgatgtcacagatgatgcaaggagttttagctgggcagtggacagcgccataaggagtgagactgggtccatttttggagaatctcgtgtccgtagctttgcttcgttagtggacagtgccataaggagtagtagtgccagtgaagcagatttgggatcatccccttccccagtgcatgcttttgcctccgctgtggatatcaggactgttgctgcacgattattcaccgtctctgagcttaacgtagccaccaacaatttctcatttgacaacaagattgatgctggaggccttgatgttgttgagtac

SEQ ID NO: 17177 - DNA, 411 bp, Glycine max
aaaaaataataataataataatagtaataacatcatcgtatcagcgtccgagccactctctccgtccggcccgaccgtctctcgcccggttcggtgtttcccagaccaccggttcagcctccgctgcgaaaaccaatcgcggcgcccgagccgtggcgcgccgcggcgccgcggatacgcatcaggacggtggcgccggtccaggcgagctcgcgcgccgatgactccgcgccgttcgagatgtcggtggagaacgcgctgaagctgctgggcgtgtcggagggcgcttccttcgacgacatactccgcgccaaaaacgcaatcgtcgccaattgcaaagatgaccaagatgccattgctcaggttgaggctgcatacgacatgttgcttatgcagagcctaaccccgcgt

SEQ ID NO: 17178 - DNA, 1266 bp, Glycine max
tcagcggtcagctaatgagattatttttggatgtcttccctgtggccattgccgtctggaagtcaggctggtcctggattccagttatttggttctgatgcggatgtgtctgatgcgttggtccatctgcagcatggtcctatgaattgctcctcgtcactaaatggttatgcattggctcccaatactgctttgggatctggtagtatcttgcaagagtcctctgctggtcggtcagatgctgatttgaatggtggtttggtggacaatcctttggcctttggtggagatgatccctcacttcagatttttctccccacaagaccagcagattcatccatgcacaatgaattgagagatcaagcaagtgtggctaatggtgtctgcactgaggaggattggatatccctcagtcttggaggtgggactggtggtaacaatggtgatgcttccactcaaaatgggttgaattctagacatcaaatcccaaccagagaaggtgccacgaatactttggatgatactgcttctttactccttgggatgaatgatgttagatctgacagggcaagaaggcaaagatcagatagccctttctcctttcctcgccaaaaacgttcagtaaggccccgcttgtacctttccattgattcagattcagagtaaaggtcataccttgtgtctcaagaattttaggtactcttaacaccagatttcgaatttagaaaaattgaagacagttgcgaggcatttttggtcctcatgaaatggcaattaatacataatgataatgggtctgaggcatctctggtggaacagagctacaaattaccctgtgccaaaatgcttgcacccacccccattggcaaagatgttgtggccgtaatgattctttatgcttgatatctaaattgtccttgtggcagatgttgatagatggactttatcagccaaaaactctccattatatctgctaagagctattattcccgtcaattttttatgagggtgtatgccggggttatagtgctggtttattgtatagttaatcattcaaatctggtagttcaaactttcaaaaaagttgggtggaacattatatctgcatttttgtctctgctaagagcaataacctgtaaatgtttagccatatcagatccaacagtgaaatcaaagatattgtttctggtcatttttctagaatactctgttgtgtcagtatcatgcctcatgattggccaagaatggtaaacgcctatttcatga

SEQ ID NO: 17179 - DNA, 737 bp, Glycine max
gtgatgctcgcattttttgtttaggggttcgtattgttaaaaggcgcagtatgcagcagatcctaaactcaatcccaaaggagtctgatggtgagaaatttgaagacgcccttgcacgtgtctgccgttgtgttgggggtggaaatgcagttgatgatgctgatagtgacagtgatttggaagtggtttcagatactttcactgtcaaccttcgttgtcctgtatggctttcatcaatagatgaattattttagcaattcatgaagtcctactaatcagttttttatttttggtgaaaattttagatgagtggttcaagaatgaagattgctgcaagatttaaaccctctattcacatgggttgctttcctcttcaagtgtttgtggaaatgaaccaacgatcaaggacctggcaatgtcctatatgtctcaaaaactatgcgttggagaatatcatcattgacccttatttcaatcgcatcacttctatgatgatgaattgtggcgaagaaattgcagagattgaggtgaagcctgatggttcttggcgtgttaagcatggtcctatgaattgctcctcgtcactaaatggttatgcattggatcccaatactgctttgggatctggtagtatctcgcaagagtcctctgctggtcggtcagatgctgatttgaatggtggtttggtggacaatccttgggcctttggtggagatgatccctcacttcagattttt

SEQ ID NO: 17180 - DNA, 489 bp, Glycine max
cttacgcgtccgcccacgcgtccgccctcgcggccgcgtattgttaaaaggcgcaccatgcagcagatcctaaactcaatcccaaaggagtctgatggagagaaatttgaagaagctcttgcacgtgtctgccgttgtgttgggggaggaaatgcagctgatgatgctgatagtgacagtgatttggaagtggtttcagatactttcactatcaaccttcgatgtcctatgagtggttcaagaatgaagattgctggaagatttaaaccctgtattcacatgggttgctttgatcttgaagtttttgtggaaatgaatcagcgatcaagaaagtggcaatgtcctatatgtctcaaaaactatgctttggagaatatcatcattgacccttatttcaatcgcatcacttctatgatgatgaactgtggcgaagaaattgcagagattgaggtgaagcctgatggttcttggcgtgttaaggtaaagagt

SEQ ID NO: 17181 - DNA, 419 bp, Glycine max
cccacgcgtccgattttcaatgggttcggaataggcgaacgggaaagcaggcgacgacaccaacaaataacaacgaatgactaaaacaaacccaacttcatcgtcatcactcccttaatctccacactctggaagaaccaaattgcgaaaatgggattgattacggtggtgaaggagttgtggagggctttctttttcctttgctcactacaattctggagaatggcgttgctctggactttctctattctttattcttattaccaattgttcaaagattccttatcccattcccagtatttcaaacctctaattcctgagaaatgttccctcttctctcagaaactcgtgtcctatcccaggtgctcccctttcacaactacttttaggcctgtctgcgtcatcactggtgcaacgtc

SEQ ID NO: 17182 - DNA, 350 bp, Glycine max
attgattaaggtggtaaaggagttgtggagggctttctttttcctctgctcaccacaattctggagaatggcgttgctctggactttttctattctttattcttattaccaattattcaaaccactaattcatgagaaatgttccctcttctctcacaaactcgtatcctatccaaggtgctcccctttcacaactacttttaagcctgtctgcgtcatcactggtgctacgtctggtctaggattagctgctgcctatcaactttccaaggaaggatattttgttgtgcttgttggacgttcacagcaattattgtcagagaccataacaaagataaaagattggaatg

SEQ ID NO: 17183 - DNA, 652 bp, Glycine max
gaagctttaagttaggacaagctagaaggtacggatattaattttctgtacaattcacaagagaaatagcagtgccaagtgtaataatatgtacatcaagcatctaaaggctttcataaatcatctttaaattcctacagagggagcaaaaaagcaaacaagaaataacattttctagtcatcagccaaggaaacccttccagtttcatacagatgatacatccaaagaggttcaatcaactcctttgcataggttaatttctccagctcatcatcattttcttctgcaatttccctctctatcctgggaaatatttcttgcagagaagagagcatcatgtcacccaatcccggtcatcaggtttaaacaacttaagacatacaaaccacaagagtcctaatgccatcccaaagtccttctggtctagcccaattactgaagaacccatgaaaattacaccgactgcatccattatactgggaatttttttcagtaatataatcagcatttccatagcttggtgaatgctgagaatttttctggttgagaagattcatcatcttcagctttatttacttcaaagagctcagtcttggctaaaatcaagggccattttggaaaatgcaacttcatttgttcagatgcagttga

SEQ ID NO: 17184 - DNA, 467 bp, Glycine max
caagtccttgctttgactttcctatttcaacctctcttgtaactcacactgcttttgctaggacaacttcaaacgtttagcttttgtcagtactttcaaatcaaaggaaactccttatactcaaaaagagtttgcaatggggttaactaggatgtgttattttggtagttgtcaagttcattccgtttgtaagagttagataccattttagaagctaattctcaagccatccgtaaaggaagttcttgcagttcacagtctatatttattgtatgatgtaacaatccatctgttgattttgcatgttatcagtcctccttcaattgaacctgttatgtttaggcatatatcagttgcgttttgatatgttcaattatggattcgttatgctgttcctcaacctactgtaactgtcctatgctacttagttaatctagtccctacttgggtcacctcatctttgattt

SEQ ID NO: 17185 - DNA, 621 bp, Glycine max
ctcactaggaaaatctggcatacacggaactttaaaggacaggtcagcccacacgagtttctacaagcagtgatgaaagccagtaaaaaaaggtttcggataggtgcacaatctgatccagtagagttcatgtcatggctacttaatacgctacatgcagatcttaagacttcaaagaagaatacaagcataatatatgagtgttttcagggcgaacttgaggttgtgaaagagattcctaacaaagtgatctctgataagaaagaaaacagtgaaaaccaaaacaatgctgagaaactttcagatggggtgaatgagcgatatgcatttgtcaaagaaacttcaaaaatgccatttctaatgttaggattggacttgccaccacctcctcttttcaaggatgtgatggaaaaaaatataataccacaggttccactctttaacatactaaagaagtttgatggtgaaactgtcacggaggtggtccgtcctcatatagcaaggatgcagtatcgtgttaccagattgcccaagtatatgattctacacatgcgtcggtttactaagaataatttttttgtcgaaaggaatcctacggtagtcaactttctgtgaagacct

SEQ ID NO: 17186 - DNA, 441 bp, Glycine max
acgcccacgcgtccgcaaattcaacagttttttcagttttagacgctgaaaattcaacaaagaaggctacacacactgacacaaacaaacaccaagcttgaaccttccctccccatgtttgaattttgctctttcccccaactaacctttagcctccatttccccgaaaaatatccccgcggcgaactaaaccacttcaaatgaccaaaatgcccttcaccttcgtcaaatttccattccacatcctcctcttcctcgtcctctcgctgccctccccggtaatttcgcaggaccagcaaacaaccctcctcggcatcaaacgacaattcggtgaccctcccgccctccgctcatggaaatcctcgtcgccgccgtgcgcatggtcgtgaatccgatgctccggcggcttctgaacggagctccacctcgccgggaaaaaca

SEQ ID NO: 17187 - DNA, 1647 bp, Glycine max
gagttctgttggttgtgtaggatccttctttgaaggtttatgcaagtttgctcgttacagcaagtttgaagagtgtggcagattaagaaatcgagatctgcttagttctgccaatgtaatgtgcgctctaagttttgaccgtgatgaggatcacattgcagcaggaggagtttcaaagaaaatcaagattttcgaccttaatgctattgcaagcgcttctgttgacatccagtacccagtaattgagatgtcaaataaatcaaagcttagttgtgtgtgctggaacacttacattaaaaatcatctggcatctactgactatgatggtgcagttcagatgtgggatgcagacacgggtcagccattgtctcaatacatggagcaccaaaagagagcttggtctgttcacttttctctgtcagacccaaaaatgtttgctagtggaagtgatgactgctctgtcaaactgtggagtatcagcgagagaaattctctgggaaccatctggaaacctgccaatatatgctgtgttcagttctctgcttactcaacaaatcttctattttttggatcagctgattacaaggtttatggttatgatcttcgtcacactagaatcccttggtgcacattagctggtcatggcaaagctgttagctatgtaaaatttatagattctgaagcagttgtctctgcttccactgacaactctttaaagctttgggacctgaacaaaaccagctcttctggtttgtcatctgatgcttgtgccatgacctttaaaggtcatagtaatgaaaagaatttcgtgggattatctgttttggatggatacattgcatgtggttcagaatctaatgaggtgtactgttatcacaaatcactgcctgtgccaattgctactcataaatttgagtcaattgatcacatttctggtcatctaaatagtggtgataataatggacagtttgtttccagtgtttgctggagaaagaaatctaacatgcttgttgctgccaactcagttggaattgtgaaactgttgcagatggtctgacagaaatgagaaaatatttggttaacattgaagcctgaaaagctatttatttcctgacttgataatattttgatttagtatacctctcagaagactaagcgtgcattttatttgagacaaactcgcagaccagttctttattcaggcttcaatgattaatggggtataaagcttaaatgggatcaccatttgacatttcttctgtggcaagcatcaatgtctcctattttccatgcttaggtaatactttcaggtgctggttttcttaaaatgtgaaccaaagaaagctgaacaagaaatgtatatagcatgtacaaatgtaggcttttgaactgaagcactggtgaagctggagcatgcaagtctctttcaaatatcgtattccaagtgactagtggttttctctgatgtctgatccattacttctgtatatagcacacctaagcagagatacatgctaattacctttactttcaaatcacttttagtttctcagaaaagtacaggagatgatctatgctttgcatttactttgacatataaactgtcgctaatatgatggttcaaatattaattttacactttcattt

SEQ ID NO: 17188 - DNA, 661 bp, Glycine max
tgatcaccatactgtccattattatcaccactatttagatgaccagtttgtgtctagtgtttgctggagaaagaaatctaacatgcttgttgctgccaactcagttggaattgtgaaactattgcagatggtctgacacaaaagagaaaatatttggttaacatttaagcctgaaaagctattcatttcctgactcgataatattttgatttagtatacctgtcagaagactagttctttattcaggcttcaatgattaatagggtataaagcttaaatgggttcaccatttggcattgcttctgaggcaagcatcaatgtacaattgtgaaccaaagtaagctgaacaagaaatgtacatagcatgtacaaatgtaggcttttgaactgaagcactgatgaagctggagcatgcaagtctctctcaaatgcggtattgcacgctactagtggttttctctaatgtctgatccattacttctgtatatagcacgccctcctaagcagagatacatactaattacctttactttcagatcacttttagtttctcggaaaagtacaggagatgatctatgctttgcatttactttgacatatattaactgttgtagttaatatgatggttcaaatattaattttacgctttcatttaaaattg

SEQ ID NO: 17189 - DNA, 486 bp, Glycine max
gaaaggtttcgatgcttttacaaactttatttcgctccaaagttcctttgcaactgaaaaataaaaataaaaatgcaccgatatatcaccgtccatgaaagaaaagcgtgctcttcatttgaagcatccattttttcttttgaccccagcttcagctatctaggtttagggttttgcttcaactttactcattttcccgggaaacaccatttagaatgttaccatctttctttttaattatgttgctgactcgttctcaaaatttggtctttcgctatagaatcatgttaggaacagttttagtttctttttattattgtaaatttcgttacttctgaatgcgtaaatttgtgtttgtcttttggtgccacaattaaattattggaaaaaaaaatgccttgcttttgctgcttgatgtgggcccatccatgcattctgttcttcctgaaaatgagaaagtctgcttcatgctagtacaggaaaagc

SEQ ID NO: 17190 - DNA, 424 bp, Glycine max
atagatttgaaccatttcataatctgaagccttttttttttttcttgttgcgatcgaattgtgacggagatggcggcgccgaacaggatcgaacgcgcccaccagatgtaccgcgacggaagttacgaggaggcgttagggttctacacggaagcaatcgccttggccaagaccaaccctcagaagatcgctttgcatagcaaccgagccgcgtgctatctcaagcttcacgatttcaaaaaaggcaggcagaagagtgtacttcagtgcttgagcttgatcacaagcacagtggggcattgatgctgcgggctcaaacgctagttaccctgaaggagtaccattcagcactttttgatgtcagcagacttttagagttgaatccatcttcagaggtttatcaaaatcttcaagctcgtttgaa

SEQ ID NO: 17191 - DNA, 451 bp, Glycine max
atttaaaactctccggaattcaattttctctgcacagttcaatccaaagtacagatagatagattcgatccattgcataatctgaagcctttttatttcctcttttttaaaaaaaaaaattacgatcgaattgtgacggaacggagatggcagcgccgaacaggatcgaacgcgcccaccagatgtaccgcgacggacgttacgaagaggcgttagggttctacacggaggcaatcgccatggccaagaccaaccctcagaagatcgctttgcatagcaaccgagccgcgtgctatctcaagcttcacgatttcaaaaaggcagcagaagagtgtacttcagtgcttgagcttgatcacaagcacagtggggcattgatgctgcgggctcaaacgctagtcaccctgaaggagtaccattcagcactttttgatgtcaacagactcttaga

SEQ ID NO: 17192 - DNA, 488 bp, Glycine max
tcgaccgcgcgtccgatggaatatggggaaattggtcaaattagagtgcagggcttgaatcattttcagcaacaaacagcaccatatgaatgaggactgaccttgctggggggagggaagaataatttgcatgtctcttctattatggaaattaaaggtggaattttcagcttagtttggttctatgaactaattaattccttttcgaccatatcaaactagtagtacactgcagaaattaatcgtctacacattaacactgattggttttcctgtgacaaatcagtgtgtggacactttaatttggtcccttaaattagtgttcatcagtatctttaaatggcgaataatcagaagaattgccctgcacatttagttagttcaatgtgcacacttcgacttcacagcatttcaatttcagtcattccattttcatatcttattaataagaatggaatatggcaatatgctgaaaatttgtagcaacg

SEQ ID NO: 17193 - DNA, 816 bp, Glycine max
gtttttctcctgctattgaaccattttttcctccagttggaaatacatcacatgactttagacaagatgagcaagagctttttgaagatccctgttatgtccagatccagtatccttgcttgggcctgtttctgagtcacttgataattttcagttggacttgggaattggctttggaacagacaatgaaatgacaaaacctcactctttgaaaagcatatctgctggttctgatgttaataagccatctctgattgaatccccatcatcccgagaaaagcatagctgttctaattggtttccaagtaccccgaatggccaagacaagcatggttttcctctggatgatgcagctgcaaatgagaagggaacatggcagatgtggagtacttctccacttgggcaagaaggtttaggtttagttggtggcgcaggaagctggctgttatcctcacaaaggaacataccaaacaaggatgattttgtgctttcttcatctcagaagactatggcttctctttttaacaaagaagataacataatttccagtacccattctccacaaaatgtttttcttcctaatggccaaagtggtgagaacttcagccctgttacaggttcaagtggttatgatccttggttacaaagtgctctcttcccaccattgtcaggtggcccttcagctcaggagggagccactcaaaatgaaactatatatggtagcccaagtggatctgctagtagccatgggcttgatggttctccagctaactgttggtccaaaaaggaatggcctgtacatggttctgtggaaag

SEQ ID NO: 17194 - DNA, 1792 bp, Glycine max
  unsure (1)..(1792): unsure at all n locations
cgtccgctgatgttaagttttgcatacggaaatatcgataagggaagctttcaatccacaagacaagctgatgtcgacaacaaagatggtaatactttagagaggaaacctagtggagaaagcaaccttgctaacggaaaccattttgtcaaaccacccatgttgcagaggggggtgctcaggaccaactgcatagactgcttggatcgcactaatgttgcacaatatgcatatgggttggctgctcttggccaccagctccatgctctgggagttattgaccacccaaaaattgatcttgatgaccctgtagcagatgatttgatggggttttatgagcggatgggtgatacactcgcacatcagtatggtggttctgctgcacacaacaagattttctctgagaggaggggccagtggagagctgcaacacagtctcaggagttttttaggactcttcaacgctattatagcaatgcatacatggatgctatgaaacaggatgcaatcaatgtattcctggggcattttcagccacaacagggcaagcctgctctatgggagttgggttcagatcagctctatgatgcaggaagacatggagatgacgatgctaggtcatttttcaaaagatccttctcagatggaaacattcttaatgaaagttctacaccgatgtcagccccaaaggccaagcatgaaaaattcccaagccaaggcggcttaccagatcgatcagaagaaggaagcaagggactctgtgagtcatcaccagaaatatctactactgagagtgacatctcattttcaaggtacactccctcaatgcctcggagacagctctttggagatatgcaaagagagcgctgccttgaaagtgaacatatttactattctgatcacggggattccttcagctgctccaactttgttgacctggattggctatcttcttcaggaaattcatgtgaagaagagccatttgagaggtcatcaattaccaactctccaattgctggagtttcttcagaaaatgttgtcaatggaataatggtaggtgaggcaactgcctccactagtgattgggggggctccagcctanagggaagggacaaactgaatccgagttatcctacggtgatgcacggtccaacacaccagaggaatttccagatacttttgtaaactgggtgacttatggacagacactttgccattgaactttgcatatgatctcttgcactaatgtatgattgacatttttttggcttggtctaaagatgcttattagaagaaactagagagaaggaaccgggtaaagaaaaagaatcaggcatttgggtaggcttctgtttatgtggtgctaatctaagaatcatcctggggccaatcttggtattgacatgcaacattaatatttctgttgtgaagatctcaatcaaatcctcaaggcatagtagaaaatagtgcatagcaagtgtttgtaaaattcttcactgtctttttctttcttttactattattattattattattattgttattttctgttattgtcttcttggagttcggtgttttcattattctttcagcagttttaataggtgcaccttttgtaaatattatttaccctgttttgtgggagcttcacttttagaattgtagatataattgattcttttaaataactttgcttgttgtaatgtataatgtagaactcatgcggtttgtgggnnnnnnnnnnnnnnnnnnnnnnnnnnnnnnnnnnnnnnnnnnnnnnnnnnnnnnnnnn

SEQ ID NO: 17195 - DNA, 328 bp, Glycine max
ggcaaagtggctgcatatgcattgacattaacagggtttttctattgccaaacaacaccaaccttgagaccagaagaatgtctgaaatggccaagtaccaaggttgacaacagggatgcagatgaaaattattctgtcaaaccacccatgttgcagaggggggtgctcaggaccaactgcatagactgcttggatcgcacaaatgttgcacaatatgcatatgggttggctgctcttggccaccagctccatgctctgggggttattgaccacccaaaaattgatcttgatgagcctgtagcagatgatttgatggggttttatgagc

SEQ ID NO: 17196 - DNA, 759 bp, Glycine max
ttcttgggaaacggatgaggtgtctgagtggtggaagtgatgctgagggtggcgctgcgatggaactcgatttggaggccaatggcttctctgccactaactcccttcacatgccaaaatctccacacgctaaaccctaggcctcgatgtcgcaccttcaagcttttttgtcgaccttcttcttccgccgtcgcgcacacctcgcctcctctctccggcgacctggaccgctacctccgctgctccatgccgcagaactcgccgctccgagtcgcggttcttgtcagcggaggcgtcgatagcagcgtcgctctccggctgctccacgccgctggccactcctgcaccgctttctacctcaagatatggttccaagaagatttcgagaacttttggtctgagtgcccctgggaagacgatttgaagtatgctaaagatgtttgtaatcaggttgatgtgccgttagaagttggtcatttaaccgatgaaatactggaacaatgtggtttcttacctcattgaagagtatagtactggccgaacccctaacgctgatgttgtttgcaatacacgaataaagttaggagcattcttggatgcaattggaggcatgggttttgactatgttgcctctgggcattatgcgaatgtgatgcacgcatgtgctgatgggatggatgagccttatgttctggaactatcacaggacatggtaaaggatcaaacatactttgtttcaacctgtcacaattcgagctg

SEQ ID NO: 17197 - DNA, 475 bp, Glycine max
cccacgcgtccgcgcgctcgtccccgccgtgcgtcgaccgcctcggcgacgccaagcagcccgtccgcgacgccgcgaggcggctccttctcactctcatggaggtttcatctcctacaataattgttgaaagagcagggtcctttgcatggacaagcaaaagctggagagtcagagaggaatttgcgcgaacagtcacatctgcaattggtctattttcatctactgagcttccccttcaacgtgctattcttcctcctatttcgcagttgctgaatgatctgaatcctgctgttagggaaacagctattctgtgtattgaggaaatgtatacacaagctgggtcccaatttcgtgatgaacttcagcgccacaatctcccttcatctttgctgaaagctattaatgccaatctagagggaattcaaccaaaagttcactcttcagatggtatttctagtggttataatgctgg

SEQ ID NO: 17198 - DNA, 579 bp, Glycine max
caaaaacagtgccaaaacatcctttttacaacgtacacactctctgtcacgaaacctggaggctcattcccctttctattttctatataaacttgaacagtttcactccaaccatgtacaccatttaaaacataaattgaagagatttagagagctcaagaaacaaaaggggttcttagattacatagtttttgtgagcgggagtgactaattaatagttgagtatggttgaggggtggaagggggagctgacaaagctcagagagaaagttgttatggcccgaaagagcctcttctccaaaggcaaagaggggtcagaagaagaacaagttgtgaagaaggaggctcacaaggttatgatggctgttcagagagacactcatgaaaccatgtcagaggcaacagtgtgcttgcttatggatagatttgtgccatgctgatgtacgtgcatgtgtgttaggtgctcagaatgtgttgtttattcatcttgtgtatgatttagttgacaagagtacgaagtttgtaatggaagttgtgaaaattaagaattggttggtctagttgctggttttttgaggc

SEQ ID NO: 17199 - DNA, 468 bp, Glycine max
tcgagccgcgcgtccgaaattggagagagatcaagattcataagttgggttcttagattacatagtttttgtgagagtgagggatagttttttttgggttgttatatacaaatataacgaattgagtgctgaggaaaaaaaatgtctgccatggtagaggggtggaagggggagctgacaaagctcagagagaaagttgtcatggcccggaagagcctcttttccaaaggcaaagaggggtcagaagaagaagaaagagtcgtggagaaggaggctcacaaggctatcatggctgttcagagagacagcactcatgaaaccatgtcagaggcaacagtgtgtttgcttatggatagatttgtgccatgctgacgcatgtgcatgtgtgtgctaagtgctcaaaatgtggtgtttattatatattgtgtacgatttagttgataattaagagaatgaggtttgtaatgg

SEQ ID NO: 17200 - DNA, 669 bp, Glycine max
  unsure (1)..(669): unsure at all n locations
atttcatgtatcattatgaaggtggaaggtttgttctaggggttgaagaatgggattcaggtgtgttacctagtgcatacgatttgcattgactgggcaccacaagtggactttgttggtgaagtggttatgaatttgaaggcagaggtggcaaggggagcaaaacttaaatgcagtaaatgtaatctaaagggagctgctcttggttgctatgtcaaatcctgtagaagaacgtatcatgttccttgtgcaatggacatctcagattgccgttgggatcatgaggattttctcttgctctgtcctgtccattcaaatgtcaaatttccatgtgagaaaatcaggtccaagaaaaaggcaacacagaagcatcccactttttctcatctgccatctcatcactcaaatcgtcttgaagcttcccaggatgctagtaaaaaattggtattttgtggatctgctctatcaaatgaagaaaaggtatttttgatcaattatgcaagcaaggttggtgctactgtgaccaagttctggacctcaaatgtcacccatgtaattgcagcaactgatgcacatggagcatgctccangacgttgaaagttctgatggcaattctaaatggacgatgggttctaaaaatggattggataaaagcatgcatgcaagag

SEQ ID NO: 17201 - DNA, 543 bp, Glycine max
acactagcttaattatcatttatcatcttatacagtactatatatatatatatatactttatataagtggactatttataaatccaatacaaggttgaaattctaggattaatattcatgttggcggtgtcacctttgaggagcacaagagatgaagggcaaggagagatgatggagagtttctcgattggaaccgatgattttgctgacctttcagaagggaacttgcttgaaagcatcaacttcgatgatctcttcatgggaatcaatgacgatgaagatgtcttgccggatctggagatggaccctgagatgcttgctgagttctccctcagtactgaggaatcagatatggcctcatcatcagtttcagtggaaaataacaacaaatctgcagatgacaacaacaacaatgatgggaataatatagttactactgagaaacaagatgagggtattggtatagcagccaattcttcttctgattcgggttcgagtcgaagggaagagaatgtaagcaagaatgatgaatcagtggtgatg

SEQ ID NO: 17202 - DNA, 485 bp, Glycine max
ctaatcgccgtccgcgcccttcatcgtgtgctccgacagtccgtggtgaacttcctggagcgtcgccggccccttcggctacggtcctcccggctgcgccgtcaagtccaacgtcctctccttctggcgcccgtttcatgggtttggtgatttgagattagggtttatggatgggttcttggtggaatttatttataggtcttttccccgttagtttactattcatgtgcttcttgccacagcatttttagcttctttcactatctcatttaagcccttttgttagataaaggaaaactttttttttctttctttttgacagcgtttaaatttgtaggtgatttgaatttgaagtttaatgtcttaatttattctttatctgctattggtttaaaagttctttaggagagaaaatgacatcaaaaagggaaagggaagcggttgatagagtagaggatgaagggcttgataatgagtcgaaaagg

SEQ ID NO: 17203 - DNA, 709 bp, Glycine max
cccttatcagttaaagctaaatagaacctcaaaatcgacaaaagacgtggttcatgtcttcatgttatctgacttttttccatctctctctctctcttccatgcttctttcccattacataactctttctctctctctgtgatcttatctccttttaattattcactcacccctttacactggttgatgcaaaaaaacatggtaccctctattgttggttgttgctgacactcttcatagtcgcaaagtaggtgactagcagtagcatgtaatggtatcatggtaagctgaccaaagtgacggatttgttccatcactgccttcagggaaagaagttaactcatagcaggtccatacaaacatgatgactccaaacttgaacttggaacctgaaaatcattcagaaggcagcagccaagtggcttcaaatgtatcctttcatgaagcatctcatgatcttaaaaagggcagcaccaccacttcctcctgtctcacaaaggatgaaactgatccaggttctattacccttgacttgacactcaacttcaataattccggtgatggcgagttgaaaggctcgagtgatgctagcagtgaagttggagctgaagctcctgcttcagcatcagcaactccaagggttttctcttgtaactactgcaggaggaagttctatagctctcaggcattagggggtcatcaaaatgca

SEQ ID NO: 17204 - DNA, 480 bp, Glycine max
atgtcttcatgttatctgacttttttccatctctctctctctcttccatgcttctttcccattacataactctttctctctctctgtgatcttatctccttttaattattcactcacccctttacactggttgatgcaaaaaaacatggtaccctctattgttggttgttgctgacactcttcatagtcgcaaagtaggtgactagcagtagcatgtgagtgaaggagcctgcagtttttttttatcgtactgtactatgtttgttatgtaatggtatcatggtaagctgaccaaagtgacggatttgttccatcactgccttcagggaaagaagttaactcatagcaggtccatacaaacatgatgactccaaacttgaacttggaacctgaaaatcattcagaaggcagcagccaagtggcttcaaatgtatcctttcatgaagcatctcatgatcttaaaaagggcagcaccaccac

SEQ ID NO: 17205 - DNA, 769 bp, Glycine max
acggctcgagggcacctgcacagaagaagaagaagaagaagaagaagaagaagaacgatagtaatggaaatcaagcccggtttgtcagcactcgttaccggtggtgcctctggaatcggcaaaggtcttgcactagctcttgcagagaagggtgtatttatcacgatcgtggatttctctgaagaaaagggaagacaagctgcaatcctcgtcgagaaaattaactccaattttcattctaagttaggatttccgtctgccatatttgtgaaatgtgatgtgagtaatgcaagggatctagctgctgcatttgaaaagcattttttgacatatggaggactagacatttgtattaacagtgcggggattagtagttctgtaccattccgtgatgatcaaacggatggcacccgaacatggagatacactgttaatgtgaatttcactgctgttattgattccactcgccttgcgattaaaatcatggaagcttccaaaaggcctggtgtgattatcaacttgggttctgcttctggtctttatccaatggtggctgacccaatttacagtggctctaaaggtggtgttgttatgttttctagatcacttcgtctatacaaacgtcaaggaattcgagtcaatgtgctttgccctgagtttgttgaaactgagatgggaaataagattgatcccaagatcatcaatttgagtgggggctttgtacctatggaaatggtggtgaaaggtgcttttgagctcattatggatg

SEQ ID NO: 17206 - DNA, 613 bp, Glycine max
ctttcttcttattgttcatgtaatagtaataatttcatggctattccatctcctaaaagtttcctccgcttaacattcttcttctcacattctatagctgtgaagtcctccaatgtttccacaaccccaacattgcatgcaaccttcccatttcctgaagttagcagcttcaattcatctaagctttcaatctcaataaacataaatccaaacatcatcaacacccttcttcagtccctccaagcagcaatatctgaagccacaaaactatctgatctattaaacaacgctggacataacatcatagagaacaaaataggagcagtccaagactgtagagaacttcaacaatccaccttagcttccttaaaaagatcactatcaggaatccgttcccaagactccagaaaactagttgatgcaagaacctacctcagtgcagcactcaccaacaaggacacgtgtctagagagcttagattctgcttctggtacccttaagccagttctagtgaattctgtgatcaactcttacaaagatgtcagtgactctctctcaatgctccccaagcctgagaggaaggcttccaaaggacacaagaaccggcgtttgt

SEQ ID NO: 17207 - DNA, 500 bp, Glycine max
tacaaacgtatcattatctgcatagtagaagaaaaacagagtagagctgcagcaaaatcatgttatctgctattgcctttggattctcagcgaattggtggttgcgctgtcacgggcgaacgcctcctcctttatcttttccggtttcagtgtcttattcttcctctttcaactccaactcaactaagttcaactatattcatagagcatcctctgaaggacttcctaatgagttggttgaagactcaaaatttgttcctttgaatgaggaggatcctatatatggtccacctgtaagtcatggccttattgttgttgggctttgaagcagatgaagctttgaagattcgacagcttttgaaagagttggatggtgaattcctaaaggtcatctattgtactgaagacatgattatgcgttcgctttgtgaggcaatgcatacaacacaacccaatgtagaagatgtcaagatagccaagtcactttctcggatatgctt

SEQ ID NO: 17208 - DNA, 742 bp, Glycine max
acgagaaacaaagttattaattacttaccaaaagagaccctcttttaagaaaacaatggcagtgaataaggtaacattggttgcttcagtgatggcttgcatgctcataacatgctcttatgctgaatcaaccttgtcatgtgaccaaatcactatatggctcactccatgcataccttatggagtgttaggagggaacgtgtcatccttgtgctgccaaggtgtttactctctcaatgctgcatataagagtgctgaggatcgaagaggtgcatgccaatgcattaaggatagggcggcatgcattcctggcattgactacacgcgtgtcaatcaagttggtccaagatgtggctctaagtgtcccttcaaagtgtacccttccactaactgctcagcggtgccgtaagcattcagcaaagggggtgcaatatcaagtctatgggtcactagtactagtagtggtgtggaaagattaattatactatgagaagtgaagaaatattatacttaattagaaggaaataaagtgtatggattgtgtgttacgatccaacgatcgaaagccttgaagtatatcaacaataaaagatatcccttcaattaatttatcattttctctgcaaggctgtagtgatatatgaaagtgaagtatgaacatctaatgagtataaatgcaaaaaatatataattaagcgtatgtaaaaaaaaaaaaaaaaagataatgacaaatagattaaac

SEQ ID NO: 17209 - DNA, 1273 bp, Glycine max
agatgaggaagtcgcccgtgtatatattgctgaagtggtgcttgcattagagtatttgcgtgtcactgcgtgtggttcatcgtgacttgaagcccgacaatttattgatagcacatgatggtcacatcaagttaacagactttgggctttctaaagttggtctcatcaacagcacagatgatctgtctggtccagcagtgaatgggacatcactacttgaagaagatgaaactgatgtatttacatccgcggatcaaagggaaaggagggagaaacgttctgcagtgggcacacctgattacttagccccagagatacttttgggaactggacatgggtttactgccgattggtggtctgttggggtcattttatttgagttgcttgttggtattccacccttcaatgcagagcaccctcagactatatttgataatattcttaatcgtaagataccttggccagcagttcctgaagagatgagtcctcaagcacaggatcttattgatcgattattgacagaagatcctaatcaaagactaggatccaaaggggcgtcagaggtaaagcaacatgttttcttcaaggacataaactgggatacacttgccaggcagaaagctgcatttgttcctgcttctgagagtgctctagataccagttacttcactagtcgctactcgtggaatacttctgatggtcttgtatatccagcaagtgatgatgaggattctagtgatgctgatagcttaagtggcagcagtagttgtttgagcaatcgacaagatgaagtgggagatgaatgttggggtcttaccgagtttgattctggcacatctgtcaattactcttttagtaatttctcctttaagaatctctcccagcttgcatcaatcaactatgatctcaccaagggatggaaagatgacccgccaacgaattctagtgcatagctgtatgtattaacctatgtcaaagtccagaatttggttttcgacctatgatccaagcaattttgggggcataagcaccttttgggtttgtataccttgtacatatttagaggttcaaagtggttcaggatgtactctttgcttgttaggttacagggcaacagtgggggtttaaatcttcggtttattgtgtatgaattgagaactgtaaattttaaatagcatattcactgttgctcacattgttctgtggtgtcctctttattattctggcaatgagaacacatccctttttgttcaaaaaaaaaaaaaaaggtggt

SEQ ID NO: 17210 - DNA, 271 bp, Glycine max
ctgtgaatgggacatcactactggaagaagatgaaactgatgtatttacatccgaggatcaaagggaaaggaggaagaaacgttctgcagtgggtacacctgattacttagccccagagatacttttgggaactggacatggttcgtatagtcccatttttatgtttaaggtggtttgatttctggttttctcccatctcttaaaatatagatttgacttttgtcatttgggcagttttttttaaataaataattacagaaaacatgattt

SEQ ID NO: 17211 - DNA, 538 bp, Glycine max
accgagtttgattctggcacatctgtcaattactcttttagtaatttctcctttaagaatctctcccagcttgcatcaatcaactatgatctcaccaagggatggaaagatgacccggcaacgaactctagtgcatagctgtatttattatcctgtgtcaaagttcagaatttggttttcgacctatgatccaagcaattttgggggcataaacacctttgtcatttgtataccttgtacatatttagaggttcaaagtggttcaggatgtactctttgcttgttagtttacagggcaacaatggggggtttcaatcttacggttattggtattcacaattgtgtatgaattgagaattgtaaatttaaaaaatgcagatcacagttgctcacattattctgtggtgtgctctttattggcaatgagaacacatccctttttgttcaggccactgtaatattatttacttacagaattgagatgatgctgtgaagtcttttctcaactccccttcaagcattttcgagaaatttttta

SEQ ID NO: 17212 - DNA, 886 bp, Glycine max
ctttttgatcctcatagtggtgacaactatgatagggatgaggatcatctggcattgatgatggagcttcttgggatgatgcctcgcaagattgcacttggtggatgctattcccgagattttttcaacagatatggagatttgaggcacatccgtcggttgcgtttctggcctcttaataaggtgctgacagagaagtatgatttcagtgaacaagaagcaaataacatgaccgatttccttcttccattacttgattttgtccctgaaaagaggccaactgctgctcaatgcctgcagcatccttggttcagtgcaggtccccagactcttgagccctcattgactgctgtgaagcatgatgctattgaaggggaaatatctgaaaaaatgcagagggaaaaagctgagcaggaggctgtggaagttggcatggggaatatggccatagatggaaatccaaagccactcaaagagttccaatctatgaagccatcagaatagaagcatagtggcttatttgggttggggtataccacctgtttttgtttatatggcaatcatggatggtccttggagcgtgatattatatttaactgttatattaagcatagcatgcagcttaggtcatacatgaggttgtcatttgggaagccttttgtaaggaagctaattcacctattacagataatgtctaaaagatagcttccttcacattcagtagaaagcacactgatatataagcacgtttgttgtcctctttttggagaatttggctgaggcttctccctaggttagattttcatcttttcagaactgctatatctgaggggttcgaactgtacatttgaatgagttattagttcttatgtatcaatatcagatt

SEQ ID NO: 17213 - DNA, 495 bp, Glycine max
cgtttctgcacgtaacagctcttgttcgctactccatttgccgcctctggaactccgaacgttgaacatggacgctgccaaagaagaatttctcagagactttggtgaacactacggctaccctaacggccccaagtccgttgatcaaattcgagctactgaattcaagagattacaattacaagatcttgtatacttggatcatgctggggcaactctatactctgacctgcaaatggaatctgttttcaatgatctcactactaacctatacgcaaatcctcacagccaaagtgactccagttctgcaactcttgacattgtcaagaacgcccgccagcacgtccttgactactgcaatgcatctcccacagaatacaaatgtatatttacttctggggcaacagcagcgctgaagctggtaggagaggcttttccatggagttgtaacagtagttttatgtatacaatggagaatcataatagcgttcttgg

SEQ ID NO: 17214 - DNA, 630 bp, Glycine max
aaaaaatttgtttatatatctttctgactcaaagtgtaagtgctgctccgacaacagaggtgaaacaaaccaactacccacctatggcggcctctgttgtagtgtctacctctctgtctgtgtgtttcaactatggctatcatcgtcgtccatccatttccgctctctcttgtcattcgaattccatcaccaaaacaaacctaaaactcagttcgcaatgtttctccaactcgaattcggtagccccgatttattgccgcaagtttgttgctcgcacttcaattggagaaaacgagagcgagagcgagaaggagttagggttcgtgggggaggactctgcggtgtttgaattgggcaaacagaaagtatcttcgtggatttatttcaccgctattttgggagtcgttctctatgttcttaacgtcgcatggattgataattcaactggctacggcaaagcttttattgacgccgtttcaacgctttccgattctagcgaggtggtaatgttgatcctaattctcatatttgctggtgtccatagtggcttagctagcttccggaacactggtgagaaactcattggagaaagacctttccgtgtactttttgcagggatatcactacctt

SEQ ID NO: 17215 - DNA, 481 bp, Glycine max
actcgcgcctcgagccgtaatcgagctcgagcgaatgatagcgaagctagaccgtgcacgaaactccgaagccactgcgcagagtggtggaagaacacatcatttccctgttacggtcatgcggaacctgcgtgcggctgcaccagatccaagcccagatagtgtgacccacggactccagggcaacgattacgtcaccccgagtttcgtcacagcatgcgcgcgcctcggcggaattcgccgcgcgcgaagagtgttcgacaaaacggcgcaaccaaacggcgccacgtggaacgccatgttccgagggtacgcccaagccaagtgccacctcgacgtggtcgtttcgttcgcgcgcatgcaccgcgccggcgcgttcccgaactgcttctagttccccatggtagtctagtcttgcgcctatgcgaacgccgtgaaagaaggagaacaagttcgctgcgttgtaaccaaacgcgggttt

SEQ ID NO: 17216 - DNA, 477 bp, Glycine max
cccacgcgtccgcccacgcgtccgcccacgcgtccgcccacgcgtccggagaaaaaaaaaaccatgtctctcaaggttgtaacagtggtgtttttgctggcaacaatactagtagccagtgatgacaccagtttcacctataatgggttccaatcttcttatttgtaccttgatggaagtgctgagttcaccaccaatggcatgcttaagctcaccaatcacaccaagcaacaaaagggtcatgctttcttcccaagtccaatagtcttcaagaacaccacaaatggaagtgtgttttctttctccaccacttttgtttttgccataaggtctgagtttcccaatttgagtggccatgggattgcctttgtggtttctccaacaaaagaggttccacattctcttccaagccagtaccttggcctctttgatgacacaaacaacggcaacaacagcaaccatgtttttggggtggag

SEQ ID NO: 17217 - DNA, 418 bp, Glycine max
ggtgttttgccctaacctaaacctcaagcattggcaggcagtggaaatggagcagcggttagcaaacacatggagaatgcctcttaacgacaagaaattcatagaaactgctctcctttccgacctccgactcgacggccgtcgcccctccgactaccgcaagctcaccgtcaagctggccaagcaagacggctccgcggaggttcatttgggccaaacccacgttatgaccttcgtcaccgcccaactcgtccgcccctaccgagaccgccccaacgagggctccctctccatcttcaccgagttctctcccatggccgacccctccttcgaccccggccgcccctccgacgccgtcgtcgagctcggccgtgtcgtggaccgtggcctccgcgaaagccgtgccatcgacactgaa

SEQ ID NO: 17218 - DNA, 1813 bp, Glycine max
gttagatggtattgaagactactcgcatcaaatcgctgaaatgattggacttagaaatgaatcttacctcattcaagctggggttcgaactatactagacataggttgtggctatggtagctttggagcacatctcttcgacagtcagcttttgactatgtgcattgcaaactatgagccttctggcagtcaagttcagctcactctggagaggggtcttcctgctatgattgcttctttcacttcaaagcagttgccatatccatctctttcctttgatatgttacattgtgcaagatgtggcattgattgggaccagaaagatggccttctcctgattgaagccgatagactcttaaaaccgggtggatactttgtttggacatcaccactcacaaatgctcgtaacaaagagaatcagaaaaggtggaagtttatacaggattttacattaacactttgctgggagcttctgtcacagcaagatgaaactgtcgtatggaagaaaactagtaaaaaaagttgctatgcatcaagaaagtctggttctggcccttctttgtgtggtagaggtattgatgtggagactccctattatcgagaattgctaaactgcataggtggaacacagagcagccgttgggttccaattgaaaaaagggaaagatggccttcccgagctaacttaaacaacaacaacttggcaatctacggcttgcagcccgatgaacttaccgaggactctgacagctggaaaacagcactccagaattattggtcactcatgtcacctttaatattttctgatcatccgaagaggcctggtgatgaggacccttcgcctccttacaacatgttcagaaatgtgctagacatgaatgctcattttggtggctttaattctgcattgttgcaggctagaaagtctgcgtgggtgatgaatgtggtcccaataagtggacccaattatcttcccttgatccaggacagaggatatgttggtgttttgcatgattggtgtgaggcttttccaacgtaccccagaacctatgacttggtgcatgctgcaggacttctatcccttgaaactgagcagcacagatgctccatgcttgacctgttcattgaaattgacaggatacttcgcccagagggttgggtaataattcgcgatacagttcccttaatagaatcagctagacctctaacggcacagctgaagtgggatgcaagagtgatagaaattgaaagtgacagtgatcagagactcctgatctgccagaaacctttcttcaagagacaggcaagctaaaaagaattgaagttttgaataaattagaccattatatacatatattcattttccataatgttcatttattaccataaagctccaaaagtgggggttgaaaattttgaacataaaaagaacacaatatatagaggaaacagagtatccttgtcaatgataccaccacatcatctatgtagccgtaaggtctacatagggccatgtaattaccaaacaagccacagagcagatcagaaacaagtatactggtagattaatttacttttccatgtgatacacacagataaaatattaagattgggagcatggtgatacaataagttattgttgtaaaatgctcagtggttgattcccccttgtagaattatttttctgctatctttctataggttcttggatgtttctggtataagcttggcaaaactgtactttttagtttgtcaatgtttataatgtgaaatcaaaatcatattgttcatcaatccattgaagattgtgact

SEQ ID NO: 17219 - DNA, 554 bp, Glycine max
acgcgtcggcacacttgtttcactttctttgtaaacccataactacacacaacctttctctctcttttacacaaacctaagctataaaccagatcaaccttacctctctccacttcttactactgtgaagtttgagtttgtggtgtgcaagatatgaaggattttaccatttaaagagatcaacttgttaggtatatggagaagaaagagatggctgtgaaaactgaggatgcggttgggtcctcttctttcccttgttataattattcaaacctttatccattctcgaacgcgtttgatttctctgaggttgaaaagagctctttagggtttatggagttactgggtgtgcaggactatagtcctctgcttgagttgcctcaactttcaactgtgtccgtgcaatctcatcatcactctacagttacggttccttctgataacgggaaagagtgttctgaggtgttgaaccaccagcctgccactccaaactcttcttccatttcatccgcgtccactgatgcagtcaatgatgaacagaagaagactcctag

SEQ ID NO: 17220 - DNA, 698 bp, Glycine max
catgaacatatggattgatttaattgttttgattcttctggcacgtaactaacaaaataacttgacgcttcttcaaaactaacatgtcaaagatgtttagtgtaaaaaattttaggttttccatgactagttttaaaactgcagcatgttacttgaatttcttcttcacaggcttgtctgaagaaaggtactgctataattggacttgttatgtttgatgatcaaattggctgcctcatttatctactgttcaccagttttgaaactcatttgtgttggatcaggattcaatatgaaggtatgccttaaaagcataaccatttattagtgccattgtcatcatggaggttagtttgccgttgattgtggttttctatcaagtagtttaggaaagggtaaacagaaaaaagggagaaaaaaatgcagaagacatgtctcatgtctattgtccagtttatatgttatctgcctactatgaaaaacatccacttatgtggcatttccccccggttcaagaggccatttttcttgcttaacaatttgtatgttttcacaggcgtcaactagaagcagagttgaaattaatagaagaagagactgcaaagagagttgaagaagcaatacgtaagagagttgaagaaagcgtgaaatctgaggacgttcaggtggagattgacaggcggttggaagatggacgg

SEQ ID NO: 17221 - DNA, 451 bp, Glycine max
gcgaatccaaaatccaattacgaagaatgggacatgacactataacacaacaagaacagcattttgccctaatcccactcgcgggactcggaattaacaactagagtgcccaaaagtcaacaatttcgattcttgccccgttcatcatcattacttcttcttcattcattcccccaaccttttctcgtctctctatcagaggggatctatgaccaactgatgatggatggtggctgggtattcacctgaatttgttcattcgtgataccctttgattgagtatccgagcaggttaggaagaatttagttggggaattataattttgctgtgagtggaataagaatcttgattagggtctgtttgttttcttggaagtcttgattttttttcacttgaattgtggctttaatacattacattttgtgaaagttgcttcttgatattgggttt

SEQ ID NO: 17222 - DNA, 599 bp, Glycine max
gaaggtcttgatgatgcagatgatgatgctgaggatgaacaagaaaatgaaaatgacttagaagtgacagaagaagctgagcctgttctccggaagcctcctgaaccaccagtggttacaaaagaagctgaaaggcaactttctaagaaggaattaaagaaaaaggggcttgaagaacttgaagctgttttggctgagctaggatacacaccgaaggaacccactggtcaagaagatgattccaatggtgctgagaagaaagaagaggatcctaagggtgctgtggagaagaaggagaatgctactggggaaagcaaaaatgctaaaaagaagaagatgaaggaaaaatcttcaaaggagcagaaagaatcacaagaccagcttgatggcttggatgctggaactggaaatgcaacttctgaaactgctgaaacggagaaggctgaggatgcatctgcaattgatgttaaagagaggctcaagaaagttgcttcaatgaagaagaagaaatcaagcaaggagatggatgctgctgcgcgtgctgctgctaatgaggctgctgcaaggaatgcaaggctagctgcatccaagaaaaaaga

SEQ ID NO: 17223 - DNA, 1460 bp, Glycine max
  unsure (1)..(1460): unsure at all n locations
cagagaataggtcaccctgccgcttccccatccctagggaaattacgtgtctttcactctccatctctatcctaacccatctatcctgactcaaaaataacaaaaaacgaaaaaaaatccatcgattccctgcacttccatgtcttctttgtctacgcatcacacctatagccgaaagcaaaaatctctcggcctcctgtgcaccaattttttgagtttgtacaacaaggaaggtgtgcgattaatcggtttggatgatgcagcttcacgattaggagtagaaagacgaaggatctacgacatcgttaacattttagagagtgtggggtgctagctagaaaagctaagaatcaatgtacctggaaagggttttctgcaattcatgtagccttgcaagaacttaaggatgagggtttgaaggagaatcctggatcatccgatgactccaatccatccattaatttagtattaaccgttttaggtacatgatgatgaggacgaagaagaaacgtttcccaacattaatactgggagtcagaatgttatggtcaaatcctcctccaagaatgaaaacagaagggaaaaatctctggcattgcttacacagaattttgtcaagctttttgtctgctctaattttgaaatgatctcccttgatgaagctgcaaagttgttgcttggaaatgccaataatagaatctttacttgtatgattgttatcttacagcaaaagttagacgcctatacgatattgcgaacgttttatcctccatgaacctaattgagaagacccatacaacaaacacaagaaaaccagcatttaggtggttgggtgtgagagggaaaacatggagtgaatcagctcagacaaatgttaaagagtcacagaaaaggatgtttggatctgacataacaaacataaattttaaaaggaaagttgatttgtccatggatggccagaactttaaaacgcaaaaccaacaggaaaatattagtcccagagctcagctggagaaaaaaagcttaaaaaaagatgcaaaacagacttcaatgagctatcagtttggccctttcgctccagcttatgtgcacaaagttggaacctctgaaaataatagtgtgaaacaggtgcaagactgggaaagcctcgcacaggggcatcgtcctcaatatcaaaaccaagctttgaaagatctattctctcactacatggaagcatggaaatcttggtactctgaagctgctaaaactttataattgacttgtccaaagtcagtcagataattgcagctttctaaaaaaagaaatgatccattactgaacgtgtgttttacatgctttagtgtattctcaatagaaaaggatccattgttgaatgcnnnnnnnnnnnnnnnnnnnnnnnnnnnnnnnnnnnnnnnnnnnnnnnnnnnnnnnnnnnnnnnnnnnnnnnnnnnnnnnnn

SEQ ID NO: 17224 - DNA, 428 bp, Glycine max
gtcagacgtctatatgatattgcgaatgtgttatcctccatgaacctaatcgagaagacccatacagcaaacacaagaaaaccagcattcaggtggttgggtgtgaggggaaaaacatggggtggatcagttgacttggctcaaaattcaaatgtcaaagagtcacggaaaaggatgtttggaactgacattggaaacataagttttaaaaggaacaaagttgatttgtccatggatggccagaattctaaaatgcaaaatcaacacgaaaatattagtccacgagctcagttagagaaaatcatcataaaaaaaagatgctaagcagacttcagagagctatcagtttggcccttttgctccagcttatgtgcccaaagttggaacctctgaaaataatagtgtgaaaaaggtgcatgactgggaca

SEQ ID NO: 17225 - DNA, 509 bp, Glycine max
agggtatgggctcgtcagcctgtataccacaggttttatgcacttgtgctgaccgcatgtatgctggaatactgctaaacactcgccttgcttgccctttgtcttccatactttcaagtccttttagtgaatcagcagcgcagttttgtgctgcttctgttgttattgccttggaagacttgcacaagaatggtgttctctacagaggtgtgtcacctgatgttttgatgttggaacaaactggacatatacagctggtggacttcagatttggaaaacagctttctggtgagagaacattcacaatttgtgggatggcagattcactggctccagagattgttttgggaaaaggccatggtttccctgctgactggtgggcgttgggagttttaatatattatatgttacgtggtgagatgccatttggatcatggagagaaaatgaacttgatacagttgccaaaattgcaaaaagaaagctacatcttcccgagacttttagccct

SEQ ID NO: 17226 - DNA, 510 bp, Glycine max
aagacagatcgaaaatgccacttgaacttgggactgcactctcgattgaacgtgaaccagttaatgatccagaaattcgtattcaggcattggaagccatatacttgatcatattgcaggaggcaggtcgaagagccttttggtctgtaaatggacctagaatagttcaaatcggctacgaagacgaggaagatccaaaggtgatggaagcatatgagcaactgggatccttgttggttcacagcagcagtgcggaggaaccacccagtcagaccacaaagtagttattttgtattaccatcagttgaccctgcaatatctctccataagaactctgtaatacttatgagggtcattcattccaagtcaattttccattttgaggttagaattaccaattttagaaatatgtaaattatgcggctcggagtagttagtcaaaatcatttatattcaagacagaacgagtgaaagatgttctcttgatgcaaaagatcagtttgcttattc

SEQ ID NO: 17227 - DNA, 772 bp, Glycine max
aaaaaggtccaaaaacaaatgaatgaaaggatgctctctgtctcacacacacactccggggaagaagcaacttcaagtcttcaacgatggctacgaattcgattacctcatcctccttccgattagtaacaacgagaatccctctctccctcttccgaaaaaccccacctctcctttcattccccacaaaaccctttttctcaaaacccatcaccttccagagacttcaaccaacaccaccaccacaatcatcatcatcatcaacatcagcatcccttcaacccatcgaagacctacctccgaagctccaagaaatcgtgcacctcttccaatccgtccccgaacccaaagccaaatacgaacagctcctcttctacggcaagaacctcaaacccctcgaaccccaattcaaaaccaacgacaacaaggtccaaggctgcgtctcccaggtctgggtccgagcctacctcgacccgaaccgcaacgtcgtctacgaggccgactccgactccggcctcaccaagggcctcgccgcgctcctcgtccagggcctcccgggtcgacccgttaacgaaatcattcgggtcacgcccgatttcgccacgctgttagggttgcagcagagcttgaccccttcgagaaacaacgggttcttgaacatgctgaaattgatgcagaggaaggctcttatgttgtacgtggaagctgaaagggtggtgatgagttcgctgaattgaactatagaagtcacctgagtcagaatctgatggca

SEQ ID NO: 17228 - DNA, 926 bp, Glycine max
ctggtaaatgatgggtatcgctggcgcaaatatgggcagaagctagttaaagggaatacaaacccaagaagttattatcgatgctcgaatcctggatgccctgtcaaaaagcatgtggaaagggcctctcatgattcgcaagctgtgatccctacctatgagggacagcatgatcatgaaatcccccctggaaggaccgtcactcagaatgcagctacaaatgctcgcacaacggccagtaatggcaaggctggaaccaaatctgagggtaatattactgatgatacaggggaacgaagcggcttgggctcagcaagcagattaacagagcaactaaatggcgagtcaattactaagtcaaaggctggtgatatggttgagttttgtgtgatcagcctttctaatgagggtcctgaaattaatttaagtgagcaacaccaacaaaaagataattcagctactaaagacgattctgtcagcaatgatgttataagccattcaagttctggagttctgtgtagatcaaatgaacagctgaaaggtgaggtaaaacctatatcagaaggaagtaaggattgccttaatgtggttgccgtgcatgatactcgtagtacagaaagtgaatttaacaagcaatcaacagctgatgcagaacccgtccaaagctaaatttgcaatatttttcaaaggtgctgctagttacagaagagtataaatatttgacaatgacacaggctttacagatatactgtgtgattataattcctatttctactctaaccgtcactttactcttctagctctctccttgtctttgagcaggttgactaaatatgcaaattacaattaatactacattggatatcataacttgtataccattattatttgagttaaataagatttacattttcgtacacttgtat

SEQ ID NO: 17229 - DNA, 1179 bp, Glycine max
cagctatatggagtcagatcctgtgaaaattgctgtggaaggggttgaacgattcaagcaagaaaactgtgatcttataattgttgacactagtgggcggcacaagcaagaagctgctctttttgaagaaatgcgccaagtttcagaagcaacgaaaccagatcttgttatattcgttatggatagcagtatcggtcaggctgcttttgatcaggctcaagcatttaaacagagtgttgcagttggagctgtcattgtcactaaaatggatggccatgcaaagggtggtggtgctcttagtgctgttgcagcaacaaagagtcctgtcatattcattggaactggagaacacatggacgagtttgaagtttttgatgttaaaccatttgtcagtcgtctactaggcatgggagactggtctgggttcatggataaaattcatgaagttgttcctatggatcaacaacctgaactgcttcaaaagctgtcagaaggaaacttcaccttgaggattatgtatgagcagtttcagaacttacttaaaatgggtcccatcagccaggtcttttctatgctaccaggatttagtgctgaattaatgccaaaaggccgtgagaaggaaagccaggcaaaaattaaacgttacatgacaatgatggactcgatgacaaatgaagagttggatagttcaaacccaaagctcatgaatgagtcccgaatgatgcgaatagctcgaggttctggtcgtccagttagggaagtaatggaaatgttagaagagtacaaacgtcttgcaaagatatggagcaaaatgaaagggcttaaaatacctaagaagggtgaaatgagcgccttatcccgaaatatgaatgctcaacacatgagcaaagtcctccctcctcagatgctaaagcaaatcggaggcatgggtgggttacaaagcttgatgaagcagatggggtctgctaaagatatgatgggaatgtttggcggtggtggtgattagtagattggctgtggcatatgagctgaggattgtttctgatctgtactacaaactctaatacttcacaagaactcatcgttgtgaaattatgctgttcacatggaattcggatgtattgttttgtcaatcaacctgcaacatctcaatggtggaaatagttcctttcaatttta

SEQ ID NO: 17230 - DNA, 477 bp, Glycine max
tttcaatttattcatttttatcattcttttggtaacaaacatttttctttcatcacctttggaagattttggagaaagcatttacaatttccatttgcgttcaattgaaccaacatgagcaacagaaaagacaagactgatgatgagtctagtgagagaggtatattttcacatctaggatatccaagtgcaccacccccctaccctcctccacatggatacccaccatcaggctatccacctccaggagggtatcccccaacagcctatccgccgctgggaggatatccacattccggttactatccttcagaatatccaccagcatatccgcctccgggagggtatccacccactgcttatcctcattcaggatatcatccaccagcttatcctgccccacatggctatccacctgctgcaccttcatatcctggagggcgtggggctggcatgggaggattgttggcagggggt

SEQ ID NO: 17231 - DNA, 442 bp, Glycine max
  unsure (1)..(442): unsure at all n locations
tcgattcatttttctttcatcacctttggaagattttggagaaagcatttacaatttccatttgggttcaattgaatcaacatgagcaacagaaaagataatactgatgatgagtctagtgaaagaggtatattttcacatctaggctatccaagtgcaccaccctaccctcctccacatggatacccaccatcaggctatccacctccaggagggtatcccccaacagcctatccaccaccagcatatccgcctcccggagtatatccgcattccggttactatccttccgaatatccacctgcatatccgcctccgggagggtatccacccactgcttatcctcattcaggatatcatccaccagcttatcctgccccacatggctatccacctgctgcacctccatatcctgcanggcgtggagctggcatgggaggat

SEQ ID NO: 17232 - DNA, 825 bp, Glycine max
acgccaactttcagcctggcccctccatgtcaacaactaattctcagttattgagtaaaggtgataaatcttctaaagttattgaggatttaaattgggccaagagagctaatacacattcaaaatcaaacattcctttgggagtagagaaaacaaacatggttcatgattcttcagaatcttttactcggccgtcaaaggtcatgaaattggatgagggaaggagcgcccctctttcttcaggaatttcagacatgcctgtcaccgatggatcatctcatatcctgggaagaagttcattacctgtacatgcagctcctaaagcggaagggcaatactctgagcaacaatcttctcagcttccacctgatgtggagtctgttttgctgcaacaagtattgaatctgacaccagagcaattaagttccttgccaccagatcagcaacaacaggtccttcagctccagcaggctcttcggcgagatcagatacagccctcataacagggaactcatcaacaattcaaaaatagcatcaacttatttgtatactagcatttgctgtagattagcttcagaatatcaaaattctttcaaccactattgcttctttttgtaatttgttttctaattccttgtccaaatatttgatgtagcattgaggagctccagatgggcatataaatcatttagaagagatgtacaataataattttgacgttaaatttttgccgttgacatatcctttggtgtgggctgaatatatttgccttgtcatttgagctattataagcatctgtatgcttgaatatattgctcttgcact

SEQ ID NO: 17233 - DNA, 1475 bp, Glycine max
ttattttaaccttcaaaagccatctgcctaccactatgatgttttgctgcttggaataatgactttgatttgcgggatccttggccttcctccttcaaatggagtccttccacagtcccccatgcatacaaagagtttagcagttcttaggaggcggatgatccgaaagaaggtggtgaagagcgccaaggaatgtattaagcaacgaaggaccaactctgaattatatggaaagatgcaagaggtgattgtagaaatggatacagaccctacggttaaagaattggagaatttgaaggaggctgtaatgcaatctgatagcaaggatggagcaaaggaaaaatttgatcctgagaaacacatagatgaatatctaccagtgcgggttaatgagcaaagaatgaccaacttattgcagtctctcctggttgctgtatcaatcttagccatgtcagttatcaaaaggataccaacctcagttctatggggatattttgcttacatggcaattgatagtctcccagggaatcagttctgggaaaggatattgcttctcttcgtcacctcaagccggcgttacaaaattttggaaggttctcatgcctcttttgtggagacagtaccattcaagaccatagctgcatttacagccttacagttagtatattttgcgttatgtttcggggtgacttggatacctataggtggaatattgttccccgtaccattcttccttctcataattataagagaacacttgcttccaaagatgttcaagcctaaccatcgtcaagaactagatgcttctggttatgaggaaattattggtgctccacatggttcactgagggataaggagccagatactgatactgatggaagctcggaagacttttacgatgcagagatattggatgagatgacaaccaacaggggagagttgaaacttagaactgtaagcagcttcaatgatagaaaccacagcttcagtgaagacagacacactcaggtttatcctggaaatgctgtctgaatatggtgaaatctcactgcaccaaccattttttaggatgcagaaaggatttgggataatagtatgttcctctgtaaaggagtgctcataattttttgtgtggtccgttaaggttgaagatgatcttctgtggaacaagaaaggattcaatcggtgaaagagatgaaatgcaaaaagaatcagaagtggacaaaaaatgcatttgaactttgaaatgggctttcaatattggtaggaaaacacactgaaatgttgagatcaagggttaattccttccttagatggctacaaagttctcaaaataatgagtcaggttcgggtggagggaaaagactcgtgttatgagggggaaaaggaaaagggagggtaaagcaaggaaatgagaatactatacaattattttttgaagttaaaatatagatagatgtcagtagagtattct

SEQ ID NO: 17234 - DNA, 415 bp, Glycine max
  unsure (1)..(415): unsure at all n locations
ttctcatagcattttttacacctcagccacagcaaaaagaatttgaaggtaatggagtgatagaaatagtgtgatggatggatttcacattcaggtcttttgtggactacaaagaaaagaaatgggtagggattcctggggaatacatacagtataggatgcagtggcctcatttttttttttttccctttcccctttaattttttttaccttgccctgattaattacccgtaaagcataactatttggtgaagatctgtgccatccatcctgcttcatttgatgttttttgttagctaggtcagttttgcacagctagatgtcagttacctggatgttgtgatcacaccgatccaacatttgagtttttgttcaaggaccatgctgacatttanggtccatgtggttcatgtaa

SEQ ID NO: 17235 - DNA, 387 bp, Glycine max
tttccacgcgtccgtggacgcgtgggagatgatcatgagcgagatgtgttggatgatgatgaagaagaaggagaagaagagggggaagttggtggagtgagagtggccagtgtagaagaggaaaatgcggcggcgattgcggagattgtgggtgatttttcagggttttctacttcgaatgaagatgattcttctagcactagcactggaccaaggtctaataatatatctcccaatgggagaatcaagcgtgttattaccgcgggtaactggcagaagggtgagcttttggggcgaggttcgtttggttctgtttatgaagggatttctgaagatggattcttttttgcttgtaaaagaagtttcactacttgatcaggggaatca

SEQ ID NO: 17236 - DNA, 313 bp, Glycine max
ggttagacactcgcttcgatactctctcctaggtgcgaagctttggaggcagaaaattcaactcaatgaggcactgctgaagaagaggttcaaccatacttgctgctgatggctcatgatgcagatcagaaaccccacatgtgcgatgctgtgatggatctcttgcatgagattcactctccagtctccaaaatgcaagctggatgccagatctcaaaccagtgctagcaaggtatgggatttcttcaattcatgtgaaagttccatttggcaaggcaattgaatctagtccttgacaacctacgatatcttg

SEQ ID NO: 17237 - DNA, 767 bp, Glycine max
ctcacgcgttcgcgactgcgagtgtgcccagcttctgcgaaatcagttttctacaatgggaaggaaaaagacagaggatgctggcccatctgcgaaggtaaaggctggtagcaaagatcctcctaagaaggaaaaaatttctgtgtctgccatgctggccagtatggatgaaaagcctgataaacctaaaaaggtcccttcttcctccagtaagccgaagccgaaatctgctccaaaagcttccacatacaccgacggaattgatcttcctccatccgacgatgaagatgatgatgatctcttggaagagggggaagccaaaaggtccagtcagcagcagcaaagggttgatttgaagccacttgatgtgcctattgctgataaagagttgaaaaagcgcgaaaagaaggatcttttagcagcacatgctgctgagcaggcaaagaaggaggctcttagggatgaccacgatgctttcactgtggtcattggaagccgggcttcggtgcttgatggaggagatgatgctgatgctaatgtcaaagatataacagtagaaaatttctccgtgtctgcacggggtaaagaacttctgaaaaatgcaacagtgaagatatctcacgggaagaggtatggtttggttgggcccaatggaaaaggaaagtccacgctgttgaaacttcttgcttggaggaagataccggtacctaagaatatcgatgtccttctggttgagcaggaggtagttggtgatgataaaacagctc

SEQ ID NO: 17238 - DNA, 323 bp, Glycine max
ctcctcttccccgatcgattgcgttctagctaagcgattcttgtgtgatgcttctggcaatgataatatatgtgttttctgattgagaaatcaaatcacgatggatattagatttttgtgtgccatgctcgtttgtttcatgcttacttgtttgttttcaatacttgccaccttccctgttatataggatttccttttctacaatcaattttttttttctgcttgtgttggcagttttctacaatgggaaggaaaatgacagatgatgctggcccatctgccatggttaaggcttggtagcaaatgattctttcttagaagcg

SEQ ID NO: 17239 - DNA, 683 bp, Glycine max
aaacgaaaagccattgttacaagcatttcacacttaacacctcaaaacaacaaaggtttctactttctacgatgagagacatgaaagacgcaggtgccttgggaggcaagacagcaagagcctgcgacagctgcgtaagcagaagagcaaggtggttctgtgcagctgatgatgctttcctctgccatggctgcgacactttggttcattccgcgaaccagttagcaagcaggcacgaaagggttcggcttcaaactgcttcctcaaaagtaaccaccacgcacgcatggcacagtggattcacacgcaaggcaagaaccccgcgtcacaacagcaagcactttgcgctgcaacagcgtctcaaagacgaagttctcttcaacaacaccagtgttcttcccctcgtgccggagctcggaggggaagaacaagaaccggtggttgtggacaacgatgaaacggaggaacagatgctgtgtcgcgtgcccgtgttcgacccttttgatgtgagaaccgatgacttggatagcttttctgacatggatttttctgaatttgctgctgatgttgaaggccggcttgacaaagaagacatgaaataagtgcgtatgtgggaggaggagagggagttcaaggtgtattggccaaggttaagggcgaagaagaaattgatggtgatgtag

SEQ ID NO: 17240 - DNA, 869 bp, Glycine max
acggtgcaacgccattgcacttggcagctcgtcatagacggtctgaatgtgtacatattctattggacaggggtgctcttgtttgtgcttcaactggtggatatggctgtcctgggagcactcctctacatctagcagctagagggggatctatagattgcattcgtgaattgttggcatggggtgcagatcgtcttcaacgcgatgcatctgggcgtataccatatatggttgcccttaaacacaaacatggagcctgtgcatcattgctaaatcctacatctgcagaacctcttgtctggccgtctccattgaagttcatcagtgagcttaatcctgaagccaaagctttattagagcaggcattgatggatgcaaacagagaaagagagaaaaacatattgaaagggagttcttactctctgccatctccatcacattctgatggggtagctgataatatgtctgaggttagtgagtccgaattatgttgcatctgctttgagcaggtgtgcacaattgaagttcagaactgtggccaccagatgtgtgcacaatgcacactagccctgtgttgccacaacaagcccaaccctgccactgcctgtcttactccaccagtttgtccattttgtcggagcacgataacaagactcgttgttgtgaagacagaatgccacgatgaaactgatcaagacagtgctgatatcaactgttccaagctgagcaagtcatcaaggaaactcagacacttgaatgacagtggtagcagcagcttcaagggactatctagtgttagttcattcgggaagttgggtagccgcagctctggaaggattgctgctgagtggcttgataaacagtgatgg

SEQ ID NO: 17241 - DNA, 362 bp, Glycine max
tccgggtccggccgcgcgtgcttccacgcgtccgcttcttccttcactttcgtttggggtaaagggcacagcttctgcaacccagcctaggtctcaagaagctgccggttatgatgacgtttttatgcagcagagcttgctctttgatgatagtctgaaggatttgaagaatctgagagcacaattatattcagcagctgaatattttgaactctcatactccaacgatgaccaaaaacaagtagtggtagaaacattgaaggattatgccatcaaagctcttgtaaatacagtggaccatttaggttccgtgacctcacaaagtaaatgatttgttggatgagaaagtcgttgaggtttct

SEQ ID NO: 17242 - DNA, 732 bp, Glycine max
  unsure (1)..(732): unsure at all n locations
ccaaatgagaaaggatagattggggagaccccataaggttgaatctatagtaaaggaagagggtgaaatgcctgacaatgaggaagtatatgagcagtttaaggaggtaaaatggatggaatggtgtcaagatgtgatggttgaagaaatgaaaactttgaaacgtcttcacaggttgcagcaaactagtgccaatcttccaaaggaaaaggtgctttcgaaaatacgcaactatttacaacttcttgggagagggatagatcaaattgtgttagaacatgaacaggaaccctataagcaagatagaatgaccgtgcgactgtggaaatatgtctccactttttcccatctttcacgggagaggcttcatcaaatatattccaaacttagacaggagcaagatgaggcagaggttggcccctctcacacaaatggatcggtatctgtttcatttagcagaaatggaaatccattccgtttccatatggagaggcaaagaggattaaaaaatatggctccctatcaaatgccagaaccagttgataatactgggaaatctgaggcatggaaacgaagaagaagaactgaaagtgacaatcatttccagggtcagccaccacctcaaaggaccttaagtaatggaatccggattactgatcctaactcactncggatcctaagtgctgggccatcggacaaacgctttgctagggagaaaccttataggacaca

SEQ ID NO: 17243 - DNA, 458 bp, Glycine max
cccacgcggccggcgagaaacagtttgagcgtcatgtggagacagagcgctttattggtgttcctgttattactagtccagcaaatttgtgctaccagtgagcaagagcatgcttgccccccttcttcctgtggcaaaatcacccacataacttatccatttcgattaaaaggcgacccaaaaggttgcggtgacaacaggtatgagctagcttgtgaaaataatgttacggtgttatatttgtactctggaaaatatcatgtgcaggctatcaactacaacaatctcacaatccgtgtggtggatccgggtgttcaacagccatattgctcctccattcctggctacttcttgtctcaatcaaatttcagtgcaattgatgaaggggatccatacctagcctttcaaaatcgagattattcttggaagtacgttttccagcatatagttttcttaaa

SEQ ID NO: 17244 - DNA, 669 bp, Glycine max
cataaccaccaaacaatggagttcccacactcccttcaatggcaatacggcatcccttctcaccttctctttccctacaatttcatccctgaaaaccatgttcactggacagaaacccctgactctcacatattctcagctgacatccctggtgtgaagaaagaggagcttagagtggaggttgaggactcaaagtacctcataatcagaactcaagcagtggataaatccacagaacctgcgaggaagtttgagaggaagtttaggctgccagggagggttgatcttgatggcatctctgcagggtatgaagatggagttttaactattacagttccaagatcacttagtagaggtttctacattgacccttctgatgtgcctgagaatttggaagttcttgcaagagctgcttaattgaatgaatgaatggtccttgttttaattaggaactaccatttactgattgtgattgattcttctaggttctaaggaaattaattaatgaaacattggttatggtgtctttgcgtgatttgggccatgttcttcttatctgagtgattcttgtgtacaaaatgattgtggattgtgatccaattgtgttctattattttcagaagtaacatggatccaagacttcaactcgcagatatttagctaactttt

SEQ ID NO: 17245 - DNA, 811 bp, Glycine max
caaaactacagatcaagagagtatattagcaatagctattattttctcaagattttaatgcctcattgcattatgtttgtaattatagacccttctttgagtgtgtttgatgctttttgtctctactcatccgttggtgcaggctgtagctccaattttttctctggtagctcctaggttccaattcaaaggagcaaacaaaaggggcattccagtttcgagggatccagcggctttgttggcgaagtactctgatcctttggtctacacaggacctataagggtccgaactggccacgaaatattgcggatatcctcgtacttgatgcgaaacttcaactctgtgactgtgccattctttgtcctccacggaactgctgataaggtgactgatccactggcctcccaagatctatatgataaggcagcttcaaagttcaaagacataaagctttacgacggcttcttgcacgaccttctgtttgagcctgagcgtgaagagatagctcaggacattatcaactggatggagaagagattatttactatttgaaaatgttagtatatatatatatatatatatatgggggggttaataggaaagggaagacacaagggaagaaaaagggatgccatgtttgtaagtgtagaaaattgaagtcgccctgggaaatggggggaggcggatgcagataggtttattcatcttttcattttagtgttttgaatatatgtattgtgtgaagatctttgttttatcaagaaacttgtacattttatagacttaaatatttcagtagtgtttccattt

SEQ ID NO: 17246 - DNA, 257 bp, Glycine max
attctttgtcctccatggaactgctgataaggtgccttatcatatagaccctgtgacgccagtggatcagtcaccttatcagcagttccatggaggacaaagaatggcacagtcacagagttgactgatccactggcctcacaagatctatatgataaggcagcttcacacttcaaagacataaagctttacgatggcttcttgcacgaccttctgtttgagcctgagcgtgaagagatagctcaggacattatcaa

SEQ ID NO: 17247 - DNA, 866 bp, Glycine max
cccacgcgtccgttttatttcaggcacaagcaacaatttgtgtcagcaaggctttgaagtggtggaagaagaccctaaagcctaatatgattgagatccactcggcacaagaactggtccattctttgctcaacgctggtgattcattggttgtggttgatttctattcacctggttgtggaggctgcaaagcccttcatcctaagatctgtcaaatagctgaattgcacccaaatgcaatctttcttaaagtcaactacgaggaactgaaaaccatgtgtcacggtttgcgaattcacgtgttacccttcttcagattctatagaggtgcggagggtcgagtttctagcttcagctgtaccaatgccactatcaagaaatttaaggatgctttgacaaagcatgggaatgaacggtgtagtttaggtccagcaaaaggtttggaagaatccgagttgaaaattttggcttctattggtgaaattaattcttctccgttactaagtcccaagcaagggaaattggaagatttgcttacggagagccatgattttgctggggtttggaacatggaaaataatagcaggggacttatgctggatgctatatactagtatttatttaattttcaaactagcaagtagggaatttatttatttatttactttgtcatgttacagaatgaagatcataatggagtaaagcagctccatatcatttattttcctatgaggtttactgatttttatatcttgctgtaaatttattttttggaggggtttgatgggacttgtaacatttttttggttggatttgagccctgcaatttagcaagtgttgctggataataatatcttccgtattca

SEQ ID NO: 17248 - DNA, 380 bp, Glycine max
gcaaattgcaaaatcaaaactttagagaacctagcgattaggtatgtcttcttcccatgtttattatgtgaatggcgctttggaatcatacaaataaaccccaacgtgtttcatcatcgattcacccaaattcaacgaaacaacatcctcatatcaatggagccatcggatccaactcacgcttctccagatgaatttgattctttgttggaagaactagaatctgcccatgaacatgtgcaggaccgtattaggcgccttgaagcgataacttccagaaccaggcagtattcgagttggccgctgtttcacactccaatccaaataaccaactctactggacaaaccagcgcgctagctgatgctcgtgaagaagaaat

SEQ ID NO: 17249 - DNA, 842 bp, Glycine max
gcaacagaaccagttgatcttggatatgtagattccgtttcagttcaggaaattggtggtgtcagggtgaccattgtgaaaaatgaagagggtggaaattctgtggccactgttgttttacgaggaagtactgatagtatactagatgatcttgaaagagcagtggatgatggagtgaacacttacaaggccatgtgcagggatagccgctttgtacctggagctgcagcaactgaaattgagttagctaaaagggtgaaagacttctccttcaaggagacagggttggatcagtatgctatagcaaaatttgctgaaagttttgaaatgattcctagaactttggctgagaatgctgggttgaatgcaatggagatcatatcttctctgtatgcagaacatgcatctggaaatgccaaagttggcattgatttggaagaaggcgtatgtaaggatgtctcaaccttgagcatttgggatctccatgtgactaagttatttgctcttaaatatgctgcagatgctgcatgcactgtactacgtgtggaccagattattatggcaaaaccagctggtggtccaaggagagagcaacctgctggtggcatggatgaagactaaaattaatggtttgctttggccatgtttgtatctcaacatgatggcttgaatttgccttgggcatgttttctttatttagactttagtattggtggcgatcttacaaattttgaattttgttttgccatgaaatacaaagagatgtggtctgtaaatctacattttattcatagcccttgtgagtgatgttaatttgccgagcatggccgttgtttgaaaaa

SEQ ID NO: 17250 - DNA, 613 bp, Glycine max
gaagacccggggcgaccgacgcgtacgcccacgcgtccggagaatttctatggtgctctaacacggaacttatctacggcttcgatgagggaggaagtagtgaagcctgcaacacacgtcgttgggagctcttattataaaaccataaagaatggcttcaatgacacaacaactgatattcagaccaaagcttcttttaagtatgctgcttcgagaggggtagtatggaacgccatttttctatgtcaatggattcttgttgcctgatactggagctgctgttgactacaagacttggagaaaggtcattgacccattggttggtgctaagaataagaagagtatccaaaatgaagagtcccttcatttcttcttgtgaaaattgtcggtatataaataaagtccagctgcattagccctgtatcagtgaaggaatctgaagaatgtatccgctgcctaataatggaatcaaatgttataaaacattccttagtccatacatatacatatgtggcatgtattggaatatatgataccctgggcaatgatgatgtgatattccttggcctatgtttgaattttatgaaaggtgatagaatgaatattaaaaata

SEQ ID NO: 17251 - DNA, 635 bp, Glycine max
tctcgagcgattcggctcagtgagacttgagttggaaatcatggcgattggtaatgataatcagccacaacaatctgaaggcaaagtgtggaatttgttcaagcttccctttcgccattcaacttcaactcctcacaatcacaatcaagtttccacctccaattctgtttcttcctttgccaaatcgctcctcccctcaccacgtcgtcttaagcttgatccttccaacaagctctacttcccttatgagccgggcaagcagggtaggagtgccatcaggattaaaaacaccagcaaatccaacgtagctctcaagtttcaaacaaatgcacccaagagttgtttcatgcgccctcctgggggcattctggcaccgggcgagagtataattgcaactgtgttcaagtttatagaacatccattgaataatgaaaagccagaaaaaactggactcaaattcaaaatcacgagcttgagaggtgaaaggaccaattgattatgtccctgaaatgtttgatgagctgaaggatcaagtaacagtggagcagattttgcaggttgtttttcttgatccagagcgtaactgtcctgctttggaaaaactgaagcttcagctggttgaggctgatgctgct

SEQ ID NO: 17252 - DNA, 454 bp, Glycine max
ggaaaaatcaggcacaacaatctaaaggcaaagtctggaatttgttcaagcttcgctttctcacacctccaactctgtttcttcccttgccagatcgctcctccccgcacctcgtcgtcttaagctccatccttccaacaagctctacttcccttagccgggcaagcaggctaagagtgccgtcaggattaaaaacaccagcaaatccaatgtagctttcaagtttcaaacaaatgcacccaagagctgtttcatgcgacctcctgggggaattctagcacctggcgagagtataattgcaactgtgttcaagtttatagagcatccactgaataatgaaaagccacaaaaaactggagtcaaatttaaaatcacgagcttgaaggtcaaaggaccaattgattatgtccctgaaatgtttgatgagctgaaggatcaagtaacagtggagcag

SEQ ID NO: 17253 - DNA, 578 bp, Glycine max
cgattttctggaaatcctgggcctccattggcgttatgtgatagggatcctggcatcctttctgtaaccgtatggagtggttttccagatgatataactctcgattcaatcagtcttacattaaatgcaacatatcataccgatgaaggtgtaaaggcgttgaagagttctacagccattgtgttacaccctggtcggaatactattaccttggatctaccacctcagaaaccaggatcttatgttcttggagttcttactgggcagattgggcagttgaggttcagatctcatagtttttcaaaagttggtcctgaagatagtgatgattttatgagttatgaaaagccagctaacccaatcttgaaggttttcaaacctagagcccttgttgatcttgatgctgctgtttcatctgctttgttgataaatgaagaccaatgggttggtattttagttcgaccattaaattactccctcaaagctgctgtcttgcatattgatactggtccagggttggagattaaagagttgcacgtaattgagatggaaaccgatgctgatgtgcaaaatgatgg

SEQ ID NO: 17254 - DNA, 826 bp, Glycine max
acgcccacgcgtccgcgagaatgttgggtaactattgggttacaataaaagacatggaaaccaggcactgaaatatgcatatctattagttttgggccaaatttagaacaccaaggaaaaaaatgatcttgctgactcaacaagtgcacccacttctcaccttttcctctacctataagtctaattctccattgcacccccatgttcaactcaaggttggggttggtgtggttaccccattttcccaagtgcccattatgcccttttgcaaaggaaggccttacaggaggaggaggaaggggagcaggtgttcctcttctgctgcagcacaggctccgttgccacctgacccagataaggaaaatagggaagacagtgatggtgtagttgttgcacagggtgagagtcctgatctgcagactcttttcagaaggttctggaaggtggcagctccttactggacttcagatgacaagggaccggcaaggttgcagcttgctggtgtttttgctctcactttggccaccactggaatcagtgttggcttcaatttcttggggagagacttcttcaattcacttgctaacaaggatcaagagcaattcacgaagcaactactttactacttgggtgcctttgctggaggaatcccgatttttgtgttgagagattatgcaagagaaactctttctttgagatggagatcttggatgacaagatattacattgatcgctatctgaagaatcaaactttctataaaattcagtcacaatcaatcattgataatccagaccaacgaattggtgatgatctaagttctttcac

SEQ ID NO: 17255 - DNA, 491 bp, Glycine max
gattcacaacacgagcatttgtttcaattccaaagcaaagaggtcgaagaaaaacaagagcaaattgggatcgaagaatttgaagaacaccacaagcaagatgcatgttgttgtggtgctcaacacgcaatcctactgcagaggcctagaacctccttcatcttctccttccgtcgtttccaacaagggaacaaggactttgagtttcaggaggctgctgctgcgtccttctcttgggattcatttatcgcgtagctttgctttaaagtgtgttgttactccgaacccagctgtggaattgccattaactgctgaaaatgtagaaagtgtattggatgaaattcgaccctatctcattgcagacggtgggaatgtggctttacatcaaattgatggcaatgttgtgcgcttgaagctacagggcgcatgtggttcctgtccaagttctgttaccaccatgaaaatgggcattgaacgtcggttaatggaaa

SEQ ID NO: 17256 - DNA, 624 bp, Glycine max
  unsure (1)..(624): unsure at all n locations
nnnnnnnnnnnnnnnnnnnnnnnnnnnnnnnnnnnnnnnnnnnnnnnnnnnnnnnnnnncccctgtaagagcatttaagaattaaaaaaaaaatcatgcggccacatatactatacatcacatgcagcacatggtttccattagtgttgttgtacatgaaaaatgacaagaatgccatgatagttctattcttgttttgaactaaactatcataaaagctgaactgctgctattgcaggtattttttcccgcaacttttgtgtaacagctacacgcacagtcaggacactagcagcaggacctgtgattcggaccttcacaattggctcatcaatggccaccaattcaagagttccatcagcagccccaaccaagtagggtctcatgtcctcaagaaccttctctatattatcttcattgagctcaagaccagtttcttcatcagcaattggttcaactgccacaatttcagggatcttctccattaaccgacgctcaatgcccattttcatggtggtaacagaacttggacaggaaccacatgcgccctatctcattgcagacggtgggaatgtggctttacatcaaattgatggcaatgttgtgcgcttgcccacgcgtccg

SEQ ID NO: 17257 - DNA, 428 bp, Glycine max
gcgctgcattccgcagggtgagagtgtagacggggaatagaattgtgttcatctatgaaagaaaagaacgacacaaactataagatcatgaaacggggaatttagtttttggagaaaaggaagtaaagacacactccctcctcctcctcctcctgctctgtctccggcttcaatttcggattccaaattgagttgatttcggagattataaattttcttttacttttttatttttgcgaaaaaatggaagaggcaaaggcattgcaccagcaacaacaacaacaacagcagcagcaacaacttctgctacaacaacagcagcaacaacaacatcaacaacattatctgctcttacagcagttgcagaagcagcaacagcaacaacagcaagctgccgccatttctcgcttcccttccaacattgacgc

SEQ ID NO: 17258 - DNA, 826 bp, Glycine max
tgctatttgtcttggtactgctaagggtcttgcatttcttcatgaagaactttcaccacctattgtacacagagacatcaaagctagtaatgtactacttgacagagatttcaatcccaaaataggtgattttgggctggctaaattatttccagatgacatcactcacattagcacaagaattgctggaacaactggttacttagcaccagaatatgcattaggtggccagttaaccaagaaggctgatatatacagctttggggttcttatacttgaaataattagtggcagaagcagtgccagaaggacaaacgggggaggatcacacaaattcctcttggaatgggcctggcaactttatgaagagaggaaattgttggagtttgtagatcaagacatggaagaatttcctgaggaagaggtaattaggtacatgaaggttgctcttttctgcacacagtcagcagcaaatagaaggcctttgatgatacaagttgttgatatgctatccaaggcaatccaactcaatgagaaagaacttacagcaccaggattcttcacaaatgaaggagaatcctctagaaataactcaaaccctgtctcttcatttattactattactcaagtgaccccacggtaatgtgaattgcagggttgcaaatggaataaaaaagtaatgtttgttttttaaaagattatttgatagccgtctattatttttgtttcgatttttttttcaaagaatataatataacatggcttgaaagcaatttcgtgcactagtgcatgttgaaaccaaaaaaaaaaaaaaagggcggccgcc

SEQ ID NO: 17259 - DNA, 647 bp, Glycine max
gttcgaggcgctccttaggttacaagagacctgcaggcatgcagtcaatgtatatatttaagcaaccaggcattgggggtgaagtagtgccacaccaggataactcgttcctttatactgaaccacaaacatgcaccgggctgtggctggccctacaagatgcaaacatattaaatggttgcctttggacaatacctggatctcacaaaaatgggcttgttagaagattcttaagagatgacgatggtgtcaaattcgatcgaccatcaccttcttatgatcaaaaagagttgggtcctattgaagtaaaagctgggtctgtggttgtcatccatggtgatcttatccaccaaagctctgaataccagtctccagaatcaagacatgcgtacagcttgcacgtgcaagctgtacgcatgtggatatggttggctgcaaatgggcaccagaaaattggatcagacgaaaagttgagccagaaccactctttgtaagctgaaatttgcaaattgagagaaacgatgtaatgatgtttaatttgcaagcttaaagcgttgtaataatgttaaaccagtttgtgtacttgcccctgaacactgattccacgtctttggttttgggatatgaataaatcagaatttgatagt

SEQ ID NO: 17260 - DNA, 456 bp, Glycine max
cccacgcgtccgcagaattaaaatatttctttgagtcaagtcctttagcatcaggcagtgtaaaaaaatgggtttccgtataccaggatattattagacaggcatcattttctacagccaaagcaactcacaaggaacttgaagtcccaaaaggctatcttgcagtctatgttggagataagatgaagcggtttgtgattctggtatcatacttgaaccaaccttcatttcatgaattactgagtcaagcagaagaagagtttggatatgatcatccaacaggcagtctcacaattccttgcaaggagaatgagtttctaaacctcacttctcgcttgagtgagctatatatcatgctttaattgagactcaaacagattagttgagccaaatttgtacaagaaggaacttcttttattgtgatacttccaatttttttcttttataattcaactg

SEQ ID NO: 17261 - DNA, 514 bp, Glycine max
tcttcaattgtcgatgatcttggccttctgctaagagaaaaaggatttaattatcacggtttggaggttctatatagtggtgtttatggaacggaactaacatgtgagatatttattggacctgtttattatcaacggctgcgtcacatggtttcagacaaatttcaggttcgatctactggcacaattgaccaggtcacccggcagccaataaaaggacgaaagcgtggtgggggaattcgatttggagaaatggaacgcgactctctgcttgcacatggagctgcatatcttctgcatgataggttgcacacctgttctgattatcacattgctgatgtttgttcactttgtggaagcatgcttacaacaacattcacccaacctcaaaagcggccagttcgggagattggtggtctacccccgggaagagctccgaaaaaggtcacttgtcatgcttgccaaacgagtaagggcatggagacagttgccatgccctatgtatctagatatt

SEQ ID NO: 17262 - DNA, 2148 bp, Glycine max
gaagaaccctaagccctctcttgctcgggattttactctcacggtagcaccagactaagccctctcctgctcgggattttactctcacgagattagagattgaagatggtgtctgacgcgagcaagaagaaggctgcgcagaagaaggcggcggcagcggccaagagaggaggcaaagcagcagctgcttcgtcgaaaacgacgtcgtcggagaaggccgccgacaagcttgccaacggaattggggaaattcagatatccgatcgaacctgcaccggtgtcctctgctcgcatcctctttccagggatattaggatagaatctctgtcagttacttttcatggacatgatttgatagttgattccgaattggagctaaattatggaagacgttatggcttgcttggattaaatggttgtgggaagtctaccctgcttacggccataggttgtcgggaacttccaattcccgaccacatggatatatatcacctaaccagggagattgatgcctctgatatgtctgcattggaagctgtcataagctgtgacgaagaaaggttgaaattggagaaagaagctgaagctttggctgcacaggatgatggaggtggtgaatcccttgaacgcatttatgaacgattggatgcccttgatgcagccactgcagaaaagcgtgctgctgaaatcttacatggtcttggcttcaacaagcaaatgcaagcaaagaagacacgtgatttttccggtggctggagaatgaggattgcattagcgcgagctctatttatgaacccaaccattcttctacttgatgaaccaaccaatcaccttgatttggaagcttgtgtgtggctggaggagagtttgaagaagtttgaacgtattctggttgtgatttcacactctcaggactttcttaatggtgtctgcacaaatattatccacatgcaaagcaaaaaactgaagctctacactggtaattatgatcaatatgttcagacacgttctgagctagaagagaaccagatgaaacagtacaagtgggagcaggagcagattgcctcaatgaaggaatacattgcccgatttggccatggttcggctaaactagctcgccaggcacagagtaaggagaaaacactggcaaaaatggaacgtggtggacttgcagagaaggtggtcagagacaaagttttggtatttcgttttactgatgttgggaaacttccccctccagttctccagtttgttgaggtgtcatttggttatactcctgataatctcatctacaagaacattgactttggggttgatttagattctcgggttgcgctggttgggcccaatggtgctgggaagagtacactactgaagctaatgacaggtgacttgatgcctagtgatggcatggtccgacgtcataatcatcttcgaattgcacaatatcaccagcatttggccgaaaagctagacatggaaatgtctgctctccagtttatgattaaagaataccctggaaacgaggaagagaagatgagggcggcgattgggaagtttgggctgtcaggtaaagcgcaggtgatgccaatgaagaacttgtcagatggacagaggagccgagtgatatttgcttggttagcttggagacagcctcagatgcttcttttggatgagccaactaatcatttggatattgagacaattgactcgttggccgaggcattgaatgaatgggacggtggcttggtgcttgtcagccatgattttaggctcataaatcaggtggcgcatgagatatgggtatgtgctaatcaatctgtgaccagatgggagggtgacattatggaattcaaggcgcatctaaagtcgaaggcgggtttatctgactgaaacaatacgagtgtggatgctgccggtgtgtagtagtattacattaaaaggttatgatttttgttcgagcagagatccgtaataattttttttagttactatttcttgtgcttatcatttatttgcctggttgttaacaagcgtggatgaatgggatttcaccttgaggaaacgaagcttattctacaaatgaactatttccaaccgagaatattattatttggggtattataattacgttaattcctctctgtt

SEQ ID NO: 17263 - DNA, 372 bp, Glycine max
gcgagacggattctgtaaaacagtggtaccgtgacgagctgcgagctcgatggaggcggaatggtgagcctgaacgtggcggcgaggttcccttcgcgctttgatctaaattatattaacgccaaaagaggcacggcaatggcttcaggggaccaaaaggcaccaccccaaacccaaagggtgcaaatttatcccaatccaaattctggggtctcacctttctggagagaaaagtaccaaagagaagccaagaggtattgggatgttgtctacaagcgccacatggacagagggggaggaagaaaagtgattttggaggttggctgtggagctggaaatactatctttcctgtcatagcatcaaatccagat

SEQ ID NO: 17264 - DNA, 801 bp, Glycine max
caaatatgatccagactcattttactctttaacatacttttggaactttccatgggaaattcttacatacccaagtcattcaacccaaaagacgttggcaccatcgcttgatgaactcatcggcgaaccctatttcaccaggttttcttctgaatgatgaatcaaagtgaggtaaccaggaagagacttttttcacttgccctaagattatggatatttagaaggagtggtagtttagaggagagaacatatcaatagtgcttccgcaatgaccacatcaacattagtggcaacattctgctagtggaggtgcacttcacatgggcaatatgagaatggtaatatggtttgcatatggaatcatagaaataaatgggtttttttttttttgggaaagacatttgataaggatgaactaaaacaacaattcctattcactgcttggtcctggttaaatagccaccacacaaattttgtatactccttcctacaatggtcgattaacccttggcagtgcttaccggagagacgctaacggggggttgggtttgatggtattgatatttaaagggagggtgtgcattgctacttgtctaccacatttattggttggcaaacacatgaagatagaaatacttcatattcttgtgttgtgtgatttctatcgactaagtatggagaatgttttgtctgttatgaattgcaactgccggtgttacactacaaataaagtatgcgttttgcaacattcgatgccaaaatataaataagggttactaaaatgtttttatgacattttat

SEQ ID NO: 17265 - DNA, 1096 bp, Glycine max
atctgggttccacggtgatgtcatgtcaatggctgcaactctcactgctgtaagaattcccactttccaccaacgccatctcaaacaacacttcacggcaccctcttcctcttccttacgcctcctcaatctcgcaaagatggaaggaagtgagatcagtgagcaagtagtaggggaggatttgggagcaaagaagaaagtttttgtagctggagccactggtagcactggcaaaagaatcgttgagcagttactggcaaagggttttgctgttaaggctggggttagagacatcgacaaggccaagacaaccctttcctctgccaacccatctcttcaaattgtgaaagctgatgtcacagagggttctgataagctagctgaggccattggtgacgattcagaagcagtagtatgtgccacaggctttcgcccggggtgggatttacttgctccctggaaggttgacaattttggcacagtaaacctcgttgaagcatgcaggaaacgcaatgttaacagattcattcttatcagttccattttagttaatggagctgctatgggacagttactcaatccggcttacatctttcttaatgtttttggactcaccttggtagcgaaactacaggcagagaaatatatcaggaaatctggtataaactatacaataataagaccaggcgggttgaaaaatgatcctcctactggaaatgttgttatggagccagaggacaccctttatgaaggttccatatccagagatctagttgctgaagtggctgtggaggcattggcttatcctgaggcattttataaagttgtggaaatagtgtctcgccctgatgctcctaaacgcccataccatgacctttttggttccataaggcaacaatgatgcctgagatttggacttgattgcagattagcaaatgttgatttgctttatggtggcaaatttgtatctcaactgtgttcctatgtgtgttgtttcattcaattggtacactagaataatgtgtaaatatttcagtatatctttaattttattctcctacctgccaaattaaaggttggtagataattcagcact

SEQ ID NO: 17266 - DNA, 535 bp, Glycine max
ctacaggacaaatcaatagttactataccgggaaaaacacaatagaagagtcttcttccccaatctcgttagccgttagggtttacggacagagagagagggctgcgctgcagctgcagctgcacctgcagaatcttttatcagcgatagcagcaatgtcttcgtcgaaagatgcagacccaagcctgggttacctgactcgcaaggacacggaggtgaagcttccgcgtccaaccagggtcaagaacaaaacccccgctcccattcaaatcaccgccgagcagattctccgcgaggcacgtgagcgtcaagaggccgagatccgccctcccaagcagaagatcaccgaccccaccgagctcggtgagtaccgtctccgcaagcgcaaggagttcgaagacttaatccgccgcgttcgatggaacatcggcgtctggatcaagtacgcgcaatgggaagaatcgcagaaggacttcaaacgcccgcgttccgtctgggagagagcgttggaggtggattacaagaaccacaccct

SEQ ID NO: 17267 - DNA, 554 bp, Glycine max
acgcccacgcgtccgccgaccccaaacgctcgaagaaaaaagccaccgaatcttcttctggcgcgaccatctgcgacgacgagatggacgaggacgggaagaagtccggcgattactcgaagaagtttcagagactgcggagcgaggaggacgagctcgccattctgaagggcgtggttgagttcacttcgaaaacagggctggaccctcttaagttccccaatgccaacgctttccacgatttcgtgaagaagtcgcttcacgtggaagtttcctgcgaccagctgaaggagaagctccgaaggctcaagaagaagttcgagacccaggctggaaaagggaagaacggagaggcccctaagttttccaaaccgcacgatcagaaattctttgaattgtccaaaaaggcttggggacgtgaggttgctgctggagccaatgggggccccgtggagaagcccaagtctaatgggagtgctgtcaagagtccgaagaagaaggaaagcggtagcaggaatgtggcttctgctaagaaaccgaagcctgaatcaaaa

SEQ ID NO: 17268 - DNA, 745 bp, Glycine max
tgaggactcagattggttatcacaacaagcaagaatggtacagaaggttgttagcacgatgccagcgcactttcaagtcagttacaaagaaacaagcgacaacgacaagaacctcctaatatgcagttctgaggtgttctatgttcctcagcgccttatcagtgattttgttgagcttgttaaccttgtgggcgacctagaaatccatcagaaggttgcaattcctatgttctttgtctccctagattctcctcagaattttgaccccgttcttgatacaatgatctacaagcaaaatccccctgcaaattccaccactctttattcggccaaagtccctgctgttcatccatggagtgtatcaagtgagcaagactttataaagcttatcagaataatggcagaaggggatccactccttatggagttagtttgaaagtagaaccctttcttcttgataatactacatggcgagagaggatgcaagaaacatgtaacactcagatagcgctcctacacggtctcttcttaatcttaaacagtgttacactgtctttttgtttcttgggtggttttttaacccttctctttccccctcccctttattgtgcagagatttgttccacagaaaatgtatcattcctgattttttgccccttctttttttgtgaaaaatgaaatgaaaatggatttgtattcaatattgcaattcaagctctccattaagagatttttttttgtgatc

SEQ ID NO: 17269 - DNA, 415 bp, Glycine max
accaggttgcgtgtgaatggatgtgaagatgtgtatgccattggtgactgttctagcataactcaacgtaaaatcatggatgatatcacagccatatttgaggctgcagacaaaaataactccggcaccttaactattgaagaattccaggaggtgatggatgacattatcttaagatatccacaagttgagcaatatctaaagcagaagcatctgcgtgattttaccactctgtggaaagatttgcaagggaatgaaagcaaggaaatagacatccaagcgtttaagctggccctttctcatgcagattcacaggtgaagagtctgccagcaactgctcaggttgctgcccaacagggtgcatatctagctaggtgctttaatcgcagggatcatactgaagagaatcctgaag

SEQ ID NO: 17270 - DNA, 477 bp, Glycine max
gtcgccggcgccgcggcggccggatacggcctcggctcccgcttcggcggaagccgctacggtgcgctcggtggagctgtcgccctcggcgcggccggcggtgctgcggcgtacgctctgaacgcggctgctccgcaagtcgccgccgtgaatttgcacaactacgtcgccgcgttcgacgacccttcgaagctgaagaaggaagagattgaggccattgcctccaagtatggtgtgagcaagcaagatgaggcattcaaagctgagatttgtcatatatattccgagtttgtttcttctgtgcttcctcctggtggtgaggaacttaaaggtgacgaggttgataggattgtcagcttcaaaaattctttgggaatggatgacccggatgctgccgctatgcccatggagatggggaggaaaattttcaggcaaaggctggaagttggggaccgtgatgctgatgttgagcaacgt

SEQ ID NO: 17271 - DNA, 778 bp, Glycine max
gcgtaggggaatggttcctccctcagttgcttccttcctcttgtgtccacccagttccccctttcattttccattcaataattcaaacaccagttaatggctacccttctattccaccacaattcgcctcagatattctcttcctccttcttcttctcacagcattaaacgccgtcgttttcatgactccataattcaccggaagcagaacaacaacaagaagcagcagcagcagcgcgagttcacatgggattgggaacaaccgcgagaagcagaagaagaatcgtcatcgaagaaggttctagaacaagaacacacaacaacaccaacaacgccgatgccgatggagctggagcaggagctaggttcaacaacaatccagcgttccttcgacgcgcgctacacgcgccacgcgcgcgactcgctcggcgaattgcctgacagcttcaccatcaccgacccctccatccccggccaccccatcgtcttcgccagcccgggcttcctcaagctcacgggctacgcggtccgtgaagtcctgggccgacccgccgccatcttccagggcccgcgaacttcgagaaaatccgtcattgaaattcgcgaggccgttagagaggagcgaaacgcgcaggtcgttctgctcaactaccgcaaagacggcacgccgttttggatgctttttcgcgtttgccccgttttcagcagcgacggtggcgccgacgtgcactttggtgccgtacaggtgccgcttcagataaaggaagggcctggagtg

SEQ ID NO: 17272 - DNA, 426 bp, Glycine max
tttccttccaatttttcaaacaccagtaaatggccacccatcaattccacccccacaattccttcttcttcttcgttccacaacactaaacgccgtcgttttcatgactccataattcaccagaagcagaacaagaagcagcagcagcagcagcagcagcgcgagttcacatgggattgggaacaaccgcggcgagaagcagaagaagaatcgtcatcgaagaaggttctataagaacaacacacaccgccaccgccaccaacgccgatgccgatggagctggagctaggttcaacaactatccagcgatccttcaacacgcgctacacgcgccacgcgcgcgactcgctcgacgaattgcctgacagcttcaccatcaccgacccctccatccctggccaccccatcgtcttcgccagcccgggc

SEQ ID NO: 17273 - DNA, 256 bp, Glycine max
gttaatggctacccttctattccaccacaattcgcctcttcatattctcttcctccttcttcttctcacagcattaaacgccgtcgttttcatgactccataattcaccggaagcagaacaacaacaagaagcagcagcagcagcgcgagttcacatgggattgggaacaaccgcgagaagcagaagaagaatcgaaattcgcgaggccgttagagaggagcgaaacgcgcaggtcgttttactcaactaccgcag

SEQ ID NO: 17274 - DNA, 440 bp, Glycine max
cagatatgaaatcctaggctacgaaaacgcgaataaagcatgaaaaggcaattttccccatggactagatacgtgtacacggtggtctttattgttggtgatgaagacgaggatgtggaggtcgtagccgggagggtggtacaagaacggagtggaaggaaagctacgaagaagatgagtaaaaaatctgatacagagggtgcaccgtataaccatgtgcacaaaattaatcctatgatatataaaagtgatccacaataaatccctaacacaactagactagtccaccttaacttttttgaataaaatagtttaattatcaattaactttatcaaaaagacaactttttatactataccccatgtactggacaaaacttaatttgataaaaccattcaacttcacctattcccttaacatttatgaaaaggtatttaag

SEQ ID NO: 17275 - DNA, 421 bp, Glycine max
gctggtcaccaacaacagttgctcaaagcatacagagatacccgttctaaagtattggaagaaagcctgcaaaagcttggagttgaaaaactaagcaaagatgatgttcaaaagctacaatgggaggttttggaagccaaaattggtaactggattcatttcatgcgtattgctgtcaaagtgttgtttgctgcggaacggaaagtttgtgatcagatatttgaaggatttgactcacttagtgatcagtgttttgctgaagtaactacaaacagtatttccatgctacttagttttggagaagcaattgccaaaagcaagagatcacctgaaaagttatttgtacttttggacatgtacgaaatattgcaagagattcatgcagagattgaaatactctttaaaggctcagcttgcacta

SEQ ID NO: 17276 - DNA, 432 bp, Glycine max
  unsure (1)..(432): unsure at all n locations
gcggcttcgctcgctcgctcgctctctcttccctcaccctctgctgcggcgaaaaccgatacgacaccgttcgccgttgaatgaatcttccaccacacgattcgatcaatctcaatggcgtgttttgattggtaaagtacgcgcgacggaacgaggcatggcagaagtggctaaaccgagttctgtgcctccgagctctcatcgaattggttcaggacctttgaaaagtggatctttggttagaaagaagacaccgtcagaacttaggggagagttgttgaagcgggcaagtaatgtggaccttactgatgaatctcaatccaccttggctgatcctacgaagaccactgangtggacaatggatttaaaaaacaagttatggaagcccctatatcacagacacacgggtgatgaagatttgtgcaaaaagc

SEQ ID NO: 17277 - DNA, 355 bp, Glycine max
aattacccgggttcgagcccgacgcgtcacgtaatccgttattgtaatttgaatcatgccataggagtattatctatgtcacgagttgtcacgaattcgtctaagactgggatcttaaatcatttggagagaggcccaagcatcacaagctctatggagaagagaggcagcgtcatactctgagacactcggcatgaagcctcatttcccacaggaacacatatcgaatacactcgtggctccactcctctactcgttcgcttggcctcttcacatgatctaagtcacagtctagacaattctgacaaccgtgacaatgataaaatccttgcctaatcaaatactttagggattc

SEQ ID NO: 17278 - DNA, 244 bp, Glycine max
aatccttattgtatttgatcatgccgctactacgtcttgtttgcttaccttcaacaaatcaatgatccactcaaccccattcccattcccaatccacctctttctcttttcttcgcaaaacgccccattctcaacccatcaatttcagtctctcttcctttcactttccacgcctatcccttatcacaaccaaacacacccttaacctcacttccacacatgccttcacttccgaacaacaaac

SEQ ID NO: 17279 - DNA, 515 bp, Glycine max
ctcgagccgaactccgccataacaaaaggatgggcaacagtgctccacattgcggtcggagcaaaccacgaaagcttcgtggaggagttgctgaaactaatgtcgcgtgaagacttagaactgcaagatatcaagggtaacactgcattctgctttgctgcagcggttggaaacgtgcacattgctgagagaatgcgcagaaaaaatgcatcattgccaatgataagggggtggagaaggagtcactcctcttcacttggctgtgttacaaggaagaagtgaaatggcttggtatctgtttgataaaactagagaaacactgtacgatgatgattggtttcaagtgtttctcatttgtgtaaactctcgactttatgaactggccctggaaatgctcaatcagaaggaatcgctagcttttgctcggggtgataacgatgagacagctttgcatgttttggctcgaaaagccttggattgtggttgccgaagtccgctacgatatccaaaacacg

SEQ ID NO: 17280 - DNA, 423 bp, Glycine max
gctatattatgtttgagatggaaattgcacatgatccttttgcagctcgacgtgctttcttccgggctatccattcctgcccctggtcaaataggctatggttggatggctttctcaacctgagactcgtgtccttactgcaaaggagctatctgatctacaggaagtcatgcgcgataagggactgaatttgagaactgacatttatgagatccttttgcaacagtcgtgacattcgccctcccactactgctagaatccgactgtatgtaagacaggtccatgatgcactactcatagtattggacctgtatgtaagatagctacatcatgtatattgtgcttccatattccccttgtgagaaaaaagattcttgatatagaaattttgtcactcatcttttcgattagtatgattactgc

SEQ ID NO: 17281 - DNA, 375 bp, Glycine max
caccccttcaattatatccatccttatcgctttgattagttgatttttaaatttttgacgacctcaatcataagaagaatcaattcttgtagctttgattcgttttcttttaattagatttgcaaacactactgaaaccgaaaccctaaacccttgtgaataagacgaatttgttctttcctttgattagataagaaagagttagatttagattcagttcgtttacgcttttatttgttgtcttctaattagatttgggagtataagtgaaaccctaggtcttatgggaagttagtgaattttgttgaagaagaagaagaaaatgtctgtggaaaggtcgtttgaggcatgggaagaggtgcagcgtcacgggca

SEQ ID NO: 17282 - DNA, 613 bp, Glycine max
gtaaaatcttggtcctcctcatccacaacacaaagatcaaatcctacgcaacgtgtggttaaaccaaacccgcgtgctccttttccatttctcatttccttcaagtacttcagttctcagcacaccacatcacctttgcagcagcctccataatattccaattcatcaccctcttttcaatattcccttattatcgctttgattcgttgatttttttaattctttacctcaattttaataagaatcagtttttgtagttttgatttgttgtagtaagattaattaactattcagattcagttattgccagctttgatttctttttttttttttttaaattaggtttgcaagtaaaacccaaacccaaacccctagaccttgggaatagtttgtgagttgtgttgaaaaagaatcggttcttgtctcgttttatttcagataagaaagtcttagattcagattcagttgttgacgctttgattcgttttcttctaattagatttgcgagtataggtgaagccctaggtcttatggataggtagtgagttttgttgttgaagaagaagaagaaaatgtctgtggaaaggtcgtttgaggcatgggaagaggtgca

SEQ ID NO: 17283 - DNA, 573 bp, Glycine max
atttatttattcattcattcatttcgctctctctctcccccttctcctttcttcctctgcaaccaaaatctgaatcttagggcaccaacacctttgatccaatgggttcggttgccgcagaagaactgaacttagatttaagatcctccttcgtccccaaaaccatcaccgatttcctccgccacctctccgccaacaacaaccaccctgccaccctccgcgatttcctctcccgcctcgaagacgagctccgcaagatccacgccttcaaacgcgaactccccctctccatgctcctcttaaacgacgcaatttcagttctgaaggcggaatcgcagaaatgcagggtcgcgcgtgattctgcgccggtgctggaggagttcattccgttgaagaaggagcgtggtgatcagagcgaggaggaggaggaagaggaggagaatgatgacgaggacgacaacgaatgccgggataagaggaattggatgagttccgttcagctctggaataacaacactaccactgccaccactaataataacaacccttctgatcgcaaacaactacttcaca

SEQ ID NO: 17284 - DNA, 288 bp, Glycine max
gaggacaccaaaccaacaccaccatcgatccaaatccaatccaatgggttcggttcccgcagaactgagcttggatttaagacccactttcatccccaaaaccatcaccgatttcctccgccacctctccgacaacaacaacccccccgccaccctccacgatttcctcgcccgcctcgaagacgagctccgcaagatccacgccttcaaacgcgaactccccctctccatgctcctcttaaacgacgcaatttcagttctgaaggcggaatcgcagaaatgcagggt

SEQ ID NO: 17285 - DNA, 338 bp, Glycine max
  unsure (1)..(338): unsure at all n locations
gtgtagaattattatggacgataaaattctctctctgatccaagtgcatacgtaccccgggctcaggctcgatggtatatatgaatttaattatatgtgttaattaatataaagtcttttaattataattatcacgaggtatatattaattgtttctttttcttttctccatagttgttcctagaattctcaatttgttatgttgttatgaattgtaggaaattagttgatctacttagttgtgatttgtaaattggtgcgtgacgatgatccatcattttctgcatccaactgtatttagtggcgatcaattgaagcacgttattgtttgtgntnna

SEQ ID NO: 17286 - DNA, 560 bp, Glycine max
acgagcctaaacatgatgcacaccatgtttgcgtgcctcaataaaaaagtagaagaaaatctcaaagtcacaaaggcagtgtacagagatgagttaatagaccaaaaagaaaccttcaacagtgccaagcaaggcattagtgaagaaaagtgtccgttttgcggactcagaaccttccatttttggagaagataccaatgagaagaagttggtgaaaggaaggtgtagtagtgatggtgatgaatcaggagggattagagtgaagctaaagatgacaaaggaagaagcggcacgtttgctatcaaaatgcaaagaaggaggagttctcgagttcaaggatgttgctcgtgagcttgtggccctcccactgaaccgagttagtgttgtgtctgctttacacgaacgataatgatgcattgctcaaggtcgttttatataaactcctatctcaatatgtttcattaagttgtattagtgaaagattcaaaaaactatatatatatatatatatatatatatatatgtagctgggtactctaggaaaattttaaagtttatgc

SEQ ID NO: 17287 - DNA, 479 bp, Glycine max
acgcgtacgatcacaaccgccataatcacaatcactgtgttccagatttcgatattcaaatggaccacgaccacgaataccctattctcacgccttcagccttacctcgccaaaagaaaccctccatacgacgatatcatggagctgctatggcacaacggccaggtcgtggtgcagagtcagaaccaacgttctctgagaaaacttccgccggtgaccaactcccacgacgcctctcccgccggtccttcaatgacgagagagattcgaccgctggtggagaatttcaatcagcatctcttcatgcacgaaggcgaaatggcttcgtggcttcactatcctatcgacgacgacgagcctgcgttggatcaaagcttcggcgccgattttctctattctccgccgacgacggctaacaacagcagcttcatgcaaaccctcggccacacgtctcagctcacggagctccggccgatgtc

SEQ ID NO: 17288 - DNA, 928 bp, Glycine max
ccgggaggaaaaaaagaggagctgcaatgcttctgtgttgatcaggttgagagaattatggagctatggaacaaaaatgatgggttcagaagggactacgtccgatgcaacactaggagtacgctgaggcgactgcaaaccctggatggccgatcacttggtcctgatgaagagccccctgtaatgcctaatgcaataactgaaagggcttccaaaaatattcccatggtctcgcactcaactatggaacaagaaaagaaatctccaagagaatctgttaatgtaaaggatgaacctgattcgaaggttgtggcacaaagaactgaaacaagtcagacaactaaagctaaaaagcctaccaagcctgctcccttagagaagcatgtggctcgttggggtgatgagtctgatgaagatgaagataaagataaaaatgaagaagaacctgtgagaacaaaggaggaagaggagctgatactgaaggctgagaaggcaaggaaggaggaagaggaggcaaacttgaaggaaaagcggaggctagaggagattgaaaaagctaaggaggcactgcagagaaaaaagcgtaatgcagagaaggcccaacaaagggctgccttaaaggcacaaaaagaagctgaactgaaagagaaggaaagggagaagagagcaaagaagaaggaaagaagaaagacatcttctgctgtcactgctgagaatacagaacaagaatctgctcataccacagaaactctaacaagtgggtggaagaaagtgacctgactgagaaaccagctgaggtaacaaaaaagccacagaaaccatctcaattcacaaggcagaccaaggtaaaatctgtacctgcagctcttcgcaaccggggtacgcggcgaattcaaccatgggtatgtgtcctaattgcgcttgtcgt

SEQ ID NO: 17289 - DNA, 498 bp, Glycine max
caaaagtctactgtcagattggaattgcaagaattttactcggctctggaagaagcaaaagctgatatagttggcctttgggcattgaggttcttaatctcccaggatttgctttctgaaagtttattgaagtccatgtatgtttcttttcttgcgggatgcttccggtcagtgcgttttggtttagaggaagctcatggaaaaggacaagcattgcagttcaactggttatatgagaaaggagcctttgtctgggattctgaaggcaaagtctctgttgattctaccaagattgaaggagcagttgaaagcctgagcagggagatactcaccatacaagccaatggtgataaagagactgctggtttgcttctcctgaaatactgtgtgttgacagaaccactaaaagttgctctaaaaaatttggaggatattcaggtacctgttgatgtagctccgacatttcccattggcaacaaaatattgcaatgaaagcaa

SEQ ID NO: 17290 - DNA, 552 bp, Glycine max
cagctgttggatatgcatattgttgggaccttagaactaggaaactgctgtggagcaaccgagtgagtcctaatgttatatactccttacagcacatgcatagtgacacatcaacattagctgttggcggaatagatggtatcttaagattgctaaatcagaacgatggcagtgttgtttcgagttgtgttatgggagataaattgttatcaacatttcaaagtccttctgggtccattcaaagaagaaaagggagtaggttgcctgaaaatatctacataaatattgacctcattcctaaaactgcaagaccttctattacatgcctcgctgttggaatgaagaagattgttaccacacacaataccaatgatatcagattatggaaattcaaaagcaagatttctttgtaaaattaagtatttaataccctgtacactgaataatttgttggattattttatagctgacatcatagtgttattatttttcctaaaactcagattaacaggatgtcaaaaatatataaaattatgtggttttattagtccc

SEQ ID NO: 17291 - DNA, 874 bp, Glycine max
gcagctgcgagtaacaactcggacccgaatgaggtcaagtactgtctcatcattctcatcaacatcatcatcatcctcttcaacctccttctccttgtcttgtaagaggaggaaattaaataatcgtttgtgggtagatgatgagaaaggaaactccgagtaaagaaaaaaaggaacaataataataaaagagcaagggaagaaaaaaaaaaaaagagaaagagagagaggaaataaggtgggccaagtcgtctagaaacctcaacattttttagagggattttgctattaaaatttgacttgagtgacggtgtagattataatagtattagcatatatatctctatcgtatgtactacgagagtttgatgggtttggagtaatttttatttttatgttggtgactcattaatattgagttggcataattcctctaggaggggagagggattttgcaacatgttactgtgggagagtaaatgagagaagaaaaagaagggaaacactgaaacagtggtagaagaatttaatgtgatttgttctttgtaacctgtgagtgtggaagaaaacaagtgagttgcgggctggaattcaaagtttgcattaattataggtgaaggagaccaaagatggtggagcaacgctgtagagattgggaagaaaaaaacagtagagagcaggtataaaaaaaactttggtgattattgaaagttgaaacttagaagttcgaagtgttaatgccatgggggattcataagtcaagaaaagcttcatttcttggccagcatcactgcttcttcaacatccacgttactactttgatgggataccctcaacagtataaagaacaattgaaggacaataagttgaagtt

SEQ ID NO: 17292 - DNA, 519 bp, Glycine max
cacgcgtacgcccacgcgttcgctttccttcttcttctttttcttcttccttcatagcaaaagccgtggccgcgagacccgagagtggaaaagaccctccacaaccaccttcacgtggctttctggccacagtacaagaaatcacaagaatctatagttcactgccacctagaccttctattgaagaagtagaagctgccacgtccactggggacaccctcaacaacgaggagcaaatcaaactcaacgaaatctcaatgcaacaacaacctcctcacgatgatgtccctcaagacctcttctctgtcctgcaacaactcaaaaagactatggttctgttccacactcatcaacagaggagagatgcgctttatcttcttgagcttgaaaatatgtttcaaaccttcggtgatctcattcagagggcttctgaattagtttctggagatacccagaagcaaaaacttcccactatacccgaggaacacgcggtgatcactgaggaaagtgaaactctgg

SEQ ID NO: 17293 - DNA, 869 bp, Glycine max
cccacgcgtccgcaattctccaagcttctcaccaagaaacaacatgcctgagatccgctccccaagccttcttgacttcccttcccttgctctaagccctgttacaccattgaatgatgacccttttgacaagtcctccccttcattggggaactcgtcagaggaggataaagccatagctgaaaagggcttctacttgcatccctctcccatgaccactccaagagactcagaaccacagctcttgccgttgttcccagttacctcacctagagtctcatcacaatcaccttcttgatcttgatgagatgaaaagagattgtgttcctgtgctgtggatgattggttaattacatcatgggttttttattttgatttgaatatggtttatggtttcctctatcaacaaggtacaaaagctttcgtctaattgtaaaagtggctttcttaccatgaaatggctactcttttctttattctcctgctttgttttcccacctcaaaatattggtatcttttcttgttttccctttccataaatgaaaaaaaaagtttctttgtccaatgattttttttctatgtccatgttccatctagttcttgaagggttattcttgttaggaaaacaaatcctgggaataatcatgagctagggtgtctcttttgattgagtgtgatgaattcaatgaataagggtcttcttcaaagtgtgtgtgtgtgtgattgctgagtcacaccaaccaccaccagtgagaagttttgtgttgagatgaagagaatccaaagatggaaaattgaagagaaagacaagggaatgaggctgcttggaagggacacattctactggaaatcagtgttggaaaggacat

SEQ ID NO: 17294 - DNA, 490 bp, Glycine max
gtaatgccaatgaattattgtcttcaacatttgagcctaattgttaagcctccaggttttttcttaccttgggactggctgggagcatttcaaataactgttctgtgaattgttatgtagttgggccagaacacactgtcttggagtctttggaatttgatttggttacaattgaagcagccacaaacaatttttctgaagaccgcaggattggcaaagggggttacggagaagtgtacaagggaatccttcctaaccgagaggaagtagctgtaaagagattatcaacaaattctaagcaaggagcggaggaattcaaaaatgaagtgttgttaatagcaaaacttcaacacaaaaatttggtgaagattggtaggattttgcccagaagacagagaaaaaatacttatttacgaatatgtgcctaacaagagccttgaccacttcttatttgattcccaaaagcacagacaattaacttggtcggagc

SEQ ID NO: 17295 - DNA, 1196 bp, Glycine max
  unsure (1)..(1196): unsure at all n locations
gggaatccaattctctctctctctctcttttcttgattcattttgttgtctcaattaaacctttgttttggtctgaattgaaaagggttgtgaattaatagtgatgtttctctctagatcaattctctttgtgtttgtgttctcagcttgcttgcttctatttccagccaatggaattcgatcatttgccacaacaaatggttatgaaactgaggttgaagaagttgatccttttgtgcaattcagagaggccccagaatacagaaaccagcggaagtgcactctaattgacacaaccaatgcgcaattagtatgtgatccttcacttgttcatgttgccatgaccattgattggcactacttaagagggtctattgctgcagtgcattctgtcgtgaaacacacttcctgcccgctgaatctgttctttcatttcattgcatcggatgcaagattggatagcaaggatgtgtttgaaaggattgttcacacctccttcccttcattgagattcaaagtttatgtgtttagggaaagtcttgttggcaatctcatatctccttcaattagggaggcacttgacaaccctcttaactatgcaagaagttaccttcctgatttgcttgatcaatgcattgaaagggtcatatacttggactctgatgttatagttgttgatgatgttcaagagctttggaaggtttcattgacagggtcaagagtcattggtgctcctgaatactgtcatgcaaacttcaccagatatttctctatgagttttggtcaagtgctgagttttctgaggtcttccaagggaaaaggccttgttatttcaacactggggtgatggtgatggatttggtgagatggagagcgggcgactacacaaggaagattgagaagtggatggagattcaaaaggagagaaggatctacaagttggggtcactccctccctttttgctggctttcggtggtaatgttgaggccattgaacatagatggaaccaacatggtcttggaggggataatgtaagaaatagttgtaggactctgcatcctggtccagttagtttgctacattggagtggtaaagggaaaccatggactaggctngatgccaagatgccttgctcagtggattttctttgggcaccttaatatctctacataccccatcaccatacataccatca

SEQ ID NO: 17296 - DNA, 464 bp, Glycine max
aatttgtaattatattattacacacatatatatatagttgaggaataaaacaaaggctctcatatcaaagcagacacagctagctattcacaatggccctgcgggttcatttctcaatagtttccatagcggttttggctctatgcacttctgcagattacttttcggctaattttagctatgctggtccaaatggacctgagtactggggaagcttgagtccatcttatgcagcatgctcacatgggaaatctcagagtcctgtggaacttatgaagactgatattgtcatcaacaagcagttgaagaatctaaacagaaactaccttcctaccaatgccacacttgttgacaacatattcaacattggggtgcactttgaaggaaaagtaggggatattaatataaatggaaaaaattactccttaaaacaattgcactggcattctccatcagagcacatg

SEQ ID NO: 17297 - DNA, 632 bp, Glycine max
cggacgcgtgggcggacgcgtgggtgcttggcagatcgttgcacagattcctccatcctagggtagtgctagaaagagtaaagtatgtcctgcaaggatggtagcagaaacggaatcggaatggataacgggaagtatgtccgttacacgcctgagcaggttgaagccctagaaaggctctatcacgattgccccaaacctagttccattcgccgccagcagctcattcgcgagtgccccattctctccaacatcgaacccaagcaaatcaaggtttggttccagaacagaagatgtagagagaagcagagaaaggagtcgtcgcggctccaagctgtcaataggaagctgactgctatgaacaagctgctgatggaagagaatgataggttgcagaagcaggtgtctcaactcgtctatgaaaatggctattttcgtcaacacaccacccagattactacgcagcagccaaccaaagacacaagctgtgaatcagctgtgacgagtggtcagcagcacaatttgacaactcaacatcccccacgggatgcaagtcctgcagggcttttgtccattgcagaagagactttagcagaatttctttctaaggctactgggactgctgttgagtg

SEQ ID NO: 17298 - DNA, 1674 bp, Glycine max
gacggtattcgtgcgtggatggcggctcaagatcagcctcatgaaaaccttatattccctgaggaggttctaccacgtggaaacgctctttaatggaactttagctttaactggtcgtgaccaggaaactaccggtttcgcttggtgggccgggaatgcccgacttatcaatttatccggcaaactactaggagcccatgtagcccatgctggattaatagtattctgggccggagcaatgaacctttttgaagtggctcatttcgtacccgagaagcccatgtatgaacaaggtttaattttacttccccatctagctactctaggttggggggtaggtcctgggggggaagttatagacacctttccatactttgtgtctggagtacttcacttaatttcctctgcagtattgggctttggcggtatttatcatgcacttttgggacctgagactcttgaagaatcttttccattcttcggttatgtatggaaagatagaaataaaatgactacaattttgggtattcacttaatcttgttaggtataggtgcgtttcttctagtattcaaggctctttattttggaggtatatatgatacgtgggctccggggggcggagatgtaagaaaaataaccaatttgacccttagtccaagtattatatttggatatttattaaaatcaccttttgggggagaagggtggattgttagtgtggacgatttggaagatataattggggggcatgtatggttgggttccatttgtatacttggtggaatctggcatatcttaaccaaaccttttgcatgggctcggcgtgcacttgtatggtctggagaagcttacttatcttatagtttaggtgctttatctgtttttggttttattgcttgttgctttgtctggtttaataataccgcttatcctagtgagttttacgggcccactgggccagaagcttctcaagctcaagcatttacttttctagttagagaccaacgtcttggggctaatgtaggatctgctcaaggacctacaggtttaggtaaatatctaatgcgttccccgacaggagaagttatttttgggggagaaactatgcgtttttgggatttgcgtgctccttggttagaacctctaaggggtccgaatggtttagacttgagtagactgaaaaaagatatacagccttggcaagaacgccgttctgcggaatatatgactcatgctcctttaggttccttaaattccgtgggtggcgtagctacagagattaatgcagtcaattatgtttctcctagaagttggttagctacttctcattttgttctaggattcttcctatttgtaggccatttatggcacgcgggaagagctcgcgcagctgccgcaggatttgaaaaaggaattgatcgagattttgaaccagttctttccatgactcctcttaattgagacatgagatcctatgaagtagaaatcacttttattttactataaatattactataaatattgggttgaattgagcgggtcgtatttaaataagaatttcttttccttttttcttagtttctatcgaaaaaaaaaagattcgatagaaactaagaaaataaacaaattgattcgccgagaaagaggagagagagggattcgaaccctcgata

SEQ ID NO: 17299 - DNA, 601 bp, Glycine max
caaaggcggcatctgaagcatcttcaaagtttggaccagccttggcttcaggttcaggtgtctttgtgtttgagaaggtgtccactttcattgttacagaagaaaaagaagttgaagcccctcctgcagtagaaactaaaacagaagaagaaacaagtagtgttgtcaaagagagggagacagtggttgaagaagaaaaaaaggaagaggaaaaaccacaagcagacgagacaagtgatgagaaaaaagtggaagaaaaacaagctgagactgctgctaaagaggaagagaaacctgctgaaccagcagaaccaccaaagccttgaaaatttcgttctgaacagaagctatatatatgtagctgcttcatgaagatgcagaagatcatatacgtgcattcttagtttgcatatagtccaaaattgtcacataccattcccttattcttttattcctgtgtaaaattggttttgtgctgcttagtttgatattgttgcagatttggtgattgatatgcatgtcaattaatgtttttatgatgaatcgttttgtaatattattcatttttcagtcaaggaattgtgacgtttagtttggtttt

SEQ ID NO: 17300 - DNA, 498 bp, Glycine max
agcaaacaagtagtgttgtcatttatagggagatagtggttgaagaagagaaaaagaaagaaaaaaaggaagaggaaaaacctcaagtaatagagacaagtgatgagaaaaaggtggaagaaaaaccagctgagacttctgcaaaaggggaagagaaacctgctgaagaagctgctgcagtagttgagcaagcagaaccaccaaagccttgaaaatttcgttcttgatagcttctatatatatgtagctgcttcatgaagatgcagaagatcatatatatacgtgtattcttagtttgcatatactccaaaattgtcacataccattcccttattcttttattcctgtgtaaaattggttttgtgctgcttagtttgatattgttgcagatttggtgatggatatatgcttgtgaatgtttttatggtgaatccttttgtaatatcattcattcttcagtcaaggaattgtgacgcttaatttggttcatcaaaaaaa

SEQ ID NO: 17301 - DNA, 416 bp, Glycine max
atctgggggttccaaaatttccacgacgaggcaccgcaatggacgaaccgaacgaagcacaagacaacagagaactctacgcgctcttgaatttgtctccagaagcttccgatgaagaaattcgcagagcgtatcgtcaatgggcgcaagcctatcatcccgataaataccaagctcctcacatgaaggatattgctacggagaactttcagcgaatatgcgaacgtatgagattctttcagatccaaataaaaggcagatctatgatatctacggcatggaggggttgacctctggtttggaacttggtccaaagcttaatggaactgaagagatcaaggcagaactcgagagattgaagaggatgaaggaacgcgagataatggcggcgcattttcaacccttcggtacaattg

SEQ ID NO: 17302 - DNA, 548 bp, Glycine max
  unsure (1)..(548): unsure at all n locations
gggtgaggaaaccattgtcaccgacggcgatgacaatggcaatagccgcttcctcactgtcttccccttttctctcctacaccaaattctccgcccctactccgcgcttcacgaactcaaaaaattccatctttgccctctcgtgttcttctccgaagagcattccggtgacggagaaggaagtgctccaagccatagccgactccgacggcaagaacctcccatgcgtcagaacctacgacaccgacctgtctcagctcactctcgtcggaaccgtcgatttcaaccaagctctgacggtccgncgccgccgacggcggtgaagtcgcctccgaccacatcgacgccggcttggacgccatggtcgtcgaaaccgtgttccctgctccttcatgcgaccacgccactgtctccactcgactgttcttacctgctaggaaagttaaagaaaaagccgctaagctcaggaattctttccctaaagatcattttccggctctgggtctaagaatgtacttgctatgacctttaggcaagtagttttgcag

SEQ ID NO: 17303 - DNA, 449 bp, Glycine max
gtgaaaacgaatggaggttgatgatcgagagagagcttttgggccgggagattatgaatgggatagcatgtgaaggttctcagaggattgagaggcctgagacatacaaacagtggcaggttaggaatacgagggctggtttcaagaagctccctctgaatgaggaattaatggccaaattgaggactgcgttaaaggaatggtaccacagattttgtcttggatgaagataacaactggttgcttcaaggttggaagggccacattttgtatgcttccacttgttgggtgccagcataatgagatgctactggactgggttcagaactcatactatactgaaggttttggtatccttggtttggctacctctacttgcttaaccttcaggtgctgtgatgaagatggcaacaagctttgcacgaaggtacttggtaaaactatggcac

SEQ ID NO: 17304 - DNA, 441 bp, Glycine max
acgcaaaaaaccttctgtcaccaaaacttacaacaacaacaaaaaaagaagaaaattttagaacaatggaggcatcaaagatgaagctttttcttggttttggtggtttccgtgttggcgatggcagcaactggggtttcagctgctgaggcacctgccccaggtccttcatccgatgccaccaccctctttgtgcccactgcttttgcttctctctttgttcttgcatttggctttctcttctaattttccaacaaccctttggttatttgttacatatataatgtgcagaggtggtgcgtgcgtttcgtgcttcgttcttcactcttttttccaactcaacttgagaagtggttgcttggtcactactctcttgtgagtagaacggttttttttttttgaagatgcattgaattggagatttggagtgaggaaagatga

SEQ ID NO: 17305 - DNA, 968 bp, Glycine max
aattggaagctcctagacagatcctaagaaatgaggaaggcaaaaagcttggtctgaaagtgaatgagaaaagctctgttcagaaggaaagtgatgtaaaaatgtctgatgctgagggagcatcgagtggaggaggggagccatctgtagttcccatggaggagggtgaaaaggaaacacagatgactggaatttatgatttggttgctgtattaacccacaagggtagaagtgctgattcaggacattatgttggttgggtcaagcaagaaaatgggaaatggatagagtttgatgatgacaatcccaaaccaaaactagaagaagacatcactagactatctggaggaggtgattggcacatggcgtatataatcatgtacaaggctcgtgttgtatctgtgtaattgctaggaagagcccgatttggtgttttacttcagagaatcaaggattgtgaatgagaaatggtttatttgttttctactcctgaggtttgatgctcattagtcggtatttatttcgtttaggtattatattttttttaaaggatgcataaggatttgaaatgaagcatggtaccccctgaatctccttccttccatcgactgggtccaagaggcacttgaatatcaagttacatacatttctgtggtgaaagcctagcctattatttctatgaatcaaacgcgagagcaacgtcctttatgaaatgcttagtgagcatacaatacaggatgaaaacttgacataaacatgtttaatttgattatgataagcgaatccttttttttatatatatttttaaatattttataccctttgtcgtggcattttgatttggtttctctttatggtaatactactaattaaatattatgttgaatgggttggttgtgcgtttggttggttgcttttttaacctttacataactggtttattaatttggggcctatgatctgtatct

SEQ ID NO: 17306 - DNA, 387 bp, Glycine max
atcccaaaccaaaactagaagaagacatagctagcctatccggaggaggtgattggcacatggcgtatataatcatgtacaaggctcgtgttgtatctgtgtaattgctaggaagaggacctgatttggtgtttacttcagagattcaaggattgagtgagaaatggtttatccgggtcattatttgtattgtactcctgaggtttgatgctctcattagtcagtgtttatttattttgccgagcaaaaaaaagtgtttatttattttagtttttgcattttttttaaaggatgtataaggatttgaattgaagcacggtaccctgaatctccttccttccatctacagggtccaagaggcacttgaatatcaagttacatttctgt

SEQ ID NO: 17307 - DNA, 498 bp, Glycine max
gtaagaatagggaattagggagagaaggataagagagagaaaacaggaggagcaggaatcaggcatggaagggctggccatgctgaagcagctcattgctcagcttcaacacctctttgacacttaccactctcaatcttctctcatctttcaacaacaacaccccagatggacgacctcccttgacattgaagataactctgtagatgacttctgtggccttgtaatgacagctggaaagtctggcagtttcaggatgtcggagcctggaaagcctccaccttctaagaacgtctcgaagagacagaagcaggggcaaatcatctggaagatcttgcacaactgaagttatggaacaagaaatttggaaagattttcctgaagatttatttgaggctgtgattgcacgacttcccattgccacatttttccgcttccgctctgtctgccggcagtggaattccatgctgacttctcaaagtttttctctgcattgta

SEQ ID NO: 17308 - DNA, 402 bp, Glycine max
gaggggagagagggataagtgagagaaagcagggtgcgtgtttttagagagagagagaggaggaatcaggcgaattgtgtgtggtttggtttggggcatggaagggctgggcatgctgaagcagctcattggtcagcttcagcagctcttggacacttaccagtctcaatctcattcttcttctactctcattcttcaacctcctcacactctcctctttcaacaacaacaccccagatggacgacctcccttgacattgaggatagctctgtagatgacttatgtggccttgtaatgacagctagaaagtctggcagtttcaggatgtcagatcctgtaaagcctccaccttctaagaagtctcgaagagacagaagcaggggcaaatcatctggaagatc

SEQ ID NO: 17309 - DNA, 988 bp, Glycine max
cacaaccaaggccactccacaagccagtaataatacttagctttgaatctccctgttgacatacatgggtttgcttctctgattacaaaaatcacttttggggagatggggaggttcgaaaaccatgttgtcaaaggaggcatcaagttgccaattgggttcaggttttgtcccaccgatgaagagcttctccttcactacctcaagaagaaggcgtttgctcaacaattacccgcttcagtcatttcagagtttgacgtgtttcagactgagccatggaaacttccaggtgaattgagggaaaataggtacttttttagcaatagatcaaatggaaacatcaagagacctgctggttctgggtgctggaaatctgtaggcaaagaaaaacaaatcatccattcagagagcaatcaagtaattgggatgaaggaaacactgtttttttgcaaagggtcccatgagacaagaactcagtgggtcatgcacgaattgcgccttgtagcttcctacccatgtcagatgccagtggcagattttgctgtgtatcgcatatttcagaaaaacaagatgaagacaagaagatcacatgggaagaagccctctagtagcagcaaacttcagagacttgttgatgttaaagctagtttctttgacttcactgtggattttaatcatgacgatatagggcctcccacaccttgttccccatgtctaagtgaaggctgtagtgaaatctcctctagcaagttagattaggatttaggagtagaagtgtagaacagtgcatgctttgtttattttcctcaatttatgagatatgatcaagaagcctctaaagctcaagtactcttgtctttactacagtcctgatgttgagttttttttgccctgcagtgtgaaacgaaaaaattatgtcctcgtaattatttgaatattattttctgaatttcttgttgcaaaaatcattaagaatccttttatcatc

SEQ ID NO: 17310 - DNA, 550 bp, Glycine max
  unsure (1)..(550): unsure at all n locations
cggacgcgtgggcggacgcgtgggtccgtattagaattcggggtgtttcaaaaccggaacgaacgtggcctncttcttccccagcaaaacctcatttcccaaaaaccaaaacccctctctgtctctctctccctctaacactctcacacacttccaccatggcggcacttaagcttctcctctcccaagctcgccgccattccttccccaaacgcgcttctcacttccactctcctatctctctctcctctcacagatccctctgctcttcctccgaatcaaactcaaaccctccccgcagacccttcgaaccaatccccatccaacccgtctcctaccctgtcaaacccaaacccccgccgcccgaacctcaacccgaacttgaaccttcacccgaaccacaatcccaccgccctccgccgccggactcgcaacgcgcgtggacgcgcgaggacatccggtacgtgaaagacgggccgtcgatcgcaccggtgtcgtactcctcgcgcggcgtggcgccgctccccgacgacagggcgcctgtggcggc

SEQ ID NO: 17311 - DNA, 418 bp, Glycine max
aggaaaaaaaattgcgaagcctggaaacgaagcgtttagatttagaagaacagaagatgcagcttcgtcgatcttgcttcttctttcatcattttgcatcgcgttagggtttgcagattttcaatttcccttcttttcgctacctttctcgcatagaatctcgcaattcctccgttgttccgtttccgcaactcatcaattcgaaagttattgcttcacaaggaggtagagcatgtaataaaggaaaaaaatggaggtcgaggtgccaatctcgcttgatttgaataatcaacttcagccagagaccgtagtttcagttcaaaatggggatcctggtgtttcctcttctgttgcaaatgctgttaacccgcagcagccagctacaaaaaaaccgaccaggcagtgggctgcatggact

SEQ ID NO: 17312 - DNA, 456 bp, Glycine max
agagatcacagaaagcgtcacaacaaaactaaagaaagcggtttcacagaccgagaaatcccaatcctatggcagaggaagggaaacccgatgaacagctctttcagcttctctccaatcttctccaccaggtggaatcactgacgaatcaagaagaagttgagctgcgttctaaaattgaaactcttggattagaggttacaaaagttccttcaaagtcaacgcagcaccttaacgagttggaaatagctgaggagttggataaattatcagcaagattggataatcttgatgagatgatatcatcatcaatggcttcagatccacaggtgcagtcactcttgagtgatacagccgatgtgtggatgccagttatcactgctacttctgaggaaaggcgcaacttcacagcggctactggagacagcaccctccaaactgatgtggaaaagtcta

SEQ ID NO: 17313 - DNA, 458 bp, Glycine max
aagaaagcggtttcacagaccgagaaatcccaatcctatggcaggggttgggaaacccgatgaacagctctttcagcttctctccaatcttctccaccaggtggaatcactgacgaatcaagaagaagttgagctgcgttctaaaattgaaactcttggattagaggttacaaaagttccttcaaagtcaacgcagcaccttaacgaggtgtttttcacttgatgcagagttctcttatccctgttgaaatgtgctagaacatatgaaaagattttttcatcttatattatcctgtgaattagtttttcgatttcctcgttatctcttgggattagttattatattttctcaacatttttatttcctcattgaggattagctatcatattttcttttcttatcatgattttttttcttaattaattaggatcattattagtatagataagggttagtg

SEQ ID NO: 17314 - DNA, 910 bp, Glycine max
cggaaaatctccttttgggatgaagtttcactaaacccttgtttttttctctttgcctttctctccttcttctgctccttgtcgacagtgtaagatcttttctcgccctcatttttggtccacaaattgtgctccacgcactcattaggttaagagaatccagcataaaagggcaagtcatgggttttaaatttatttatttttaaagtgttgaatttgaagggtcagaatgagatgtttcatatatatcttggatctgtctccttgaatgccattttgtttgtagccttcatttgaggtaaaggaaaatcttgggagagttcattaagcagctagatatggcaagatttggtctttccctttgggcagttatatacgcgtttgtttgctaccgtgattgaagggaattcaagcaacaatcttccttatacagtgcttcgcaacttggattccatagcacagaagttggtagatgttaccaaggactgcacagtgaagaacttgaagcactataatcactcaggttaattgcaaggggaaaaaatggaatgccaactctagcatacataggatggtggtgttgagaggtgaagcaagtacctgccaatgtaataatggtagtgttgaggaaactgaatgaaagatggattacatgttaagcataatacctggtggtggggaaaatgcgaatatacagaagatgcatactcaaacgcttctatttcaactgatcacattatgacagtgaatccgttgtgaagttcccagctctcatacatctaaaaaatgaggactgagttgcacaaatgtcacaataacacagtttgcagttttggccaggattctttaattccttacacaatgccattaagccctataatagcacactatcaagtttggtggcttgcat

SEQ ID NO: 17315 - DNA, 598 bp, Glycine max
ggaaaatcttgggagagttgattaagcagctagatatggcaagatttggtctttccctttgggcagctatataagcgtttgtttgctaccgtgattaaagggaattcaagcaacaacctttcttatacagtagattccatcagcacagaactttgtcgatgttacgaataactgctcactgaagatcttgaagcactactataatcactcaggttaattgcaagggaaacaaaatggaacgccaactgtagcatacataggatggtggtgtagagaggtgaaacaagtacctgccaatgtaatagtggtagtgtttaggtacctctgatgatgctgacgataccactgagcaggttgtgatgcctgtatgtactgccagcgattgatatggagatctgggaagtaaaaaacaaaacttaatggaagattgattacatgttaagcatcatacctagtggtggggaaaatatgaatacagaagatgcatactcaaacgcttctatttcaactgatcacatgcattatgacagtcaatacttcgtgaagttctcagctctcgtacatctaaaaaatgaggactgagttgcacaaatgtcac

SEQ ID NO: 17316 - DNA, 512 bp, Glycine max
ctttgaataactcaggaactcccaactctccctccgtcactcgctcacctcaaacccccaaaccttcatccgtcgatgcccactggctggctctgccatccgagcctcaccggcgtcgccgccacaaccacatctccaccttcctccaatccaccgcctccaacttcgcctctctcttcaaccccccaaaccctccctctctagcactccctcacccgccctcctccttctccctccctctcttcttcgcgccgccgctctcctcctccaccgccgttgactctgccactgccgagcccgctcgccctgccgcgaaatcggtccgcatagcgcggctcggcgccaatgggaagggcggcggcgggcctgtgttcgtggggcaggtgttcagcatgtgcgacctctccggtacgggcctcatggccgtttcgacgcacttcgacattcccttcatttcgaaaagaacccctgagtggttgaaaaaagtatttgcagcaatcaccaagagtgag

SEQ ID NO: 17317 - DNA, 538 bp, Glycine max
cactattgaataggcaatgtaaaatgcagtagtttaatctgagaaagattatgcaggtgtgatcgtatattgtggctaggcaaaggaataaaacaactacaatatggacgtgcagaaattaagctctcggatcatagaccagttagttcagccttcttggttgaagttgaagtattcgaccatcgcaagctaaagagagctctaaatttcactagggcagcagtacacccagagatcttccttgatgaagatggagaaatataatcatgttagacattcatcgtggtactatcatattaaacactggtaaatatagttttccatcttctctttacaataatccaattcatgacacgctgtgtaggatatgcttttggatagatatatagaaaaagtctaaccatcatgatgcatttcaaatatatgatttgccagaccgtaattcaattcatttcaaaacaatagtttgacattttttttcacaagtaacgaccacttaatttatttgactcactttttgagaattcgtgtataaact

SEQ ID NO: 17318 - DNA, 992 bp, Glycine max
  unsure (1)..(992): unsure at all n locations
agactatactngactggccggaacgtttattagatgcaactccacatactgattccaggccgaaattgcgccgagtactaagcagctcagagagaaccggctttagctggacagatactgcttcaaaatattcgaatgcaatgaaacggtcacaccatagttctggaaatttgggcttgttatggaaagagcagaaagtgatgcctgaagaagtaattgatattattgacgacttatctgacatgctatcagacgaggaagatgatgatgattattttgaagtagcaaatgacaaagaagttaatggaataagtaaggtgaaatctcatcgtaaatatgtccggattgtcagcaagcagatggtaggaatatatgtgtctgtttgggtgcaaaggaggttgagaaggcacattaataacttgaaagtttccccggttggagttggacttatgggctacatgggaaacaaggggtcagtttcagttagtatgtctctctttcagtcacgtatgtgctttgtttgttcccatttgacttctggtcagaaggaacgggctgaacataggcgaaactctgatgttcatgaaattctaagacgcacttgcttctcatcatctgtcttcgatgcagatcaaccacaaacaatcccatctcatgaccagattttctggttcggggatttgaattatcgtatcaatatgttggatgctgaggttagaaaattggttgctctaaagaagtgggatgagttgaagaattatgatcagctaagcaaagaattgcgtatggggcatgtatttgatggatggaaagaggggttgataaacttcccacccacttacaagtatgaaattaactctgatagatatgttggtgagaggccaaaagaaggggaaaaaagaagatctccagcctggtgtgatcgtatattgtggctaggcaaaggaataaaacaactacaatatggacgtgcagaaattaagctctcggat

SEQ ID NO: 17319 - DNA, 794 bp, Glycine max
cccacgcgtccggtttcttattacagtagttgacgcggcactgcacagtagtagagaaaagctaacgcgtgtaaatgaagtagtgagtagagcaagagcgacaaagagagtgccaggtgtgtgaaggagctcgttacttgggatccagttgttgttattcttaatcggagatcgcagcggcggattgcatgagcggcggatcggaggcggtgtgagcagaggatcgaaagatgtctgcgatcatagtgtgcgggaagagatcagcgctgttccaagaccttcctcccaagaggatccgttgttcctcttcttcttctcccgttcacctctctcctcctccttcttccctcctccaccacctcgccgcccttttccctgacatggaccaccaccttctcgagaaagctctccaagattgcggcaacgacatcgactccgctatcagaagcttaaaccagctccgactaggagcaccaccgccttcttgtcttgattctactcccatcgcatctgatactgctcctcctcaattgcaaggtggagcaaaatgtgatgcagaagtctcaggttctgatgatccagcagctggactaaagtatcctacaagcggtgccgaatgggtagagctttttgttattgaaatgatgaatgcttcaaacatggatgatgccaaatctcgagcttcaagaatgctagaggcattggagaagtccatttgcgcaagagcaagtgttgaaaccgagcgaaacattcaccaggaaaatatgatgctgaaggaacaagtggaggccctt

SEQ ID NO: 17320 - DNA, 513 bp, Glycine max
gtgagcagaggatccgttgttcctcttcctcttctcccgttcgcctctctcctccaccacctcctcgagaaagctctccaagattgcggcaacgacatcgactccgctatcagaagcttaaaccagctccgcctaggaggagcaccaccgcctccttctcttgattctactcccatcgcatctgacactgctcctcctcaattccaaggtgaagctgtttggcttcttaaactctaaatttttgcctaactcaactctaaaacatgcgctagcttgggaattccgatgctcattctttgaattccaagctacaacgacgattttgatagttttgttttgagctctcccaattggtatccagaagtccactaacttgtcaattcacctatatacactgttttgacttttcatcaatacgcgggatatatctaacaacatcctactagtgctgccactcagtatgtcaaatgtggaataaattactaatttagaccctcacttctaaataatcta

SEQ ID NO: 17321 - DNA, 388 bp, Glycine max
gccgcatatgcagcaaaagcctgcacttttgaacctctctcgtgatcactcttcttcctggctgtaaatttgtaaccttcacacttttcagaacacccagaagctctagcctcaccagcaccacatattgctagctagcgactccgagatgccaagcaaagaggattcacctttagtagaagcaaagcttccactattagaagctcaccctttaacagatgaaagagaacaagaccaaagtttcccacgaaggttttggcttgagtcaaagaggctttggcacatagtaggcccttcaattttcagccgtattgcatcctactccatgttagtcataacacaagcctttgcaggccaccttggtgacctcgaactcgctgccatctcc

SEQ ID NO: 17322 - DNA, 866 bp, Glycine max
  unsure (1)..(866): unsure at all n locations
gaattgagctgtgacgctttccagcttctagggatggctgagaggggaatgttgcctgagttcttcagcaagaggtctcgctacggaacacctctcataggaatactcttctcagcctccggcgtgattttattgtcatggctgagctttcaagaaattgtagctgcagaaaatttcttgtactgctttggaatgattttggagttcattgcgttcattctgttgcggatcaaacaccccgacgcatcccgaccttacaagataccggggggaactgctggagcaattatcatgtgtatccctccgacaatattgattggtgtggtgttgtttttctccacccttaaagtaatggttgtaagccttattgctatggcaattggccttctgatgcagccttgtctcaaatttgttgagaagaagagatggatgaagttttcccatagttctgagctccctgattttggcaatcaggaggacactcgcactttggtgcattaatctgtcctgtttcaataatatggagatgatttgttcttctaggtcttcaagcatgcttgttaagtttatacttctctgaacccaacaaccatagaagggcagctttttatcctacacctttggtaattcaactgtttgtctatgtttttagtttgatcaatagatgggatgccaattagaaacgtggaagatagtgtttagaatgtcttgggaaatacaattatttgttaagtggattatgttatcatttgtcaagaaaaaaatttgattattttcctttcattttaaattgttagcttttcatnnnnnnnnnnnnnnnnnnnnnnnnnnnnnnnnnnnnnnnnnnnnnnnnnnnnnnnnnnnnn

SEQ ID NO: 17323 - DNA, 434 bp, Glycine max
cccacagacactcacacacacagcacaacaaaagcgttttatcttccgttccatgtctatacactgaaatggcgtccatgtctacgtgcatcactgtgatccccacttgtgggctaccgcggcggctactttccttcaccccgaagcagccaatatcactcccttgcgtgattggaggagtcccgaaaagagtatgggattctagggttttggtggcgaggccggggggcgcagtggaaagcgacaagttgccttcggatgtgagaaagcgaacgatggatgccgtggatgggtgtggagggagagtgaccattggggatgtggctagcaaagctggccctaacttggattaaggccagaaagctcttcaagctcttgctgctgatgcggatggctttttagagggttctggggaaggtgacgttccggatgga

SEQ ID NO: 17324 - DNA, 375 bp, Glycine max
cccacgcgttcgcccacgcgtccgcaaaacaggagctccgagaggttcaagccatggggatctacctagctgaagggttcagcagttaaggaaaagagacgaagattttgagctcggaaccattgcgatggccatggcttccaaccatcttcgaaacctcaatcgcatctccatccaccattttcaggctctcctcaacgatactaccaggttcttctccgacgctgcttcttcattgcctcaaccgcaacctccctcatcatccttgaagcacaatgagctcgccaagttcgccgccatcgccgatacctggtgggattctgaaggcccctttaaaccattgcatgtgatgaatcctacgagacttgctttcat

SEQ ID NO: 17325 - DNA, 560 bp, Glycine max
  unsure (1)..(560): unsure at all n locations
cttcagagaaacaacggagggaaggagatggaaaacaatgctgaatctggaaaatccaaaagggaaagggaaagggattccaattcacggagggaagtacgttcgctacaacatcttaggcaaccatttccaagtctattccaagtacgctcccnctctccaacccgttggtcgcggcgcatacggcatcgtttgctgtgcgacgaattcggagacgaaagaaggagtggcgataaagaagattgggaatgcctttgacaacaggatcgacgccaagaggacgctcagggaaatcaagcttctctgtcacatggaacatgataacataattaaaattaaagacataattcggccagcggagagggagaacttcaatgacgtgtatatcgtgtacgagttgatggacaccgatctccatcagattatacagtctaatcaggctctcaccgatgaacattgccagtactttttatatcaactcttgcgagggttgaagtacattcactctgcaaatgttttgcaccgagatctaaaaccaagcaatttacttctgaacgcaa

SEQ ID NO: 17326 - DNA, 735 bp, Glycine max
  unsure (1)..(735): unsure at all n locations
tcggaacaagacccagccagcagttagggaaatcaagcacagctcaatcattgaatcttagcataaacacatacagaagaaggaaaagtggcaccctgggaggagctgatattgtaggagggtttggaagaaaaagaattttgttttgagatatatatacatatatgtgcaagtgcataggaaattaacacaaaaagatgacatggtgcaatgactctgatgaggatagggttattgaatcaacgacgccaacaataactattactcctaacactgatggcataaagctcaccgaagaaattagaaccataacatgcccctcgtgcggccataacattgaattcaaagatcagggtggaatccatgacttgccggggttaccagctggagtgaagtttgacccaaatgaccaagaaatattagaacatttggaggcaaaagtggcgtctgatgcatgcaagcttcatccccttattgacgagttcataccaacgcttgaaggcgaaaatgggatctgttatacacacccagaaaagctaccaggtgcttcctctgttactcagtttattttattttaattattttttgtctaattaattagtatagtttcgtgttttagaatacttattgcatatacacatcattgaattctcatttattgggagacacgtcttgatgtgcacgataccgcatgcatgaaattaatngntttagcaatgaaatgatttttttttc

SEQ ID NO: 17327 - DNA, 467 bp, Glycine max
ctctctctctctgaacaagacccagccagcagttagggaaatcaagcacagctcaatcattgaatcttagcataaacacatacagaagaaggaaaagtggcaccctggtacgattaaattctctctctttctgcaaatagagaagttgattcagaagaaacgagtccccaaagagacaaagctactagctctacctttcttcaccccttttcatctctatatatttttttttttttttgtattttattagggaggagctgatattgtaggagggtttggaagaaaaagaattttgttttgagatatatatacatatatgtgcaagtgcataggaaattaacacaaaaagatgacatggtgcaatgactctgatgaggatagggttattgaatcaatgacgccaacaataactattactcctaacactgatggcataaagctcaccgaagaaattagaaccataacat

SEQ ID NO: 17328 - DNA, 1453 bp, Glycine max
cacactttctctctctctctttctctttctcactcactctcactctctgtcacggacagacagagaaaaactcagacacccacgttcacacttccctcacaccatcccttactgttccttcttcttcttcttcctttttttttttcttctcttaatggaatgatggaacacaacatcatcgtcaacaacaacgtgatcgcaccgtttgtcataaaaacctacaatatggtgaacgatcccaccaccgataaactcatcacgtggggcccagccaacaacagcttcatcgtcctcgatcccctcgacttctcccactccctcctccctactttcttcaagcacaacaacttctccagcttcgttcgccaactcaacacctatggtttcagaaaggtggatccggatcggtgggagttcgcgaacgagtggttcctgcgaggacaaaagcacttattgaggaacatcgtgcggaagaagcacggtggagctgggaggaccaattccaattcgcattattcgcatcccttgaagctggaggagttggacgacgaggctatggtgatggagatagcgaggttgaaggaggagcaaaaagcgttggaggaagagcttcatgaaatgaacaagaggttagagacaacagaaaaacgaccacaacaaatgatggcttttctgtgtaaggttgtcgaggacccgcagattctttctcggattctccgagaaagagaaaagaaacacctgggagagaaaaagcgacgcctcattccgcctccgccgccgacggcagcgacgtcgtcgtcgtcgtcctccggcatcaagacagagttcgaagaagacgaaggtaattataatatcaagtcttcgtcgccggagacagggttggaaatcgacaacaatagtaacaatatttgttcgccgccgccgctggggtgttggggtgaacagggttgttatgggtacaattgcgcctccgtgccggcacctttgacggtggtagcgccggcgtttccgacgatgggaggagggtatttgaggcgtggggggttttggggggaaatgacggcggaggggaatgcggtgccgccttatccgttttcgttgttggaagggggcttttagatttagttttaggttatgaaatgaatgaattattactgccacaaaatttcatcttggattttctgtcgtattgaaagttctatccttttttgtgcgttgattctgtgtaaagaaaaaaggttgggaaaaagagtaaaaaggtagtgggaaaattgttagatatttatagttgtgttcggtttcaggttttttttttcataaatattgtttttaaataaatgctttgcggatggtgtagatcaagtaacatagagttgtttcaatttaatgagtaggatcggattagaatcttgcatatataattatgtaaaatattcaaactgtgagttttgtt

SEQ ID NO: 17329 - DNA, 510 bp, Glycine max
cccacgcgtccggtttgtttagtaaaaatcgaaaaatctgaagcaaaagaaacggcagacacagtgagcttagaatcattcaggataaaggttaacctcctttttcaaggccccctgccaagggcttgctccatttggttcggaattttatgggggaattattttcctgatcaagactcaaatctggaaaaagtgcacactgcaaagcttgttgctactaatctatgccttgttgcgttctacttttctgatttagatggatgttacttccctgggttcaaatagcaatacccaaaccgaccaacaccctttgttgatggagcagccagaaacccataacggtcatcagcatgtaattgacattacaaggaatggtgaagctctaactacgtcatctcgtaatgatcaatactctgaaatgcatttaccacagaatgaagatcaagcagctggggatgcacaaaattccagtcatcaaacatcatcatcttctgcacccagattaaactc

SEQ ID NO: 17330 - DNA, 528 bp, Glycine max
acggtttccttctaaagcacaacactaaagttcagcaatcagtactctcaagaagaaaattacaagatcatcatcacaataacaatatgagttcaggaattagagcatggagtgtggcaactagcgttggagttgtggaggccttaaaagaccaaggtatatgtaggtggaatcatgctttaagatcagctcaacaccatctcaaaaaccatgttggttcattctctcaggctaacaagctttcttcttctgctatgagctccacaacactaaaacatgggaagacaaatcagtcagaggagtcattaaggactgtcatgtacttgagctgttggggtcccaattagatgccataaggccaataaaaaaattggatctttctctttcaatttctaaaaatgaaacttaatctcaaaagattattatgggtgagatttctggggtcatactggataggattgaaagattgcttggctgatgtgacaatcaagttggaaattttggtaaatgattatggttaacattggc

SEQ ID NO: 17331 - DNA, 467 bp, Glycine max
cccacgcgtccggagagactgagacagtgatatggcgtatctgagattctcacacgcagcaccacagccacacctcacactagggtttccttcaccacctcaatttctctctattgctgctccaaaattctctccctcgtcttctaccatcaggtgcaaaggttttagtagattgatagtgaatcagaggctggtgactgtttttgcaacaaatcccaactctgtaggtgaaaaatcacccacagaaggatcagatgtaaatgaaactagcaatgctgctcaaggacctcctctccttactattctggctggattctttgtcctttttgttgtttgttggagcatttggtccattataacgtggctgataagtttaatagttaatgtacctgctccaaaataaattttattgtaatgtttgtttgtattttaagccactgcactagtccttgtgctcttggtcatag

SEQ ID NO: 17332 - DNA, 509 bp, Glycine max
aggcgacaacacgacagaaggggggagaaactagatggttgataagtactactataatagtataactaaggaaggagtaagggtgatggtggttctgatctgacttttggcggtgtgggagtcacgagagcagcaaggggaagtcacaagagtcacaagaatggagagaggttcgggcaagctgagcaggaagaaaagtggtggtggaaacggacaggttctagacggttctaatattatggagttggttggaaaccagcaagttttcaccaccttcgtggaccataagtttcacgagttagacacagacaaagatggcaaactctctgtcaaagagctccagcctgctgttgctgacataggagctgctcttggtttgcctgctcacggcactaatcctgattctgatcacatctattccgaggtgttgaatgaattcacacatgggaagcaggaaaacgtgagcaagagtgagttcaaagaggttctctcagacattcttttgggta

SEQ ID NO: 17333 - DNA, 408 bp, Glycine max
attttccagcaagccaagctacacttcggctctcgtacggtgcttccttcagtttccgccgccgatggcgactgcggcggcgctcttttctcgcctccgccgcgcgcggccgtcctcctccctctccctcctctctcctccacgtgtcctctcctctcctctccctcctccgcttcccgctcccgcatcacctcactctccaaccctcgcctttctcgacgcgttccgctcacgcgctttctcctctcacatttccgacaatcgagaaccggagctgaactcgttcggtgtcgactcaccgcttaactcggagcttctgaaagtgactgctgatactagtggcggcggcgaagacgacgccgtttttcccgttcgcgccgcgatttcgatgctcgagtcgtttcacga

SEQ ID NO: 17334 - DNA, 875 bp, Glycine max
catacaccatcaacttcttcttcttcttcttcttcttcttctttcgttcttcattgttcattcaatttcttttcttctctcatcatctcacccaacaaatcattcaattgcaatcatctatggcgtctttcgacccgagcgtagattctagtaattccgacacgttgcgagaatccaatcacaagaagcgcagaaaaatcggagaccacgccgccggcgatctcgattcggccgccgccgtcccttggagatccgacgtggagcagcggatctactcccgccgcctcgtggaggctctccgccgcactccgtcatcggcgaccaagcctagagccgccggccaggtccgcgagaccgccgaccgcgtcctcgccgccaccgccagaggccgaacacggtggagccgcgcgattctcaagcgctggaggaagctccgcatgcagcacaagaaggcgaaggcggcatcgtccaacaacggtttgaagagaacgaggattggaaacggagagaggaggaaccggttaccggctgttcagaagaaagcgcgcgttctcagccggttggttcccggttgccggaaggtttcgttcccgaaccttctggaagaagccacggactatatctccgccttggagatgcaagtgcgagccatgacggctctggccgaactactcgccggcgccgcgccggcaaatctcgccggctccgcgttgagttgacccgcgcgcctaggctatattgcgccaggtgttttttattttttattttttatttttaattattatatcgttttttttttcagattcatgtattttatcgtgtacactgtacatgccatttgcttattcctccttcctttgagttccactatcccc

SEQ ID NO: 17335 - DNA, 990 bp, Glycine max
atttgtttcacactttaggaaacacagagagagagacaacaaataagatgaaaaacgtaggaaaattagagtttagtggagaattatagaaattacggtcccttcttctaattgtgtgcgagtagctgttcttctgcttctgctttacaagttttgttgccatggaagcagagttggataccgagcagcagcagcaaatgacggaaggaagctattcccaaactatgcaaattgatccaaaaagggctcgatttccatgctccgttgtgtggtcaccacttcctgtaatctcgtggttcattccttgcattggtcacattggcatctgcagagaggatggggtgatattggattttgcagggcctaattttgtgtgtgtggacagttttgcatttggagctgccactcgctatcttcaaatccccaaagaaaagtgttgtgtccccttagtccagtctgtgtacaatggtgaggaacactacatgcagggtgaaactagaggagatttgaggacttgggatgatgcactaaggaaaagcactcaagaattccaacatctatcttacaatctctttacctgcaactgccactcgtttgttgccaataatttgaacaagttgggttttctgactggtggatggaatgtggtgaatctggcaattttcattttattcaatggacgttgggtcagcaaagcatctatgcttcgatctatcttaccatttgtggttgtattttttcttggagtcacattctggggcttcaccttcctaaagttttggttcttcttcacttccattcttattgggtggttccttcttggtacttattgtttcaagaacctgattcagttgtagtatctgtttctcttgttctactttgtataaaactgtaatacgttcgaagtgatggaagtgacccaattaaccatatactttgtattcagataaattttgttgctaaatgttaaaggcttgttcttgtggtatc

SEQ ID NO: 17336 - DNA, 468 bp, Glycine max
ctccgctaaatttgacagaatcacataaggcgtgaatcgaaataaaaagtggttttactcttctctctctagactccaatggcggctctcttctccattgcctccttcgtcttaccatcctggttataggctgaaaagggaaggggggagagagagtgtttgcggcaatggaggaaccgagcaaactgaagcgtgccatgattgattccttggctggggcaatttctggtggaatatcacggactgttacatcgccccttgatgttattaagattcgattccaggtccagctagagcccacatcttcatgggcattactacgcaaggatttggcttcagctacggctgcagcatcaaaatacactggtatgcttcaggcaaccaaggatattcttagagaagaaggcgtacaggggttttggcggggaaatgtgccggcattgctcatggttatgccatatacagcta

SEQ ID NO: 17337 - DNA, 428 bp, Glycine max
acagtataagattgggaagcaaaagcgagtatcgtattgttctgaccagtgactactgaccctacaatctctccacttttcaatcaaatcaattccaatgtcggctctcttctccttcatcttcccatccagctgaaaagggaggagagagtgtttgcgttgcggcaatggaggaaccgagcaaactgaagcgtgccatgattgattcctgggctggggcaatttctggtggaatatcacggacagttacctcgcccctcgatgttattaagattcgattccaggttcaactagagcccacatcttcatgggctttattacggaaggatttggctgcagcatcaaaatacactggtatgtttcaagcaaccaaggacattcttagagaagaaggcgtacaggggttttggcggggaaatgtgccggca

SEQ ID NO: 17338 - DNA, 433 bp, Glycine max
tcgttcacgcgtccgattttcaaaagcttttgtgagaaaaatgctgatggccaatcaatgctggcgtctacgctaattccacagccatattccatgaatcatgcattcctcgaggaggatgtcaatatgtcttttggcagcatgctattacacagtcttactttgggtgaaaatggtgatcttgagacttgttgcagagctgctagtgttctatctcatatgttgaaggaccatctccaatgcaaggaaagggttttaagaattgaaattgaggcagcacccatgcaatctttaggagctccagagccactaatgcatcgaatggtgaaatatttggctgttgcttcttccatgaaattccatgatggaaagtctagtacatcaggaaactcttatgttcaggccattatcttgaaattactgattacctggc

SEQ ID NO: 17339 - DNA, 537 bp, Glycine max
  unsure (1)..(537): unsure at all n locations
cgattggagtaccttttacctttctggttgaaaaccggccttcaacctaacctcaaaaaagggattcgggattgcaagctaacatccaatctgaaaatgcacaagttgaaaatgaaagtgctattactgtagaaaattcatattttggacagataatatcaaactcactcattttactttgttatgagaatgaattgagcctacactctntaaattttgtgattgagggtagcagtaagtacatacgaaaggtgaaccttgtacaacgatgctgctggactacaactttcaagaaagatgagaaagagtgtgttttggttcttctgtatcaaagtggagacattgaattaaggtccttgccagctttggaagtgttgggagaaagctctttaatgtcgatcctcagatggaacttggaaaccaacatggtgaagacgatatgttcttcatcaaatggaaaaattattctggtcaacgggaatgaaactgcttgcatatcactgttgaactgtgaaaatgagttctggactccagagt

SEQ ID NO: 17340 - DNA, 538 bp, Glycine max
cccacgcgtccgaaagaattggaggggagataattggggttgtaccagccgcgccgccaggtgtggttgtggatgaggacgatatgaaagttgattatgagcatgagaaggagaatccgagggagagggatagggagaggagttttgtgaaggagagtagggaggagaaggaggagaggatgcatcgcgagaaaattcgtgaggagaggaggaaggagaggtagagggagaggatgttgtaggccaaggatgctgctatggggaagaggagtaagattacgcgggatagggatcgtgatattagtgaaaaggttgctcttggtatggcctctactaaaccagggactgaggttatgtatgatgagagactgtttaaccaggataagggaattgcgtctgggtttgccaccgatgatcagtacaatgtgtatgagcatgggctgtttactgcccagccaacgctgtccactttgtataggccaaagaagaatcttgatgatgagacttatggaggtgctgatgagcagttggagaagat

SEQ ID NO: 17341 - DNA, 424 bp, Glycine max
cacgcgtccggcaaccagatggtcttttgcataggaatgcaattggtgaagctgaagaaaatcccaaatcgactgctattgacacttcccaagcagatagggtggcaatggaagaagatgatattaatgcaataggagaagaagagaaagaacaattaaatgacgtagattacttgacagggaatccacttcctaatgacattctcttatatgctgttcctgtttgtggtccttatagtgcagttcagtcttacaaatatcgggtgaagataattcctggaccggcgaagaaagggaaagctgcaaaaactgctatgaacctattcagccacatgtcagaagcaacaacccgggagaaggagttgatgaaagcctgtacagatccagagctagttgctgcaattgttggtaatgtgaaaatatc

SEQ ID NO: 17342 - DNA, 519 bp, Glycine max
  unsure (1)..(519): unsure at all n locations
gcagcaggaatggattcagatgtcttgagcagctatctttcaaagcttgaaacaggccttgataaagtgcgattggttttgcaatatgaaaaccccgacccgcccggcaatttctttaactccacaaagctatttctgaattatgctgaagatgaaatggtcaggattaaagcagatgagagaaaagccttgtaccttgtaaaagaagttacagagtactttcatgggaatgcaacaaaggaagaagcccaccctctcagaattttcatgattgtaagagactttctgaatatcttggatctagtgtgcaaagaagtggaaaagatgcactgatagaatcggtggtggttctggcagatccttccgaatacctccaaatgcatcattacctgttctcaacagatacaatcatccaaagcaggatagaagctcagatgaggagagctcatccccctagtgttgtgaatatgaaagataccatangctntcagactaacagtgaaagtaaatgaatgaatg

SEQ ID NO: 17343 - DNA, 512 bp, Glycine max
gtggtgaggttgagaagattcctgggttcgatttcgcagactggttgaagaacacggtttcggagaatgatttcgttgtgatgaagatggatgtggagggtactgagtttgatttgattccaagattgtttgaaactggggctatctgtttggtggatgagatttttcttgagtgccattacaataggtggcagaggtgttgccctggacagaggagccccaagtatgagaaaacttatgatcagtgcttgcagctcttcacttctctcagacaaagtggagttcttgttcatcaatggttttaattaactttgtagaattgcctgatggatgatgggtcaaaccctatatgcatgttcttagcttctgcatgtttcttctttttagttttcttatttttttcccaagccaatagagaagagagagagtgagagtgagagttctttattttttaaaatttctctacttgtaacagttgcaactgaaaatgaaaattaaaaccatccctttac

SEQ ID NO: 17344 - DNA, 455 bp, Glycine max
ctttgtttgcttctcaagtctctcgaagcctctttctctctcttctaggttcgtttctctctcctcctcgttcttgtttcttcggtgattttatgtgtgtgtttgtgtataacggtggtcgtgtgttttgagtagcttgaaacacgtttgacgaacgatgttttactacgttgttgtgtcttgtttattttaaatcatagtcttgtaagttcgtagatcgtgaatttgcttatgatttatttcttagatataaaaaattatggggttttgttggggattttatcatgataaaataaaagctttctcttttcttgaatgaaattggctttttttgtaacttttgttctgttttgttatgattttttgcttagcaccttcctattgattcctgattccgggagtttgatgattggccttcattaggtattataatttgtggatttgattataaatat

SEQ ID NO: 17345 - DNA, 643 bp, Glycine max
tacggtgtgctctgaaaaagtccatgagatattcagagtttcatacccaccttcctcccctttcttataacaagaacaataattaacaccgctagaaaaatcatcatctctttcaccattaaagcaattaggaaagaggtttttgattgaagctggcgatatgaggaaggggaacaagaagaagaacaagctggtgtggatgatagcgacgccgtttagggtgttggggaaagcgagggacatgtacgtgagcagcataacgaagtgcggtcacaacatgaattacagcaaccccgtggatgctgctggcagattccaggctttgcccaggagttacagtgctgccacgtcacgctccgacaacaacgaggatttcgccgaacttttgagagcggcttccgccaggactttgggcaacataatcgatgtagatttggttgtaaaacagcaggcccaaacccagacccggcccgtttcctcaaatgggttgcccaagtcgacgagcgttggcatgggccggatcgacaggacacgccttatgatttgggggaaggggaagttcccgttgtgcccaaagcctatccaagaagtagaagctatgctgttggaaagacaagtgctgttttgtaaattgtcaagtact

SEQ ID NO: 17346 - DNA, 916 bp, Glycine max
aagaaaggcaagtaccatttttatcaatcttatcacccttttgcattgcacctacaaaagggccaccccttcttcccttctcaacttgtacttcatctaattcaatactacaacttctgaatcacttagttgaattgaattatcttcaaaatgagagaaatccttcatgttcaagctggtcaatgtggcaaccaaattggaggcaagttttgggaggtgatgtgtgatgaacatgggattgatgccactggaaattacgtaggcaattcccatcttcaacttgagagggttaacgtgtactacaatgaagcaagtggaggacgctatgttcctcgagctgtgcttatggaccttgaaccagggaccatggatagcttgcgttctggtccttttggaaaaatattcagacctgataatttcgtgttcggccaaaatggagctggtaacaactgggctaaagggcattatactgagggagctgagcttattgattctgttcttgatgttgttcgaaaagaagctgagaactgtgactgcttgcaggggttccaaatttgtcactcactgggaggaggaactgggtctggaatgggtaccttgcttatctcaaagatcagagaagagtatccggataggatgatgttgactttctcagtgttcccgtccccgaaggtctctgacactgtggttgaaccctacaatgccactctctctgttcatcaactagttgagaatgcggatgaatgcatggtccttgataacgaggcactctatgatatctgtttccgtacactcaagctcacaaatccaagttttggtgatctgaaccacttgatctcaacaacaatgagcggggtaacgtgctgcctccgcttccccgggcagctgaactccgacctccgcaaacacgccgtaa

SEQ ID NO: 17347 - DNA, 458 bp, Glycine max
cccacgcgtccgcaagtaccatttttctcaaccttatcacccttttgcataaaagggccaccccttcttcttcttcccttctcaacttgtactacaatttctggattgaattatcttcaaaatgagagaaatccttcatgttcaagctggtcaatgtggaaaccaaattggaggcaagttttgggaggtgatgtgtgatgaacatgggattgatgccactggaaattacgtaggtaactttcatcttcaacttgagagggttaacgtgtactacaatgaagcaagtgggggacggtatgttcctcgagctgtgcttatggaccttgaaccagggaccatggatagcttgcgttctggtccttttggaaaaatattcagacccgataacttcgtgttcggccaaaatggagctggtaacaactgggctaaagggcattacactgagggagctgagctta

SEQ ID NO: 17348 - DNA, 576 bp, Glycine max
caaacaagtacctcccaagactcacagcaaagagccctgaagttgttgtggtgttccggcataccgaaattcctcaatcaggacactaattgtcctaattcaggtaattgctagctactttatggctattgtgtttgtgtccacattgtggcggtagtagcaccaagtttctcagaaccaaaaaggtttcatcttttcaccacccttatcccaaagcttttttatttttggtggttttttctcgttctcatcggtagcagattttaaggttggattgaaggggttttagcagccgttaataatctgtgttgtcccatttggaggaccaacaggacatacaaaggttgttctttttgttcttgtttaaaagatgccaactttgatttcatctaggtttcttttgcttgttggagagtcactccacatgagaaggggtttggccacttctaggtctgttttattgcacactagtagtgtccagtgtatgagccaagtggaacctcatcatggttccgtcaccctctctagcataggtttgcaaactgaaactgaacctagaaacagaagccaaacaaa

SEQ ID NO: 17349 - DNA, 503 bp, Glycine max
caattatttacaacttttctgttttcaaatcccttgacaacaaataatagtgcaactgttccagtctcttgattttgctccatggccaaccaaggatttgatctccctttctacgaaaaaatttggttcaagcgaacatttcaaagagtgatggacaccttcattttagtcctcctcctcttgcttcttagttaccgtgttttctcatccaacaacttcactttcccatggttccttgctttcttatgcgaatcttggttcaccttcacttggattgtgattctcaacgccaagtggagtcctgcagtaaccataacccacccagatcgtctcttgcaacgggtacctgagcttccaccagtggacttgcttgtgacaacagcaaatcctatactagaaccaccaatcatcacagtcaacactgttttgtctcttctagcgcttgattatccagctaacaagttagcttgctatgtttctgatgatggctgttcccctcttac

SEQ ID NO: 17350 - DNA, 516 bp, Glycine max
atcatacccaacaacatcctccgacaccatgttgcacatggaaaaccccctcctgcagtcaacaaactcaattaccttcacattctttgggctgttgttatttctctttgttctttcatccatattcagaaaccgcggtgctgcaacaagaaaagcaccaccagaagcaagaggcgcgtggcctttaattggtcacatccacctcttaggtggctcaaaaccaccccatgtcacgttgggccacatggcggacaaatatggtcccgtcttcaccttgcgtctgggtgctcacaaaacgttggttgtgagcaattgggaaatggccaaacagtgctttaccgtcaacgacaaagcgtttgctagccgtcctaaatcagtgtcctttgaattgttgggatacaactattccatgattgggttcatcccttacggttcttattggcgtcacgtgcgcaaaattatcacgctggagcttctctctactcactgcatagacatgctcaagcacgtgatggt

SEQ ID NO: 17351 - DNA, 640 bp, Glycine max
gccacgcgtccggttcgggtggttataaaattagggactgatcctattctccggacaataaaaaaacttgcagtcgtgcctgcttaaccggcatttttcctctctctttcactcacgaggttagtacgtggatggttcaaacaggttaccaaagctgagggaagaggtagagttgctcggattcagaggaggctacttgttatagaggttaagaaaaggattatgcagtaccaaaattatgttgatcaagggttggagagagatgcacaatatatgtttggattggcactctatagcctggatcgcctgtatcagtctgtcaagtggcacgcagaagctaccggagagtgggaacgcttgcgtgaggatataatagatttggctaagcctagactacaaactgcacacaaggagtctgtgatatcacacatggttacatttgactgcttgcttccaagtcggaaccgcctgtagcatattttagcttaccattcttctcatattcttttcaatgatgtttttcttgctactctgaaatccaattttgtcgtgaatgtatgcatttattcctcgtacctggccacattttatcacatcatagtatgatgataattttttttgccaaaaaaaaaaaaaaaaa

SEQ ID NO: 17352 - DNA, 482 bp, Glycine max
  unsure (1)..(482): unsure at all n locations
gnngaggaccaaccgagttttcatgttcctagcagcagcagcaatggaggccgtattggaagcgatctttcgttatcaatgtccgatcaacaacaatggcaagccgggcctccacatttgttagcaactgctgcagcatcatcaggattcccacagcaaattagaccctcccaaggttggctgcagaaaaatgggttccactctctcatgagaccctcatgacccctcaagatattatttctaccatgccattttccatttgaaaaataatctccccctatttgttttgtgagcatgtatgtacgagtgaatccagtttagattattgtttatgttatgtccacccccccccttctttaggaaaagcccatacataacggtaactttactattgggtgaaagaatagggagagccaaattgggaactccctctggccttgttataggccagtcaaactaaccaacgtgcgaaattttttcct

SEQ ID NO: 17353 - DNA, 989 bp, Glycine max
  unsure (1)..(989): unsure at all n locations
attccttcatggctagtagactggatttctgaggaaggtggatacttcattggcaatttgcaacctgctcatatggacttcaggtttttctcacttggaaacctttgggccattgtatcatctttaggcacaacaagacagaatcagggcattttgaatttaattgaggccaaatgggatgatattgttgctcaaatgcctctcaagatttgttatccagcactggagggtgaggaatggcgtataaccactggctgtgaccccaagaacaccccttggtcataccataatggaggatcttggccgacacttctatggcagttcacgttagcctgcatcaagatgggaaggcctgatttggcacaaaaagcagttgattcagcagagaaaaggctttcagcggatagatggcccgaatattatgatacccggaacggaaggtttattgggaagcaatcacggttgatgcagacatggaccattgctggtttcgtgacctcaaagatgcttctagagaatccagaaaaggcatccttgttgttttgggaggaggattttgaacttcttcagaactgtgtctgcaagctaagcaaaagtggtagaaggaagtgttcccgttttgctgcaaggtctcagtttattgtttaatagggaggaacagagagtcattgtttgaactctgtagtagtgtaggtgaactaatttattacaataataactgattgatgccacttttcagaattaatctgttaactgttcctgttatttggtgacaacggctaactgtgcaacatagttctgttgcatcatttatttatgcggggtaaacttcccggatatctatgtcctgggagatttcaccttgtactgtatgtgctatgttgcttccctgtgtatcagatttgaacagtactcacattagttctgcattatttaatttgtttggtgcttagcacatttttttttattttaatgaatttnatttttat

SEQ ID NO: 17354 - DNA, 433 bp, Glycine max
aatgaataatgttggtctatagtgcgcacacatgctgatgctgtagattgacgaagaagcagtgggccaaccgcgataatctctacatattaatataatctttctcgtcacctgagagaaatagaaaatgcggaggcgcgcaagaacccttttccttcgcgtcctggaacctcctattcacatcaacgcttcgctttcccaaacatttacccctggattctccttccacacgctctcgcacttccaggaggccctggtagtggaaaaggtacacaatgtgcaaaaattgttgaaacctttggatttaagcatctgagtgctggagatcttttgagaaaggaagatggttctgatagtgaatatggctcaatgaatatgaataccattagaggaagaaaaattggtccatcaagaatgactggcaaattgattc

SEQ ID NO: 17355 - DNA, 314 bp, Glycine max
tcctcaattcggctcgagcttgttgagagaaatagaaaatgtggaggcggcctgcaacccttttccttcgcgtcctggaacctcctatacacatcaacgcttcgctttcccaaacatttaccactggattccccttccacttccaggacaaggttggcatttgccccaaaccgcttataacttttgttttaggaggccctggtagtggaaacggtacacagtgtggaaaaattgttgaaacctttggctttaagcatctgagtgctggagatcttttgagaagggagatggtttctgatagtgaatatggctca

SEQ ID NO: 17356 - DNA, 631 bp, Glycine max
tgggggaagaaaaagagcgtgaaggtcgggggatagatagggtttgcctttaccctgctttgctctcggtggtgtcactgattggcgttgccaaatttcctttggcttcttcttctccgaatctttcagaatctctctctcatttatttttgaattgaagtttctttctcattatctaaaatatcctcgcgcgtgttattagcgatgccggaggaagaagtagtggagctcaagttccgtctctacgatggatccgacatcggtcccttccgttactcccctgcctccaccatcgccatgctcaaggaccgcatttttgcagactggcccaaagacaagaagattataccaaaagcagcaaatgatataaaactgataagtgctggcaaaattttggagaaccacaagacagttggccagtgtagagtaccttttggcgagcttcccaaatgggttataaccatgcatgttgaggttcagccatctttgctcaaagcatagacagagaaaaaagttgatgaggtgcccagaaaacatatatgtgcatgtacgatattgtgagaatccgttgtcgtcatcatcatcatgaagagttaagctgctgatctcgccctaggtgtatgctgggata

SEQ ID NO: 17357 - DNA, 496 bp, Glycine max
ccaaaatcagcacttagaagaatttaacggaagattagtaaaaaagaaaagagagagagcgtgaaggtcgggggatagggtttgccttgactcacgttggcaaattttccttttgcttcttcttgtccaaacggaatcatttatttttggattcaactttctttctctcggcgcggtgttattagcgattggaacagtgcgagcgatgccggaagaagaagtgctggagctcaagttccgtctctacgatggatccgacatcggacccttccgttactcccctgcctccaccatcgccatgctcaaggaccgcatttttgcagactggcccagagacaagaaaattataccaaaggcagcaaatgatataaagctgataagtgctggcgaaattttggaaaacaacaagacagttggccagtgtagagtaccttttggcgagcttcccaaagggggggttataaccatgcatgttgtggtgcagccatctttgctc

SEQ ID NO: 17358 - DNA, 931 bp, Glycine max
tcgatttttgcttggagggaagtatcctttttagaggaagttattctgagacacccaacaaacatatactctatattggtaaaagaaaaaatctctgacatcattatataaatgccatattggtgtataagacccaaaccattctcattttccatcaagcaaacgataagaaatgttatcagaaacattggccatccctgcagtactccttgtaatactcattttgattctatcctctgtcttgttccatcttcaagatgaaagaacaaatccaccaggtcctaaacccctcccaattattggtaaccttcacatgctggggaaactcccacatcgttcccttcaagcccttgccaaaaattatggacccataatgttcataaagttgggacaagtcccaaccgttgtagtttcctcccctgaaactgcagagctattcctcaaaacccatgacactatctttgctagcaggccaaaaactctagcttcagaatacatgtcttatggaagtaagggcctagcgttctctgagtatggaccctattggcgtaacgtgaaaaagttgtgcaccacacaacttctgagtgcatcaaaggttgagatgttcgctccattgaggagggaggagttaggagtatttgtgaagtcacttgaaaaagcagcagcctcacgtgatgttgtgaatctgagtgaacaggttggggagcttatatcgaatattgtgtgtagaatgatacttggccgcagtaaggatgatagattcgacctaaaggggcttgctcgtgaggttctgcgtttgactggagtgtcaatattgcagattatgttccttggacaggcttcttggatcttcagggactaaaaggaaaaatgaagaaaatgagtaaggcatttgacgaagtgtttgaacaaatcataaaagaccatgaag

SEQ ID NO: 17359 - DNA, 620 bp, Glycine max
cattgaaggaaaaagatttcgtgccttgacagatgaacggagagctgatcttgctgataggatatcggtcatgggacggtcatctcccaatgacaagcttttgcttgtgcaagcattgaggaggaaggggcatgttgtggctgtacctggggatggaacaaacgatgctcccgcacttcatgaggccgatattggtcttgcaatgggtatccaaggtacagaagttgctaaagagagctctgatatcattattttggatgacaattgtgcttccgttgtgaaggttagtcctcatttcttatttggaagattttgaactgttcttataaatgatgcatgtttaacatctaccttttgaaggactatttctggcattacttgaaatgcagaattgtaatttttttaatactttttgttttgtgagaggtatagaattaaggtgtatcccatagcctgatattattttatgtaagctgattatgaattgatgtttgaagcataagtggtactgcctttcaatttctttcgccaattcaggttgtcaaatgggggcggtctgtatatgcaaatattcagaaatttatccagtttcagcttacagtcaatatagcagcacttgc

SEQ ID NO: 17360 - DNA, 1019 bp, Glycine max
ctttatagattaggaagaccggaatagccaaccaaacccgtcgtcgtctagttatctatctcctccaccagcgaaaaccccaaaaccctagaattcaagaatcgaaagcaatggacttcgacgagtacgattacttggagaaaacagtggaggagcaagaggaccacgacagcagccggaagaagaaggagagcgagaggagctacaggaagcgcgaggagatcgacgagggaatcgaagagacgaagagcaagatgtccaggggcgacgaagagaacggctccaagaaggataaggactgtgaagaacgcgacagggagcgccgcagggacagggatagagatggtgagagaagtagcagagacagggatagggatagggatagggagaaggagagagagaaagggagggaacggagggaaaaggataaagagagggagaagagggagaaggagaaagagaaggagaaggagagggaaagagaaagaagggagagggaacgggaacgggaagagagagagaggtctcggaggagtaggagtcgttccgagagagaaagagaaagagaacgggatttcgacaccagagatagcaggagatttagggacaaaaaagaggcagcggagcccgaggcagatccagaaagggatcagagaactgtttttgcttaccagatgcccttaaaggcatcggagagggatgcttatgaattcttctcaaaagctggcaaggtgagggatgtccgtctgatcatggataggaactcaagacgatctaaaggagttgggtatattgagttttatgatgcaatgtcagtgccaatggcaattgctctctctggccaacttcttctaggacaacctgtaatggtcaagccttctgaggctgaaaagaaccttgtccaatctaatgctaccagtggagctgctggagtagtaggaccatatggagctgtggacaggaaactatatgtggggaaccttcacttcaacatgacggagagtcagctgcgggagatt

SEQ ID NO: 17361 - DNA, 676 bp, Glycine max
tcgcccacgcgtccggcgaaaaccccaaaaccctagaattcaagaatcgaaagcaatggacttcgacgagtacgattacttggagaaaacagtggaggagcaagaggaccacgacagcagccggaagaagaaggagagcgagaggagctacaggaagcgcgaggagatcgacgagggaatcgaagagacgaagagcaagaggtccaggggcgacgaagagaacggctccaagaaggataaggaccgcgaagaacgcgacagggagcgccgcagggacagggatagagatggtgagagaagtagcagagacagggatagggatagggataggggagcagaagagagaggagaggtctcggaggagtaggaagtcgttccgagagggacagagatagggagcgggattttgatatgcgcgatggccggagatttaaggataaaaaagaggctgcagaacctgaggcagacccagaaagggatcagagaactgtttttgcctaccagatgccgctaaaagcaacagagagagatgtgtatgagttcttttcaaaagctggcaaggtgagagatgtccgtctgatcatggataggaactcaagacgatctaaaggagttggcaatgcgataatgatgagggatggtgggaataccttgcactcatgtgtaatcaattcag

SEQ ID NO: 17362 - DNA, 358 bp, Glycine max
gtttgtgatagggacagggatagggatagggatagggaaaaggagcgcgagagaagagacaaggatagggagcgagagggggaaagagcggcgagggagagatccacatggagcaggagtctgctccgagagggacagagacagggagcgagatttcgatatgcgcgatggccggtgatttagggttaagaaagaggccgcagaacctgaggctgacccagaaagggatcagagaactgtttttgcctaccagatgccgttaaaagcaacagacagagatgtgcatgagttcttttcaaaagctggcaaggtgagagatgtccgtctgatcatggataggaactcaagacgatctaaa

SEQ ID NO: 17363 - DNA, 738 bp, Glycine max
ttgagggtttatttgatctacggaaaatagccagggctacatcaggattcgttggtgctgatgtggcggctctggttgacaaggctggtaatcttgctatgaagagaataattgatgaaaggaaacgtgaattatctcaagacctcacgagtgagcatgctagaagactggtggagggaaccttggtcggttgaagaaataaacaagcttgccatcaaaatgtccgatttcgaggaagcagctaataaggtgcaaccttcattaagaagagaagggttctcttccattcctaaatgtaaaatgggacgacgttggagggcttgatcgtttaagaaaggagtttgaacgttacattgtaagacgtataaaatatcctgaagattatgaggagcttggggtggatctcgagacgggatttttgctttatggacctcctgggtgtggtaaaacactgattgccaaagctgttgccaatgaggcaggggctacttttattcatattaagggacctgaacttttaaataaatatgttggagaaagtgagcttgcagttcgtacaatgtttagccgtgcaaggacatgtgcgccttgcatactcttttttgatgagattgatgctctgacaaccaaacgtggtaaagaaggtggttgggttgttgaacgactattgaaccagttgctcgttgagttagatggcgctgaacaacgaaaaggtgtttttgtgattggtgctacaaa

SEQ ID NO: 17364 - DNA, 624 bp, Glycine max
gatataatagccatttttctaaggttccattccctgcatttttctagctccttcttctctaaacactcatctatgactacctttccctcccctccttcaccatcttcttcttcttcaattccttctccaagatctagcatgttttactatgctggaagtgaagatcactctgaggagcctcacttcctccaagcttgttttctttgcagaaaaccactcggccaaaatcgtgacatcttcatgtacagagggaacacaccattttgtagcaaagagtgcagacaggagcaaatagagattgatgaggcaaaggagaaaagttggaagctttcttccaaaaggggtgtgagacaatcagagaccaatcaaaattccacacccaataaggctgtaagaacaggcacagttgcagtggcctaatcataatcaaacaaagaataatcatgacatgatgatgatgatgagtggggaaagtgcccaatttttgaaggaaaaaaaagattgaatattggaaatggaaaaattccaaaggaagaaatgcaatcatgaataatccatgaagattctgataacccgggatgaatcttcaattcgctgcctttgtaaagaaaaaaaagtttggtt

SEQ ID NO: 17365 - DNA, 454 bp, Glycine max
gttcttcttttcaagttcataaacttcattggcagcttcaccatattccaaagagatcatcggtatgagatatgtgtcttctgagtatgatgatgaagaagaagaaattcaagaaagttactcttatgtccatgattctattgagtcagatcatctagtagcagacatcatttgtggtggagagacccttttggttgtgcacaagaaccagcctcagaggactcattcttcttctgatgaattcacaagcccccgggatagccttgctgaagacttagaagaaaactattcaacagaaaccttgtcttttcacaagtcacctttggtttcagactttgaaaatgaacaagatgcagaagaatttccagcagaagatgctgattctgttccaaattctgtcccagctgaaagcaggcccacatcgcccatcacactgaacctctacaaaagcgac

SEQ ID NO: 17366 - DNA, 567 bp, Glycine max
actgactttatcaaagtcacccttctcccaaaagaaatgtatttttgtttacactttgctaattttctctcacattttttgataataggatcccaaatcgcactacttcttgggtttgccccaatcggaatacctaagtaaggaaaaggtatagacatctggctgcaatttaagtatgttgctgcactaaccatccactactctgacatcccaatagccccaaaagactgcttgtttatatatatatatatatatacatatatatatatatttatttatttgaatttcacaataacatacctcataccttgtagttgggctttgtgaagggttttggttttctgtttgggaggctggcagcacagctgcctttgtatggttatcatcagtacccctggtactgtagcttctcttattaataaatatatatattttctgccttccaaaaaaaataaaaaaatctaataataaaatattttattaaatactaaatttataaaggaaaaaaaaggaaaatttccacaaaataaataataattatggtaatggtgaaaggcaaaattaata

SEQ ID NO: 17367 - DNA, 408 bp, Glycine max
gaaaaccctaaccattccaatgtgctatcgcaattacctctctgcactccaatgacgcgctgctgcggcattcggattccgtgatctgattggcgattgggatccaatcttcatcaatccgattttgttgaaatggagcgctcgggtccgcgaagacgaacgaagggagatgaaaaataaaggaaggaatgttgtgtggtcaattgcgatggataagtgtctaattgaagccctggcagctcaggcaaaacgtggaaacaaaattgacaaatgtttcaatgaaaatgcatacacggctgcctgtgtagcagtaaacacttgcttcagcttgaatttgaataatcagaaagttatcaaccgtttgaaaacaattaagaagaggtatagagtaataaaagatatcctaag

SEQ ID NO: 17368 - DNA, 430 bp, Glycine max
  unsure (1)..(430): unsure at all n locations
ctcgtttgttctcattttatcttttttctctctctaaaattctagagcgagaaaagggagagagatcaaagtggtgcaacagttcaattgatgaacaagtgattgactattgatatctccttttgactttccaattcatgttctcaatttccctttgatttctccttctgggatttttttcccctccccctcctcaatttgatactcattttttgaaggtttcacactggaacaattgttggaaaaaaaaatctccaatggttgagtttttcttgttctctgtttggtcttaaatgtgccatcatgatcatcaaaagcatatgaacaacaaagtggggtttgcaaggagtaatgttcattggattggtgaaccaatatttttccagaattggcattatctttggaggattngatattttctggtgatcat

SEQ ID NO: 17369 - DNA, 461 bp, Glycine max
tgattaaaaaaaaaacaaagagactcaaaaaagagttctccgtcaactgaatctccatcatctttcccctttcccccctttcgcttcttcgtgttttttcttctctctcacttttgcttcttcttcatttcttcacgatccactctctctcgtagttgtggtggtgctgatcgcgtgcgctcatggtgatcgagcatgacattgagagttgcgggagcagagcgatgcaatctttgcacgcgcatcaccctcgccaccaccggcagaagctggaggtgtacaatgaggtgcttcggcgaattcaggaatcggattgcgaggaggggcatgttcccggcttcgacgatcagctttggctccacttcaatcgccttcccgctaggtacgcgttggatgtgaatgtggagagggcagaagatgttttagctcataagaggttgcttaagttggcggaggaccct

SEQ ID NO: 17370 - DNA, 549 bp, Glycine max
attaaacaccaaaatactaggagactcaaaaaagagttctccgtcaactgaatctccatcatttttcccctttcgcttcttcgtgttttttcttctctctcacttttgcttcttcacgatccactctctctgtttcgttgtggtggtgctgatcgcctgcgttcatggtgatcgagcatgacattgagagctgcgggagcagagcggtgcaatcttcgcacgcgcaccaccctcggcaccaccggcagaagctggaggtgtacaatgaggtccttcgacgaattcaggaatcggattgcgaggaggcgcacgttccaggcttcgacgatcagctttggctccacttcaatcgccttccggctagtgaatttgccagagtggtttttgtacgagtctcgtagttggtcactctgattgctactacataggtacgcattggatgtgaatgtggagagggcagaagatgttttagctcataagaggttgcttaagttggcggaggaccctgcttctcgacctgcatttcaagttcgcttagtacaggtatat

SEQ ID NO: 17371 - DNA, 714 bp, Glycine max
cactaatcataagcctctccatctataccatcatatatggctagtagttgtttctccatgacaacaccaatcttcaaaattcgcttcttcttattcttatgctttattgggataagttcatctcaattgtcctctgacttttactccacaacttgtcctaatgcgctttcaaccattaagagtgcagtggattctgctgtgagcaatgaggctcgcatgggggcttccctcctacgtcttcatttccatgattgttttgttcaaggatgtgatgcatcagtgctattgaatgatacatcaagtttcacaggtgaacagacggcagctggcaacgttaattccataaggggttttggtgtaatagacaacatcaagtctcaagttgagagcttatgtcctggtgttgtttcttgtgctgatattctcactgtagctgcaagggactctgttgttgctcttggtggacctagttggacagtgcaattgggcagaagagactcaaccactgcaagtttaagttctgcaaactcagacttgccccgttttgatttaagtctgcaacaactcagcgataatttccaaaacaaaggtctcaccaccgctgaaatggttgctctctcaggagggcacacaattgggcaagctaaatgttcaactttcagaacaaggatttacaacgagaccaacatagattcctctgttgcaacatcattg

SEQ ID NO: 17372 - DNA, 566 bp, Glycine max
gggacacccaggaggttaagtttgagaagggtattcaaattctcaaaattttcaagcagcattcaagcaaaacatgcattttggatgattttgggtctatgagactcgtgaaaagatgattcaggaaagaaaatctatggaacaacagcttccgaaacaggctagcaagtccaatgatttaacaacaaatgggacagttatgttgcccaagtctcatgatggagccttgaagaatgaatcagctactacagatgaagcaggacaaaaggagaagctggtagaagtgaatggatcaactcaagcatctgaagactgttcaaagaactgctaaacccgtgacagtgcaagacaagagagtggttaaagaatgtagcttccagtatcccctccccctcttttcaatcccttttcatacattcctttagtatggagcgagttttggtgttttcttgttccttgttatccctgtttattttgtttgtccttgggattctaatggatgtagccatattgcacctctttctaaagaaaatatataaagtgagaatggaaatatgagtttaatt

SEQ ID NO: 17373 - DNA, 481 bp, Glycine max
ggaaccctagcttcgtttctctctctctctctaactactctgtttctctctctacggtagatcggcggcgaggaggatatggacgacgacgacgagatccagtcgcatccttcgccggcgagcggatcccctccgtcgtcgccgaggtcgaacggtcggataacggtgacggtcgcggctccggcgccgcaggcagcccaccaccgccgaacagtctggcattagcgcttccgattcagcagccggcgaagggaaacggcggaggaggaggcggcggcggcggcggcggaagggaggattgctggagcgaaggtgcgacggcggtgctgatcgacgcgtggggagagaggtatctggaactgagcagaggaaatctgaagcagaagcactggaaggaggtggcggatatcgtgagcgtcagagaggattacacgaaggcgccgaagaccgatatccagtgcaaaaaccggatcgacaccgt

SEQ ID NO: 17374 - DNA, 504 bp, Glycine max
ttttcgacctttcttttaaaataaacgaagatgccgtggggtcagggagtgatcactgatcctcaccttttaccacacacctacttccaaacccacatgagggataacatgaccatgactgccactactgatcaatggatgcagttctatcaacaacctctaatggatagccatggccatgatcatgatcatgatcatgatcatcatgctttggcaccaaacaccacagaaggcttctctagttctcccactcctaccatgccttcatcagagagcaatagcatcttgagccaattgagtccaaagggtaatgtatccaaaccaataagaagaaggtctagagcctctaagagaaccccaactacacttctcaatgccaaccccaccaattttagagcattagtacaacaattcacagggtgtcctcgcacaaccatgtcaacactaggggtccataagggccctattaccttgaattttcaacaggaaatagtagtactgaac

SEQ ID NO: 17375 - DNA, 400 bp, Glycine max
atcgcctacgcgtccgagagttagggagtgatcactgatcctcaccttttaccacacctacttccaaacccacatgagggatatgaccatggctgccattactgatcaatggatgcagttctatcaacaacctctaatggatagccatggccatgatcatcatgctttggcaccaatttccacagaattaggcttctctgatgcaaccgtgactacgacaactagttctcccacccccaccatgccatcatcagagagcaatagcatcttgagccaattgagtccaaagggtaatgtgtccaaaccaataagaagaaggtctagagcctctaagaaaaccccaaccacactcctcaatgccaacaccaccaattttagagcattagtacaacaattcaca

SEQ ID NO: 17376 - DNA, 478 bp, Glycine max
ccacggtatatcaacaagaagagacaaaattattgcactggtaatgattatactagccgtggttacaagtgtgcttgccatttccaccaacatatttaatgcttttagtagcaagtcataaatacaagctggttctctcttttctccccttctctctctctctctctctctctctctctctctctctctctctctctctctctatatatatatatatatatatatatatatatatatattatagaaaaatgtatttggggagagagggtgtgactggggagattctaggggcaatttggttgctgcggcgattgtgttacttgtgtaatttggatgccttgtttattgtagaattcatatgtcttgcggcagcatttctatgtaaagtagcaaatactattaaagaaatgaaatcgacttgatgggtgactaagttgcgccatatcaagtttgtgccgtgcaaaaaaaaaaaaaaaaa

SEQ ID NO: 17377 - DNA, 490 bp, Glycine max
attttctttactcaaactttctttcatgacaacctaacagtataagagggggaatttataataagcaagcgtgtgttgagattaaataacacggaaatatgaaaactcagaaactgtgactcattcctctttgactccgattccgcattgcattttccttgtgttacactctcccttcctcttttctttaatcattcgtcttttcaaaaccttaaaccatactaccacatatatattaaaaaaacaaactactataacctattgaaccccccaaatcaactactattccttaatttcttaaatccatggtttcttcctccgaccaaacacactcttgagctaattaagacggaaccatgtcgccgatgaagttctgggttacgcagcccaacaaacaacacgccgtgaagctgacccaattgaagctcgaattaggcctcttcggagccaggctcggcgccgcaaacgacaaggtcgcatttgaaataac

SEQ ID NO: 17378 - DNA, 1265 bp, Glycine max
tctcgagccgaatcggctcgagagaattagggacagcacatagtgcacaagtgcagacattaaattcacagatatcttcagtgggggatgagaagaacgtgctcaatgaaactaatcagaatttaaagaaggaacttcagtctctgatatttgaccttgaagagaagctgaaggaacaacagaaaattgaaggttccctgagatctgaggttgaaactctcaaagttgaggttgctgagaaatctacattgcaaagtcagctggaggaaattgaagggaaactggcacaagctgaatctagactaaatgaagaggttgaaagtgttcaagctgctgcttctcaacgagaagcagatttaagttcaaagttggaagactatgcacaaaaattcaatgatagaaatgtattgaatgataaggttgcagaacttgagaaagagttgcaacttgcacgggatgctattgctaaccagaaaggagcagagtcccagaagttggaactagaggcagcattgaagaattctcttgaagaacttgaaactaagaaaaatgatatctctcttttacagaaacaagtgacagatctagagcagaaattgcgagttgctggtgataaatcctcagttaagggtgatgagagtgttgatcagaaagaagggttggaagtaaaatccagggacattggttcaagcctctcgattccatcaaaaagaaagagcaagaaaaagtcagaagtaacaagtggtcagacatcatcttcatccgagactcatgttcaaactggccatgattctcctgtcataaatttcaagttcatcttgggtgtagctcttgtgtccattgtctttggcataattcttggaaagcgttactagtatcagcagtctatgtcttttgattttgttattctcatcatgttttttcattttttatgttttttttttctctcttctttcccgttgattaagattaaatacagattgaaagctttctttgcatgctttcaaactcaagtcttcagcttggtcagggaacttgttttaattcctatcccttgcctgcgtgtaaaagaaatggggtttggttaatgtttttttttttttttttttggaattttaataatttgagcgcgagctgtttttgctatggagcacatttttcttctcaattttatgtctggagtggaggatttggccatttgggcagctagaaaactttgtacctaaatggctaaccatggtgtaaagatttatttactttctcct

SEQ ID NO: 17379 - DNA, 786 bp, Glycine max
ctttctcctgcccagctaatactttctcctgtagagggttcctaaaaagacttcatctggtggcatttatgctcatatgtcttcatcgatgtacattccagatcggtgattttggcattctgataagatctggtttcagcataccaaaagcgttgttcttcaactttctgtcagcacttgtggcacttgcggggactgcattggctctgctgtgggggaaggatcctggacagtcatctttgattgagggatttacagcaggtggatttatatacattgcaattgcgggagtacttgcagaaatgaataacggtgggaatacaacattaagaagtactgttgtccaaataatctccctgaccattggcatggctgttgcccttggtatttcccttgtagaatgaatggaaattggtctctataggacttgcatgtcttgattcctgatttgccaattatttcacaaaaaatattccaaccagtttacaaatgttctctttatatttttgcttggtgctaaacggtgaacccagaaaagcttgtagggaggaggaaccgagagaaaatgatggatcaaacagaatggtcaggctttaacaccaaatgattccttactccctaacagagtgaactttgtacagtacatgttttttcttttcgtcgttaatactaacctatcacaagccgtttgtctttgtcaaactatgtattttgtaacatttttctttcttatgagctgtatagcagtcaaaatgctttcctcttctaaaaaaaaaaataaaagct

SEQ ID NO: 17380 - DNA, 479 bp, Glycine max
ctcgagccgaatcggctcgagttcaactcttaactcatcagtttcaagtcgcagaaatgaacggtggcgcctttgattttatcgaagaaaacggaaacgggagcgactcggactcgaattctgatgacgcgccggagtactaccagccgatctccgccgtggaagacagtgggagttcggacgacgagcacgacggtgaattcggacacctcccgaacggttttgccgcgcacggcgtggtggagaacgggatctcgtctctggatctgaacgacattacagagaagagcagcagcgacgaggaggaagaagaggaggaggagaggatcagagagttgttcgagagatcgtcgagagaagacgagaaccggcggaatgcaccacttattgttgagaacgcgaccagagttatggaagcgatgcgcggagtggccttcgccggaatggttccccgatgggctggtccagatgctgatgat

SEQ ID NO: 17381 - DNA, 522 bp, Glycine max
gaaacttgaatctgggaagccagatattttaaaaggatctttctatgccaatcccatacttgatacacctacaacagaggcttctttgatacaacggtatccacctggttccggctcaaatttatggcctagaacccctttaccagaactggaagtggctttcaaagcacttgggaagctgatatttgacattggattgatgttggcatatcactgcgatcaatatgtatccaaagggatgaaaattcacaaggatgaaggtctggaatcaatacttcgttgctcccgctgtcataaaggacgtttgctatattattttccttcacaacagggagtcccagatggcaactctttgtcttcttggtgtggatggcatactgaccacggttcactgacaggtctgacttgtggtatgtttacgagagatggtgtagaaattgcttgccctgatagtgcttgctggcctctatattcgaacaagaaataatcaaaattatcaaagttgtctattggaaaagatga

SEQ ID NO: 17382 - DNA, 468 bp, Glycine max
ctcggaaaaattaccaattggtgagtggttttgtcattcatgtctgattaagaggcagaaaattctcatggagacagttatgagagcaccaagtatccacaatgaattgggcaaatgtagatctgccccagttaaggctggattgaatcccatactgttgatgttgagagacaccaagccctatacaactggtgtgcgagttggtagaggttttcaagcagaagttcttgactggtcaggcccgataaaaagtgatgaagatgcccttcctgaaccattggaaattagtccttcagaattttataaattgctgggagaaaatacgagaaatcctactaaacttagttccattggtaattgggttaaatgtcaggagattatagatagagccaatggaactatatgtggaaagtggcgcagggctcctctttttgaagttcaaactgatgcctgggagtgcctttgtgc

SEQ ID NO: 17383 - DNA, 481 bp, Glycine max
agtattttccttgagacaagaaaacatggagacttctattttgggggatatgggtagttcagttgaaacaatattgatgcagcacaaggattttccagttgcaggcaaacttatgctaatggcaatcatgctaggcagcgagcatagtagtgacatcagaattgaagaaggaccttccccaatggaatagcgtggctaaggatcattcctaaccgtaatccaagttggtataggttttgtacaacatgaattgtggaatatgcagttggtagtgttcgctcctctcttccatgcattgcattcacaacataaccctggatgatattggtaaatggtgttggatagaagatatgcagcatgcacaaacacgcaaatattaatagagaaaggcttgttgtatgcgaatttggcacaccattccggaaaccttatttgccaaaagaaaaaggttgtgattaatatatatattttaatccaaaaa

SEQ ID NO: 17384 - DNA, 376 bp, Glycine max
ataagggttgaaataaaactgcattgtcttaattcttaggtagtaataagctacattgaaacaacaaatctagttgacgacacaacagcagcaaataaaagaatacacatgtagatactaattatgacaaatcatgaatcataaaaaatgtccaacaagatgaagatccatgtcaatttttaagtgggttcattctctccctcagatagtagagtttggcccttctcactctcttcttgtcaagcacctttatctcctttatgttaggtgaatacagagggaataaagatttaattccaaccccagccacctgcctcctaattttgaatgtagtattgagtccaacattacgccttgcaataacaatgccttttat

SEQ ID NO: 17385 - DNA, 895 bp, Glycine max
tacctcttttgttgaggatgatttttccctgtttattctgataaagaatgaggtgatgataagtttatttaaagctcttgatgattattctgttgataatagaggtgatgtaggttcttgggttcgtgaggctgcattggatggcctagaaaaatgtacatacatgctctgtaagatagacaagtcagtttgtttgtctggaagatctgatggaaatgaaattgagcctattgcacatccctcgattgatagcatgcttaagaacaaccgagagctttttttattcgatgaaaatcttgctaccaatttagttggaggaatttgtaagcaagctgtggagaagatggataaactgagagaagcagcagcaaatgttctctgcagaattttgtacaaccagatgattcatattccatatatacctttccgagaaaagttagaagaaatcattccgaaggaagctgatgcacaatggggtgttccttcctattcttatccacgctttatatcaggttcttcaatgtgcttgttatagcagagatgtgctatcaggtttagttatatctattggtgggttgcaagattctttgaagagggtatcactctccgcgctgttagagtatctagaaggggttgaatctgaagaccctagtacaagaacatctagggtatacatgctatctgctgacatcctgtgggttctccaacaatacaagaaatctgacagagttatcgtacccaccttaaagaccattgagattctgttcagcaaaaagatattccttaatatggaggctcacactccggctttttgtggtgctgttttggattctctgtcatttgaagtgaagggatcaaaagacttctctaagttgtatgctggtattgcaatact

SEQ ID NO: 17386 - DNA, 444 bp, Glycine max
atataaaagcgcgtccgaagctaataagcttacagccagttgacatgttcccacacacccctcatattgagtgtgtttgccttctggagcttcagtaatctgtgatcaattaaaacgttccatttcaaggggattacaagcttaatacaagatgcaactcaaggttgggtcttcaaggtgattgataggaaaactcatacttttatgctgcaaagtgtgcctaatgctttgcctacccaaaactactgcatcagtgtacaaatacaaaatcattatgaatggtggtaacattggcaagcatgcagggatcacatcgttgcaaccttgtaaaagtttctcatacatttccatttatgcagagcccaaaaggttttggatttatgcagagcccaaaagaattcagcgtgcatataaatagatcctcgagccgattcggctcgatac

SEQ ID NO: 17387 - DNA, 721 bp, Glycine max
ggcatacgataggtacaagtgcttgccgatctttcgcagacagaatatacaaccccaatggcactgatccttccatcgacccttcatttcttccatttccccgacaacttttcccacaaacacaaccaacgaagcgagtcgcactagacacaggaagccaattcaaattcgacacgtcctacttcgctcacctagttagaggccgtggaattctccgttctgatcaggttctttggactgatgcttccacaagaggctttgttcagaaatacttagccacaggtcccttcaaggtccaattcggaaagtctatgatcaagatgagcaacattggtgtcaagaccggttctcagggtgaaattcgcaagatatgttctgctattaattaattaaggcaaatattaatcagtatccttataatattgattaaggaattaaaaaaatatttaaaattatattaatcatcacttaaggatactggttaataagactaattaattaattgcatacttttctgagaggtgccaagattaaacttctatacacctccttaattaaatctatgccagaaaaactttgctttataagtgaataaagcaataattaaaaatattgtggacaatgatataaaaagaaataaaaatcatttaagatctgttaatcgcagaattcgactatgaccgcagaaaagcttgtgaaataaaattattatatttttgtt

SEQ ID NO: 17388 - DNA, 437 bp, Glycine max
tcgttgagacttgcacagagaaaagaaacaagaggaaactagctggggtaaagagattgagtggtaacacaaaaggggaaaggaacgtgaaaggagccgtgagaggtatagaagggatgcagaaaaagataggagcagggaatgggaggaggatgggcacaggagacaagaaaaggaaagagataggagctgggatacagtgtttgagagggataggagaagggaaaaggaaagagatagaagtagggacagaacaataggtggcaagagagatagagacccggagaatgaaagggatgataagaatcgggaaaggcgagatgatagatatgggcacaaagatagagacactgcaaatggtaaggataggcatctgcgtcatgaggatggtaatgacaacggagatagatatagaaaacattcaaggcatgaagaaa

SEQ ID NO: 17389 - DNA, 903 bp, Glycine max
agaatgtgctaggctcaaggggtcctaggagaatgcattgtgtcatggattccattcctgccactgcaattgaacctggaggtgtagcacctacacagactgagttttctcttaacaacatagacatgtttccttcattccccttttttcgatcaaaatcaaatcgtgcggaaaattccatgtctggaccattggttgatcaaaaggatgggatgctagtgttgaaaaacaaggcccctaggtggcatgagcagctgcaatgttggtgcctgaactttcatggacgggtgacaattgcctcagttaaaaactttcagctggtggcttctgcagaaaacagacctgctggaccagaacatgataagatcatcctccaatttggaaaagttgggaaggatttgtttacaatggattaccggttccctatctcagcatttcaggcatttgcaatctgcctcagcagttttgataccaagattgcttgtgaatgacatgtttaaacagtttcaatccagattatataggtatgtctcttgctgccgggagaagtatggtttgaaggtcacttgttgggaagcagacagatgaaaaatgtttgtcagggtaaagattggttggatgggtgttgaactaaaatcaaaaggagcattcagtttctgggatcacaattcaccagctcttgggaatgttacttggaacttctccaccatcaccccacaaagcaaagcacaaaaacgggaaaaatacatttattcagacccccttgtacataaattctccattttttttctttcaacaatttggttgtttattgtaatatagaaatggttgtttaaaacatgtccccgctagacatgttttgttaatgagactactagctttcaacttatcctttcatgaaaa

SEQ ID NO: 17390 - DNA, 631 bp, Glycine max
atcacttctatataatagaagataataaactcaccttctcgtcctccttcaagctttatttacaaaagcaatatggaaacggagtcactattgcctaagccaacttatggtggcataaagaggtacttgagaaggaggcgctaccaacgcctcgacggcgatggcggtgccaccgctaccaccggtggaaagaaaacaaagatgattaggtcaagaagaagaagcccacgtaggcaatggaggatcaaggcaattccaaaattgacatggatggttaggtcacccttgaagatgatggcaaagctaaaaaatgcttacacaaacttcatgttgaattccatgagcacggacaacatatttggtaccaaaaggattccaaaggctgatcctcatcaagtgtctaagtattataccggtgatgcgtttgaggccaggctcatttttgagatttcaaaggccttggttgcgtctcatgaactatatcctgtacattaattattggttctacttcttttttttttttttggatttctcgaattttcctttcgaaatttcccgtgtgattccgcagaaaatgttgaagaatcacccagaaattgtaatttatttcttgttaaacgcatacgctttc

SEQ ID NO: 17391 - DNA, 421 bp, Glycine max
ttaggaagcgcctttcctaagaagttgggaggaagaagagagtgagagtgagagagatggaggttggatttttgggtttggggataatgggcaaggctatggcaatcaatcttctacgccatggcttcaaagtcactgtttggaacagaaccctctccaagtgtgacgaactcgtgcaacatggtgcttcagttggagaaaccccagcaactgtagtcaagaaatgcaagtatacaattgcaatgttatctgatccttcggctgctttatcggttgtgtttgataatgatggtgttcttgagcatattaatggaaaaggttatattgacatgtcaacagttgatgctgatacatcttccaaaatatctgagactatcaaagcaaaaggtggttacttcctttgaactccttgtttcggtag

SEQ ID NO: 17392 - DNA, 515 bp, Glycine max
  unsure (1)..(515): unsure at all n locations
tacagcttgcttacacaaaaagccacctctgacctctctttcttcctttcagtgcanaagctcccctgcatgaccgtacaatctagtatggttagtaatctacaatgcttcttgtcttaaagccaaagcattaagttaatgtcttttcattagaccaaatgggtaaggcttccaaatggtttcgcggccttctcggtctcaaaagaccagactcgccgtctcccaaagaaaaacgccgctggaccttcgtcaagtcctacagagaaaaggaccccacccacatcgtagccgccaccccccgccgctgccctgccaccaccgccggaggcaatactcctgaagaatgggctgccgtcaagattcaagccgcctttcgaggctctttggttcgttttcttaatattatcatccaaaatacattactttaacataatcaatggcatgacttgagtaggatggactctagttgaagattaaaaaataagaataaaaatatctctgttgcaatttacata

SEQ ID NO: 17393 - DNA, 636 bp, Glycine max
tgaacttgtgtacatgaactagctgacaaggccagggatgtgacagaactcaagatggagaggcagaaaaagaagctggcagatagcagagctggagaaaattgtgaggctgaaaaatgcagaggctgatatgttccaattgaaggctgatgaggctaaacgagaggccgagaggcttcagatgattgctcttgccaagcaagataaatcagaggaagaatttactagcaactacttgaaacaacgattaaacgaggctgaggccgagaagcagtacctttatgaaaagatcaaattgcaggagagttctcgcgcttcgcagggcagtagtggtggtgacccctctcagatgctgatgtattccaaaattcacgatctgctttacagtgttccttccaaagcagacagtcagggtaatgagcgccacccttttcggacaaatccctgagagtccattgtgtttgtaatgccaattatgttagctgttgtagctaagtcacctttgaacaatttaggatgagccacttttatggcaatgtaatcaccatcttcatcaattttatctgcgttttgatattggaaaaagcttcaatatatgtttggaactctaaccattattaatatgcttttgtaagg

SEQ ID NO: 17394 - DNA, 500 bp, Glycine max
aaagacattttgatttttttagggtcaatgggaccccaagaaggaaatacgggtctcacatttatttttaaaattcgttaaaaaaaaaaacaacaaaaaaatcacattcaagcgtacctactatactactgtacctaactactactcatgccggctttggtctgcacgtgtggtgactattatctgttcttgggattgttgaatttgactgccattgatcactaggaaaaaatgagatcataggtacctaaaaataagaaaaatgatctcaactgggtgaagaatgaagatccattagctatgttaggaattgtgtcgacatgtaaggactaaggacccctagtagaaaattcttgtttcattgctattgtagtaggatttttttgtatgtctgtgaaatattatattatattatattatatatatatatatatatatttttttttaattttcaaagtaagcagcaattgaaatgaaaatgtaagggtttcatttttgtg

SEQ ID NO: 17395 - DNA, 530 bp, Glycine max
gttttcagcaacgaaggaaagcagtaccgggtacctcctaattatcctgctcgcatccgtccatctgatgttattcagtttggttctgagaaggtttcgttccgtgttaaggtgacaagctctgttccaagagtctcagaaaatgaaagccccctagctttgcagggagtatgactgattctgctcaattgcaatttgtaagttatggaaaaattatacagcacaaatttgctattgtatagtactatctgcattgttttagggtggggtattataccccagtctagtcatttaagatctgatatgttacatgcctatatggacatttaagagggactcttgggtataaatttgttactccactccaatactttttgtgtatgacatttgtaatttgttagagttagatttataacatgacacacataaacttgcacgtgattaatgttgaatggagtaagcaatgccaagctatgaatttttgcacttttaattgtgatttacagaatccccctgtatagtttatcatt

SEQ ID NO: 17396 - DNA, 266 bp, Glycine max
cggctcgagtgttattcagtttggttctgagaaggtgagatgagaggtcctaaaaagcagttgcagtatactcatgttacacatttgcatcttctaggacttatattaggtatatgaggtttcgttccgtgttaaggtgacaagctctgttccaagagtctcagaaaatgaacgcacactagctttgcagggagtatgactgattctgctcaattgcaatttgtaagttgtgggaaaattatacagcacaaatttgctattgtata

SEQ ID NO: 17397 - DNA, 961 bp, Glycine max
cgtgaatgtcctgctccttcccctttgtgcgcacacttcagatggaccgccacttctgccgccctccataagctccatcgcgcctcttttcctctccgtctccgacctccgatcctccctcgccgagacatcctccgacggtggcagaatcgtaattttccgcggcaccgtcgacacacctcgaaaaccttgagacccggtgtcttggtttctcgcaagtccagcgataacagcgtcgttcttcaaagaactcaaacgtgtttgtccactgttttctgcttcctatttggcagagtttttatctgatctctggagaaatatggctgccaatttctggacatcatctcattacaagcatcttctggatcaggaagatgtggatgtggtgaatacactcgacaaggaaaagggtattacactggaggattttaagcttattaagatgcacatggctaattatattttgaaattggctcaacaagtaaaagtgaggcagagggttgtggccacagcagttacatacatgaggcgtgtttacaccaggaagagtatggctgaatatgatccacgcttggtagctccaacatgcttgtacctggcatcaaaagcagaagaaagcacagtgcaggctcggcttcttgtattttacattaaaaaattatacagtgatgacaagtatagatatgaaatcaaggacatacttgaaatggaaatgaagattttagaagctcttaattattacctggttgtataccatccataccgttcactatctccgttgcttcaggatgcaggtctgaatgatctaaacatgactcaactaacttgggggcttgtagatgacacatacaagatggacctaattcttgtacatcctccgcatttgattgctttagcttgcatatacattgctagtgtgctcagggagaaagacagcactgcttcgtttgaagaactcgtg

SEQ ID NO: 17398 - DNA, 354 bp, Glycine max
acctcgagcgaatcggctcagattcaccgccacttctgccgccctccataagctccgtccccgccccttttcctctcagcctccgatctctgatccctccgatggtggcagcatcgtaattttccgcggcaccgtcgacggcacctcgaaaaccttgagacccagtgtcttggtttctcgcaagtccagcgataaaggcgtcgttcttcaaagaactcaatcgctgcacggtgtttgtccactgttttctgcttcctatttgcctgagtttatctgatctctgaagaaacatggctgccaatttctggacatcatctcattacaagcatcttctggatcaggaagatgtggata

SEQ ID NO: 17399 - DNA, 824 bp, Glycine max
accaataatcaaataggtctcaaatagaatttattatacaaatttacaaggataaatgtaactgggtagaaaaacatgcatctctcaaaacaaaacactattcatactttgtgcattggttatgaattatcataaaattgttaaactagacactctttctactgagtcctgactagtaaaaatctacaaattccttattcctatgtccattttacacacatcattcgcttcaacaattttttgtgttgcccaaaattggtccaaaacatataattgtaaatgcaaaacaattaatctggtatcatcctatcttccggacataagattcacaagattttgattttcgtagaaggaaccaacatcccaatcgtcggtagttgaagaaagtgtcataagagcaaccacaatagatctcatacttggacggagttggggattgtcttgtgtacatgctttggctagttgtgccatcttgcgaactgaatcaattgggtagttatccccaagccttggatcaactagtttgcagagctcttccgtaggatctggctgactaagaactccatcaaacaaagctacgaggccctttgagtcggcaacagaatcgttcgtcttgacaattgcttccttagccgaaataagttcataaagaacaactccaaaagcatacacgtctactttgggagaaacatctccatattgagcatactccggtggcatgtatccaaatgttccaacaagacgaccagtgggaagcgatgagcttccaacttctgtcagtttggtcaaaccaaaatcagcaaccttgccccggaagttctcgt

SEQ ID NO: 17400 - DNA, 435 bp, Glycine max
gaattaaaaaaggacccacgcgtgcgcccacgcgtccgcccacgcgtccggaagaaaggaatataccttacggatggtggaatcaagaagcatttgggattgcatagtgcgggtggtgacgaagatggaagacaaagagagtgagagagagaaaaatcttcgctttatgtcaatggcacgaagcaggggtttttacagaagtgagcaacgacgccagatatgagaaaagtgagtttatttggggtcatatttgtaaaaagtggttttgtaattataccctctaattcaagagtgaagaaacaagggtgggatggaaatataaatagtacaatttggtcctagtggtggcttaccctttggcctctttttctaattcagaattttttttaaatatataaaagtggggtgatatgtttacttaaaaaaagggcggtc

SEQ ID NO: 17401 - DNA, 683 bp, Glycine max
cccacgcgtccgcggacgcgtgggcggacgcttgggcttctcctgaatctgcatcgggggggtcctatatgaactttaagaaaatggaagttacaggtggctaagtcttggcaacttctatggcctactctggtatccgggcaatgtgtgagggaggatacaacttaggcagtttaagaaacagttggcagaaaaccagcaagaagaatcactgtgggagcagaacaactgttatggaatttgaatcagactggacaaagcatagaaaatcatctgctcatactgctcaagtgatccgttctgcaacatcgttcatgccttggtcttgtagaatcccaattggtgaaggattttatgaatttctgtagttatatgcttctcaacaaaagttctttacatcctcataattgttggtttaaaaaatgcctggttttactgttggaaagaagagatttatccagccaaatatgtgtttcaccaatttgatccatcaagataaatcaactctttcacaaagcaatcattgcttattccctgaggcactgaataaagattatagccccattctacctgtgctgcctgatgatgtggctgagtattgtcttgcactcgtgcctcgttacaacctccctgctatgggtgtcgtgtgtcgagcatggacgtcgtttatccaaagcaacgaa

SEQ ID NO: 17402 - DNA, 350 bp, Glycine max
gagtgtctttctctcctacagttttggtcctaatcctataagtatcctttgcttctttttcttctatccattctcttctccacacacttcacaacactccgccgcctgaatctgcatctcctttctcctctatgaacttgaagaacatggtagttacaggtggctcagtcttggcaacttctatggcctactctggtatccgggcaatgtgtgagggaggatacaacttaggcagtttaagaaacaattggcagaaaaccagtaagaagaatcactgcgggagcagaacaactgttatggaatttgaatcagactggacaaagcatagaacatcatctgcccatactgct

SEQ ID NO: 17403 - DNA, 230 bp, Glycine max
cattctcttctccacacgcttcacaacttctcttcttctgaatctgcatctgcatcttctttctattgaactttttctctccctttaaattggtataacttaaatatccttgaagaaaatggaagttacaggtggctaagtcttggcaacgtctatggcctactctggtatctgggcaacgtgtgagggaggatacaacttaggcagtttaagaaacagtttgcagaaaa

SEQ ID NO: 17404 - DNA, 461 bp, Glycine max
agtcgcaacagagtaatatgcaaaagctcagggacggaacccaagagcaagttctggagactgatcatatcattatctgtgggatgaatagtcatcttcccttcatattaaagcagttaaataagtatcaggaatttgctgttctcttaggcacagctacagctaggtaaatggttcagacaaggaggcagagaatccttcttatgtctgatcttccaagaaaacagattgatagagtagcagacaatattgcaaaagatttaaatcatattgatgtccttacaaagaggtatcaatgctggttgcagccttaatatgaccaaatcatttgaaagagcagcagctaacagggcacgtgcaataattatactgccaacaaaaggagatcggtatgaagttgacacagatgcatttctttctggtttagcccttcaaccaattccaaacatggattctgtccc

SEQ ID NO: 17405 - DNA, 694 bp, Glycine max
acccactcgtccgatcctttcgcccacgcgtccgcccagcgtccgaattcctcaaccacacttgccatatcaaagaaaagagcatcaacatcagatcaaagatacaacatggaggcacttcaatcatgggtttcaaagcacaagctcgccagcattggggcactctgggcctctggaattggagcaacacttgtggcttattcatgcaaaaagtctccaatgaagccaagtctcaggcttatccatgctaggatgcatgctcaggctctaactttagcagtgctatccggtgcagctgcttatcattattatgagaaacgtgatgttcagccaaaaccagaggcagattatattattcctgctcccaatgtcacccagatggttgaatatgaacttcaatgtcctttctaaaaattaaaaataaaactgtaggggtcatgttattaagattaggagatattcctatcatcgatcctgtcaccgagttagcttttgcctagaaagaatattgtttgtgtattttatgaatgattggactccagaacaagtgggaatagctattgctatgcaatgttgcaatgcatctctatcaatgttcatagaggtgcactatcttaattttctaatgtatacatacaagttttatgacaagtttcagcttgaattgcattgtttttctaataaagtttattgg

SEQ ID NO: 17406 - DNA, 496 bp, Glycine max
ggaaaaaccgggccgaccgcacgcgtccgcccacgcgtccgctcgagaatatgacccgtcctaaaatttacgaaacataattatttattatttatgatatataatgagaggaacataaacgaacaatcagatgctgctagtcatttggataataaacaacattaggatttaggcatatcacatgatcgctttacttataatttagggatatcagctcaataccacatgattcaagtaatattaccaaaatcaaagccttatcctacaagatgcggtcagctacatgggtcatgacgtcattcggcaagtttagaaaccaaagtgtagcaaacgggaaaaaagtacacttctccttacagaggtatcccatatgacacaataactctgaaatagtatagtataccatagtcttaatcagcggaatatacaatttcttacatgacaaaaggacagccactgatcccagacaatattggcaagtaaaataaaggggaca

SEQ ID NO: 17407 - DNA, 910 bp, Glycine max
  unsure (1)..(910): unsure at all n locations
gcgtgtgggcatactaaaaacccagatgggtcagttcaattcacagcaggcaagactaaagttggtgatgctattgatggtgcaattaagataataactgttgcggtcaccatcgtagtggttgcagtaccagaggggctcccattagctgttactttaactctggcctactcgatgagaaagatgatggcagataaagccttggtaaggaggctttctgcctgcgagaccatgggctctgccacaaccatatgcagtgataagactggcacattgaccatgaatcagatgactgtggttgaggcttacgcggggggtaagaaaattgatcctcctcacaagttggagtcctatcctatgcttcgctctctgctcattgaaggtgttgcacagaacactaatggcagtgtttatgcacctgaaggtgccaatgatgtcgaggtttctggatcaccaacagaaatggcaattttacaatggggaatacagattgggatgaattttacggcagctcgatctgaatcatcaattattcatgttttcccattcaattcagagaaaaaaagaggcggagttgcaattcaaacggctgactctaacatccatatacactggaaaggtgctgctgagatagtcctagcctgctgtacaggctatgttgatgtgaatgaccagctggttgggatggatgaggagaagatgacatttttcaaaaaagctattgaagacatggctgctgatagtctacgttgtgttgccattgcatatagatcatatgaaaaggagaaagttccaactaatgaagaactactctcacaatggtctttaccagaggatgatcttattttgctagctattgttggtcttaaggatccctgtcgacctggagtcaaacatgctgnggaactct

SEQ ID NO: 17408 - DNA, 480 bp, Glycine max
ggccattgtgttgtctattattcacctttttctcatggactatggtgcatcggagattctagaagacgtgccggggaatagtgcatatcttactgggttgagcatcattgggggaatgacattgttcccatctgctctggagggagcaattatggggccattaataactacagttatgattgcactgaaggatttgtatgctgaatttgttttgcaagaacctaaggacaagtccaagcagaaagccagctagctaagcttctactacctgtgtctataaaaactatttatttgcagttgaagtttggtgtaaccgcatgctctttgccattgttgaagtttgcctttagatttttgagttgcgcatatagttatacaatttcatttttatctgtatcattagattattaccattgaaaaaaataggacccactttttacgtcattttattcattttattaggtgtcatcaaatattttc

SEQ ID NO: 17409 - DNA, 504 bp, Glycine max
  unsure (1)..(504): unsure at all n locations
gaaaccccgccgacgacccacgcgtccggtttggtgtaactgcatgctctttgccattgttgatggagtttgcctttagatttttgaggtgcccatatagttatacaatttcattttagggtcttgttgactagtgttcctagactattggttaaggaactaaaaggagaagtttttaatatgtaaatcataggaaagtataaaaaaaaatcatgaagaacgcaattttatgccttccaataaaaaaccttagttccttaacccgtgtcctcgggacacttgttagcatttgccttcattttatatgtatcattagattattataattgaaaaaaatagggcctactttttgacgtcattttattcattttattaggggtcatcaaatactttcacttggtggcagtgtttgtcaaaattgtacacaatttgtattttgttcctccaacaaattttcttattctttgtaccaaaagagaagagactcatgcaagctttcagang

SEQ ID NO: 17410 - DNA, 656 bp, Glycine max
agacgacagaagggggggatgggacatagccgaagtgctgaacggaaaaaaaaaaaacagaaaactactcacacccacgacactgaaacgacaatgcgtttaagctttggaaatgcagaagaataagaagatgcgactctgctacttcttctacctctaccgtgttactgttagggcttactgagttgcaagattcacttcaaattatgcgtttcgctgatcggttcctcatcacatcaaacgacgtcgcagatcatcgcaattccttgattatttccttttgttgatacgcggaatcgcgcacacggtgctggtgtgtgcactgaggtagaaagaagaagattgaattgtaaacagcatgaattaccttcttggagctttcaagcctgcatgtaatgtcttgatcacgtttaatgatgggaagaaccggaagcaggttccgtttaaaaaagaaaatggtcaaatggtcacagtcccacttttccaaagtcaagaaaacattggtgggaagattacaatagaaccaatgcaagggaagaagattgatcacaatggtgtaaaagttgagctccttggacagatagagatgtattttgacagaggaaatttttatgaccttactttccttgtacgagaactagacgttcctggagaaa

SEQ ID NO: 17411 - DNA, 487 bp, Glycine max
ggattgagaaggaatgagaatggggggaggtttttgtctgatgatgttggtaggtctagcaatcgagggcgagggcaagggcaatcttctcgaacaattatgggaggaatggagcggatggtgatggcagaatgaggaagaatgggaatgggagaaggtttttgtccaataatgttgatcggtctagcggtggagaacagtcttctcctttgaattatgggggggatggaatgaatggtgatggtagattgaggaggaatgggaatgggaggagggttttgtctgatgaggatagtaaccattccggtaagaaacaaaagggtccaatggtcacattcccactattccaaagacaagaaaacattggtgggaagattacaatataaccaatgccggggaagaagaatgatcacaatggtgtaaaagttgagctccttggacagataaagatgtaatttgacagaggaaattttatgactttactttc

SEQ ID NO: 17412 - DNA, 368 bp, Glycine max
cttttgcgttctcccacgcgttcgcccacgcgtacgcgctgatcggcttctcatcaaatcaaacgacgccgcacccccttgattatttccttctgttgatccgcggaatttctgcacacggtgttggtgcgagctctgaggtacaaagaagaagcctgtattgggagcagcatgaatcaccttcttggagctctcaagcctgcatggaatgtcgcgatcacgcctaacgacgggaagaaccggaagcaggtcccgtgcaaaaaagaaaatgggacaatggtcacagtcctactgttgggggggggggaaaacatttggtggaaaaatacaatataacccatgcgagggaagaagattgatcaacacgg

SEQ ID NO: 17413 - DNA, 538 bp, Glycine max
aatcccggcccggaggccacgcgtacgcggacgcgtggggtttcctagtatgcaaggtaaagaatcagcaaatttcaaccccggatccagcgagtaacatgttgacaaaagtctaccgagttgcattttgttcttgtaacctcctcaacccactggaggtcgtgatctgtaaattttgagtgaattatacaacaaattcttgaaaaagaaatgattttctcttctgagctgctgcttattgatcgatgaatccagctgcaattattttcgaagatggcaataaaatctcttctgcggtgttatctctttgactgaattccaaattttgtaagtataatagttggctatgaaagagactgtaccaagaagcatagtgtgagagtcagagatcagttgttaagtatgagatgtgagaacatttgttgaatgtatattgctaaatagaagtgcaaaagatgattatagattcataattgatttatttttaagtgcttcaacttcaaatcactcatgaacattatatttgctcagtagtgaa

SEQ ID NO: 17414 - DNA, 790 bp, Glycine max
ggagaaagaagaattgataaaagccttgacatctgaatcatctgagtgttccaggatgaaggaaataaacaaggagttgtcctgaaagcttgaggtccagacacaaagattagagcttttgactgctcaaagcatggtcaatgaaaatgtttctgcaaagcaaccagattctcgtgctatgtatgagaacaccccatatgcagatgagggtgatgaggtcgtggaaagggtgttaggatggattatgaagctctttcctggtggaccttcaagacggagaaccagcaaacttctttgattggatttacattagacttttgtatttgttgtcaccaaagtcttactcaactgttaggatggatcatgaagctgttccccagtatgcctccaaggtcaagaatcagcaacatttcaacccccggatccacgagtaacatgtcgacaaaagtctaccgagttgctttttgttcttgtaacctcctcaacccactggaggtcgtgatctgtaaattttgagtgaattatacaacaaattcttgaaaaagaaatggctttctcttctgagctgctgctcattgatcggtgaatccggctgcaattattttcgaagatggcaataaaatctcttctgcggtgttatctctttgactgaattccaaattttgtaagtataatagttggctatgaaagagactgtaccaagaagcatagtgtgagagtcagagatttttcccaaaaagggttttttttgggggttttttttaaaaaagtatgagatgtgagaacattt

SEQ ID NO: 17415 - DNA, 493 bp, Glycine max
gttcgagcgacgcgtccgaaacacccttgtcgaccacaccaaaattaaaaacataaaaaagcataaaagcacaaaaagacataaaaaagggaaaataaaacattttgaagtcatatttgcacacttgattaaaggctgtcgtcccttgtgacggatgcgtggggtgctaataccttccctgtgcgtaaaaacaactcccgaactattcacacttaaagttcgtagaccacaccttttcaattttcccgacgctttcctcaaataaaagttggtggcgactccgcgcattttcctttcatggaagacgcacttgtgagtcccgcatcgccctcccgtcaaagggtaggttgcgacagtacttgccctcccgccgaagggtaggttccttaattgaattaactaataacaaaagtgaaactaaggctaaaataaactcacaaatcaagctttgtccataaaaatcacttaaaaaccattttgaggtccaacgcct

SEQ ID NO: 17416 - DNA, 464 bp, Glycine max
aaaaaatagcccaaaaagtgaaatgaatgttgggataattggtttatatggatcgttcctggtcgagaccaaatatcaaaatgacattgccataaatagataaaatagtatttccatttatttatcaaaagaggagtattctttgaaaccaaaatggattttccttgatatctaacataatgcatgaaagtatccttaaagaatgataaggtatatgaacaatccttaacagatacttctacaagatgttctatttttttgatagaaaaaaattcgctcaaaaaaaacgcgaaaatattttaatcgtaacttagaggatttgttacgtagaaaaagaaagatagattcatattcccatacatataaattatataggaacaaaaaaaatcttggattactttttgaaaaaaaagtagaaatccatttttttggagtaaaaatactattccaattataataataag

SEQ ID NO: 17417 - DNA, 506 bp, Glycine max
cggacgcgtgggcggacgcgtgggcactactgccgcagaagagaccgaaacgccgtcttaggcatctccgaacaccgaatatggaagaaagaggaaaccaacacaaacacgaacaagaagaagaagaagaaatcgtttgcttagacgcgtcgttcttcgtcgatgacaattaccagctgacgaaattcacgttcggttcgcaagacattcagctcttctgtctgcattctgcttccactgattttgatttgacagggcagctggtttggcctggagccatgttgctgaatgagtatctttcaaaaaatgttaacctgcttcagggttgcactgccattgaattaggttctggtgttggtattaccggaatactttgcagcagattctgccataaagttgtgatgacagatcataatgaagaagtgatcaagatcttaaagaaaaacatagagctgcattcatgtcctgagaatattacttctatttctcatggattagtagcagag

SEQ ID NO: 17418 - DNA, 449 bp, Glycine max
cggactgagggtggcgcgatcaaacggcagccgcgggagcgtggcgtgccggagcgcgtgcgaggccttcggggatcctcgtttttgctgcagtgaggcgtactcgacgcctgacacgtgtggccgcttctccttattcgctgttcttcaagcacgcttgcccacgcgcgtatagctacgcgtacgatgacaagaccagcacctacacatgtgccaacgctaactatttgatcattttctgccccttcccctataccagccaaaaactgttgggagtacgaaaagatggggcacagcttcctctggtaaataaaactatgatgtacttatcaaggctacaatcaggtggttcttcaccatcagggtagacacttacaccaaaaatagctgcttcttagtataaccgtgtaagcttttcatgctgtctccctttgatcttactattttac

SEQ ID NO: 17419 - DNA, 1529 bp, Glycine max
  unsure (1)..(1529): unsure at all n locations
attgcagtgatcccaaaggggagaggaatggagttgggaaggaggatgagcaggaggtgagaaagaatgtgctgcagaagcttgatgcctgctttggtgggtctgtgtcgaaagaggctaattatgcgagattggacagggtttcggatttgctcatgttttacttatcctcaatgtgttatatatttggttttgattcgccatgtggccctggcagttcgttcaagtctggtaaattgatttgggcttccgatgctgctggttgtttaaaccaattagaatctagatcgtttatggggaaattggctggtcttcaaactgttgttttcgttcctctgaagtctggagtggtggagcttggttcgtttgaaatggtgcctgaagagcagggtgttgtggaaatggtcaggacagcatttggggaatccagtcctggacaggcaaaggtgtttccaaagatttttgggcatgagttaagcctgggggatacaaaatctcagtctataactattagtttctccccaaaggtggaagatgatccgggtttcacttcagactcctatgaagttcaagcactaggggtgaaccatgcttatggaaattcttccaatgggactttaggtgacggtaatgaaggaacattgtttcctcaattgaatcaaatgatggctgggaattttaatgctcaagcaagggttccttgtctagatctcggtaatgaagactcatcatcaattcatgcagatgagcggaagcccaaaaaaagaggtaggaaacctgccaatgggagagaggagccgctgaaccatgttgaagctgagagacaaagacgtgagaagcttaatcagaggttttatgccttgagagctgttgtccctaatatatctaaaatggacaaggcatctttgcttggtgatgccattacctttatcactgatctgcagatgaagatcaaggtgttggaagctgagaagaacatgggccacaatcaggaccaaaaattgtcattgccagatatggattttcaggaaagagaggatgacacagttgtgacagtgagatgccccttagatattcaccctgtttcgaatgttgttaaaacgttcagggagcatcaaattgtggctcaagactctaatgtttcaactgcagatgataaaataattcatacattctccataagaactgagggaggggaggctgctgctatacagttgaaagaaaagcttgaagcatccctatccaaaagttgattgtcagatcatatttatgtgtagcatctcaatgatattgtaaaccatgttagaaatactctgtcttgtaggttaagtggctaacataatattgttcttagtgcactttgtttttacagtagtgtactttgttagttgtaatctgttttaaaatatgttcaggtcatcgtaaatgaccttaattatgtacttaagttgattaataattgaatttgatgttgatgggccaaaaaaaaaaaaaaaaaannnnnnnnnnagcggccgctctagaggatc

SEQ ID NO: 17420 - DNA, 571 bp, Glycine max
tccgcccactcgtccgtacacatatgcattctttctctcactccattccatttccgggatttgcatttggcatacatacacttacctctctggtctctagctatagcacaagatatgggtagcagttattttggagaacctaactttggaaatgaaagagcaagttgttcttcttcgtcaagaaaagggaagaagagccacaactcagacaagccaaagcaaccacagagaggtcttggagttgctcaattggagaaaatcagattacatggctatcacccttctctgcacgctccttacccttctaatttttccaacgaagatccaagagtgcaaatagcatattcatcggtgccatcatcttctttttcttactcatcatcatacgcagcttcctatggattccaacccaacatcatgatgggcctatccgaatatcaaaaaacaaacatcagatatggagattctcagccaactaatacagcaagatgggaaactaccagcgtcatcttggagagccagtattctgctccatccaacatagctcgaccctttctaaacctaaatgaca

SEQ ID NO: 17421 - DNA, 587 bp, Glycine max
ggcaccggtgaaatcagttatagtcttcttgtgagacaggaggggcacaaacggattatggggtcatgttcttggaatccacatggtcacgaatttgcgacaggttcaagggataagacagtgaaaatctgggccatagagagggagtctgtcaagcagcttatgtctttacctcaatttacgagtagtgtaacagcattatcttgggttggtctccatcatcggaagaataatggacttctagctgttggaatggaaaatggccaaatagagttgtggaatctgtcttataacagagcagatgatgggagcatagcagcaccaggtttggctgcttctcttgctgtacgtatagatccttttatatgccatgcgtctaccgtaaaccgtctagcatggaagaaaaatgaggatgatcaaacgagtatgcaacttgcttcatgtggagctgatagatgtgtaagagtgtttgatgtatctgttgagtaattattgtacccctttttttagttatatctgtagaatgatttatattatcctcatagctatggctaagaaaatttgtccctgcttgcattgttcttctc

SEQ ID NO: 17422 - DNA, 745 bp, Glycine max
ggatcaccgtcgatggcgtgcaggggctctgggtgccagtccggtggctgctacaaagacgaagacgcaacatgtaagcaaccacccaagtccgaagaagccgattcaaaaaaccctagcaatgtctgcatcaagtgcaagctcaacgacgccgtttcgggctacggcggaatcgacgatggtcgtttctgcgccgattgcttcaaaaccaacttgttcggcacgtttcgtttcgccgtcacttcaaatgccatgataactcccacggacaaggtcctcgttgccttctctggtggcccttcatccagggtagctttgcaatttgttcatgacatgcaccggagggctcagaggaacttcgatgcgagtagggaccggtcgttgccggtgtttggtgttggagttgtgtttattgatgagagtgccgtgttgccgattccttctaatgaaatggaggaagcggttgaggttgttagtgaggttgtgtcgagtttggccccaccaaggaaggagttgcatattgttcctattgagaccgtttattcctcggattctggtgatgggaaggagaggataaccaaggtagtgaacacagtgattgatccaacgggaagggaggatgtattgctctgtctgcgaatgttggcgctacaaaaggttgcttctgaatttgggtataacaggatcattctggggtcatgcatttcgaggattgcttgccatgtcatttcagccactgtgaagg

SEQ ID NO: 17423 - DNA, 745 bp, Glycine max
cactgctggaattgatcactttagtgaattgagtcaggttaggcctcaaaatggcataacatccatatctcctaaaaatgtgagctctcctctgtccttgtcacctcttggtcgtaaattctcggaaagaataaaaactgctggaggatgtagggatgttgttgaagagataaagaattgcaatataacttcaaggagtatagaacaatcacttgacaattccaattcacgtctcatgttaaattataaggatgatgattccagagttgcacgcaaatcttttgatgatgttgaattcttatgcaaagatttctgtccatcttctctggatgatattgccgagatgagttggccactatgtcaagaatcagctcccacttctcactccatgagattcactagaagtttgagtgggctttcggtcaggaggtctttagttggttcatttgaggagtctcttttatctggccggttcttatctggaaacaatagcaagaaaatcgatggttttcttgctgtgctaagcattactggtgggaacttttctcctaaatctcagaagcttccattctctgttactagcgtggatggagattgctatctactgtattatgcatcaatagatcttgctggaaattcctcttcaaacaagttaagaggccaattgctgaaacgagggtttggaaaagatgattcccaaattgtaaaaagccgtctgcgtataccaatgaagggacggattcaa

SEQ ID NO: 17424 - DNA, 473 bp, Glycine max
cggcccaggcgtgcgcccacgcgtccgcccacgcgtccgcccacgcgtccgcggacgcgtgggcttcaacttggatgaccaccctaactaccctgattctgatcagattccttactttgaggatggtgattctgtgacatacaataatgagaaggaggggatcattgagtgcttgaaaaggaatgtgggtggtgatttagatagtgaggtttcttctctccctgattggataccaaccaaagtgatggccaccacttggcttgctgatgcacttgagtatgaactgtgggtgggatgtgatggttcctctgcttatagcatctattattctgatcttccctggcctatcggcaaggttctcttttggaagaaagcttattgggtaaagcagaaacatgggataagtgaagagaatgtagaagtaaaggaagaagagatttatgggagagcaaactctgcatatgatgctcttg

SEQ ID NO: 17425 - DNA, 312 bp, Glycine max
ccttcccctttcagcattcagttttgagttcacccatcacagttttcttcttcttcttcttcttgtgcatggcaactgaaccgagtgagagcacacaaaggaacacccttgtcgttagaaagccatgttttggcctcccaacaggttgccctcaatgcctctctgcttacatttttctcaagctctctcaagttcccttcaacttggattaccaccctaactaccctgattctgatcagattccttactttgaggatggtgattctgtgacatacaataatgagaaggaggggatcattgagtgcttgaaaa

SEQ ID NO: 17426 - DNA, 820 bp, Glycine max
tctgaccatggggttttcgactttttgacaaggcagtcttctatagctcatcatccttatcagaaccagttgttctagagtttccagaactgaaaggtcatgctcgtcgtgattattggctagctatcatccaagagattctatatgttcacaaattcataagcaagtattaacttaaaggggttgcacgggatgaagcgctttggaaggctgttttaggaattttgcgtttgcaagccattcaagatattagttccacgactcctatacagcatgatgcttttctcatgtttaatttatgcgatcagcttccgggtggagacttgatattagaaacccgttgcaaatatgccaaacttaagagagtcacatcatgaaaatgatttcaagggtggaagtggaatgtattctatatcagccttggacatggtttctaacttgggatttgtatttggagcaagttcaaacaactcaaatgagagtaggattgctgtgggtgaaatatctgttggagaaatgactgaattggaaagagcggttaaagaatctaagaacaatcataaaaaggtcatatctgcacaagccacagttgatggtgttaaagttgatggtattgacactaatttggctgtcatgaaggagttactttttcctctaaatgaacttgcgaagtctcttcagtccttggcatattgggatgatccacggaagtctttagtgttttgtttgtttttcagttacatcatctacaggggttggcttggctatgcagcagcgctggtgcttgtgttacttgcagttttcatgataattactcgat

SEQ ID NO: 17427 - DNA, 442 bp, Glycine max
ctccccccacgcgtccgctctcctctctcttcgtctttctctttctctctctttcagatttctgtctctctcatctttctctctccggaagggcaaaccctaaagaccgtttgcacccaccaaggatcgtagtggcgttcagatcgtggggttttcgttttgcggcgattagatcgattgtcatggatgatgatgtgttgaacatgcccaattggggttattacgaacccttcagagggggacatcttggccttcagctcatgcctggtatgactgaacgggacacaaagccatttttgcctggtcgggatcctgctatgttaatgggtgctaatggaacttttcaccctcgagattgcgttgtttccgaggcaccaatgccattgaactatgtcagagatagttggataaaccagagagataggttttttcatatgcagca

SEQ ID NO: 17428 - DNA, 334 bp, Glycine max
tcgctttcgcgtccgcccacgcgtccacccaggcgtgggctctctcctctctcttcgtctttctctttctctctctttcagatttctgtctctctcatctttctctctccggaagggcaaaccctaaagaccgtttgcacccaccaattgtcatggatgatgatgtgttgaacatgcccaattggggttattacgaacccttcagagggggacatcttggccttcagctcatgcctggtatgactgaacgcgacacaaagccatttttgcctggtcgggatccggctatgctaatgggtgctaatggaacttttcaccctcgagattgcgttgt

SEQ ID NO: 17429 - DNA, 652 bp, Glycine max
gaaaattctatgtggagagaagctttcatgaaggcatacaaggctatggataaagtgttgaggtctcatccaaatttggactgcttctgtagtggaagcacagctgtcactatagtgaagcagggttcaaattgttcatgggaaatattggggattcccgagcaatcatgggatccaaggacggcaatgactccatggtggcaattcagttgaccattgatttgaagcctgatttgccaagggaagcagaacgaatcaaacagtgcaagggtagggtatgtgcattacaagatgagccagaagttcatagggtatggttgccttttgatgatgcaccaggattagcaatggctagagcatttggagatttttgcttgaaggaatatggtgtgatttctataccaggattttctcatcggctgctaacagacaaagatcagttcattgttcttgcctcagatggggtctgggatgttttgagcaatgaagaggtggttaggatagtatcttcagcgccaactcgatcatcagcagcgaggactctggtggattccgcagctcgtgagtggaaacttaaatatcctacttcaaaaatggatgactgtgcagttgtgtgcctatttttggatggaaaaatggcctcagaatctga

SEQ ID NO: 17430 - DNA, 836 bp, Glycine max
cggctcgagcccaaacccaaacccaaacctaaacgaagaaacagaaagaaaaaaaatgaacaaacaaattggggtttgaaaagaagccggtgctgtctccttgttctccatcgtaagatataactaattatttttatatcttcatcaagatgcgccgagggagaaccgccgccgccgctgccgccgttgtggatcccacgccggaccaggccaaggagacgacgcggttccgtggcgtgaggaagcggccgtgggggcgattcgcggcggagattcgagatccgtggaagaagcagcgcgtttggctggggaccttcgattccgccgaggatgccgcgcgggcctacgacaaggctgcccgatccttccgcgggcccaaggccaaaaccaatttcccccccttccccggcccggcagaggcggaccaccactcgcagattccgctctaccaggcccatgggctttccaccaagttcgagcccgtcgtccaggtgaaccggcccacgagcagcggcatgagcagcaccgtggagtccttcagcgggcctagggttccctcctcctcctctcgcgctaagccccttgttgtggttgttaaccctatcatccctctcgacgacgacgacgacgactgccacagcgattgcgactcttcttcctccgtcgtcgacgaccaggactgcgtcctcacctcctccttccggcaaccgcttcccttcgatctaaacctcccgccgcccgatgccgcctacgacgacgacgacgacgacgacgtccccgccaccgcgctgtgcctctgatgaagaagagcctcttctcggtataatcataatttt

SEQ ID NO: 17431 - DNA, 844 bp, Glycine max
aacgaggaaaaaaaaaatatggaaaagaaacaagattaagaattggggtttgaagaagccggtggtgtctccttgcttgttctcgatcgatcttgttattgtaaaatataataacttttttatatcgtgatcaagatgcgccgagggagagccaccgccgccgtcgtggatccgacggcggagcaggcgaaggagacgcggttccgcggcgtcaggaagcggccgtgggggcgattcgcggcggagattcgagatccgtggaagaagcagcgcgtgtggctggggacgttcgattccgccgaggatgccgcgcgggcttacgacaaggctgcccgatccttccgcgggcccaaggccaagaccaatttcccctccttccccggcccgacggaccaccactcctcgcagcagattccgccgctctaccaggcccacgggctttccaccaagttcgagcccgcccaggtgaaccggcccaccaccagcggcatgagcagcaccgtggagtccttcagcgggcctagggttcccccctcctcctcctcctctcgcaagccccttgtggttgttaaccctatcatccctctcgacgacgacgacgacgactgccacagcgattgcgactcttctttctccgtcgtcgacgaccaggactgcgtcctcacctcctccttccggcaaccgcttcccttcgatctaaacctcccgccgcccgatgccgcctacgacgacgacgacgacgacgtccccgccaccgcgctgtgcctctgatgaagaagagcctcttctcggtataatcataattttcttcttgttgttgttgttgttgtttgtgactatctct

SEQ ID NO: 17432 - DNA, 450 bp, Glycine max
ccccacgcgccgcccacgcgtccgccccagaaatatcatatatcgtatcatccttaatataagctttattttgtgtcaattttgcactgtttaatttctacaaatatcaaagatcccccttcctcttttagtcaaaccatatttcatatttgcaccaaattttttttaccaagatttgtaagatcacaattcacaagccccagagaagaaaagggaaaataaatccttgaaagtttcatttttgacaaatacagttgaagcaaaattgaattaggtaatagttatccttcaaggacatagggagggctatataaacctttcttctgatgttggtgtgaaagtggctttgtgaaaaaggacaaaggcttgttcagcgatcataacattgaagattttgtattcacacgtatgaagagggataataatattggtggtgtctcgattgaaatg

SEQ ID NO: 17433 - DNA, 454 bp, Glycine max
cccacgcgtccgcccacgcgtccgcccaatcttcactgaaccgcaccgcttccatttcatggcggtgcgttcactacttgctctcagttcccaacaaacccatcgctctcgtcgacgatttcctcacactgtttaaacctctctcccactctccgccccaaaactcactattctccaggctccgcagaatcgctcacaaagctaaggcgaagccgcaggagctggaagtaactgtggcgagtgatgcgtttacgcaattcaagcatctgcttctgcctattacggataggaatccctatctctctgagagtacaagacaagctatagcaaccacctctgctttagctaaaaagtatggagctgacattactgttgttgttattgacgaacagcagaaagagtcactgcctgagcatgagacccaactatccagtatccggtggcatctatctga

SEQ ID NO: 17434 - DNA, 446 bp, Glycine max
  unsure (1)..(446): unsure at all n locations
cgcgtccgttccaagaagtgttagagtggaaagacctgctgattaggtttttacaatttgccaattgcgagttccttgatgtcagcactctacatgctgctctgccagattccactgctgttagaatcatctcaaattctcgtttgtatacacgtaaatcacttatctattagtaggattttaatgtatttcaaatatttgtataagtagaaatttctttctgtcatctggttttggttcaattatgtaggtggtttaacattcatagctgcatgaccaccaagttctcaaatactgtaaatagctgcaaaaaaatatatccaacaacaaaaataacaaaaataaattcgcattttacatcggttctagggaaaataattcccctctcttcttcaacgagtctnnnnnnnnnnnnnnnnnnnnnnnnnnnnnnnnnnnnnnnnnnn

SEQ ID NO: 17435 - DNA, 462 bp, Glycine max
  unsure (1)..(462): unsure at all n locations
attgaatctccaatcatcatcatcacatcacatcacgacgacgacgacgacgcatgattctggtctttctctgctccaaaaaaactgaatcccaatcgcgaagaaaagaatccctcgcttggatcttgcaacatcgccagagggatccatgatactcctgcagtctcattcaagattcctgctccagaccttgttgaatcgggcccaaaatctcgagaaaggagttgaactggatcaccactgggttgagtttgatgatgttcgatatcatattcaggtgtcaatgaagaatcctcatgttttgttgctatcagtatcgttgcctactccttcttcagaaactatttttgtctgtggacttccttttggagccattgaagcaataaaagctgcatatggtaatcttgtgcanattcttgatcctncaagggatggctntaatctcacattaaaaataaatct

SEQ ID NO: 17436 - DNA, 554 bp, Glycine max
accgtgttcttctctccatcccaaaatttcggcggtgttcgtgtgccatcatcttctccgacaatcccaaactcccaaaccaacaacaatttggactcctcacctgagtttctcaattttaaacttttaattgagcagccttaatcgcaggaacaggacaattctgaagaaaaaaaatgcttgtttcggttgctatcagcgacgttttggtggtgcttccgccttcgacatctcttagactcccggaatttcgccatttgcatgtttttgcggtttctgacgccaagggttttctgtctgggggatttcttaaaagctgtccttcatcttacaatcccaagcactaccatgaactctacaatttccgagctagaggcttagttgcaagggcatctgctgatccgagggataatttggtgccatttgctcccctccaattggagtcaccagttgctcagcttctggaacaaatctcaaatacccatccgcatctactaccagcaggcattgatcaacaactagagaatcttcagactgctagagatgccagaatg

SEQ ID NO: 17437 - DNA, 715 bp, Glycine max
cccacgcgtccgcccacgcgtccgcttttgcaagctcaatttcggaactgaataattgcccgatatataggaatttactgtcttttttcttactttttttaatacttccaattccatatgtattatgctcggaatttctggaaaaaaaaaagctttgaaattgagctgatttttctttctttccttcaagaatcacatgtattttatatttatatttattcaaactgttttaacgacgtgctaactcttctgaaacccttgcccttcgcttattctccactatatatagccttaatcgcaggaacaggacaattctgaagaaaaaaaatgcttgtttcgggtgctatcagcgacgttttggtggtgcttccgccttcgacatctcttagactcccggaatttcgccatttgcatgtttttgcggtttctgacgccaagggttttgtttctggtggatttcttaaaagctgtccttcatcttacaatcccaagcactatcatgaactctacaatttccgagctagaggcttagttgcaagggcatcagctgattcgagggataatttggggccatttgctcctctccaattggagtcaccagttggtcaacttctggaaaaaatctcaaatacccatccacatctactaacagcagtcattgatcaacaactagagaatcttcagaatgttagagatgctcagaaagaatctgatc

SEQ ID NO: 17438 - DNA, 519 bp, Glycine max
ctcaaaacttgtcttccccctctctcctcctcggaacgccattcgcatgcagttctcgcacaacacactggacaattatatttcaaagcgcaacccatttcaacatttcatcatttttctcgtgtaaccatcccctcacccacgaacccatcccatgaatttcccaaaatgccctcaacccagaaccccctcttctccttcctcctacattccaccccaccgtacccaactgcaccctcgcatgatctccctctactcttcttcttcttcttccctaaaatatccaaatcccaacaacaaaccccacaacgccaaatgcctcttgttcttcttcgccctcctcttcttcaccgcccccttcctcttctacctcttctccaccgccctccaactctactcctcccccaaattcgccgactcccgcccctactcctttgccctcgccctccgcgccggcccccacgcccttcgtctcttcgtctttcacttccttggccccttccctaacccccttacttt

SEQ ID NO: 17439 - DNA, 353 bp, Glycine max
aagagaacgaatttattctggacaccttgtgccacttattgtattaatcgaatgctggagggttttactaaaataagatgtgtggaagagtgcatggaaaagggccagaaaattaccaaactaatatacaatcaaatatggttgttaaatcttatgaaaagtgaatttaccgagggacaggagcttctaaaaccatctgccacccggtttgcctctagctttgctactctacagagcttgctggatcatcgatttgtctcacaagaatgtttctttccaacaaatggatttcatccagattctccagctcaaatgacgggaaagaggtggaaacaatacttttgaatgtcaca

SEQ ID NO: 17440 - DNA, 407 bp, Glycine max
cccacgtgtccgcccacgcgtccgcccacgcgtccgcccacgcgtccgcggacgcgtggggttctataggctcgtacctctgtgtccttgagttctaaggagacaggaacctacgtctggtggatgaatcatgaccgtgtgatcagagcgtgattaacggcccgggtgagtttctctttggagtagtctcatctttggctgtagaggatcgttcttaggacacttccatgtgcctgggaatggtcatacggttgtctgacagaccaaaaaagaaaaaaagacaaaaaagtaattaaaaggaagattgaaaacttcgatgtgatgaaggttgaatccgagtttaagtcgatgtcattcgatgataaatgccatgatgttaaagggaagggctaccgaagtgcaatatc

SEQ ID NO: 17441 - DNA, 371 bp, Glycine max
cccacgcgtccgcccacgcgtccgcccacgcgtccgcggacgcgtggggttctataggctcgtacctctgtgtccttgagttctaaggagacaggaacctacgtctggtggatgaatcatgaccgtgtgatcagagcgtgattaacggcccgggtgagtttctctttggagtagtctcatctttggctgtagaggatcgttcttaggacacttccatgtgcctgggaatggtcatacggttgtctgacagaccaaataagaaaaaaagacaaaaaagtaataaaaaagatggtaaataaaacaatttaattcaaaaaataaaattcgggataggacaatatttattaattcaaaataggaattagatcatt

SEQ ID NO: 17442 - DNA, 490 bp, Glycine max
cgccaatttcaataatccctggataaggtaacttttcttacaccctcctcctcctccttctcccccaaatcctctcacaaaacaaaaaccaaaacacagagaaaagaagagacactaaccacccggtgaaatcaaaaccctaataataaaaaaatggccacacgttcaagcttctcttctctccaaaccttcccttctctccaaaccttccctcccattcccattcccgttcctctctccgaaccactccccattctccctctccttcccccccatgcgccgcgtcctctccacaccgttatgctgcaccttctgcccctccgaacccaatctcagcccctccgaaccggaacacgaagccggttcagccaacaccgaagagccgggtataaattcaaccgaagaaggtgcagcttcggtttcagattcgggtttggaagaagaagaaggcgccgaggcagtgcttcggagtggcgcggattcggagaag

SEQ ID NO: 17443 - DNA, 443 bp, Glycine max
acggaagctggtggataagtctttactctgagtaaagagaataatgaaagtcagggtggagtagcattgagatgagaaatcaccggtccaactggatgacagtttacagaaaagtgatggtttcactgcaagaaaagatgatccacctactatgaggaaaagacgtgcatttagggagaagaagatccctgcggattcagcagatgctaatccagcttcgatagtggaagtaaagccaagccatactgaccatcctccggaaaggaatgaaaggaaggatgaaagaagcagcaatcctcatcatctggatagacctgagaagcaaaatgcagagggcagagcacccaataagattgaagctagatgggatggtttttcatcaagagcaaggtatgggggcagtggaggcaataacaattacaggggaagagataaatttaatg

SEQ ID NO: 17444 - DNA, 592 bp, Glycine max
ccggacgcgtgggattttgtaattgtaaggatcaataagttgtttgtttttacttgatggactacaaaaatgctccacaactcataagatacttgtacccaaaagataacctttgtacattctgtgagaaaatcgatgacgaagtgcccaactaaactttattcccaggacttaattggttttatgcccatctttgaactttgttctcgagactgaaaacatattttttcttctgctgcaggtagtattaagcatctttggtccaccttcaagatgttcaatcattgagcaagaggaagatcgttcatcaacctcttcatagctgtaaactactcattggacgatgggatgtccgcaagtagtgcagaagcatctgtaaagtacagaaatttataggcgaaacagaagataggaaatacagcaattttgacatatccgtcccctaagttgtgtatcatgacccttgtacctatttaataatcaatctcttgtaaggttagggtggaagtttgtgaaaaacaaattaaaaggttaatagcattaggcctatagattcaattaaccttttaaaaaaaaaaaaaaaaaagggcgg

SEQ ID NO: 17445 - DNA, 315 bp, Glycine max
tatagctggttggagttattgttctttgcttctcaagaacagaagtgtttgtgatttattactttcggatgtacttgtcattggtacttcttggtttcttgcatggacttgttttcttgccggtagtattaagcatctttggtccaccttcaagatgttcaatcattgagcaagaggaagatcgttcatcaacctcttcatagctgtaaactactcattggacgatgggatgtccgcaagtagtgcagaagcatctgtaaagtacagaaatttataggcgaaacagaagataggaaatacagcaattttgacata

SEQ ID NO: 17446 - DNA, 387 bp, Glycine max
tcttgcttcaccactttccgtatccctcagcttcacgacaacaatggatttcacttaccctgcacttctctccattttccttctcctactacttccttctctgatctcatcacaaatctgccagaaaaactgtggcaaagaaactgtcaagtacccttttggcagtggtcctggttgtggagaccctcgtttccaaccacatgtgacatgtagcaaccaaaagctcacattcaccactcacacaggctcctaccctgttacctcaattgactacaccaaccaagtcatatacatttcacatcccaccatgtcaacatgctctttgcactgtcccttgcaaagggcttggccttaactgggatgcaccatttacctttgctgatagca

SEQ ID NO: 17447 - DNA, 144 bp, Glycine max
aaacccggcggcgggcacgcgtccggtaatgtaggtgttccaagcttcaaggtaggtaataatgttaggtccaagtagatatgtgattgagttgtaatacaatgattctaatatcctatctccaccattcatattaatatttgc

SEQ ID NO: 17448 - DNA, 419 bp, Glycine max
cccacgcgtccggagagtttgagtttcaccctttgattgaaggtttcggtgctcggtgcttttctgactcccatcatcttctcatgctttctgattcaataatttgaatgcgtgtatcgctattcactctgtttttttaggatttctttttcaatgctggatagtttgctggaacgatctttttaatttgatgtttgtttttctaatacttcactcagatcgacgttcataaactgttttagtccttttgacgcacattcacaagttagggtttttgttagtaccatctgccccaccagtcatttcgtgctttaccagttatcttatctgggaatatctgctatgccattctaagattaagaatataaaaaaaaattgttgacagagatgtcaacgtatgacaatgttggtggtgggaa

SEQ ID NO: 17449 - DNA, 259 bp, Glycine max
gtccctggtcactactcacaaatgtgaattgtccacacgttctcgagaacttagaatagaatactcgtcccacacccaattttcttctctctctcctctcatcacttcatatattcgcaatttctcttccaccgtgaaaccctagacccaactgcgagcgcggagccaagccatgtccctcaaccggcttctcttcgtgggccggcgcttcgatcggcgggccttcggcctcttcttccttcgatccctctctggcttc

SEQ ID NO: 17450 - DNA, 481 bp, Glycine max
gaaacggcgaagatacatggatcttatccaagaggaagaagaggaagaagaagaaggggttgtggttcggaggaccagtgttcggaagagcggcttggtgaagaagcttggggatgattttgacagggttgccctggaaaacgatgagtccaatacggtgtcgtcgttgaagacgactcgtggtcggaaattggttaagaatggtgaacttgggaacaaaacggtggttgaagtagctgaaaaatcaaacaccaaaggaaagaagagtgcaagtgaagccgagaagagccctggggttagaacttcttccagattggctaaacgtgtgtccaatcaaacgtcttgtaattagatgtttgataaaattgtggttttccttttccttttattattgtccaattagccattctgtgtatgtttcaagatttagggtttgttcaacaattggtattttgcagtaagtcatacatgaatgaatgaa

SEQ ID NO: 17451 - DNA, 878 bp, Glycine max
cccacgcgtccgcccacgcgtccgattttttgaacaaaaatcctaaaccaacctcttcttgctacgtctccattcacagttgctgttcctcccggtcgttgtttgcacaaactcagcctcaatccaatacgatctaatctgataaaatagtaaggatacttataactgttttcccttggtatggtatttcatcatatgggtgtgtttaagttttcatctttcaccggataaacatgaagaattaaccatgctctagtcaaaacttgttttgctcaaaattcaataacttggtctgcttaaagatattggcttgatccctcacacctgcaaaattgaatggcaccctcaatttgttttcttcttctatcccttctgttcctttcatcctccacaagtggtactgatgaagagggtttcatctttgtgatcatatctgataagggccttgattttgccaaggatattctgatagaccaagctgttgcctctattgttcagtctcagctgccacagattgagaagactgtgcaagtccctcttgttggaaaagccaaagtggttctttctgacatcactatcaatcatatccaagttaattcttcatctgttaatactggagagacaggcagtgctcttgtcgtttctggtgccactgccgacttgagtttgaactggaggtactctgttagcagttggttagtcccaattggaatttcggacagtggaaccgctactgtgaaggttaatgatttgcaagtgggacttactgtgaatttaagaaaccaagaaggaactcttaagttgaatctcctggattctggatgtcatgttagagatttatctataaagttgcatggtggagcagcttggctttatca

SEQ ID NO: 17452 - DNA, 437 bp, Glycine max
gtccggcaaaattgcttgacaggatcagttgggatttatctcccacatagtttgtggttacaatgggttgatcaagtgatcttctctgtgcttgatgacctgcttgaaatttctcagacacactctcaaaaagacttccgcaacatagaaggaacccttgttcttgctttgaagctcttgtgtaaagttttcctccagttaatccaagacctatcacaattgccaggcttcaacaaattatggttggctgtactaagtcggttagaaatttatatgaaggtgaaagttaggggaaggagaagtgagaagcttcaagagcttgtgcctgagcttcttaagaacactttgcttgttatgaaagcaggccgtgtactagtccagagcaatactgtagatggaagtagtttatgggaactgacttggctgcatataaataa

SEQ ID NO: 17453 - DNA, 264 bp, Glycine max
cccacgcgtccggacaattctgagttctgatgatataaagcaagcactatttagaagcgcaggatatggtggacgatatttgtgaaaatagaagagaggtgcaaaataacacagaaagtgcaccatagctaggggagagtttttgagtttctgatcatagtgatatccattgatttacaagccaatctagccggatttcgtttttcttagtgtaagacaataattgatttcttcaacatgatgcctattgtaacattttcaaaa

SEQ ID NO: 17454 - DNA, 451 bp, Glycine max
ctctcttccttctttctctttacctcgtcattggcattgccagtggcgttcaaaccaagaccttccacttgcagaggaaactgcagcatggcaccccggagtgcctcctcccccaatcaagaaaggagaaaggcgctattatactggaaatgaaggacagaggtgagtgctcagagtcagagagaaaaggtgattgggttgagaaacagttggtactggatggtctccacgttcgttcaattcaaaatcacattcgaaaaaggacctctagtagccaaattgcagattcctcggaaacccaagttccattaacttctggcataaaattccaaactctaaactacattgtgacaatgggattgggtagccagaacatgagcgtgatagtagacactggaagcgacttgacatgggtccaatgcgagccttgccggtcatgttataatcaaaa

SEQ ID NO: 17455 - DNA, 528 bp, Glycine max
cgtccgaactgcccgcttcctcttgttaggaaaatatatgcaaaaagaaaacgagtattaatataatgaacgggtagttgaatagtgtctacgttcaattgtgcatcctcaattatcattctttcttcttcttttcttttatgcttaaaaaataagctttgtttgaaggtacgaacttcacttcctcactcaaccgagtccattcacaggtcctttggcaatggcaactcacagactcgctttgatcatccaaaacccttcgaacgacgacgagtttttgctcgtgaagcagtcgcgtcctcccaaattccacgatggagaatacgactctttcgtcgattctgatctctgggacttgccctcggcgcagttgaacccgctgcttgcagaatcagagccaccggttgacttggaacttgcggtctcgcattcggaatcccaggacgtcgatttgaggaaattcgacatccgttcggctctcaacgaggtgtttggacaattagggtttggggcggttgacggaggagg

SEQ ID NO: 17456 - DNA, 371 bp, Glycine max
  unsure (1)..(371): unsure at all n locations
ngttgcccattaaatgctcataagctcgctacggcgctccttcagttattttcaactgcccggttccttttgttaggaaaatataggcaaaaagaaaacgagtattaatataatgaacgggtaggaactccacttcctcactcaaccgagtccattcacagttcctttggcaatggcaactcacagactcgctttgatcatccaaaacccttcgaacgacgacgagcttttgctcgtgaagcagtcgcgtcctcccaaattccacgatgaagaatacgactctttcgtcgattctgatctttgaaacttgccctcggtgcatttgaacccgttgcttgcaaaatcagagccaccggttgagtttgaacttg

SEQ ID NO: 17457 - DNA, 557 bp, Glycine max
caagaaatgaaagatgctctggttaagaaattgaaagaccaactatttgttgccagagctgattatcctagccttgcaaaactcccagcaaatgataaattgtctcgccaactgaaacagaatatacaggagatggagcacatgcttagtgaatctaccacagatgctgatcttccaccagtggctgaaagttattcaaagaagatggaaaaaacaataaccagggtaaaatcaattcctgtggtttgcgacaatgtggacaagaaattgagacaaatatttgatttgactgaggatgaagccaacttccacatgaaacagagtgcattcttgtataagcttaatgttcagacaatgccaaagagtcatcactgcctgtcactaaaactaactgtagaatatttcaaatcctcgcataatgacgaaaaggctgacgaagaaaagtttattgattcttcattgcaccattatgttattttctctaatatgtgcttgcagcttcagtagttatcaactcaactgtatttcatgcgaaagaaagttcgaatctggttttt

SEQ ID NO: 17458 - DNA, 671 bp, Glycine max
tagaagatctatgacgtctgctgcacgcctacataagctcagtatgctgctaggcctttgcgtccttcgttgataaagaacaaggagaagcgatcggagctgcacgccaagctgaagcaccagaagaagctcgacaagcgcgccaaggccaaggctcgggacgctgctctcaagagagctctcgacctcggcgaggagcctccagagaagaaggtccctcgcactatcgagaacacgagggaactcgacgagaccgtttgcaagcccgatgacgaagagttatttgctggaaatgatgctgatgaatttggtccaattttgaatcagcaacaaactcccaagatattaatcaccacttgccgcttccattctactaggggacctgcttttatatcagagttgctttcagttataccaaatgcacattacttcaagagaggaacatatgatctgaaaaagattgtagaatatgcaaagaagaaggacttcacttctattatagttgttcacaccaatcgtagggaaccagatgctcttttaatcataggtgtacctgatgggcctactgctcatttcaagctctcgaaacttgttttgcgcaaggatatcaagaatcatggaaatccaaccggtcacaagcccgagcttgtattgaataacttcacaacacg

SEQ ID NO: 17459 - DNA, 796 bp, Glycine max
aagcaattaccccttttcataaaaccctagcaagtaaaaaccgtcccttttcgtttctgttctctgtgcttcgaaaaccctaactaaactcgcgtggtagctccaatggggggaaagaggaagaagagcgatgatgatgatgacgtggaagcagaagcagaagcttcaggttggaagaagaaaacgagaacgacggcggagagagagaaggagaagaaggagccattgcgtccttcgatgataaagaacaaggagaagcgatcggagctgcacgcgaaactgaagcaccagaagaagctcgacaagcgcgccaaggccaaggctcgggacgctgctctcaagagagctctcgacctcggcgaggagcctccagagaagaaggtccctcgcactatcgagaacacgagggaactcgacgagaccgtttgcaagcccgatgacgaagagttatttgctggaaatgatgctgatgaatttggtccaattttgaatcagcaacaaactcccaagatattaatcaccacttgccgcttccattctactaggggacctgcttttatatcagagttgctttcagttataccaaatgcacattacttcaagagaggaacatatgatctgaaaaagattgtagaatatgcaaagaagaaggacttcacttctattatagttgttcacaccaatcgtagggaaccagatgctcttttaatcataggtgtacctgatgggcccccccctttttaaaaccccttttggggcccttttttttcccatttcaagctctcgaaacttgttt

SEQ ID NO: 17460 - DNA, 510 bp, Glycine max
ggttgaaagactttgttggtgcaattggggaatccactatttccaaatcttctctggacccatttcctattccaagtgttaagtcgggtgaagacttgcttgatgatctggaaacagaagagagagacaaatgctgtgaagcttatagtggtgattcggtttatgagctgaatgaagtggcagctgcaaagggatgtctggggcgtttccctgggggagaaatgatgggaattataaagaaattcattaacttagatgcgggaactgattaactaaggaagctaggacttgttatgagactatttttcttttctcactctgaaatcaaagtgatttcagtttcagggtacaaaaaatcaaattttgatcttctgtactatgtgtagaataagaagccttgttctgaaaataacaatgtaaactcaacttaaataaatttttctctgttgtttttgcactctcgtaggagagtcctaaagcttgatatgaattcaaaaaaatcattctatt

SEQ ID NO: 17461 - DNA, 738 bp, Glycine max
cccacgcgtccgaaaagagtaccaaacttttcaatctcgcacactgatatatgactgttgtgggggcatatgtatatggtactgattcaacaatacagagaatggcttttgggttggaccatttccatttaagtgggtgcttggcctcagtcaccttgtcacccagccaaaatagaacacccactttttgtaccaatatgagttcctcattgaagtggggtttccgtactggtcaaaaatgttgtaacatactcgcatcttggtcctccctagcaatgcagtatcggttgtctgtatcctggaaatgctatgagaccggtttcacaagcaagatgatgaggcaagtccaatgctaacttgcatttctgtggtttatatacatgatgcagcatactcaagagtaaccttattggaattgagaattgattcaacgtttttctaactcaattaatggtgcaatgatttagtacaggttttcttttcttttttatgcatggaagtcggttttcactaacccaaccggcttatagttttttattgaactaattctgtcaccatttgcccctctgaagactctgttatttgcagagtcttgaggttggtgaatttgcatagtattgtaactcactgatgatgtaatacactcctcaattgttattatctgtgaattttgttcccatatcttatgttgagagttgtggtgcaataaacatctttctcaaaagagaaatgttattt

SEQ ID NO: 17462 - DNA, 349 bp, Glycine max
gcgctcagtcttcgtagctcatcacgtcatcactcttacatctcatggtgtgctgacctcctgggcagggtgtgctctaaccggttcatggccagatgaacatgcatctgaactgcctagtacttatcgtggatctgtaccactttgctattactatttacgacgtgatgcactccaatatgttgaacaacgctctctatcaatccagatctatcatgctcacattagagctctggctgaagctagctacaaggttttctccctattaaatcagagttctgggacaacatagggagctacagcagccgatggaagcaggggtgaattgcttgtagcagatgacgatgtt

SEQ ID NO: 17463 - DNA, 366 bp, Glycine max
cccacgcgtccgcgacggtgacaactgtagttcgtgttcgaaataaattcaattgtacacaggggccgttgtccttaccttaggtcaatttattatttaggttactggcgggtctataaataaattttacacattggtcattttcctttcgtttctgaacttcgttaaaatgagttttttgtccaagttgggttaatgcgtatatatagttttgagatttcttattgctaaaagtgtgattttttttgtgtgttcatgtaacttctttgtgggcttccaatgtggaccccaaatttatgtactggttcggccgtatagccctttgttgtccactaaactacctttatgctgcgtgcctttgctatc

SEQ ID NO: 17464 - DNA, 324 bp, Glycine max
cccacgcgtccgttccagaacgccggcgaccgaacccgaattgaagtccagagaagacaacggatgccgcgagttacagcaataataatattaataacaacagcgacaggggtggcagtaacagtaatagtaattgtaacatggaacatcatcatcacagccaccatgtgaatagtgggttcttgccctgaaaatagtagttattgtatttatttattatagcttttttcttttcttttttttaactttgtacctttttatctcttcaagttgatcaaggagatcggaaattgggcaaaaaaaaaaaaaaataaatttttatat

SEQ ID NO: 17465 - DNA, 428 bp, Glycine max
cgtccttcagaaagccgcttccatgagcgcgagcaacaaatggagagcaatgtcgcaccaccagcatcagcctctgtgcacgcgcacgcaccagatcggcgccctcctcctcgtggcgaccaccttcttcttcacgagaatgctttccacctccacgctctccaccagcgtcgtccacgtgtcgcaaccccggttccagtgggggcagtcccagctatccctcaagatctacgtctaccaagaagacgaaatcgacggtttgaaggagctcttgcgcggaagggacgctaagatcacagacgaagcttgcctcaaaggccagtggggcagtcaggtgaaaatacacaagttacttctgcaatctaaacaacggacattgaagaaagatgaagcggatttgtttttcgtcccatcttatgtgaaatgtg

SEQ ID NO: 17466 - DNA, 1118 bp, Glycine max
attagcttaggtagaagattttaaaggagggaaggatagtcagagagtttgttggtttcagcaaccagaagcagcttggaagatgaaacgcatttaagaatccatatgaaaatgacagggccggactcacactaccattcatgcttcgctctcacttccaaacaaacgaaaaacgttactattaccacttaggagtttacttcttcatcgctcacatcacaattcactaggaagctgtaagagaaggatccttcatcagtgtttcgcgatctctgaagaagatggggaaaaagcgtgtaatgacgccagccaaggacgttgacttatcttccaccaaatacaaacgtgaagttgtgcaagctccgcatttgactggatttgtatttaggttatttgtgaggataattgaagctcccctgataggtcctatcattatgaatattttgaagaaggaaaataaaatggatgagatactgcgccacactgtgatacccgaggaacccatgtttaaacctgaatatccacctcaagaaatggagcctggtgttgttgtccttgaggaagatgggagacctgaagatcgagttgagtctgccctgaagtgtcttccacattatgatgttgctgaattatgggaaaattcatctgcatcttttcggtactggaaaatacgtgactatgctcatgcttatcgatctagaaaagtaaccccatccatggttgctgagcgcatcatctcaattatagaggacaatggaagaaataaacctcctacaccactattgatatcgtttgatgctgcagaagtccgggagcaggcggcagcatctactcagaggtttgaagcaggaaatccattatcgatattggatggaattttcatggccatcaaagatgacatagattgttatcctcatccatctaagggtgcaactacatggatgcatgaggtacgcactgtaaaggaggatgcagtctgtgtatcaagactgcgtacctgtggtgtcatattcatcgggaaggcaaatatgcatgagttaggcatgggtacaacaggaaataatcctaattttggactacaagaaatcctcatgcgcctgacaggtatactggtggat

SEQ ID NO: 17467 - DNA, 620 bp, Glycine max
ctcacatatcctccttcgtatccgtgtcttccccaaccattccgtcgcccaccgcaaattcaaattcaattcgagctgaacctagggttagtcctattgccttcaccgatctcgaatttcggaaacggtaaaagaaaatgcacgtcaaatcggcgcagtcatcgttccgggatcggacacaggaattccacagcatcacagagaggttgaagaagtccggatcagggcccaatgggcccagtagtagcagcacttcttccagatcggaggaacagcgatccgcgatcgcgaatcaatcggagttcaatagaagggcctccaagatcggcttcgggattcaccaaacgtctcagaagctcgccaagctcgccaagttggcgaagaggacttcggtttttgatgaccctactatggaaatccaagagcttacgggggttattaagcaggatatcactgctctaaactctgcggttgtggatcttcagttactcagcaactctcggaacgagagtgggaacgcttctaccgacacgactagccattcgaccacggtggttgatgacctgaagacacggttgatgagcgccaccaaagagtttaaagatgttctcaccatgcga

SEQ ID NO: 17468 - DNA, 397 bp, Glycine max
agcaaattcatttcattcaattcaatgtaaaaaaacacagtagccacccaatacataaaatttgtttatgctttctacacgcacttcctccttcgtatccgtctcttccccaaccattggaatacattccttaacccaccgcaaatccaaatccaaattcaattcgagctgaacctagggtttgttccttcctattgccttcacggatctcgcattctcctcaaatttccgaaacgggaaaaagaaaatgcacgcgaaatcggcgcagtcgtcgttccgggatcggactcaggaattccacagcatcacagagaggttgaagaagtccggatcagggcccaatgggcccagcagcagcacttcttccaccagatcggaagaacagcgatccgcgatc

SEQ ID NO: 17469 - DNA, 851 bp, Glycine max
tcggtgtactttaaaaaaaaacaaatctcagatcagatatactcgcgcactctccttaacaattacagagtcttcttcgtaggtagattttcgtagcaaaataccaataaataaaggcaccaaacaaagatcaaacgcttggaggaaacattcaccatttttctcttttccgttctgttctgttctgctttgcccctcttttctcccaatgactactcaccattctctctctttccaactcctctgagcctcgctcgttaggttctctgtctcttctcggagacccacaaaacaatttcttatttatttccttctcaaacaaagaacctctatttccccttggctgctcagatctagtattcctcaagtcacaacctttttttgttccgttagcggtgtgagacatgagtaaagaagaattcttgaagatacagaaatgtgttcttaaagtgaacatacactgtgacgggtgcaagcacaaagtgaagaaaatcttgcagaaaattgatggggtgtttaccacagagatagatgctgaacaagggaaggtgacggtttcagggaatgtggatcccaacgttctgatcaagaagcttgcaaaatctgggaaacatgcagaactctggggtgcacctaaacccaacaacaacaacaataatcataatcataataaccagaaccaccttgccgaccagcttaagaacatgcaaattaacaaccatcccaaaagtggtggtggtggtggaaaccacaacaacaaaggtcagaatcagaaccaacccaaaggtggtggtggtggtggaaatagccaagccaagggtggtggtggtggtggtcaacaacatggacca

SEQ ID NO: 17470 - DNA, 385 bp, Glycine max
ccatttttctctgttctgttctgctttgcccctcctttctcccaatgactactcaccattctctctctttccaactctgagcctcgctcgttagctaggctccctgtctcttctcggagacccacaaaaccatttcttatttatttccttctcaaacaaagaacttctatttccccttgctgctcactgctcactgctcagatctattattactcaagtcacaacctttttgttccgttggcggtgtgagagatgagtaaagaagaattcttgaagatacagaaatgtgttcttaaagtgaacatacactgtgacgggtgcaagcacaaagtgaagaaaatcttgcagaaaattgatggggtgtttaccacagagatagatgctg

SEQ ID NO: 17471 - DNA, 339 bp, Glycine max
  unsure (1)..(339): unsure at all n locations
gttttgccaactggtggggatagtgttagttctggcttggctgctncccccgaaggtgaggttgacatgattcagaagaacgacgcacatggcgaagggaagaagagaaagaagcatgaaagcacagatagccccgttgctgttcctgctaagaaggtgaaagtggatgaagtggaagaggttgaaaagcaagaaaaggtgaaggtgaagaaggtagatggagagactgtggaggttgaagttgagaagaaggagaagaagaagaaaaagaagaagaataaggagaacagcgaagcagcctcttctgatgaggagaaaactgataacaaaaagaaaaag

SEQ ID NO: 17472 - DNA, 390 bp, Glycine max
gtttacaggggagcagttatccatcggaattacttatacggtttagtttcgttgattccagtgacttcagcacttagcattttacctttgcctaatgttccgttcttctgggttttatttcgcacttattctcattggagagccttgcagggaagtgagaggctgtttcaactagtctcagataacagcaagacttcaaacacttgtacatatgaaaagaaaactgagcacaaggaatctaaaagtcaaagacatagttcatatgaaccttgttgggtaagccctttacatattctcttctgttagaagagatattggtgagttcatagtggcttcaacctcccttgcaggacgttaaattatgtcatgcatgagccaaaaaccattttt

SEQ ID NO: 17473 - DNA, 424 bp, Glycine max
ctgatttttctcagcacacacttgaaagcgagaacacccttgtttgttttagctcctaagttggaagcttgtagattgattttcactgccaagcaaaagaaagtgagggaatctaacccttaattgaacacaatgagttcattttacatgtctctgaacccttcaatttctcaatcgtgttacaaacccaagcaatttttcaatttggagagagagagtactttggtgggaagaagtcctgttattcagattagatgccggagggttgtgagtgcgtgtcttaacgtggatgttgatgcacctgatagtgggaagacagcattggagaaaaccaaggatgtgatcgagatggaagggaagttcttggtggggacatatgcaagaaacaccggtggtgcttgagaggggggaaggtttcaaattg

SEQ ID NO: 17474 - DNA, 327 bp, Glycine max
ctctactcttctttcaattcaatttctccattcttatttgctttcccaggaaatttagtaaatgcacgagttttttcagttttgtgccccaatttgcttcattagcagcaaaacgaaaaagtgcaatgggtgcagtttacttttctcaatcatgttacaaacctaggcaaattttcaatttggagagagaaagcactttggtgggaagatgtcctgttgttcagattagatgccggagggttgtgagtgcgtgtcttaacgtggatgttgatgcacctaatacagggactacaacatcggagaagaagaaaactaaggatgtgatcg

SEQ ID NO: 17475 - DNA, 554 bp, Glycine max
ggacaacgttgcttgaatttggagtgttcgtttttttacgtcacgtgagtgtcaccgataaatcggaacaaaacaaacaaccttagcctgatgcctgagttctccgagcccgatcatgcatttcatcgtccatgtccatggatatgaagatgaacatgcttttctttctcgtcctttttgcttctgcaatttcctcttctcttgccaagggttccttgcaacaaacccttcttccttcagaagaattcaatgacggtagtaatgcaagcagtgcaaggcatttattagaggatgagtctcaggctcagacaagtgttgatttggcacaaggatttatgtccaatgatgaacttgaatgggccatccaagaatttggacaaagatgcagcaacatttccaggatatacagtattggaaagagtgtaaatggttttccactgtgggtgatagaaatttctgacaagccaagagaagaaaagactgaacctgcatttaaggttattgggaaatgtgcacggtgatgaacctgtgggacgtgagctgcttatattttt

SEQ ID NO: 17476 - DNA, 463 bp, Glycine max
tgaatgtgtgatgatttattaatttctttcctgtgacttggtttgttgtcattctgaatgctgttgctaatacatgcattgttggagttcaattggttgctttgctggctctttttttgcacttagtttttatttttatttccatcaacttgatttgtagttttctctttgagtttaattcccctcaaggtttgaattgtatttgcttttagagtttaattcaaattcactaactatgataaaaatctgatcataaattatcaattatgataagagtattgatttttataataattatttaaaaatcgtatctaaaataattttttagaataattattccatagtaaataatttatgcactgaaatttattaaaaactttttacacttttatttaattattaattattcatatttttttagactggttacttttattaataattaatttattaatttttattt

SEQ ID NO: 17477 - DNA, 1280 bp, Glycine max
cacataccaaaccacgttggttctctcattttcaactttcaattcctgttccattttttacacaaaggaaaggaaaagagaagagcgaagagaagacgtagtggattttggtccgtgtatgcaacgaaggagccacgctcgaacacgatgcccctaaccaatcatcttaacataaaaacattttaacattaaaactcttttccatttctcactctcttctcttctctcacgctcccgcccaatccaatcaatggcttcttctctttccccttctccctcttccctcgaccaaacccttcgcgacgtcgacgactacgttctggaaaatgggtcagaaggtttgtcaagggacacacttcattatgtgtacgagcttgtgaagaatgggaatgtggcatttcgagagaacagaatggaagaggcaatcaacttttactcaagagccaataacatcaaatcaggtgatcccatcatcctcagcaatcgaagtgcagcttatattaggattagccaatatttcatgcacagaacaccatcatcttcagaacgtaggccattgagtgggcttgaacccacaacacttgctgaactgggtttgaaggatgctgagaagcttgttgaactccaaagtaattcagcaaaatcatatcttttaaaggccaatgcttttctactgttagagaaatatgaaaaagcccgggatgttattctttcaggccttcaagttgatccttttagtaattctcttcgggcttctcttcaaaatttggaaagtgtttcatctagttcaagagggatgagtacacatggacatccagaacgtagtgatgatttatgattgcactctctgcctgaagttactgtatgaacctgtcacaaccccgtgtggacattctttttgctgttcgtgtctatttcagtcaatggatcgtggaaacaaatgcccattgtgcaggactgttctgtttattagtcctagaacatgttccatcagtgtgacattgaagaacatcatacaaaagaatttcccagaggaatatgctgaaaggaagcaagagcacgacagtttaatcaaagctggtgtagatttactccctctttttgtcatggatgttgtcataccatgtcaaaggtttccactcaatatatttgaacctcggtatagactcatggtaagaagaataatggaaggcaatcatcggatgggaatggctatacttgattcaacaggttccttagctgagtttgcctgtgaagtggaaatcacagagtgtgaacca

SEQ ID NO: 17478 - DNA, 623 bp, Glycine max
gttgggtggtccatttgtccctcatattgagcgcattattcgagacaaagcagtagccatgaattcacctgtagtgtcagcatacgatactggaaataagtgtactatgaaaagtttcagcatactcaatggaaggccttgtcaaatttgtgatatactgatacaagttgtgaaagacatgaaaatgtcctgtaagttacatgatgtgaagttgcaaatgctttggagatcaccaacttcaaaatgcagctactgctacttgtgtggcacttgttcttcgcaatttaggatggagtatttctgataaatctattaggtatggtttagaggatacataccttcttggaaggagtcaatttctaacatctgaagaagctgaggtattaggacttactggatcaacagtactgcttgatggagcccacaccaaagaatctgccaaagctctgatgaataccataaggatggcatttcccaaggctcaattggtttttgttgttgcaatggcaagtgacaaagatcatgtgggatttgctcgagagattctctcaggtgtacatgtggagactgtcgttttgacagaagctgctattgctggaggtgtaactcgaacaacaccagca

SEQ ID NO: 17479 - DNA, 800 bp, Glycine max
cggacgcgtgggcggacgcgtgggctttccaagtacctgatgagtggttctcagattttggagggtgtatatgcatagtcagaggattcatgcatgactcagactgtctaaagaaggggtatagttctttggaagctgtactgttatgtgttcctgttgattatcaatgtgtggatctgtctttgtacaaggatagtcaaatcgtcctgttactaaacaaagctactaatacatctgaaagtgctggagatggttgtatgatgattctgcaagtaagtgatctaccatatgtctctatgtcaagatctgcttgtatagatgtttggaggttaccagaactaaaggattctgtcgcttacctgaatattggggatgagaaatctcgcaccattcgtcattctgtaattgctcccttggcagttagtgcatcaagaggcgtggcttgtgtatttgctgcaacaaagcgtgctctagtctacattttggaggaagatgaagatgaggtctcggatgtagaatagtttgctatttaatttatttttcattttttgcttttgttttggctgtggttgaggggttgtaatcatttgccattttcataatggtccttgaaacacattgttgtagaatgtccatatcccttattagtgttcacttgaacacgtaattaatttaattatttttcctaagatagaagtaatcagttaagcccaaaaaagtaaaaaagatcaaacagagtaaaagaccgaaagtactggagtttagtacccattaataataatttgctaattgtttgaggt

SEQ ID NO: 17480 - DNA, 559 bp, Glycine max
atttgaagtcaagtgttgttgctgtttttatcgccaatgaagagaattctgcgataactggtgttggtgtggatgcacttgtcaaagatggcctcctcaataaactcaaggatggccctctgtattggattgacacggcggataaacaaccatgcgttgggactggtggtatgataccttggaaacttcacgtcaccgggaggctctttcatagtggattagctcataaagctataaatgcgctagagctagccatggatgctctaaaggaaatccagttgcgattttactcagacttcccacctcatcctcaggaacaggtttatgggtttgcaaccccttcaaccctgaagccaacccaatggagttatccaggaggtggaatcaatcaaattccaggggaatgtacaatttcaggagatgtcagattaactccattctacaatgtaaaggatgttatgaaaaagctgcaagaatacgtggacgatattaatgagagtgcacagaagctagaatctaggggtccagtttcaaaatatgtcctacctgatgaaaacat

SEQ ID NO: 17481 - DNA, 690 bp, Glycine max
gcaatacagccaatgtatacagcagtattaaattacaacactgagtttccacagcttggatctgctcacagaccccacctttctgctgaacaccaaccacgacctcttccacagcatatacctgggccctgggctgcacaatcaacacctgctggaattggatatggacatcccgagaccatgatgccaccattaatcctaatcaagttggtgcacactcctcatcagccatgtatctgcattcatctcagtatccctgtcagcgccctggaatgccgtttatacatcatgaacatgttcaccaaccctttgcacagtctcatcagcccccaccagatgcaagttttggattggcccggccccggtgaggggcatgggccatgcctgcacccaatcagccagtggtataagataagatcatgggctgctgcagctccaaatttcttttagctgattggagtgcaggcatataggccgagtttggctggaatggattggcttatatttgaaatatcagcccaccagcattgatctatccctccaatctcggctttgcaaggatgcttcctgcatcttccaccagtccgtgactgtgtccctagtagacatttgaattttttgaggagcttttagagcacatagactgttgatcatgaagagtaaattgaggacctcttcagaggaaatgga

SEQ ID NO: 17482 - DNA, 853 bp, Glycine max
aaaatcggcactcatgagttattattagggtttgcaacctttaaactctgaagctgcaatagcacagcacagaatggggcgcaaagagaagcagaacgcgaaggcaatagatgaggaacacgacgtagtaaattttaacggcgcttcaacgccgtccctcgttttcagcagcgacgacgatgaagccaaccaagatctcagcctcaagatcgtcgaaaaggccatgcgaatgcgcgccgccaaacacgccccaaacgacgacgtttcttctccgttttcgcagaaatccgaactcgcagtgcccctaaacgacgtcgtttcggatttgcccagcgcaatcgctgattccgaagtgacggaaaagaagaaaacggccaagttgaagagggaggcggctggggatcaaagtgttgttatagcggaggagcaagagatggaggagacaatcaatgctacagagaatcatgtggaaggaagaccagagataggtgacaatatggttctgcgaaagctgcttcggggtccgaggtattttgatccaccagataatagttggggagcatgttttaattgcggtgaggaaggtcatgctgctgtgaactgttcagcggtgaagcggaagaaaccgtgctatgtttgtggttgtttgggacacaatgcaagacaatgcagtaaggtgcaagattgctttatctgcaagaaaggtggtcaccgtgctaaagactgtccggagaagcacacaagtacttctaaaagcattgctatttgcttaaagtggggaaaattcgggcatgatatcttttcctgcacgaatgattattcacaggatgatctcaaggttattctttttctt

SEQ ID NO: 17483 - DNA, 449 bp, Glycine max
caacaaagaggtagtcattgaacaaaaaaaatatggagcaatctaggcgatagcaactgatgggcacaggaagtagtggacgcgtggcacgatagcagcatgtcccgtcgacgggacaagaaaatttggaccgttgaaggctccttggttgcggcgccgttgaccggagccataggttacgtgattcgatgattgcatctaatcatcaatcatcagttaattaatgcaaaattctcgaatcagttgtaaccatgttggtgctggcgctaacttcctttgcacccgccgcgaatccctttcgatttcgaccccgcgcgttctgtcgccgtaagctcaaaatcaataactctctcccaccgccttcttcacccgcagttcctttcgagaatctctttcacagcttaataactcagttcccttccgtcaactcactcaatttcattactccc

SEQ ID NO: 17484 - DNA, 249 bp, Glycine max
tattgcaacacaaaagtggaaagaatgactgacccaaaactacctgcagtagtattcttgctactcttcaccttaattcttgcatctagatttacgcaaggtcatcgtcatgtcacactcttctacatgaattcttcatgtcatatgagttccattcaattctcaccttattttcacctagtttcttctactctctctccttttatgattttggatctgtcttctcatactaaagaatcctaatttcac

SEQ ID NO: 17485 - DNA, 316 bp, Glycine max
ccaatggggagaagcacaagatcagctgtgcaatggatcacatcatagatgctcagatgaagggagaaatcagcgaagagaatgtgatctacatagtagaaaacatcaacgttgcagcaattgagacaacactatggtccatagagggggctggaccagagttggtgaaccatccaaccgtccaaagcaagattcgtgatgagatatcaaaagtgctaaaaggggagccagtttcagaatccaacctacacgagctaccatccttacaagccacatttaaagagacactgagactttacacttcaatttctttttt

SEQ ID NO: 17486 - DNA, 1397 bp, Glycine max
gctgggagaaaacaaccgacaggacatattctcatagtataccattgaattaccttatttccttgatggggaaataagataattaacgaacccccgactattggcataattacaactgttgttaaccaaggaaaataattcgtgataaaaataagatatacttagactagaaaaacccgcgctcaaaataaaaaaagatctccttttttatttcgagcgcgggtttttaccagtaaaaaaacgtacttgtgtgtggttctttttgaaacgtatcaataatctagacccatgcttcgagttgtttcatgccataaataaactctaacacttaagaaatctgtcggacaggcggattcacacctcttacaaccaacacagtcctctgttcttggggcagaagctatttgtttagctttacatccgtcccaaggtatcatttctaatacatccgttgggcgggctcggacacattgagtacatcctatacatgtatcataaatttttactgaatgtgacattggatcgtaatccttgaacatcaaaaattcaacattttcaatctagtaaacttgtaaacgaatttatatatattagataccagatgaatcaatgatttataaaaattttgataatcaaaatatacttatagattaattaataataagagaatagaaccaagatactttgatttcttatctttgttttcgcaaacatgattctaatttatatatcatatatgcctatgctaatttgaattcattaatagtccacacaaaatttaaattatactttttttattttttatgggtaatattatttattcaataaatttgattgattgatgcgggttgattttctattacgataaattgaggaaacaatagccggtccgatagctgcttcagcagctgcaatagctataacaaaaattgaaaaaatatttccttttaattgtcgactatcaaaaaaatcagaaaaggttacgagatttatattaactgcattcagtataagttcaagacacataagggctctaaccatattccggctcgtgatcaacccatatatacctatagaaaataaataggcactcaaaacaagtgcatgctcgaatatcattgaccaactccttatcaatttttattcatttcgatatgaacaagaagaattcaacggatttgattgactaatattataagtctacaacaaaataaagtattcgcaataaaaaaaagattttatacagaaatattcgttttcattcacatagaattcaaccaaaataaatgtgataaaatctaaaaaaaaaaaaaaattgaattttggttttggtttatattattagttctaaaaatttcttattggcgagctacgacaattgcacctatcaaagcaac

SEQ ID NO: 17487 - DNA, 425 bp, Glycine max
ggccgaccgacgcgttctatataatgtttctccaccaatttttatcgtcgattccagataaattgcctaatacaaacatgggagctgcattcaaggacaatcttgggaatcgtaaggctgcatgcagcaagagaaatgctaagaatatcacctcctgtcccaacaaaattcttaatattttccttatacaacgagataccaaagggagattatgtgctagaagagctcgcggatagcctcaaaaagggcaataatggacagtcatgtagtgcaagttctatccttaggagtatgaacatttccaaaagtgtagattctgatataataatagatgaggcaagtcaagcagatggaagtgttaatgttgtagacgatagtccctcattggaggctgctatcaaacaatctagggaggaagaaaagga

SEQ ID NO: 17488 - DNA, 686 bp, Glycine max
cgcacatcctctataaggagggaaactgagctcagtaagaagcctcctcgccaatctttagatggatacaagcacgtggttgatgtggaatactgtcccccagttccttctgatggccctaaatttcctccaaaagcagtaaaagcaaaagaggcagcacaaaatgcgcccaatacacagaatactgtggaatatcatgaaattgtagaagatgagatgattcgaggattacagcagttgggatggaaaaaagttgatgtcagctttcactcagcattctggcctttctttgctcataacaacattcatgtgaaaaatgaatggtttcacaatgctggtgtaggagttattgctcatgtggccgaaagcttaagacagctagaagcatcatcatttttgtctgctagcttgtaactagtgtactagtatgtgattccactttgccgggaacatgcctaatgttgtctttggttcagagaataaaaatagagatgtaaattgaagagaattttttattattaaaataaggtgtaaaaggtatgggtccacatgagacccaccaaatttctttcttatttctctcctagcttcctaaactaaacaccgcctaacttatacaatgcaagatgagaaaacatttttttttatcatagtagtcattaatatacttacaatattttattatt

SEQ ID NO: 17489 - DNA, 1075 bp, Glycine max
gacgcactcgtccgagtggattttgctttgtttcttcgaaacttagcataaaacagcgtaacagtatccatccgtggcttcacctgcaagccaacccaccaaacccttgtcattcactcccacctatctgcaactctaaacccaatatacccacgggccacggtcggtgacgctataatccaaattacggtgtcgttttcagttcgtttaagcatcacccttcccaattgtattcactactaccagtatcttaatctaatccccaaccacacctaaaccaaaccatcagcataatggggaactgtttggggaagtcggagaaattaacggcggagattgttccacgcgacggggccaaagtgtatcccaccgtccgcttgcacggctcgcccaagagcattctcgccgcctacatccgtttcgcgcttctccacaagtccgtttcgttggacttggtcgaaacggcaacggagcgcgtgggagatggtggtggtggtgcggttacgctccaggtggggtcggaggttgtttcgggctcacgcgagacgctgctgcggttcatcgacgcgcgcttccctgggccctcgcttgggagcgggagcggaggacgaaacgacgccgttgctggcgagcttgacgcgggcgcaccacacgagcatgctgtggcacgtggagaggatggttaagtgggcggaggatctcacgacacgtggcggaaagaagatcgtcgatccttccgtggggactcccaggatggagattagaaaattcgccaagagctactctgagctgcttgagctcatgatggaacacgctcagatggaagaaaccatcctcttccctctttttgataaggccgatcgagggcttgctaaagctgcaaaagaggaacatgctagggacctacctctcatgaatggcataaaagaagtcataaaatctgttggggttttggactctggcagccctgattaccatgaggctttgtacagcctttcttctcggctcaaatcattgcaggggcaatgcaaacagcattttgcagaagaggaggtggagttacttccgctaatgg

SEQ ID NO: 17490 - DNA, 385 bp, Glycine max
ttcataatcatattaacaacaacactactaccacttcccagtatcttaatctagtccacaaccaccctcagcataatgggcaactgtttggggaagtcggagaagaaattaacggcggagattgttccacgcgacggggccaaagtgtatcccaccgtccgtttacacggctcgcccaagagcattctcgccgcttatatccgtttcgcgcttctccacaagtccgtttcgttggacttggtcgaaacggaaacggagcgcgtgggagatggtggtggtggtgcggttacgctccaggtggggtcggaggttgtttcgggctcacgcgagacgctgttgcggttcatcgacgcgcgcttccctgggccctcgcttgggagcggga

SEQ ID NO: 17491 - DNA, 1270 bp, Glycine max
tcgcttctttttcgctggagcctcaccaacagtacaccattcaattctttccagccgtgaaatgagagccggactaagcaccatccagcaaaccctaacgcccgaggcggcgagcgttctcaaccactcaatcgcggaggccggccggcgaaaccacggccaaaccactccgctccacgtggcggcgaccctcctcgcctctccctcgggcttcctccgccaagcctgcataaaatctcaccccaattcctctcaccctcttcagtgcagagccttggagctatgcttcagcgtggcgctggagcggttgcctacttctcagaacacgggctcttccatggagccgccaatctccaatgccttgatggcggccctgaagcgggcccaggcccaccagcgccgcggctaccctgagcaacagcagcagccactcctcgcggtgaaagtggagctggaacagctaatcatatccattctcgacgaccccagcgtgagcagggtcatgagagaagccaggttctcaagcccccgccgtcaaagccaccatcgaacagtccctcaacgccgtcccctccaccgtttattcccgattgggattccggccaagcgcggtggctccggtgaattccgccccggggcggaatttgtatctgaacccgcgcctgcaacaacagcagcagcaggggagtactgcacaacacaggggcgacgaagttaaacgaattttggatattttgctgaggacgaagaagaggaacccgatcttggtgggggaatcggagcctgaggcggcgatcaaggaggtgataaagaagattgagaacaaggaattgggagaaggggctttcgcgaatgctcacgtgattcatctggaaaaggagcttccgagtgatacggcgcagagacctgcgaggttgaaggagttgggggatttgattgagaccaggaatcggaattctgggtgtggaggggttttcgttgacttgggtgacttgaagtggctggtggagcagcctgtggggtttgggattggcggtggtttgggtaacatgcagcaactgaccctcgccgaggctggcagggcggcggtggctgagatggggaggttggtcagcaagttcggcgagggtggcgctggaaggctttggttgttaggtactgctacttgtgagacttatttgaggtgtcaggtttatcatcctaccatggaaaatgattgggatcttcaggcagtgccaattacctccagagcacctctccctggaatctt

SEQ ID NO: 17492 - DNA, 549 bp, Glycine max
gtttttggcccgttaatttccgagcaatcgttcgccgtctcttgaagctgctgctgctgctgcccgttgtgaagtgtttgttctccgtcatctcgcgtcgttagttcattgaactcactgcattgagtggatttggtacaagttgagttcagaatggatgggcgacatcagaagcaaaaaaacaagtacagtataattgttcctacatataatgagcgtctcaacattggtctcattgtttacctcatcttcaagcaccttggggatgctgattttgaaattattattgtggacgatgggagtcctgatggtactcaggatgttgtaaaacaactgcagcaagtttatggagaagatcggattctgttaagagcacgccctaggaagttgggtttgggaactgcttatattcatggcatgaagcatgcatctggaaattttgttgtcatcatggatgctgatctatctcaccatccaaaatatttgccaaacttcattagaaagcagtcggagactggtgctgatatagttacagggactcgttatgtt

SEQ ID NO: 17493 - DNA, 451 bp, Glycine max
gacccactcatcggtagttttagggcttttcattcttcactcttctcttcgcttcaatggctacaatcgttctcaggaattgctcttccacttctcggcgcctcttccccttaacctctcaaatccactcttccttcactcgttcccctctctctcctcccgttttcaccaatgactccacatcttcttcttcttcttcttcttccagttccaacccctggtggagatccatggccaccttcaccagaacgaaacctcacgttaatgtcggaactattggacacgtggatcacgggaagaccacgcttactgcagcaatcaccagggtgcttgcggatgaagggaaagctaaagctgttgccttcgatgaaatcgataaggctcctgaagagaagaagagaggaatcacgattgcaacggcacatgtggagtatgagactgcgaaaagaca

SEQ ID NO: 17494 - DNA, 685 bp, Glycine max
gcggcatgatttccttgatggtaaactcaaccatatcctgaattttgtttgctaattgattggggttccgttttgggaactacgtattataataaatcccatctttactttgagattttctgtggaaggataagagccttgcatttaaatattaactttctgtttcccttgtcaagaacttcaactctgatgctgacgctcaagcaaatttggctatcaatcttgtagatggccaagtccaggaagagtgtgtgtaattcactcatggccgctgctggttatgttttgggtttgttgcagaacacgcctgcaatttacagattactcctaagaattggtgacccaattatttagcaatcaaaccctaagaatgaattattttctactggtcctggctccgtagtcataataacttttagcctcagcgttttcaatttccatgatttttttccgccatggaggattcctatcaggacttctcaacactgcagtcacatcaagttagagtttatcattttcattctttagcatatggaagacctgaatatcttacggtctatagcaaaatgatacttgttcaataacactaatattatcatacctcttagttgaaagtactgtttcattaactttttgtatccattcggactcttactgggttttaatagttacattttcaagacgc

SEQ ID NO: 17495 - DNA, 851 bp, Glycine max
cccacgcgttcgctaaacccctcgttggtggtagcggctgtgacagactcagaggcggagcaaggagaatgggaaggtcgagaagaaagtacaagcaatcgagaaccaaggtccgtgtgggactccctaagaagaaccctaggcttttcaaaccctctttctccgttccacccaagctcttgcaatccctcgaccaagagcctcaatgggacgaccaaggcaccgttaacaccaactactcctcctttggcgttctctctgaccctaactccctcaccgaactctcttccgatcctcaaaccatcgattccggcagcgatctcgaagaagacgacttgaaatctgccctaggaaagaagcgaagggatgggaggagcgcgccgcctcagcctctgactgcaatgcaacggattcatatcagtcgtctcgtcgctaaatacggagatgattatcagagtatgttggtggatataaagctgaatccgatgcagcattcaattggaactctgcagaagctgtgcatgaggtatcatatgtatcaaaataagaacccgctccttaaggccaaatgaaatgggagcttaattaattaatccatggatggagatgcaatgattggagtggatcgtttagccaaaatttttgtcacagtgaggacgtgtttctctaccatgtcatcgttgagaaattttgttaatgcttttgaatttttgaattatttgtggatttttgttgtgatagattaggcattctggacctctgctcttccagtcttcctaacctgctaccaccaagattatgtagcattttattatagaattagattttcaatcaaaaaaaaaaaaaaagga

SEQ ID NO: 17496 - DNA, 543 bp, Glycine max
ttcatcttatcaaagccttccctgtttgcttttttcacaattcacttcttttccagagagttagggaagaggaatagagaaagagaaagagaaagagcgtgagagagagaaacagcacaaggatggagctttctcaacttggttttctggatgagctacttgctccaagaaaagacactacttggagtaatgctttgtcaactgggttgaatgagttactactccctagtggttggagctttgactcttttgatgagaaccaaggtttagctactttgaatccctcatttgctgcattttccactccactagaccacagatttgaatgcccttatggaagtgaagcagcatacccttttgttgatggcttcacattgcctgagcttgattcttcatacaccaggaatgatgagtcagcaccacttttgccacaagaggataacccatcattggaggatgaagagtttggctttctgggaagggataaccagagcttggaacaagcaaaaattggctgcaaaattgaggaacaagtgacagaga

SEQ ID NO: 17497 - DNA, 446 bp, Glycine max
gcgattcattcctatagctatagctacaacatatcatactactactgttgttgttgctgctactgctgttgctgctgccgcgtatcaatcactcgcttaccataatgggtagggatagccatgaccccacttcctttcactcttccattgcccttctacaagagaggtttagacagcttcagagagtaaaagaaatgagggaggagagggagcttcagaagatgctcaatgaacctaaacaattcagttccaacaccaccacctctatgagtcgtacttatcacaattccaacaattctatcctctctcaccctgaattgattatgccatcaaagtcaccaccccatgtttctctctctctctggccaacatctcagggcaagcaagaggactatagaagtgctcaaaccccggtttcaatgaactatgcacattcacagtccatg

SEQ ID NO: 17498 - DNA, 1421 bp, Glycine max
cagcttacagcctcatgttcaaccgcgccatcggcttcgccccttacggcgtctactggcgtaccctccgccgcatcgccgccacgcacctcttctgccccaaacaaatcaaagcctccgagctccagcgcgctgaaatcgccgcccaaatgacaaactcattccgaaatcaccggtgcagcggcggtttcggaatccgcagcgtgctcaagagagcgtcactgaacaacatgatgtggtcggtgtttggacaaaagtacaaccttgacgagataaacaccgcaatggacgagctatccatgttggtggaacaaggctatgacttgttgggcacccttaattggggagaccatatccctttcctgaaagactttgacctacagaaaatccggttcacctgctccaaattagtccctcaagtgaaccggttcgttggttcaatcatcgccgaccaccaggccgacacaacccaaaccaaccgcgatttcgttcatgttttgctctctctccaaggtcccgataaattgtctcactccgacatgattgctgtcctctgggaaatgatagttagggggaccgacacggtggcggttttgattgagtggatactggcgaggatggtgcttcatccggaggtgcaaaggaaggtacaagaggagttggacgcggtggttaggggtggcgctttgacggaggaggtcgtggcggcgacggcgtatcttgcggcggtggtgaaagaggttctgaggctgcacccgccgggcccgcttctctcgtgggcccgcttggccatcactgatacgaccattgatgggtatcacgtgcctgcggggaccaccgctatggttaatatgtgggccatagcaagggacccggaggtgtggctggacccacttgagttcaagcccgagaggttcatgggtctggaaaacgagttttctgttttcgggtcggatctgagactcgctccattcggttcgggtcggagaacatgccccgggaagactttgggtttgagcaccgtgaccttctgggtggcgtggcttttgcacgagtttgaatggctaccgtctgatgaggccaaggttgatctaacggaggtgctgaggctctcgtgtgaaatggctaacccactcattgttaaagttcgccctaggcatggattaagcacttaatgatgatataattaagcctattaatcataatcataatgttaagtagcaggtgcatggccctttggagccactaaatgttaagtgaatccatgaatcaaggtagaaagtttgagttggctctgtctctataatatgggtcaacgggtttttgttttttttttttttctctccttgtttttattaagttgacagtctcaagttgttcggtaatcgaaaaaaattagaaaatatatctatttccactgt

SEQ ID NO: 17499 - DNA, 402 bp, Glycine max
cagcagacaagcatccagcgcacatccaccacgtccgcaaaaatcccacaccgcttgcttccctggcccctcccctctctcacatcaaatccatttcgccaaatttcacatcactcttcacaaacagaaaaatagtcctccgccgccggcaatcctaggtttccggtgacgatgctcccctacgcttccatcccggaggccgtggcggcgctgggccgcaacctcaccttcgcggagaccctctggttcaactactccgccgccaagtccgattacttcctctactgccacaacattctgttcctcttcctcgtcttctccctcgtccccctccccctcgtcttcctcgaattcaagcgcttctccttcgtctcttcccacaagatccaaccaaaagtccgc

SEQ ID NO: 17500 - DNA, 522 bp, Glycine max
cgcgtacgaaaaaaagtcagaagaaaattaatttgatttaaaagataaggggggcccagctatttatatgcttcgttcatgcaacatatatggaagggtcttcagaatgcctaggacccctatgtttttgtgccactgccacatgttggataaatagagatttcgttcagtcaagtttgaacatggaaagtaacatctgttgtcgttttggctttctcaaaaacacatgcccttctctgtacgccatcgttagctcctactactaataaccgagtacacttatttaattcttactactaatttctccccctattattagtattatttattagtttataatttgtacattattccatttttttcacaaactttcccataatttatccaaaataaagacaatttatatatgtacaggaattatattcattttcacaattgtgcttatttgaatagggaaattaacaattgcttgatcccaaaatcaaattgtactcacactattctttatgagcttgagtatat

SEQ ID NO: 17501 - DNA, 960 bp, Glycine max
ggcactgcatgtgcagcaatcacctctgcccacttcatattattttgcacttctcaacctctctttgaaccactcatatcatcacacagccctctcacccttttacatatatatacacatgtatacatatgtgtacgtaccttccaatctaccaagtgttttattgtcttaaatagttcaacacctgcaggcaattgataccctcgttccagccacaatgagcagcagtcctgcaccttgcagccgatcctggtcaataagtgaggactccctaagaaggtatgtgcagtttgcgagtgaaagctgcgtacaagagttattggcagcttcggtcacaaacaaaggaaatggcaacgatggatggaaggtgctcactcttgacaatggagtggagatatcaaaacgcaggtcaggctcactccacacgtttcgcagccgttgggttcttagagctgtctctccccaacagttcataacagtggccaatgccattgatgctgcaaagcaatgggactctgatctggtggaagccaggtacataaaagatcttcaagacaacctcagcataattcgtcttaggtttggtgataactccaagcctctcttcaggaatagagaattcattgtctatgagcggcgtgagactatggaagatggcaccttggtggtagcagttgcttcactgccaaaggaaatagctgcagggttacatccggagcaaagtaatgcaatcagaggactgttgctacagtcagggtgggtggtagagaagcttgaagatgattcatgtgtggtcacttatgttgttcagttggatcctgcaggatggctgcccaagtgctttgtcaatcgatttaacacaaaactggttatgatcattgaaaaccttaataatttagcccaagcatgtcctagtgaaggtgatatgtgagtactctgtaaccaagtatagtattaatg

SEQ ID NO: 17502 - DNA, 237 bp, Glycine max
gatacaccataatattatgaatatgtctttctagctccaaaattcctatgcatgatggcaattgataccctcatgccagccacaatgagcagcagtcctgcaccttgcagccgatcctggtcaattagtgaggactccctaagaaggtatgtgcagtttgcgagtgaaagctgcatacaagagttattggcagcttcggtcacaaacaaaggaaatggcaacgatggatggagggtg

SEQ ID NO: 17503 - DNA, 444 bp, Glycine max
attgatctcaaggtggaaacacatcagtaatggctcaattgggttaaatccatacagccgctatgcagatgattctgtttggatgattgctgaggcactcaaattgttttttgatcggaatggtaccattttattctctaacaatacaaatttaagtggtacgagatttcaaggacacagggtgggaatgggacttcaagtggcagagaccattatttgacagtgagatagatatggcggtctcatttatacaagaagttgaggggtacaaaatccagtctcatattggtgatcagtgggtgtgggcggcagatcctagtggccagtattcgattaggagtgcctatagtgtgcttagagaggacatatcagaggaggcccaggatggagagttcaaggaattatggaagcttaaggtcccacctaaagtggctgtgtttgcat

SEQ ID NO: 17504 - DNA, 432 bp, Glycine max
gtccaagcttcatgcacaattgcacatgctgtgtcttgtcactaaagaggagggtgtcatgggaaccaatggtttgttatatttggttcttttgaatatgacacccttcttcaataatttgagtttaaaactggagatctatcagcctatgtattatttgattattttgcaagaggttataggttcaaatcttgtgtcattattgtaacaccctctcccaaaacaaaaagatattttgtatatagtatctggattagtgctgttaattaattgcatgtgtgttgaatatctcaaggctaataaggagcgttatacatacagttcaacaaagacaaagctactgctacatatggagtgctgcctgctgccaatgtccctccaccttatgcccttgcatcaatttcagccttgcagtttgaccactttggacac

SEQ ID NO: 17505 - DNA, 804 bp, Glycine max
ctgtcgcgtgggaaacaaaacactctttcaaagtaaacaagtgatcaacaatattgcaagtgttgtcaatacgttcatctttgcaactgcaaacataaatgtaacacaaggtagtcctggctcttacaatcagtctgggcctagaatgccgtctttatgctacccttttgactctcagtttcaagagcgtcaatgtacagatcaagaagtttcttctgccaatgcttcaagggtttggaagaactatgaatgtgaggtatctgaatctggcatttgcaccacagttggcagggtgacccccgagatttacttgcagatagtagctgcggtgaatgaaatctatgcattagaacattacactccacctttacttagccttcagaattgcaattttgtcagggatgcgtttacaaaaatcacttcaagctactgtcctccattaaaccattacctcaagattatcaatgtaggactcggcctcatttcagggggtgttctactctgccttgttctctggatactctatgcaaaccgcccccgaaggagggaagtgtttgagaagtcatccttaccagaaaccaccacaaatttaccgttgtcaaatgcaaatagtgaaatatagattggacaataaaaaaaatagttgataaagcagagttccttattgttttacaattccctactatattacggggaagaaacaaaggtggagcgaagctgcatctttgagtttgaagagaatagccaaagctagtgtactacaacttttttccatataaagaaagagcattttaaattgttttt

SEQ ID NO: 17506 - DNA, 856 bp, Glycine max
catgacaaagacattttacaaaatactttaaaataaaaaataaaataaacatcttttcgaaggctaaaataaagataaaataaagatttaagttccactaataaaaatatatttaggtaaagacttgatataaaaaggaactttcgtgctaagaaattttatgcaggattattggttggtctcaacaaacttatgtagttgaaagtccctgaaaagacacagatatcatcattaagcttggttctaagatgttacaatagtcacatgttgtctgagctgtcaaccttcagtattgaactgagatgttttaagaattggattaatcccagctctcttgtttttacaggctatctcggttgcagccgaatctaaacgggaagaagagaaagccaagggagtgaatccagataatggaggagaaaatccagatattgtaccatttgaagacaatgaagaagaggaagaagaagagagtgatgaagaggaggagagcttcagtcatggtgtagggccagctggccaaggcagaggtaggggaagaggtatgatgtggccgcctcatatgcctcttgggcgtggagcccgacccatgcctggaatgcagggctttaaccctgtaatgatgggtgatgggttatcgtatgggcctgttggtcctgttggacctgatggctttggtatgccagatcttttcggtgtgggaccccgtggttttgctccatatggtcctaggttctctggtgattttggaggtcccccagcagccatgatgtttcgtgggcgaccctctcaacccgggatgtttccaggtggtgggtttggaatgatgttgaatcctggacgcggtcctttcatg

SEQ ID NO: 17507 - DNA, 657 bp, Glycine max
gacatttccagggttgtgcaaagatgacatccaaaattggtggttctgttgctggggggaattggaaatatgctcatggaactgcacattatggacggaatttctctgttaaatggttgaagttatgtgaactgtcattccacaaaactcgccattcaaggaatccatacaatgagaacttaccagtgaagagaagtagagattgtcaggagctggagccctctattggagagcagctggcatccttgctttatcttgagccagatagtgaacttatggtatattctcctttgagtcatcatcttgctttgtgaataaaaactgataagcaataatcatgatgtacaaatgggaaaaaaccaaattgttctgttatgttactgtgagaaattgagtgactctggaatctggattgatatggtaattgttttacttgatataaaatggaactttcttgctaagaaattttatacatgattattggttggtctcaacaaacttatgtagttgaaagtccctgaaaagacacagatatcatcattaagcttggttctaagatgttacaatagtcacatgttgtctgagctgtcaaccttcagtattgaactgagatgttttaagaattggattaatcccaactctcttgtttttacaggc

SEQ ID NO: 17508 - DNA, 596 bp, Glycine max
ccccgagcgaatcggctcgagcagagtccttccttgtctgttatcactgtgttgcgagcagtgatcgattctgcgaactgcgattcgcattgccaatttcaacagcgtgcgttcgtacgtcggagatggagtcgctaccgacgacgacaaagcgaggaggagcgagatcgaagcccgttcagacctcgaaatcgtccctcgtcatggccttcttctcctgcgtcgcgtggctctacgtcgccggaaggttatggcaagacgcagagaatcgcaatttactcgctagtcttctgaaaaagaattcagctcagaggcctaaggttcttacagtggaagataagttaatggtgcttgggtgcagggatctggagaggaggattgtggaagctgagatggaattgacattggctaagagccaagggtacctaaaggggcaaggccagagaagcggctcttctgatcgtaggcttcttgctgttatcggagtgtctactggctttgggagtaaattgaagagaaatgttttcagggggtcttggatgcccagaggtgatgccttgaaaaaacttgaagaaagaggagtggtcatacgtttt

SEQ ID NO: 17509 - DNA, 485 bp, Glycine max
cggcgtcgacgacgttgtatagcagtccttcttcttctttctgtgttgacggtggcgttgatctgattggaattcaggatcaatggcaggggcagcctctgctctgttcctcctcgacatcaaaggccgcgtcctcatctggcgcgactaccgcggcgacgtctccgccctcgacgccgaacgcttcttcaccaaactcatcgaaaaacaggccgatccgcaagctcaagatccggttgtgcacgacaacggcgtgacctacatgttcatccagcacagcaacgtctacctcatgatagccaccagacataactgcaatgccgccagcctcctctttttcctgcaccgcatcgtcgatgtgtttaagcactactttgaagaattggaagaggaatcgcttcgggacaatttcgtcgtcgtgtatgagctacttgatgagattatggactttggctaccctcagtacactgaggcgcagattctta

SEQ ID NO: 17510 - DNA, 571 bp, Glycine max
  unsure (1)..(571): unsure at all n locations
acctcgtactcgcgctccggagtttcaacggcgcagaccgaatcgaatcctccaacatacgtttccaacgatagatagacaaaacaaaatccgaagctccaaaattcctcctaagtgcagtaaccgaaacccaatgacccacctagccatggtttggcttcaaacatggctccctgaaccctagcgtttctccctcttcgccaacaacgctgatccgatcccgatctgtttctgattccgatccgatccaatccaatggctggggcagcctctgctctgttcctccttgacatcaaaggccgcgtcctcatctggcgcgactaccgcggtgacgtcaccgccgtcgaagctgaacgcttcttcaccaaactcatcgaaaaagagggggatccgcagtctcaagatccggttgtgtatgataatggtgtgacctacttgtttatacagcatagcaatgttttcctcatgatggctaccagacaaaactgcaatgctgctagcctccttttcttcctacaccgtatcgttgacgtgtntaagcattattttgaagaattggaagaggagtctc

SEQ ID NO: 17511 - DNA, 386 bp, Glycine max
gtggaaattttggttgagatgggaaagaagaacaaagtgaaggaaaatggaggcaaagagcattgcccctcgactctttttgtctccaacttgccctattccttttccaattctcagttggaggagacgttcagtcaggttgggcctgtcaggcgttgcttcatggtcactcagaaaggatcagctcaacatcgtggtttcggttatgtccaatttgccgttgaggaagacgctaaccgtgctattgagctgaagaatggtacatctgttgaaggccggaaaattgtagtgaagcatgcaatgcctcgtccctcccggtgaagaacggcaatcaaaaccaaataaagagggcaagacagatgatctcacaaagccaaaagacgatg

SEQ ID NO: 17512 - DNA, 388 bp, Glycine max
cccacgcgtccgccagccgtacggtttctggtcgacgatcctacttcatagcaatccatgtggcctacatatggggatcacttcatgaaaatattattgggttggtcccattatccgagccattatccaggtgactggtatgcacaggaacaatgtgtatcactgctatactgccccatatatcataggttgactccaatgccattgaccctcatgatacactttggaacattgacggcgattcaattcttgctgctggatacctacatcatctgccactgtattggatccaagcttgccttacatctatatccaacattcattcatcatttcttccagctttcgcaagagtggcattctatctcatgatagatcacgaagctgaaat

SEQ ID NO: 17513 - DNA, 736 bp, Glycine max
cggctcgagggcagcacaagaatcccacattctcattctcttaagcctgtcattaaaaaccagtttctctgtacttcatacattttcacaaaccccaagaagaatggaacagggaagaagaagaagaagctcttttggtcctatgtcctcaactattccttgtcttctcctccttttgttctgtctctcaggatctgctgaggcctacaagaattacacagttggcgactctttaggatggtttgacaatactgagaaatccaatgtcaattaccagaagtgggctgacagtaaagaattcagcttaggagatttcctcattttcaacacggacactaaccactcagtggttcagacatacaatttcaccacatacaaagaatgtgactatgatgatgcacaagacaaggacacaacccaatggtcagcttctgatccatccaacacccaaacacatcctgtgacagtggctgttcctttggtgaaggaaggcatgacatacttcttctcaggtgattatgatggtgaccaatgcaagagtggacaacacttcaaaataaatgtgacctatggacaagggttgccaaagagtcttaaatccccagaagatgctccatctcctgctagtcctgttgctggagatgatgattcagcaccagacactattgttccttccaatttcagtcaccccaaagaagaaaatgatgacgacaaaactagtgacgaccagaaatct

SEQ ID NO: 17514 - DNA, 578 bp, Glycine max
  unsure (1)..(578): unsure at all n locations
aaagtgcttgtcaagtagtatctgccactgaaattgtctgaaatgaaaacattctgatcatcattagataacttatcacattatgcaggcagcagcaacaacaccactctatcaactcgtgagcttcaagccaaagcttcaaactttcccttcaaaatctcaactttgccccttagggacccctttctgcagactaggaatggcttctgtttctgggtttgggctgagacccctgagggctgtgggtggttcttcttcatcttctgcatcaggtgatgatggatttgtcacactgatagagtatgtggcgaaggaaggaatgaatgtgaaagatgatttggtggtgttgcttgatcacattcagtatgcttgcaagagaattgcagcacttgtggcttctcctttcaattacagccttggcaaacaaactgctcttggttctgttggttctgatagggatgctccaaagcctcttgatattgtctcgaatgaaattatcttgtcatttttcccaaaaaccctttttttccccccccggnnaaaaaaaaaaaacatcccggaagagttgctgtcatggc

SEQ ID NO: 17515 - DNA, 913 bp, Glycine max
gtctcagcatgatttggtgatgtctactctggattccaacctctcagatatgtcttcattttgcttttagtgtatgcgcttttcttgatttcttctccatgatttctgctttgggtctcacagggaagtcaagtagcggaaatcaggaagtgtggttggttgtgaaagcgcagtggctatcttatttaaatgatttggtgatctctaccctgaatttagaattcttggattgttcttttgcttctacttttcgatggtctagtatgagagcatttcttaaattacttctccgttgtttcgtcttgggtctcgtgatgtgggatggctgttgaaggcttgaagcagtggctatcttattgctagttataccactcgatttaatcatctactttcatttattcgtatgctagattccagatgagttttatttcctgatgttgctgattgaagattgaatcaataaattattatgcctttcttttgaaaccgtggattagaatctggctacagataaacttaatgtcttagatgtttcattttctggatttgatcacagggaatatggattgaattgtgtgcctgtttgttctgcagcggtgggagagtactatttaggttctggtttttattacccttgattatctcatgttcattatggactggctttccttattgtgggttttggatttattgtttttgacagtgtagggttctgtcagagttagacttgacttgatgtttctttttgggaaatgtacgaggataactggttctttataggattggccccgtatgatttggtgatgttggatttataagtgtttagttacttatttacttctcaattgattctctgtggcatgaattgtggcgattagacgttgttattttgacttctcaatggacttctata

SEQ ID NO: 17516 - DNA, 539 bp, Glycine max
ccagtctccgcatgatttggtgatgtctaccccagatcaaactctcaaatttgtcttcaactttgcaattttcttgggtctactatgggtatttctcgacttacttcctctttgatttctgcttttggtctcacagggaagtcaagtagtggtggaaatgtggcgttgtgaaagcagtggctatcttattacatgatttggtgatcactaccctggatttagaattcttggaatttgtcttttgcttcatatctcaaattacttatcccttttttgcgttgggtctcacatggtgtgggttggctgttgaaggcttgaagcacagtgggctatcttattgttggttattataaccacttgatttaatcatctacttgtatttattcatttgccacatgctaggttccatatgagttttatttccgcggtgttgctgattgaagattgaatcaataaatagttatgcctttctggattccagatgagttttatttccatggtgttgctgattgaagattgaatcaataaaatattatgcc

SEQ ID NO: 17517 - DNA, 455 bp, Glycine max
tgtaacatctaagacattaagtttatctgtagccagattctaatccacggtttcattttctggatttgatcacagggaatatggattgaattgtgtgcctgtttgttctgcagcggtgggagagtactatttaggttctggtttttattacccttgattatctcatgttcattatggactggctttccttattgtgggttttggatttattgtttttgacagtgtagggttctgtcagagttagacttgacttgatgtttctttttgggaaatgtacgaggataactggttctttataggattggccccgtatgatttggtgatgttggatttataagtgtttagttacttatttacttctcaattgattctctgtgtcatgaattgtggctataagacgttgttatttgacttctcaatggactactatattggagagagaatattagacagtc

SEQ ID NO: 17518 - DNA, 508 bp, Glycine max
tgaacgatcagtttgttcttgatgcttaccgaaagggtgataaattgaagtttgcgaaccattctcctgatccaaattgctatgcaaaggttattatggttgccggagatcatagggtaggcatttttgccaaggaacggatttgtgccggggaggagctgttctatgattatcgttatgagccagatagggctcctgcgtgggctcggaagccagaggcatctggatcaaaaaaagaggacggtgctccttcaagtggtcgtgcaaagaagcttgcttaatgggagtttgttctttaaaagtcaattctttaggttattctttcacacgtaggggaagcaatctcattggtagcggaaagaagtattgcttttagcttttgttcgtagcaaggccgtgtaattgttgctgcataggtaactaactacatttaaacagttcattttgatattaacagactgtattcatcattccaaacggaaaatataagcttaatcaaaattgcgca

SEQ ID NO: 17519 - DNA, 532 bp, Glycine max
ctctctcagtagaatcaccactttctgccaccgtcaggattcaccttttcttatatcagttggtggaaactataaattgtggctggagttggataggaacggagcagaacagaactatagtatctcatctctcttgatagtagaagtggtgctgactttcttgtgatcagtgatgctggtgaaatctctctcacttcattctcatgccttctcaagttgcagtttttctgcaagtgaaattggaacaaacccaagttgggttcccttaaagtccttaaatagcctctgctgttcctccaagcctagaaatttatgcagatttttgtgtctgagcactcaaaatggtggcttcagagaaaactctggtgaagttggacttggagatgcagtgataattgtggatcatggctcgcgtcgcaaagagtcaaatctcatgcttaatgaatttgtggagatgtttaagcataaaactgggtatgagattgtggaacctgctcatatggaattagcagaaccatcaataagagatgct

SEQ ID NO: 17520 - DNA, 612 bp, Glycine max
ggtaggtccatttatagcttctatacacgccttcaattctgaggtggtataagagagtgttacatttttcatgctggcaaatgtaagaaagcactttgatggtttgtttctaaacagttttattgaattattttcttttgacatctatgaacaatacatatactaggcacatgattcaggttcaattcatgggaatactaaaacacatcctgctaagattgctttatgagaatcattgcgatgatgtaatttctgcagtctttccatggatactactttccttatcaattttattgtattaattctagatgttccaaatagtctatcttcactttaaatagttaaattatcatattgagactctacggaggagccattcgccaagaactgtactacctcctcaaagatgagaatgatgttcatttcacatttgggagcataggtggaaatgggattaatcaggcaagccagggcatggccttgtcgaaattctgcctcaacattgcaggggataccccatcctcaaatcgcctttttgatgccatagtaagccactgtgttcctgtgatcatcagtgatgaaattgagctaccctttgaagatgacttggac

SEQ ID NO: 17521 - DNA, 471 bp, Glycine max
aaaaaccgggccggccgacgcggacggtgcgttttaccattttcacaacaatttgctagcatcttaaatttagatcatatgtgagggaatttgtgaatggtacgtgacagactggctatttctaaccattagcagtttaagacaatttgtgaaatgtttgctatttcgattgattgaaactatagggcagcgtgtttgttgtgacggactagctatttttcactgttgacattttaataaaataaataacatttctgaattgtttgctattttgattgctatatatttctcactatcagggaatacgtttataacagctcaaacatattgatcaaccaattatatatgttggatggcctaataaataagcattttttattttgtcattgtattatttttttttagcttttcatttataattttgagtccttgtcatgatattcctataaaatatttataggaattttagtc

SEQ ID NO: 17522 - DNA, 345 bp, Glycine max
tagccgtatctaggtctagatcctttgattataaggatgatgccgagtacggcctattggtaagagcgtgagctcgatggaactacgatataacgcgaatcttcacgaacgcttaacacgatacatctgaagagggcctactcgagggcctgcgcgcggatcccctatacgaggactgtgataactacgttgatatatagctgcggtcatctgacgatgaccctggtgaccgcttcaagcgtgtggtatatggtcgagtttgagtatacgccctttacgaatgaaccttatgcccctgtttgcaggatccagccgatctgtttttgcttatccataaacgctgga

SEQ ID NO: 17523 - DNA, 114 bp, Glycine max
gtcgttcatgataaatttgggcaaaattccaacattgagctatagttttaaattctatatacaggttccaacattgttattttaacaattaaagcattatgttttaaacttgaa

SEQ ID NO: 17524 - DNA, 558 bp, Glycine max
ctaaacagttcaggaattgggtggatgatttattggctacaccgttaggttcagatacatggctagtgaaatttgacaagtgggagttatctggtgaagagcggcagggttgtgttgttaccgccataataagcaaaaaggattcggattggttcacttgggtgcatgtgcatgaaacctggttggaaaactcagagcaaggtttatggatactttagtttgttcctacggcttatccaagttcccgtgtgtcttgtgataacttctgcaataaatgtaatgtaatcaatcacaaagtaatttctattcctgaaatttttaaagaccttccatcatgtgaaggtgtcttatgtcatatgtatttcaaatttactgtaaatcttttctggttgcatagctgtcatgagaatccaatttttaacacatcggcttgattataggttatttcaatctgttgttatgtctggtatttattcttttttcccctacctttcggctgaacgggattcatcatttgcataattaatagaataataaaaatcataatattctccttcc

SEQ ID NO: 17525 - DNA, 403 bp, Glycine max
gccacgcgtcgagttcctcatttttatcctatggtccgcctccgcatgttgctgggctggttatgctttcccacttggtccaggaccttttccaggtgcagaaaaccctttagggaagcctgtttctcaggcacccggacaagcttttgctccacctgctcatgctgttgatggcaaaaatgttcagcctctggtgcggggagatccaaatgcctatgttggcaatttttctaatggaagaacaaatatccaagaacaaggtgaccatctaaatcatgcttggcatcatcaaagaccttttccttccagagtaaacattcctatgcaacagggtttgggcccaaggccatttatacgacccccattttatggtccaccttcagggtacatggttggtccaagc

SEQ ID NO: 17526 - DNA, 436 bp, Glycine max
gggatgtatgcatcaaaggagaatgtaactggcttctgtcgttcgtctcagttgaaagtagcagacttctcatttaattttttagttggtaggatacccaaatgcttggagtatcttccaaggttaagctttcaagggaattgcctccagggtcaggagttaaagcagcggtcttctatacagtgtgcgggtgcctcacctgccagtgccaagagccagccagtggtgaatccaaatcaccaacctgctgaatatgtgtccaagcatcacagagcatcgaagcctgtttggcttttggctctagaaatagtaactggaactatggtgggctctctctttctgggtgctgctcttgctgcttttcagagatgtaacataaaatcatctatcattattccttggaaaaaatctggaagccaaaaagatcatacagcag

SEQ ID NO: 17527 - DNA, 428 bp, Glycine max
cccacgcgtccgcccacgcgtccggaaagaatgtgcattagactgttgggagctacaccaaagtcagttcttgagctcatggatgtgaaggatctcacattagctcatgtcaaaagccatttgcagatgtatcgaactgttaagaccactgacaagcctgctgcttcttcaggcctttcagatggatcaggagaagatgacatgtctccaatgggaagcagtggtggaatgcgtcaattttcagaccaaagaagcctttcggatcgaccactgcaacaagatatcgactactcttcagccaacaacacactatggagtaactcttcaagtagagaaccatggcaacaaaataactctaacgacatagatggtttcagacccccaatcttccagtcgcagcatatatcaggagggcatcaaattcaaga

SEQ ID NO: 17528 - DNA, 714 bp, Glycine max
cccacgcgtccgcccacgcgtccgcccacgcgtccgaaattggttccgatgtcttcatttcaggcaatgctttccaatccaatatggattttattagtaacccacaagcgtacggttttatcacatcaaaagttgcatgctgtggtcaaggaccttacaatgggattggactgtgtactccggcgtctaacttgtgcccaaacagagatgtgtatgcgttttgggaccccttccatccaagtgagagagcaaacagattgattgtggacacattcatgatcggagactccaaatacatgcacccaatgaatctcagtaccatgttgcttttggattcaacttcaaggacctagctaattattatcttcttcctgttagggtcctggcatacattctgcactagattttgtgttatatattgattgtttaagcaatattgttacaaattatttgaaaccacgggatttctatgattttttctctctcaaatctctgctttgagggaggaaaaatagagaaaggaaagttcattgtgtcattgaatgtaccagtttaggaattgtaacttgtgagccatgtatcgtttgggtgaattgggtcagataatttgtgggtagaggctaagcccaaaaactgtttgggcttgaaactttaagtgtgataaacttaggtatatgagatgtactaggaatttaccaaaacttgttccacgcg

SEQ ID NO: 17529 - DNA, 718 bp, Glycine max
cggaaatctgctcgagcgaaaattgatgaggactttgacttcagtacaagatgttgtctttgtgttctccaactacaatctaatgaacccaaccacctacggcacacggaaagaatttcgttgtagtgttcattacacccaacaaccaagtgcagcaatcaccaaaaaagaagaaggcaaatcaaagttttgaaccttggttcaatatctagagtccctgcaagctcaacacatcagagataatcaaaatgcatcctgcgcagatcgttttgtatggatcaactttatgtgtcatgataacagtgcacttctccatgaagctactcgctgaacatgttttgaactggaagaaaccaaaggagcaaaaggccatagtaattataatccttatggccccattgtacgctgtggactcctatgttggtttgataaatttctttggaagtgaagcatttttcacattcttggactcaattaaagagtgctatgaagctctggtgattgctaagtttttgggcttgatgtacaattatctaaacatctccttaagtaagaacatagtgccggatgaaatcaagggaagagaaattcatcattcattcccaatgactctttttcagcctcacactactcgtctggaccataaaacactgaagcttctcaaaaactggacttggcacatttgttgtgatacgtcagtgtgctcaatcttgatgat

SEQ ID NO: 17530 - DNA, 507 bp, Glycine max
tgtgggtccaaccaagcctaataaaccgctagggcttggtggtgttgaattgttgcagactggacctgatgctgctcctaaagcggcggctgaaagcggtgccggaactccgctggagaacttgttggtgaagaaaactgacatgaggggtcctgagatgtatatctcggaggagattagtgccgagttcagggaatcgttgcttgccagggtgggtttgatgggtgttgtttacctcagaactttgccacccaaaaccgctggtgataaggaaactgaattttcgttccgaattgagggaacagaagctgttaaaagatttgttatacaaagttcgcgtgttagtagccttggtaatgggatgtttcatgtgaggactgcagcctctgaggagccgatacccattatgaagtatagtttgggtcctagtctgacgcccttgcctttgagggttcgacttacaaaacgacatactgggagtttgctttctgtgatgatacaatatgc

SEQ ID NO: 17531 - DNA, 625 bp, Glycine max
ccacttcaaccttgctttcttttctgctcaacatggctgaagattatctccaagaagagaagaagcgagttcggaacccttttgtccccattggtgcacttgttactgctggtgtgctaacggctggcttaatcagttttagacaaggtaattctcagttaggccagaagttaatgagggctcgtgtggttgtccaaggtgcaacagtggcgctcatggttggcactgccttttattatggagaaaatccttggcgatcgagttaaaatttgaatggcctgaaacaaaagttgaagtttgtaattgcttggttccttgttggttttagttttatttttgtgataaagaatttggtcatttgaggaccaaatccaaacccttgccaacatttaaattttttctcacaacgcataacgattgagttcatctgaatgtacttttatatatagttctttaatcaaataaacaactctcaattgtctcttaaaaaaaaaaaaaaaaaactcgaggagagaactagtctcgcgttttttttttttttttttaaaaaaacgaaaaccctccacaatgacaagcaagcatttagtcatttacagaattgctgaacaattggttattccctcgt

SEQ ID NO: 17532 - DNA, 379 bp, Glycine max
gcgcccacgcgtcctcccacgcgttcgcccacgcgtttccatcatcccttctcatcgctaggcaaaggggcaaggaagacattgatcgcgtttcattggcttctatgctcggaattcagcttttgcgtctgaattaggctgcgtgttgttcccgattgtttgtttttcaatcgttagcagcagagcgtgcttgaacaagttaattggttggttttgtgattttgacgcttggggaccgcaatggaatttgatctctgcgatagcagtggaacagatgatggtcttcctccttcccatcaatgtctaaatagatttcaatgaccagatcatgccacttggactggaaacggaagatctgcaattgtaggccttggtccat

SEQ ID NO: 17533 - DNA, 569 bp, Glycine max
aaaaattcgctaatctctgacctcttcttcacatcttcctccattaatacccttccctctctctcccatggagttgatctacctactctatctggttccaacgttgtacgcgtgtttcctcatatggaagatgttggacgagagaagggacagggagtgttacatcttaaactaccaatgctacaagccccccaacgacagaatgctcggcaccgagttctgtggcaagcttatcagacgcaccgaaaacctgggccccagcgagtaccgcttcctcctcaaagccatcgtcagctccggcatcggcgaacaaacgtacgccccaagaaacatcttcgagggccgcgaggccactcccacgttgcgcgacagcatcggagaaatggaggagttctttcacgacagcattggaaaactcctcgcgaaatctaacgtctccccctccgagatcgacgtcctcgtcgtcaacatctccatgctcgccaccgtcccttccctctcctctcgaatcatcaaccactacaaaatgcgccacgatgtcaaggtctacaaccttcaccggcatgggc

SEQ ID NO: 17534 - DNA, 434 bp, Glycine max
ggggacaataataacacacaaaatcaattccacacctacatatccaccacaccatggccaccaccaccatgttctcatcaccatcggcaattctctcctcagccgccacaaccaccaccccaaaaccatcctctgcagcaccacactccccatcatgcaagcatcctcttctactacccttcaaacagcccttaacaaccttaactgccgccgccgccatcgccactattttaacctccgctccaacaccctccttagcacaagagtccctctcatataaagtctactatggcaccgccgccagcgccgcgaactacggcgggtatggtggcaactccagcaagaaggactctgctgagtatgtctacgacgtgccttctggctggaaggaacggtaccaatggaacggacagtgagtttataacccaagaaag

SEQ ID NO: 17535 - DNA, 435 bp, Glycine max
ttgacgcgtttgcggacgcgtgggcggacgcgtgcacactctctttcttctgctgcaccagcaacaacagagaatgaacagtactgaggaggggatgcaaggcataggcataggcataggctgcttccaaaacgacgtcgtagggcagctggagctgagtcccactatgagcaactcctcctcctcgctatccatggagctggacgagtccccggagagcagaatccaacggttgatatcggagcacccggtcatcatcttcacccgatcctcctgctgcatgtgccacgtcatgaagaagctcctcgccaccatcggcgtccaccccaccgtcatcgaattggacgaccaggagatcgccgccctccccctccccgacaccagcgccccctcggcctttataggcggcacctgcatcggcggcctcgaatccct

SEQ ID NO: 17536 - DNA, 442 bp, Glycine max
acgcccacgcgttcggcggacccatggctgggtttgatatcctgagcgagccatagaaagagttgaattaatagagatacagattacgtgaaactgaaaggaaaatggcactctcagtctcctcaccctcatgcgtacgcgttccttcatgtttttggaaaccaaatggcaagagttgcaaagagcgtactaaggtttcatgtgcagctcacaatgataataagaatccgttggttggaatcggtattggggttgtaacgtcttgtgtgatgggtttaactgcattggatgcggacgccacgagaatcgaatactacgcaacagtggcagagcctttgtgtgagtacaactatgttaagtctggcctcggctactgcgatattgctgagggcttcggtgacgaagctccactgggtgagcttatcaatgttcactatactgc

SEQ ID NO: 17537 - DNA, 300 bp, Glycine max
cctcctcgtttgaggaacccaattctgcgtttttgctctcagcactagtgttctctctgttatctcatctctctaacccacactacaccaccgcgccgccgtttgagtgtttgacggtgacatccctgttaaatttctctcgcggactcgccgtcactgtctcacggaggctactggagctgtttggaacagcgtccaatggcgtccctttctcaatctcaccgtatcgcactccctttctaaacgcacgcggcgagtgatgatggcgagactcgctccccctttcagtatcttcacaca

SEQ ID NO: 17538 - DNA, 537 bp, Glycine max
cttaaaaggattccaatgagcctttttacatatatgcaactacccttgatccgcggaactcttcagagaatttagggagaaaatgatgatcacagaagatgaaacggctcttacaacaggcaaagaacagcaaagtgaagtgatgaacggagacaaggacaatcatggaagcgaagatggcaaccccaaagagtggttgaacctgagcataggtggaacttcttcactatcaacatctggagacactgattcacaagcaagaccaccagccactgccaaagttttttcatgcaacttctgcatgaggaagttctttagctcacaagcactaggaggccatcagaacgcgcacaagagggaaaggggagctgccagaagataccaatctcagagatcgatggcaataatgggattctccatgaacacaccaactatgtttcgatcacttggtgttcagccccattcacttgtgcacaagccacgcagaggtggtggtaccatggtgacaccgggctttcatgatgcaaatgcacatgc

SEQ ID NO: 17539 - DNA, 303 bp, Glycine max
ccggaactcagaagagaacttaggggagataatgatgatcacagaagatgaaacgactcttacagcaagcaaagaacaacaaagtgaaatgatgcacggagacgaggacaatcatggaagcgaagatgacaactccaaagagtggttgaacctgagcataggtggaactactactttactctcaacagctgtaccaccagccactgccaaagttttttcatgcaacttctgcatgaggaagttctttagctcacaggcactaggaggccatcagaacgctcacaagagggaaaggggtgctgc

SEQ ID NO: 17540 - DNA, 663 bp, Glycine max
  unsure (1)..(663): unsure at all n locations
tttgcaactcaatgaccctttcatacggaattggattgacctcctctcattcttgcttgctggggtcaaggctaatgccgtactctcagcagagatgatttacatgtttgcagagtggtacaaaccgggatgctgtcttgagtacccccttcatggaagtgcagctattattgatgctcttgtgcgagggctagagaaatttggtggaagaatttctcttcaaagtcatgtggaaaacattgttgttgaaaatgacagagccattggagtcaagctgggaagtggtcaattcatacgtgctaaaaaggctgttgtcagcaatgcatcgatgtgggacactttaaaattgctacccaaagaagttgttccaaagtcctactcagatagggttaacacgactcctcaatgtgattcattcatgcatctccatttgggatttgatgctgagggtatacgcagtgatctgggaattcatcatatagttgtaaatgactggaaaagaggagttgatgccgaccagaatgttgtgttgatatcaatacctagtgtacttagtcctaatctggcaccgcacgggaaacacgtgttacatgcttatatgccaggaactganaccattgagttgtgggaaggacttgatcgtaggagtgctgaatacagaaa

SEQ ID NO: 17541 - DNA, 530 bp, Glycine max
gacgacagaagggggaggaggtatgagataatggctcgcagtatatcgtacataacggggtcgcagcttctctctctcagacgccatccaagcatcgccgtcgtcgatgtaagggacgatgagaggagctacgacggacacatatcggggtctcttcattacgcaagcgacactttctccgataacatctcaaatctcattcaggcagttaaaggcaaagacactctcgtcttccactgcgctctaagtcaggttcgtggcccaacttgtgctaggaggcttgtcaattatcttgaggagaacaaggaagatactgggataaagaacattatggtcttggaacgtggcttcaatgggtgggaagcttctggtagacccgtttgccgctgcaccaatattccttgcaaaggagagttgtctccttaatcaaagacgtatttgtggttggatggaattatggaggcatatcatctttcgtgtgatatgtgcacgcatttgtatacaaaatgtcaaaaacagtaggatgacca

SEQ ID NO: 17542 - DNA, 727 bp, Glycine max
atgaattactgaactgcgagctccctccaattcgcttctccttcttcttcattccttggcagtacacaaatctgtcatatcttgctgctcgatcgttacgatgatggcgctcaattcattgtcaccactttcaattaattctcttcacgtatcttcaagctcaacttcaaagatttcgcattctcattccaagtcctttcccgtcgttgtgtgccaaattaactcaaacagagatcatcgtcaagaatccacaaaatggggaaaagtggtttcggccacgttggcggctgctgttattgccttcagctctgacatgtctgcccttgctgatctcaacaaatttgaggctgaaatgaggggtgaatttggaataggatcggctgcgcagtttggctctgctgacctcaggaaagcggtgcatgtcaatgaaaatttcagaagagccaatttcacagctgctgatatgagagaatctgattttagtggttcaactttcaatggtgcataccttgagaaagctgttgcatacaagggcaaattttccaggtgttgatttaagtgctacattgatggatcgcatggtatctacatcaagttgattaactttatctatacgttcaatactaattttttttctctcttttaattgggtatatgtgtgattttcttgtttgaggtctaaaggttctaaatgaagccaatctcactaatgccattctccttagaa

SEQ ID NO: 17543 - DNA, 573 bp, Glycine max
gctctgtatgcctcactcagtttgaacccgaatcagagataaaccgcttatcgtgcggtcatctcttccacaaagtgtgcttggagaagtggctggactactggaacattacatgcccactttgccggactcccttgatgcccgaagatgacacaccttgctttcagtaagcaaaacaagtgagcatgccaataagagagagtttcatgtacagtgtagtgtacatattcttgagggtttttgatgttcatgcatctgagttctgccacctttttaagttttaacctttttgccttgtatggtctagagtttgtggagggttttgctttcccttcttctgtctgtgctctttagcacaaatgaggcgtatactttttgcttgcatgttatgtttgctcacaatgcccaccttggttggactctcagagccctaattctatatttgggcattttgatcctaatttggaagcatggattgtagaatccatttgttttgcctttcaaactctcctcaccatgtatatatagtctgtaaatagctttggttgccacataatagagtatattttgttt

SEQ ID NO: 17544 - DNA, 818 bp, Glycine max
cggacgcgtgggtgcggggcaaggaagatccatgtagtcacatggttattcgaggcaaagccatggctggacatattgaagacctttatgacttggttaattctgttcttcaagatgtccaatttacagatcaacagcgtttcaaacaatttgtttcccagagtagagcaagaatggagaaccggttaagaggaagtggtcacggaattgcagctgcaaggatggatgcaaaactaaatgcagcaggttggatgtcagaaaagatgggaggtctcagttaccttgaattcctccgaacacttgaagagagagttgatcaagattgggccgatatctcatcatctcttgaggagatccgcaaatctatattttccaagcaaggctgcttgataaatgtcactgctgataggaaaaaccttgcaaagacagaaaaagttctgagcaaatttgttgatctgcttcctactagctctcccattgcaacaactacttggaatgttagacttccattgacaaatgaagctatcgtgattcctactcaggttaattacattggaaaagcagccaacatttatgatactggttatcggcttaatgggagtgcatatgttatttccaaatacattagcaatacatggttgtgggatcgtgtacgtgttagtggtggagcttatggaggtttctgtgattttgatactcactcgggagtgttctccttcttatcttatcgtgatcccaatttgctgaagacacttgatgtatatgatggaactggtgacttcttaagagaactacaaatagatgacgacacttttaac

SEQ ID NO: 17545 - DNA, 531 bp, Glycine max
aaagggctctctccttctccccatgttttcttttctttacttctttgtctgataaaactgtcatcaacctcctcctcttcccactctctctctctttcttcccccctcttttttttattcttcttttttcccttgcaaatattttataaaattgatatgtgttgaaggcatatttgcttaagagctgaaccacatcatcgtcttgaacgtttgaatctatggaacagcttgtcaacttcatcatccggccaccaagagctgaatatgaccccaaaagtgatttattggatcaggagttcatgctgaaaggaaaatggtatcaacggaaggatgtagagataaaaaacagtcggggtgatgttcttcaatgcagccattacttgcctatagtcagccctgaaggaaagcctctgccgtgtgtaatatattgtcatggaaatagcggatgtagggctgatgctagtgaagctgctataattttacttccctcaaacattacaggttttactctggatctttctggctctggaa

SEQ ID NO: 17546 - DNA, 808 bp, Glycine max
cttatctgttgctcctagttgctgcatatttctaatacattcatcaagtgcattgttttctccgttgccccctacattaagaagggcggttgaatattatgattttgggcctcacaagatccaccatagttcagtgttctatacaagtaatctttcttttgcctttgtcaacttgcgtcctgctgtgacaggtcatgtgcttgtctgttcaaagcgtgaagtgaagcgtgttgctgatctcacagatgatgagactatagatttatggcgcatagcaaagaaacttggtaggcagctagagagctaccataaggcatcatcacttagctttggtatccaagatggaccttaagcagggcaaacagtgcctcatgttcatatccatatccttccctggaaaagtggtgattatgagaacaatgatgacatttatgatgacatgaatgaaaaagagaaagagttgaatcgagcacttaaggtggatatagaaaggaaagacaggagcattcaagaaatggctcttgaggctgatgaatacagaaaatttgtcttttgacatttttaagtggcactttaaataaaataggaaggttacaaaaagaaaatctagataaaaaggttgataataagggaacagaatttgatgattctgtgtttcataacattttcattgtatcaggagttctcaagaaaacgctgtctgtttggagtttccccttttgttcttctgcctatttggacatttcatgtattcgccgtgatcaatcaagaacttatcttttgctttggaaaaaaaaaaaaaaaaaaa

SEQ ID NO: 17547 - DNA, 890 bp, Glycine max
tgctcagattatgacaaatactatccagaagaagtacaaggtttcttccacccagcttctgtatcaatcatgtccatatcaagcagcaaccctgttaatcgctggtccatatctggataaacttttgaccaaccaaaatgtatttggtttcaagtatacgacacaagtgacggttttcataattctttcctgccttatctccatctctgtcaatttcagtacgttccttgttattggaaagacatctccagtcacctatcaggttcttggacacctgaagacatgccttgtattggcatttggttatatacttctccgagacccatttagctggagaaacatactgggtattttgatagccatgattgggatgattctatattcttactattgcactctcgagaatcagcaaaaaactgtcgaagctgcatctcaatcatcccaggcaagagaagatgaatctgatcctctgatgaatgtggaaaatggaagtgcagttgtgagttctaatgtcggacaaagacaaatgtcccctgtatggagcaagagcaaagactagtatgtttaatgggctttgttttagcattgtcaagaacagttttatagtccctatagagggttaacgcccgtaatccatgaggaattagaaagtggaagtgctgccaaacacatgtcctagtcatttttaatagctttagtctaatatttttatgaatcgtttgccgaccaacagtattagggaagggaacaagcacatggtcatgtcgtaattctattggccaacaaataggtcttatagtaacatacatctcctggtgatgttttcatatcatgatacatttatcattttatatagatattcaaactttttcttggcttgaatagcatat

SEQ ID NO: 17548 - DNA, 1061 bp, Glycine max
acttctaaaggggaaaatccaaaaggctattttcactctaaaaatgcaaaattttatatttatgaaagaataatacatccatatgtttcaacatatcttcctccaaataaacttatgacaagcaaaatctgtaaagacgagagatgatggctttaacaactaaagttacggagtatataacggacttgtgttgtgtcactcattcttggcagaagcagcctgctttgctccaacagaaaagaattcagagatgacttcaaggggcatgccctttgtttctggaaccttcaaaaacacaaatatccacgagatgaaacaaacaactgcgtaaatggcgaatacaccaccaagtcctaaagagcccagcatcacaggcagcgagtatgtgatgatgatgtctccaatccagaacactaatgcacagatagcaatgcagaggccacgcaccctagtggggaaaatctctgagcaaaggatgtttggaattggtccataacccatcacaaagcagcagaaataaaccacaacgcatactgttgagattgctgcatgggcgacattgccaaaatttaccaggcttccaatgaccaaaataatgagtgacccaatcagcacggggattgtagtaagtaacaactgccttctgcctgaaacatccatgagcttcatggctacgcctatacagggaagcatcaagaaggttgtgaaagcactgataaggaatgatgccgactctgagccaatgcctatatctgaaagaagaacttcaacaccagcctcttcaaggatttgaggtgtgtaatatagaaccccatttatccctgaaaactgctgaagtatttgtattccaactccaacaatcaatgcatgcttaacccctggttcaagaagagctttccaacttggcccctttgaagcggtctcagatgggtgaaccattgcaggcccaactgggtgtccatcaataagctccttggagtaaagagcgggttggcttaccaaggcagcagcctggacaaattcgccttcaccgggaatcgatacaatggatccacgacgag

SEQ ID NO: 17549 - DNA, 456 bp, Glycine max
  unsure (1)..(456): unsure at all n locations
cccacgcgtgcgcccacgcgtncgcccacgcgtncgcaaaaactgtaagcattaattttcgaaatgggaaaaaacgaaaaataacttttccaaattcatgacaaccgaatcacacaaaaactattttatatgctgtttttctgtttgaaggatcacacaaactagtaaccagaaaaatggcagaaacaaagttgagctccttcaaagacaaaagatggtcactccatggcatgacagctctagtgacaggaggcacacgaggcatagggtacgcaatagctgaagagttagcagaatttggggcagctgtgcatatttgtgcacgtaaacaacaagatattgataaatgtttagaagaatggaataagaaaggacttcccataacagggtcggcatgtgatgtactatctcgtgaccaacgtgaaaatttaatgaaaaatgttgcttcaatcttta

SEQ ID NO: 17550 - DNA, 394 bp, Glycine max
gaacgacggcgttccttgcacgcaaaggcgtcgttttaaattatgccgccggcgaagaggggaaaagcaaaggcggagcctaaggtaacaacgccgtcggaaaaacctaatgattttccgtcttgtattcggagcgtgcctccttcctccgtcgctataaccatccacgccaaacctggtgccaaatccgcatccgtaactgatataagcgacgaagcggtgggagtgcaaattgacgcacctgcgagggatggcgaagcaaatgcggctcttctcgattacatcagttctgttttacgtgtgaaacgaagacaagtttctttatgcactggttctaagtcacgagataagacagtgatcgtggaagatgtacccacaatatgttttgacgctt

SEQ ID NO: 17551 - DNA, 617 bp, Glycine max
tgttatcttgccttcagtttcattctttctggaacaaaccatttctagctaatttgttcttacctgtcaaatgctatcttctccttagtccgagttccttctccgatacacaattcaaaaacatggctcttaatttttctcttgtgttcaccttgtactccattatttttctcctaacaacagcttcatccaccaccaccacccaaactactacttcaacagtgggaaaagaccaagttccacgcataatgtgcaatgagtgcgagcttccacctccacccccacaaccaaaagagtgttcaccgccaccgtcacctacggttattattaaatgtgcgacggcgccaaaaccactaccaccaccaccacccgtggttattgaatgtccaccaccggcaaaaccaccgcgtggaggaggtgctgactgcttgctccccactttgccggagacaccagaagaaccgcaatacctacaaccgccgtcgcatctttcgtcggcgccgggaacgatagatcttgacgatattatcagcggggctaacatgattaatccactgctacgctacttcacattgaactacttcacttttctccctcctctttggcttccctattac

SEQ ID NO: 17552 - DNA, 430 bp, Glycine max
cggacgcgtgggaaaaaagatcactctgaagaagaaaccaagaataccacgtttcttcatcatttttcattcctttcttgatcatcatattcatcactgttaataaataaataaagaaaaactttctcatagattctgtaaccaacatcgacatcactgttaactatggcaacactcgctcccgggattttgttgaagctcctcaacggattgaacaccggcgtgaaacccacgaacgagcaccgcagctcgctcctgcaagtgaccgacatcgtccccgccgatctcgacgaaaaaaacctaatcccaaaacaagggtttttcataaaggtctccgattcctctcactctatctacgcgagtcttccctcggaccaagacgacgtcgttctcagcaacaagatgcaactcgggcagttcatctacgtcg

SEQ ID NO: 17553 - DNA, 871 bp, Glycine max
gcggattcttttcaatcagttggtgctgtctcaaagactgaacaatttagtcaaactaatgtaactgaaccttcattatctggtatgccagttagcagaccatctctgaacaaccagtataataataggccacatcaacaacttgtgggacatcaaagagtttcccagcaaaataaagaatggaagcctaaatcaagccagaagccaaacagtaatagtcctggagtaataggaaccccgaaaaaggctgctgttgctgctgcttcgcctccagcagaaaattctggagatatagaatcaaataccacagagcttcaagataaactttcccaagtaaatatatatgagaaccaaaatgtgattatagcacagcatattcgagttccagagactgatcgctgtcagctgacctttggtaccattgggactgaacttgattcttcaaggcttcaatctaagtatcacattataggagcttctgaaaaatcaaacgaggaattgactgcaagcttgacagtacctgctccagagttgtccactgatgatgtttctgggagcaaacaggtggacttgcgggatgaacacattagaagtttggggtcagactctccagtatccggcgctgcttctgagcaacaattgcctgacaacaaagactcttcaaacactcagaatctggacaattatgccaatattggattggttcgtgatagtagtccatcctatgctccttcagaaccgcagcaacaagattctcatgatatgccaggctttgcggcttacgatcctccagctggttatgacattccttacttcagacccacaattgatgaaacagtacgagggcagggtttgtcatctcctcaggagg

SEQ ID NO: 17554 - DNA, 528 bp, Glycine max
ctgattctcagtccctcagtgctaccagccaccaccaccaccactaaaccctcgcaaagccctaaaactgagtttctcatctctcagattagattccgatagacacagaaatggcttttcgttcaggttctctgtctcgctccttaatgtctacagctagggcatcactccgaccggcggcgccgtcgtcaacccttccccgcctccgtccgccaccactcgccgcccctcgcgtccagtcccgccgcttttccatgcctgcttccaggaatttggggcaattagggtgcacacactcgcttttacctctgggcataacctgcatgacgtcacacattgctgtcagtgcgcgtgcttgctgcgagctgtcccatggtgatcctgattcctgaggtacgtgaggaagctgttggatttgcatagtgttgcctttgatggtactggtgaccaataatttatgaatagtggtatctgcgaagtaacggttgtaggattcttgaatgaggctcatctgttatgctattttta

SEQ ID NO: 17555 - DNA, 261 bp, Glycine max
ccaccaccactaaaccctcgcaaagccctaaaacttcgtttctcatctctcacaaatggcttttcgttcggcttctctgtcgcgctccttaatgtccaccgctagggcctcacttcgacaggcggctccgtcgtcaccccttccccgcctccgtccgccgccactcgccgctcctcgcgtccagtcccgccgcttttccatgcctgcttccaggaatttggggcaattggggtgcatacaatcgcttttgccgctgactat

SEQ ID NO: 17556 - DNA, 695 bp, Glycine max
gcggtgggcccatctacgtcagcgacgcgccggggaagcataactttgatctgctcaagaaactggtcttgcccgatgggtcgattttacgggcccgtctaccaggaaggcccattaaggattgcttgttcaccgacccggcccgcgatggagttagtctgctgaaaatatggaatatgaacaagttgggtggggtgttgggggtttataactgtcaaggtgctgcctggagtgctactgagaggaagaatgcgtttcatagtacggactattctggtggtgatgccatcactggatatgtgagggcttgtgatgttcacctcattgcggatgctgctgctgatgatgattggaacggtgattgcgcgctctactctcactactccgggcagctgattgttcttccgcacaatgtggcgctgccggtgtcccttaaggtgctggagcacgaggtgtatgctgttgcgcctgttaagaaggttttgggtggtggtgctggctgcagctttgcgcctcttggacttgtgaacatgttcaatgctggtggtgctgttgaagggctggtcttcgaggaggatgggttggttcgtttggagatcaaagggtgtggtaagtttggggcttattcttctgccagaccaacaaagtgtttgctgggaaaccatgagctgctggatttcgattacgatgctgat

SEQ ID NO: 17557 - DNA, 740 bp, Glycine max
cccacgcgtccgcccacgcgtccgctttcttatcctgtgcattctactttacagagcgatgaagcagaatctgtcttgctagataatctttctgaatttgctgctagcctcttggctgcctatgatagtggtgatctggtagcagcacttgaagaaggccataccggctggcaaaagtgggtgaaaggctttggaaaatcgctaaagcgcaagggaaaatcgcttttcatgccgctccgacttctgttgaccggcaaactccatggacctgacatgggggcaagtgttgcattgctctatagagctgggactagcaatgtagtagctcctgaatctggctttgtgacactggatgaaagatttaaaatgcttaggcaaattgactgggaagcattgtccaaggaccaacctgtcaaagagactgctgctcctgtctaacttagaattcactttcaaggtctatcaaataataccatggttttacacatctgtttggagccttctgttttttgtttttttttttttctgcaaatttgactagagaagtctgatttgtaatatttaccgagggatcttttatagtcatataatgagttccattttgtttaggcaagtttttatttcaatgtgactagatatatttcctatttttggaatttggaaacatggatattttggagtgatgtttttttttaaattatttaaataagatatggaacagagaagcagtatttgcttat

SEQ ID NO: 17558 - DNA, 437 bp, Glycine max
cttgatttgtttatcaaacaaagctagacccaccctccttgattctgaaccattccttgcaccaaccaacacgacactcccaagttccagcaaggaatcactgccacctttgtttccttttcttctcatcatttcgtttcacaaaaaaataaagaaccatggaggggagaatgggactcttgtgtcttcttggattgggtggtgcatgggcttgtgatggaagagaactcgcaaactgcaatcaattgagcaaactaagcagaaaaccagatgtgtgtgcactttgtgaggaatatactaccaatgcacttgattatttaaatgaaaacaagacccagctagagatcattgatatcctgcacaatacttgctaccagcttcactcttttaagcagaagtgcattacttttgtggactattatgctcctcttttcttc

SEQ ID NO: 17559 - DNA, 501 bp, Glycine max
tgcaaagataccttctcaacgtccttcatttcttacccaagaaaccagatattgcagctggcagtgttccagatccccctgctaatgctgtgactgtggaacctaaagttgccactcaacaagaaactgcacaacctaaaccagtggcaaaacaaccactttctccttatatcgtttatgatgatttgaagccaccatcatctccttctccatctcagcctggtggtgggaaaccaacaaagatcagtgagacagtgccaaaaccaagtgcttcagatactccaagtagtgtgccaggagtagatggcatctctcagacaacatcgtcatctaaagtggagaagcctctttctccttatgtagcatatcctgacttaaagcctcccacatcaccatctcctaatgcaccaactgtatcagtttccacacctgctgcagctggggtgccggagatagacacaatatcaagcaatggaccggcccaactttcagcagcagatg

SEQ ID NO: 17560 - DNA, 456 bp, Glycine max
ctgatgcgcccttgtcagagcagacactaactcaagcttgggctacagccagagagcatttggcaagaacgagcgggatttgagaattgagaaagattctcaatcctcttcctcaattcaattcaagctgtgtgaacatgaaattgaaacttggacaagaaaaattcaattaaaattccccccaaattaccgtgcatgtgtcgtcgcctggacccaaatcactctctctctctctgagcataatattagggtttaacaaggagttttcttcactctggcaataacactcacaacacagcgatgtcattttcgttgttcgccactccgcagcaacagcaaccgcagcagcagtctccttttcagccacagcaaactagtttggtcctttcgcagcagcagcaacaatttcaacagcagctacatcatcaacaacagcaacaacaacaacaacagctt

SEQ ID NO: 17561 - DNA, 529 bp, Glycine max
tggatcactcaatcctaatattttatattccgattaaaatagtgagagtactagaaggtagtgagatcgcatagggaataatggaaacagaagtggttgaagatattgtgattgtgggagctggaattgctggccttacaacatccttaggacttcacaagttgggtatcagaagtttggtgttagaatcttcagacactttgagggtcactgggtttgctttgtcaatatgggaaaatgcttggaaggcattggatactgttggtgttggagacttcctccgccaccaacatctccagctcaatgggattgtcactacttcattggttacagggcaacaaacatcagttatgcctttcacagaaacaggaaatcagcaaagagaccgtgaaattcgttgtgttaaaaggaagttactgttggaagctcttgccaatgagcttccaagtggcaccatcagatacttgtcaaaggttgttgctcttgaggaatctggattctataagatactccatcttgctgatgggac

SEQ ID NO: 17562 - DNA, 940 bp, Glycine max
cattgctgcgtttcttatctttctctctctctctctctttgtgtgcaaaaaagaactatgcttgatattaatgaataatgttgattcttatctgccagtctgctactacttagtttttttttgaagtgtaaaactggctccccatagcttcttcttcttttgcacaccccagattccgcgaaacccacctttccttggttctcagtggaaggttttgttcttttgtcttttcttctgtttgggtgaattgggtaatctgaattttcaacaacaaacaattattaagttccatggttcagtcttggattccttgcctgctggctccttgaggtgttttgtccgattgggtggtgttcgaggttttggagaaattaaggaaacactgcacacaacacaactgtaacttcatccaaggcaataacttctctttcacgtcgatcttttgctctcactgtcagaatttgaacttgccttttttattcagaatctcaattcaattcatggtggctcaattttgctgaattgggctaacacctttgattcatcgctgtgggatcttttggtcaatattttggaactgtgaagatttgtgttttaggctaaatatgatgcttgagcaggactgtgctggttttatttagtagttttatgcactagggtgcttctgtgttcctacaaggaaatgctttcctattggattgcactgtttagttaggcatggctttcactgcattatccttggtgctgttgctgcaactgtcaacaatttttggctccgaggttgtcttacagtcaaaggattgtggctctgattgggtggcgcattcatattctagtcatggtcaggatctgttctacataaacggcaatgtagtaaacaaagttgctttctgtgaggctctcaaattgtatattgcaaaggggtgtgatgtgaaggact

SEQ ID NO: 17563 - DNA, 304 bp, Glycine max
cccacgcgtccgctgtcttatgactagctagtttttgttagattattattattgtgtgagatcaatggtttgagtacgttatatatgtgcgagaagagtatgtattgcagtactagtagtagttagtcaggaaatgggagggataataaagttacatgggtgtggggtgatcttatgtacttggtatgatattatgtctgatttgaacaagttgacgaccaaaaagtgtgggtctcttcttgatcttatgtacttttgtattaatcgtttttttttatgtaaattttttaatatctttttttgg

SEQ ID NO: 17564 - DNA, 420 bp, Glycine max
cccacgcgtccgcccacgcgtccgagatcagatcccgtctgagaagaagaactccctacacacatcattgctgtgcaatgctacctgggagattctcgtttttcggaggcggcggggattccggcgcggtggtggacaacgccaattcgtcaccatcaaagggtggtggagacgaactcgctgttgttcaacccacactgaagctcgagacggataggcaggtttaccggcccggcgatcctgtgattgtgaccatccagatctcaaatcccgcatatgggtactcgtttctcatggaaagactcggttttgagatcaggggcatcgagaaattggacactcaagggttcgtcacgcagaagctgatgcccgggtctgaacaacggagtagtgagaatgcttttctggagtgcttaacac

SEQ ID NO: 17565 - DNA, 1757 bp, Glycine max
tttcatgcgtccgctcttgtagatactcggtgtatttgattggtgcggaagcaacccaatgcccccagagttttggatccttccatcttttcttcctatgcatccagctaagatgtggtgttactgtcgattggtatacatgcctatgtcttacttatatgggaagaggtttgtgggtccaatcacaccactcatcttacaattaagagaagagttgtttactcaaccttatgaaaaagttaattggaagaaagcgcgtcaccaatgtgcaaaggaagatctttactatccccatcctttgatacaagacctaatatgggatagtttatacatattcactgaaccgctacttactcgttggcctttcaacaagttgattagagaaaaggcccttcaagtaacaatgaagcatattcattacgaagatgagactagtcgatacataaccattggttgtgtggaaaaggttttatgtatgcttgcttgttgggtggaagatccaaacggagatgctttcaagaagcatcttgcaagggtcccagattacttatgggtttctgaagatggaatgaccatgcagagttttggtagccaagaatgggatgctggctttgctgttcaagctttgcttgccactaacataattgaagaaattggtcctacacttgcaaaaggacatgatttcatcaagaagtctcaggtgaaggataatccttttggagattttaaaagtatgcatcgtcatatttctaaagggtcttggacattctctgatcaagaccatggatggcaagtttctgattgcactgcagaaggtttaaagtgttgtctacttctatcaatgttgccaccagagattgtgggagaaaagatggaacctgaaagattatacgattcagtcaatgtcttgttgtcgcttcagagtaaaaaaggtggtttagcagcatgggagcctgcaggagctcaagagtggttagaattactcaatcccacagaattttttgcggacattgtggttgaacatgattatgttgagtgcactggatctgcaatccaagctttagttttgttcaagaagctatatccaggacataggaagaaagagatagaaaatttcattaccaatgcagttcgattccttgaagatacacaaacagctgatggttcatggtatggaaattggggagtttgcttcacttatggctcttggtttgcacttggaggtctagcagctgctggtaagacttacaccaattgtgctgccattcgcaaagccgttaaatttctacttacaacacaaagagaggacggtggatggggagagagttatctttcaagcccaaaaaagatatatgtacctctagaaggaagccgatcaaatgttgtacatacagcatgggctcttatgggactaattcatgctggacaggcggatagagaccccatgcctcttcaccgtgctgcaaagttgctcattaattctcagttggaagagggtgattggccccaacaggaaatcacgggagtattcatgaaaaattgcatgttgcattatccaatgtacagagatatttatccaatgtgggctctagctgaatatcgaaggcgggttccattgccttccactgaagtttaatttagaatggtttgagcacgaaaaggcaaaggcattttcattaagattgaggcaaataaagcaaataagttgtgtgtaatcaagcttaatcaattttttcatattcctatgtttatttcct

SEQ ID NO: 17566 - DNA, 686 bp, Glycine max
  unsure (1)..(686): unsure at all n locations
gttaaatttctactttcaacacacnaaagaggatggtggctggggaagaaagttatctttcatgcccaaaacagatatatgtacctcttgaaggaagtcgatcaacagttgtgcacactgcttgggctcttttgggtctaattcttgctggacaggcagagagagatactacttctcttcaccgtgctgcaaaattgctcatcaattctcagttgaaagagggtgattggcctcaacaggaactcactggagtattcaatagaacgtgcatgctgcattacccaatgtacagaaatatttatccaatgtgggctctagctgaatatcgtaggttggttcccttgccatccactgaagtttaatttgaaaagttgtgcccataaaaaggcaaagccatgtcaacaaacattaagacattgtttttcatcttatggctctttttagttttgtaaagacacaaggcttaactcttttatgttatggtaatggatattatgcgatcgaatgcttgcatatcttacgtattttcataggactttaaagtatcggggttgtattagtataataaacttgtaatgaagttgggttgttacaaataattattggtatgatttttttatgtaattattgtaaaaattaataaatttattgtaaaatatagtatatataatcttttttcttatagt

SEQ ID NO: 17567 - DNA, 437 bp, Glycine max
cccacgcgtccggtttctgcagggagttagtgttggtaccatcaaaaccaaggcaaatgtttgctgcgttcagttccccctggattctgctcgtttccttgcttttggttcagcagatcaccgaatatattactatgatcttcgcaaccttaaaatgccactttgtactttagttggacataacaagactgtgagctacatcaagtttgtagacactgtgaaccttgtctctgcttccacagataacactatgcagctctgggatttgtctacatgtgcatctcgagttatagactcaccgattcaatcattcactggtcacgcgaatgttaagaactttgtggggttatcagtatccgatggttacattgccactggttcagagacaaatgaggtgttcatataccacaaggcctttcccatgccagcattgtcat

SEQ ID NO: 17568 - DNA, 833 bp, Glycine max
cccgaaatcaagtctttttactgtttttccccagttcgcccatgatatagatggcgctctcccttctttgatataaaggacaatgcgcatcaagataaccacccaggattttccaacgttagaatctcagcaattttagatgtttctttctttctgccttgagcctcacctcttgtgatatgcagcattctagactttccagtaaaaaagaaagacgagaattctgcgcaatccgaggagctagcgacacttaggccaaaagacaccaacaaacaaatccagcaccgcttccacgttttcttaataaaatggttacatcggaactctctaatcaccaaaacaacaactctcccatgatggcgaagccccacagaaacaaaacctcctctgtatttctctccgatggatctctcttcctcggaggagcattctccgctctcatcctcgtctggggtttctcctccttcaccaccaccatccctaaggaaacccccaatttcgaatctcttaccaaaaacgacgctgttccgcaccacggtactcccgatttcaacttcgacccccccgacagaacattctacgacgacccgcaaatgggttacaccatggacaagaaagttcgcaactgggacgagaagcgcgaggagtggctgaagctccacccttccttcgccgccggagctagagagagggttttcatggtgaccggttctcagccgaagccgtgccggaaccccacaggcgaccacctcctcctgcggttcttcaagaacaaggtggactactgtcgggctccacgggtgcgacgttttctacaacaacgcactgttgga

SEQ ID NO: 17569 - DNA, 904 bp, Glycine max
gatttattctgggatttacgttgttctggggttgtttgctgagaattatcggttacattcgaagcaggaagaggatgaaaaaaatttggtgtcaaagggtgctgtggttaaaggtgttctcctccaacagctagttcaggctgtggttgcaaccctcttgtttgcgctgacaggaagtgacggccaaaatactacaagccagaatacttctctacttgttttagcaaggcaatttgttactgctatgcttataatggacgcatggcaatactttatgcacagatacatgcatcacaacaaattcctttacaaacatatccactctctacatcacagactcattgtaccctattcgtatggagctctgtacaatcaccccgtcgaggggcttctgaatgacactgttggtggggctttatctttcctactctccgggatgagtcctcgagcctccatcttcttcttctcctttgccaccattaaaacagtggatgatcactgcgggttattgctccccgggaaccttttccacatctttttcaaaaacaactcagcctaccacgatgtacaccaccagctctatggcaacaagtacaacttctcgcagccattcttcgttatgtgggacaaaatcttaggtacctacatgccttacacgttggaggagagggaaggtggtggttttgaaactagaccttgcaaagattacaaggatgattaacttttttgcttgacgagcattctttatctgtactagtattgttttccctttttatgagcagcttctcctttctcatgtgatgcctgtatatatacatatgatgtgtcctgttctatatttttctttcccttatgtccatactagatagacataataaaggaaattgaggtgctacctattacc

SEQ ID NO: 17570 - DNA, 363 bp, Glycine max
attaaaggttggacagtagggcaaacgtacactagaatgcagttctactactaaccaacctttaattgaggcgcttgttcaataatgtgtagtaatattatattacctcaagattataaattaaagaaccaagcaatatatagttgagtattgtagatggattagtgttgtgggctagatagaagatgatttagcccccttttaattatatttgatttgatttatatgtagcaagcatttgcagatgatgctggcttattttatatgctatgcctctgcaaatggaatatttgctctgttgagaaagataaatggtaaaaatgattgttgaatgcaagctcttgtacttttagttattgtctt

SEQ ID NO: 17571 - DNA, 771 bp, Glycine max
ggatagatcaaacagaaattctgaatattagtgaggatggatctgagaacaaagtcatttcatgcataattctagttattccataccattcttgttatctaggagtctgaaactacttcacgcaaacaagttcaatacacagagaagaagcatatactcattgagaaaccaaagctctaatgtggatgcaattcatgcctttgagggtgattcactagagctggcagccggagtatctttccctgtaagtgcctctagcgtcttgtgaaattctgttgggagaggaggaggtcggtggagaggaacatgcttgggaactggtgcatcattctcaatcacctcacattcataatcatctggaacaccccaaggatcccactcgatcatgtaggaaatgagcttgagctcgtcctgagcctcttcgatgagctcctcgacctggccgcagccgaggcgtttctcgatgttctcccagtcctcctcctccttgcacacgccgagcctgtgcttggtgaagctctccacggccttgcggtacccttcatcttcgggaaccttctggatctctttcagcgtcttgctgtacagcccaatcagcacctccctcgcgttcggcaccacgtccagccccacgatccccgtcgaagccttcaccttcgccatcaacggccgcgccaccgcacgcagaaacatctttttactctcactcactctcccccaaaagtctccctctacaacgttgctgttccgagtctgggaggaatgtgtgtc

SEQ ID NO: 17572 - DNA, 2302 bp, Glycine max
ctttggctcacacaacatgaactcctaccaaggttctctcgttcactcctctctctctcatcgtacgtgcatccatctctcaacaccaaattactacttgcttctcttattactctccccaatattgcctcttgtactttttatgctgattgcccttgaacccttcaagtttcgacacacattgttcactctcacaatatttgcatgcaacagatctcaattattcaccaatcaaaaccacttgcacattttttagttgaacacaataatttcatctatcactcccgttttagcccccacttgaatactacacagctagggtttactttcctcatttaagctgcaatggatccaattgaatttgcgtggtgatggtaatagcagcctctagctcctccggtgagggaaggtgcaagcaataaaggtttaattttttgttttgggagttgggcccagcactcacatggacgcagcaacggctttaatgatcctatcagcaatagcggcctatttaatatggttcaccttggtcactcgctccctcaaaggtccacgtgtctggcccctattgggcagcctccctggcctcatccaacacgccaaccgcatgcacgactggatcgctgacaacctccgcgcgtgcggcggcacgtaccagacctgcatctgcgccctccccttcctcgcccgaaaacagtgcctggtgactgtcacgtgcgaccccaaaaacctcgagcacatcctcaagcttcgcttcgacaactacccaaaaggccccacgtggcagtccgccttccacgatttgctcggcgaaggcatcttcaactccgacggcgacacgtggctcttccagcgtaagaccgccgcactggaattcaccacgcgcactctgcgccaagccatggcgcgttgggtgaaccgagccataaagcacaggttctgccccatcctagccacggctcagaaagaaaacaaatcagtggatcttcaagacctcttgcttcggctcacttttgacaacatatgcggcttggctttcggccaagacccgcaaaccctagccgtggggctcccagataacgctttcgctctctccttcgatcgagccaccgaggccactctacaacgctttattttacccgagatcttgtggaagctgaagcgatggctcaggctcggaatggaagtgagcctgagccggagcctgaaacacatcgacaattacctctcccacatcatcaagaaccgcaagctggagctgctgaatggtaatgggtcccaccaccacgacgacctcttgtcccgcttcatgaggaagaaagaatcctactcggaggagttcctccaacacgtggcactcaacttcatcctcgctgggcgcgacacgtcatcggtcgcgctcagctggttcttctggctctgcgtcaagaacccgcgcgtggaggaaaacatcctaaacgaactctgtactgttcttctgtccacgcgtggagataacatctccacgtggctgaacgagcctcttgtgttcgatgaggtagaccgtttggtctacctcaaggcagcattgtctgagacactgcggctttatccctccgtgccggaggactccaaacatgttgtgaaggatgatgttttgcctaatggaaccttcgttccggcaggttccgcggtgacctattcaatttactctgttgggaggatgaagttcatttggggagaggactgcctcgagttcaagcctgagcggtggctctctcctgaaggggacaaaattcaggtgcaagactcttacaagtttgtttcgttcaatgcgggacctaggctttgtttggggaaggacttggcttacttgcagatgaagtcaatcgccgccgcggtgctcctgcgccaccgcctcgctgtcgcgccgggccaccgcgtcgaacagaagatgtcactcacactgttcatgaagtacggtctcaaggtgaatgtgtacccaagggatctcaaacccgtgctggaaaaattaaccaccatcaagagtgttactgttggtcaaaagtgattttgatttggttaattaaaacagatagatacatcatcggtttaaataaagaaataattataagaattttatatattacttaatatagaatattgacgatgatgtatcatttcatctgtgttagtttaatttacgttgtctgtatagatgaaatttccctttactcacaagtttctcatctgatgatgaatactatttatgtttttgtaaaccttttgatgattaaaaagtaatgctgctgcagttcgggaa

SEQ ID NO: 17573 - DNA, 512 bp, Glycine max
gaacaagttcaaaaatgagtcagtgaattggaatgcaccaaccaattcgtggatccaagcagggagtgaagaacgctctaatggacccgagatcttgtggaagctgaagcgatggctcaggctcggaatggaagtgagcctgagccggagcctgaaacacatcgacaattacctctcccacatcatcaagaaccgcaagctggagcttctgaatggcactgggtcccaccacgacgacctcttatcccgcttcatggggaataaagactcctactctgaagagtttctccaacacgtggcactcaacttaattctggcagggcgcgacacgtgatctgtcgctctaaaatgcttcttctggctctgcattaataacccgcatgtggacgaaaagatcctgcacgagctctgcagtgtcctcaagtttacacgtggagatgatatctccacgtggcttgaggagcctctggtgatcgaggatgtagaccgcctggtctatctcaaggcaactt

SEQ ID NO: 17574 - DNA, 302 bp, Glycine max
tttcgctcacacaacacaactcctaccaacaaggtgctctgctcgttcactcctctctcatacctctggctcctcctccggtgaaagagggtgagaagaggagttagcaagcaatttttgtttcttttgggagttgggacccctcactcacatggacgcatcaacggctttaatgatcctatccgcaatagcggcctatttaatatggttcaccttcgtcactcgctccctaaaaggtccacgtgtctggcccctattcggcagcctccctggcctcatccaacacgccaaccgcatgcacg

SEQ ID NO: 17575 - DNA, 448 bp, Glycine max
caaccttagccaacaacaaagctaagcgaagcatgggtttactgtggtggcgaaaggggaataaaccccaaccccaactccaagctaagtcatcgtcaattccgaagtcgaacggcacagacgcaacgaaacccctcaccgaggccccagggatgaacggcgccgtggaggttccccgtcccccgaacaccaccgtctcgatttttgagttcggctctgtcaccgcctccaacgaccaggtcacgctcgccggctattgccccgtctccgaagacctcgagccctgccgctgggagattctccccgccgttcagtctaacgccccccagtttcgcgtagtcttttgatacccaactttttatctcatcgccgcttatggaatgtactttttgctataaaacattcgagtttaagggaaattcgcatttttcttattgttaatgttatg

SEQ ID NO: 17576 - DNA, 473 bp, Glycine max
ggaggcatagcagataacacaaacacaaccttagcctacaacaaagcaaaggaaaggaaaggaaagcatgggtttactgtgctggcgaaaggggaataaaacccaagcccaacctgaagcaaagtcgaacggcgcagactcaacgaaacccctcactgaggccccagggatgaacggcgccgtggaggttccccggccctcgaacaccaccgtctcgattttcgagtttggctccgtggccgcctccaacgacaaggtcacgctcgccggctattgccccgtctccgaagacctcgagccctgccgctgggagatcctccccgccgttcagtccaacgccccccagtttcgcgtggtcttctgattctgatacccaactttttttctctcttttgccgcttgtggggttcaattttaactactttttttttttttttttgctataaaacattcgagtttaagcgcatttttct

SEQ ID NO: 17577 - DNA, 452 bp, Glycine max
cattttcaggcccacattcaccgtgtcacactggcccctgatcgcagattcaactactagtagttgctgacacataataaacctgtgaattgtaacctgtaggctcaatttcattggcaagaggcatatagaattatcctcaaagaatagccaagaggggtcttaatttggcacaacttggaagtgctaccaattgagtttgagacaccactgtgtctgtgattttgaggtttagaatgtctgctgctgtgtctgcaaccaaggatgttcccttcattgctcatctggaggaagatatcaaaaacaaaggaagcaacaaggttgttggggaagcagaccggcttccttacaatgatgatgccgaaggaactgattcagagacagaggaagaccccaagttggaattggatcttggtcctcagttttccctcagggaacagcttgagaaagat

SEQ ID NO: 17578 - DNA, 452 bp, Glycine max
atgaaactcaagatattttaattcatgcagttgacttgatttccttgcatgctcctaatttatggaaagcaaaactagtacacgttgtatgttacacaaattggcctgtgaatcaatacagcatgatctctacatcaacactgtcaccgaaaggaaaggtgagttaaaaggtcacgggaaaggcacagacatgctactatgtggtaggtattgtcaaacactcacatctcggtgcctacgggactactacaaatccttcttataaggataatacattatacatctctgacaatgcttcaaagccgatgattttgtatgttcattcttatgtacaaaaggaaagaattgatcaagaatccaacaaacacctgagtctaatgtgcttttaatgacgcgatgttgggcttctcatgactcccaaggtctccaaccatagtgaccaacaagaaggt

SEQ ID NO: 17579 - DNA, 563 bp, Glycine max
tgatcaggagtatggtttcaccgttgatgttaatgctgatggcggtgatgaagatagcggcagagactgaaaagtttcatgaagcttcgaatgcgaaggacaatattgtagcactgctgaaagattgtatcttattctggctaaggaagagataattgtagcagtaggaagtaacacctgtagctggaggctcactatttgcagcattaggaagtggataggttgcttattgaagacgctggagcccttttttgattttgcttcggaatgaacagtaagttgtgtcatcgaaggacgaaagcagagtttactattgtggatgttggagaactaactataatatcttaatgcttgttgtacggcagattgtatagatgtttgtattgcttttcggttatctaagttaattgttcccacataatcagttcttctcgacatagaagtaacatgcaccagctctttttgaggatcttactgaggatgtattttgggatctttattggttacttccatgtactagacgataccttgaagttagccataaaaatcaactatattttctt

SEQ ID NO: 17580 - DNA, 1040 bp, Glycine max
tttttcacgcgtccgatacgaaacagttgttcttctttttcagcatccaatttgcatctcttgctcgaagaatcaatcctttacttttgtttcatgggctcattttgggaccatagagcgccatgacgccatgaccaaacccaacactttctttcacaatctaatcaagcccttcaaattcagctccagcaaagagggacaaaccgaagaaaacgaaatacagaacttagctgcacaggagcagaagatcttcccctacgaaacattggttgctgctaccaacaaatttcatattcttaacaagctaggtgaaggaggatttggacccgtctataaggggaaattgaatgatgggagagagattgcggtgaagaagttatcgcatagatcgaatcaagggaagacgcagttcgtcaacgaggcaaagttgttggcacgtgtacagcaccgtaatgtggtgagtttgttcggttattgtacccatggcttcgaaaagcttcttgtttacgagtatgtccttcacgagagcctcgacaagcttctcttcaaatcccataagaaagaacagctagattggaaacgtaggtttgacataatcaatggggtggcaagagggttgctttatctacacgaagactctcacaactgcattatacatcgcgacataaaggcaagtaacatcttactcgatgaaaattgggtgcccaagattgcagatttcggcctcgcacgactcttccccgaagaccaaacccatgtcaacacacgtgtggctggaaccaatggctatttggctccggagtatctaatgcatggacatttaaccgtgaaggctgacgtatttagctatggggttttggtgttggaattggtcagtggccagcgaaattcatcctttgatatggacgtgagtgcacagaatctcgtcgactgggcatacaggctatacaagaaagggaaggccttaaaaatcgtggacccaacactggcctcatcagtggtagcagaacaagcagaaatgtgcattcaactgggtctac

SEQ ID NO: 17581 - DNA, 309 bp, Glycine max
aacaacttgctccattccgaaacagttgttcatctttttcacttcccaaaatcctcacctttcctcgcagttttgctcgaaaaaaccctttgtttgttctttcatgggctcattctgggagcgccatgagcaaacgcaacactttctttcacaatctcatcaagcccttcaaattcagccccagcaaagagggacaaagcgaagtagaagaaataaagaacctagctgcacaagagcaaaagatcttcccctacgaaacattggttgctgctaccaacaaatttcacattcttgacaagctaggtgagg

SEQ ID NO: 17582 - DNA, 530 bp, Glycine max
ctttgttagcactgttgaaatttctaatccgcagtacctaaagtatgtctccaacagtcacacacaaatgtcctcttctctgaaacgctgcacatcctacaccaaatacgagatcagaaagcgaaaccctgaaccaaaatcatgtgccctattggtaatcgacgtgcaaaaccacttctcatccatggccaccccaatcctccataacctcaacaccaccatctccctctgccgccgcgcctccatccccgtcatcttcactcgccactgccacaagtcaccctccgacgccggcatgctggaggagtggtggtccggggacctcatcgtcgacggcacggcggaggccgagctcctggaggctctggaccggaaaagcagcgaccttgtggtggagaagagcacctacagagcgttcaggagcactggcttggaagagaagttggtggagatgggtgtgaaggaggtcatagtgacaggtgtcatgaccaacctgtgctgcgaaacgacgtcgcgtgaagcgttcgtga

SEQ ID NO: 17583 - DNA, 446 bp, Glycine max
cccacgggaacatcctgttttcccaaccaacttgaagctccttccaacaacacatcatcatcatccatggcatctcaaggtcatggtaacaagctcatcgtttccacatcaccaaagagtgacagtggcagcggcggcggtggcggtgcagtgggatcattgcccaaagggcagtgcttgtgctcaccaacgacacatgaagggtccttccggtgtcgtttgcatcgtgggcctacagcctcaccagctaattggatgaaacgctccaagtccatgcctgctaataagcctgtggtttctgactccacatgctgatgataacaccaaaaaatgctattgtgagttatgtgttcatgtgtacctttatatgatatatgatatgaatccttgcttggaactcttgaattttggcagtgttaattattatatatatggttggaactttg

SEQ ID NO: 17584 - DNA, 450 bp, Glycine max
tccatgtgcagactgaaaatgagggctgttcagctttccacagatcacagcacaagcattgaagaggaagtttttagaataagagcagaacaccctgatgataatcaggccatattcaatgatcgagtgaaaggacaattaaaagtgaccagagcatttggtgctggattcctgaagaggccgtcttttaatgaaccgctactgaagatgtttcgagttgattatgtggggaatgctccttacctaagttgggcttcctcctgtccttcatcaccgacttccctcaagtgaccggttcctggtgctctcctccgatgggctttaccaatttttcagcaatgaagaggtagttgcccatgtcacatggttcatggaaaatgttcctgaaggtgatcctgcacaataccttatcgcagagcttctctttcgtgcggctaataagaacggaat

SEQ ID NO: 17585 - DNA, 509 bp, Glycine max
aagcaattcacgttggaagctgatacaaataagccaacaatacctgctgggggttaatcagcacccaggataggatgcattggacacttaacccgtatatctaacaaactggtccagttagggaataacaacagtgtgattcaggaacatttgcagggaaatagtgactggacagattggcacctgagtgttttatctaatcgcaatgctgtggaaaatgtctatcaatggtcgtgtgggagaccaacagcgttgcatgacagaaatagggatagtgacgaggatgattatcaagatcgggactatgatgcggctgcattagctaataatttgagtcagagccttccgttatggcatttacaataatgaagacattgaagaggttcatggctctcttgaacgagaagatgaggatgtctattttgatgatgcttcttcacaggtggttataactcctttgtgggtggaaaatgactattgaaggtgggctttcggtgaaaaattcaact

SEQ ID NO: 17586 - DNA, 533 bp, Glycine max
gtgtaaccgccctctcctgtcttcaccgttcctctctttttccgacgcgcaaacactcacacaaatttcgtttctatttccgactacaactctctttccccaattctccgatgaccggcggcgacgagcgtcaccggacggagacctaaaaacatctctcacacacacactcattctccggcaggcatgtccgaggacgcggacctcgctctgcagaccttccgcgcgctggtggagagcgcggaccggaagttcggccgtgtacgcgacgtgccagcgtatggcggcggcgcgagccagtatcagcagcagcaccacgcgttccagaaggtgttcaaggcgtacacgaggctctggaagcaccagcaggagaaccgcgcgaagctggtggagtgcggcttgaagcggtgggaactcggcgagatcgcgagccgaatcggacagctgtacttcgggcagtacatgaggagcagcgagtgcaggttcctcgtcgaggcctacgtcttctacgaggccatactcagcagaagata

SEQ ID NO: 17587 - DNA, 609 bp, Glycine max
cccacgcgtccggttcgtgttgtgttgtgctgtgtttcatcattcatggcttcttctacaactcccacactccctctggctgtcccccagcgacatcactctgtttctcaccgtcaagttctcttcttcgccaaattcagtaacaaagtttcgctctcttcttctgtggcttcgaaacggagttgtaaatcaaagtgcttttatgcaaaagtgcaaaacgcactcaacgaggaagcggttgaaactcagagttcggagttggaggaggatacccaaagtaccccttcttcctccaaactggtccttgttgttggtggctccggaggcgttgggcagctggtagtagcatcactgcttcagcagaatattaagtcacggttgatacttaggaatcctgacaaagccacagaactgtttggtgaacaagataaggagaaactgcaggtattcaaaggagacactaggaagcagggagatttggatccatccatgttgagggtgtcacacacgtgatttgctgcacaggaacaacagcttttccttcaaggcggtgggatgatgataatacaccagaaagagttgattggatgggagtaaagaatctagtat

SEQ ID NO: 17588 - DNA, 816 bp, Glycine max
gaaaaagtgtctctctcacactcggtctgagactaactaacgacttaccagtaaagagacattaattaatttgcaaaaagaagaagcattgagattgggattgggagatggagcggaagtggagcagtgaatctggtgggaatgtgatatcgtcgccatcacactcgcgtaatgggcattctcgctcctcttcgctcactatccccggaggaggaatttcaaccgtcaaaaggactcagaatgttgctgccaaagccgccgctcagcgcctcgcccaggtcatggcttctcagactgccgacgacgacgacgacgacgaagacgatctaggatttcgctacactgctcctccacctctctctctttccaggagctctgctagatctccatctcctgcgttagctcggaacctcgtagaagaatcatcaatgtatcttcgcccagcaccacctgctgctggtaataatagaccaccgctaagcctcaggactccagctcctgttctgccctttgaccctcccattcataataataataagcccaaagataaaagatttccgtttgatgctggactccttcaaccaaaagattcaggagaccagcgtgaggcttctgcacttcgtgatgaggttgatatgctgcaggaagagaatgaaagtattctagacaagctcagactcgaggaagagagatgcaaggaatcagaggccagagttagggagcttgagaagcaggttgcttcccttggagaaggtgtatctttggaagcaaaactttgagcagaaaggaagcagcattgcgtcaaagagaggctgc

SEQ ID NO: 17589 - DNA, 285 bp, Glycine max
tcggtcttcggctcgagtattgagattgggagatggagcggaagtggagcagcgaatctggtgggaatgtgatgtcgtcaccatcacacacacactcgcagtcgcgtaacgggcattctcgttcctcttcgctcaccctcactggaggaggaatttcaaccgtcaaaaggactcagaatgttgctgccaaagccgccgctcagcgcctcgcccaggtcatggcttctcagactgccgtcgccgccgccgacgacgacgacgatgaagacgatcttggatttcgct

SEQ ID NO: 17590 - DNA, 550 bp, Glycine max
ctcccatctatctacatagacctatgccatgcatttcagtttcagatatagaacataaggtgaagcattcttgtgaaaccaaatctcctgtaacaaaagaaatgcctcaaagtctctgcagtttcccctctagaacaaacccacaaaccacccttaaatcaaaagattttgctttctccccaacaccaaccaacaagagcatgcataaatccactacccttgactcaaatgacacaaaagataaggctgaatttcccccagtagaaataggaaccagaggcacagttgcatcactcataatgcaagaaattgagtacttcagcagaattggttccaattcacaaaggaacaagtcccaaatcacagaggtgagttcatccattagtacaagttctacaaccacaattgtatctaaagtagaagaaagtacaaagaaaaagcgaggaagtagcaagcttttaccaagtatgtgttctatggtggatgtatcagacagtggtaggccaaatgggacctcagccttcagttacaggaacctgaagtctgacac

SEQ ID NO: 17591 - DNA, 481 bp, Glycine max
ctcgagccgctcagctcagttttcattcaaaacaaacactgatctgtgaagtgtgaaccacacaagcacgttttgttctatgccttggctttgttcaccatggactcttctaagagacttacattttcggaaccctttatgtcacaggggagaaaggtgatttctgggttcagtttgggcgttggagtttctctccttttcctcactctcatcttgctcaacagcacttccctctccgttcccaaggttcaagtgtttctccaaggatccgattccaattcctcttcttcttcattctcgtggcgttttcccttcacaaccactctttcttccaacgcttccgtgagtcctctgcatagggttgaagtgaacgtgtcgtcaagtgagggttcggagaaaagttcggaggaaacccttttggggaatctcactggggatcagaaaaatgcaagcttgcatgatgggcacgaggaagatgatg

SEQ ID NO: 17592 - DNA, 621 bp, Glycine max
  unsure (1)..(621): unsure at all n locations
cccacgcgtccgaaaaggtttaacaaagataccagacatatctgggtaaccaaattttgagaaaccttcatttgaatattggcagaatttaattacagctcatgattcgatttgtttaatttctaggtaagcttaaaatattgagtgcttttggttgcatcaagcttaggagttttccaaccccgccctcgcccccgcttgaagatctccatccttcatgttgtacttgagagttttccaaaaatatcagaaaagatggaaaatgtaagggaacttcatttgcagtacactcccataagtatgtctgtctagttgtggagttgttcagttaccaagtagcactgtcgtgttaccagaactgactgatattatagcttttggatggaaagggtagcaatggctaaaacaggaagaaggtgaagaaaaagcgggttcaatagtatcttcaaaggtagaacggctttgtgcctaaggatgcaaccatttattattttttcaaaaggtttcatgcagtttgttcatgtgaaagatttagactgattgataataatttcagaattcttcatgaatgtatcanagaatntcaatttttaaagatgcgactttgtgcgagcatctttt

SEQ ID NO: 17593 - DNA, 268 bp, Glycine max
attgagtgcttttggttgcatcaagcttagaagttttccaaccatcaagtcttccaaaaatatcagaaaagatggaaaatgtaagggaacttcatttgcagtacactcccataagcatgtctgtctagttgtggagttgttcagttaccaagtagcactgtcatgctaccagaactgactgatattatagcttttggatggaaagggtagcaatggctaaaacaggacgatggtgaagaaaaagcgggttcaatagtatcttcaaagg

SEQ ID NO: 17594 - DNA, 705 bp, Glycine max
cccagcgcgtccgcccacgcgtccgatctgctgaacacaacaaagagggatcctcaaactcggataacagcagtgatgctagccagaatggctctaacagcaatgaaaatgcaaatgacaatgggaatgctagtcatgaagcacaaaacaatgctgatgcgggacagggcaacaatgaggccactgttgagagtaaggcaagtgaaaatgaaggtggtgctcaaaacgaaacagtggagtcacaaaaagaggaggaatctgcacactccggcggagatagcaattctaacttgaatgatcaaggaagttctgatcattcaatcactcaggaggataaagaatctcgcgtggatttgggaactctaccacaatccaatgcagaaaacaataacattgaggttactgctgctgagtgataattcagatagagtaattgtatcaagcttcttttgatcctacttctttttttctatttttgttgtgccatgtattgtttctttagttggatattatgctatcaagttttttgctttacacagggtcggattaagagtttacaaggtcctagagttctatttgtataaatcagttgctattattcatatgtaacctgaacccttttatgtaagcaatccttatgacgtcttaaatgtcatcatggcaaagatccttaaaaattaaaaaaaaaaaaaaaagggcggccgc

SEQ ID NO: 17595 - DNA, 472 bp, Glycine max
gcttaaaccccaaagttgcacagtcctcacgctttctgggtagcaagtagcaacagcaagtagcaacgcaaactcagatatggtttggtttcaatgcgaagattgcggagacaacctcaaaaagcccaagttgtctagtcacttccgaacttgctctgcctacaaattgtcgtgcattgactgtggggaaatatttgggcgtgataccgttcaggatcacacgcagtgtatcacagaagcggagaaatatggaccaaaaggccaaggaaaaacttttaacgttgcaactgccaagcctaataaggatagcaagcaaaggcctgaagttgatattaatgtggggttatctgatcggcctccttggttctgtagtctctgcaatacgaaagctacaagtaagcaaacacttcttctccatgcggatggaaagaaacacagggcaaaggctagagcatttcatgcttcaaagcaa

SEQ ID NO: 17596 - DNA, 1603 bp, Glycine max
  unsure (1)..(1603): unsure at all n locations
gcgcccacacgtccgagcagatctttcaagaatggcacaaattaacaacatggcacaagggatacaaacccttaatcccaattccaatttccataaaccccaagttcctaaatcttcaagttttcttgtttttggatctaaaaaactgaaaaattcagcaaattctatgttggttttgaaaaaagattcaatttttatgcaaaagttttgttcctttaggatttcagcatcagtggctacagcctgcatgcttcacggtgcaagcagccggcccgcaaccgcccgcaaatcctctggcctttccggaaccgtccgcattcccggcgacaagtcgatctcccaccggtccttcatgttcggcggtctcgcgagcggtgaaacgcgcatcaccggccttctggaaggcgaggacgtcatcaatacgggcaaggccatgcaggccatgggcgccaggatccgtaaggaaggcgacacctggatcatcgatggcgtcggcaatggcggcctcctggcgcctgaggcgccgctcgatttcggcaatgccgccacgggctgccgcctgaccatgggcctcgtcggggtctacgatttcgacagcaccttcatcggcgacgcctcgctcacaaagcgcccgatgggccgcgtgttgaacccgctgcgcgaaatgggcgtgcaggtgaaatcggaagacggtgaccgtcttcccgttaccttgcgcgggccgaagacgccgacgccgatcacctaccgcgtgccgatggcctccgcacaggtgaagtccgccgtgctgctcgccggcctcaacacgcccggcatcacgacggtcatcgagccgatcatgacgcgcgatcatacggaaaagatgctgcagggctttggcgccaaccttaccgtcgagacggatgcggacggcgtgcgcaccatccgcctggaaggccgcggcaagctcaccggccaagtcatcgacgtgccgggcgacccgtcctcgacggccttcccgctggttgcggccctgcttgttccgggctccgacgtcaccatcctcaacgtgctgatgaaccccacccgcaccggcctcatcctgacgctgcaggaaatgggcgccgacatcgaagtcatcaacccgcgccttgccggcggcgaagacgtggcggacctgcgcgttcgctcctccacgctgaagggcgtcacggtgccggaagaccgcgcgccttcgatgatcgacgaatatccgattctcgctgtcgccgccgccttcgcggaaggggcgaccgtgatgaacggtctggaagaactccgcgtcaaggaaagcgaccgcctctcggccgtcgccaatggcctcaagctcaatggcgtggattgcgatgagggcgagacgtcgctcgtcgtgcgtggccgccctgacggcaaggggctcggcaacgcctcgggcgccgccgtcgccacccatctcgatcaccgcatcgccatgagcttcctcgtcatgggcctcgtgtcggaaaaccctgtcacggtggacgatgccacgatgatcgccacgagcttcccggagttcatggacctgatggccgggctgggcgcgaagatcgaactctncgatacg

SEQ ID NO: 17597 - DNA, 441 bp, Glycine max
cccacgcgtccgggtggatcaaaactcaaccgcataaactggggtgatggtgggagtgctttttcttcgaaggatgccaattcacaaggcaatcagtcaaccagagacataggtgttcagtttaatgctgttgagtttaaaaggtccactgaagaattgaaattgcgttattctaattctaacgaggaagcagttaataaaaccgcaaaaaagaagcggaaatcagaaccctatggcgaggaaccttctggtgaaaatgaagaggaggcagaaatgcgctataggttttatgaaagtgcatctgcaaggaaacgaaccgtgacggcagaagaaagagaaagggcaattaatgcatcaaaaacatttgaaccgactaatcctttctgccgagttgtcctgcgaccctcctatttgtataggggatgcataatgtatttgcct

SEQ ID NO: 17598 - DNA, 476 bp, Glycine max
tttaggttgctcttcttcttcaaccttagccatggagtctctcccaaaaattcgtcattctcacatctcactcaatcactcactacttcaacgaggttctcagtgccatcgttcgtcatttccgacacccttctcttccctctctccaccactccctccattctctcctatcagagtctcatcttcaccatcaccgtcacccaaaccccaaaaccccttaaccctaaaccttcttctccctcctctcgtcaaacccacctgcatcgccatagccgcgaccgcattcttcttcatgcgcctccactctccccccgttgcattcgcatcgacgccggtcgctccaccggaatccgccgagtcggaaactctacccaacgaaagcgccactgaggagcaacttcgcaccaccgacaccgacgcgcttcaatcgctccttcaaaccaagatcagagccctcgaaatcaacgaagcgattc

SEQ ID NO: 17599 - DNA, 425 bp, Glycine max
cggctcgagcgttcagctggtggagatgggtttagtggcaccttactctgctggaacatgtcttccttcccttcaacgccttccaaccctgcaagcccaaaaatggaacaacttctcagcacctcttagttgccaccgccaagtgaaatgtgctgtccaagtccaaccacaagtagcaccacgaattacacctgatgagagcctgcaggtgaagagaagaactctcataggccttctagcatttgatgctgtccttgcttattcttcattgcaagcagcaccagcagctgaaaatccgtgtgaatttcaagtggcaccttcaggccttgccttctgtgacaaacttgtgggagctggtcctcaagcagtgaagggacagcttattaaagcgcattatctggggagactggagaatgggaaagttt

SEQ ID NO: 17600 - DNA, 562 bp, Glycine max
gcaagatcgaatggcggcactagagaggaagtggcttttctcctttgccggtgctccccgtcctggccaccccaaatcaatcaggggtcagttaattgatcaatgcagacggtcaaatgtttgtaaactgttggaatgtgactttggcgaaagcaaatgtcattctcccagcagcataatgcagatgtttcaaagctcgcttttctgcttgcaaccccagggtgattcatacacgcgaagatctgcttttgattcaatgctggctggttgtatacctgtcttcttccatccaggctcagcatatacacagtatacttggcatcttcccaagaatttcactaagtattctgtcttcattcccgaggatgatatccgcaagaggaatatcagtatagaggaaaggcttagtcagataccccctgagcaggtgaagatcatgagagaagaggtcattagtctcattccaagactagtgtatgctgatcctcgctccaaattagaaactcttaaagatgcatttgatgttgcggtgcaagcagtaattgacaaggttacaaatttg

SEQ ID NO: 17601 - DNA, 455 bp, Glycine max
agatatacatgttttttgttacacactattttgtatctttgcttgaaggataagcataataggttatttgaagatttggtgtactggggttcattcagctgctttctgttgcctctttcccggtgataaaagtgttgctggttactgcaattggcttgtttcttgcactggatgacatatcaatattgggagaagattcaaggaagaaagtgaatcagcttgtgttttatgtgtttaatccgtcgcttgtgggtagcaatctggccaaaacgataacttttgagagtattgttcagttgtggttcatgccgttgaatattctttgcacattcatactaggctcggccttgggatggattttgattaaaatgacaaggcctccgaaacacatggaaggtttaatcttggggtgctgttctgctggaaatttatggaacttgcttatagtcattatt

SEQ ID NO: 17602 - DNA, 639 bp, Glycine max
tcgtaaaaagacccttgagcaaggtgcaaccaagcttcttcatagatggcaagaagtggcaccctttctcgatgaaaacctctttatcagagtccgcattcaaagagcacagagtactgtgacaacttcttacgaaggtctcttcctaggtggggcaagaaaactccttaaaatcatgaaaacaagctttcctgagttgggtgtgacaagaaaggattgcatggaaactagctggatcaaatcagtgctctatattgcaggctttccaagtggcacccctcctgaagttctgcttaaaggaaagccaatagctaagttcttcttcaagggcaagtcagattttgtaagaaaaccgataccggaaaccgggctagaggggttgcggcaaaggctgctggtagaagacagccccttgattttatggagcccttatggtggaaggatgaaccaattttcagaatctgacaccccatttccttacagaaatggaactctgttcataagtctgtacatctctctttggcaagagggagagaagaatgttgcaaagcacatagattggattggaaaccttcacaactacatggggggcttatgtgcctagcttcccaagaggacaatatgtgaattaccgggatc

SEQ ID NO: 17603 - DNA, 416 bp, Glycine max
gggagttctttctgaaacccttggtcgcctgccaaaggggcatcaggcaaccacattacttgaactcatgacaatcagggcatttcacagcaagatacttcgttgttacagcctcggaacagctattggttttcgaattcggcgaggcgtattaacagatattcctgccattctagtgttcgtttccaggaaagttcacaagcagtggctcagtccaatccagtgtctacctactgctcttgaggttcttggagttgtccaaattgaacctgcttgatttaattttggagtttgaaatatttatatatcacaaacaggtttaagttgttatctggtgcctaagatgcatttaaaatcaatgttcaatttgtgaatcaagggcctggtggagtatggtgtgatgtggatgtggtgga

SEQ ID NO: 17604 - DNA, 844 bp, Glycine max
gctcaaggggctgttggtgttataattagaagtaatgtttctttagctgtgtccgatgtatttcccctgccagcggctcacattactcacaatgacggggcacaaatatattcttatttaaagtcaacaagtaatccaacagcgactatatttaagagttatgaaggcaaagatccattagccccgctgttggattccttctcaggtagaggtccacacaaaatcactccacatattctaaagcctgatttagctgctccaggggttaacattctagctgcatggtctccaattgctcctatttccggagttaaaggagataagagaatttcaaaatacaatatactatatggacctgcaatggcatgtcctcatgttactgcagcagctgtttacatcaaatcatttcatcccaactggtctcctgcagtgattaaatccgcattaatgacaactgctactccaatgcgtgatatacttaatcatggaaatgctgaatttggttatggtgctgggcaaatcaatcctatgaaggcagtaaaacctggattagtttacgatgctactgaaattgattaatgtcaagtttctggggtggagatggttatagtggatttatggacaaaattacaggagataattaaaccacttgtacaccagcaaatacaggaagtgttttggaccttaatctcccatcttttgctctatccacaactcgctcaaagtatattagtgccacttttagtagaactgttactaatgttggatcagctaaatccatatataaagccacagtaactacacctccatcatcttcttccttaaacatcaaagtagtgccaga

SEQ ID NO: 17605 - DNA, 1030 bp, Glycine max
  unsure (1)..(1030): unsure at all n locations
ggtggctaggggtaaccaactctatggaaacacacaacagattaggattacgtaccatttccttgatcctttttctgactcttactaaaagtctaagctcaactgcatttgatgtcagtgaatatgaagattgggagagcattgatatagcagattctatcttaagttatggaagtgaattgggagacatggaagaaaatgaatggcagatggtgcaaacgaaaggaaaccaatttgtggtgaacgaccaacctttctatgtcaatggattcaacacatactggttgatggtatttgctgcggatgagtccacaagagggaaggtcactgaggtgttcaaacatgcatcctctgtgggtatgtcagtttgtaggacttgggccttcaatgatggccaatggcgtgctcttcagaaatccccatcagtttatgatgaagaagtattcaaggctttggactttgtggtaagtgaagcaaagaaatacaaaatcaggcttatattatcattggccaacaactgggaggcatatggaggcaaagcacaatatgtgaaatggggcaatgctgctggccttaacttgacctctgatgatgacttcttctcacatccaactcttagaagctactacaaggcccatgttaagactgtgctcaatagagttaacacattcacaaacatcacttataaggaagatccaacaattttcgcttgggagttgatgaatgagcctcgttgcacctcagatcccacgggtgacaagttacaggattggatacaagaaatggcattccatgtgaagaaaattgatccaaagcacctagtggaggttggagtagaaggattttatggcccatcaacacctcagagaactcagttcaatcccaacacatatgctacacaggttggaactgattttatcagaaaccacctggttcttggagtggacttcgcttctgttcacatatatgctgactcttggatntcacaacaaattgctgatacacatatcccatttataaaatcatggat

SEQ ID NO: 17606 - DNA, 323 bp, Glycine max
ggcaaccaagctcaatggagagctttggtgtgggcatgggttctttgattcttctttggatgcttactaaaaatttaagttccaatgcacttggtgacagtataaaggatgaggaaggactcaaagaagaccaaaatgaaatggaaaattctctctcaaataatgatgaaatgaggggcatgaaagatgatgattggcagatggtgcaaaagaaaggaaaccaatttgtggtgaatgacaaacctttctatgtcaatggattcaacacgtattggctgatgggatttgctgcaagatgagtccaccagaggaaaggtcactga

SEQ ID NO: 17607 - DNA, 383 bp, Glycine max
acggtataaaatgggcatgctctttctgccgtctgcatgcttacaataaacagaggaacaaggttcgtacctacagcggcttctgacggaatacctcaaaggcattgaaactagagcagacgagattgttcaagtgctccaggggagaccacaatagcattttcttcgaactcgaaattggcttggcgattggatgtcatgagccaaaacattgttctgcatgatggtagaagtggttcattatctgaagaacagatcatgctaatacactaaggtggagaaatatagatcatcatatcttcaacaggcagccttactcacgcggatcggaagattggctttgacaatacttcacgcaacagattaagtaatatatctcctga

SEQ ID NO: 17608 - DNA, 466 bp, Glycine max
aaacactctctctctctctctctctctctctctctctttctctctttctttctttcttttttttctctgatgcgtttctacaaaaacacaaccttttaactgttttttcttcttctttgcttgctccttatttcttccttcgccgaatcctagaatgtcctcgtcggggttccctggcggcggtggtgcgtcggagtttttcgccggggtaggtggtttcggcggcagatccattccggcgaccagcatgaacaaccccaacgccgccgcctccgccaccaacaacaacctccaccctctctaccgaacccatcaacatcaacaacatcatcttcatcagaacctccccgcaatgtttctagatccttcctcgcagatcgcccaacggcaaacaccaaccctaatcggtaaacgtaccctaaccgaattccaagcctacaaccaaaccaacatcaacccataccac

SEQ ID NO: 17609 - DNA, 780 bp, Glycine max
gttgtactcttatccattctatcccatatatgtaaggacctgcgtagaaccactttccagcaatattgcacctttttgcccatagccatggctgaatcaattttaggtttcacccttttcaaatcacacactcttagttcatgtctacaaacaaaaaagtttcaagtgaaccattcttcaagattgccaaagcagcattcaaagtctacccttttcaacagaccgtggcaggtcttagagggcaagagcgaaaaaagaggatctttgtgcaaagtgaatggcttgccagattggccactgatggccattatagtagagcaaatggaggggcagagagatttgatcactgagaaaacagtttcccatcttagtgatcgggcaataaaaaatgtttactcttggtacataatgttcaccgtttgggggtgcttattctttggtgccatgaaggatccatattacgactcagaaacatataggggagatggaggagatggaactggcaactggatttatgaaaagcaagatgctatggaagcagaagccagagaagctctgtggcgggaggagttgattgaggagatagaacaaaaggttgaagggttgagagaacttgaagaggctggcaagaagaactagtcaactgattcatacctttgcttccacccattaaccaagcgattctctgttattgtatataaaaagagtaatttcttatgcttcaaaatgcaatgctgaaccacagatagtactttgaactaatatatatggggtcgcaat

SEQ ID NO: 17610 - DNA, 552 bp, Glycine max
ctgctgttactgccatgatatagggtatgatactcgggagcaagctaagctgctgaaagctgacttagcctttctggagtgtttggagaagcagcatgggagtactaaaggagaccctcatgttgctcatctttataagacaatgtgtgttaatggtctgaggaattttctgataccgtacagaaggaatattgtgaatctacaacagtgtgggcaacctatgattcagtttggatggcttagcaatttgagatggggaggttggaactttcagaaaactcatagattgagctcactggggggaagtactgtgtcataaattgtgaatttcatcgaattttgaaagtatgtgatcctgaccccccagtcttcaaagttcctttagtttttaaccttctgtttgctagagcatgcttcttattggtatgacttccacattttgtatagactatagtagtgtacatagcttgttttgtaaattgcaacgtttggtgctgcgtgacatcttggtgccataagcaaacttgttataatgaaaatcattaggttgtg

SEQ ID NO: 17611 - DNA, 473 bp, Glycine max
gtcagtcaatacctgagactgaaccaggcaaggagcagttttatcattatttatcatttggctggttgtgtggaggaatcattgagcatgcttctggcaagaaatttcaggagattcttgaagaagcaatagttcgccccctccatattgaaggggagttatatgtagggattccgccaggggtggaatcacgtcttgccgctctgactgtagatactgctgatttaagcaaagtctcagcactcgctaatcgtcctgaccttccctccaccttccaaccacagcaaattgctcaacttgcaaccagtttacctgttgctttcaatacactgaatgttcgccgtgccatcataccagcagctaatggacatgtatctgcccgggcacttgcacgttattatgcagccctagctgacggtggcaagataccaccacctcattcttctgcttctaagccagtacttggtagccat

SEQ ID NO: 17612 - DNA, 520 bp, Glycine max
atatatttttagccaaaataaaaagggggaagttgtatgtgtatcccttccttccggtctgaaacaaaaggaaaggatgaagcaatcaaaggatccgttcgaagcagcgttcgaggaatcgccgccagaatccccaacggctacggagacagaggcagagacgcaaaaccctactcctcctcctctgctcatgccacctccttcttctttttctggtgttgctgtagtagcactgaatccacaacagcctcagaatcagaaagtgaagaacaaagacaatgaggaagaggaggaagaggaggacaacatggacgtggagctcgccaagctccctttcaccggcgaccctcacaaaatggccaagatgcaagccattttgtcgcaattcaccgaagagcagatgagtcgatacgagtccttccggagggctggctttcagaaagccaacatgaaaaggttattggctagcatcactgggacccagaaaatttctgtgcccatgacgattgttgtatcgggc

SEQ ID NO: 17613 - DNA, 811 bp, Glycine max
attccttttgataccccacatggggacattgttgtttttattggagattggtacacccgcaatcatacggatttgaggaaggcccttgatgatggaaaagatcttggcatgccggatggtgttctcatcaacgggaaaggcccttaccgatataacaacacacttgttcctgatggcattgattatgaaaccattgaagttcatcctggaaaaacttaccgacttcgtgtacataatgttggagtatcaacaagtctgaatttcaggatccagagtcataacttacttctagcagagacagaggggtcttacacagtgcaacagaactacactagcttagatattcatgttggacaatcttattcttttctgttaagcacggatcaaaatgcaagtacagattactacattgtagcaagtgccaggtttgtgaatgaatcacgttggcaaagagttactggagttgctatcttgcgctatacaaattccaaggggaaggcacgtggtcctctcccacctgctcctgatgatcaatttgacaaaacttactcaatgaaccaagcaagatccatcagatggaatgtatcagcaagtggtgctcgtcctaacccacaagggtctttcagatatggttccatcaatgtgactgatatttatgtattgaaaaataagccactggagaaaatcaatgggaagcggcgagcaacactcagtggaaactcttttgtcaatccttctactccaatcaggcttgctgaccagtacaaattaaagggagtatacaagcttgatttccctaccaagcctctta

SEQ ID NO: 17614 - DNA, 504 bp, Glycine max
ctaaacacaaagagaatattgggatatttccaatgaagacggagctgaacaagagacacagagaccctccacgaaatgctgtctattattcctttggatatctcggtatcctcaactcttgccaaagtctcacctttcaataacagttttaagaaaccaacctctttcccatccaagctttcaccttcctctgatgaattctctctcctttctctctcccactcaggaatttgcagggctagtcaagttgttgatttgttcccaaccgtgtcccccgaaattattgtccgcgaggcaaggttggaggactactggggagtggcagagacgcactgcaagtgcttcttccctgaatattccttcccattagattttgtgctgaggatagacagattggtggtggctatgttagcagctatgttagcccgattctttaggcctagagattgcagaaggatctggttggtggctgttattgacagctcacttgatgagtcattttca

SEQ ID NO: 17615 - DNA, 480 bp, Glycine max
attaacttggcttttttttccctcactgatctaacagcctattctcactatatatactatatcccatggcttcagaacctgttctagctgaaactatccacctaataggatggatctaactgcagagatggctgaacacaagatgaaggtgatgactccatgatttctcttgttcatactgtcgtctagtctacacatgcggcacacaggctcaagccaggcaagttattgatgaagcctattatatacttaattagtacctatttttgttcgcactttttggaaacatcaaggaactagatgtggttgttgtttctttccttagctaggtagtactagtattatttatctttaaaacatgttacatagaatacaactagaaggatgttaaagtctatgctgagttcccttttcaatagggtagaggctaactaggtattaattagggatggaatcagatgtataatcttattattattt

SEQ ID NO: 17616 - DNA, 369 bp, Glycine max
  unsure (1)..(369): unsure at all n locations
ctttcgtcctcttggcgtttcaaaatggattttgtcgttttgtgcctgatagtgctggtgagtgcccaactattctaccacttctacagcctcatcaacatcttcgtcacgcgtttcggtcgcaaccctcctcctcgccctcctcccaccaccaccgccgccgccgccaagtcctccgatcaagacgcgccttcctcaaaggactcttgaagaacaatccaatcccaccactttgggggtaggcttttaaaataaataaaaaaaacgagggatccaatccagcaaaggttgttggttggtgtgtaatgttttaggttactatgtacctacgcactactgtaagagnttttttattattatttttgtgtg

SEQ ID NO: 17617 - DNA, 713 bp, Glycine max
gtttgaacatcgagaagaaaacagaaaggactgcttaaggacccttctccctctcattgaggaggcagggaaagctaataaactagtggatgatgctcgatcttcatacgtaaaagagaggcttcataccaatccagctttcatggagaggctgcatgcgaagtcaatgaggttgcgagaatctaatcaggttcctgcttgaggttttcagatctgatgtatgaattttttgacattcacctgccataattctttattgctccctggttttttgtatgagtcttatcttgggttccggctgcagaaaacaacctccctgcttagagcgtaaggcctcttacatctgatccttcctagaccccgcaactgcaggggagactcatgcaccgggctgacctcttagtcatatctttcgtatttagtgcttgaataatggataattttttttacctcttgacagatattgtatgctagttgactcaaatgttacatttttgaggagtaacattgatcatagaaaaggctgaatgacctcacactgaagcaagggatttttataaccgcagtttacaatgaccaattctagcgtgcttttccacaaaatagagagaatagccacctcactctgtaacaagcacaattatgagtaataagcaatctctatttctctgctgaaaaaaaaaaaaaaaaaaaaaaaaaaaaagaagaggggg

SEQ ID NO: 17618 - DNA, 553 bp, Glycine max
attaccgtgtattctatttctgtgttactgaaacatggtctttctcattttctccacacgctctccctctccaaaaccttcacatataccccgaagcaccaacatccaacggagtgagtgttgttaggttacgcttatttcaagacatgaagattccttgtttttcttgtttcttgccatcgaccactgaagaaaacaacaacaacaacgactacccagatgaagagatcaacgatgggagctttcgtttgttcacttacaaccaattgaaattagccacgtgcaattttcattcctcggagaaggttggagaaggaggctttggatctgtctttaaggggaagcttgttaatggatcttttgtggcggtgaaagtgctttcggttgaggtggaatccatgcgaggagagagggaatttgtggcggaattggctacacttgcaaacatcaagcaccaaaatcttgtaagcctaaaagggtgttgtgtggaaggtgttcatagatatttggtctatgattatatggagaacaattgcctctaaacgcctttttt

SEQ ID NO: 17619 - DNA, 477 bp, Glycine max
  unsure (1)..(477): unsure at all n locations
gtctgaacagaaatcaaatgaaagcagtgaacatagagatgaagtccaggaggccatatcttggtacaataggatccttggttttcagattgaaggtggacgtggggtaaaattcagcttcaagaatattaatgtggacaacccaaatgaggagttcttttttaccatccgccacgaagatgacgtgtatacattgctaaattgtaaaccatctgtcaaagatactgacgagttgatccatgaattaaacaacacaaatgggctatttaaatttgtcagaacaatgaggaaaaagtttcaagaagtagtggcacaaggccgtttatctatgacaacaaatgaacatcaagaatctgcctttatctctgcatctggtccagttntatcaatatcaaccattactgaagattatgatcatcaagatgaacccaccaaaggtaatgcacatcttccagaaacaagttaatcgaagaaggg

SEQ ID NO: 17620 - DNA, 525 bp, Glycine max
cccacgcgtccgcccacgcgtccgcccacgcgtccgcccacgcgtccgaatttttcaatggtggtgtagaggggaccatggtaaagtagaaacgcgcacacatcattggatcaagtctccctcagtctctacgtacaagttgtgtgagtcagcgtcatcatcggtgatggagtgaggacgtgtgcaagtgttgccgttattatatatagcataggcgcgcgtttacaccatcaaccgctaatccattttgttcagtgtgggacatagaagctgttcttgtgtgtctgagagagagagatggagaaagaaacagagatgaagcaatccaagttcaagaggatttgtgtcttctgtggcagtagtccagggaacaaaactagttataaggacgctgctattgagcttggaagagaattggtgtcaagaaatattgatctagtatatggagggggcagcattggtttgatggggttgatttctcagggctgttacgagggtggtcgccatgtaactggagttattccc

SEQ ID NO: 17621 - DNA, 382 bp, Glycine max
gggaagcaacgagcaagataaggcaaagaaagggttagaaggcactgccatagatttacctactaaccgccgtgtcaacctgaaaagcgctaccagcgacgacgacttcaccaacattcttgcacacatcaaatcctccaaaacccccgctgtcatcaaatatggcgctccttggtgtcccgtttgtatccaaattctcccagcattctgtagactgagcaataattttccaaagcttacctttgtatacacagacatcgatgaatgcccagaaacaactcaacacattcggtacactcccaccttccaattttaccggaatggtgaaaaggtagatgagatgtatggtgcttggtggggaagagaggctccatgatcgtct

SEQ ID NO: 17622 - DNA, 1334 bp, Glycine max
cgtccgccatattgtcaaaagacttatatttggtaagccaatcaaattggacattaataaaggaatggagagggcagaacaaattggaggaggcaaagctgtggccacagtcctagccattggcacagcaaatccacccaatttcatccttcaggaggattatcctgacttctactttcgggtcaccaatagcgaccatttgcaccgcttgaagcaaaagttcaagcgcatttgcgagaattcaaagatagaaaagcgacacatagtccacacggaagaatacctaaagcagaactcagacagcggcacgtacgatggccttcccttggagacacgacagaatgtccccacggaacaggtaataaaattaggtatggaagcagcatcaaaggccattaaggaatggggcgaacccttatcagaaatcacacacctcatcttctacaccacttcttgcttcggctccgttcccggtcctgaccactacctctccaaacaacttggactccgctcaacggtcaaccgcctcatgctcttcagccacggttgccacgctggcggcaccattctccgcgttgccaaagatatcgcggagaacaaccctggctcacgtgttcttgccgtctgttccgagaccatgtttgcctcgtttcgcgctcctagcgaatccaacgttgaggttctcgtaggacaggctctgttcggagacggtgccgccgccgtcatcattggcgcggatcctaagcactccatcgagcatccactcttcgaactcgtgttggcttctcaaaccactgtgcctgacaccgagaatgcgatcaaaggaagtcaacaagagaataggttggtttattatttggataaggacattcccaatattgtaactaacaatgtgaagaagtgtttggttgatgagttgggtgaagttggtttcgtcgacgaaattgattggaacaagtttttctatgcaattcatccgggtggggctgttattgtgagtggggttgaagagaagctagggttagagaaagagaagctgagtgcgacatggcacgtgctgagccaacacgggaacatgtggagtccaactgtgatttttatcttggatgagatgaggaacaggtccaagactgaggggaagagcacaaccggtgaagggttagagtgggggattttattagggtttggtcctggtgtggcaatggaaactgtgcttttacgtagttatccatgttgataaatagttacaaggagttacaaatactactactgctactcatgtttatgtatttatgggtcttttttttaagaataaatgtggtgactttcttagt

SEQ ID NO: 17623 - DNA, 549 bp, Glycine max
ctcgagccgctcgagccgctgctcatcactccaaccttgctttccatagataacatcttcggcatcagacaatagacaaaaacatgcattccttaacatgcacaccactttcttcttcttattcttctcatcacaccactctaaagccaaacctcaaccctctgctgggtgctgatgcaacttttaggccatgttctctacccttgaaaagaagaacatgctttactaccagagccattctctcatccaccagagaagatgtcttgaagcatttcagcgagcgaagagctctcaagattatctcaggcctgcagaatttcaataaagacaatgttgcctcggttgtcactgctgctgacaagggtggagcaactcacgtggatatagcatgtgaccctgagttggtaaagctggccattggcttaacttcttgtccggtttgtgtttcttctgtagatcctgcaacatttccagctgcagttgaagcaggagcactaatggttgagattggaaactatgattcattctacgagaagggaatatttttca

SEQ ID NO: 17624 - DNA, 568 bp, Glycine max
ggcaatttcgtgctagtgtggtagtgtggtacccttaccctgaggtgcaagacaaagtaacctaacggtgcttacaactattaacagcggaagaagtgaagggcccagacggccaccgtctagggtagggttagggttttaattttcgccacacaacaacacacgctacctcactgcaaagcaatctcgctgcttccgttttcggatttcaatcgcttccactcgcagctcccatggcaaaagctacttccggaaccgtcaatcctcacagccgtaccggagttcgtatcgtcgtcgccggagaccagggcaccggaaaatctagcctcattataaccgccgccgccgataactttccggtgaatgtgctgccggtcttgcctcccacgcggttgcctgaagatctgtatccggatcgcgtgcctatcaccatcatcgacacttcttcccgtgctgaggatagcgataaagttgctgaagaattgcagcgggctgacacagttgtccttacttatgcatgtgatcggcctgagacactcgaaaatcttagtatattttggcttccaca

SEQ ID NO: 17625 - DNA, 527 bp, Glycine max
ctagtgtagtgtgggtacccttaccctgaggtgcaagacaagtaacgtaacggtgcttacaaatattaacagcggaagaagtgaagggcccagacggccaccgtctagggtagggttagggttttaattttcgccacacaacaacaacagacactacctcactgcttccgtttacggatttcaatcgcttcgactcgcagctcccatggcaaaagctacttccggaaccgtcaatcctcacagccgtaccggagttcggattgtcgtcgccggagaccagggcaccggaaaatctagcctcatcatcacggccgccgccgaaaactttccggtgaatgtaccaccggtgttgcctcccacgcggttgcctgaagatctgtatccggatcgcgtgcctatcaccatcatcgacacctcttcccgtgctgaggatagtgataaagttgctgaagaattgcagagggctgacacagttgtccttacctatgcatgtgatcggcctgagacacttgaaaatcttagtatat

SEQ ID NO: 17626 - DNA, 444 bp, Glycine max
cccacgcgtccgcaaaaagtcctctctctctctctctctttcacactctcactttttctgtgcttctcttctctctcctttcaccctcttggaataatagagtagggagaaaaaaaagggtctcaaagatgagaccaaaagacgggtttttcattaaaggtccctataagggagggttttttctcatgcatgtggctagcagcagcagcaagtgcaaggtggccatgagcatgaccatggtcaacgaccctttgaggagaattgggaggtgtgaccaaaaaaaagaagccattagtggctctgaaattggagctgacaattctcctgcagcaggagcagcttcttcattctaatctggtgctatcctatctgagctttttactactactactaccccatctaatttctaccacactttctttgttttcccctggagtcttcttg

SEQ ID NO: 17627 - DNA, 805 bp, Glycine max
  unsure (1)..(805): unsure at all n locations
ttctcgagccgnatcggctcagcttgtttgtttccatttcttgcttctattatttacttgtttttctctagtattcatggtgctcgctggtaaacttagtactgaacttggggtgaaagcatccgctaccaaatggttcaacctcttaaccacgcaacttcaccatgttcagaacctttgtgaaagagtgcatgaaaccaagctgcatgatggtgatgactggcacggtgttggtaattcggttaaacactggacttatgtcatagacggcaaggtacacacatgtcaggagagtattgaagccattgatgaagagaacaaaacaatcaaattcatgctcttcggtggagatattagtcagcactacaagagctttaagctgatctttgaagtgactgataagaacgatggcggtgctgctgttaaatggactcttgaatatgagaagatcaaagagaatattgatcctccacatggctacatggactactttgacaaatccactaaagagatggatgcttatcttgtcaaggcatagctcctaatattatcaagaaaataacaacaaaggagtaatggatttggctctgagggtatatatatatatatatatatatatatatataagcgttttatctatatagtcattgtgatgctagaaacgtagaataaaattataatatgcgtgtttgcttctgtccatccttcgtttctgtcgaataaatgcaggttggtggattgaactatatgtaaaattatgtgaaccggccgggttatgtattgcaaaataagctaaatactttat

SEQ ID NO: 17628 - DNA, 767 bp, Glycine max
cacaccatcaaatctggacaatatctatcttcaattttcttcagattctaacaatggtagattaaaaaaaaacctaaatttctgcaacaaataattaagcaatatctcaaagttttaatttttgtatataagtttcctcccagggagatccttacgtggcgtagcgtaacagagaatagaacgcccgagaacggagagagaggaaacgacgccagcgacgtaaaacaccataaccaatccgagaacccacggcatcagcatgaacccgatgaagaaagtcaccgatccacacagcatcagcgccaccgaaatccctagcagtagcgacgcgaaccccgccggagtaatctgcgcccccgccggcgaacgcctcgccggaggctccggcacgatcgacggtgaccggagaaggttgaagaccagagccgagagctcacagaaaaccctagattgctgatcttcctgtcctctcatggtgtctttgtatcagaggaagaagaaaaagatgtaacaataataataatagggagaggaataggatagaaaaggaaggagatgaaaattaaacgtgttgttgttttgaggaaatcaggaaatggaagtatttgcagaaagaagaaagaaagatgtaaatgaattatgtttgcatttggggattcgcgttgcaagtaatgacacgttgtcgttttgcttagattaaagacgcagaagcagaatagaaaagttgaagaaaaagtgttgcgtgacgttaggattttggttttgag

SEQ ID NO: 17629 - DNA, 532 bp, Glycine max
agagaacccttccgacagactctttactctcgttcacagcataaaaacagcaccgctttacaaatgacaccactattattgtgagataacggccattattcttcttccgaccatccccaagaatgcttttctcacccttcctcactctcactttcttcctcctcttctcttcttccgttgctgcgatttactcagcggcaacatgttctaacatagtgccgctgagataccgcagcgacagaatctccataacggacttcggtggtgtcggcgacggccgcacgctgaacacgaaagcgttcagagcggccgtgtaccgcattcagcacctgagaaggcgcggcggcacggtgctttacgtgcctcccggggtgtacttaacggagagcttcaacctcactagccatatgaccctttatctggctgctggtgccgttatcaaagccacgcacgagttggggaattggcctttaattgcacccttaccatcttatggaagaggaagggagctccctggaggaaggtatatgag

SEQ ID NO: 17630 - DNA, 448 bp, Glycine max
ctattccagagcttttccggggatacgagaatacaaactacaatcttcccttcaccctctcagatctaactcatccacccattcggttcggtttccactcctcacctgtcatcacaatcaaattcatttcttcttattagttcatgtgctagctgcttttctttttaaattttcagatttgttttttcctgttttgtacggaatttcgatcgaccaagatgagcgtggttggtttcgatttcggtaacgagagttgcgttgttgcggttgcgaggcagagagggattgacgttgtgctcaatgatgagtccaagcgtgaaacgcccgccattgtgtgcttcggtgacaagcaacgcttcattggcactgccggtgctgcctccactatgatgaaccctaagaattcaatctcacagattaagagacctcatggtaggaaattcgctga

SEQ ID NO: 17631 - DNA, 506 bp, Glycine max
aggaacatgtagtcgagtattatgaattattttcttgcaaactaaaaaaactgactatatagcatgtaaaaatcaaccgagatcataaacacgtgatagttggaaagcatagaataataatttctggataagaaaggaacgtgataataatatttttcatctgtcccacaagttataatggtagggtgagtcaatagcagccatcttctgctgcaagttgaggtccttatagaaccttttaatgaactcctcagccgccacgtcaacttggttatcgtctccaccttcttcgtccttcaaaggaaagggcgagtctgtgattctgatcagttttctcccaattggactttttccgaacccgggtaacggagaagcctcaaccttgttattgttgagtatttcgagcactttctgtacggtcgaaacgtcgtcgtggtgggggaacttggtggtggtggtgcaacggtggtggtggtgacggtgcttattggtgctgcgcttgatga

SEQ ID NO: 17632 - DNA, 820 bp, Glycine max
ctaacatcttctcacaacagcatcactaatccttttcctttgtgtttattttccatcttccattaatatgggtgttgttactcagatttatgatacccctgctgctgtgcctcctactaggcttttcaaagccatgacattagatttccataacctcttcccaaagcttgtggatagcatccacagcattgttttcacccaaggaaatggtggtcctggcaccatcaagaagatcaccaccattgaaggtgacaaaaccaagtatgtgctgcacagagttgatgcaattgatgaggctaactttgtatataacttcagcataactgagggcactgccttggctgacacattggagaaggtctcattcgagagccaattggtggaagctccaaatggaggatccattaggaaggtaagtgtccaatttttcaccaaaggcgatgctacgcttagtgaggaggagctcactgccaacaaagccaagatccaagggcttgtaaagctagttgaagggtaccttttggcaaatcctgattattgaaggtctttgtagttaattaataagagtttgactatggtgcaaattaataagccttgatggatttgcaggctcagcaccaaggctttcttctatgatattttctaaatttttctttgttatgaattgggagattaatcaatcataaattaatagtgtggttttgtaaaaaaaaaaaagcaattaataatcaacaatagacttgaaatatagttgttaaacagtccatttggacaggaacgaaatattcgtaaccaaaaaacgtgaaattcttaataaaaa

SEQ ID NO: 17633 - DNA, 1461 bp, Glycine max
aggtaagtaggtgtctctcactctcgcaccgaatccacattctaaagtaatacgccggagaatgacgtcacactcccactacccacccgacttagacgccgactccgtcacctcctccccacgctccgatcacttccacgacgcgccgccccgcatccgcttcatgtgcagcttcggcggcaagatcctcccccgcccccacgacaaccagctccgctacgtcggcggcgacacccgcatcgtcgccgtcaaccgctccatcactttctccgccctcattctcaaactctccaaactctcaggcatgagcaacataacagccaagtaccagctcccgaacgaggatctggacgcgttgatctcggtcaccacggacgaggacgtggagaacatgatggacgagtacgaccgcgtcgcacacaatcagaacccgcgatcggcgcggctccggctcttcctcttccccgaaggagaagactcccgcgccagcagcatcagctcgctcctaaacggctcagccaagcgcgaaaactggttcctcgacgctttaaacggcggcgtctcgggcctcgaacgaggccgctccgaagcctcttctatggtctctgaagtacccgattacctcttcgggttagacaactccgaagaaataacaaatcaccaacgcgacccgagacccaaacccggacccattattcaagataacgtttccgtttcagatccgggttcgcccgccccggttgtctcgtccccttattgttccacgtcatcagcgccgcccgtgccctctctcccgaaccttccctatgttaaaaccaaacctttaaacttaaatccggttcctgatactgactccaaggaaaatcaaaccgaacctgaaacggaacctcacccgaacctgaacctgaaccaaaacccgaacatgtattcaaataaccctgttgttcactaccctccagaagctgcttattcggcgcattcagtaaacccggttccggtttactatgtttccggtccggttcgaccgggatccgtgccggttcctatgcaaaccccttatcactacgttcaacaatcgtatcatgctgtggtgccacctcaggttcctatcgggtaccatcctttggttccgggttcgggtcaagtatatggagcgggcgtgaggcacatgaccccactgcaaccttacagcccctccaccacggcggcggttcatgacggtttgaaacagcacgtgtatcatgccgtgccaaattcgggtccggttccggctcacccagttgttccgatgacgggtttggatgaaccgcagagaggtggagcgtaatttgtgacgggtcggggccccaattcacttaataactgatcccatttttatttagtggatgggtgctgaatttttactaccataccatcatgcaaacggtaacttatgtctatatatatacaagtgccttcact

SEQ ID NO: 17634 - DNA, 450 bp, Glycine max
cggctcagccaaccgcgaaaactggttcctagacgctttaaacggcggcgtttcgggcctcgaacgtggccgctccgaagcctcctccatggtctccgaagtacccgattacctcttcgggttagacaactcggaagaaattacaaatcaccaacaccaacgcgacccgcgacccaaacccgttctccaagacagcgtttccgttacggatccgggttcacccgccccggttgtctcgtccccttattgttccacgtcatcagcgccgcacgtgccttctctcccgaaccttccccatgttaaaaccaaacctttaaacttaaacccggttcctgatacacacttcaaggaaaatcaacccgaacctgaaaccgagcctcaaccgaacctctatctaaatccaaataaccctgtcattcactatcctccagaagctgcttattcggtaaa

SEQ ID NO: 17635 - DNA, 246 bp, Glycine max
gtattctaagtgttttggccggtcttttgactacagtttgttttccaagttatgacaaatggccatgcagagaacatgatggaactgaagaaaggaagaatgtggacacttccaatgcgattcttatacggatcaacagtaacaggtgaacaaactgtattctaagtgttttggccggtcttttgactactttattggaaaatttactttgttcattcgcataagtttatattggatttcttatct

SEQ ID NO: 17636 - DNA, 474 bp, Glycine max
ttcacagaagagagagagagagaaaaaaaaaaaaaaagtctctgtttcttcacttgctcacaagccgcaactgctactgtgtacccaatctgagcccaacgagatgggggggcagaatctttccccaaaggaaaggagtagagattggattggagttcttatgaacagcagctttggttattgtacttatcaccatgatcttcgatctaatgagatgaatgtgttctgcgtggactgtgcacttaggatgtgtaggcactgtaaggaagctcattccctacatagaaggtttcagatttacaaatattcctaccaggatgtcttccgccatgccgagctgcagaagtattttgattgctccaaaattcagacttacatatccaataatgaaaggattgtgcatctcaaacctcgggccttcaatcaccaaatctaagtctgctgatctaagtcccgactctaaatacaaagaga

SEQ ID NO: 17637 - DNA, 629 bp, Glycine max
attttggttctgtctttatttttctttttcatgtaagcaaaagaacgaattagagtgggaagacgatccaactcggacccgttatcttcattctattcaaccgatcctctctttttcttgtcaaagcagatagggcatggcaacagatgaaaatgctgacatgtcagatgcgaagtcccagttgagtcaattgcatgagacatggaagcaggagattgcaaaaagccaatcccaagtggatgtattgcaaaaagaacttacagagttaaagtcttgcaatcaggcttcagatggaaatgcaaaacaggagttggaggttctttggcgaagagtcaagactgcttctacattgttgacttacttaaaatcaaaagctaggctcatggctgttcctcatctagcccatacatcttgtggcatcaaacaattagagggggtaggctttgttgacaaaaatgggataccattatctggttggtccagcaatgttgatctttcttcatttgatgacgcagatgaagaatcttggataggaattaggcatcagtatggttccttagatgaacaagatgcagcttatataggtgaaatgctcaagtctgtacagatggtcgcagatgtaatggagg

SEQ ID NO: 17638 - DNA, 434 bp, Glycine max
atctcgagcgattcggctcgaggaaagaaagagaaagagaaagacaaaagatatccgtaagaccttgatccaactcatcatcgtgttcgtcttcttcttcttcttcttccttcaactcgcttttcatccaaccaggacatggcggcagatgaagatatgtcagctttgaagtctaagctgagccaatcaaatgaaacttggaagcaggagatggaaagaagccaatctcaagtggatgtattgcaggcaaggataatggaggtaaaggcacaaatacaaggctcaaaggaagatgcaaaaaaggagttagaggttctatggcgaagagtcaagactacttctaccctgttgacctacttaaaatcaaaagctagaatcatggctgttcctcatctagcccatacatcttgtggcataaaaaagttagatggagt

SEQ ID NO: 17639 - DNA, 377 bp, Glycine max
  unsure (1)..(377): unsure at all n locations
ctcagacccgttatcttcattctactcaatcgatcctcactttttcttgtcaaagcagggcatggcaaaagatgaatagctgagccaatcgcatgaaacatggaagcaagagattgcaagaagccaatcccaagtggatgtattgcaaaaagaacttacagagttaaaggcttgcaatcagggttcagatggaaatgcaaaaaaggatttggaggttctttggcgaagagtcaagactgcttctacattgttgacttacctgaagtcaaaagctaggctcatggctgttcctcatctagcccatacatcttgtggcatcaaacaattagagggggtatgctttgttgacaaaatgggatacattatcangtggtcag

SEQ ID NO: 17640 - DNA, 485 bp, Glycine max
agcttgaaacaggacccacatccaaccacaacctcagcctgtgtcagttgagggaaaatgggcacttgtgggattgtcttgttgaccaaaccttcccctaagccatggccacttcggacatcctcacgacgcactcttccccgcattcgctgctgctctgcttcttctacttcagagctttccccagataagcttccaactagtattgatttgtctgtaactggtggtgcctatgatttctcaaaagcaacaacatcactaacaaatgagttcatctcttcaccaaagaaagtaactcttttaaggcatggtcttagcacttggaattcagaaagtaggattcagggaagctcagatttgtctgtattaactgaagttggggaagagcaagcaaaaaggtgcaagaaagccttggaaaatatatactttgaccagtgttttgcaagtccaatatctcgtgccaagcaaactgctgaaattatatg

SEQ ID NO: 17641 - DNA, 737 bp, Glycine max
acgtattctaaagtgtggggctatagcagaaatgcattaatacttggtgcataatacattttcactttcttgtcctaataagataaaaaaaaaaataaaaaaatgaaaccaagagtggaaagggcttgtgtggggagtatgaatgccacgctttccacgtaggaatcagacacaagccgattccacgttcacagaatcaccagtttcacaacctttttcttatcatcaattgtctctttttattctcacttccttaactcagtatctgccaactgagatacattaggaatagcaaagggaaaatggccatgcatatgcaagcacccacaatcagtcttaacactgcaaggtccccatcttcattagctccagctgccaatgctggcctgcgaccacacctcaaccctttggctttaaagtcatctttcttctctggttcccttaacctcttacttcatccaatgcaacagtatcttacttctggagctcccaggatttccatgcgtgtggcctccaagcaagcctatatctgtcgtgattgcgggtatatttacaacgacaggatcccctttgagaaattgcctgataaattcttctgtcctgtttgtggtgctccaaaacgaaggtttaggccctacgctccaactgttgcaagaaatgcaaatgataaagatgttagaaaggcacgaaaatccgaaatcaagaaagaagaagcaattgggaacgcactttctatt

SEQ ID NO: 17642 - DNA, 514 bp, Glycine max
taggagaacactaacatgcatttattcaaacaactcctcagttagtttcatttcatggctaactattcccaccctcatatctgccaatgtctgagtcacttgctgaccctccggcaacattttccggtcataattgccggaaaccgccgcaagaccggccaagagttggtggaggaagtgttgtccttggcacaaggcctgctccaccttggactcacatctggccaagtggttgccatctctgctttcaatagtgataggtatctggagtggttattagccattgcatttgttggaggaatagctgctcctctgaactatcgctggagttttgaagaggcaagattagcaatggctgcagtgaagcctgtgttgttagtgattgatgagagcagttacacatggtactcaaaactccagcaaaatgatgttccatctctgaagtggcatattttggtggattccccttcctcggatttttctaagtggaatgtgttaactgctgaaatgctta

SEQ ID NO: 17643 - DNA, 872 bp, Glycine max
tcgcccacgcgtccgtcttgagccatttactttcctcaacttcaatttctctagctagctactagttcagtgttcagcatatgtgaaatgaaatgagaagaaccatgtcaaatgcatcagcatgcttctttttctttgcttttgtagtattagtagcacttcataatgctgaatgccgttctcttcggcctagtgtttctgatggggttgatgcagttcaattacctcaagagtcttcttatctacaactcaaagaccaaagtgttgttgtcgagtcttcttctgatgagcatttctgtaagcaaatgtacgggttcttgccatgttccaataacatacttggccatctcttcctcattttggtttatgagtacttgttgttccacggagaatcatatttggctgctgggggtgagcaaatcttcaagaatcttggccctggggtttttggtgctagggcctttgatattcttggtgctcttcctgagtcattaattcccgctgttactggactgtccggcgataaggagagtgcgcaagagtatgcttccactggagttggtttgttggctggatcatccattatgcttctgacagtagtttgggggacctgtgttttcattggcagacaaaagttgaaaaatgactctaactatggtggcacaaattcatcaagtggaggaataaaagaatcactaactggttatggtatcactatggatgtagatactagaaagatggcaagaatcatggttttctcagttataccactcctcataatgcagattcccagtatattcaacttctcttctattccacgcaacgtgaccttgatggttgctcttacagtcgctgttgctcttcttatctca

SEQ ID NO: 17644 - DNA, 1038 bp, Glycine max
gcctagatgggtgtggagactcatctacacatgaatctggtctcttttttgacctaaattggaaaaccaatttccaaaatttgcttatggtttgagaaggggtcccaagaaggaagacaaaccctcaggcacgttataataaaaaaaaataaattatgcgcctattaataattgatttagcgagagagcgtttcttttttttctctctctctctgaacttgaactcaacccttcttccttcgttccgcgacaacgatgaccaactacggcacaattccaacctcctcctcgccttcgaccaacctcgacttcatctcacgcgccaagcagcgcgtcaaggagggcctcggaacccgccgtccatggaagctcatgttcaatttccgatccttcggtctccccgccggggtcggagacgccgtcgcgcgtgtgagggagaacatctcctacttccagatgaactacgcgatcgtcgtgctcatcgtgctgttcctgagtcttctatggcatccaatctcgctgatcgtgttcgtggtgctcatggcggcgtggctcttcctctacttcctccgcgacgaaccgctaatcatcttcggaagactaatcagcgaccgcgtcgtgcttatcgttatggcggtgctgaccgtcgtgctgctgcttctcaccggcgccatcggcaacatcctggtggcgctgctcatcggagcggtgttgatagtggcgcacgcggcgttgaggaaaaccgatgatttgttcttggacgaagaagaggccactggattctctcctcccggtgctcctctctcttgatcccaatcttctctttctttctatgaatttgttatttggtcaatttagtaaataattttaggttcagtttggtttctttcggtttatatgtttttgccctttttcggaggggaaatttgcatttcgtgtctgtgaagagagatgcttggtgaagtgaaattcattttcttacgctttgttaatttaatttagttattatatcagagattttatcatcttttttttgtc

SEQ ID NO: 17645 - DNA, 667 bp, Glycine max
gtaaaatattcattccctcatctctaatccgttatgagaagctgaaccttcctctgcacaatctccttcaaaaagcttctcatccatggcgaaaacgctcatttcgtctcaatcgttcatcggcacaccgctcccctcactccctcgccaccacctcccccaccgcaccaggctcgtcgccaccaaagtcctcgtcagcctccacgaaattcccccaatccactccataagccgcaacattgacttcgccggaatcgtgactagagccgaagcctttctctacacgctcgccgatgctgcggttgcggcggaccctgcggttgctgcggactctgcggcttccaccaccgatgctgccgtacagaagagcggaggttggttcggcttcatctccgaagctatggagttcgttctcaaggtgttgaaggatggtctttctgccgtgcatgtcccttatgcatatggatttgctatcatattgctcactgttatagttaaggcagcgacgcttcccctgacaaagcaacaggttgaatctacattggctatgcaaaatcttcaaccaaaaattaaggccattcaagatagatatgctggcaatccagaaagcatacaacttgagagtcaaggctatatcggcaggctggggttaaccactggcaagttg

SEQ ID NO: 17646 - DNA, 479 bp, Glycine max
gagaaaatataataatggaaggaaagttgtcgcgtgcagcaaagaagattacatcgtcttccattcaagaactgtcccagctcgctcagagatgcaacgccatcaacctcgccgagggcttccccgacttcccctcccctccccacctcaaaaacgccgccgtttctgccatcaattccgacttcaaccagtacaggcacgtgcaaggtgtgtgtgatctcttggccaagatggtgaagcaaatgcatggtttagacatcgaccctgttactgacgtagctatttgctgcggtcaaagcgaggcattcgcagctgcaatctttgcaacaattgatccgggtgacgaagtcatactttttgacccttcctatgaaacgtatgaaggatgtgttgccatggccgggggagtccctattcacgtgccacttgacccgcctcaatggactctggatccaagcaaattactccgatcatttact

SEQ ID NO: 17647 - DNA, 535 bp, Glycine max
atctcgagcgaatcggctcgagacggtagacgacagaagggggcttcatgtccatttaatatttcatgtgaagtatatccctagggaaaaataatttcttcacatttacaatgaagcaatccactctattcctgttcctattcctattccccctcgttcatgctctttcttacgaagctgcttatattagagatggcctcaaatcctattcccagcttgatctccctcactccgtttttggttctgaaagtgtagccttcgattgccatgggaaaggaccatatgttggagtgtctgatggtagaattctcaagtggcaagagacaaagagagagtggattgactttgcagttacctcgccacacaggaacaagaaattatgcgacgggttacaaaatgacaagatggaatcaatgtgtggaagacccttgggcctcaaattcaacactgtaacttgtgaactgtacattgccgatgcatactttgggcttctggtggtaggaccaagtggtggtgtggcaaagcaattagccac

SEQ ID NO: 17648 - DNA, 637 bp, Glycine max
tccacgcgtccgcccacgcgtgcgcccactcgtccgaccacgcgtccgcccacgcgtccgtccacgcgtccgcccacgcgtccgcccccgcgcaacaaaacacgtcactcgcagtgtgcctctcacgccgacttcctatggcaagggatagctgcctcactcgtgtcaccgccggcgccgctatgggcggcgctgtcggcggcgccgtcggtgctgtgtatggaacatatgaagctattaggtacaaggtgcctggactattgaaaattaggcatattggacaaactacacttggaagtgctgctatttttggtcttttcttgggtgctggaagcttgatacattgtgggaaatcatactgaggataaagatttgtcctcccccctacttacagtgctttggttgctacacttgtaaagtatgagtagagcagggattttctgcttttttggttttctggatcatggaaaaggttttatggcactactcctatgaaattttgcatttatttctcccaagacattattactgttgaaatttctttgctggggctttccttctacttttttgattcctcattttcttccgagacagtgaattgctcttgcaataaaaaggagtgcagatgtgtgtgttt

SEQ ID NO: 17649 - DNA, 1583 bp, Glycine max
  unsure (1)..(1583): unsure at all n locations
ggccttaggaaaagaggcacctgagtcaatgctggtcagagacacacacccctccccagcaaactctcacacactcacacacaaacgctggcgtttcgccaaatcccaaacgtttctcctttggacaccataaaaagcacagcctctccaaaccttcaccctctctctccctgcgctactgcgccatggaccagcgccatggaccccaacctctcccagagtcagacaccataggaaacgattctcacccaaaaacgcaactcaccaaggaaacagaacgagttgtggaatcgctgtccgacgccgagtcgcggcgccgcgagttacggagctccgacgagcctcgttcggactccaatttagaaaccctaggccctggtgtttcctcttcggttgaaacccttgctgtgcagcatcggagtgacgatttgcaagggagctctactgctccgaattcgggtggcaaagccgaaagtaaggagacagttgaatctcctgaaaaggaaactattgaaagaggagcagtgcagccactccaaactcagacagaaaatcggcttcaggtgtctgtgtgttcaattccattgtctgatctatcaccaacttctgttacacaatctttatcaattgtttctagtccaaccgtacaaaaacagaaaatatctactccanaggtcaataacacacatgtgccagaagtagataggaaaaatccttctggtcgcagaaccttatctgctggttctggtgcagggacatcagcatctgacggatacaactggcggtagtatggtcagaaagcaagtgaagagtcctacaggttctcgaagctattacaggtgtactcattcagactgttgtgctaagaagattgaatgctgtgatgattcaggtcatgtgatagagattgtatataaaagtgagcacagtcatgatcctccacggaagactaattccattagggaaaataagtttctgtcttccagtgaacccattgtagaaaacagtgttccggagcagcctatcaaagttctgaaggatgctgatccatccatttcttcaaaagaatctctacaagaagcaccctgcagcactgataagaaacgacaaaacacatctaatatcagtggtaatggtaaagttattttgaaagaggaacatgtaaatgagccagtaccaaaaaaaagaatgaagaaaggtgacttaacagacatggattctccagtaaaacctggaaaaaaatccaagtttgttgtacatgcagccggagatgtggggatatctgctgatggttaccgatggcgcaagtatgggcagaaaatggtgaaaggaaatccacatcccaggaactactacagatgcacttctgctggatgtccggtcagaaagcacattgagaccgctgtagataattcagatgccgtcatcataacatacaagggtgtacatgaccatgacatgccagtgcccaagaaacgacatgggccaccaagtgctcctcttgtggctgctgcagcacctgcctccttgaacagtttgcaggtgaagaaatccgattccccacaaaacaagaaaatttctac

SEQ ID NO: 17650 - DNA, 453 bp, Glycine max
  unsure (1)..(453): unsure at all n locations
ctctggtacttggcccaagaggaatgttgaagcctatcacaacaaaagcagcagcatgaagccaaacgttggtcccaactgcatccgggcagagaattacatgattacttttgaagttgaagaagaaaagtttccgttatttggaaagaaataccagctaaaatttgctaatgatgtctctgctgaaacccattgcttggctcattttccaagtttcatcaggttggccagggaagctggtcttgagtacgtggagattcaaaatttgaccgagttttatgatgacaacatagtgtgttaacaggcctgctaattgtgctctgttgtcacactatgttccaaacctcttggatcctanggggagacttcttcctcgttcatatgatgcactangtctctacaccacgtttatatttcaaaaacctgacccggaattgcacccccgattcctac

SEQ ID NO: 17651 - DNA, 569 bp, Glycine max
caataccaagctgacaatggagctcaagctgttcagatctttgattcatgggcaacagaacttagtccagtggattttgaagaattcagtttgccttacttgaagcagattattgatactgtgaagaaaagtcatccaaacctccctttgatcctctatgcaagtgggtctgggggtttgcttgaaagactagctttgacaggcgtggatgtagttagcttggattggacggttgatatggctgatggtaggaggcgactgggaccgaatatagctgtccaggggaacgtggaccctggcgttctttttggttcaaaagagttcatcactgatcggataaatgatactgtgagaaaagcaggtagagggaaacatatcttgaatcttggacatggcattaaagtaggtacgcctgaggagaatgttgcacatttttttgaggttgctaaatcaatcagatactaagcagctacttatgattaattcatttttttttgtttaattgcacttttagtttttttactatgatcggtgtttgattttgattctctaatgcattttctcagagc

SEQ ID NO: 17652 - DNA, 703 bp, Glycine max
gtggatccattattcatattgttgatcatatcgatttagatgtctggagtgtacctggaagtgctgaggccgctgtatgaatcatcaaaaatcttggctcagaagttgacaattgctgccttgcaacatataagacagatagcactagaatcaagtggagaaattcagtatggtggtggacgccagcctgctgttttaagaacatttagccagagactttgcaggggctttaatgatgctgtgaatgggtttgttgatgatggctggtcactgatgggtactgatggagtggaagatgtgactatagccataaactcatctccaaacaaatttttgggctccaattacaacgcatcgatgtttccagcatttggaggtggcgtcttgtgtgccaaggcatcaatgctcctgcagaatgttcctcctgctttgcttgttcggtttttgagggagcatcgatcagagtgggctgattatggagttgatgcatactctgccgcatgccttaaagctagtccctatgcagttccttgtgcaagacctggtggcttccccagcacccaggtcattttaccccttgctcatactattgagcacgaggagttcctggaggtagttcgaatagagggtcatgcattttctcccgaggatgttgcgttggcacgtgatatgtatctattgcagctgtgcagtggagttgatg

SEQ ID NO: 17653 - DNA, 516 bp, Glycine max
ggtaagtcttacacaagataagcatccttttggtggtcaagaagtagatgcatcttctcttggatgggcaatgtcagcagtatcatctagagcgtttcgattgtatggtgaaaaggatcccaatgggatacgcattgacataccaatgatgctccccctaattgatatgtgcaatcatagtttcaatccgaatgctagaattgttcaagaacaagataccagtaactcaaggatgcaagtgaaggttgtggccgagacagcaatcaaagaagatgatcctctgttactttgctatggatgtttaaacaatgatcttttccttcttgattatggatttgtgatgcactcaaacccttatgattgtattgagctcaaatatgatggtgctcttttggatgctgcaagcacggcagctggagtttcttcaccaaacttctcagcacctgttccatggcaggaactgatcttatctcagctgaatctagctggagaaactgcagatctcaaggtgagctt

SEQ ID NO: 17654 - DNA, 989 bp, Glycine max
tgggaaatggaaatagcactcactcacttgcagcgaagaagaaaaaaaataaaaacaccatcagcatcttcactcaccacgaaggttccgttctctgtggatctatatctctagggcacgttacgtggaaggaagctcttcaccgacttcaatcgaagaagatggattacagtgctggttcgagtctgtttccgttgcaccgttgcaaaaccattcacctggtgaggcacgcgcaggggattcacaatgtggagggtgacaaaaactacaaagcctacatgaaccccgattacttcgatgctcatctcactcccttgggatggcaacaggttgacaatttgcgtaagcatgttcgcgactctggccttatcaacaccattgatctagtcattgcatctcctttgatgaggactctacaaacaactgttggggtatttggaggtgagggctacacagataaaacagacgtccttcctcttatggttgcaaatgcaggaaatagctaccgtgctgcaatttcaagtctaaattccccaccaattgttactgttgaactttgtcgtgaacatttgggagttcatccctgtgacagaagaagaagtgttagcgagtatcaatttctttttcccgctgttgatttttcactgttagatagtgatgaggatacctggtggaaggccaatgttagagagacaaaggaagaacttgcagctagggggatgaagttccttaactggtatgagtttgttataattagaaacttctaaaggtttattttatgagtttatgccagcaatactacatattggaaacacactaaaattggactttgatgtgtagcaagttaatataattctactatgtaaggctcttcgctataggatgataaaatgaacctatatttttgcaatattttatgaaatttactatatatagctgagtgtgtttaatgtaatgatgtaattgaagccgctcacaaggctgtcact

SEQ ID NO: 17655 - DNA, 786 bp, Glycine max
cacttgtcaaatctggagatgttggactgcacggggcttctccatctcacatccctgcaacaattaaccatagagagttgtcctttgctggagaatatggtgggagaaaggcttcctgactctctaataaaattaaccatatgggaatgtcctttgctggaaaaacgatgccgcatgaagcaccctcaaatttggcctaaaatttcccacatccctggcattaaggttgacgatagatggatttagccaccaaggatgatcatcagagaatcaacaaatcatcaaaggcaacgtggaaattgaccttgtatatatgtttcgaagaagtaacgatacagatatggttgattggcccggagaaactgtacctacccatgaatctaagttcaaatttgaactagtgctaaatgtaacttttgatttaattgacgtgaaattgacactttctcaatagctgaatttttatttgtgaggtttttcgttgggtacaatgtgaaggatgaaaaggtgtaccaagtgaacttcagaaggattggatgatttcagcttatctcttatcccctgtcctataaattaatagtggtatgattattctaaaaatatgatagatatgtacatacgtaagaattgataaaagcataataaatatacaattgcaattcggtaaattgaagaacatacatacttcttagacattgctaaaaacaaaatcaaaaaattgtagatcattttttcctattgatcacaaataagaatgatactatcaatgatcaatctcatttcttg

SEQ ID NO: 17656 - DNA, 465 bp, Glycine max
  unsure (1)..(465): unsure at all n locations
ctcgagccgctcgagccgtgctacggcttcagcttccgctgcttctctctcccttcgctcttctccgttcaaactcaaccctccaaaactcaactccgttacgctccgtttccctcaccttaatcgccgttataacagcgccttcagagtcgtcgccgcttccgtttccgtctccaaccccaacgtgcaaaccggccccgacgatctcgttgcttccattctctcaaaggtggtgcaaacggatggaggagtattgctgaaggaggaagagcataaagaggtggccgaagtggctcacgagctgcaaaagtattgcgtgagtgagccagtgaaatgccctttaatatttggagagtgggatgtggcatactgttcacgggcaacatcaccaggtggtggctataggagtgccattgggcgccttttcttcaacacanagcanatggttcaagttgttgaagctcc

SEQ ID NO: 17657 - DNA, 428 bp, Glycine max
attgaatatggacaatgggttgaagagcaacaaaggcggaacgaagaacttagacatgcatttcaagcgcaagcatctgatgtacagctgaatgtagtggttcagagtgtcttaaaccattactcaaatcttttcagaatgaaagcagatgctgcaaaggctgatgtcctctatttactctctggtgtgtggaaagcatcagtggagcgcattttcctttggattggaggctcccgtccatcacagcttctaaacatcatcgtgccacaacttgcgcctttgactgatcaacaaattgttagtattagcaacctccgtctatcgtctcaacaagctgaagatgctctttcactaggattggaaaaacttcagcagagtttggtccacgacatggcagttgattcactgggtgtaggaaacttcggact

SEQ ID NO: 17658 - DNA, 1549 bp, Glycine max
ctcgagccggtagctatttctacttcccttctcttggaatgcacaaagctgccggagcatttggtggcatcagaatttggagccgccctctcattcctgttccttttcctcctcctgccggggactttaccatacttgctggagattggttcaagctcgaccaccgaaggctgagacgactcctagagaatggtcataatctccccttccctgatggccttcttatcaatggacgtggttggaatggaaacaccttcactgttgatcaaggtaagacttatagattcaggatatcaaatgtggggctcacaacatcaatcaacttcagaatccaggggcacagtttgaaacttgtggaggtagaaggatctcataccctccaaaacacctattcttcccttgatgtccatctcggacagtcctattccgtgctggtcacagctgatcaacctgtcaaggattactatatggttgtctctacaagatttaccagacggatactcacaacaacttccgttcttcattatagctattcaaaaacaggggtatctggtcctgttcctccagggcctacccttgatattgcatcgtctgtctatcaggctagaactatccggtggaacctgacagcaagtggaccaagaccaaaccctcagggatcataccactatggattgatcaaaccgagtcgaaccatcatgcttgcaaattctgctccttatatcaatggcaagcagaggtatgcggtcaacggtgtctcatacaatgaaccagataccccattgaaacttgccgactacttcaacatccctggagttttctacgttggaagcattcctacctatcctaacgggggcaacaatgcctacctccaaacttctgtcatgggggctaatttccatgaattcgtggagattgtgttccaaaattgggaggactctgtgcagtcatggcacatcgacggctattccttctttgttgtagggtttggtagcgggcagtggacagcagacagtagagtacactacaatctgagagacacagttgctagatgcaccactcaggtgtatccaaggtcatggactgcaatctacatggctcttgacaacgtgggaatgtggaacataaggtccgagaattggggaaggcagtacttaggacaacaattgtatctgagggtgtatacaccttccaaatcatggagggatgaatatccggtgccaaagaatgcgcttctatgtggcagagcaagtggtcgtcgcacaaggcctttctaatttaatttaggtagcaattagcattgcaattgcatcatgtcacgagagggtggcatattcatattgtgactgcttctatttttttagctacgtgcaggcaattttacttttttattgattgggattattttttaacggatggtgagatgagatgaggtatctgacgcatgatgcatgtgtagtaactatgaacttccaagttccatcattttcacgtattaattattaaataaataaatcaagttctgaagatcaaacaaaaaaaataaaca

SEQ ID NO: 17659 - DNA, 493 bp, Glycine max
atttaaagctggttatgattcagagattcgccttggctgggcatctctttgggttggagatgaaggtgggaaagccaaaacagctccgatgcagatgaaagttcaattcatgctacaagtgccacaggacgacataaaatcttctgctttgatgtttcggattaagaaaagatgggacttttaaggctctactggtgactttacctgttttttatatataaaaaatgggtatttgactttgggcagttccattgtgttttagtttgttgcatccacagtccactctttgcaaaagggggtattgactatttgacaggttgatatttctccaagtcagctaattgcttcgtggtgtgacaagtaagaacaattttcaatcgtacaaaatttgtaaagatgatttttctgatttgtaagttggcagattatggttatcgaatgcagacagtgctgaaattggttatgcatttggctaaaggccattcaactttgc

SEQ ID NO: 17660 - DNA, 451 bp, Glycine max
cccacgcgtccgcccacgcgtccgcccacgcgttcgaatgtttgggactttgtttgggggataagagagcgatgttggtgttccgaagattgatccagaatcctcctatgaatgacgataagagatgagagaacaaagctttggagataaaatgcatggaataactctccctctcactgcaactgcaaatagcttccttttgagatctcctctaccaagttgtttcatacccacttgtaaagttagctacggatttcgttttaaccattctcagtggaagcaccataaaacagaaggatggagcaataggaatagaacgatggtggtgagagcaaggcgtcacgagtcaccgtatgatgttttgggagtgtctccatcagcattcgtcgacgaaatcaaaaaggcctatcggaaacttgctcttaagtatcatcccgatgttaataaagag

SEQ ID NO: 17661 - DNA, 812 bp, Glycine max
gattttaagtggttgtgatgaggtggtctttggttcttctggcaagcatgcttatatctttcagcagctcacaaataataatattaatcctgctgatataccttcttctgtgagtattttagaagcccaaagtgctccaataaatggaacgcaagtcgaagctagatctggtgacccttctgccgttgctggagcatcgatattggcctctttatctaatcttcctaaagatttatctctcctttcacctcctgctaaaactggaaagaatgtgcaacagaatgctgacatttcatcactaccttctggcaacggggatgatatgccagacagtgaaatgaaggatgccaccaatgatgtagcatctgaagttttctctgctgataaaactgttaataaaaatcctaaccttgacacagctgaagtcaacatcaatgtggatcccgatgttgggaaggttactgctgctacctatgaattgaggccattattgcgcatgcttgctgggtcatgtcctgaagttgatttaagtggtggcatttccaagatattggaggggcgaagggaattaagagagctccttaaagatgttgataccccaacaatattggcatcaaccaggcgacaagcatttaaggacagtttacaacagagaattctcaaatctgagaatattgatgtctcttttgaaactttcccatattatctaagtgatacaacaaagaacgttttgattgcttctacatttattcatttgaagtgcatgggctttggaaaatatgcttctgacctctcatcagtgtctccacgaa

SEQ ID NO: 17662 - DNA, 520 bp, Glycine max
ccaaaaaccgatgatgtatatacacctttcgcctttatccctggccgagacagctccatgtgccgttactcttaaaccctctctttcacttcactcatcgcattaacaaaccaagtaaccggcaatgaaatgaacaacaacggcaatgattcttcaacttcaccgaaccttcttctcctccacctccacctcctcctcctccgttccttcctcatcaccccctctctctcggccacttcatgttgcagttcagggcgctccaggctccaccaattgctctcgcgccgcacgccacgtcatccctcatcggcgccaccgtccaatgccgaacgcgtcttctcttccctcgaagggttaccgcgaaatgccacgcgacgtcgtttagcaatttccgtttcccgtttgctttgaactccacgacgtcgtttgggggcagcgttttctcgagggggtttgcgacgcgcgcggcggagcaacggtaagcacaacaaacgggcgagggctgctgtcgttcgcggaa

SEQ ID NO: 17663 - DNA, 488 bp, Glycine max
cttttatattccgtccgaagggagtgttactgtgtgagcaaagttgcttcctctatcgtgttctttgcgttagggtttgcagatcgaaaaatactgacagcattgtgttgtgcggttacagaagatgagtgaagacgaggagatgaaagatcaggcaacgccttcacacttgctttcttcagttcctccatctacattgcaccatttgaagggaatagcatcaattattgaaaccggttcgtactcaaaggaagttcgtcgaattgctcgtgccctgcgccttacatttgcatttaggcgtaaattgacaacaccagttctctcatcttttcttgattatgttcttactcccgcttctgaacctcacactaggttatcctcttatctccctaatcctaaggagggtgatcgagagatgggagtggacagtgcaacatctactattcaaaccctggcggcgaagcactttgtgcctgagctagaaatct

SEQ ID NO: 17664 - DNA, 451 bp, Glycine max
gtctgagatagaagcatagaataaattttacacttagaacatagaagcaaagtgtttggtgtgagaagagagataatggcgcagagagctcaaccagcgttggccaccacggatgtttttcagaagggagatattcattggaagcaattcaatgttgaaacatccactgcttcttcctcacctccaaaaccattgcttatttttacaccaaccgtgcctggcttataccctgtaatattgttttgccatggcttttgtattcgcactagctactactctaagctcctagcccacatagtttcacatggattcatacttgttgctcctcagctgttttccattggggtgcctatgtttggaccagaagaagttaagtgtgaaagaagagttgtggattggctagataacgggcttcaaccattgctttccgagagcgttgaagccaaattgg

SEQ ID NO: 17665 - DNA, 376 bp, Glycine max
cccacgcgtccgcccacgcgtccgtccacgcgtccgcccacgcgtccgcgctctcgctctcgcgtcgctgctctattccgttcttcacgtgacatcacggcctcaagaaacgtcgtcgtattagagaaaggcgcgtaacgcatgaagagacaaatgttgcatgatctgattgagaatgcaggaggctgcgctgtcaccgatggaggattcgccacgcagctcgaaaagcatggagcctccatcaacgatcctctttggagcgccatctatttgatcaaagacccacatcttatcaaacaggttcacttggaatacttggaggctggtgctgatatatcggttacttcatcataccaggctacacttcctggatttt

SEQ ID NO: 17666 - DNA, 435 bp, Glycine max
cccacgcgttcgcccacgcgtccgcccactcgttcgcccacgcgttcggaaaaggactcgtccttgaaatatgctcacaactgctatacttaacaattaacaacatactagagcatcctggattaataaataatacgattttcttgtgatgagcaaaaattgcaaaaggatataggatgggcccacttctatcatcttgaaaaaagcaccaagatgccctggttgtctaataaccattcagcagacgatgcccttcttcttgctatttttccagatagttgcagagaaacacttgctcactcagccccagcaaggatgaagacacgccacttacttgatgatctgtgtctagtagtgctagtgttagccctaggttgtgcagcggaggaggattccacttccaccgccagcatcatcttcaccacactcggcaga

SEQ ID NO: 17667 - DNA, 523 bp, Glycine max
ataaatactgtggtttctcaactttctttcagttcacgggaaatctaaccaaccagatctagtttcaattcgatgccataaattctctctctatgccgagacgatttgaatcttcgttccaaaattgtcatttttttacaaccctatttccctcaatatcctatcttctatctaccaaagtatcatctcgaacaggatctatctgccattgtttcgaacaagattgttttgaataagtttgccttaaaccagaaaaaaaaagactgtcttctcttctccaattcctcagctgtgttcggacactcctaggtagctgtcggtttccgcgaaccaccctttcctcaaaattttccgaaacctgcatctccgcggaggtacagaacaaaagacagaactctgaggtcaaaatctggttagggttttgcctcgtttgcgtcaatggatttcgctcgggacggcaacgtggtgcaaataatcaccggcggtggaggcggaggcggaggcggagagagctggtccggcg

SEQ ID NO: 17668 - DNA, 531 bp, Glycine max
catttccgttaccgttatcctcacttctctctctctcaacctcttatttatttattaaccctttattccacccctttcctctcccttcatcaagcacccaactttctgccacccccacaaaagggtgcttgcgtttctttctgtgatctcaaccatgaagcgtccactcacaccttcagccagcggcatgaagactaacaagaaagccaaggcgatggaaaatgacgaagacgtggaggggctggggcgtttcgacgacaaccttctgttcgaggtgttgaagcacgtggacgcgcggacgctggcgatggcgggatgcgtgaacaaacagtggcacaaaactgcgcaagacgagaggctctgggaactgatctgcacaaagcagtgggcaaacacagggtgcggtgagcaacagctgcgatccgtggtcctcgcgctcggtggcttccgtcgcctccacgcactttatctcttccctctctccaaacctcaacaactacaacaactaacatcatcttcatcctcttcctc

SEQ ID NO: 17669 - DNA, 678 bp, Glycine max
ctcgagccgctcgagccgattcggctcgagcctaacattctgccaccgccagacccaaacggcaaaagggtgctttgattcgcattctgtgatctcaacgtcgcattcttttatctcaacgatgaagcgtccactgtcaccatcagcgagcggcgtgaacgttgaggacaggaagatgaagaagaaggcgaaggcggtggaaaatgaggacgataacggggagcgcgtggaggggctggcgcatttcgacgacaaccttctgttcgaggtcttgaaacacgtggacgcgcggaccctggcgatgtccgggtgcgtgaacaagcagtggcacaaggcggcgcgggacgagaggctctgggaactgatctgcaccaagcagtgggcaaacacagggtgcggtgagcaacagctacgatccgtggtcctcgccctcggaggcttccgtcgtctccacgcgctctacctctggcctctctccaagccccacgcgccttcttcttcttcttcttcttcttcgtggcctgccatcccgcacgtgcttcggtccaaacctcgttggggcaaggacgaggttcacctctccctctccctactctccattcgttactacgaggagatgaatttccttaacaccaagaaaaacacatgagaccaataaggattgacacaatttcgtac

SEQ ID NO: 17670 - DNA, 442 bp, Glycine max
  unsure (1)..(442): unsure at all n locations
ctcgagccgaatcggctcgagaccaaaccaaactaacaaggatcattcatggcttggttaagaaacctctcaaagtttgccaccatgaaaagagcatcatcatcatcatctcaaagacccaaaaacactgacccattttgtctattaccctccttcacttttttttccaacttcagcactaacaccattgactgagaagccctgtgtgaagccagttgagtataataattattcgggcttgcagccaacaaggcctcatgagaagccacgtgtggtggtgctgggctcaggttgggccgggtgcaggctcatgaagggcttggaccctcgtgtgtatgacattgtttgtgtctcacctcgcaaccacatggtcttcacccctctattagcctctaaacttgtgggttttttgggggganaaaaacccccttttttccctttt

SEQ ID NO: 17671 - DNA, 657 bp, Glycine max
cccacgcgtccggaatattctgtggaagagacaggtggtgggcataaggcatcaaaactttcagtgtcagacagacaggttatgcattctggagggaataggagcagttcttcagaaatttctgcttcctcaatgaaaggctgtcacaaagagagagatgccattgatcaaggtactgctcctaatcgaagtaaagttgatgacatttcaaaaaggaaacagcagcgtgaagctgttgatgctattctttactcatctttgatatctgcaaagaaggatgagacattaccaaaagtttctgctaaaaggcctttttcctcatttgttgctagtgggagtactaagccgcccaagacaaaaagtgcaagacaagatcaatgagcatgggatcaaggaaggaacaatattgttctgaggactaaggctgaagtttttcatggttcttgtgatcaccatcttggcttaccttggatgaagatttttttgcttctcatcagatgatttcccatcaatgatataatggtgagtggaatttcaattcaagcggagaccagtgaaactttaaagtgatttcatgcaataagtatttgtatatatagcggaagatttgtgtaaatgaaagaaattgtttataatggtttttcttttttgggggtg

SEQ ID NO: 17672 - DNA, 2211 bp, Glycine max
gtaaaatacagagggataagattcaagatataataaacaacatacaaaaatcaacgtgtgcgcttttcttctctttccttagttttcagattctgaaatcttagtttctgcccgaaactgaaactgaatcgaaattcaatacaatgagttcctcaactacagtgaggaagttgcaggtggtgtcccctgttcctgcggacatagacattgcaaactccgttgaacccgttcatatctcccagattgccaaagacctcaaccttagtcccaatcactatgacctttacggtaaatacaaggctaaggttttgttgtcggttcttgatgagcttcaaggatcagaagatgggtattatgttgtggtcggaggcattactccgactcctctcggggaaggcaaatctactactacagtggggctctgtcaagctttaggtgcttttcttgataaaaaggtagtcacctgccttcgtcaaccatcgcaaggacctacttttggaattaaaggaggtgcagctggtggtggctatagccaagttattcccatggatgaattcaatcttcatctaacaggagatattcatgcaataactgcagcaaacaatcttctagctgctgcaattgataccccgaattttccatgagtcaacacagtcagataaggctctttttaaaccgtttgtgccctccaaataaagaagggaaaaggagctttagtgatgtcatgttcaggcgtcttacgaagcttggcatttcaaagaccaatccagatgatcttacaccagatgaagtaaataaatttgctaggcttgatattgaccccaattctatcacatggaggagagtaatggacatcaatgaccgattcttgagaaaaattactattggccagggacctgacgagaaaggaatggtgagagaaacaggctttgatatttcagttgctagtgagataatggctgttttggcactgacaacatccttagctgatatgcgagagaggcttgggaaaatggttattgggaatagcaagagtggtgaccctgtaactgctgatgatctaggtgttggaggtgctttaacagttttaatgaaggatgccattcaccctacccttatgcagactctggaaggaactcctgttcttgttcatgcaggtccatttgcaaatattgctcatgggaattcttctattgtggctgataagattgcactaaagttagttggaccaggtggatttgtagttactgaagctggttttggtgctgatattggagctgaaaagtttatgaacattaagtgtcgttatagtggtttgacacctcaatgtgcgattattgtggcaactatcagagcactaaaaatgcatggtggagggcctgcagttgttgctggaagacctcttgaccatgcatatttgactgaaaatgttgccctggttgaggctggttgtgtgaacatggcacgacatatatcaaatacaaaatcttatggtgtaaatgttgtagttgccatcaacaagttttcaactgacactgaagccgagctaaatgcagttcagagtgctgcattagctgctggagcttatgatgctgtaatttgtacccatcatgcgcacggtggcaaaggagctgttgacctgggcattgcagttcaaaaagcctgcaagaatgtgacacagccattgaagttcctgtatcctgttgaactgagtataaaagagaaaatagaggcaatagcaaagtcatatggagccaggggtgttgagtactcagaacaggctgagaagcagattgagatgtatagcaagcaaggattttcaggtcttccaatctgcatggctaagactcagtattctttctcagacaatgctgcagcaaagggagctccaagtgggtttgtcttacccataagggatgttagagctagtataggcgctggatttatttatcctttagttggaacaatgagtacgatgccagggcttccaacaaggccatgcttctatgacattggtcttgatacaacaactgaaaaagtcattggtctctcttaaatcaaagtgacttgctctatcacctttcaaaagctttatggatgtcatttacatatccctttgcgatgttcatgaatgtcacagtaacattcctccttgtttgtttgcatgcttggtgatctgtatgaatgaaataaaggagacattatatccgt

SEQ ID NO: 17673 - DNA, 445 bp, Glycine max
gtaaaaaaagtaaatttaactgtaatattaaaaatttattcattaaataaaaaaaaatatataaggaaaaaaaaaaaccgttgaaacatccttagttttcagattctgaaatcttgattctgaattcatcacaatgaattcgtcaactacagtgaggaagttgcaggtggtgtcccctgttcctgcggacatagacatcgcaaactccgttgaaccagttcatatctcccagattgccaaagagctcaaccttagtcccaatcactatgacctttacggtaaatacaaggctaaggttttgttgtcggttcttgatgagcttcaaggatcagaagatgggtattatgttgtggtcggaggcattactccgacgcctctcggggaaggcaaatctactactacagtgggactttgtcaagctttaggtgcttttcttgataaaaag

SEQ ID NO: 17674 - DNA, 263 bp, Glycine max
acaacatacaaaaatcaacgtgtgcgcttttcttctctttacccgttgaaacatccttagttttcagattctgaaatcttgattctgaattcatcacaatgaattcgtcaactacagtgaggaagttgcaggtggtgtcccctgttcctgcggacatagacattgcaaactccgttgaaccagttcatatctcccagattgccacagagctcaaccttagtcccaatcactatgacctttacggtaaatacaaggctaaggtt

SEQ ID NO: 17675 - DNA, 446 bp, Glycine max
atctcttgccaaaagaggttgaaagtgcaagggctgcttatgagagtggcaaagctgcaattccaaacaagatccaagaatgcagatcttacccactgtacaagtttgtgagagaggaattagggactgggttgctaactggagaaaaggtgaggtcaccaggtgaagagtttgacaaattattcacagcaatgtgccaagggaaaattattgatcctcttatggagtgccttggggagtggaatggagctcctcttccaatctcttaaatttattgtaactcttaacaaatattttatttgtacctatgcaagaaaaaccataatcatttggtttgtctatcatttaacaaatcagtttgaaaagcctaatttcaatgttccttcaatgtcaaataggaccttgtaattttaatattttaatggaatttcatattcacatgttct

SEQ ID NO: 17676 - DNA, 583 bp, Glycine max
caactacaccacgacaccatttgattatgttattctgtaatctcaataacaagatttaaaagtttggctataaaatttgcgccttgtgggtgggtttggggtttcaatttcaaagggaagcagaagaagaagaatgatagttagaactccaccgccacccaagaggccacgcgccgatggcgatgacggacagctagtcatctacgaggatccgccggagtcatcccctccttcggagcaaatgctctgcacctatcaatgtcgccaaatggtcaaatccgattttattgatgccttaagcaaagctgaaaatcaagctcgtcattatcaatccaagtttgagacattggagcctcatttccgcaaagttgaatctgagaggaagaaatttcaggaccaattcttatacgcccaacaggaacttgcagctgcaaaaggccgcgagcaggcactccaagaccaactcttgaaggaggccactcagtctcaagaacgattaagaaaacaaattcaattaaacactcaactccaggttaagctccaaaatgagacagaccttcgccaaaaagctgactctcatgct

SEQ ID NO: 17677 - DNA, 812 bp, Glycine max
ttgagacaacgcttgatatagaaaacaattctgctcaaaaggtgtggcaaatggttgagttcgttttcgggtgggtatatgtaatagaaatggttttaaagatttatgcatatggatttgagaactattggcgggatggtcaaaaccgctttgattttattgtcacggtgacaattgccattggagaaactgtaacttttgctgtacctgatgatgatcttcctttcatctcaaatggagaatggattcgttaccttcttcttgcaagaatgttgagattaataaggatcctaatgtatgtcaagcgataccgagcctttgtggcaactttattgactctcataccaagtttgatgccatacctagggatcatattttgtaccttgtgtatttattgttcaattggtgtacagatttttggtggaatcgttaatgctggaaaccccgaattggaattaacagctcttgctgaaaatgagtatcttttgataatctataaaattgtctcctttaagcctttcatggttggtttgatccagtaatagttactccctctggtctctattataagcagcaaaagtcacttattttttggtctcaaatataagcaaaagttaactaactttgccttattttatgagactatcttcaaaatgtccttcattcaatagggccaaagactttttaatgcttgatattaagttccaatgaatggcagtttaggggaaaaaaagcttatttttgttgtgggattaacagaatttaatgaaattaactaatttattgatagtgtgaaatcatttttttttttt

SEQ ID NO: 17678 - DNA, 673 bp, Glycine max
ggattcgttaccttcttcttgcaagaatgttgagattaataaggatcctaatgtatgtcaagcgataccgagcctttgtggcaactttattgactctcataccaagtttgatgccatacctagggatcatattttgtaccttgtgtatttattgttcaattggagtacagatttttggtggaatcgttaatgctggaaaccccgaattggaattaacagctcttgctgaaaatgactatttggttttcaatttcaatgattacccgaatggaattgtgacacttttcaattttcttgtcacggcaacctgggacgaagttatgacgagctacaaggaattaactgggacttcttggacttatttgtacttcattagcttctacttaattactgttttgctgcttttgaacttgattattgcttttgtcttggaggcattctttgccgaaatggaacttgagtcatcagaaacttgtgaaggaaatggcaaggaagttgaaggagataaatatcgaaagcgatctactggcacaaaaacacgaagccagagggttgatgctcttcttcatcatatgctgagtgctgaattgtgtcaaaatgagccttccagtacacaaacttcataaatcattttgcagaatgcacgaaggagcccacctcattctgatctttc

SEQ ID NO: 17679 - DNA, 383 bp, Glycine max
caaaatgcccgtgggtggcctaaaaaacaacaaagagatggctaagctcagaatgagactccgtggaacacaagcaaagctggattctttccgttggtagatacaaggaagcaattgatgaatcagtgttaacgaataagaagtataaagatcagtgggcttcaaaaggattagaagtgcttaacctaatgaaacagctagctgctgccaaaggccaataggaaatttgcatggttgtatattaaaggatgtaatcccacatcctgagtcatgtcatttttttgtttatcatttatagatgggtccatcattccaagtggtcttattaatgtgtaaatcttatgccaatagtgaaagcttgatagatgcatgctgcaattttt

SEQ ID NO: 17680 - DNA, 429 bp, Glycine max
accagctccttctcagcctgcagagtcaaaaggtgaggaaagtggtggtggtggtggtggtggtgggttaggtggtcttgcaaacttggctggaggcttcttcaaaaagtagttcaagagcagtactactaatttcagctatcaattaaataaaaccattgattgtttttttttttaccttgttgtgggatttgaataatatggacgaggtatcagattctgtaaaaaaaagtcttttaacttttcgttttaggtctagtggcagtgagatttggataatatgcatatcaaattaaggattcaaatcttgttattgtaaaaaaagaagtctttaatttctcacttctagttctagtgctgttgctgctgttgttcttatgtgatgtaagttgaataaatatgatttggtgattgtacttaaaaaaaaaa

SEQ ID NO: 17681 - DNA, 477 bp, Glycine max
gtcttttacatggaaggttcttgctccatactctggcacccttgctgttcttgggactgggctctatgtcctatccttctctcttggtgctggtcctgtgcctgcccttcttctaccggagatatttgcttctagaattagagcaaaagcagtttctttgtcattaggcacacattggatctccaacttcgtcatcggcctctacttcttgagtgttgtaaacaagtttggtatcagctccgtgtacttgggattctcggctgtctgtgttcttgctgttttgtacatagctggtaatgttgttgaaacaaagggtcgatcattggaggaaatagaacgtgctctcagtgcttcaacatgaaaatcttccaggaaatgctgttgttcataattcctatgctgctcaaagaactgttttatgctcttactagttccacacatttgtctggcacgagtgatgactgggataacttgttt

SEQ ID NO: 17682 - DNA, 409 bp, Glycine max
cccacgcgtccgcccacgcgtccggtttgaagaaaaatgaatctaaaggattcaaaggtgatttgctctttcatactgcttaattttcttttcttcagttgttttgcagctgataatctcccgtgccctccaaaatctactatcccaccttcctcttcaccgcagaaatgccccaaagacacgctcaagtttggtgtgtgtggaagttggttaggcttggttaaagaagtaattgggacaaaaccaagtgaagagtgctgcatccttttgaaaggtctcgctgatcttgaagcagcactgtgtttgtgcacagctattaaagccaatgtgttgggagctgtcaaggtcaaagtgcatgttgctgttagtttgcttgttaatgcttgtggaaagaaggttccatctggat

SEQ ID NO: 17683 - DNA, 514 bp, Glycine max
gtttactctgttcttgtgtttgcgttgcttggaagaggctctccctacactacagggaggaagatttgtgatgggtggaagttctattggtgatgactgggagctcacttcctcatctaacgagggtcggacagtggtcttagttggacgaactggcaatggcaagagtgcaacaggtaataccattcttggaaggaaggtcttcaagtcaagggctagctcctctgctgtatccacctcatgtgaattgcagacaacagaattaaacgacggacaaattgttaatgttattgacaccccaggattatttgatttgtctgtcggatctgagtttgttggtaaggaaattgtcaaatgcattgatttggccaaggatgggatccatgctgtcattgtagtgttctcggttagaacacgctttactgaggaagaagaaactgctcttcggagctcgcagacattatttggaagcaaaattgttgattacatgattgtggtcttcactggaggagat

SEQ ID NO: 17684 - DNA, 570 bp, Glycine max
cccacgcgtccgcccacgcgtccgattttctctgtcttcaattgcaggtctgctgcaactaaaagaccctctaaaagtaatttcatttccaaaatccgcaatccaaggtgcaaagcctgtaatctctcagaacttgtggccacgcaaagcttcaaagaactcatcagatccattggtaaagcttgttcatgaactgcagagagatttggaattagtatatgttgggcaagtttgcctctcttgggaaatcctttgttggcaacacaagaaagcccttgagttacaacaatatgattcacaagggtctcatagtcataggtataaccatgttgctggtgaatttcaactttttcaagtcctagttcagagattcatagagaatgagccatttcaaggccctaggctacagaactatgtcaagaaccgttgtgtgattcgcaacttgctccaagttccaggcattaaagatgatagtaaaggggatgaagaagaggatgctattgcaagtggaaagttggcagatatcatcaaggaatcaatgagggtgttctgggaatttgttcgagcaga

SEQ ID NO: 17685 - DNA, 494 bp, Glycine max
ctccaaagccagtggaaattgaagagaagcttgaatacaaggatcaaattgatgaaattgataaagtttacaagagctatgcagagaagatgaagaaacttgatatcttgaattaccagaccatgcatgcattaggtctgcttcaactaaaagaccctactaaacttaatttcatttccaaaatccgcaatccaaggtgcaaagcctgtcatctctcagaacttgtggccacgcaaagcttcaaagaactcatcagatccattggtaaagcttgttcatgaactgcagagagatttggaattagtatatgttgggcaagtttgcctctcttgggaaatcctttgttggcaacacaagaaagcccttgagttacaacaatatgattcacaagggtctcatagtcataggtataaccatgagacccttgtgaatcatattgttgtaactcaagggtctcatagtcataggtataaccatgttgctggtgagtttca

SEQ ID NO: 17686 - DNA, 673 bp, Glycine max
gtgctttaggtaatggttacagttaatgttgatggatctgttcttgatcgaattgctaaaataatgtcatatcttcgtcttggttcttctgggaagatcctaaagaagaagagaaaggaaaaggatgcacaagggaagattttggctgttggtaatggatttgacaaagaggataagccatcaaaggttgaaggtggggcaaaaaatcaaactgaaaaagaaattattcctccacctcccataaagaaaaatcctcttcattcaagagagaaacaaggcccagctgttgctagagcagaagatgatgacatttttgtaggtgaaggggttcactatgatgtacctggtaaagacttgagccaaagtccggtctctgaggacatggaagagtctcctaggaacaaagaaaaaccttcatatgtcacagaacctacttatggtcctgtcccaccttcaatggttcctcaagggtggcaagaaacaaatggatatgatgtaatgcaaacacaagcctttgatgctggctaccaaggagagtggcaggaataccagtatgctgaacaactggcttacccagatcagtatcttcagcaaaatatgcagccttatgatgtgcaagcaggtttaaatcttccacaagatccacgctttatgtctcaagaagaaaaggatc

SEQ ID NO: 17687 - DNA, 449 bp, Glycine max
gcattgcacaagttctagtggccgcttatagaaaacgaaaagttgagctaccacgtgagaagcatgttgatggggttttctatgatcctccacttactgggacacacgttttgtcaaacctaccactgaccaaccaatttaggggtttgaataaagcagctgtaataatggagggggagctaaaccctgatgggagtagagcaaataagtggaaacttgtcagcatccaacaagtggaagaggtgaagtgcttggcaaggattttcccaatttgggctgctgggatcctaggttttacttccatggcacaacaaggaacatttactgtgtcacaagccttgaaaatggacagacaccttggaccaaaattccaaatcccagccgggtcacttggggtcatatcattcatcaccataggtgtgtgggttccattctatgacagaatcatg

SEQ ID NO: 17688 - DNA, 497 bp, Glycine max
ctcgagccgctcgagccgaatcgagtgtcgaactcgagtggtaatggagacgattttacaagcaacgtgaaaaggctcataattgatttggtcaccatttgaaggaagagaatgtgaaagagtgaggtcagagttgccagtagacgaagacaatcgtcatcagttgcagctgcaaaggaatgaggtaattgcattgacgaaccttctcaatcgactctcggaatccttcaaattcgtccacgaagtgggacctacagttgaaagaatcatggaaggaggacatttttctgctcatacaagaactgattagctcatggaaaaaaatttggtcctatgtatctaaaacttaggtgtgtatgtgcgattctagtgttgacccataaggggataataaaaacccttttaggctaacactttataagaagactatggtctccaatataccaatccaccaaaagctcatccttaattctcttcatctgaagagagatcgacgc

SEQ ID NO: 17689 - DNA, 612 bp, Glycine max
  unsure (1)..(612): unsure at all n locations
cccacgcgtncgcccacgcgtncgcggacgcgtgggtggagacgattttacaagcaacgtgaaaaggctcataattgatttggtcaccatttgaaggaagagaatgtgaaagagtgaggtcagagttgccagtagacgaagacaatcgtcatccgttgcagctgcaaaggaatgaggtaattgcattgacgaaccttctcaatcgactctcggaatccgtcaaattcgtccacgaagtgggacctacagctgaaagaatcatggaaggaggacatttttctgctcatacaagaacattgattagctcatggaaaaaaatttggtcctatgtatctaaaacttaggtaacatgctctcttctcagtatttgtcgtatttctcgtttgttgtaccaaactgagtattacatgtttgcaatctgcaagctataattggtgacagttctgtttttaattattcagattactagagagactagacataggaaaaccaccgtcgtggtttggaaattttctgagggatgtgaaactaatgtacgtagaatgtctcaaaattaaaaataaacccaaggagaaaatttaccagcgtaatagaagatatattttacttggg

SEQ ID NO: 17690 - DNA, 610 bp, Glycine max
ctagcttcaagctgcatgtccaattccgtttgatgaagctaatttgtggaaaggccaaagtggacctgagctaaaacagaaaattcaacaacaattcagaaacatcagtgcaatgatggattgtgtaggatgtgagaaatgtcgattatggggcaaacttcaggttcttggtctcggaactgcattaaagattctcttctctgttgatggtcaagaaaactcaagtcatacactgcagctgcaaaggaatgaggtaattgcattgacgaaccttctcaatcgactctcagaatctgtcaaattcatccaagaaatgggacctacagctgaaagaatcatggaaggaggacatttttctgctcatacaagaacattgattagctcatggaaaaaaatttggtcctatgtatctaaaacttaggctataattggtgacagttctgtttttaattattcaaattactagagagactagacataggaaaaccaccgtcgtggtttggaaattttctgagggatgtgaaacaaatgtacttagaatgtctcaaaattaaaaataaacacaaggagaaaatttactgagagtaatagaagatatatttttacttgg

SEQ ID NO: 17691 - DNA, 293 bp, Glycine max
aacaaatatgtttgtttcctctttattgttatgtgtcagaagctacaacaaagtcagttgaggtgttatttttcctctctattgttacataagaaaaggcagaaaatgagaattaggtaggggtaggtgccacaccacttgctcataactcatctttggatgctccatctcttccattatcatccaacgatgcatataccttaattattgactcgtagattttaatccctttcaagtattcatctttgtgcagaaactcattgtggtcatgtagaagaacaggagtgtttgcc

SEQ ID NO: 17692 - DNA, 460 bp, Glycine max
ttcaaacatcaggaactaagggagagagctcgtacgaagaaagaagagggagagaagagaatggggagagaaagagaaaaggggggaattcccattggcaaggggttgctggaagcaaagcggattgaagaagagaatgagaggaaacgtttgttggccttgaaaaaagtagagaaagaggaagagaaaagggctagggagaaaatcaagaaaaagttggaagaagacaaggcagaaagaaggcggagacttggattgcctccagaggaaccctcagcagccaaaccttcacctgcgcctattgtggaggagaaaaagagttttgtgcctgttaggcctgccacaaaagctgagcaaatgagggagtgcctccgttctctcaagcagaaccacaaggaggatgacgctagagtgaagagagcattccaaactcttctaacttatgtagggaatgttgcca

SEQ ID NO: 17693 - DNA, 521 bp, Glycine max
  unsure (1)..(521): unsure at all n locations
ggcatcacagggcaaccatccaaaccctaaccctaaccctaaccggaataattccgttgcgtcggcggggccggtgtggccaaccatcgacggcccattgggcctgtcggaggaagaatcagtgggctacgctcgcaggttctacaagttcggcttcgcccttctccctctcctatgggccgtcaattgcttctacttctggcccgcccttcgccactctcactccttcccccgcattcgcccctatgttgttggatctgcaattgggtttgcagtatttgcgacacttctcagttcttgggctctaacatttgccattggaggggaacggctctccggccctgtttgggatcaattggttatgtacaatcttgctgataggttaggcttaacaaggctggagctaggtttgttgtgtggcacctctgatacaaaatattttgatcctttattaccagacttaccttcttccctgctctgcttcgtgaatntcatctgcattacttatatacatttgacta

SEQ ID NO: 17694 - DNA, 501 bp, Glycine max
gagcacgacgatgagttctgctgaaaattaaaaatcgaaataaatccgttaggaagttgttgaagtgggtggaacccaacgaagcagagatggaggctttgctgcaattcgcaccgatgcagagctccgttgatgagggtttctggcaccgtttgtcttctttgaagctcaacaagcttggcattgaccattctccaattcccttattcggtttttatgcaccgtgctctcactctcaagtatcaaatcatttaactgttttagctgagtctttaccttctgaattgagtgaggcatcattaatccctgaacccagccgcggcaaccggaacaggtgttctgttccagggatactttacaacactaatactgtggaaagcttccatccacttgttaggagtgacactgttgaggaatgaggcagcaaagatatgggatgacattctaactggaaaagctgtggaggactgttcagtactttaacattccttgttatttctt

SEQ ID NO: 17695 - DNA, 483 bp, Glycine max
cccacgcgtccgcaaaaactttcatcttatttacaagtatttttttcagaaccttcacttctcaagtctcaacacatacaacaatgggttttcgtttacctggtatcagaaaggcatcattaaaccaagcatcatcaaaagccatggacgtgccaaagggataccttgcagtctatgttggagagaaaatgaagcggtttgtcatccccttatcatacttgaagcaaacgtcgtttcaagacttgctgagtctagccgaggaagaatttgggtataaacatccaatgggtggtcttacaattccttgtggagaagatgtgttcttagatattacttctcgcttgaacaataggtgctaaccctgcgatgataagactgacctagacatatagtacttaacacaatttttgtaactcacttttttgcttgaaaatattttctctttttggtattatactcaagcaagtgtaaaaaatgttatac

SEQ ID NO: 17696 - DNA, 580 bp, Glycine max
ctgctatttgtgggtataaatataatgtatagtatatatactactaagtctctaagtactaattgcattaattatacaccacaaccctccggcccctatataaacacgagctttctgtggtgcaccagtgtgctatcttatgcttgtgcctcaagaaataggttagttccgagctgaaacaagatggctggtgataaacaaaaactctttaacagactgaagccattcataggtgtagtgttcttacagtttggatatgctggtatggatattctatccaaagctgcactgaacaagggaatgagtaactatgtatttgtcgtgtaccgtcatgtttttgcctttgttgtcatggccccttttgcactgatcttggagaagaaagtaaggccgaagatgacattttcaatcttcatgaagacaatgattctcagcttggctagagcctggtattgaccaaaatttgtattgtgcgggcatgaagtacaccacagcaacctttgctgtctccatgtacaatgttccccctgccattacctttgtcatggcttggattctaggcttgagaaggaaaactaaa

SEQ ID NO: 17697 - DNA, 645 bp, Glycine max
caagtctcatactatatatactcttaattgttatatatactttcttcgttcagcatggactccgcgagagcggcaggcgcaaaagtttgtggtgacggtgacagcggtggtggcggtggtggcgaagcgggcgagccggctgcagcggaagctggcggcgagggaggagtggaggatcgagcttctgcgatcaccgaagaagcttctgagcaacataagcagcaaaacgctgccgtttaggaagaagaagaggggggaggaggattggggaaagggtggggtgtggcagaaggcgatcctgatgggagacaagtgcgagccgttggatttctcgggagtgatttattacgatagtaacgggaagcaggtgaacgagatgcccctcaggtcgccacgtgccagtcccgtgccgcctggacactattttatccaccatagccatcactactatcaccaccaatgaatcaaatcattgatgatgatgatgatgatgcaccctacgattataagccaggacacgcgcttacatttgttgttgcacatgcgtcttttattttatttttgtggttgttagacagagatataaagtgagtccgaatcccatgagttattccgacttatcacaagttctaatggatcggatta

SEQ ID NO: 17698 - DNA, 968 bp, Glycine max
  unsure (1)..(968): unsure at all n locations
ctcgagccgattcggctcgagcttctctcgtgtttcacaaactaaagaacaacaatatgcctccaatcttgccggatttctccaactcggtgaaactcaagtacgtgaaactagggtaccaatacctggtgaaccacattctgactctcactctcatacccatgatgatcgccatcttcatggagattctacgcttaggccctgaagagatcctgaacctctggcactccctccacttggaccttgtccaaatcctctgctccgccttcctcatcatcttcatcgccaccgtctacttcatgtccaaaccccgcaccatctacctcgtcgactacgcctgcttcaagccacccgtcacctgccgcgtccccttcgcaaccttcatggaacactccaggctcatccttaaagacaaccctaagagcgtcgagttccaaatgcgtattctcgaacgttccggtctcggtgaagaaacatgtctccccccagcaatccactacatccctcccaaacccaccatggaggccgccagaggagaagctgagcttgttatcttctccgccatggattctttgttcaccaaaactggtctcaaacctaaggacatagacattctcattgtgaactgcagccttttttctcccactccttctttgtctgccatggtcatcaacaagtacaagctcaggagtaacatcaagagcttcaacctctccggcatgggctgcagtgctggtttgatatccgttgacttggcacgtgaccttctccagtttcaccctaactcaaacgcctgcggtgtgagcaccgagatcataacctctaactactaccaatgtaaagagagagccatgcttcttacgaactgacttcttcgtatggcgagtgctgctattctgatgccgtactgaacctacgtacgcangagaatctaggtcatgttggtgcacgttgttcgcactacaaag

SEQ ID NO: 17699 - DNA, 515 bp, Glycine max
atcaaaagtggaaaatctctcagtctcatctctcactctcttgcttccataatatggataacattgtattaaagatgactagtttatacaccttggttcttttacttttactttttctatcttataggcctgctctttcattttcttctagacataggcaatattggggtggtgggaggatattgagctctggtgatcataatggtgatcttgtgactaatttgcctggccagcctggggtgaatttccagcactatgctggatatgtcacagtcaatgaaaccaatggaagagcactcttttactggttctatgaggctatcaccaagccagaagagaaaccattggtgctttggcttaatggaggccctgggtgctcttctgtgggatatggagcaacacaggagattggtccatttttagtggacactgatggccaaggcctcaaatttaataacttctcttggaacagagaagccaacatgttattcttggaatctcctgttggagtgggc

SEQ ID NO: 17700 - DNA, 786 bp, Glycine max
atttgcaaactccaaccaaccaacttcttaattaataactgtcgtcgtttcaatctcgttacacatctcaaaacgcagcagcagcacactcgacttaaaatgcaagccgtttcactctcacctttgtcgtctagggattcttccgacgagttcgctggaaagttcgaacacgatttcgtggctaagctcaaaatcaacgaaaacgaaaacgaagagaagcataacgaagatgaggtagaagaagaggaagagtttagcttcgttctcacgaattccgatggatcgccgatctccgccgaagacgcgttcgacaacggccatattcgtccgatttttccgattttcaaccaggatcttctgttctccgacgattacaacggcggcgacggtctccggctgccgataaaggtcttcgtcgaacacgcggatgtttctccgtcgccgtcggaggcgacgacgccggcggaaggaacatactgcgagtggaatccgaaagcggcggtgaagagcaactcgacgggattctcgaagctgtggaggttccgagacgtgaagctgcggagcaacagcgacggaaaagacgcgttcgtgttcttgaaccacgcgccggcggcgaagccggcggagaaggcgagcagcgtcgtcgtgaagaaggttgaggtgaagaaggggaaaacgacgacggcggcggcgtctgcgcacgagaagcattacgttatgagcagagcgaggaaagagagcgataaacgcaagtcgtatttgccgtataagcaagatctgttcggg

SEQ ID NO: 17701 - DNA, 367 bp, Glycine max
tactccacccaaccaaccaccttcttaattaataaccgtcgtcgtttcaatctcgttacacacctcaaaacgcagcggcacactcactagaatgcaagccgtttcgctctcacctttgtcgtttagggattcttccgacgagttcgctggaaagttcgaacacgatttcatggccaagctcaaaatcaacgaagagaaagtcgaaaacgaaaacgaagagaagcataacgaagatgagatagaagaagaagaagaagaagaagaagaagaagaagaggaagagtttagcttcgttctcacgaattccgatggatcgccgatctccgccgacgacgcgttcgacaacggccagattcgtccgattttt

SEQ ID NO: 17702 - DNA, 923 bp, Glycine max
ctcgagccgcgcctagcaactttccagtcactaacagtgcctttcatgccaatcacttcacatatttgaaccccacaatatctaagtttggtcccagtgctgtttggcctggttgtcatcctgtagaatttcctcttccagtacctattgttgaaccaatccctgatcccatttcagagtcacaagctctgtgtcatggtttggaaagtccaagttcggcttcagttcttcctgaggacattgataatattggggattccaatcaagtggtaaaaactttatcatcagagataagtgaagatgaagcagtgagatctggttcagaaagtataaaagaaaatggtaatatgaattttcacgggtctgaaaatgctgggaacaagcaacatcaaaacattgcttcaaatggcaactctagcagtagtggaactaacatggatggtgagaaaacctttagcattttgcttcggggaagaagaaatcgaaagcagactctgagaatgccaataagtttgcttactcgacctaatggctcacagtcatttaaggttatttataaccgtgtggttagaggaagtcatgctaccaagtctatgagatttgtcttctagtaaagattgtacagctactgcatagtccacagttctttgttggtactaatgaaatgttgcagaataattgtgggtaaagaagtttctcataatcttgcacaacagagacctggtatttacatcatttctggaattgaattacaaagtgccctgttgtatcagctcatgtttcatagctgcactatcttttgggaggtttccgatatctgtgtctatctaagatggaggattgtaggcttttcttcattaatataagtctacaggttcatcgcagtcagttctggggtttctgaggtgccttcaaggtgaaaa

SEQ ID NO: 17703 - DNA, 440 bp, Glycine max
cccacgcgtccggaaaagcgaaaagggttttgcgttgaagagaagtagggtttaggtaataggtgaaacggtgggagagaagcagcctcaacctgaatctaaggtactgcaatctcttatggtttctattggttcaaaaacattggtgtcaagaagctcaatgggcgagcacgactatgaacccctcaaacaaggcaaaactaagaggaggaagcataagaaaggaggatccactcatgcattcgattccaactccttcacttctccgcctcaactatcccgtgttaggaaacagcttgaccctgaaacaacccaatacttctctgaaatttctaatctttgtgaaagtgacggggttgaattggaggatcgatcacttatatgtgctaatgctctcgaagaaaccaaggggaaagaattcgaaattgcaactgattata

SEQ ID NO: 17704 - DNA, 748 bp, Glycine max
caagtacgacacttccatcttcatcgtaaacaaacctcaaagttgcattccaccatgtctaaacaacccattgatccctttcgccacatcaacatagttctcaaccctaacggaaccctaaatcgcttgcgccatattcccagcaccgcaccctcttccgaccccactctcccagttctcaccaaagacatcaccatcaaccaacaaaacaacacatggctccgcttattcctcccccgaatagcactatccccaaaccctaagaagctacctctcatcgttttcttccacggcagcggcttcatcgtaaccagcgccgcctccactatgttccacgacttctgcgccgccatgtccgccgccgtccccgccgtggtggcctctgtcgaataccgcctcgcgccggagcaccgtctcccggcggcgtacgacgacgcggcggaagccttggagtttatccgagacagcagcgaggaagaagaatggttgaccaaacacgccgacatgtctaattgctatctcatggggagcagtgcgggggccacaatcgcctacttcgcgggtctacgcgcgaccgacacggcgagcgatctctcgccgttgaagatcagagggctgatattgcggcaggtgtttttcggtgggacccagaggagcaaatccgaggttaggctggagaacgacgaggttcttccgctgtgtgtgacggatttgttgtgggagctggcgctgccggttggcgttgacc

SEQ ID NO: 17705 - DNA, 441 bp, Glycine max
cggacgcgtgggcggacgcgtgggtttccgttcccactcccactgctactctgccattcaaatatgcaattgattcccaccattcaaagccaaattctctattctcatcctcaccacaaaaactgaacacaacccacctcatattacaagtagctgattctggcaagtggagcaacatggtttcatttttcccaggttttataaccgaaggtagagatgttcagagcctcaaggtggatctctatgaagcaattgcaccacttgaccgaggtgccgaggctactcctgaggaccaacaacgtgtggaccagattgctcgtaaacttgaggctgtgaatcctgttaaggagcctctcaagtctgatttgctcaatgggaaatgggagcttttctatacaacatctcaatcaattctgcaaacacagagaccgaaacttttga

SEQ ID NO: 17706 - DNA, 632 bp, Glycine max
cccacgcgttcgcaattcaggcttcacctgtttctattggggggcgtcaagctgtagtcgagataaagagaaccactacccgtgttggcagtggcattaatggtactggaagacctatgatcccatctggtaggggtgggttacgaaatgactctttctggggtcgtgggaattatgttgggggacggggataccgtcgaaatgattatgtcagccgtggttgcttttctggtacgggtcgtggccatggagaaggttttcaccaagggacagggagaggcggccggtcaagtggacaaaaacaaaatgctgcttccaactgaaatactggatgattcttgggaggttgttctgagacccccctttttgggtcagttatgagcatggaattcaaccttctaaagtttctcatgtttctttcactgcaatttgcacagttgtagtatttctagttgttattgctatgattttagtgggttggtagtgatcactgatcaggaataggtatagtcttttcttttgaaaaatttgaaacatgctatgactggaattagcagtaggttaaccatcagttctcttttatttgttgctatggtgcaacatttttatatctaagttgagattttaatttt

SEQ ID NO: 17707 - DNA, 478 bp, Glycine max
aagcgcaggtagtagaaagggaaaagaagataatatggtggtagtttaagataatggtaatctatggcccaagtttatcggtgtactgtgggtcgtgggtacgagatggtgagagcaattggcaagataggtgcagccctcagaaattgagtgggtctgggagaagaagcatcacctgcaaattcgagagtgtgagactcagtagagcatgcagtgtggcactgactaccttgctcacaaccgctgcggtgatagcttctgtggcagcagctgatgaacccgagactctatccaacataccccagactttgtccggtgagtgcacgttgcccaaagattgcaagaaagctagaatacagaaaccaaagtcaaggaaagcggaatcatgcacaatcaagtgtgtcaccacttgcatcagaggtggagatggctctcctggggaaggcccttttaacgtgataagacctctggttgtttc

SEQ ID NO: 17708 - DNA, 455 bp, Glycine max
ttccacgcctgagactaaatagtgctaagaactctaatggtggacaagatgaatatgctgatattcaagtcccttcagatttctttgctgctagttttctctatcagaaacaccacagcagaaaagaaaacccatcacacaaaacacacatacataattcacatggacaagttcaacatgccagagagttttaacgaccatctcctctggtttgattcatcactaaaatcagtatcagactcagcagagatgctctacacatataaaaaagtagctcatggcttctctacaaggctaactacgcaagaagcagagttgctctcaaagcaacctggtgttctctccgtcatcccggaagttagatatgatcttcacacaactcgaacaccagagtttctggggttggccaaatacagcactctttcactggcctctggcaaacaaagcgatgtgat

SEQ ID NO: 17709 - DNA, 530 bp, Glycine max
atgcaaagggtcatctgtggtgatgagtggtcatggaaccacaatcttgaagacagtggcagagtttgagaaatggaaagagtttgtggtgaaaaaggggtttgagccctctttcaaagagcaccatgaaaggattaggcgcacccactatcgctgcttacaccttgtaattcctaatgctgctgggaagttaccagagaccatacgatgcccagagtgtggtaggataatggagatcttcatcagttataaatgcaaccacagtgataatacttcaattgcttcaaactagaacacagtgaggcctgcttgtttgatgttatggatgagagagtgtgggattaagcgtcatttccggttatgagcaacttctgcctagtactaagctttttctggtaaaataaagatttctttgaacaaaaggagttctgtttgaccctataaataaggtgtaaccttttcttatgtaatctggtgttgttaaacttgaatagtgttacaatggtaaaaaaaaaaaaaaaagggcggcc

SEQ ID NO: 17710 - DNA, 743 bp, Glycine max
gagaacataactcagcaatgacaatgaagtttcgggccaatgaggttctcaatgggaagtacacaagagccacagccaaaagtgttttcctggtacccttcactcttcttctcatcatgctccctctttctctcatgagaagctctcatgaatcaactccagagatatcttctgtaagtgtaagcagcagtttgaacaacaacacagaagtaaaacaatgtaacatcttttctggaagatgggtgcataatcctgaagcaccttactacagcaatgaaacatgccattggataatagaccaacaaaactgcttgaagtttgggaggcctgatagagagtacctccattggaggtggaaacctgatgaatgtgagcttccattcttcaatgcaactcaattcttaaatcttgtgagaggaaagaaaatggcatttgttggagactcagtggggagaaaccagatgcagtctttgttgtgcctcctaagtcatgtgtctgaacctgaggatgtttctcataaatattcttctgatgtggtatacttcaaacgttatttctaccatgattacaatttcacccttggaaatctatggtctccatattttgtgagatccagtgatgctgaccccagaggccacacctacaacagcatcatgaagttgtatgtggatgaggcagatgaagcatggacaagccaggttgaaaactttgacatagttataatctcatcagggcaatggttc

SEQ ID NO: 17711 - DNA, 1027 bp, Glycine max
ccgtgttgccatctatgattagatggacaacaggcagttgcaaaatgatagaaggcaggccctgggtaatgatagatctcaattgaaagcagctaaatactatgtaatatggccaacagctttcactcattgctcccatatctaaaagttgattgatccttagaatcttatcttctacatgaggaatagatactgtgcccacttccgttggtgaatggaactcgtgattctgttcaatctcccttctccaaccctccattaaataatagcctgcaacctgctttgtttcttgtagtgttctaatcattttggctttccaatcctcctgatttcctcttctacaattctaaaatcacgcaaatggcatccaagagaatactgaaggagctcaaggacttacagagagatccaccaacttcatgcagtgcaggacctgtgggtgaggacatgttccattggcaagcaaccatcattggtccaaatgacagtccctatgctggtggtgttttccttgtgaccatccatttccctcccgattatcccttcaaacctcccaaggttgcattcaggaccaaggttttccatcccaacattaacagcaatggcaatatttgcctggacatactcaaagaacaatggagtcctgctctcaccatatccaaggtgctgctctctatatgttctctgctaacggatccaaatcctgatgaccctttggtgcctgaaattgctcatttgtgcaagaccgacaaattcaagtatgagtctactgctagaagctggacccagaagtatgccatgggctaaaactcgcttccttcctgcctcctccaatacacgttttggaattgtctttctgctcttcaaatacctccccctttatggtattatatataaatatgaccatgaagtttgggcatattattgttccacttgcatacatatcacacttgttctcaaaggctttacctttgtgattcgagcccgctctccatgaataaaatgctactttcatttagagcttttc

SEQ ID NO: 17712 - DNA, 1253 bp, Glycine max
cagattcagagactatttgggcagtgttatcattgaaattcaagtggggatgggtccttgtggggagctgagatatccatcttatccagaaagcaatggaacatggaggtttcctggaattggagaatttcagtgctatgacaagtatatgagagcttccttggaagcatcaactgaggccattgggaagaaagagtggggaaaaaatggaccacatgactcaggccaatacaaccaatttcctgaggacactggttttttccagagggaaggtacatggaacacagaatatggacgattcttccttgactggtactccaccaaacttgttgaacacggtgagaagatccttgtatcagccaaaggcattttcaactcatgtggggtgaaactatctgccaaagtagctggaattcattggcactacaagactaggtcacacgcggctgaactaactgcaggctactacaacacgcggtttcgcgatggatacctaccaatagcacaaatggtggcaaaacatggagttgtgttaaacttcacctgcatggaaatgagggacagagagcaacatgagcattgttcccctgaggggttggttcatcaagtgaagatggcagccagaacagcaggagcagaacttgctggggagaatgcacttgagagatatgatgcaggtgcattttctcaagttctgtcaacaagtaactctggttctggattggctgcattcacttatctgagaatgaataggaggttgtttgagggagacaattggaggctctttgtggagtttgtgaaaggcatgtctgaaggtggaaaaagacaaaggcttccagaatctgattcttgtgggactcatctttacgttggacacatcacaggaattcagaagcagcaagaacaagctcaagaggttgctcttgtgtgaacacatatagcatcatgtggagggatcattgtgtatactgtgtagttaaattaaaagcatcatagtttttatagaagagaaaaggagggcaaaagagatagaattatgatgggtatacgcaaggaaaatggcgtattctaggcctaaccctgagatcattaggaaaattattgttttatttcatgttagaaatccaataagtgctgtgcggttaattcccgcaaattgatcttatgtggtatttcacatgaattcgtttgttaatttgttccaatcatatgttcaaactctttaaagagaaaaatgaaaaatctttccatat

SEQ ID NO: 17713 - DNA, 425 bp, Glycine max
cggacgcgtgggcggacgcgtgggctcggcggcacacacaaaaccctttctcagtcactcactcggcaaaagagaagcgtcgacggtctgcacggtgggtgcttcatcgacggcagcgacctgtggcggaggacagggttcccttcgctcttggagttcgcatcgggcagagaagcttctctgcattgcgctgggacgcaaaaccctggcagcaatcagcaccacggcgcagccgcacacctctgagacgccaccgcaatcaggatgagtgaacttctttttgatgacattttcaaggtcgagaaggtagaccctgatggtaaaaagtatgacaaggtttctcggattgtggcacggagtgagaagtgtgacatgaacatgcttctagatgtaaataccgagatttatcaatggggggaaaagaa

SEQ ID NO: 17714 - DNA, 387 bp, Glycine max
atcctcactctctattttgattctgtctcgaagtctctctctctctctctctctctctctctctctctgtgtgttttctctctctcgatcaaaacttttgaacagttcaacgagtcgattgttaggctgttgctctgacctggagtttgatcaactgtacctaattgaccttggaggatgagtgaacttctttttaatgacattttcaaggtcgagaaggtagaccctgatggtaaaaagtatgacaaggtttctcggattgtggcacggagtgagaagtgtgacatgtacatgcttctagatataaataccgagatttatacgatgggggaaaaagaaagattcttgatggctttgtctccttcacttgttctgaatactaaggat

SEQ ID NO: 17715 - DNA, 467 bp, Glycine max
agaaaacgacagaaggggaagtcacactattacaaaatgaaccaccttcattccttagcttacactaccaccactaacctctgtggctcttccctaggttgggattatcacaaccttggagttctcaacgcggacaaaatgtctttaatgccagctatggagggaagtactacaccaccatcactatcatcacctcaacactctgatttctcaactgggtatctcgaagatgctttgattgaatcatgtgagcgttccaaacgtagacgtgtgttaccatgtgctgctgatgaacatagcaagagtttcattgatgaccttgagcagagtttctggaatttcaaccccttatggaaccaaccagtagagaacttcaacttctactgcatgaaccagatagaaaggttttgtggattttcagatgagcatataaaccatcaaggagcgaggaaacaaacattcttcta

SEQ ID NO: 17716 - DNA, 410 bp, Glycine max
tagcctctgtggttcttccctaggttgggattatcacaaccttggagttctcaacgtggacaaaatgtctttaagtactatactatacttttgtttctctttatatttctacctataatgcatttgttacctccttggataagatattaatgcttataactagctaaagtgttgcaatgcaatgattggtggtgatattcaatatgcagtgccagctatggagggaagtactacaccatcactctcatcacctcaacactctgatttctcaactgggtatctcgaagatgctttgattgaatcatgtgagcgttcaaaacgtagacgtgtgttgccatgtgctactgatgaacatagcaagagtttcattgatgaccttgagcaggtacaattagctatactatatatac

SEQ ID NO: 17717 - DNA, 528 bp, Glycine max
ccaattggaccatggaaaccaattggaccaggggaatttcttcctagctttctgcactagttgagaaatcatttttcttagtggaatctgcatttaactgaaatttgctcgcctctacccccttcctatccatggattattatatggttgtgaatgattaacgtttgctgctgtgacaatgttttttactcttcttttgggagtcaattagaaatagcacggttggacgaacactctatttctgtcttgctagcccattgaaatgtagcgaacaccttttctgtccatttatgctcaactgaattttgtttcccaaactattcagcattccaagtcaaagctagaaccatcaagttgaaactatttagccatatattataatactttatttagggctacaaacactataattagtaactacgtaatagggacaagtagtcaatgtctctctgtcatttctagtctaatacttgtgcatcgcttggttacttcggtattttaaatgcgtgatgaataacaactgaaatg

SEQ ID NO: 17718 - DNA, 402 bp, Glycine max
ctgaaactgaaactgaaactgaaacatggtatctctgggttccttcacttcttttgcatgtgacaacctttctctttctctttctcagtctctcaaaccgtcatcattgcctctcattcactctttcacacttccaagaaacactatcaggaagaagaacggtgctagtgtgaggcctctgttctgtgccctcaacaacaataacaacaacactgccttgcagtacagaaccctcggcgactccgacctcaacatcagcgaaatcactcttggtactatgacctttggggagcaaaacactgagaaagaagctcacgacattcttaattatgcattcgaccgtggaattaacgctctcgacactgctgaggcctacccaattcccatgaagaaagagacaca

SEQ ID NO: 17719 - DNA, 432 bp, Glycine max
cttgagaaatataagcatctagtctacttgcttgctatgcaaaggatgtttttgatattttagaaccggactttcccattcactttacacatccaagtagtggagatactcatgtgcaaagagatgacctgtcaacctctctgatgtctgcattctcttctacacctctctttgagccggttgtcattcctctgcttcttgagaaactgtcttcttcactgcattctgcaaagatcgattccttaagatatccttgagcgtgctcttccgagcatgggcgcacaagagaattgcaaaaatatgccggggctattttggtcttcattaaaagacacccgtatctactttatttgggggagccagatctttcttttactataacacctgtagatggtattggcttcccagagaatgatttgtgatagaagctct

SEQ ID NO: 17720 - DNA, 831 bp, Glycine max
ggagctggaatgatggattgcaactaagcactatcagagaccggtggggtctttattagagcacaagagtgccttagaaaaaaaggcttatcgagtgcagacaagaaagcaagcagggtcactgctgaaggaaggatcggttcttacatccatgacagcaggataggtgttttggtagaagtaaactgtgagacagattttgtctcacgaggtgaaatttttaaagagcttgtcgatgatatagccatgcaagtggctgcatgccctcaagtagagtatcttgttactgaagatgttcccgaggaaattgtgaacaaagaaaaagaaatagaaatgcagaaagaagatcttttgtcaaaaccagagcagataagatcaaagattgttgaagggcggataagaaaaagacttgaggagctggcattgctcgagcagtcctacattaaggatgataaggtagcagtaaaggacttcatcaagcaaactattgcaactattggagaaaatattaaagttaagaggtttgtgcggttcaaccttggagagggtttagagaagaaaagccaggattttgctgctgaagtagcagcacaaactgcagcaaaaccagcacctatactggtgaaagaggagcctgctgttgcagatgcagaagccaaggagaccgagccaaagcaatcaacagttgcagtctcagcctcattggttaagcaactgagggaagaaactggagcagggatgatggactgtaagaaagctctagctgaaactggaggggaccttgaaaaggctcaagagtacctcagaaaaaagggtctctcaaccgctgac

SEQ ID NO: 17721 - DNA, 594 bp, Glycine max
gcagatcaatctaataatacttcttcagccgtccaagtaaagaatgaaccaacctatccaactatggacattaatgctaaaaaatctcgggaactggatgttcaagtagaatctcaaggagcgcaactaaatcagttaccatcatccagttctaatgctgttagtcaagaaacggaaagatcctcacttcacttacaaggccttaataaggagcaacaacagcatctacatttcccttcagcatatggtaacagtggtggtaattataaccctttttcgggctcaaccagtagttccacatcatctatcagaccacaaccttttgattcacacatgaggcaaattccacatcagagcatcagtccaaatcaattaggtgggtcaacacagggtttgattggtttgacaaaacttgatcagcaaaattctttcaatgatcccaagagaatgcctggtggatttgtgtcccctgtggcaaacaatacaacatcacaacaatcttcaaattcttggcaaccatcagcaaacaaagaacaaagttcaggctcgttttcatctgttccatatgtaaaaaaggagcctaatgacctgtct

SEQ ID NO: 17722 - DNA, 559 bp, Glycine max
  unsure (1)..(559): unsure at all n locations
cccacgcgtccggagcagcagcacattcctcgtgactcgtgaggttcgttactagcgtgtgtggattttaaatcaggtgcgacgcggtgtagagagtggcggtggtgtcgccgtggcggaagtgagaatgacttcggacggagcaacgtcggcggcgactaaccggaggaagccgtcttggagggagagggagaacaaccggaggagagagagaagaaggagagccatttcggcgaagatatactccggtcttagggcgcaagggaactacaatttgcccaaacactgcgacaacaacgaagtcttgaaggctctctgcgctgaagctggttgggccgtcgaagaagacggcaccacctatcgcaagggatgcagggcaccatatccaggtgatggtgtaggcacctccaccagaaacactcctttctcatcacaaaatccaagtcctctttcgtcgtcatttccgagtccaattccttcatatcaagtgagcccttcctcctnctctttcccgagcccttctcngttggatgcaaacaacccttcaaacctgattcca

SEQ ID NO: 17723 - DNA, 426 bp, Glycine max
  unsure (1)..(426): unsure at all n locations
gtagaagcagcacattcctcgtggggggtcgttactaacttgtgtgggttttaaatcaggtgcgacgccgtggcggaagtgagaatgacttcggacggagcaacgtcggcggcgacgcatcggaggaaaccttcgtggagggagagagagaacaaccggaggagagagaggagaaggagagccattgcagccaagatatactccggccttagggcgcaagggaactacaatttgcccaaacactgcgacaacaatgaggtcttgaaggctctctgcgccgaagctggtttgaccgtcgaagaagacggaaccacctatcgcaagggatgcagggcaccacttcctggtgatggtgtangcacctncaccagaaacactcctttctcatcgcaaaatccgagtcctctttcttcgtcatttccaagt

SEQ ID NO: 17724 - DNA, 473 bp, Glycine max
ctctaacaaaaacttcaatggaggcaacatatttgatttggaaataacagtaaatgatgaaatcataaagtcaagcagcttgacttgttacaggtcatatgcagatcctgtagtaggttttgaagaccaatccagcaatggatcaactccaccagcagattcccaagctaacatccccaatgggaaacatgcggtgaagaagctgaaataatgtgccttgagaagcaccaatgcatgacatcatagaaaacttaacgcacatatagtcataattattaccaggaattctggaacttcgtgaactgaaaagatggtcatggtctcaaccatcaaattccaagcctaaactagatttcccggtcatggtttttctggggttctagttatgaatttaggaccgcaatttatatgatttagtatactgatcgcaaagtgaataatcgccacccactatttgatttttattctgcatt

SEQ ID NO: 17725 - DNA, 715 bp, Glycine max
ttgattccaacgccgtagtggcaaatgctagattctatcatagatattttctcttgctctgctaatgatatttatatctgacttttgattggttaggttgaggatccttttgagcagccacaaaatactgcaagatccgttagcgcaggacaactgaagaagataactgaggcatttgcaaggacgcatgacttgcttacctcaacaaatcagaatcaaatttcacttttgtccaacatggcacctgcgcatgttataagatgtatcacaaggccttatggtggaggttactttcacccaactcagccacaagtgcagagggccatacgcccacaactgcagtcgcaacgtcattttcaaaatgtcagtcaaggaacaagctccaacagttcatcttcaaaaggacatacattggtgcatagaggccaacagatatggaggccaaagagttaaaaggggatctctattactccgaaaatgccatggttttagctttgaacaggtttttactattgcctttcagtttacttgttaacacaagtgattgaaagaatgggattttgattttttttgtgcccttgtggatcaaaaagtgatcaaccgtgtatattacatgaggttttggtggggcattatattgacgtttttacaactcttatgtacttgtggtaatattcgggcatgcaagagtttaaaatgtgcaactttgcatatg

SEQ ID NO: 17726 - DNA, 431 bp, Glycine max
cttctcagctgaatgatggcaacagaatactattatctcttgtttcttctttggttcctctctagcttaaccttcttattggacaaccacgttgtgtttctacgcgtgaaaatactactcctattgggtgacattcactcctttgcctacagcacaaatgcttgggcttttcattcctagttggtaccatatgatacaaaaggttgataatctattttacttttttggtacattctgttgcttagtttgtatttcgggttgaatgccatccataccaattgtaagaaaaaataatagtgtgtaaatgacaaaacttcctctcaatatgagagagaccaaagattgatcacactttccattcaaaaaaaaaaaaaagataaatgagtccatagatttattctgagttgtagattgaagtgtattcacattat

SEQ ID NO: 17727 - DNA, 308 bp, Glycine max
aatagccttcatagcttccatacaatccctagagaagataccacagtctttgagctcttcaggacggtttgactttcatataaagctgcctgctcctgcagcttctgagcgcagggctatgttgaagcatgaaatacagaggcgtcagttgcaatgtgatgatgacatcctgcttgatgtggctgtagaatgtgatggttatgatggttatgatctggaaatattagttgacagaactgtccatgctagctgtttgccgttttctgccatctaatgctggccattatgagcatgagagtcctgcttta

SEQ ID NO: 17728 - DNA, 498 bp, Glycine max
gattgattgaatattcctgtccttccttgcttctttgtgatctcatgtctctatcttgttcacctgttgaatgaatgatgatgctgaacatggacagcatttctactgtcaagtttgtatgcaccgttttccttttttatgtgggatttatgccaaagagatcttcgaaagtgataattaacaagatgctggagctaccaaaagttgcctcgtaaagtaggtcttactcagaagccaacaacaataagtaatggcatcagcagaagggaaggctccttatacagctaattgttttactcaagatttccggattcccctgagttctctggatcatccgtcatcagtttcaaaaaaattagtatctgattgggttcctaataattctattaatgatcaaattctttctaattcagtttttgtaccccataatctgaattctgcataagctaccagaaatgaaatggtggctacatgtgaaaagtgacttgggggatgaag

SEQ ID NO: 17729 - DNA, 303 bp, Glycine max
cacacccttcatttcctttgctccctctcattgtgctatatttccattacacaattactagtcctctttctttgttggtgacacacccttttgcttattaaacacatatcataacaaggtataccaaaatgtgcggctctaagaccaaagtgacgattggcttagaagtcatcgctgctgctactactacaacaactgctaagccttcagtggctagaatcaatggaaggccagtcctccaaccaacttgtaaccgtgttccaaaccttgagaggaggaattcaatcaagaaagtggcaccag

SEQ ID NO: 17730 - DNA, 474 bp, Glycine max
aaaggacatcgtcaggagttgactaagttaaggataactgatattcaaggaattgagaaacctcaaaatgtattgcctgaaaagcctccaaaacctgctaagaaagaaaaggaaaaagttgcagttactgcttaaaaaggatgtacctacccctttgggtgttgatggttattgctgtctttttgtctcagtgagttttgatagttggatggtatgtagtgagcatggtgatattgttgataagctcttcattttgcatctgcaaattctaggtaggtggaaatagtcaaccatccactcagtagtcaggttttgtagaattgttacacaaattttcttttccctctgtagtgctataattagtgattcaatgtttgaacgggtttcgaggtctcaagaaatttaataatgactcctgtaatttttgttagtaaaaaacatgatactatataatacattttaccaatttctgac

SEQ ID NO: 17731 - DNA, 876 bp, Glycine max
cccacgcgtccgcttgactgcatttatggccatggcaactctaaccccaatgtgttgctcatgttcaacacccagattcagtggtcaacaccatcagcatggctatcaactaaaactaaaaccctcagttttgaatttcagacctcagaagcaaaatagaagcatcagaatccgatcaccctctgcctccaacccgaaccagaatgagtcttcttctcccggattatactctgccaagaaattcgacctcaccgcatccaacgtcgacctcgttctcgacgatgttcgcccttacctcatcgccgacggcggcaacgtggacgtggtgtcggtggaagacggcgtggtatctctccgtctcgaaggagcatgcgagagctgccccagctccaccaccaccatgaccatggggatcgagcgcgttcttaaggaaaaattcggagacgctgttaaggacatacgccaagtctaccttaccgaaccaagggagacaacggttgaggcggtgaataatcatcttgagatattgaggccggccattaagaattacggagggagcgtggaagtggtgtccgtagaaggcggggagtgcgaggtaaagtatgttggacctgactccattggatccggaatcaaagcaaccatcaaggagaagtttccagatattctcaatgttaccttcaccaccaccacttagctctttctctgtaattattccttcaaaagataaacttcctctgctgctaaatgtattagtagtagattgtctccttttttcgcttgaatattacatgcatcagctctgaatgaatttaagtatggaattgttatttccttttagagcctaacactaggaataatttgagtcagccttcc

SEQ ID NO: 17732 - DNA, 438 bp, Glycine max
cccacgcgtccgctctactgtgtcttcctcttccattttcattctctctgattgttgttctgagattattaggttactttgtctttacttagaaatcaaaggcagaacttcgctgggagagcaatggtgacagcaaaagtgattcaaatccatggaaataaatggcagttgctggtgtgcataatgtgactgtgctcgaatctactttcctaagggaatcccattcccagccatctgggaggcaaggagatggagggaggggaggcacccggtcaccttcggtcttgcaaatgtggcgagagattgaagatgagcaggtagtcagacaagttcaagggaagactccccccgggggggtggggaaaagggggggttttaaccccaaaaaaaagggggggaaaagtttttggggaaaattttgggggggggggttttttt

SEQ ID NO: 17733 - DNA, 455 bp, Glycine max
cccacgcgtccgcccacgcgtccgcccacgcgtccgctctcgcgccagtcaaaaaccctctcagagaaagcacacaacaaagatgaccgacgaagacaaacccaaagccttctccggcggccatcacaaccaccctccgccgcagccacaacccttccccgccgcccagtatggcaccttccaaggcgtcgccaactaccctccgccgcagccgcaccccgccatcggcttccctcacccggttccgccgcccggcgccgtcgactcctccgcccctcctccgccctactacccgggctaccaagccgttcccggttatgcagttgctgaaggaagacctgtaagagaacgccgccttggttgctgtggccttggatgcggctggtgtctgtttatattaggcttctttcttgctggcattccgtggtatgttggggcaataattatgctttgtt

SEQ ID NO: 17734 - DNA, 1176 bp, Glycine max
gcggcatcagcaatggctgcccctggaatggactcgagaattcttggatgtggtttggcttctggagctgctgctccatctgatgtgcataatcttggtaggatgggaaatcaaattccaggcagtgctcttcaggctccttttgtcgatccaatgtatcttcagtacctgaggacgtctgagtttgctgcagcacaacttgctgctctcaatgacccctctgtggacaggaactacttaggcaattcatacatgaatttacttgagctccagaaagcttatcttgggtctgtcctctcacctcagaaatcccaatacaatgtaccgctgggtggtaaatcaggcagctccactcctcatggttattatggaaatcctgcatatggtgtcgggatgtcttacccaggaagtccaatggcaaactctgttgtatccacttccccagttggatctgcaagtcctgttaggcacaatgaactgaatatgcgttttgcttctggaatgaggaatttggccggggtcatgggaccttggcatgcagatactgggaacattgatgaaagttttgcttcttctctgttggaagagtttaaaaccaataaaacaaagtgttttgagctctctgaaattgcgggtcatgttgttgaattcagtgcggatcaatatgggagtcgatttattcaacaaaagcttgaaacagctactacagaagaaaaaaacatggtttatcaggaaatcatgccacattcccttgctttgatgactgatgtctttggtaattatgtggttcaaaagttttttgagcatggacttgcatcccagagaagagaattagccaacaaacttcttggtcatgttctgacacttagccttcaaatgtatggttgccgtgtcatccagaaggccattgaagttgttgatctggatcagaagatagagatggttccagagcttgacggtaatgtcatgcgctgtgtacgcgatctgaatggcaatcatgtccattctgaagtgtattgaatgtgtccctgaagatgctatccactttattgtctcaacatcttttgatccagttgtgaccctatcaacacatccgtatggttgccgggtgatacatagagtgctggcacattgcaaagaccctacaacacaacatatagttatggatgaaatttt

SEQ ID NO: 17735 - DNA, 439 bp, Glycine max
atggaaaacaagataggaagacaaaagagcactaaccagggaacatatgtatacacacatgtagtgagagagaaaaaaaaagggtggtttttggtttctcttttggttcctttcttatatgccatatttgcatctgatgcagcaattcctctgtaacggttattatttttgtgaaggggttggagagaaacactgatcagtgactactgcttggttgctactactgaaaatggattacagcaatgacaacaaggagccatgggattggcatagggaggattattgtctccaaaggagtttcaattatgaaatttcacaagggatatggaatggagtttctcaaaatgaagatctttcctttgtgttcaatgatgaaacaaccccagtgaaagcttgtggggactttgcatacaatgtcaataatagtgagttacaaaag

SEQ ID NO: 17736 - DNA, 672 bp, Glycine max
aagaattaatggcgaggctaatgttgtggctgtgaatgctgcaaaggaatacggaattcccaaattcatcctgatctctgttcatgattataacttaccatcatttttactttcatctgggtactttacgggaaagaggaaagcagaatccgaggttctctccaaataccccaattcaggtattgtcttaagacctgctttcatatatggcaagaggagagtggatggttttgagcttcctttggatttggtaggggagccagcagaaaaaattctacgagcaatagagaacttcaccaaacctttaagttctcttcctgcatctgatttactcttagctccacctgttagtgttgacgatgttgcgctggctgttatcaatggtgtcacagatgatgacttctttggtgtttttacaattgaccagatcaaggacgctgccaataaagtacgggtatgaatatgatccggatatagtcaaacgagataaacctgcaattgcaataattgtacagtcagggagtaactacaatgaggctattttccttgtgttaataccggtggcagcttttggagcacaatcttttttaaattttaagggagtagtgtgtgaccgtgtgaggagaatggtgtttaaaacaatactaaatgtaataaatgaggttcatatct

SEQ ID NO: 17737 - DNA, 884 bp, Glycine max
atcagcaaagactaaaaaagagaaaaaagggtggtgcttgtacttgtgatggtgtgtgcgtttgagagaagaagggggttaccgtgtttgtttcttcaccgaacgaacaagcatatggtagcttaaagccctagtttcaatgcgaacatcctataatcttgttcttcttcgctctcgcttccgccgctctcacaatttccacgcataccgttcccatctccgtcgtaatcctcaaaccagaccaccatccaccagctatcattccctcaaattcccgattccttcttcccggcttcaatgctcatcgccatcgcagtttctttaccagggctaagccagcaaccaccaacattgaattcaacgatcaccacagtcagcgagctgttaaaactgcattgtggtgtaactttcttgttttttcactcaagtttggagtatggttagcttcctctagtcatgttatgttagctgaagtcgtccactctgttgccgattttgcaaaccaggcgctacttgcttatggtttatctagctcgaggcgtgcaccagatgctattcatccctatggctattccaaggaaagatttgtttggtccttgatatctgctgttgggatcttttgtcttggttctggtgccaccgttgttaatggagtacagaacttgtggattgcacagccccctgagaatatgcagtatgcagctttggtgatatgcggttcattcatcattgaaggtgcttctcttattgttgccatacaagctgtcaagaaaggtgctgctgcagagggaatgaaattaagagactatatttggcgaggccatgatcccacatctgttgctgtgatgacagaggatggtgctgcagtcaccggccttgttatt

SEQ ID NO: 17738 - DNA, 615 bp, Glycine max
ctctcttcttcttgttacaagagagagattcaaggatctggtgccccttcttccttccctttgtgttgttgtgttgggaccaattctttaatgagcgagagagagagggcgcaatagtagccatagccataatttattgttattatttagggatgagtgaagtgaatgaatgaaaacaaaaacaccgccatcgctcttgtctctcacggttgactctgcggttcttaatctctccgacatctccgatctctcccatgtccctgatcacatcctcctcgacctcttcctgagaatattgaaggctgggaagctgactgagaaagttctgagactttttatagcaactggtaaggatgaagtcctctcatttgttcaggcactcaatatccaacatattttgacccctgtgcttcccaccaggtgttctgaggcaaaatcagacttttagtttgtaagatagtctgtaccttgcaagatgtctcaagcagttatcaacgataatgaagtggacattgtgattggtgcactgcattctgatcttacaacttttatgaatgaatggaggccaattttcttccgctttcacctgataatagtaaaagatcctgaccttaa

SEQ ID NO: 17739 - DNA, 539 bp, Glycine max
ttacaagcgagagagagagagagagatataccccgatctggtgccggttcttccttcttgtgttgggacccattctctaatgcgcgagcgagagagggcgcaatagtagccatagcgataatttattgttattatttagggatgagtgaagtgcacgcatgagaacaagaggaccgccatcgctctggtctctcacggttgactctgcggttcttaatctctccgacatctccaatctctcccatgtccctgatcacatcctcctcgacctcttcctgagaatattgaaggctgggaagctgactgagaaagttctgagactttttatagcaactgggtgttctgaggcaaaatcagactgttagtttgtacgatagtctgtaccttgcaagatgtctcaagcagttatcaacgataatgcagtggacattgtgattggtgccactgcattctgatcgtacaacttttatgaatgaatggaggccaattttctcccgctttcacctgataatagtaaaagatcctgacctcaaggagga

SEQ ID NO: 17740 - DNA, 463 bp, Glycine max
acgggacaagatatttttccctgcaagcatggaactctttgggggctttcaaattgattgtacgaacttttgcatctggatttgcatgaattttgctagaagacatggctactgcaaatggtgggactgggactgaggatgcacaagaggaaatctaatgacctttttcttaagcaagggggacaccaaatcatgccaagatcacctagattgtgcacccctattcggaaggaatggccggaggagagtttgccaaatgacaatgtgattggcttgaatagctatgttacttccttagctggatctggacctcctagttctagtttttgctccacaattgattctgaacacattgttgaagagttgcctgttaggaattatgagaaccagaatataaacttagttaaccatccacataattcaagacaggcaaagaatcaattgactattgagtctaagtata

SEQ ID NO: 17741 - DNA, 389 bp, Glycine max
tattatgagtggttgaaaaaatcagggaaaaatgctcaattgattgagtatccatcgtcgattcatgcgttttatatatttcctgaattgcccgagtcatctcacttgatctcacaggtcaaggatttcgtcaccaagaaaattcctgactttcaatcaaatgtatattacgttcatgttggagtcaagtgcgcatggctatgcaagttcttgtttcaagccttctaaacaacacaatagtatttagtagtattagtatttcgtaagagtctattactattatatgtttggatctctccaaaatttaaaaagtaatattttggttgttataaaaaagtattaattttatacttataaaaataaaacattttatacagttttatttactt

SEQ ID NO: 17742 - DNA, 1346 bp, Glycine max
tgttgttgaggataagaaactagtggtgaaggagatcaaaactttggctggctcttggcagaaagtcttgttttctcgcatctttcgggaagcccatggcggatgttttatagccaaggaagcgtatgggatgtgtgaagatttttctctcttctctgttattcccaattgtgtttacctgttcgcaggggttcttagttggggtttcagcccttttgctcaccaaaaaaaaataagaaactactgggtgtggcttttggtgtgtttgaagttgcgctgaaatagagacaatcggttggggttggtagtgttgcgttgcgttgcgtatttgtgaaattgatgcagcgcggtgctcgctgaagtgaagtaatcccttttggttgtgttgtgggtaatgcttctcagtaattctagtccaccattttcatttgtctcaggaatcactatgagtatgactaagggaataactccaagagattctcttttgctgaagcccaaccctttatcttctcttagttcactccattctctccagcatggtaacaatacgattagagttcctgtgactataagaattcaaccagagaggttttgtcatggtgcgctaaccatcaagaatgaagtgccgcaaaatgctgattttcctcgacagtattccagaaaagagaagaaaccttttccagttcccattgtagaactgcgacgagcagctagggagaggatgaagaagatgaaagatgagccgagaaaaccaatgtcagcacctaagaatgggttgctggtgaagagccttataccgactgcatataatgtgtataatgctaggatcactttgatcaacaatctgaagaagctgctcaaagtagtgcctgtacatgcttgtgggtggtgcagtgaaatccatgtaggacctgttggacattcattcaagtcatgtaaaggcacacaggccaacatccgctagggcctccacgaatggacgactgcacctgttgaagacatattcacttccaattgaagcctatcacctctttgatcgtcttggcaagcggattactcatgaagagagattctctatccctcgaattccagcagtggttgagctctgcattcaagccggtgttgaaattccagagtttcccaccaaaaggagaagaaagcctatcatccgtattgggaggaaggaattcatcgatgctgatgaaagtgacctaccagataaaatctcagagggtcctttaaaaccattactagctgaaatacatgattcagaaatagtagctccattagacaatgaagtagcccctcttgccgaggaaactctccaagcatgggaacggatgagg

SEQ ID NO: 17743 - DNA, 408 bp, Glycine max
  unsure (1)..(408): unsure at all n locations
caggggggaagtcagacagacggacagactactgctacgttaatcatgggtccaacctctatggccgccggaagagtcacgaggtttttggccaggcactaccctctcgagcaccaccgtgataacgccgatgttgagttcgactttcttgatgatattggagaagccttgttagctcaaagtgctagcagtgatgagtgcggtcaccccaatgaaatggaggaacagttcgaccaagacgaggatcacagagataccgtcgaggagaatagaaccttttgggacaaacaacaccagcttttgcaggccagtatatgcagaactagttcttcggagtcacggataaggcatgccaccaaagaagcgcttcangaaattcaaagcgcggaaactgtgtgcggttgtggc

SEQ ID NO: 17744 - DNA, 386 bp, Glycine max
acgcccacgcgtccgcccactcgttcgtccacactactacgttaatcataatcatgggtggaacctctgtggccgccggcagaagagtcacgaggtttttggccagtcaccaccgtgacgtcacgtgcgttgttgccgatgttgagttcgactttcttgacgatattggagaaacgttgttagctcaaagtgctagcagtgatgaaatggatcggttcgatgaagacgaggatcacagagataccgtcgaggagaatagaaccttttgggacatccaacaccagcttttgcagaccagtatatgcagaacgagttctttggagtcacggataaggcatgccaccaaagaagcgcttcaggaaattcaaagcgcggaaactgtgtgc

SEQ ID NO: 17745 - DNA, 478 bp, Glycine max
  unsure (1)..(478): unsure at all n locations
ggagtcagacagacaaacaaactactgctacgttaatcatgggtccaacctctatggccgccggaagagtcacgaggtttttggccaggcactaccctctcgagcaccaccgtgataacgccgatgttgagttcgactttcttgatgatattggagaagccttgttagctcaaagtgctagcagtgatgagtgcggtcaccccaatgaaatggaggaacagttcgaccaagacgaggatcacagagataccgtcgaggagaatagaaccttttgggacaaacaacaccagcttttgcaggtaacaattcattacttaatccacccaataccttcctcaatttaattactaatttgctagctactgtacgcctatctaagaaacttgcatgcaccctgttaatttattttgatttttttaaatgttctcgttagattaaattgtttttttttatatagttnttctatattacatgtttt

SEQ ID NO: 17746 - DNA, 689 bp, Glycine max
ctggaaaatactgtggtttgtggtggcacttcttctatggcaggttttgaagagagatttcagaaggaatctagcttaagttcatctgctgttcaacctacactcgttaagcctccagaatatatgccagaaaatttaaccatgtattctgcatgggtgggaggtgccatacttgccaaagtggttttccctcaaaatcagcatataactaaggcagactatgatgaaactggaccttccattgttcaccggaaatgcttctaacagtatctatccacatggtttcaacaactatttattcctctgcatctactggtactgtaacatgctgtaatagctgtatattccaagtgctagatgtcgtgtatatcttaaaagctgcagcgatctccattaatgcaatcttctcactctgcatgacttcccaggtagcagtggaagatttccgtaaatacctgttccttaaacatgcatatgttggagctctaggagcttgcatatctttgtaatgtggatatctcctgtaaaatattcattttggccatttgtaaccttgtagcctgtagctactagctacacctcttctagcacacccctttgttccttttatatgatagtttggaatttatgttttaatttatgaattaataatatatcttgtattaatgttttaataatagtttggaagg

SEQ ID NO: 17747 - DNA, 653 bp, Glycine max
tcttatgaacttaagctagattccttctgctgttcaacctaccctcgttaagcctccagaatacatgccagaaaatttaaccatgtattctgcatgggtgggaggtgccatacttgccaaagtggttttccctcaaaatcagcatataaccaaggcagactatgatgaaaccggaccttccattgttcatcggaaatgcttctgacagtatctatccacatgattttaacaactgttggtaccgtaacatgccataatccttgtatattccaagtgctagatgtccatgtgcgtgcatatcttaaaagctgcagcgatctccattaatgcaatcttctcactctttacgacttcctaggttgcagtcgaagatttccataaatacttgttcctcaaacatgttggagctctaggagcttgcatatctttataatgtggatatcccctgtaaaatattcactttggccctttgtaaccttgtgggctgtagctactagcacacccctttgttccttttttatgatagttttgtaatttttgtcttaaaattatgaattagtaatatatctcattaatagtttggaagggaagttataggcaagacttctaatcaactttcccttaactgcagtatacgtagttgttataccttt

SEQ ID NO: 17748 - DNA, 550 bp, Glycine max
gcgatctaaatgtgtgccatccctaatcatttctgaacccttcccccgttcccctttaaagtctctttgtcccttaatagagtgggcattaagtacactatcggggagagaccaaagagcaaagagtgttgtgttggtaattaagaaagagaggaaaaatgccgctcaagttggcgggaggagccactgtcggttcccttctcctatgtgttgctatttctctctttcacatcgctggggccgaagatccctacaggttcttcaactggaatgttacttatggtgacatttaccctcttggtgttcgccaaacgggaatattgatcaacgggcaattcccaggtccagatattcattctgttaccaacgacaacctcatcatcaatgtcttcaacagcttggatgagccctttcttctctcttggaatgggatccagcagagaaggaactcattcgaagatggtgtttttggaacaacgtgccccatcccaccagggaagaattttacttacatgcttcaagtcaaagatcaaagtgggagtttttacta

SEQ ID NO: 17749 - DNA, 401 bp, Glycine max
aatcaatctctctctctctctctctcaatgacgctcaacatagcggctttggctgtgttgtgtatttctgtctttggcatcgctgtggtggctgaagatccatataggttcttcacctggaatgttacatacggagacatttatccacttggtgttcgccaacagggaatacttatcaacggtcaattcccaggtccagacattcattctgttaccaacgacaacctcatcatcaatgtcttcaacagcttggaccagccatttctcctctcctggaacggagtccagcagagaaggaactcattcgaagatggggtattgggaacaacatgccccatcccagcaggagggaacttcacatacatactgtaagtgaaggatcaaattggaagcttctacta

SEQ ID NO: 17750 - DNA, 485 bp, Glycine max
gcgcccacgcgtccgctaaaaacgtgtatttgtattcatccatccctaggcactccaggtggcgatttcattccatgtgtaacctctctctctcccttcactacacttcattcattcattcaccactcagaggcagaggccagagagtgtggtgtgtgtgtgtgtctctctctttctctgcttttgagtaattaaatgagagcaaaaatgacgctcaaaacagcggcggtggctgtggctatagtgtgcatttctgcctttagcatcactgtggtggctgaagatccatacaggttcttcaactggaatgttacatacggagacatttatccacttggtgttcgccaacagggaatacttatcaacggtcaattcccaggtccagacattcattctgttaccaacgacaacctcatcatcaatgtcttcaacagcttggaccagccatttctcctctcctggaacggggtacagcagagaaggaa

SEQ ID NO: 17751 - DNA, 420 bp, Glycine max
cccagattcattcaccagtcaaaggcagaggccaaagagtgtggggtgtgtgtgtgtctctctctttctctgcttttgcgtaattaaatgagagcatcaatgacgctcaatacagcggcggtggctgtggctatactgtgcatttctgcctttagcatcactgtggtggctgaagatccatacaggttcttcaatctggaatgttacatacggacacatttatccactcggtgttcgccatcaggtctttgattctctcttctactttcatctcattcattctaaacataataacatactatgtgtcttgctctcacacacactcacacaaacagggaatacttatcaacggtcaattcccaggtccagacattcattctgttaccaacgacaacctcatcatcaatgtcttcaacagct

SEQ ID NO: 17752 - DNA, 260 bp, Glycine max
cggggagagaccaaagagtgtgttgtgttgtgttggtaattaagaaagagagcaaaaatgccgctcaagttggcgggaggagccactgtcggttcccttctcctatgtgttgctatttctctctttcacatcgctggggccgacgatccctaccgcttcttcaactggaatgttacttatggtgacatttaccctcttggtgttcgccaaacgcgtgtcttgttcaacggggaatattgatcaacgggcaattcccaggt

SEQ ID NO: 17753 - DNA, 453 bp, Glycine max
gcgctctagcacgtttgaggctgcgtcttatcattggataccatttgttgtcatctctgattcgaccgtgcacgtcatcgcccgcgccgccaccgccaccgccatctacttttcgtttttgctcctttcttagggaaatgggattgtggaccttacttgaggggttcctgcttcttgcaaacgcactagcaatactaaacgaggaccgctttctcacacctagaggatggggcttatcagatttctcagctggacagacaaaatctttcaaaggccagcttataggtctcatttatgcaactcagtacctaagatttcctcttttacttctcaactctgtcttcattatcgtgaagttagtttctggatgatgcctgaaaaggttccaagagttatcatcaggttatttcaatttgttataaagcacgaaaatttgacagttgttatctacca

SEQ ID NO: 17754 - DNA, 430 bp, Glycine max
cccacgcgtacgtccacgcgtccttccacgcttgtccaactattatgtaatctgctttatgtttcaatcatttcttcgtattccttcaacacccatcagattaatggcaaaagctatcctcttgagcaacaaatggtacggatatgagcaattctgggtcacacgttcttaccccacaatacagaaattcagccacgggaaaatggatctcaaggtgaaggcagcaacttccttgaattcaaatgccaaacagaaggcaaatttgtttgctgaaaaaaaggagagaatccggctgccaacatataatgatgatcttggaggcaagaaatatcacatcagtgaatttctgagccaacctagcggaattgcagccgtgttgaatacgaaggccttgcaatcatttgaatctcttgatgctaacacatacagg

SEQ ID NO: 17755 - DNA, 428 bp, Glycine max
cccacgcgtccgtattaaccctcttttttacgccaaaacgatgtcgtatgtgcctccgcgcctcagaaacgccacctccacctccgtcgccaccgccagaaccccctccgtaacccttgacaacaacaacaacaaccaccaccaccaccacaagctcgcattcccctccaacaccaccaccaccaattgctctccctctctctccttccacaacaatgcctctcgccggagctccgccgcgcctccctcgccgcggattcttgccacccccgacgccgtcttcccccaatggcaaccctccgaacgcgtttctcgcatgactcccgagcagattgaagaaatccgatccaggcttaatcttgatgttgctgtcgcatctgactctcctcctgcacctgcgcctgctccaatagaatcgtttactgata

SEQ ID NO: 17756 - DNA, 325 bp, Glycine max
atcagaaggctgccgatcagggcagcaacggagtcagcggattgcacgtaagattggtcatggtcttgttcggtttaattatgggttttttggttctatgatatcacgtcgctagtatacagctcaaaccctcatagattcttttctttttctctatatgtcaaccaaatgggacggtgcccccgacatctgtacctatttattgtttctttgttttcagtgtgggtagatccggtttgtgctacctgccagctgggatctgcatgtgtgcatataaacacttttcaattcattagatttagatattaattaatattgccctctc

SEQ ID NO: 17757 - DNA, 667 bp, Glycine max
gggtgacagaggagtatattaattaatatgtatgtgatttattgaattcgaagagaacaacaacacacacagagagaggtgtgaaaaggtgatggtttttggagcttatgcaacgtcttgcattttaagaagcacctaattacgaatatctatcttagcacacacaaccaccaccaccaccaccactactcctccattgtcactgccactgccaccttcaatttcaacctttctccaaaaataacataaaatcataatccgaatatctcagcattctctcattgctgcatcagctactcgcattttcgctttttttttccttccgggtgtccgtacttttcaatggaccgacgctggccatggaagaaaaaatcgtcggacaaggccgtgcttgagaaagcagctgcggaattggactctgctgcgggtgctgctgcaactcagaagccgagctacatccaaatctcggtagagtcatattcccatctgactggtttggaggatcaagtggagacatatgaagaaaaagttcagacactggaggatgagatcaaggaattagatgataaactgtcagcagctaattcaggggtagataccaaggaaagcttggtagaacagcatgctaacgtcgcagaagaggctgtctcaggtttggagaaagctg

SEQ ID NO: 17758 - DNA, 653 bp, Glycine max
atcttctctcagctctcacgtacgggaaacgaacacatataccaaatccttggttgaggagctttgtctgagttacgagtcagaaaagtgtccttttctggtttcattcaaagcagtgccatcaatgggaacataacatagcaattagcacatgatcttcacaagacatggcatcactgtgtctaaactcattaccagtcccaccaacttctctttcttcttcttcttcttcttcttctttgcttcttcacaacaacaacaacaacaacaacaatcttagtcccttgaaacccattgttgtcagtggagaccccccaacttttgtttctgctcctggtcgcagaattcttgctgttggagatctacatggagatcttaagcaagctaggtctgcacttgaaatggctggtgtattgagctctgatggtcgagacttatggactggtggagaaactgtgttggttcaacttggagacatactatatcgacgtgaagatgaaattgccatcttgtgcatgctgcgatcattggatagacaggcaaaacgaaaaaggtggagcagtgttctagtaaatggtaatcatgaaaacctttattgtggaagggaatttaaattttgtgaagttgggggattttattaacgttatgatttc

SEQ ID NO: 17759 - DNA, 557 bp, Glycine max
cagcacataacacctattgaggcaggacttacaatggtctatagggaagagcagaagagcagaaggtggttttctaggagctgatgttatcctgaacgagcttgaagaaggtcctaaaatcaggcgtgttggtttcttttcttctggtccacctcccagaagccacagtgagattcaagatgaaggaggcaacaccattggggaaatcaccagtggtggattcagtccttgcctccagaagaacatagccatgggatatgtgaaatctggattgcacaaggcagccaccaaagtaaagattattattcggggaaaacccaatgaaggagtcgttacaaaaatgccatttgtaccaacaaaatactataagccttcctgatttacttctgtatttatatcttaaacatttcctaattgctctctcccttgttgacaaattttcccataatcaagtgttacagccactgctaatgtcattgtcttaaatataaggctttcagttgcattcataactcggtatcaattttcagacatgtatgagtttaatttggcatgtt

SEQ ID NO: 17760 - DNA, 747 bp, Glycine max
actgaattggtagttagataaagtatacgactcaaagttgatcagtgcttaaatgaaataatcatggactagcacatatatcatattgaggcaggactaacatggtctataggagataggaggagagcagagggtgaattaatagagatgatgttatctctgaaacagcttaataaggtccttaatatctggagagttggtatcttttgatgtggtccacctaccagaagcctcagtatgtatcagtataaagtagactactacattgggataatcatcagtggtggtttcagtccttgcctccagaagtacttagccgggggatatgtgaaatcaggattgcacaaggcaggcaccaaagtaaagattattattcgaggaaagtctaatgaaggagttgttacaaagatgccatttgtaccaacaaaatactataagccgtcctaatttactttgaggtttcaccttgaacctttgacctttcccaatactcccccttaaccagttttcttataatctggaagttgtagtggatttctatgccattgtcctactcctacccatatcaagtacaaggaggacgccttgcatcaataactcaattttcatccaaacacgtatgatagttgagagaaatcttgaaattttctcacattgttcccaccaacttctatattgaagtcaagatgaaatctatggaattaaaagtggacatgtattcactgcatgacctgcgatattcatttc

SEQ ID NO: 17761 - DNA, 542 bp, Glycine max
cgtccagcgttcgactacgaattgaacttgcgttgctgaagaataacatagtgagttgtgcactctgcagaagctccacgtacttccgcacgaccttttcatataagaatgaagcttgacgtagatgtcttgagatatctctccaaagatgattttagggttctcactgctgttgaattgggcatgcggaatcatgaaatcgtacccactgaactcatagaccgaattgcgcgtctcaagcatggaggcacgtacaaggttttgaaaaacttgctcaaacacaagttgttgcatcacgactcttctaaatatgatgggttccgccttacctaccttggttatgattttcttgccattaagactatggtgaacaaaggagtgtttgtggctgttggacgccagattggcgttggaaaggaatctgatatatttgaggttgcccgtgaagacggaacagttctggctatgaagttgcataggcttggaagagtctctttccgagccgtcaaatctaagcgtgactacttgagacatcgcagtag

SEQ ID NO: 17762 - DNA, 714 bp, Glycine max
cccacgcgtccgcccacgcgtccgtcctttcgtccgggaaatgaaggtgtttaagcgagagagactgaatgggcactacggtattaccgcttttctcataagcaacatattctctgctgttccttacaattttttgatgtcaatcattccgggagctgtggttacttatctttctggactacataaaggagttgataactttgtattccttatttctgttttatttgctaccgtgacttgggttgagagccttatgatggttgttgggagtgtttttccaaactatgtcatgggcgtgatcgtatgtggaggaattgaaggagtcatgattttaacaagtggattctatcgacttccaaatgatcttcccaaaccagtgtggaaattccctttctactacatttccttcctcacctatgctttccaaggactgttaaaaaatgaatttgaagacttgccattttcttcggaagttctagctgacacttggcacgtgcaaatgggtcactctaagtgggttgatcttgctatcatgtttgccatgattgttctgtatcgagttctattcttggccatcagtaagtgcaaggagaaatcaaaacaagttagtgttggcattaaacccgaaactaaaattttctccagaatcaacatcagtgaactccaaatgaggggaattgatgatcataatgctgtctaagcagtagttcgact

SEQ ID NO: 17763 - DNA, 506 bp, Glycine max
ggaggggcctcattctgattttgctggaccaacttcgggaagcactgcctgtgttgccgttattagaaacaaccaacttgttgttgcaaatgctggtgattcgcgttgtgtgatatctcggaagggccaggcatacaatttgtctagagaccacaaacctgatcttgagattgagaaggacagaatcttaaaagctggtggttttattcatgcaggacgagttaatggaagtttaaatcttgcaagagctattggtgacatggaatttaaacagaataagtttcttcctgctgaaaaacaaattgtaactgccaatccagacataaacactgttgagctttgtgacgaagatgaatttgtggtgttagcttgtgatggcatatgggattgcatgtcaagtcaacaactggtagattttgttcgtgaacaattgcactcggaaacaaaactttctgccgtgtgtgaaagagtacttgatcggtgtttggcaccatcaactgccagtg

SEQ ID NO: 17764 - DNA, 719 bp, Glycine max
gccagccaccataacgtgacaccaaattctcattctggcgcgcgtcctcacatccccacaggtaccactattcctcttttcttcttcatcatcttcttcttcttcttcttcttcttcttgcatttacatcaactcttctcccaacccataaaaaaaaaataaaaaagttcgtattttccctcccatgatcgaccctcatggtcacagactccaagcccatcattccccggcgcggcctcgtcgtcggcaactactgtcatgacgtcctccaccgcgacggcgagaccgtcgccgagaccctcggcggcgccgcctccttcatctccgttatcctcgatgccctctcccttcccttccacaccgtctccaaggtgggccccaacttcgcctacaccgccgacacatcgaatcaccccccgttaataatcccaacctcccaaaccacgctcttccacgctcacttcggttcgggccacccggaccgcctcctgaaccgcgtccgatcctgcgattcaatccaacccaccgacctcccggaccaacaaccccggttcgggttcggactcgcggtcggggtcggcggtgagattctcccggagacagtggaaaacatgctctcgatctgcgaccacgtgttcgtggacattcaggctctgattcgcaggttcgacaacatcaacggtcgcgtgagccacgtggcgctaagagagagcgggttc

SEQ ID NO: 17765 - DNA, 431 bp, Glycine max
aacttgctatcttcactaacatgtcctctttaacgttcacaacggaggtagcatccagcttcctcggcctcgcttatcacaatcccaaacccttcactctctcactccaaaccactcttctccctcttctacgcagaacaaccactcattcccgatcgctaacatttcctctccgaccctctcgccgcttcttcgttacctccgccaccactgcacctcctcaatccgaggattccgacgtttccaccgtcattcctcccgacaatcgcataccggcaaccatcatcaccggctttctcggctccggcaagacgacactgctgacccatattctgaccgcggaacatggaaagaaaattgcgggtattgagaatgagtttggtgaaattgatatagatggttctttggttgctgcgaaaactgctggtgcc

SEQ ID NO: 17766 - DNA, 379 bp, Glycine max
cgcgtcctcggtggtggaagttgcttgaacgctggcttttacactcgcgctagccctcagtgatgtaagggaagcggcgtgggatggaagggtagtgaatgagtcgtacgaatgggtggagaagatagtggcatttgagccacaattgaagcagtggcagtcatctgtgcgggatggactaatagagataggtgtggtgcctaataatggcttcacttatgaccatattggtgggaactaaggtagggggaacatctttgaccagaatggcttcaagcacactggtggtgaacctctggaatatgccaaacccaatggaattaacctggttttggatgccactgtgcataggatcttggttagagtcaaagatagatca

SEQ ID NO: 17767 - DNA, 681 bp, Glycine max
gggtattctgagattacaagtttcagaggccgagggcgataatatttccatacggtttcttgacaggaagacaggtgagactactatggggaagacaaagcctgaaacaatacttaggcaaattccagccatgaaaggacaggtctgcagcacgcttgaggcaagaagagacgtagaaactgtattgactatgggaatcatggaagatggtagcattattccccatccagctggtacagggaaggttgatttggtgatgaatgtggtggaacgtcccagtggagggttttctgctggtgggtgggatatcaagtgggattacaaatggtccactaagagggcttattggaagctttgcctattctcatagaaatgtttttggtaaaaaccagaagctcaatatttccggagagaggggccagattgactcagtctatcgcataaattacacagacccttggattcaaggagatgataaacgaacatctagaacaataatgattcagaattcaagaacacctggaaccattgctcatggtaatgcagatcgtaatggtagcctgaccattgtccgcatcacaggctgcatagagtttagtcgaccaatcaatgccaagtggatcggaacagtgggacttgtcttccagcatgccatagtacgtgatgatgctggaatcctat

SEQ ID NO: 17768 - DNA, 185 bp, Glycine max
aagtagaaccaaatcaagagttccaagggttggtatgcggaggagctaatgttcttccggctaaatttttagaggactcgatgcgagatggttatgggaaaattatcagatgaatgtggtggaacgtcccagtggaggattttctgctggtggtgggatatcaagtgggattacaaatggtccac

SEQ ID NO: 17769 - DNA, 612 bp, Glycine max
agctctcacttcacaacacctcacccattttccactctttcccttctaccttgttccacctcttaatttttctaacaaaatggaggaaagtgtgctaacaaagaggccaagagaagaagaacccctagagaacaaagatagtacttatgaattactagagtccttatcaaagaggcacaggtcatacaaccacatactctccctccttgaatcagaggaagatgactccacacaagacctatcttctctcatcacttccctccaacaagaaatcaccaattgtgcctctgattcggacacccttttgaaccaacacagcctcaccaacaccaccaccaccaccacaacaaatagtaatttagaggattgttcatcctcaacaactaaatattctagtgacatgatggaggaacatgatgacaaagaaggggtcatgagacaccttcttgaagcttctgatgatgaacttgggattccaaataaagaggatgaatcactcgatcttggtgaagatgggttcaagttcaacggtggagacatgttttcttcaatttgtgatgggttgttgtgggagctcgaagatgaagctgctaactactatgatcttttgca

SEQ ID NO: 17770 - DNA, 554 bp, Glycine max
ctcgagccgcaattgtgtaccttcccttgctccttctcacttcacaacactcaccccatttttctactcctttccttcctccctccttttactttcatttttctaacaaaatggaggaaagggtggtaccaaagaggccaagagaagaagagaccctagagcacaaagatgcatcattagatagttatgaattactagagtcctcatcaaagaggcacatgccatacaaccacatactatccctccttgaatcagaggaagatgactccacacaagacctatcttctctcatcacttccctccaacaagaaatcaccaattgtgcctctgattcggacacccttttgaaccaacacagcctcaccaacaccaccaccaccaccacaacaaatagtaatttagaggattgttcatcctcaacaactaaatattctagtgacatgatggaggaacatgatgacaaagaaggggtcatgagacaccttcttgaagcttctgatgatgaacttgggattccaaataaagaggatgaatcactcgatcttggtgaagat

SEQ ID NO: 17771 - DNA, 455 bp, Glycine max
caagcaaggcaaaagagaagcaactttgaaaactcaatggctgcaacttattatttactgccaacaagtccgaaaactttctcacctttcctcagaaacccaccttccattccttcaggtcatcatgtttcactgttgggttcattattggactatccattccattgttccagcagaagaggaaacaatagtgttgaggccaattgcaatgcaaaaaagaagaacccttggttagacccttttgatgatggggaggatcctgagatggagtatggttccttgtttgcagatgggaagcaggaggaggatcctaggccacctgatgaccctgacaacccttatggattcttgaagttcccttctggatattctgtggagatagcatccttggcattgaaagtgagagggggatgtgaggagatgctgctgtgtgatatctggtggtgtttatgaga

SEQ ID NO: 17772 - DNA, 477 bp, Glycine max
gatattctaggatgaaatctcacatctctggtgaaagctctctgggcaatgagttgaggagatccgtcagcgagaagcttcatcacgttgatgaggccgatgctgccaagcaaggtagggttctaaagtatatacaaactgagaagcgacggaggaggagccaccgtgcagaagaccccataagaaccttgatgttcttaggctctatgaatcacacgtgacatatgatattattaatgaggtatttgggcctatagccttggtgttgaaattaattaaccccctttgactaattgggggtgaaaaatcaaaaccgaaattcatttcaattgtcacatatatgttaatacagcagtgatgtaaatatgtcatggaccttcatatctatagctagaagtatcccttacttcagatcggttatatttcgaaactatataccaaaaaatatcagcctatatgtatatgcttatatcatct

SEQ ID NO: 17773 - DNA, 642 bp, Glycine max
ccaaaccctatcccttattcgcctttgtccaccctcaatggcctctgtttcagccacttctctcaggttccaaccctttctcaagttgtctacaaggactactacccaggggtgttacaaaacttcaagtttgggggcagtttctgtgggatggaataggagaacctttccctctttgagatcctcccgtttacgcatttgtgcagtcaaggcacaaccggagacagtgcagaaggtctgcgatattgtgaggaaacaacttgctctgcctgctgaatctgagcttaccccagacaccaaattttcagcacttggtgctgattcccttgacacggtggaaatagtgatgggtttagaggaagagtttggcataactgttgaggaggatggctctcaaaacatctcaaccgttcaagaagcagctgatttaatagagaaactgattcaagacaaaagtggagctagttagttaggaggtgaacaattctagggaaaatccattgagtgagggcacaagtgtaactgaatgaggttaattattcagcccattcactggccctttttttgtgcttacgcgtattctttagcaagctttttttggtgactttgttccattttctatttgatgcaagaggtcaaccc

SEQ ID NO: 17774 - DNA, 424 bp, Glycine max
tgtacgtatactactgtgcttctgttgagatttattcctgtcccttcatattcctcttctgtatctatctattctctttgctcgttacagtttgcttcattattatataaagggtctcaaggtttttaattgtttttaaaaaattaaaacttttgccaatttgtgaactgggtctgcttgattctattttgctgctttttatttattttaatttgtttggtgtattgtgtattaagctgaacatgaaaatatgttgttgttgcggattgctcttttgttaattaaaaccagctagttagtcattatgaagcttgattccttatgtctatgcagttctctagatttaaatcttgggaaaagaatgttgctgtccacttatatattggccttgaactaatgatcttttttttatcctaagtaaaca

SEQ ID NO: 17775 - DNA, 413 bp, Glycine max
atttttcgttccaagcagaatatcacaacttgagcttatccatcatctgaatatattgttccattccaactaacacattctgccacgcctttcactaatctgatttgattcatggctttagcactttcctccaccgcattgtcaagtcttccaaacagagaaattcgtcaaaagggtttcccagaaagaacacccacatgcttgagcttgaccagaagaacaattgcaaatgctacaaaaggagtctcagctgtctgtgaaccacttcctccagatagaccattgtggttccctggtagctcacctcctgagtggcttgatggaagtcttcctggtgatttcggattcgaccctcttggattaggctctgatccacagctgctaaagtggattgctcaagcagatctaatgca

SEQ ID NO: 17776 - DNA, 793 bp, Glycine max
acctggtgaagctttgaatcaggttgtggaggtcaatatgaaagtcgaggaaccaggtgagaagaatgttcacaataatgcattctatgctgaagagactttgctcagatctgaattggaagccatgcgtgattgcaattctttgactgctcggcattgggttgtaaggaacacgagaacatgcaatagaactggacagttgacaggctataagctggtacctggctctaactgcttgccattggcaggctctgaagccaagtttttaagaagagctgctttcttgaagcataacttttgggtaacaacatattcacgtgatgaagttgtttcctggaggagaatttcctaatcaaaatccacgtgttggtgaaggactagctacatgggttaagcagaaccgatctttggaagaaactaatgtagttctttggtatatatttggaatcacacacgttcctcgtttggaagactggcctgttatgccagtagagcgcattggttttatgctcacgcctcatggattcttcaactgttcccctgcagtagatgttccgccaaatgcatgtgaaatggattctaaagataatgccattaaggataatggttcttcgaaaccaattcagagtgggttaacggcaaagctttaggaacttgaccctccaaaagttatggctctgtgctgctgatatggagaaacatgagtactattctgatatatgttgttgagctcattataattttgaatctagaatattaataaagctattgaaataaatagtggtttcgtttt

SEQ ID NO: 17777 - DNA, 386 bp, Glycine max
  unsure (1)..(386): unsure at all n locations
cccacgcgtccgcggctttctccttataaacttcttccgatgtgtttctctctttctctctccgtactcttgctttcttcataaaattttgcaatcggtttgacaactgaatttgcatttggtaatcaaattaataattgacaaaaaaagaagaagaaaaaaagggtggggaggcatagccagatattgaacctgccctctgttcttaatctcattgtgcctcccctcagatctcgtcttcaatcggagtgctttgccttcattgattcactgcttgatgatttgtgatgaaagatcccgttgttcctaactgaatccgacaatatctatttttgcatcgntaatacagtctctcagttagtctaaatttaagataaaatgcaatc

SEQ ID NO: 17778 - DNA, 316 bp, Glycine max
gcaaaatgttgctaatggccagcctaatcaagcaaatagaactgcaacccctttacctcaaggaatatctaggtattttattgttaaaagttgcaatcgtgaaaatttggagttatctgtacaacaaggagtttgggcaactcaaaggagcaatgaatccaaactaaatgaagcatttgactctgtggaaaatgtgatattagttttctcagtcaaccgtactagacattttcagggttgtgcaaagatgacatccagaattggtggttctgttgctggggggaattggaaatatgctcatggaactgcacattat

SEQ ID NO: 17779 - DNA, 391 bp, Glycine max
gcaacgacaacgagagggtttaaaggatcctccaaaacctcttccaaggtttgtgttttgttgggtgagattcgattctatcatcgtttcatcaaatggcttttttgtctggagctcagcgtctgcttcgccgcaccccacttgttcattcccactatgcttccattcgtctcagctcaactctcacttcccccaaacttttcgtcagcggtctttctagactgacaaaagatgaaaaccttaaggaagcattttcttcttttgggcagctggttgaagctaacgtgataattgatagagcctctggaagatcaaaggggtttgcttttgtaacttatacaaccatagaagaagctgaaaaggcacgagaaggaatgaaccctcaattttt

SEQ ID NO: 17780 - DNA, 455 bp, Glycine max
  unsure (1)..(455): unsure at all n locations
nccacgcgtncgcccacgcgtncgnccacgcgttcgtccacgcgtncgcatcagagcagaggcgcggacattcttaatagtgactttgttagccactggcaaaatttgcaatatggccgattttgtcaaaactcacgtcatccgccttcaatgacgtatccttcacctggtatggtgcctcctgtttatttgcagggtcgatatccttgggatggccctggaagacctatttctggtaacatgaatattttcagtcagcttatgaactacgggccacgcctggttcctgttgctcctctccaatcggtttctaatagacctgccaatatttaccaacgttatgtagatgatatgcctcgatatcgaagtgggactggaacctacttgccaaatccgaaggtttctgctcgggatcggcattccactaataccagaaggggaaattacaattatga

SEQ ID NO: 17781 - DNA, 1279 bp, Glycine max
cttgtagctattagcttataacagagagagagagagagagagagagagagagagagatcacatttcctgagctataggctatagccttccataatcttataacaatggaggggaccaccagccaaagcacgtttgccttcatccctagcacaattgagacacctagtccaagcatccctgagatttcatcatcatcaccttcccctggcggctctcttgcaagagttgcacaaagttaccctcctggatttcccagaaaggtatttgcggaggttatagggacatttctgttagtgtttgtggggagtggttctgctgggcttaagcaagattgatgagagcatggtgtcaaagcttggagcttcacttgcaggaggactcatagtgacggtcatgatttactcaattggacacatctcaggggcacacatgaacccagcggtttctcttgctttcaccgccgtcaggcatcttccttggccacagctcccattttatatagcagctcaactcactggtgccatttctgcttcatacacattgcgagagctgttacgaccatcaaatgagattggaggaacatcacctgctggatcacacattcaagccctaatcatggaaatggtgaccacatataccatggtgttcatttccatggccgtggccactgactcaaacgcgacaggacagctatcaggagtagcagtaggttcttctgtttgcatagcaagcattgtagccggaccaatatcagggggatcaatgaatccagcaaggacattaggtcctgcaattgcgacatcatactacaagggactttgggtatattttgttggacctattactggggcggttttagcagcttggtcttacaatgtgattagggacactgaacaccctggttttcccatttcactatcctccatttcatccaaggtgcgccaaagcattggtggaactgaacaaaaaagcgaccaaagatgcttggtgtgaatgaaataataaacaacaatgttttttctgacaccacaccaccgcccaaatcaacatcaccttcaatttcttgtcttggaggatctcaagtttccacatgtattatcatgtatatgatcaaaaataccatgcctagatcatatggtattattagcttggccatgtatcgagttaatttcagggctatgagctagccatgtgtaatgccaaagtgtgtagtgtgattttcctacattaaaaaaatgaaagcttcatatgaaaaaaaaaaaaaaagggcggccgccga

SEQ ID NO: 17782 - DNA, 396 bp, Glycine max
cggacgcgtgggcggacgcgtggggcgcgattctgcatcgcttgacctcgtgaattggctcgggaatagaccggagtggaagatcatgaatgggagagaccattttcttgtcgccggtaggatcacttgggattttcggagactcactgaagaagaatcggattgggggaacaagcttttgtttttgcccgctgcgaagaacatgtcgatgcttgtggtggagtcgagtccgtggaacgccaacgatttcgggattccgtatccgacttattttcatctctgccgaggatgatgatgtgttcacctgggcggagaggatgaggaggcttggagaggaagtggctgttttcgtttgccggacctccgggcccggataacccgaaatcgataaggggc

SEQ ID NO: 17783 - DNA, 541 bp, Glycine max
ggagcacgcaatcttgcataaatacagagaagaagagaagagtgaagagacgaaggatggggaaggcaaaagaagcggcggtggtggcgggagccctagcattcgcgtggctcgctatagagctcgctctcaaacccttccttgccaaggcacgtgcttcgattgacaactccgacccgccacgtgaccccgacgacgatgctcttcctaaaaccaccactgacgacgttcccgacgccgccgattctaaacccgccggcgacgtgcctcccgctgctgatactataaccaccgacgccgtctgaagtggtctctcattcatgttattttgaatttcgtcatatctcaaaactactgtccaaatgaaataatattgttagcctgttgtgcttctgttaaatttgtatattgtgttgtcggtaaatgctctgtttggtttgatttggttttaggattgaaaaaaatatcaggttgttctattctgcttgtttcccttgtcattaaatatatgtgtatatttgatttatagttaaaaaaaaaa

SEQ ID NO: 17784 - DNA, 391 bp, Glycine max
gagacgaaggatggggaaggcaaaagaagcggcggtggtggcgggagccctagcattcgcgtggctcgctatagagctcgctctcaaacccttccttaccaaggcacgtgcttccatcgacaagtccgacccgggcacgtgaccccgacgacgatgctcttcctaaaaccaccgccgacgacgttcccgaagcctccgctgacgacgtgcctgtcgctgctgataccaaaaccaccgacgacgcctgaacttatctcattcatgttattttgaatgtcctgaaaattactgtccaaatgaaataatgttgctagcctctttgtgtttctgttaattttgtgtatattgtgttgtcagtatttttggtctggtttgtttggttttaggattg

SEQ ID NO: 17785 - DNA, 263 bp, Glycine max
tcctttgcttaggatagtaacaccaccaatctgtttggcaagagatagcagttgttgaggagcatctatgtcatttacttcagaacttagtactttctgaactagacgcttatattcattgacatttggtgttagaacagctaaggcatagccgctaacaagttcaagattatttgtaacaagaaaaagtccatccccgtctataaatattgtcaggactgtgtgagtgaaatcatgagacatgcaagacgatcaaatatcta

SEQ ID NO: 17786 - DNA, 420 bp, Glycine max
atgaattatggataaatggagctctgccacagactctagaaagcagagaaaacgatgatgggcttacatggttgtactctcaaactcgcttcagttcccaatttctcttctccaactttccttttcaaaactccaaccctccgttttcagaaatctccattgtcacgccccatcagagctctatcttcctccgccctcgtccaaacatctactaccaaggccactgaagaccaaggtgtgaagcctcaatggaaggccacgatagacttcaagtggataaaggataacaaggaagctgttgctgccaacttaaagaaccgcaactctgatgctgatttgaacctcgtgctccacctttatgacaaaatgttcactcttcagaaggaagttgagagggttcgtggtgaaagaaatgcagtg

SEQ ID NO: 17787 - DNA, 335 bp, Glycine max
cggacgcgtggggaacggcgcagcaactcgatcatcgatcttccccggtgatcttcaacgatccggcgaaaacacgattctcaccactcgcaaactcggacagggcacagaagatcgtgaaatcgtacgatcttacgagtcagatcgcggttttgagtaccatgaggtgaaagctttgttttttgaattgtgaggaagattgaccaaataaacagaggcaaaaatgaagatggtaactgctttcaacggcaacatgaagaaagctgctgctggacttagacgcattaatcttgatggtcttcgatggagggtttttgacgcaaagggccaggttc

SEQ ID NO: 17788 - DNA, 475 bp, Glycine max
ctcgagccggctctctctctctctttcctcccttccttccctctcaacttcattttcctttcaaatagtaacactagagaacaaaagctctggctagaacttgtaatgtatatgcaagccatcatcattcagaacaattagtgcatcatcctccttcaactgaagaactttatttaatttgctcctaaaatattttgtcagaggatgtggtgcagtaatcctttgccattccttctttatttttaagcttacagcatctgcaatcatctcttattattacttcaaagtggcgatcacactatcattcattcagctgatcttgaagattttgtggcaggcataaaacctgcaatgagatggctttcttcccagcaaatttcatgctccaaacccctcaccatgatgatcaccatcatcatcaacctccaccttctctcacctcaattctaccaacgtgtgcacctcaagaatatca

SEQ ID NO: 17789 - DNA, 288 bp, Glycine max
ctcccttccttccctctcaacttcattttcctttcaaatagtaacactagagaacaaaagctctggctagaacttgtaatgtatatgcaagccatcatcattcagaacaattagtgcatcatcctccttcaactgaagaactttatttaatttgctcctaaaatattttgtcagaggatgtggcataaaacctgcaatgagatggctttcttcccagcaaatttcatgctccaaacccctcaccatgatgatcaccatcatcatcaacctccaccttctctcacctca

SEQ ID NO: 17790 - DNA, 434 bp, Glycine max
ctcttccgttcaagtgtgcaatttctcaggctgttttactgttgcttcggctctttctgagcatttaaatttttcgttttaaatcctcagcattgaaaccaaaaactgatcttcgaatagcatcgcaaagactcaaaaccaccccaaaataacaagagaaaatccaattttttaggctctcacaaaaacgggtggagaaaaaaaaaacttgaacactgaacctacgttgaagctgaaagtggttgaaagggggttatggagagttccgttgggggagagaggagtggacgcgtggcactatcagaggtggtggcagattgtgtgaaacggtggttcagagatgcactgaaagaggccaaggcaggggacataaacattgcaagtgttggtgggtcagatgtacaacagtggctatggggttcctagagatgctc

SEQ ID NO: 17791 - DNA, 625 bp, Glycine max
ctcgagatctgttttatgctctctgggtgcctgatctctttatggaaagagttcagagcaatggccaatggtctttgttttgtcccagtgatgcaccgggtttgacagattgttggggtgagagaatttgaggagctcgatcttcaatatgaaagagaaggaaaagcaatgaacgttgtccaggctcagagcctctggttcgaaattctgaagtcacagatagaaaccggaaccccgtacatgctttttaaggatacttgcaataggaatagcactcaacagaatttgggtacaattaaatcgtcaaacttgtgtactgagataattgaatattcaagtccaactgaaactgctgtgtgcaatctggcatcaattgcactaccacgatatgtaagagaaaagggtgtcccgatggagtcccatccatccaagcttgttggaagcacaggctctggaaatcggtattttgactttgataaactagcagagattactgcactggtcacaacaaacctgaacaaagtaattgatgttaattactacccagttgaaaatgcaaaacggtcaaacttacggcacagaccaattggtataggagtacagggtcttgctgatactttcatac

SEQ ID NO: 17792 - DNA, 586 bp, Glycine max
cgtggcacaattatcatgcctaacttctccatgtttcattttggtcgccctgtagccctttcaactggatgtaaatcggcattcacttctttgaatggtgatactgttggcgatttttcctcaaaaagttcagcagatcatgtcgagaaggttcataattgcaataagaaagagactcccgccatggaggaatacaacttgtttgcagcaagtaataacctaaggttttcaattttttaaaatgataaggtgagaagtattaggtggctgttgtcgaatccagtccctatcttcacatatggtaatggaggtttgagtaccttgtaatttggtgaacaataagcttcctttcagcaatttccaatttagcctatagcttgattagttaattgttgcccaattgtctctattctttttattttttttggtgtagagaaagattgagagtgctggtattttaaagatttttttgtgaggtcataatcaccctaaagtttcaatgaagcatttgttcttcataattctttttgttatactgaaactaaagcagtctttatagtgaaaagctgtattggagtttgagctg

SEQ ID NO: 17793 - DNA, 473 bp, Glycine max
cccacgcgtccgcccacgcgtccgaaatctaagccttcaccgcgtaggtcgagggttcaaaaggtagcactaggaccacattttaatactggtgtagcacgtgctgctgagacttcgaggaatgttcagttcccattggtgttggattcagttgtgagcatagtggtgaagaggccaaaaaagtcgaggagcaagaaggagaaggaagaggaagaggaggttcttgtgattgaaggggttgagtatgacagcaacataccagtgaaatttgatgtgcttattaatgatgaagatgataagcagattcagccagaagattcggagtatgcaggaagctttgtgactgtgcctcattcgcataagcacaaaaataagaagattatcacttgtttgaggctgggactgacagatttgttggaagaattggaagcagacgatgatgatagtgttgtggtgacgttggttccgaggta

SEQ ID NO: 17794 - DNA, 523 bp, Glycine max
ctcgaccgattcggctcaccagtattacccttctctctacctccctctttctctgttgggtcactcacattattaaaaataaccaccctcacacttcccaacgcttccttaaccatgagccacgccggcctctggcttccgccgcagttcctcgccggagaccctgacacaaccctttcgaactccgatttcagcttcccttccgagttcccctacgagttcggattgtcttctccggagagcagcgacgacggcgaagaggacttcttcgccggcctcagtcgccgactcggtcagacctcgcttcacgaaactcgcaagcaactctcatccactgtttcggagattccaaggaaaactcagggtttggtcggttcccctcagtccacgctcgccggaataggaagctggtccggtcggagcgccgtttccggcgacggaagccccaacgggtactcgcgtgtcccttcgccctcgacgacgccgtttgacgaaaacaacgacccctgggaagtgatttacg

SEQ ID NO: 17795 - DNA, 345 bp, Glycine max
ctcgagaccagtactacccctctccccattctctctttctttgttgggacttccaccatgagtgacgccggcctctgccttccgccgcagttcctcgccggagacacccacagaaccctttcgaactccgatttcagcttcccttcggagttcccttacgagttccgagtgtcttctccgccctccacggagaccgagagcagcgacggcgaagaggacttcctcgccggcctcactcgccgactcagtcagacctcgcttcacgaagctcgcaagcagttctctactggttcggagattccaaggaagacccgtcagggtttggtcggttcccctcagtcgacg

SEQ ID NO: 17796 - DNA, 581 bp, Glycine max
  unsure (1)..(581): unsure at all n locations
gaacacaggagtgtggcatccacatgttctttaacacgtgtcattacattcaatcctctgggtttcttatctcatccactactcggttacatagcatggtagtagttgtgatttatgaagccaaggagaagataatctcataaaaaacagaaaaaggagtgaaaaagagagacccttttgaatggagtctgttctaagccacgttggtgcaggtttcttcaatggcatgatcccaaggggagttttaggtacccatttcaaggctagttcctttgttggtgttgatggtgggaggccaaggcgtgtagtgttggtgaaagctgaggctgtgagcataaacccagatataaggaagagtgaagagaaagtggtagattctgtggtggtaactgaactctccaagcccctcactccttattgcagatgttggagatcagggacttttcctctatgtgatggaagccatgtaaagcacaacaaagccaccggagataatgttggccctcttcttttgaaaaagtaaaattatgatgatcatggcctgtttttattagagaattacattaaatattntaaggaag

SEQ ID NO: 17797 - DNA, 419 bp, Glycine max
cttttcttgaacttttggagcttgggttgtctacttgtcttgggactcacattatatggttgcctttatttaccaagtgaatatattctaatcctgaaggtgaggcaacaagcagaatcttgctctgttcaagtgctttgtcctgttaaatgtaatggaatgtggatggttttatctgtcaagaagcaacgatgtcttttcaacagtgttcaagaattggcagctcaattatgtaaaagtaatcttttgatctatacaactggaaagtgttttcttttatcataaaacgcttagcccttgcatctcttgataatttcttagaaactgtcattaaaatgctagttatttgaaaacagaaaaagatttatagagtaactgactcaactgaggaaccatgtgtgctagaaaaacttttttgt

SEQ ID NO: 17798 - DNA, 1004 bp, Glycine max
catctgttggatttgaaaccaatgggttatttatagaaagaaagatttccttacctattcttgacctcgaccacaagaactcgaaacttccaattttatgcacaaattcatcaaaaatgctagggatcactttagatgaggctgtttttaactccgcaacagccttatattatgatgcaaaatttatgcactggattgttgaccaaataccagatcaatctctactgaacactgcaggatggagatttattgttccccagctgtacaagaaatacccaaatcatgacatgaacttgaatgtatctttatcgtctcctccagttgtggagatttcaaatcagaaagctggtgccaccatatttgcagacatggcaatcgatgttttggaagaagatgaagtaataccagtggcatgcatatcattggtaattcaaggtacaggtctggtcaaaatcaaaggaaacaacctcgtaggttctatcagattgaatgactttcaaatgtcattgaaatggagcaacattggcaatctgcgggtgtacctcattcagccagttgtgtggacgcttattgaaactgtcttcttgccatatgcaaatgcacgtctgagtaaagggttacctttgcccatcattcatggtttcaccttacaaaatgcagagataatcttgtcaacttcaagaattgcagtttgcagcgatgtagcttttgcagattcaaacaagcgttttcttcaatttcattgaagagtgtatggttattgttcatggagtgtaaatagttcaaatcagaaatcaagatgatacatctacttgtgcaatcttatttcatttgttaattgctacttgctgggaaacggggcaatcattatacaaactttgatacaaatacttgctccgccagttatcatgtaagaagtagaggtttatacacccttgcaaaagaacatgtgcatataaaaattagagttagtatttgaatagatttgatgttacgaaaagctt

SEQ ID NO: 17799 - DNA, 600 bp, Glycine max
  unsure (1)..(600): unsure at all n locations
cccacgcgtccgcccacgcgttcccgcttagagcgtctccaacaaatccctaatcgcaacaatgccggaatcacccggtggtggagacgccggcgctccaccgcaggcgacggagaatgagaatccccaaactgaacgaaccgccgcgggtcctccagtcctctcgaagaacgcgcggaagaagctggcgaagcagcagagattcgaggcgaagaaggcggaaaagaaagccgcggcaaaggagcagaagcgaaaagaagtagagagaaagcggaaggagtgggaagagagccttgccggcgtctccaaagaagagaaagcgaagctgatagagtctcgaaggaacctccgcaaggagagaatggagaagaggtcgctggagaaagagagcaaaagagagagactcactgtagcgagaggacgaggccaaaacgtcgtcgtcgatctccagttctctcacctcatgaaccctaacgaaatccacagcctcgtgcagcagattatgtattgttatgcggtgaatggaaggtgtgcttcccctgcgcatctttggctcaccggctgcgagggggaaatggatagcgctntgaagcggattcc

SEQ ID NO: 17800 - DNA, 498 bp, Glycine max
aaaaaacgaaaaggggaaaatcggaaacgaagtctcgcaaaacgcagcctacaacgcaagttcgcaaccctaacgcgaagctcctcgtcgctcccaaggcctccgccgtctccgtcgcgccagagtccagacatagcgtcgtgaacagttcaatgttctatctcagtaaaatcgaacacaaattgcccctgcctccttctcgttttgttcttcctattcgagaagctatacacatggagcttgagaaacttttcttagataaggttatagcaaacttgggcctctgcatttctgtctatgatatcagatccattgatggtgggtttatcttccctggtgatggggctccaacctatacggttgtgttcaatttgattatgtttcgtccgtttgagaaggagatcattactgcaaggcttctttcatctgatgctgatggcttacgattaaccattggattctatgatgatatttatattcctgcaagtcgtttgcccg

SEQ ID NO: 17801 - DNA, 452 bp, Glycine max
cctcgagccgattctcttcgcacacaacacagccatccctttctctcccttcttttgctctctgccctaaccagcctcaccagatcttttacctccatttccagtgcatcacaccttagcttcaagccatcacaagttgtagatacagttaatactcaatatggagctgagtactataaaagatgcttttgaccgtgttactaagaagcaaaagttatcttgttccaagactcaagaagcaattgatcagatcagacaggaaattgagagtgttttagacacgctgcagtcagcgaataacactgaccatgaacttgattataaaactgtcctgaatgagcttaaggccggttttcttttaattgctccacttagtcaaatggaaggttcacagaaggagctaaatgtagcactcaccaagtatgggaagcttcttgagaaacatttcaacc

SEQ ID NO: 17802 - DNA, 553 bp, Glycine max
gaactcaaacagggaggatcatttctgatcgatttattgcttacgatttggaatagtgacaagtaaagacaaatcacaactcacggtcatccaattccaagaatagagctttacgaggcagcggcttcaaaaggaggggaatattcagaggaaaagaaagagtagttgttgaacaacaagagctttcctcattcttagcttatctcacaaggaaggtacgtaagatccttaacacccttaccgcggttacttgccgcctcaatccattgctgaaatgaatgctcataaataaatatatttgcaggctacgaatctctgctcctagatttttgtttcttaattatcaatctagtctctaaattatattaaaagatttaatttgattccaaatttttaaataatttaatttaatttctatattattttaaaatagattaatttgaccatttttgtccaattgtgattagtataacaaatttcagcggcttttatttatgaacagtggaattattatatttattattagtttaaaaaataaaacaattttcaattc

SEQ ID NO: 17803 - DNA, 431 bp, Glycine max
tttctggtttctttcgtcatgctctcagtattctcttgctctttaacttgatcttggtcttcttcggactagtatttattgcttacgatttggaatagtgacaagtaaagacaaatcacaactcagggtcatccaattccaagaatagagttttggttctgtgcttggtttcatcctcggaaggatttcccaaagcaaagtggtggtgccacgccacagtggtcaacttttgagtgcgtgtggtttggttgggttagccaaagtgcagagtgaagaagaagaaaaaatgagaatctttttatttttttatataataataaatatagtgacggaagaagaagaaatgattaaatatcgtcactattcataaacaaaatcagttaaatttttttatcttaaggatgccaacctaattagacggaaaaaaaaaa

SEQ ID NO: 17804 - DNA, 614 bp, Glycine max
cttattgtcttgtctcaaaatggtggatcaaatagaggaggtttcaatatagtatcttcaagtgccaaaagcagcattcatctggatggactattcaacattatctcatacgatttggtgccaaagctacagaatatgcttatgacacgtgactttaaggttgtgattgctgatgagtcacattttctgaaaaatgctcaggcaaagaggacaactgcttctcttccagtcataaagaaagctcaatatgcattattgcttagtggaacacctgctttatcacgaccaattgaactattcaagcagctggaagctttgtatcctgatgtatataggaacgttcatgaatatggtaaccggtactgcaagggtggagtttttggagtttatcaaggtgcaagtaaccatgaagagttgcacaacttgatcaaggcaacagtgatgattcgcaggcttaaaaaggacgttctttctcaacttcctgtaaagcgcaggcaacaagtcttcctagacttggctggcaaggacatgaagcaaattaatgctttatttcgagagttggagatggttaaagccaaaattaaggcagctaaatcacatgaggaggctgaatc

SEQ ID NO: 17805 - DNA, 678 bp, Glycine max
ggtttggtagggtgatttcacctgatatagcaaagaatttacttggggcagactttgctgcagaattatcaaagactactctcagtgagcatgataatgaaatgtcaaggaggctggtgaaggtacttgagaagttgagaaatacagatcgtgcatattaccagttgtgccaccttgtgaggcaaggtgaacagcccaaagagggattcctccttcttgcaaaccttgttgaggaccagatgggtggtaacagtgggtatgctgaatggatgctgcagatatctcgacaagtgcagcaatcataatatatagcttccctggctaaataagcaagtcaggtctgctatttgtctcacaagtgacgaccatttctttctgcattggaggtatattaaatctgtcctttggggtgcttggagaagcattcttgacctggctaattgatcgtgacctgtggagaagcatgcttttgagagattgttgattcatcctgggatgtatccgttaggtgaactctaccacagagattgaatttaaacgtgtgttcatgtttttgatatagagggaagaaagaaacacttttttggttactttaccttgtgagataagttgtcactttctgtcttatatgtccttttgtcgtcgtcttatggttgattctttcattgtagaaaaagg

SEQ ID NO: 17806 - DNA, 445 bp, Glycine max
cccacgcgtccgcccacgcgtccgatagaacccaatctgaaatatctagctctacctcggaaaccaagcatttgtgtgtattccttttcagggagttaagtggaagatggggttgtcaacagcaaggacaagcataggatcagtttgtgtttgtgccatctcaaagcctctccgccgtcactgccatttcctcccaacctctgtttctcctgtcttctcatgtcttcagaaaaagtgcaaattgaattttcaaaaaccagttcaagatgctgcagactcaaaaatatcatgtagcttagtgaatgtggaagatgggatagatgatgaagcatgtgaattagtcagtggagtggagctttcacttgaggagggtgatgaaaatatccgtgcttatctgttcaaggcacgtaaaaaataacaatggaactggcctattgcttctttc

SEQ ID NO: 17807 - DNA, 381 bp, Glycine max
cctcacacaaacactcacactctctctttctttcttcctgctgctacaatatggagcctctctcttccaccaaacacaacaacaatctctccaagccttcctccctccacacggaggctccgccgccggaggccagtcccctccggaagatcatggtggtggcctccatcgccgccggggtgcaattcgggtgggccctacagctctctctacttaccccttacgtccaactgctggggattccccacacttgggccgccttcatctggctctgcggcccaatctccggcatgctcgtccagcccatcgtgggataccacagcgaccgctgcacctcccgcttcggccgccgccgccccttcatcgccgccggctccctcg

SEQ ID NO: 17808 - DNA, 415 bp, Glycine max
atcgctacagagaaaccttgatgatgcgaaacatgaggcagaaatgctagcaagtgagcttacaactgccaaggaacacttgaaggaagcacaagcagagctgcaaggtgtgtcaaaagaattgacagctgctcttgaaaagaatgatagcctacaaaaagaattagttgaagtctacaaaaaggctgaaagcacagcagaggatttgaaggaacaaaaacagttagttgcttctctgaacaaagatttacaagcattagagcagcaagtctcaaaagacaaggagtcccgaaaatctcttgagagggacctggaggaggcgaccatatcactagatgaaatgaaccgaattgcgttgatcctttctggggaactactgatagctaatcctctggtttctagcctggaaaaagag

SEQ ID NO: 17809 - DNA, 407 bp, Glycine max
ggaactgaggatgctcatttcgttaaagagtgtcgcaagtgaaataagtggtgtctttgaggtgagaaataacacaggcccgtcttcggtttgaatatttatccatttgatttgcaatgattcttttttctcaaaatttcccattcttccatggttttctacattctcttggatttgggttcattcattaaaactgatgaatccattgttattttgtgtataaaaggttctcgaatggggcttatttgtttgtgtgtgattctatttttattttctgaggggtggaaagtggggcgaggtttggggctcacaagtatttgttatgtaaaattgtaaatgtcttcagacatccacgtttgaaattgaaactggtttaagttatgaaatattagccagtttgtttgagg

SEQ ID NO: 17810 - DNA, 572 bp, Glycine max
  unsure (1)..(572): unsure at all n locations
atgtctccccggatgacatactgcttaaacaaaagcttgacattcttgcaacaagccacccanacttaaagatgcaggagtgcaagaaatggccaacgaaaaattggagaggaggtgcaggttacatatcaaaggatgtggttgtgaaaggcttacccagtcctagtgatgatactctaatacttgtgtgtggacccccgggtatgatgaaagcaatatctggagaaaaggccaaggactggacacaaggagaggtttctggcatcctaaaagaggctggatacactgaacaaatggtatacaaattctgagaaatttagttttcttgcatctgaattccaagcacttgtccgctgcagaaatcgtgtactgaaatggttttctgataacaacagttaggtgcggttgaaaattccaacatgaaataaatcttgaattacagagcatagagaattattaatggtatcttgtattttcaaaattttgtggatatttaatcatgcggttgtctagcatggatgtcatcaatgggcatctgtgggggtaaatttacttctcccaccctattttct

SEQ ID NO: 17811 - DNA, 1583 bp, Glycine max
attgaacttagccatcattccctgacatgaagcaaaatctggtttggtcatccatagatacctctgaaaaccaaattagactcttgcaccgcaataatggcaataaaatactagcataatttatttgtgagtctcaaaaccttagcacacaatatatatacactgcatagccttggggtcttcaaaatcatcaattcaatggcttccctcatgagcaccatcctcatgcaaaggtcttcttctacttcacttgctgctgggaggttgttctccacaacaacagcaaccattattgattccccttcacttgctcagagaatcagagatttgcctaaggacctccctggaaccaacatcaagaaacatgtttctcagctcattgggaggactccacttgtttatcttaacaaagtcactgaaggatgtggagcttatgttgctgtcaagcaagagatgatgcaacctactgccagcatcaaagacagaccagcatatgcaatgatcacagatgctgaggaaaagaatctgataactcctggaaagacaactctgattgagcccacgtcaggcaatatgggtatcagcatggcatttatggccgccatgaagggatacaagatggttttgaccatgccctcttacacaagcttggaaagaagggtgaccatgagagcgtttggagctgaattaatcctcactgatccagccaaaggaatgggaggaacagtaaagaaggcttatgaacttttggaaaacacaccaaatgctcacatgctgcaacaattttcaaaccctgccaatactcaggtgcattttgaaacaacaggtcctgagatatgggaggatacaaatggacaagttgacatatttgttatgggaataggtagtggaggcacagtctctggggttggacaatatcttaaatccaaaaatcctaatgttaagatatatggagtggagccaagtgaaagcaatgtgctgaatggtggtaaacctggtcctcatcatataactggcaatggagttggattcaaaccagacatattggacatggatgttatggaaaaagttcttgaagttagcagtgaagatgcagttaacatggctagggtgttggcattgaaggaaggactcatggtagggatatcatctggagctaacacagttgcagcactcagattggctcagctgcctgagaacaaaggcaaacttattgtgactgttcatccaagcttcggtgaacgatacctatcatctgttctgttccaagagcttcgtcaagaagctgaaaacatgcagccagtagcagttgattaattccatgcataagctttgttgtggagttacattacatggagcaacctagttattacaatcctgttgtagcaaaaattgttaacatcatcttacagttcggccatagcaaaaattgtcaaacaaagctgtgttaattgggaaaaggttttgatacagcttacaataagagctgtgttaatgttttgtattgttctttatttttcatttttaatcgaaaaaggtataaagcaatcgaagtgttctttataaaaaaaaaaaaaaaagga

SEQ ID NO: 17812 - DNA, 420 bp, Glycine max
aataaaacttcttaggaatgagttggggcttgaagtttatccagccaaaaccagattagcggtaagtgacacagcaaagttagagtaccccaacttttctaatctgggcatagaagcccaacctggagagaatgcattggggtttcagacaaggaggcctggagttctagtaaggttgaaggtccccaaataatcattataccgttggttgcacaggaagtaagcgttaaatagttctattataactcacagaaattttgggccaatattagataagatatgccattttttttctcccaaccctgtatatattgcatttgggtatagctgcctatgtatctgcaataaaataggtgttacataatgaatgatacctagtaccgtggaatcaaatcatgtgcttaaatgaacagattcact

SEQ ID NO: 17813 - DNA, 507 bp, Glycine max
atttttccggaatagaatagagggggaagtgcggaaaccctagtggtagtggagttgggtgagaatgggaatagcaggtaaggttggggattatgctttcaaggcattcaccgccactcttggagtcgccactatttacctcactgcaaccttctctgtcaacgtttacagaggcctctcttggcacaatgctcaaaccaaacttgacaaacaagatgctgatgagcaagcaccgtgacttgatctcataagcccaccatcttaaatttcaaatcatgttgtgtagaaatataatgtgagtttctttcttacaatttttcacttaattagccaataattaaatggaaaatcacgagtaataacctagtaaattggcaaaagtagattgtggtttttgatagattgtacttatacattattatttgtttacgtgttatatggacttcctggaatcgacttctgatcatatacgacatacgatggtagacaatgaagttatattaagta

SEQ ID NO: 17814 - DNA, 555 bp, Glycine max
tatagaagagctctgacgtcgcacgcacgcgtacgctcggaatgcggctcgaggcactccatctcctagtctctattgtttttcccattccctttcttcacctaatcctgctcctatttccccactaatcacgcaggttttacctggcgtgggttggattgaaacatgtcaggtttgaactggttagtggaatttaatattttaaggtaaaccccatctctttgcggctatttgggggcttgtttccttggggagaaaggtcatccatgtcataggtggcatcccaggtttccaaattttttttaaagtttgattatttttaagaatatcttaagagattatgtctccaatcaggaaatgggttgttggaagatatgtatttcactcctttcatttgatcacatatttcatcctctgtaattgaaaaaaaaaacgagcttttttaggtggggtttgtactttgtactgtggcattgtcaggagtatcttgagagtgaacaattcgttaatggatcaacatagaggtgacgtattggatccggatcatgataggaa

SEQ ID NO: 17815 - DNA, 542 bp, Glycine max
tctcacacacagtttgtgtcactcttttttttaattttaattttttttcatttatttttttgcattttcttgtgttcttcaccttgagagggtcctctgttctgggctctgttttctaattggagcttgggcaccgaaacaacatgggttggttgtgttgcccagggaaatcaagccaagaatcggttgccgaagaagactaccggcgacaccctcggccagaaacccaccaatttcaccgccacagatagcgccaaagttgatttcagagtgaatgggaataaggaagatggttctaaaggtgatcaacttgctctggacgtaaagagtttaaatttgaaagaggaggcttctcaggatagaaaagataatggtaatcgggcacagacattcagttttaatgaacttgaagctgcgacgggaagttttaggttggattgttttttgggtgaaggaggctttggcaaggtttacaagggacacttggagagaataaaccaggttgtagctataaagcaacttgaccctaacggacttcaagg

SEQ ID NO: 17816 - DNA, 651 bp, Glycine max
tgatgctaacaatttaaaaatggaacacatcaccgtcttggaacaagctgttgatgtctatggcatggagttggaaaggttttggacatttatcagtgaggtctttgcaaatgcacctttctttatttcagcagaggttgctggtgcattggaagcaaggaaaaatgatgactacaaagagataaatgttccagctgggaaaacttatgagggtttactctctggtgatgctggaaactcatacattgcgtgggatttttcattggtacaaggcaagattaatatggatattggatttagcttggagtttgtaagtcctactggggaaaaaactctgatgttaccttacggccgttatgagtctgaccaagggaacttctgcacgttaatggctggaagctataaactgatctgggacaacacatattcaacgtttttcaaaaaggtgctaaggtacaagatagattgtatacctcccgtcaccgagtcagtgcagtctgactgaagcaagtatatgctagtcatttgttcattttaatcttattaaaaacaaatgttccaattactcatgtcaagattgatacacatttatttgtgaagaggaaaggaactgggaaaaattaatcttttatataaaaatgttattgttat

SEQ ID NO: 17817 - DNA, 944 bp, Glycine max
acgagggcataataaccaccccctcctttctttcatcatctcttcctcaaacttcttcataaatattgtttgaattgtttctaagcattagggtattttgcaaaagaacaagaagaaaataagaccatgagtacagccaggtttatcaagtgtgtaacagttggagatggtgctgtgggaaagacatgcatgcttatatcctataccagcaatacctttcccacggattatgttccaacagtgtttgacaatttcagtgctaatgtaaccgtggatggtagtacggttaatcttggtttatgggacactgcagggcaagaagattacaataggctgaggcctttaagctatagaggagctgatgtgtttttgttgtgctattctctcatcagcaaagccagttatgagaacatctccaaaaagtggatacctgagctgagacattatgctccaaatgtgcctatagtgctggtgggaacaaaactagatttgcgagatgacaagcaatttctgattgatcatccgggatccgcacgaataacaactgctcagggtgaagaactgaagaaaatgattggtgcagtcacttatattgagtgcagctccaaaacacagcagaatgtgaagacagtttttgatgctgcaataaaggttgcattgaggccaccaaagccaaagaagaaaccacgcaagaaaaagacctgtcctttcctctgatatttcattattcagttatctttcaccccaaatcatttatagagcagaagtcaagtccaatgctttttagtttttgtgatctacatatataaagagcctgtgggtttttggataatttctgtgaagaactttagattcctctcgaattgtaaacgatggcaaatgagcttaagtcttacattgttcaattaattattttattttgcagtgtctagctgcggctctgt

SEQ ID NO: 17818 - DNA, 448 bp, Glycine max
ggctcttgtaagcatttcctctgttttcaactgcaaaattataactgaatcttttaactgtgtgcgtgtgtgtgtttgtgtatacgggatgcaatgctagcaacaccctgatctgaaaggtgcaataaggttatgaatgaaaccagtgacaaaagctgtagatgattgtgttaagctatgagatctgagggcttcaaattccttttctccttccggatttcatccttgtgtctctttacttttgttgtctttaaattatatgtacatcaatgtttcttttattcttttttattttatttgtttattgttggctgtgttaattatttttcatatttagtggttggccttagcagttttaactgtactattgattgacctgcaaatctgcaatcatgcccaatgatgtatagagacttttgaatgaatggcttcatgggtttgtaatttt

SEQ ID NO: 17819 - DNA, 518 bp, Glycine max
ggtgatagataaatcaaaatggcttgagggggcttcgttatccatcttgctaaactttagtaccagagtttgcagactgagtggctcggtgagttagtgagcgaaaacgatagatagcattaccatgttggttggataactgaagtgagtgatgatttcaacttcaagcatggctttgctttctttactacccaaaacggcaccgcatgccctttccctcacaaacccttcctcttccactcccctcatcttacctttcagtttccaatgtttgcctcaccctcttccttctcctctctcttccctcaaagctactttttccgacggtggcgacaatttgcgcggcaagcccctggttcctcaggcctttgaagaagaagacgacgacgacgacaacaaatgggttgactgggaggacctgattttggaggacaccgttcctctcgttggcttcgtcagaatgattcttcattctggacaatatgacaatggagataaactaagtccagagcatgaga

SEQ ID NO: 17820 - DNA, 606 bp, Glycine max
atccgcggatcgcgtgggtcggacgtcgtgggtttagccatcccttcatatattgtgattatgttattatgtcaaattataactccaaggaaataaaacaaatacaatcaaagaatcttctttgctttctctcctttgcactttcctcctcttccttgtgatttttgtttgcatcacagggagaaactgagacacagaagatgagagagataattagtattcatattggacaagctggaattcaggtggggaattcatgctgggagttgtattgccttgagcatggaattaaccctgatggcaccatgcctagtgatacctcagttggtgtagcacatgatgctttcaacaccttcttcagcgagacgggatccggcaagcatgtgccaagggctttatttgttgatttggaacctagtgttattgatgaagtaagaactggtccttacagacaactctttcaccctgagcaattaatttctggcaaagaagatgctgctaataactttgcaaggggacactacactgtttggaagagaaattgtcgaactatgcctcgatcgtatcagaaaattagcagacaattgcactggtttgcaaggattc

SEQ ID NO: 17821 - DNA, 312 bp, Glycine max
aaaacaaatacaatcaaagaatcttctttgctttctctcctttgcactttccttctcctcgtgattttttgtttgcatcaaagggagaaactgggagacacagaagatgagagagataattagtattcatattggacaagctggaattcagtgacacctctgttggcattgcacacgatgctttcaacaccttcttcagcgagaccggattcggcaagcatgtgccaagggctttatttgttgatttggaacctagtgttattgatgaagtaagaactggtccttacagacaactctttcaccctgagcaat

SEQ ID NO: 17822 - DNA, 549 bp, Glycine max
  unsure (1)..(549): unsure at all n locations
cgatcgtgagtctcaacctgatgctgcactttacacgtgtttgatcactgggtttggaggaagcaagacatggatatggtatacaatctactgaagaaacaaaagaaaagaggttgtccacctgatggggggacctacaacgctttgataaaactgatgactagccaacatatgccagatgatgcagtgagaatatacaagaagatgagtcaaagtggcatcaaaccaacaattctcacttacaacatgataatgaaatcctattttgtgacaaaaaattatgaaatgggtcatgagatttgggatgagatgcatcagaaggggtgctgtcctgatgataattcctacattgtatacattggtgggcttataagacaggacaggtctggtgaggcatgcaaatatttagaggaaatgttagagaagggaatgaaagctccgaagcttgattataacaagtttgcttctgatatttctaagactgggaatgctgtcattcttgaggagttagctcgaaagatgaattttgntggtaagtttgaagtgtct

SEQ ID NO: 17823 - DNA, 757 bp, Glycine max
gataccaccctcaaataatcaaacttatcgtatgtatgacttctatctttgtttcaacaccaagtgcagacaaaaagcagcgaggtttttcataacaaaggagaatgaaggctttttcagttaaagttgaggaaggaagggaaggtaaaaatggtaacctttctgttggtccagtataccgtaacctcctctcagaaaatgaatttcctccaatggatcctgatttcagtaccacttgggatattttctgtgtgtctgtcaaaaatcatcccaataaccggatgctgggaaagcgtaaaattgttgatggaaagattggaccatatgtctggaagacatataaagaagtctatgatgaagttctgcatatgagttctgctttacgagcatctggttccgaacctggcactaaaattggaatttatggatctaattgccctgaatggattgtggcaatggaggctttgttctgctcaaagctttatttgtgtgcctctctatgacacccttggacctggtgctgtaaattttatcatagatcatgcagaagtagattttgtgttcgtccaagataagaaggttaaagagctttcaaatcctgaatgtaaatcctcaaagcgactgcaagccatggtgtgcttcactacattaacagaggaagagaaagctaaagccacagcaattggaatttagccatattcgtggcatgaattcttgcacttgggaaaagcgaacccaaaaagtacttttccacctc

SEQ ID NO: 17824 - DNA, 738 bp, Glycine max
gagatatgataaagacaataatttgtgggtcactattggaagattacctgaccgaatagtctcaatgaatggctgggggttagcctttcgtgcatgtggaaatcgcctaattgttattggtgggccaagagctttagatggaagggtaattgagatcaatgcttgtgtcccaggtgaaggtgtgccagagtggaacctgcttgctagcaggcaatcggggagctttgtgtataactgtgcagtgatgggatgctgaggcatttgcttttggtgaatagtgctatatggatttattctgaatggaattaacattcttcactttcaaggagagatgattctggctcttgggtaatcagcccacctttgggggtaaatatttactcctatttagagtaacagatacagttttagaaggttcacaaaactgagtcttttcattttaagttatcatgatggtttttcaaatgttggcacagtgacaggtgaataattagctcttggtacatgttggggttgcaatcacctttttcataagttcaattgaagtgttgcagaattgtaactggtctcagtttttgtcttctttgctttctttgcttgctgccacccctttttaaatatgtattctaattgtcttcagatcttcccaaaccctgtttgtgttgcctgttattccccttttcctccctaagttgcagaaaaaaatgagacataaggaataaccttttcttttttcat

SEQ ID NO: 17825 - DNA, 583 bp, Glycine max
cttgtttggtttgagacttagagtaattgagttggtcctccttccaactatttgagttgtttttcttttctccagtgccaattccggtcactctcttcattaataaattctactatatatatgaagaagtggccactgctgctgaatcagttattccttcaatcatgtctttctcttcttgcttttcccattctccattgacactcaaggctatgaaaccttgtggttctgttgggaaggggcaaaattttgctttccctatcagaagtaatggtgctgagctttgtgacggacacattgtgagaagtagagtcaacttaagcggagattggagtttcataggaggatccagaattattgtgaaaccaaaagctacaagattgcttcttcattatccaaaaaggggtcacatgcacgcttcatgcttcataggatctcaactcgctagcactgtatttacagtaggaacaatagcagtgctcccattttacacactcatggttctagctccaaaatctgaactaaccaagaagtccatggagagtagtataccttatgtagtgcttagcattctatatgcata

SEQ ID NO: 17826 - DNA, 444 bp, Glycine max
  unsure (1)..(444): unsure at all n locations
gcgtccacgcgtncgtccacgcgtccgcaaaatgtgggtaaaaccacattctccttcaccgacttgcccaagctgccggtgtacacaatccaccgttgatcccccttccggtgatggtccttcttcctccataacaatacacttaacaggactgatgaaagagattataactttggattgcgaggtttttgcggggaaacatactttgccaaccatgtagcagatcaagtagtagaagaggagggtcacttggctttgggcgaggagcatatcttgaactggatcgacatggaggagcacgcttgcagtcgttgttgaaggagcagatttgtatcgcggcgtttgctgatttgcatttggattggcttcaggtgaggaacagatctggatatggatcgatcgatgatcatgtgtttcttgcaaataaaattgttctgaagctat

SEQ ID NO: 17827 - DNA, 763 bp, Glycine max
gtgcacacgggaaccttggagaattctaaaatacaaaaaaaaaccggaagttgagattttttttattgttctttgcatttcttttgcacgttttctagaagtttttgactcactttgtggtgttgatttcatggccacctcttagtcccagcatcgctgcgtttttgtggaattttgcaatttggattaatgggtttcgacatttgcgttctgaatggaactcaaggtcaccttccccatgcttgaaagtaagagacaaagaaggttgaggatcttgcccgcttatcatttcagacaactcctatctatattgatgtagatgatgggagaacaaaggtcacaaatgaaagattgcttcagggttatcttgtggttccctgtgccaagcgatttattgttctctattcctttttgaagagacaccagtcaaaaaaagtgatggttgttttctcttcatgcaactcactcaaatttatttttttctcttcgtgttattgttgctgttgcgctagattcaattgtttcaggtttgtgctttcgcccctgctgtgctggattcaattgtcacatttggattcgattgtttcaacccctttcagatttgcaagacacatcatgtagttatttgtagctctatgttcctcagtttttaaaatacaccagtgacagggcagcctccgaaacaaacaagcatgcctccaatctattcactgtctaggaaaactccaatgaaaaaattcttcattctctgtttgatatactc

SEQ ID NO: 17828 - DNA, 483 bp, Glycine max
ctctggagctgttgtacaatgttaagtttacgcctcgtaatggagctggtgttattgttatatgccctactagagagcttgcaatacagacgcatgctgtggccaaggagctgctcaagtatcattcacaaactcttggattggttattggaggttcagctagaaaaatggaagctgaacgccttgctaaagggataaatttattggtaggaactcctggtcgtcttctagatcatcttcaaaacacaaaaggattcatgtataaaaacttgaagtgcctcatgattgatgaagctgacaggattttggaagcaaactttgaggaggaaatgaagcagattatcaagatccttccaaagaataggcaaacagctttgttctcggctacccaaacaaagaaggtcgaggatcttgcccgcctgtcatttcaggcgactcctatctatattgatgtagatgatgggagaaccaaggtcacaaatg

SEQ ID NO: 17829 - DNA, 409 bp, Glycine max
tttccacgcgtccgcccacgcgtccgtcttagtcccagcatcgctgcgtttttgtggaattttgcaatttggattaatgggtttcgacatttgcgttctgaatggttcgtgcactcacgaatacgtgaccacttgcagctaaaacattgacctcctgtgatcatttgaaggaatgtgtagtcgtgaatcaattgtgttgctgttggctggaaagtggtcactctgagttttagatgctattgtctttgctgtgaagttattttacttggtcctgattgtatttcaggaactcaaggtcaccttccccatgcttgaaagtaagagtaaggaaatacaactcctatctatattgatgtagatgatgggagaaccaaggtcacaaatgaaagattgcttcagggttatcttg

SEQ ID NO: 17830 - DNA, 505 bp, Glycine max
ccttcgcgtccgcccacgcgtccgcccacgcgtacgccgcgtccctctctctctcatctctctttctctctcttcgcccggaaagttggacaataccaccatcatagcgcatcatcatcagaattccaagagtgtcatgggggaacaaaaagttttatttttgttgatagagggttttactcggttgaaacgtttctgcttctgctcgcccttaagattgcaggtaattagaggaaatagtgtggtcattattgagatgatgttgtcgagaatggaggctgggaagaagggtggtggagtgaatgacaatgagaaaaatgacatatattgctttcctgtgatcatttgaaggaatgtgtagtcgtgaatcaattgtgttgttgtttgctggaaagtggtcactctgagttttagatgctattgtccttgctgcgaagctattttatctggtcgtgattgtatttcaagaactcaaggtcaccttccccatgcttgaaagtaagaa

SEQ ID NO: 17831 - DNA, 497 bp, Glycine max
ggcttgtagcagcaaatccagtaaattatggtcggccatgtcagctatcttgtgtagaggctttatctgctgctttgacaatatgtggggaagaaaaaactgcaaatttgttgcttgacaagttcaaatggggccatgcttttatgtctctgaatggggaattactgagggcctactccaaatgccaaaatagtgctgaaattatatctgttcaaaatgcttggctgtcacaagagagtcagattccaagggctcctactgacagtgaagttacgacacctgaaagtgaggataaaacccagaactcttccgattctgaagatgggcttccacctcttgaaaagaacatgaatcatttgagcatagtcaacagtgatgaagagagtgaatagattcattttacatctttaaggctgcggtactggaagtgatttgaagatgtgtgcaatgcagaatcgcttagtggcaaatcgttttggtaacaaaatatatgcgtt

SEQ ID NO: 17832 - DNA, 814 bp, Glycine max
cttccctttctttctttctttaaaggtcttgtgagtgaaggagagtagtgttgttgagaaattaaacgtctgcggaaagcaacaatgtcaggacctgagtgttgctcaaacccaccagttctgaaccccaatgcaggagctggccatgttgaaaaactcgctggtctcaattcctatctctccggttcccctaattccattgccattcttctcatctccgacatttatggctatgaagcaccaaatttgaggaatattgcagacaaggttgcagctgctggttattatgtggttgttcctgacttcttccatggtgatccatataatcctgagaatgctagcaggtctatccctgtttggttaaaagatcatggcacggacaaaggatctgaagctgcaaaatccataattgaagctttgaaaagtaaaggtgtgatggctattggggctgctggattttgttggggggctaaagtcgtggttgaacttgcaaaatccagactaatccaagctgccgtgctattacatccagcatttgtctctgtggatgatatcaagggtgttgatattccaacagctgtgcttggagctgagattgacaaaatgtcacctccagagcttgtaaaacagtttgaacaagtcctaactgctaaacctggggttgattgttttgttaaaatatttcctaaagtttcacacggttggactgttagatacaaccctgaagatgcagaagctgtaaaggctgcagaggaggcccatcaggacatgctaaactggtttgctaaacatcttaagtagaaatcttgttatg

SEQ ID NO: 17833 - DNA, 613 bp, Glycine max
gctagttattttttctgcagctaactaccaagcaaacacacagttagctctcgctccctggctgatggatggcggtgatcctaccaaactactcaaagtccatctagtcacctgcaccgactcggccgagttcgcgctcctgagctcggcgctgactcggacctcggtggtgggcctggacgcggagtggaagcccgtccgaagattgttcccgagggtggcggtgctccaaatcgcgtgcggcgactcggcggtgttcttgctcgacttgctgtcccttcccctctcttccctgtgggcccccttgcgcgaattgctgctctcccctgacatcctcaaactcggattcggattcaagcaggatttggtctacttgtcatccactttcgcctcccatggcggtttcgataaggttgagccatatttggatatcaagagtgtctacaatcatctacagcataataagaaacatgtacccaagcaaagtaagagtttgtcaaccatatgtgcagaagtattggggttttcactctccaaggaactccaatgtagcgattggtcacatcgtcctcttacagaagagcagataacatatgcagctatggacgctcat

SEQ ID NO: 17834 - DNA, 539 bp, Glycine max
atttcatttgagtatatctattatagtttactactcaactaagatggactcgaagaggaagatagcattacttatttcaggccttctggccatgctcattttaatctcctcagatgtggcagccagagaattgaaagaggtcactggtgctggcttgtctggtggtcgtggggtcaactatggtggctttggtggtggctcccctggctttggtggtggcttccctggctttggtgttggtagcttccctggctttggtggtggcggcggcttccctggctttggtggtggcggcggcttccctggctttggtggcggcggcttccctggctttggtggcggcggcttccctggctttggtggtggcggcggcttccctggctttggtggcggcggcttccctggctttggtggcggcggcttccctggctttcgtggcggtggcttcaacaaccctggcttgggcggtggcttcaacaaccctggcttgggcggtggcttcaacaaccctggctttggtggtgatggtggtggcatct

SEQ ID NO: 17835 - DNA, 514 bp, Glycine max
tcattttcaaaaaggcaatccaggaaaattacaatgagaagctcatgttcaaaacagaacttactgctcgacaagttaggaagctcactgaacttttccgaccagtagatgttcattcaggcttgcagcctgttcgctcccctccacgagcaataattcctgataggggtgctcttgatggtgttaggggatcatggtcccatttgcacagggaaagggatccccaaatcgaacggcaagaagaaattccccgtgatttatttcttactgagaggagttaccgagcttatggtctccaaggagatagaaggaatgccataccagcccctcaagttaatcctacactcgatccttatgagagggattatgaaagagagcaccttcatcacgtggaccctctctaccgcacaaaccgtcccttcatacagagaaagtcttcatggccatcttcatcatttgaatgagagtgaacaccagacctatttgcatggcggaatctccacacatgcaaaca

SEQ ID NO: 17836 - DNA, 784 bp, Glycine max
agtgaaggcaacaacatttgaggaagcaaacaaagggtggtccccacctttaacatctgtgtttggtcaaaaatcttcctggtctggtctggtctacccggatctaatcccgttttgaatccacctgtgtttgtttttcttctgcttcacacttctgatctcatctatacgtgagaatatctctaatagaatatcaagatttataatctttaataatattttggtggatcctgtgatatcactgtaaagatttttctttttcttttcaatcaaaaatcaatgattttaaattacttcttgtagatctcacaaggacttacttcctaatatttagagtgacccccatggagggttgggttaatttttcttttttctgattctcatgatgatcttgtaatgtttttctacaaaaacagttttactatcctggagatcaaacccctccctccaagagtagatctttaaaaaatctgtgtttgcatctaagataaggtgcaagaaagaggtgctatcagtctctcacacctcacctcgttttgcttttttaactttttgatgttaccatctttattccctttgggtatctttacaaagcacagcaaagaaattcactgagaaagagaaagcgaagggtgatgatggagtgaattaagtacaaatgaaagatgaacagaaaatattgaattgggtcaatcagatctaatctatagagtataagtaggtaattgacaaaggagtgttatttatggctacatataccaaaagcactatagtgaagggggtc

SEQ ID NO: 17837 - DNA, 507 bp, Glycine max
aattgttgtcgaaaggaaagctcgtggatggtgctagacaagttgattgacatcgttgtaccaaatcaaagaccatgtctgggatgcttccgggagttgaatgtgctcgaaggagacgcttgcataacagtgctggtgatgattccaccagcaaccgctctttctgtttgtatactaccaggaacctccaatcctcttcctctttactggaaagaagcatgttaaatcgggcatacccagatgaaaatctcggaggagcggcacgcgaagccaaacggagacttgatcagaagttcatggcacatatcaaatcagaaagccacaaaagaaaaggcctttttcatggtttgtggcgccaactcagatcttagtcttagggaatctagaagaagatcaaaatgataaatcctagaacagtaactggccttttattcttttttcttggtctgtaacgaaattatttattttcattagtcaaaagaaacagagatatgtgaaaactaaaca

SEQ ID NO: 17838 - DNA, 322 bp, Glycine max
tgttgtaccaaatcaaagaccatgtctgggatgcttccgggagttgaatgtgctcgaaggagacgcttgcataacagtgctggtgatgattccaccagcaaccgctctttctgtttgtatactaccaggaacctccaatcctcttcctctttactggtacctttaccttcctctttcgtccactttaatttctctctctgtctataatggggatgcgttattattttaatgaaatcaggaaagaagcatgttaaatcgggcatacccagatgaaaatctcggaggagcggcacgcgaagccaaacggagacttgatcagaag

SEQ ID NO: 17839 - DNA, 500 bp, Glycine max
aattcaccatccaaaaaggaacaaaccgcaaagttggaaaacctacatacattgctcgcaagtagcatctgcaaatcttccaactccaccatgttcggttccgcacgaatcctctccgacgtcactctccgcctccgtcaaaacctttcggttcacggtgtgcgcgtgcagaacataaacatcggaggcggtgtgggaggcgagatcccggacaacaagcgtctggtgtacgctcttcagaacctccacggaataggccgttccaaggcgcaacacatcgtcgccgagctcggcgtcgagtaacctattcgtcaaggaccttagcaagagagaactctattccattcgtgaattgctctccaagtatctcatcggaaatgatttgaaaaagtgtgttgagagagatgtgggaaggttggtgggcattcagtgctaccgagggattagacatgttgatagcttgccatgccgcggacagaggactcatacaaatgcacgca

SEQ ID NO: 17840 - DNA, 371 bp, Glycine max
tgcttatcttagtgctcctgttcaaggttgtttggatgaagcatgcagcttttacaatcggatgattcagttgggtgggtaccaaccccgtcttagcttacatacttccctcttcaaagctcttgtaagcaatccggggatcttgtcaaagaattaccttaagcaagctgagtttatatatcatcatttggttacaactggccttgatgtgcctaaagaaatttatgggggcctaatttgggtgcatagctatcaggattccataaatgaagaaaggatagcagaattgaaggaagcaatgctccgtgctggatttgaggaggatagagaggtgctattatcaatcttgagggcttgtgcacgggaatggg

SEQ ID NO: 17841 - DNA, 655 bp, Glycine max
ggcttttcatttactaggtggattacattcttggggacaatccattgggaatgtcgtacatggttggatatggtgcacgctacccgcagagaatacaccaccgggccagctcgcttccctcagtggcagcccacccggcccacattggttgtaaagctggatctcggtattactttagcccaaatcccaacccaaatgtgttggttggggccgtggtgggtgggcccaccaataacacagattccttccctgattccaggcctttctttcagcagtctgagcccactacatatatcaatgccccgctggtgggccttctttctttcttttcagctcactgttgactttgcaagaagtgtatctatgatttccatgtggtgcgcaaaattggtcaccctgcattgctcctaaggggaaaaaaaatggagacgagtgtcgctaatagtagtattctggtttgtgggggttttcttttcgtaagtgaagtgataggccaatttttgtatactatagtattttatgtaacggggcaagtctatatatagaatataaagtttatggtctagagttttaatgcatatggaattcacgtcctaacaaagcaggccaaaaaactggacttcgttgataataaaggcatgatcattgatcaaaa

SEQ ID NO: 17842 - DNA, 797 bp, Glycine max
agctgcgaacgcatctgctggacttcggactatcaaacgggttgaacaaactttgcaagatcttggggtcaatttgaagccaagggttccaacgaaagctgtttgtgcagagcatcttgaattaagaaaagaaatactaacttggcttaatctccagaagcaggtgcaatataaagaggctgaaggttcctcctttcgtgatgggtcatatggtgaaacacctggcacaccaaagcatttacatcgtggtggggatcaggatcgaacatttattccagattcaatgaatttcggagtggaaagggtaggcaaaaaggaccaaaagcgcatggcacctggagctccatcagctcataaaagacctagaaaactaaaggcctcagatctttagtttctcaggtggcaaccgggaaaggtgtttcaattcacagaattctttcaatcaaaattatgaatgttgtggaaggtgtggctgtgaactcaacacctgaaaattcggattgtggtatatctagtccaactgaaattcggttcacttcggtctaaaattttaaactaatgccactcttggtattcgatgtaaaaagaaaagtgggatccctgagatgagtgagatctcccatcttaaccatgtcctgagaagctggactttatttcttgtgctgctaaggatttgtagaattgtagggattccaggtacaaaagaggcatcttattggaatatgcatgtatataagtttgacatgggaatttcggatgactttgatagcttatgaagataattttattgtcattgt

SEQ ID NO: 17843 - DNA, 442 bp, Glycine max
cccacgcgtgcgatggtccttctgaagaggagattgcaagtgcttcattcaagatgtggtttgttggacatggtttcagcaatgagagtcttgctgcacagggaaacacaaaacctgacatggagattataacaagagtaatgggacctgcaatgggttatgtaaccaccccaataattatggttcagtgcgctctcgttcttcacggccaaagaaagaatctaccaaagggaggtgtttacactccagggattgtatttggtccaactgatctccaggaaagacttcaacaacatggaatatcttttgatgtcatctcgaaaaggtctatttcttcttgactctaaacagttcatccatttttggttggaagtgaaaaaactgacttgtcggagtgcagaaggtataataaagtattgagaaaatcttttttggtttatat

SEQ ID NO: 17844 - DNA, 435 bp, Glycine max
cccacgcgtccggccaatcgagctcacagtgttataggtaccgatgagttcatggccacagatctgtatgaagaggaatacaacgtgcttgatgacatctatgcatgtggcatgtgcttgctagagttggtaaccgttgagtacccgtatattgaatgcaccaatgctgctcaaatatacaagaaagtgacatctggaataaagccagcatcattggcaaaggtggctgatcttgaagttaaagcatttatcgaaaagtgtattgctgatgtgtcggaacgattgtctgcgaaagacctcttgatcgatcccttccttcagtcagattatgataatgatagtgtaggtcgatcttcaagatctcaaacccatcattcaggaaataatcctcataatcaagctattgctgaggataattctgttgagacaagtagg

SEQ ID NO: 17845 - DNA, 1006 bp, Glycine max
tagacatgtcatctccatctagacaatcaaaatctagaaacttaactttgaatgaggattctgttaatcattcaacaaaagcttctgtgtccaaaatttcatctccggcatctctgagttccttggcttcaaagtctatatcttacaaagaagtggctttagcaccaccaggaactgttttaaagccattgttggaaaaggctgacatggaaagggttaatgctggagatgagatatgctgcaatcctgctgtgacatcaataagtgaaggtagttgccaaagttccataactaatacagtttgtcagcatgatgaaacagaggaaactcatgaaaatgaacctcaacaagaaagttctggatcggaacttgagaaggtttctgatcaggcaaaatctacagcagaaacaaatggcagtaagctttcagctgcggccaaacctttcaatccaggaatgttgtccatgtctcaccatttaaattcagcttccttcacaagcatgtatgatacagatgttagtcaaggcatgcacgtggagactgtgcttccccctgctgttgctagggtcccttgtgggcctagatcgcctctgtattatagaaccaactatacttttcgcatgaaacatggttctactaaaggtcaaacctctatcagagaaagaagtggatttgggtctccaagaataatgaatccacatgcgcctgagtttgttcccagaaatgcttctcaaatagaagccaatgatgccaattcaaatgtttccaatgagcataactctttgtctgacataggcatgtcagaagaaaacaagctagatgaaaattttgttgaaatcaatgggagttccaacaaaaacagtatttctgaatctgagaagtccgagatagctaggcagatactgctcagttttctagggaaatctgtcaaggaaaatattgattctggggatgagtctaaggatggtgaatgaaaaattgacatcttgggaaaggtgttctgatg

SEQ ID NO: 17846 - DNA, 382 bp, Glycine max
gcttatcaatggcctgcggcattccattacgtctctccgctttcccaagcaccacaatgagggctacacttccccatttacacgcgccttctatctccagccgcccgagtcctctcagctccaactcaatgagtcaacccgccacaacgaatcacgcggatgttgtagtgcagtacgtggtgctccgccgagaccttatcgacacgtggccgctagggagcgtggtcactcaaggttgccacgcttctgtttccgccgtttgggtcaacatagacgatcctgtcaccgtcggattattgcagccccgattaacttgattccatgcaccaaggtacacttgaagtaaagggggaaccccagatcaaaaacttgtctgagaaac

SEQ ID NO: 17847 - DNA, 547 bp, Glycine max
ctttcgcgtccgaccacgcgtccgcccacgcgtgcgagagactctaaaacctttcgttcttttttccctttatttttcccgttttgccattttgcttttctccttccttcatggctgcttggcttattcttcttctcctttgcatggcaatgattcaatccacgtttgcgtcttcttcttcctcttcgtgccttcccgagctgccttcatttcgctacaatcttcaatcacaatgcccaatctcgatcccatcgaatccacctcttcaggtggatggaaattttgttgaaggaattttctctgacataaagaggacagagtatacgtctatactcttttatgcatcttggtgcccattctctcgtaaaatgcttcctcaatttgaaattctaagttccacgtttctccaagtagaacatttggttcttgagaaatcatcagctttgccaagcttcttttcaaaatatggaattcacagcttgcctgcaatattactagtgaaccagacatcaaagttgagatatcacggtccaaacaatcttctctc

SEQ ID NO: 17848 - DNA, 477 bp, Glycine max
  unsure (1)..(477): unsure at all n locations
ctctaaaccctgcacttgtgtatcccactgcgtgttgttcttgttcaatggcacgcctatttcgttccctcagaaaaaccctaaccctagccctaaccctaacacaccaatttcagcatcaaccatgcatttctcgaagaagttacatatccgacatgcgcaaatcagctttcgagggaaacatcttgagactcctccgcaacgagattcaatacgagcttcagtcctctcctcccaacaaccctgttaccaagtttaattcctttattgtggatggtcgagctggggagcgatggattacgttgaaaagacaatacgctgatgaagacattaaacttgaagtcaccatgtttgatggagctgttcctgctccaactccaactccaaatggtggtgtagttaattctgatgaaatgcagatgcacattactggaattgtcaacatctncaagggagaaggtcgtgtgttggaaatca

SEQ ID NO: 17849 - DNA, 543 bp, Glycine max
cccacgcgtccggctagttttcgtttacaccaccaccttcttcaagaggcttttgggcaagtcaaggttctttcttctttcctcggttcccctccctccaagggaagaacctcttcagatacaccctttttgccctgagaacacattcgaccacaccgcactcttccatttcacccataaagcttggactgcagtcaaagagtcaacgatccacaacatgttttcgaggggcagagggagtgacattggtggccatggcaacacaaacgtggctgaatgggaattacggccaggaggaatgctcgtgcagaaacgtaacttggatttgaatcaaaattctgcatctaaatctaccatcaaagtcaaagtgaagtatggctcatcctatcaccaaattcaaatcagttctcatgcaagttttggggaattgaagaaaatgttaacagaacctacaggattgcacgttcaggatcagaagttgatttacaagaaaaaagagagagactcaaagtcatatcttgatgttgagagggtcaaagatgg

SEQ ID NO: 17850 - DNA, 632 bp, Glycine max
gtattatttcccagtcggtttctacattctctctgtttttttccttccaccgactgctagttttcgttaacaccactaacttcaaggttggtagctttatcttccttcccctttaaattatactaatcttacttcccttaacttttcctttggtttttattcttccatttattgtattttacatcatgaagaagaggcttttgattttgggcaagtcaaggttctttcttctttcctcgtttcccctccctccaagggaagaacctcttcagatacaccctttttgccctgagaacacattcgaccacactctcttccatttcatccataaaacttggagtgctgtcaaagagtcaaagattcacaacatgtttccgaggggcagagggagtgacattggtggccatggcaacacaaacgtggctgaatgggaattaaggccaggaggaatggtcgtgcagaaacgtaactcggatttgaatcaaaattctgcatctaaattcaccatcaaagtcaaagtgaagtatggctcatcctatcaccaaattcaaatcagttctcatgcaagtttcggtaattccatccttgggcatttctctcttcattttatttaaaaatttaatctttacact

SEQ ID NO: 17851 - DNA, 486 bp, Glycine max
gcgagtgagaatcaaatacaagtaccctataaaaccctaaaaatccattagggttttctcgttcgctcttcgcacaccacactgatggcgtgcacaatcgacttccgctgtctcgacgagggtttcggcggcaaaacctacaagcgcaagagagagcagcagtcgcagcctcagcacgacgccgccgccgatgacgtcatcgacggcgcctctctgatggacaccgacgacgcactcccgccgccggcgaagcgatcggcgctgccatcgtcggagaacccggacaagccggcgttcgggcagccgagctacgacggcgtgatcgccgggagggtgtcggggcggaagtggaagccggtgcggcagcatagggcgtcggcggcgcaggtgagccggaaggggacgacgttcgagcagagggagagggagaaggtgataaagaaggcgtacaaggagaggatgatggagctgaaggaagagattcga

SEQ ID NO: 17852 - DNA, 1290 bp, Glycine max
taggacaccttgatgtggtgaaggagttgctcaactattccaacgctcagacggtttctaagaagaaccgatccggatttgatcctttgcatattgcagctagtcaaggccaccactccattgttcaggttttgctagattataatccgggattgagcaaaactattggtccctccaattctactccgcttataactgcagcgacaagaggacacacagaagtggtgaatgagcttctgtcgaaggattgtagcttgttggagattgctagatccaatggcaaaaatgcgttgcatttagcagctcgtcagggtcatgtggagattgtcaaagccttgctcagtaaagatcctcagttggctcggaggaccgacaagaaagggcaaactgcattgcatatggctgtaaaagggcaaagttgtgatgtggtgaaattgcttcttgaggcagatgctgctattgttatgcttcccgacaaattcggtaacacggcgttgcatgtggcaaccaggaaaaagcgagtagagatagtgaatgagttattacatctgccagacaccaatgtgaatgcattaactagagaccacaaaacagctcttgacattgctgaagatcttcccctctccgaagaggcatcagatataaaggactgtctttctcgatatggagcacttagagctaacgagctcaaccaaccaagggacgaactgaggaaaactgttactcaaatcaagaaagatgttcacacccaacttgaacaaaccaagagaaccaacaaaaatgttcacaatatttccaaagagctaaggaaactccacagggaaggaattaacaatgccacaaactcagtgacagtggtggctgtgttgtttgctacagttgcttttgctgctatattcaccgtgcctggtggggatgatgatgatggctctgcagtggtagcagcttatgctgcttttaaaatcttctttgtctttaatgctatcgcactttttacatctttggctgttgttgttgttcaaattactttggttagaggtgaaactaaagcagagaaaagggtggtagaggtgatcaacaagctcatgtggttggcttctgtctgtacttcggtggcgtttattgctgcttcttacatagttgtgggtaagaagaatgagtgggctgcaattttggttacattagttggaggggtgataatatctggagttattggcactatgacttactatgtagtgaggtctaagagaagctgatcaatgaggaagaaggagaagcaagctgccagga

SEQ ID NO: 17853 - DNA, 623 bp, Glycine max
tactgggtgcataagacgacagaaggggagagacaatcagtgtcccacgttgttgcgattgcgactctctcttcctacgataaccgtttcctctcgccggaaaaccgacattgatctctctctccggcgatccccgcccatccctccgccatgagttccggcgagctcctccacatacagccccaggagctgcagtttccctttgaattgaggaagcagatctcgtgctctttgcagttgtctaacaagactgacaactatgtggctttcaaggtcaagacaacaaatcctaagaaatattgtgttagacctaacactggagttgtgatgcctaggtctacttgtgatgtcatagtgacaatgcaagcccaaaaggaggcacctcctgacatgcaatgcaaggataagtttctccttcaaagtgtagttgctagccctggggcaaccacaaaagatatcactccagaaatgttcaataaagaatctggtcatgatgttgaagagtgcaagttgagagttgtttatgttgctcctcctcaaccaccatccccagttcgagaaggatctgatgaagattcatcccctcgtgcatctgtatctgagaatgggcattcaagtgctgc

SEQ ID NO: 17854 - DNA, 315 bp, Glycine max
tcgctttttcgtccgcaaagtgtcccacgttgttgctttgcaagtcgcgagtctctctcttcttcctacgacaaccgtttcctctcgccggaaaaccgacattgatctctctctccgcccgatccgtccgtccgccatgagttccggcgagctcctccacatacaaccccaggagctgcagtttccctttgaattgaggaagcagatctcatgctctttgcagttgtctaacaagactgacaactatgcggctttcaagtaacaatgcaagcccaaaaggaggcacctcctgacatgcaatgcaaggataagttt

SEQ ID NO: 17855 - DNA, 701 bp, Glycine max
cctcgagccgattcggctcgagcgagatcgagcaacactaatatcccccaaatcagtcaaatcactctcacccatcaagcccacagccaccaccaccaccaccaccatcgccgccactctcacaccatccaccaccacccaccctcgccgccgggaattgttgtccatcatcaccaccacatggttgctccctctgagcccggcactggcatcctcggacgaggaatacgtgaaggagacagaggaagtgatcaacaaagtgaggacgacaatcgtgatggacaagaatgaccccaacgtggcaaccgcggtggcggagttgagagaaacctcgaactcgtgggtggcaaagtacaggagggaaaaagcgcttctgggacgcgtttcctttagggacatgtattccgcgctcaacgctgtttctggtcactacattagcttcggaccaaccgctcccattcccgccaaacgaagggcaaggatcttggaggaggtcgacactgctgaaaaggcgcttctaaggggaagataattgagcaaaaaggttttttttttttccttctttcgcttcgttcttcttgtttcttaagtgttggtttttttttttttgtcttgtattgtattattattgcaatgtatcaaactcaagttacagtaatagaggctcgctttctccgtttattcggagaggaaaaaaaaaa

SEQ ID NO: 17856 - DNA, 456 bp, Glycine max
tccacgcgtcacgtctctctctcacatcatcatggcctccccaacactaataacccccagatcagtgaaatcactcacacccatcaagcccaaacccaccaccaccatcgccgccactctcacaccacccacaacaacctccaccgccgccgccacccaccctcgccgccgcgaattcttgtccatcatcaccgccaccacatggctggtccctctgagcccggcactggcttcctcggacgaggaatacatgaaggagaccgaggaagtgatcaacaaagtgaggacaacaatcgtgatggacaagaatgaccccaacgtggcaaccgcggtggcggagttgagagaaaccttgaactcgtgggttgcaaagtacatgagtgaaaaagcgcttctgggacgcgtttcctttaaggacaattatttcggcggctaacgctatttctggtcactaca

SEQ ID NO: 17857 - DNA, 367 bp, Glycine max
cccacgcgtccggaaagttttatggttaaaccacaatatctttttttttttttttcttcttgttcgtctttctcgtagcgtatggaaaaccaccaaaatcacaaggtagaaccagtaccggacatagagaagaaccaccaccaccgccaccaacagcagcagcagcaacaacaccgtaacgtcgcgtggggcacctgggaggagctgttgctagcgtgcgccgtgaaccgccatggcgtcaaggactgggacgccgtcgccatggaggtccagtcgcgcaccacgcgcctcctcgccaccgcgcgccactgcgagcagaaatttcacgatctcagccgccgattcggcgaccaatgcaacgacgacg

SEQ ID NO: 17858 - DNA, 648 bp, Glycine max
cccacgcgtccgcccacgcgtccgcgaaccccctcctctccgggattctgacatgcggaagacggtgatggacttgttcttcgggcaagcaatggaaggggaggtgcaaaagaagatgagggagacaggagagtggctctccaccaatgctgagcctagaattacttcttccagaaaaggaattttaatgtttatgtttcaatggattctaccaatttgggctatattactcctagtagcctttggagccatcaagttaccattcaacagcccttttcttgatgatctgctcatgtgagcataggtccatacatgcagatggtccaaaagccaaaatttaacatgtccgacttcaatgagttagcatcccctctagtgattggaaaacactagtagaaaagagaaaaatacaaacaatttgtgggtcccaccatgttggtgggtcccacattgtttgtgtctcctactggtattttctagtatcaaagatgagttgttttcgggttcaattacctgaacactgtatagattttccctttttgtgataactgtgtatagatgtttcattgctctacaaatgcaggtagatttccatacaattatatacttggtaatatcttgcagtgtgtttggatgtggtatttaaac

SEQ ID NO: 17859 - DNA, 409 bp, Glycine max
cgacccgcgcgtcctctcctactggcctttggagccatcaagttaccatttatacagcccttttcttgatgatctgctcatggcagcttatgacaaacaccaggcccctcattcttgatcatctgctcatttgagctgtccatttatttatatttaataacataacattctcaagttcttgtttttgttacgtccatacatgcacatggtccaaaagccaaaatttaacatgtccgacttcaatgagttagcatcccctctagtgattggaaaacactagtagaaaagagaacaatacaaacaatttgtgggtcccaccatgttggtgggtcccacattgtttggtgacttctactggtattttatactatcaaaatataattttttttcttatttcaattaccttaac

SEQ ID NO: 17860 - DNA, 699 bp, Glycine max
ggatcgtgttgttgtgtttgctttggagaaacgaggtggtgttcgttgttggcgaatactcccactcacgcgttcgtggttgcaggctctaatcagatcccaagtggtaatccgtgagctcagtggaatgattctttcccgtgctcccaagcaatgtaattttgtggaatggcgaggacataaagttgtttataaaaggtatgctagtctctatttctgcatgtgcattgatcaagatgacaatgaattagaagtccttgaaataattcatcattttgtggagattcttgaccggtattttggcagtgtctgtgaactggacttaatattcaactttcacaaggcctactatatactagatgaaattctaattgccggtgagcttcaagagtccagcaagaaaacagttgctcgattgatagcagcacaggattcgttggtggagaatgcgaaggaagaagtcagttcattaagtaatataattgcacaagccactaagtgaggaaaacaaatgtttcagtttcctgctcctcatatagtatgtcgaattgtcaatgtccgattttactgttactaagttgtctttcttgatgttgtctttctcacatatcatgtttgtgtatgcctgaactgtattacttgttgtggtgacattgagcccggagggttacatttaccccgtatgttgttttgagattg

SEQ ID NO: 17861 - DNA, 374 bp, Glycine max
gattcatctttttgttcgtgttgtgtttgctttggagaaacgagttggtgttctttgttggcgaatactcactcacgcgtttgtagttgcaggctctaatcagatcccaaatgatcaactttgtgcttctcattagtcgccaagggaaggtgagattgacaaaatggtactcaccttattctcagaaagaaaggagtaaggtaatccgtgagctcagtggaatgattctttcccgtgcgcccaagcaatgtaattttgtggaatggcgaggacataaagttgtttataaaaggtatgctagtctctatttctgcatgtgcattgatcaagatgacaatgaattagaagtccttgaaatgattcatcattttgtg

SEQ ID NO: 17862 - DNA, 515 bp, Glycine max
gtcacttacagagcagaggaagaatggcagatggatcatcaacaccagcaacaccttctgccaaagtttcagccatcttcatataccctattaaatcatgccgtgcaatttctgtttctcgtgctcctctcactcctactggatttcgatgggatagacaatggatggtggtgaattcccaagggaggatgtacactcaaagagttgaaccaaggcttgctttggttgaggttgaattgccatctgaggcatttcttgaaaactgggaacctacacaagactcctacatggtggtgaatgcacctgggatgcaacctctcaaaatatgtttgagccaacaagggaaggaggtagcaaatgctgtctcagtatgggaatggactggatctgccttggatgagggagctgaagcatcacagtggttctcagattatttaggaaaaccatgtcaactggtccgcttcaattcagcttctgaagttcgaccagtggatcctgattacgtcaagggacaa

SEQ ID NO: 17863 - DNA, 552 bp, Glycine max
cggacgcgtgggcggacgcgtgggcggacgcgtgggtgttgctggaaaagaaagaaaaaaacaattttagtgtagcggcgtgtgtttggtgcaatgactttgaggtttgaatcagtagtgtgggctttaaaccctaagctaagtcaccaccgtttctccatccccaatcttcgtcggaatccccactctctattcgcacctcctcctcctcctcgcattcgcacttccttcctcgcattcgaagaaggaggaggaggagaaatcgaaccggcgaaaaacgaatacaacaacgattaccgtaccggtgccgaagaatcgtggaagcaagctctggacacgttccgagaacaggcctcgaagattcgagatgcttctcaagaagcgtacgagctgtactccgagaaggcgattgcggtgttgaaggacgccacggaggagctgagagtggccgccaaggaaatcggcgacgaaggcaaacagtatctcaccgtagttgccgagaattcaccggaggtcaacgaactcgttgaatcattcacctcaccaattcgt

SEQ ID NO: 17864 - DNA, 419 bp, Glycine max
cttgattccctttaacattttgataatcatacatcttggattctacaaattctcatcatcttaaccatgttacattagaacacccgaaattaaagcatgcagttgcttcaagaataatttggagggactagtgtggaaagtagacacagaaagaaatgccatcaacagtgagggatcacgggattgttcgaaggatggcaagtcttcctcgaagcataatgggagggatttcaagagcaatgggggatggaatgggctttataggaagaggaagaagaagaaatcagcacacaaatattcctttgcagcctcaagaccatcatgttccacaaccacatggtcaagtagtagttcaagatgaatggagttttctagagagttttgagtagcaatttggcaccaaacaccctttcttctat

SEQ ID NO: 17865 - DNA, 452 bp, Glycine max
aaaatatggtgcattttcaggttctcacatggaaacgaaggacgacagtgctgaaaaagaagaagcttggtcttctcatgaagacgaaattcttttgaactatgttcaagtccgtggagaaggaaattggagaaaccttcctaaaagagctggcttgaaacgatgtggtgagagttgcaaacaacgatggttgaactatcttaagccaaccatatctagaggaaacatttctttagatgaacatgaactcataatcagactgcataagctcttggggaatagatggtctatcattgctggacgattaccaggacgcaccgaagaagagatcaagaactactggaatacctatttgagaaaggaggcagaagagaaccaaaacaataagaacgaatttccaagcacaagtatgacaacaactagcatgtctagtgttcaatctccatggtact

SEQ ID NO: 17866 - DNA, 657 bp, Glycine max
gaattcaatacggatttgttgtgcgcgctagatatttggagtttggacgcagaaattttcttaaattattgtagggaatgaaattgaaagggaaaaaaaaaatcaaaattatcttgagcggtaacacagagcagagcacggaaaggaaaaacctcggtagagttgagggtttagcggcagcatagagaatagagatagagcgaattgaaactctctaatggcactctacacccatctcatctctttctcttcttcttcttttcttcattcaccttcgcctctatgtcttccaaagcctctcttcccttcttttactttgacagtgggcaattcaacctcccacaccaccagtctcgccgttcgctcctcttattccgaaatgggctcttcccctgagcccatcaatttcaggaagccagggattccgtccatgtctcacttgagactctcaatgaacgaaagtagcaagccatcatttaaatggcgaagggttttgctcaaagtcagcggagaagcacttgctggagaccactctcagaacattgaccctaagataaccatggccattgcaagggaggtggcagcagtgactcgccttggcattgaggttgcactggtcagttggcgcgggtaacatcttccgtggatcctcctggg

SEQ ID NO: 17867 - DNA, 1904 bp, Glycine max
accttatctctctcctcactccctcccctcacatagaaaaacaagcacgcacgcacacgcatacacacacacactctctcttttccactccctcttttggccgccagaacaaacaaaacccacacttcactcccatccaattccaaacccacgttgttgttggtgcatggaatgaccgagtaccggatgaacctgtggaccgacgacaactcctccgtcatggaggccttcatgagctcctccgacctctcctccctctggcttgccacgccgcagtccgccacctccaccacaactccaggcacggcaaaagcccctcctcctcctcctcctcctccgccgccgccgggcagtcccagtccctcctcaaccaggagactctccagcaacgcctccagactctcatcgaaggcgcctgcgagagctggacctacgcaatcttctggcaatcttcctacgactattcctccggcacctcccttctcggctggggagacggttactacaagggcgaggaggacaaagacaaagtcaaaaccaaagcccccaaaacgaggtcgtccgcagagcaggaccatcgtaagaaggtcctccgcgaacttaattccttaatttccggcccttccgcttcagctgacgacattgacgaagaagtcaccgacaccgagtggttcttcctggtgtcgatgactcagtccttcgtcaacggtagcgggctgccgggccaggctttttttaactcgagcccggtctgggtcgccgggcccgaaagactttccgaatcggcctgcgaacgggcccgccaggggcagctcttcgggctccagactcttgtctgtataccgtccgcaaacggcgtcgtcgagctcgcctccgcggaggtcatttttcagaaccccgatctgatgaacaaggtgcgtgatttgttcaacttcaacaacaacaacaacaacaacaaccctgaaacgtgttcctgggcgttgaattgcgttgccaccaccgatcaaggcgagaacgacccttcctcgctctggctcaaccctgaaatcaaagactcctccaccgtctcgccgccgaattccacggttaataagacgatgcatttcgaaacccctggttccagtaccctaaccgaaacccctagcgctgctgctgctgttcacgtccccaattctaaaagccagggattcttcccgagggaattgaacttttcgaattcattgaaacctgaatccggtgaaattctgagctttggggagagcaagaagagctcttacaatggggctttctttcccggtgttgttgcggttgaggagaacaacaacaataacaagaacaagaagaagaggtccccggtggtttctcggagcagcattgacgatggaatgctttccttcacttccctgccggctgcaaatataaaatcagttaacggtgcttgtgtcggtgccggtgattcggatcactcggatctggaagcttccgtggcgaaacaggtggtggagcccgagaaacggccccggaagagggggcgaaagccggccaacggcagagaggagccgctgaatcacgtggaagccgagagacagaggagagaaaagctgaaccaaagattctatgctctacgagctgtagttccaaatgtatccaagatggacaaggcatcgttgttaggtgacgccatatcgtacataaatgagctgaaattgaagctcaacgggctggattcagagaaaggggaattggagaagcaattggattcagccaagaaggaactcgagctcgcgaccaaaaaccctcctcctcctccagcaccaccacctggactacctccatctaataacgaagaagcaaagaagacaacgaccaagctcgctgatttggagatagaggtgaagataatt

SEQ ID NO: 17868 - DNA, 500 bp, Glycine max
cctcgagccgattcggctcgagattttatttgcctttaaaattcaaacctttcagcaattataattctgaattattgactcaaattaatgtaggtgagcattgttatggaacaaatgttgcccctgcttcatacctgtggcttacctccagaagatgtagacttcataaattctgatgggaagacaatgaacaggctgttgctggaggcaaatccacgaatgaccctctttactggtagttcaagagtggcagagaagttggctgttgatttgaagggccgtgttaaattggaagatgctggatttgactggaaaatactgggccctgatgtgcatcaggaagattacgtagcatgggtctgtgatcaggatgcatacgcatgcagtggtcagaaatgctcagcacaatcattgttatttatgcatgagaactggtctaaaacttccttgctatctaagttgaaagatcttgctgagagaagaaagttggcaaacttgac

SEQ ID NO: 17869 - DNA, 473 bp, Glycine max
aaggcagctcatatgctatcacttccttagtagatatatctccatacataagatatctctactaaggcagctcatatgcaatcacttcctaaggtttcggatttctttacaaagttaatactatgagtttctccaaagagttaccagcaggctggatggggaagtttatgtgtcacaaaagtttctagaggatttttgcggggatcaggttcgtttcctggcaaggtcttttggtgtccctggaaatcatcttggacaacaaagtcatggttttcgttggccatatggtcccgtggccattattactccttttaattttcccttggagattcctgtccttcaattgatgggtgccctttacatgggcaacaagccagtccttaaagttgacagcaaggtgagcattgttatggaacaaatgttgcgcctgcttcatacctgtggcttacctctagaagatgtagacttcataa

SEQ ID NO: 17870 - DNA, 528 bp, Glycine max
ccgtaacctcaaaatgaaagcgcctgtggcatcaaccaagttagttattaaaaagaaacaaatttcaccagacactgaaggttcttgcaaactgaagattgttagttctaaggcagattcaactggtgctagaggtattgtaatatctggaagttcctcctttatggggcctaatctagtcacagaagtaccagaaggtgaagatgacagaaaatttagttctccacagctactgcattcatattctgacaagagaagttatgatcatgtccattaaagggacaagtcatataaaggtaaagtcaatcaagatggttttgaatcttttgattgtgatacggaagaacatacttctgttttcagcaatccacatggttcaggaattggtttgtttgatgttacaagatgatcctatgcgtcaagcacgatctatatggatgaagaccaacttctgaggagccaagcacttcaaacagaagaattatacattcgacagggtcaaagcttcaggggcaaacctgaagaggg

SEQ ID NO: 17871 - DNA, 846 bp, Glycine max
aaaaccatccactgctagtacttcggttgaaattaagggaactgtcaatcaaggggaaactgtattggatgttcctgacgtgcaggggggaccagagagcagcaagttgacagatgatgatgttccttctgctgaagatgatatttctgaaaatgtgggaaccagtgcaactaatggctcctcaacagctcttgtggatgatgaaagtaacctagtcagcaatgtttctagcccaacgacaggtatagatagtgccattgagaaggaagaagaggttgcttctggaagtttgattcctgaagaggatctatctactgtaaatccaataattgaagaagttactcagacagatgtcacaaacgatttgaaaactgacacacctgttgaaatagctaatgaaaatgtaatagaaactggagttgatcaaattgttacggaagatgagaaacaatcacaaactcctgatgcaattgaagagtttgcagctgcagtactaacagacagtgatgtggttgaacctagccctgataaaaatgatacaataacagaatcagatattacatcgagtgcaccagctctccaagaaagtgcagatgatgatgttggagctattactgaaaacattgacagcgatactagtttgggtggacaaagtgacgagttgtctcctgtgggaagcttgactacagatgcaacagaagatactgatcaggttccttctcctgaaagttctgccactgaagtagtaaaaacctccattgatgatcctgaagaagaagcaaaaaaacaaactccggctacagagaatgaaaattcttttacctcacaagttgaagacaaagaggt

SEQ ID NO: 17872 - DNA, 631 bp, Glycine max
cgtagaggaaccacaccaatccatcccgaacttggtggttaaactctactgcggtcgcggcgccgtgggcgaggccgcgatgcggcgcctcgaggaggcgctgcgcgtggcggaggaggacaagatggcgaaggaggccagggacgtgaagctcatcatggcgcagatcacgtttctgcagaagaacgtggatgaagcgttagggatttataatcagctcacgaaagaggatcctagggatttcaggccttatttttgtagaggcatgatttatagcttgcttgataggaatgaagaagctaaggagcagtttgcaaaatacagggaattgagtccaaagaagtttgaggttgatgggtatttgagaacccctttgtcaaggatgaagctgtttagcactgatgagagttgagaaatagtaataataaatttgcggcaattggaataaggatgcaaaaaccgagttaaattcttttgcattagctatctatgctatattgctatgccactcttgaaaagatgggtgggtgtaaaagttgtttgtattaatagagagaatgatagagaaataatgattattgttgagttctggtgaattgaactcagtaacagtggggctgcttttgccttt

SEQ ID NO: 17873 - DNA, 529 bp, Glycine max
catcagttgagtgaagcagcgtcactgcatcagtctggccatggcatttgccacgactcattttttactatcgcgcccaaccgcgtccacctcaacgctcttcttactctcttcgaatctcacacgacccaaacctgcttcgcttccttctcgattcttccattgccgatcgaaacgcctcgtcttgacgcctcgattcgccgtgaaagcctgcgcggtgaacgtcgaggagaagaatgtcgctgcaatatcgggagagtggggtaaggtttccgcggtgttgttcgacatggacggcgtgctttgcaacagcgaagagccttctagaagagctggcgttgatttgttcgccgagatgggcgtcgatgtcaccgtcgacgatttcgtaccgtttatgggaactggagaagcaaattttttgggaggtgttgcttctgttaagggagttaaggggatttgatccagaagctgcaaaaaaaaaggcttttggaaatatatttggataagtatgcaaaaaccagattctgga

SEQ ID NO: 17874 - DNA, 487 bp, Glycine max
ggctatctataaacaaaaggggattaaataaaaataaaagtaagtgtgttgaagaaataataaggtgtggttggggttgggagttagggtagaatcaattgagaatggggatccgattcgtactgatggtgaacaagcaaggccaaactcgtcttgctcaatattacgaatacctcactctcgaagagcgacgtgccctcgaaggcgaaatcgttcgcaaatgcctcgcccgcaacgaacagcagtgttccttcgttgagcatcgcaactacaaaattgtatatcgtcgctacgcctctttgtttttcctcgttggagtcgacgatgatgagaatgagctggcaattttggaatttatacatctcttggttgaaactatggatcgtcatttcggcaatgtgtgcgagctagatattatgttccatttagaaaaggcgcattttatgttggaggagatggtcatgaatggttgtattgtggagacaag

SEQ ID NO: 17875 - DNA, 922 bp, Glycine max
ggaaggagagggagtgctgaggttgaagcgggaaacaatggcaattcccatgttgagggctgcaatgatttctcattctcaatctcaaccactcattcattccatatctgctatttatgaaaccgctaagaggaggaagagagtggtgttctcttcttcttcttcagaacttaaccctgtaattcggtcagaggtatcattttgtgttgggacttgcctcattccacatccaaaaaaggttaacacaggtggggaagatgctttctttgtgagcaactataatgggggagttattgctgttgccgatggtgtctctggttgggctgaagaggacgtggatccttcggtgttccctcgtgaattgcttgctaatgctcccaattttgtaggagacgaggaggtgaactatgatcctcagattcttattaggaaagcacatgccgccactttctccacaggctcagctactgtcatcgttgctatgctggagaagaatggaactctgaagattgctaatgttggagattgtggattaagactcatccgtaatggtcatgtagttttttccacttctccacaagagcactactttgactgcccattccaactaagctctgagagggttggccaaacataccttgatgcagcggtatgcaatgtggagttgatacaaggagacacaattgtcatgggatccgacgggcttttcgataatgtttttgatcatgaaattgcgccaaccattgttagatacaaagatgttgcagaggctgcaaaggcattagctaacttggcaagcagtcatgcaatggattcaaattttgattctccctattcgttggaagccaggtctaggggttttgagccacccttatggaagaagattcttggaatgaagcttacaggtggaaagcttgatgat

SEQ ID NO: 17876 - DNA, 350 bp, Glycine max
gaaggagagggagtgctgaggttgaagcgggaaacaatggcaattcccatgttgagggctgcaatgatttctcattctcaatctcaaccactcattcattccatatctgctatttatgaaaccgctaagaggaggaagagagtggtgttctcttcttcttcttcagaacttaaccctgtaattcggtgagttacacttcattttctgattctttttgtttttttggcctttcttaaacatggtttttggcttgctttctgttgctgaggttgtaagtcagaggtatcattttgtgttgggacttgcctcattccacatccaaaaaaggttaacacaggtggggaagatgc

SEQ ID NO: 17877 - DNA, 771 bp, Glycine max
ttttcgcgtccgcccacgcgtccgcttttggcagctttttacacccggttgaaacagcagcagattctgctccatttttgtcattgcttgctccattaaattctggtttgcggctatcatattggaaagcaccatctagtgcctcctctgttgaatttggaattgtccttggtaatatttctgatgttagtgggattatattgattgtcagcccatgtggctactctatggctgatgctccaattgtgcaaatttgggcaagtaacaaaatacacaaggaggaaagatcattaatgggaaaatgggatctgcaatctatgattaaagcttcctcagaattatatggacctgaaaagtcaggaacagagcataaagtgcctagacacgtaaagtttcccttcacgaactctgttcagtgccgcataatttggataagtttacgccttcagcgacctggttcaagttctataaatattggaaatgacttcaatctgttgtctctagatgagaacccttttgcacaagaaactcaacgggcctcattcggaggatctgctgagagcgaaccctgtcttcatgccaagaggattttagttgttggaagccccattagaaaggaatttgatcttaagccacaacaaagctctgaccagttgaccctgacagggtggttggaaagagctccacagcttagtagattcaaggttccaattgaggctgctgaaagattgatggacaatgatcttgtcctggagcagtatctgtctcctg

SEQ ID NO: 17878 - DNA, 402 bp, Glycine max
  unsure (1)..(402): unsure at all n locations
agggatctctggggccactttccatctgatgttgcnaatggagctcagtaatgtccttaacaatctgaatggtacanaagaatccatcaaaggtgcacaactttggttcctgccgagatctccatttgcaccagccctagcagaggctcttagaggtagggtctttgcattggatgaagttgagagacagtttcacattatattcctcgccaatgacatactttttgacagctttaatcggaggacaagcagttgtgaccttgacaatgaagctcttgcctttaaacctgttttaggctccatgcttgcaagaatttatcattatccacaaagcaatgagggatacaggaaaagaatgccgccaatggtggagttctggtcttcttagaaagtgttccatca

SEQ ID NO: 17879 - DNA, 826 bp, Glycine max
cccacgcgtccgaaaagacagaacagaagaggttctgaaagactgaaactttcatggaggtcgtctatccaatccaatctgttatagttccactttctcccacactacacattaacacatggggctcgactcaaatgataaatgttgcattttacaattgcaagagaccctgagctgaacaacacatgtctgtccctgtctctgtttctgtctctggttcagggttacttagttttccttcaattcagcgaccacattccaaccctccacccaaacacgccgtacttccttccacttcccgtgaacccgacactgatactaaatacttgtgtctatgagcccatttcaaatcatagctagccaagagctaccttaccaaactttccctttccgaggcttaggtcaccgactcaccggacagcaccgcaccgttgtcggatggattgcaagtacctaatctgatcgtcgcctattgaatttcgatccgaagcaattcatttcagataatttgttcgtccccttcgagtttcagaaaaactatatatattggtggacacgacacgacacgacacaacacaatgcaatgggaagctccaaagttcaaaggctttccgggatgcaaaagcaagtacttagcctcatacagagggtttctgcgtgcagcacgttccaaatcggaggaagaacggtgcaagatagagtcaattatatcgcaagagtttcggcgtaatgcggaggatgtagatcgcaaaaattttctctacattgagtacttacttcgccgtggcaacaaacaacttgatcagcttaaaaaccctggtactac

SEQ ID NO: 17880 - DNA, 516 bp, Glycine max
caacccctctttcttcttcttcttctctctccctctttgcaagaaggaagattcagatgtgagatcactgttttccttcttctccttctttctttctgcaactctattgttattcattcaatcaacacaatatggctgccactaataacattcatgggaacactgaatctgctcaatccaacattgctcctcccactaagcagcctctacatccttctaagactgttgattctcaatctgtactcaaaaggctgcaatctgaattgatggctttgatgatgagtggagattctgggatatctgcgtttcctgaggagcacaacatattcttctggaagggaacaataacaggaagcatagatactgtgtttgaaggcacagagtataagctatcactctccttccccaatgactaccctttcaagcctccaaaagtcaagtttgaaacaacctgcttccaccccaattttgatgtgcatggcaacatatgcttggacatactccaggataatggtc

SEQ ID NO: 17881 - DNA, 598 bp, Glycine max
acgagacaaaatcaagaagtttgtgttacacaccaacttccctggtcatgctgatttcaattcttacattaagtgcaactttgttgtctatggctcagattcagtagggggatctttccaggaagtaaataacagcaaacagagggttattacacctagcaccttatgggaacaagttaaggaaatacttggggattgtgggcgagctgccatccaaacacacggctcggcaagtaacccctttggttctactcttgtatatggttatcaaaatattgcctttgaggtcatgaagaatggttatattgcaacaataactctcttccaatcatgatgatggcgcttttggttactcaatcttctccatattgttccaagatttcccaaggttgggtatggaaattcaggggtaacaggtagggttgtacgggcactgtgtataaatattgcagctatccatcatcatcattgtcgtggcaaggggctatgaaaattgtacagctgtgtaacaaattgtacataaaaatcctgttaaattatgtaattttctaacattttcatcttccacaaagaaaatgcaataaattccttttgcttt

SEQ ID NO: 17882 - DNA, 566 bp, Glycine max
  unsure (1)..(566): unsure at all n locations
cccacgcgtccgagaattcatttatcatatcttttttaaaatttttatgattaaatttggataaacttttcaaactctcacactttttggactatttatcgtttctacgtctgtgtgagaaagattgttgtattattagaagtgtgagagataacagcgatggcgaggcgaggcgagactcggaacgagtcgttattgactcgggcggttgcggcggtcttcgccttcgtgagacacgccgagtttgagatcctcttctttcttttctttttcatcgcttatcttctattcaaagacatcacatcaaggcctgactataatcaaatgttcgtaaagaagcccggtggaccagaattttggcctttttagaagagttggtgattggtcaggnttgatgtctttgtccataggggtattcttagcgcaccatgcaatgatttgaggatttccttttggatttgtatctaaatgtgtaactttatagccaaaacatgagaaactataaaatttgtacaatgttccgttccaattagttatagcaaaatcaagtataaaaggcttacagc

SEQ ID NO: 17883 - DNA, 913 bp, Glycine max
tatctatacaccgattaagatggagaagagatcagcatccctgaagcagaaacttgcgtccatcacacctttggttgaagaactgaagaagaaaaaagatgaaagattgaagcaatttgaagatgtatagactcagatagaaaagataagtggagagatttttggattccattctgtcaataatgcttcgagcagcacagcagttgacgatgaacatgacttgtcacttaggagacttaatgaatatcaaacgcatctccgaacacttcaaaaagaaaagtctgatcgccttcaaaaggtcttgcaatgcgtgaatgaggtgcattctctttgtagtgtgcttgggttggattttggccagaccgtgggtgatgtacatccaagtttgcatgggactcaggtggaacagtcaactaatattagcaatagcacattggaaggtctagagcaggccattctcaagttaaaaatagaaaggaaaacctagatttcagaagctgaaggatgttgtatctaaactatttgaactttggaatttgatggactcatcaaaagaagagagaaactgttttatgaagattacttctattgttggaacctcagaatcagaaatcactgaacgaggtgttctttcaacagaaatgatagagaaggcttcggcagaagtggacaggcttgccaaactaaaagcaagcagaatgaaagaacttgtttttaagaagaggtcagagttagaggaaatatgtaaattgactcatactgaaccagatacaagtactacagccgagaaagctagtgcattaatagattctggactggtggatccttctgagctattagccaacattgaagcacagatcatcaaggcaaaagatgaagctttgagcataaaagatgaacaaatgcgattgat

SEQ ID NO: 17884 - DNA, 697 bp, Glycine max
aaagaaatgacctgaagtctctatatattccaggtaacgaagaccttagcaacccaatgaacgcgtccccatgaacggcacgtgtagcggagtactaggccgccgttacacgctactgctgtccgtcgtcaccgtttgaattacccaccgctactttgtcgtcattcttcttcttcttcccttttcattgaccttttccttccttcgtcctccaatggcgactgttccgcacccattatccctcgcaagtgtaggttttgctaaccgaacctcctccatctccagatccactctcaaatgctgcgctcaatctccttctccttcactagttgacaacgcccagaagtttctcgaagcttccaagaaggggaacgtcattcctctcttccgctgcatattttccgatcacctcactccggtgcttgcgtaccggtgcctggttaaggaggacgagagagatgctccgagttttctctttgaatcggtcgagccaggccaaatttctagcatcggacggtacagtgtggttggagcacagccgtgtatggaaattgtggcgaaagagaacgtggttactattatggaccacgtggaagggcgcaggagtgaggaaattgtagaggatcctctggtgattcctcgtaggatcatggagaagtggacgcctcaactcttagatgaacttcctgaagcgttt

SEQ ID NO: 17885 - DNA, 426 bp, Glycine max
cttgaacggcacgtgtagcggagtactaggccgccgttacacgctactgctgtccgtcgtcaccgtttgaattacccaccgctactttgtcgtcattcttcttcttcttcccttttcattgacccttttccttccttcgtcctccaatggcgactgttccgcacccattatccctcgcaagtgtaggttttgctaaccgaacctcctccatctccagatccactctcaaatgctgcgctcaatctccttctccttcactaggccattctccttctcgctcttttctttctctttatttctctcactctccaatgcttcatccaccgtttacttattcttccttcagttgacaacgcccagaagtttctcgaagcttccaagaaggggaacgtcattcctctcttccgctgcatattttccgatcac

SEQ ID NO: 17886 - DNA, 719 bp, Glycine max
gttttacacagagaagtacatggggttgccatctgaaaacaagttgggatatgaaagcggttctgttatgaaccaagtgcagcagttgaaagggcggttgttgcttgtgcacggcatgattgatgagaatgttcacttcaggcacactgcaagacttatcaatgcacttgtggcagctggaaaatcatatgagctaatagttttcccagatgaacggcacatgcctcggcgtcatagtgaccgagtttacatggaagggaggatgtgggacttcattcagaggaatctgtaacatgactttttaattcatctttcattgttgtgtttagttgaatgggcaaagtggtttctgaagttcttttacccaaaagaattggttttgtttcttcttgccttaaagctgataagctactttgatggctattttggcccacttcacacaccctaacaagaaactcttctgggtatcaaataactgaataagcctttaaaagtcaaatagtctagatcttgtatgtggaggagttgtccacaacatagccttttttttttatgagcggtttgctttctttctttttcaccatcaagtcaaccttataatttctttctttttcaccatcaagttaaccttataattcctcgtactgcttacaaggaattgttccccccctcctttggcacttctcctttcttgcctttgcttaataataattgaagtt

SEQ ID NO: 17887 - DNA, 473 bp, Glycine max
tgttacatcatgggacggatatgacacgttttacacagagaagtacatggggttgccatctgaaaacaagttgggatatgaaagcggttctgttatgaaccaagtgcagcagttgaaagggcggttgttgcttgtgcacggcatgattgatgagaatgttcacttcaggcacactgcaagacttatcaatgcacttgtggcagctggaaaaccgtatgagttaatagttttcccagatgaacgtcacatgccaaggcgtcatagcgatcgagtttacatggaagggaggatgtgggacttcattcagaggaatctgtaaaataacttgttattccatctttggttgaatggccagagtagtttctcaagtttttttttacccaatagttggttttatttcttcttgccttaaagctactttgatggctatttttgcccacttcacaccctaaaaagaaactcttctggctatc

SEQ ID NO: 17888 - DNA, 456 bp, Glycine max
cccacgcgtccggcctgttcggttaaataaaggagttgtggagcttgtttcggattttgttgtttgcgacgaaggaaagcctttgtcacccgaggctgctcgtatactgcgtttaatgggaatcaagatggctacatttcgacttagcttaatttgcagatggagtcccgatgagtttgaacgttacatcgatgggcctgatgaatcagatatcgaatgctcgtaggacctcttttaaaacgtagaagattctggagccccatcctccaaagaaaaaagattacacaagatatgactgacgcatatgtaatttacatcttcagtgctatagactgtgtagcgttttttggattatgtattcttagaagagtttatttgtggaaatgcagagagatttctgtgaactaagccaagcctgaactttataaaaagttcaaattactgtgatacaatttt

SEQ ID NO: 17889 - DNA, 709 bp, Glycine max
attctgccgtcctgaacacacatgacgtgtgtggtgaaacagaaaccttatgggagttggcaaggaaaagctacacagcctttgtaaatgctatgaactgcaacaagcatttcacagacatgtctgacctgaactacctcatgtgcaaggctattgagaaccccggtttgacgccatcgtcatcacttaggacagccttgatctctgtgtttgaagatcctgtcttcgacgactcggccgaaatgcatggagagattggattggaagactatgtaggttgtgcttctgctcatggtgttggtccatccattgccgtattcgacaccatacggaatggaaagttggattgtgcttgtatatatccatcaccccttcattcaagagagcagattcaaggactagttgatcatatgaagagaatacttgtggaaggttgtaacagtgaaaatcaacaaattgaaccataatccgcttctgaggctgggcaattggttataatttcataatcaaattcataaacttggttgcctcttcaatttcagtctgtgactctgtgattctccttgctctgttgaatttcccagggccaggtattttaatatgaaggtagaaataaatatattgcatgcaatttccaatgaaggattcaaagcatctgcaaaagttgcccttccattaaaaaaatgcagagattcatttttttcctgtc

SEQ ID NO: 17890 - DNA, 339 bp, Glycine max
ctcagactcttctttgatctgaaccaaaaacaaaaaccaccaactttgtttaaccctgcagagttttttctgttcctttccctgctgctgcttttgcagtctctgggggattttgctttgcatttttttatgtgtcaattggtggtggctttcaagcggtggcggctattattattgtgttgagttttcatttttccaagaatcatatatagggtatcctcagattctgaagctctaaaattttcttgcatttaaagttttctctgccacaatccatcaacaagggattcatatacatcactactactccatcactggcagtgttgtactaagttcgac

SEQ ID NO: 17891 - DNA, 441 bp, Glycine max
agatcccaaaataatttcgctactgaaggaagatctgagcttccctcagcagcatatgctggctcgaaaaacgcttcactggcaaggtcaacaaatgtgtcaaccacagaacctgttaatcttgatgacaatgacaaactgcttgggggattgttaacttctggatttgatgaagcatcatgcaaaagtaggatgcagtcccatttgtaccgcaaagcttctcctcataaaccttctccatatttgatatctaaactacgtaaatacgaagaaattcatagaaggtgcggaccaaatactaaagattacgacaaaagcatgaaaaagattgtaagctccaagaacaatggtgctgctaccaaatgtaagtacattatctggaatactgccaaatggtttggggaatcaaatgattagcatagctgcaacatttctttatgc

SEQ ID NO: 17892 - DNA, 584 bp, Glycine max
  unsure (1)..(584): unsure at all n locations
gacgtgttgttaagttgagttagttttggtttaggatttggttgggtgaagtgacgtgtgcacttgaactgttctttcttctgtttctatggcttccaaagttagttagcaacacgcatttcgatgacggtggtcggactcttcctcactgccacgaagctcgccggagctctattcactctcaccgtcgccgccaacgccttctcctactcccgctttcgcaagaagaaccttcgcggtttccgctctcccatcgatgaatcccaagacactctcgcacactttaacgtcgctgaaggggaagatgggtttttctttggtttggcgacagcgccagcacatgttgaggacaggcttgatgatgcttggatccagtttgctgagaaaaagagtggtgaaggtggtggtgactctgaggggaagcagagagtggatgctgtgattggttctgcttctggcgatggtggttcccagccggccataacatctncgaggagcaggaagcctctcaaggtggcgatggaggccatgatcaggggaattgagaagtatatggaagtggaagggaaagaaagagaagaaga

SEQ ID NO: 17893 - DNA, 347 bp, Glycine max
  unsure (1)..(347): unsure at all n locations
cgtgaatagaactctcacactcagttcagaaaacgccggtgaagtaagcgttcacgtgttaagtgaagtgactgtgacgtgcactttcactgttcttctgtttgttatgtatggctttgaaagctaggcagcaacacgcatttcgatgacggtggtcggactcttcctcaccgccacgaagctcgccggagctcttttcactctcaccgtcgccgtcaacgccttctcctactcccgctttcgcaagaagaaccttcgccgtttccgctcccccatcgacgaatcccaagacactctcgcacactttaacatcgncgaaggggaaagatgagcttttcttttggttt

SEQ ID NO: 17894 - DNA, 475 bp, Glycine max
cgggaatgtgactggcttatgcattaccctgcaccttccaaacacactagctactaatgcgtttcctgtctcacttattctacaaaaacaatggcatcatttccaatcccacagctcctaccatctcacaccaaccactccttaacttgtttcagtagtaacactaacactctgccgttgtcatcctcactgttgcgccgtcgccggagtctcgactctctccgatgctcggcgtcgtcggagaagcagccccacgacgacgcgctggagctccctctcttccctctccctttggtcctcttccccggtgcgatcctccccctccagatcttcgagttccgctaccgcatcatgatgcacacgctcctccataccgacctccgcatcggcgtcatctacaacgacgccgtctcgggcaccgccgaggtcggctgcctgggcgatgtcgtcaaacacgagcgcctcgttgacgaca

SEQ ID NO: 17895 - DNA, 289 bp, Glycine max
acaaaactcagacttaacttcaacacattttctttaattaggcaaaataaacttcaacacataatataaggtcaaaacttacatacaatttcataggtacttatgttactattctccaatcaaattagaattctactttgataatctatgttgactcttaaagcagacgtcttattacaaagattactgggttaaaattccaattctgattagagacaagacaacactaaaatcacctaagatactgcatctaagccctgtccataatataatgtttaagcgcgacgat

SEQ ID NO: 17896 - DNA, 508 bp, Glycine max
acaggcattaggttatgtgcatggagctcaagttgtccatgcatctgaaccaatccatggtcgtttgagtgaagttgagcacaacggctgccagctttttcgtgatataccttctggtaaaaattatggattcaaggtggttcgatatcattcactggttatagattctgaatcacttcctgcagagctcattccaatagcatggacctcttccactagcacacttccatttattgggtccaaagattttggcaagtccaatactcatgaagctcagccagatcaaagcatttccattgatcctcttttagctaaagtaggaaatggaagttcaaaccattttgattatggaaaaactagaagtgcaagagttcttatgggaatcaggcattctacaagaccacactatggtgtgcacgtgtcaagtgcataagtgatctgcttataatatttcccttgggcttatatttatttattaagttggtaaatatgttcaactcaacaattt

SEQ ID NO: 17897 - DNA, 589 bp, Glycine max
tggttctagatcgcgatctagaactagcaagtttaaattatactcatagtaatcaatctgggagtattgatcagtgttccagaccttcagaaggagtaatagagagcggatcatctgcttctgctgtctattccaatttaaagcctgatctttcaatgtcagatggagaaatatgcttggacaagctatcaatcagagaactgcatgaactgtttaaggtaacgtttggtcgggaaaccactgtgaaagacaaacagtggctgaaaaggaggattgccatgagtttaaccaactcatgtgatgtttcagctacaactttcattattaaagataacaaaatagttagaaaatttgaagaagacagttctggaaatatgagtgctggatctttaatctcttcggaaaatatgactgaagaagatgtcaactttaaggattcatctgctgtagatgcttgtggaattgatgataaccaagttgtttctgaaacaagatcagaaaatggattggaatatgagaattatcagacaggacaaagagctgcaaaaagaattcggagacctacgaagagatatattgaagagctctc

SEQ ID NO: 17898 - DNA, 450 bp, Glycine max
cccacgcgtccgcttggaatgtcagaagctcagcttgtttcttctcctcaattttccccacgaaaaaggttctcctttactttcgcccttgggctgagataagaaccttgaattctgtgagggaattgcatgcccagattatcaaaatgccaaaaaagaggaacttggttacaatggatggaagcatgatgagaaactacttgcaatttggagactttgagtcagcaacaaaggtattttttgtgggttttgcaaggaactaccttctatggaactcttttcttgaggagtttgcaagttttggaggtgaattcacatgagattctggcggtcttcaaggaattgcatgataaaggagtgaaatttgacagtaaagctctcactgttgttctgaaaatttgtctggctttaatggagttgtggcttgggatggaagttcatgcttgtctg

SEQ ID NO: 17899 - DNA, 630 bp, Glycine max
cccttttgtccgcccacgcgtccgcctacagccagccggagaagttgcaactgcgaacagaacaacttcaaaatgccaaaatccaagagaaatagacaagttacgctttcaaagacgaagaaaaagggaagagaccacaaagagacgatagtgaacggaataaaagatgctgcagaaaagtacgggcacgtgtacgtgttctctttcgagaacatgaggaatcagaaattcaaggagttcagggaccagttgaaatcgagtagcaggttctttctcggctctaacaaagtaatgcaagttgctttaggtcgctctgcttcggatgagatcagacccggccttcataaggtttcaaagctattgcgtggagattctgggatggttttcaccaatttgtcaaaggaagaagttgaaaggctgtttaaagaatttgaggagtatgactttgcaagaacaggaagcaatgccactgaaaaggtggatctcaaagagggtccattagagcaattcacccatgagatggaaccttttctcaggaagcaaggcatgcctgtgcggttaaataaaggagttgtggagcttgtttcggattttgttgtttgcgacgaaggaaagcctttgtcacagagg

SEQ ID NO: 17900 - DNA, 903 bp, Glycine max
gaggcattagcagagttgtatgtaatcgatgagcaatatgagaaagccttcttgttgtatgctgatcttatgaagccagaagtatttgattttattgataaacataacctacacgatgctattcgtggaaaggttgtccaactaatgaggctagattgcaagcgcgctgttcctttgttaatccagaatagggacttaataagtccacctgaagttgtgaatcaacttctaaatgcagatgataagagtgattgtagatattttttacatttatatctccactcattatttgaagtaaatcctcatgctgggaaagacttccatgatatgcaggtagaactctatgcggactatgatccaaagatgctgctaccttttctccgtagcagtcaacactacacccttgagaaggcttacgaaatttgcattaaaagagacctattgagggagcaagtcttcatcctaggaaggatgggaaactcgaaacaagccctagctgttattataaacaaattgggggatatagaggaggccgtagagtttgtcaccatgcagcatgatgatgaactttgggaagaattaatcaagcaatgccttcacaaacctgaaatggtgggcatattattggagcacacagttggaaatcttgatcccctttacattgtacataaggttcctaatgggttggaaatccctcggctccgggatcggctggttaagattatcaccgactacaggactgaaacatcgctcagacatggatgcaatgatatccttaaggcggactgtgtcactcttccaattaagtattacaaagaggcaaggcatgggatttctttaggtaatgaagaagatgagccgcgggctaaaatgagtgatactcgtgcttctcaggtatttgac

SEQ ID NO: 17901 - DNA, 392 bp, Glycine max
ccgaagtgaacagacactaactcttttctttgcagttgcagttgctgcaatgcctacaaagctattctcccaactacatcttctccatcccctcctccccatgaagccccgcactctcccccttctctccagacccttcttcttcccttcctccaagttcctccgaacctcaccgtttaaggttcgcgccttctcctcccgggagaaggttcccctccgaccctccaagagcctcatcgacgacgaggccgacctcatcaactgggttgacgaattgcgctccggcgggcccgatgaaatgcggtctggccggggcaatgaagtgcggaccggtcggagagaccggtttgccgattctggccggttcagccgcgatgacagggaacgcgaat

SEQ ID NO: 17902 - DNA, 745 bp, Glycine max
gttggcctttctggaaatgaaataaagaatttgaagtcatctggcgtggagataacgtacactttgacagaaccagaaattgctttcacgggagataccatgtcagatttcatagttgatgaaaataacacagatgtcttacgggctagaattcttgtattggagtgcacctttgttaacaattcaatcactgtggaacatgccagagattatggacacactcatctgtccgagataataagttatgctgagagtttacagaacagagcaatccttttgattcacttttcggctcgttacacagtagaggaaattcaacacgctgtaagtgcattgcctcccagtttatctggtcgaacttttgcgcttaccgaaggtttctgagtccctgacaagttgggagtttggttgatacataaaaatgactatggagctgtttttgcctcctccaaacccacctgagactattggacgcagttagaatgtactgtcatcattgatgacaaatgtgggagaagtggagtgcaaagcctaatccactgatgcatagtgtgtttggattaccatatgaatcaccaaaaacgtttatttgcacatttcaagagagaaaacggagaagcaacaccagtgtttcgttgaatataatgtatgtttgcgttggaacgaaccattttccaaacatacactatcactctatcagctaccttctttattaagttgtttctagtaatatttatttggtaaa

SEQ ID NO: 17903 - DNA, 377 bp, Glycine max
ggcagatctccaactaaacttcaattataattctcagacaccacttgctcatcattataccttcctgtctacgtgaaataataataatacattaaaccaaaccaatgtcggactggtactttttctacccttttcctttttctccctaaattcttttcaaaattttcttttgctttgcttgcccaaattcctcttgccagatcccaacttcacagcaaaccgtgaatctgatcaagacccaccttccaaaaatgcaacttgggaaatgggttgtagaccttgttctcatattttcacttctcagtcaattctcagaaactgtggcagagacatcatcctattcaacaccacagccacagcctccaatctgttcagaa

SEQ ID NO: 17904 - DNA, 285 bp, Glycine max
aattctcagacaccacttgctcgcatttctcatcatcattataccttcccgtctacgtgaaatatcaataataatagactaaaccaaaccaatgtcggagtgatcccaacttcacacacagcaacaccaggacgtatctgatcaagacccaccttccaaaaatgcaacttgggaaatgggttgtcgatcttgtgctcatatgttcactgctcagtcctcagttctccgagaagtgtggcagagacaacatcctcttcaacaccaatctgttcagtagaagacaga

SEQ ID NO: 17905 - DNA, 454 bp, Glycine max
cttataattctcagacaccacttgctctcatttttcatcatcattataccttcctgtctacgtgaaatatcaataataatagactaaaccaaaccaatgtcggagtggtactttttctacccttttcctttttctccctaaattcatcttcttttcaaattttcttttgctttgcttaccctaacaaagtcctcttgtcttgccagatcccaacattatcgcacctccacgaccaacaacaacaaccttctcgtacttttcactcctccaatgaacatcgtcagcctcgatctcacatttttttcccgtttcacgctcatagcttagtttctccttctgttattttttctttagggttgggattgatttcgaatttgggggtgtaggattgttggtattttctttcaaattttgttaatttaagttgtgatgattcttgttatgcacttggatt

SEQ ID NO: 17906 - DNA, 373 bp, Glycine max
  unsure (1)..(373): unsure at all n locations
tttgggtttcaaataagcggacacgtgcaacgaaaacggctgctgatttgggccagaatgaaaagaaatgtaacgccaaaaatgaactactgtataatatgttaagttgttgaacgcaaacaaacagcagcatttgtttgttgctattgtattataaaacgtgcccctgcttaacacatgaggcacttcatttggtgcaaatgttcataccagtagttttggagaatccatggtaagcagccacttatttgtgtgtacccttttagagcacacagcatatggtcccccccaagtaccaagtttcttcttgtccgccnaaaaaaaaaacccaaaaaaaaaaaaaagcgcccgctctaaggatccaggcttggtg

SEQ ID NO: 17907 - DNA, 442 bp, Glycine max
ctccttcaattctcaacgaaacccgtcgtcaaagtgggtttccggcagagatcatatatcttctagggtgtccacctttgaaattcaatctccaattgagcatcacaaaccctagaaaatcgttccagatgaatacaaaatcgctccaaatcctggtgcactcaccggacctcggaatttcccttcaatccacaaccaaccacgaaaccctttccgatctcaaaaactctcttttccctcaatcacaccaatccttctacttcaccttcaatggcaaacccctccccgacaaaacccctctttcccaattcccccctctctccaccctctctctccgctcccgcctccttggcggcggcggagacggcggcgccaccggagccgagtcccgcgactgctacctcaacatgtacgccgacaagaagcccgacaaggtggaccc

SEQ ID NO: 17908 - DNA, 439 bp, Glycine max
  unsure (1)..(439): unsure at all n locations
cgcgtncgcccacgcgtccgtctctgtctggtccattgttcgacttgcacgcagaggcaagactcgcagccaggattatataagacaatgagtggtgcgcaactgcaaagtgcttcccctgccttgaccatacaagggtcacagaaaaatgtaggttcggtggctgtggcaactgctgcagaatcaaagccaaagaagaaaatctgctgtgcttgcccagacactaaaaggttgcgagatgaatgcatagtagagcatggtgaatcagcctgtacaaaatggattgaggctcatcgactgtgcctccgtgctgagggattcaatgtttgaggttgatagtgaggaaaagacattagtagattaactcacgtgattttatgaaattgatagaagattttgggttgcaattttcaggttgacagtttaaattttgaataaa

SEQ ID NO: 17909 - DNA, 425 bp, Glycine max
ataccaatgcaaaaacgatgggaccggtcccattaccaaccaagaagcgaatctactgtgttcttaaatccccgcacgtacataaggatgcccggttccatttcgagatcagaactcaccagcgtctcattgatattctatatcctacagctcaaacaatagattctctgatgcaacttgatcttcctgctggtgttgatgtggaggtcaagctgtagagatatttgcttttcaggttgctaactgtcttgaatttgagtgaggttcaacttgttatcaatagccaaaatatattggcagatatcatgtgtttcactgcctaaacttgatttctaagaacaatgctaaaagtccttttgtttgcttcccccctttggccccaacaaggtttcaaataggggaatcctgaattcctggtcctggtt

SEQ ID NO: 17910 - DNA, 300 bp, Glycine max
gagatatttgcttttcaggttgctaactgtcttgaatttgagtgaggttcaacttgttatcaatagccaaaatatattggcagatatcatgtgtttcactgcctaaacttgatttctaagaacaatgctaaaagtccttttgtttgctttccctttctgtcttcattaaattagtttatccctgatttcctgttattgcttagatatttgtatatcatatacaatgttatgtaattcaggtatgccacaaaattctattttattttcctggtataaaaaaaaaaaaagggcggccgccga

SEQ ID NO: 17911 - DNA, 581 bp, Glycine max
gatattttaggagctcagacggtatttttttaagaagactgtaagaagagaattttaatttctcactttttagaaagaaattgaaattccagatttttagttgtttaaaattctgttttaaaattccaaattttaaattttttataaaaagcatccaaacaataaattctaaattacagaaatttaaattctctgataaattactttcctcaattaaaattctctatccaaacgcactattaatgaaattgtgatgcaatatataccattaggagcaattgaaaattagttcttaccttaatgtggtgcaggtccgtggcctgccctgtgctcacaattttcatgtcgaatgcattgatgagtggcttcggctgaatgtgaattgtcctcggtgccgttgctcagtatttcccagaccttgatcttagtgcactgtccaatctccgtgctgagcctgaacaatcttctgccagtgttgtgacaacaaccagatatgtgagaggccaaccatctagtcaaagttaccggctaagattgcagggtcttctgcgtccagtccgtgctgaaattgcaggaccagt

SEQ ID NO: 17912 - DNA, 770 bp, Glycine max
gcggatgcagatcggagttcggatacataaacgattaaccagcttttcaagtgagctgactggagtcacaaataaagcacctgccgtggctattgatgtgttgcgccgcacaattgtagttgtagagagttctctaacaagtggggcttcctatgttgtctacctatatggctcagcaaaggagctccttccagcaggaattagggatacagtcaatgtatatgaagataaagcaacagaaatcttgaggccagttgggtctgcaactcaaaggttatacatggctgtctattcattggagaagagtcttggcttggatccaaatgacccaatcattccatttgttgttcttgtaggctcttcagccacattatgggccttttattggttgtggacatatggaggttactcaggaaatttgtcccctaaatcagctttcgagcttttggctgaggacgcaaatgctgcacttattgatgtccgctctgaggaaatgcgagaaaaagatggaattcctgatctccgacgggctgctaggtttcgttatgcaagtataattcctcttgaggttgatggctccatacgcaagttgttgaagagtggtacgagaacttgatgattccttgattgctgctattattcgacatttgaagatggttaaggacagttccagggttatagtgttggatgctgatggtactcgttctaaaggcattgctagatccttgaggaaaattgggctcaagactccatacttggttcaaggtggc

SEQ ID NO: 17913 - DNA, 666 bp, Glycine max
ctggacgcgctcgagccgattcggctcgagttcactctttctgcagttcaacacttctccgactcattatgatatgatcactctctttcttgtgtatcccacttttattctgaggtcaacggtctttgaatcttccttactcaattgtgtgtgcaaccttatcaaatgggtcggaggaacaatgaaccaaactccattctttcacaccgtttgatcctcccattggtgtgtttcgcttcgtgcggtttggtctacgcgttcctctctgcggtgctcacaaacagcagaaacagagtttcagagtttcagaggttagttgaagatggcgtggcgtcggagaatgatggagggtgctgtagagggattgaaaatttggagctttggggtgcagcagtgaagtggggttccgagttcaaattcaacagttctgaagggtgctgcaacgcgtgcaaatccatgtgttctgggaaagatgggccttgtctgtgtgatacttgggtcttttgtggggatcgcaaggcctgtggatccaagttcggtgagtgttggttgaagaaacagaaggacagcttagcacctgaacggcaagaaggagcgcctccgggggaagtgattggttggacttctggtcttatctttgggaaaggagagggtattattggactg

SEQ ID NO: 17914 - DNA, 1242 bp, Glycine max
cttacaagcttggaagaggtggttatggacctgtttataagggaacgtttcctggaggtcaagacatagctgtaaagaggctttcaagtgtttccactcaaggcttagagcaattcaagaatgaggttattttgattgcaaaacttcagcatcggaaccttgttagactcaggggctattgcattaaaggagatgaaaaaatcttactttatgaatacatgccatgctaagagcttggactcatttatatttggtcagtatcacatattccatcatacaacttccctgaagtgctcttcaaccattacaatcataatttcactaaccttgttcttaatttgaaatgtgaaatgtatatcttgaaagacccgacacgaacttcactcctggattggccaatacgatttgagataatcgtaggcattgcgcgaggcatgttgtatcttcaccaagactccagattgagagtgattcatagagacctgaaaaccagcaacattcttctagatgaggagatgaatccaaagatatcagactttggtcttgccaaaatatttgggggaaaagaaactgaagcatgtacagggagagtaatgggaacctttggatacatggctccagagtatgccttggacggattcttttcaaccaaatccgacgttttcagctttggagtagtccttctagagattctcagtggaaaaaagaacactggattctatcagtccaagcaaatttctagccttttgggtcatgcatggaagttatggacagagaataagctactggatttaatggacccatctctttgtgaaacatgcaacgaaaatgaattcattaagtgtgcagtcattggactcttatgcgtacaagatgaaccaagtgatcgacccactatgtcaaatgttttgttcatgctcgacatagaggcagcaagcatgccaattcccacgcagccaaccttttttgtgaaaaagcatctttctagctcagcttcctcttcgagcaaaccagatataggtcagtatgagagcagttatcaagaaggtcgatagtgcatgattgaagctattgttagagtacgtgtaaaataattaatgatattttaattgtattttataacaatttagagtattctgtattatttttaaggataaattttggatttcctgtctgtctttttagtacatacaccattttgaatttataacgtatgtttttaatataaaatttttcttggtt

SEQ ID NO: 17915 - DNA, 811 bp, Glycine max
ctagcattgtttttcttatctagaaaaagaccatttgaccttccttccatctttcttgggcacgccaagctctaaaaaaacccttttttctttcgttttgttccctctaaaattctctttctgcttagtctccacgctcttgcttgcttttgtgtgagagaacaatggcaatggtgaagtctcccaagaagcaagtgaacctcttctattcccttgactgtgaagaccttgcccagaacgttgctcttcaatcaccccacatcgttctccagaacatcaaatggaggtcatttgctgatggatttccaaatatatatataaataatgcagaagaacttcgaggtcaacatgttgctttcttggcatctttcagctcccctgcacatgtctttgaacaactttctgtcatatatgcactccctcgtttatttgttgcttccttcacattggtattgcctttctttccaactggatcctttgagcgaatggaggaagaaggagatgtagcaactgccttcaccctagcaaggatgttgtcaaatattccaatttcaagaggtggcccaactagtttagtcatatatgacattcatgccttgcaggagaggttttattttggagatgaagtcttgcccttgtttgagaccggtattcctctcttaaagcaacgtctgagtcagcttcccgacgctgataatgtagttattgcatttccagatgacggtgcatggaagcgattccacaagctgtttgataatttttcactagttgtatgtactaaggttcgtgaaggtgacaaaaggatagttcg

SEQ ID NO: 17916 - DNA, 413 bp, Glycine max
  unsure (1)..(413): unsure at all n locations
cccacgcgtncgcacagaggcagaagaagcatagagtgagaagtgaagagtgaagaagagtgaggaattgaagagaaaatgggtgctgattggggaccagttattgttgctggggccttattcatcctcttatctccgggttggtggttccaatttccctcaaagtataggggggttgagttgggaaacatgagcactaggggggattgcaattttgggttcatgccatcattttccttctgcatacttacccatcttggggtgtagcaataggcattcacatacacatcaattgaatcctatgttcaccttataagtcaccacaaatctccatatgtacgtttacaattacttttctttttagctcctttgatgtattaatttcccttttaaaagttttcatcttggttttc

SEQ ID NO: 17917 - DNA, 478 bp, Glycine max
caagcaattacaacacagagtgagaagtgaggagtgaggagtgaagagtgaagaattgaagagaaatgggtgctgattggggaccagttattattgctgtggctttgttcatcctcttatctccgggtttgttgttccaatttcccgcaaggtatagggtggttgagtttggaaacatgagcactagtgggatcgcaattttggttcatgccatcattttcttctgcatacttaccatcttggttgtagcaataggcattcacatacccatcaattgaatcctttgttccccttatgtagtccccacaaatctccacatatatgtttccgattactttctctctcttttttttttggctcctttgatgtattaattaatttccctttgaagtttttcatcttggtttctcttctggggtactgtgtaccaaatattgttcaaaagggaaaaggagatctaaaactataggaattatgc

SEQ ID NO: 17918 - DNA, 333 bp, Glycine max
aaagtggtaggtgaatgtttgaaaacttgattttgaacttgcccctaataaggtggtaggtgaatgtttggatggttgattttgattgaaattgtttttaaagtgaagtgatttataactcttaatagttattaattgtgaaatccaaggattaaattttttgtccaacatataagttaaattgcttccaagtaaataatcgattgtggatccaagactcgtcttttcaacctgagatcaaacaggtgaacaactaaagtcaagttagctgatattttaagggattctgaatcatctaaagtgagcccaaagatgcgatattatgaaattctt

SEQ ID NO: 17919 - DNA, 438 bp, Glycine max
cgcgtccgcccacgcgttcgcccacgcgtccgcccacgtgtccgatttgaacaggctgagctggggaagcatcctgccaaaaaacaggcggggtcacaaccaaaggtatccaacttctggcccaagctttactgggaaagggaagaaagtgatagtaattgagttagtgggcggcttgtattaaagtactaatcacattctaagctgattgtttgcccttgccatttggtggaacattgatttattgagctgtcgttgtgtatccatcaatttttagttgcactgttctgcgacaaagttggatgtggtatgtaaagttagtactggctgcaggcttgttgtttgaacatgcttgaactatgaatttcacgtggctctttcctgtcttactccgctcccattctccttctcattgtaacggatagaacaatgaataat

SEQ ID NO: 17920 - DNA, 493 bp, Glycine max
tgcacagcagcaaagctttggaccacctggtcaaggagaaagaagaaattatatgccacaacagaactttggacggccgggacaaggggaaagaagagatcctgtgcctaggcatggtgcttcagaggcgaggggtgatacttttaccccatcatatgcgcaggatttcaaaccagcatacatggagggatttgaacaggctgagctggggaaccatcctgccaaagaacaggcagggtcgcaacaaaggtatccaccttctggcccaggcacttttactggagagggaagatactgatagtaatctgggtcatgtgggcggcttgtattaaagtactaatcacattctaagatgattgtttgcccttgccatttggtggaacattgatttattgagctgtcgttgtgtatccatcaatttttagttgcactattctgtgacaaagttggatgtggtccgtaaagttagtactggctgcaggcttgttgttag

SEQ ID NO: 17921 - DNA, 510 bp, Glycine max
gtgaagaaagacaagagaaaagggaggatccatggccacaagggaaggtaccctgcaaatcgcaaagaagaaagtccctctcattcctcttctgtctattctctgcttcatttccattttcttccttctctcccagttcaaatctacctccacctcccaccactcccttcccacgttccaaatcgagaaacacgaataccaccgcggttcctgcgactactccgacggaacatggatccacgacccctcgaggactccgaggtacgacaatacctgcaaggagatcttcaagggctggaactgcctctccgcccacaaatccaacgccccacatctctccacgtggcgctggcagccccgcctctgcgatctcccccagttcgaccccgctgagttcctccgcactcacacccacaccaacatcgatcaggtcttgtcggagactcgctcaacaggaacacgttcgcgtccctcttctgctctctcaagagtgcctccgatggacagatc

SEQ ID NO: 17922 - DNA, 463 bp, Glycine max
  unsure (1)..(463): unsure at all n locations
caaaaacggaatttgaagcttcttccgatgctgctggtgccaagtacgtagaagaagaacccacgccatgtttctataagactgaaatgctgactgaaccacccaatcacacaaagcccaactcatggactctctcttctctctaacacccacactccgaccattcaataattgcatccccctctctctcacacacttcacacccccaacaagagtaaaggtgagtgctttgcagccccgtcgaaaccacggaggcttgggtgtggccctgctcaacgtgaccgcaaacgcgaagcttcggataagtcccttcgttgccacgctggcagccaaccccaccttcgtgtcggggctgctggcgtggctgatagcgcantccatgaacgtctttctgaatttcttcatggagaggaaatgggatttgaggctcttgttcgcgtccgggggaatgctcctcttccac

SEQ ID NO: 17923 - DNA, 625 bp, Glycine max
ataaaatttaacagtaatgcccttcaatttaattttgtgccatttttagctcttcacaagtgccaatccaatcccagccggtgcagaaaaaccatgaacacgccgtggcgtcggaattgaatgcgcgcgtgcgcacgtgtcaaacgcgacgacagttttcttctccaattcaatactactactactactattactataacatagacggcgtgttcttctttcaaaacccggttcatctttcttttttgttgctgccatattcctcccattttttttccttccttcaatctgctgcttcaatggaaggtttggcttctctcagggttccctttcagaccacccaattccactcttccagacccagaacctctattcttccatcccaagccatttttttccacaaaagaagctccttttcatccttttctgctcgtgcccaggtggagtctgatgatggttcagctgcagtagccacacctggtgaatctgtgacagaggttctgaaaactaaggagtgggaggtgggaatgttccaaaacgaggttgcagctagccaaggtataagaataaggagaagaccaccatctggaccccctttgcattatgtaggaccctttcaattcag

SEQ ID NO: 17924 - DNA, 319 bp, Glycine max
ccaatcccagccgtggtacattctcttggggccagaaaaaccatgaacacgccgtggcgtcggaattggatgccccccggcccacgtgtcgaacgctacaacaattttcttctccaattcaatactagtactataccttagacgattagacggtttggcttccctcaaggctccctttccggccaccccatttctctcttccagacccagaacctcttttcttccatcccaagccagttttcgtaaaagaagctcctttttatccttttctgttcatgcccaggtggagtctgatgatggttcagctgtagtagccaca

SEQ ID NO: 17925 - DNA, 571 bp, Glycine max
tctttacatgtgccaatccaatcccagccgtggtacattctcttggggccagaaaaaccaggtactcgccgtggcgtcggaatgggctgcgcgcgtgcgcacgcgtcgaacgctacaacaattttcttctccaattcaatactagtactataacatagacgattagacggtgcgttcttcttttaaacccttgtttcactttccgtttcatctttcttttttgttgctcagcaatccctcccattttttttccttcaatctgcttcaatggaaggtttggcttccctcaaggctccctttccggccaccccatttctctcttccagacccagaacctctattcttccatcccaagccagttttcgtaaaagaagctcctttttatccttttctgttcatgcccaggtggagtctgatgatggttcagctgtagtagccacatctggtgaatctgtgacagaggttctgaaaattaaggagtgggaggtgggaatgttccaaaatgaggttgcagctagccagggtataagaataaggagaaggcctccatctggaccccctttgcattatg

SEQ ID NO: 17926 - DNA, 296 bp, Glycine max
gccaatccaatcccagccgtggtacattctcttggggccagaaaaaccatgaacacgccgtggcgtcggaattgaatgcgcgcgtgcgcacgtgtcgaacgctacaacaattttcttctccaattcaatactagtactataacatagacgattagacggtggagtctgatgatggttcagctgtagtagccacatctggtgaatctgtgacagaggttctgaaaattaaggagtgggaggtgggaatgttccaaaatgaggttgcagctagccagggtataagaataaggagaagg

SEQ ID NO: 17927 - DNA, 458 bp, Glycine max
gccacgcgtccgcccacgcgtccgtccctctcactcactttcgctctctgacttcacctcaatgcaccacactgcacgtaagtactcactacctttggctcttctttactatggatgaagctgcaggcagccaaccctagcttgcatatcccctcactctccatttcagccgcaagccacgcaccattcttcatctcttatagtcttacttcatctccgctcatagcatatatattattatgcgtaagtgaaccaaccactcaccttctcatctccgaccaccaccagcagcctaaccagtcaggacttgcccgccatgaaccaccatacatgcgtgaaccaactgcagtgacttcctctttaaccaacccttgtgaactataggaaccacgtgcagtagcgaatcagcgagggtaatgtggtagccacagcaggaatcaaagaaacaagaagaacgt

SEQ ID NO: 17928 - DNA, 600 bp, Glycine max
atttaacctagaaataaagaaaaggcaaacataagcaaaacggcatgtcgtgtaatgtaatgaaacgaatgaaatgataggtaggtggaggattgagagagtgcggtgttggttcaccatgtggaagtttggtgcttgaacttgaacgccgaacattgcgattcagagagagagagagaagagaatggccatggcccgaagagtccctcgtaatgttttgggattggtcaaaaggaacatgtccttcaaatctttggatcccccttcctccctcacccacggaatccacgtctttcattgccccgatgccgttggaattgtagccaagctatccgactgtattgcctctagaggtggaaacattctcgccgctgatgtttttgttcctgaaaataaacatgtcttctactccagaagtgattttgttttcgatcctgttaaatggccacgggtgcaaatggaggaggacttcctaaagctttcacaaacattcaaagctataagatctgttgtgcgggtgccagctctggatcctaaatataagatagcggttcttgcatcaaagcaggaccactgcctggttgatttattacatggatg

SEQ ID NO: 17929 - DNA, 436 bp, Glycine max
cccacgcgtccgcccacgcgtccgtgaaaacggtatccatcaatcaatcagcagggaagaaaaagaaaggaaggagcgatgtggttaacagcgaaacccattcgacaactatgcttcccactcccaatctcagtcccaaacaagttctgcaattgcagcttatccataacagcaacaaccaacaccaacaccaacgccgaaattactactactctcactcaaactcctaagccaaagccgaaccctaagtcgacgttgaagaagcgaaagaggtaccggaagctatatcccggagagaccaccggcatcaccgaagagatgaggttcgtcgccatgagactccgcaccaacgacaccgtttctcaacaagaacaccaatcgcattccgacgcgtggcaggccttcatggaaggcttcctctcttacctcgtcgaca

SEQ ID NO: 17930 - DNA, 470 bp, Glycine max
cgtgatctgtcattacgtgcgactatctccactatagaaagaaaaaagaaaagaacaagcaaatccacaaatactaatataataaatactagaaataaaggctttctacatatacatatatcgtccaaaacaacgatttttatcagctgtagcaaagaatgaaacttcatagaagtcaaaatatgaagaaatcaatatgtctagatacccccttttctatggataaaagatctaattgataaaggaagcatcgtaaggatccattaacgcggttttgaaccgatacaataaaaactgcttacttatctcatgatagataagtcaggaatccacttatgcaataacgtagagcccccgatcttttgagcagcggtgtagtatcaaatcccaaagatagaaagtcttttctctttactgtataaataagaaagaaaagactttttccaagattctatagaaatggatatatt

SEQ ID NO: 17931 - DNA, 832 bp, Glycine max
tcgcggacgcgtgggcgacccacgcgttcgactaccaatactcctcgcacaacacaaccacaatggccgcgaagaagaagaatggcggcggaaacggcaacaacaaggagaacgaagacagcaccatcaccgtcgtcttgaaggtcgaaatgcactgcgacggttgcgcttccaaaatcatcaaacacctccgctgtttccaaggtgtggaaacggtgaaggctgatagcgacgccgggaaggtgaccgtgaccggaaaagtggaccccacgaaagtgagggataacctggcggagaagataaggaagaaggtggaactggtgtctccgcagcccaagaaggagcaggagaacgagaaagagaacaaggatgctaaggcaaacaacaaatccgagaataacaaaacccaggacaaaaaaaccaaggacaaagaggtggtaaccaccgctgttctgaagctggcattgcattgccagggttgcctagacaggattggcaaaactgtgttgaaaaccaaaggagtgcaagaaatggccattgacaaggaaaaggaaatggtgactgtgaaagggacaatggatgttaaggctctggcagagaatctcatggagaagctgaagaggagggttgacgtggttcctccaaagaaagacaaggaaggtggtggtggtgatgatgagaaggaagtatcagggaagaagaagaacaagggtggtggtggaggagacaagaatgagaatattgaagatggaatagagaaaatagagtataacagaatggagtatttggcaccacctgcttttggctttggttatggaccttatggtggtgg

SEQ ID NO: 17932 - DNA, 250 bp, Glycine max
accaatactcctcacacaacataaacactcccttcagacacaatgggcgcgaagaagaacaatggcaacaacaagcagatcgaagtcaacaccaccaccaccgtcgtcttgaaggtccaaatgcattgcgacggttgcgcttccaaaatcatcaagcacctccgcgctttccaaggtgtggagacggtgaaggcggtcagcgacgccgggaaggtgaccgtgaccgggaaagtggaccccacgaaagtga

SEQ ID NO: 17933 - DNA, 772 bp, Glycine max
cttatatttaaaaatcgcgtcctcttggcttattctgtgcaattctccatctctagtctttactcacagagtcactcaaatggcttccgaaaccccaaagccaaaacccgttctaccgtggaaaacccgcgtttcaatttcctttctctctaccctaacggactatgcacgccgttctaacggcaccgttaaccgccgtctcatgaacttcctcgatcgcaaatcccaacctaacgccaaacccgttaacggtgtttccacccaagacgtcaccgtcgacgccaaacggaacctctggttccgaatctttaaccccgcagccgcctccggcggcggcctccccgtcgttattttcttccacggcggcggcttcgcgttcctctcgccggattcgttcgcctacgacgccgtctgccgacgtttctgccggcgaatccccgccgtcgtcgtcttcgtcaactaccgcctcgcaccggagcaccggtacccttcccaatacgacgacggcgaggatatcctcaggttcctcgacgagaaccccgcggtgctgccggacaatgctgacttgtcgaaatgcttcctcgccggcgacagcgccggcgcgaatttggctcacaatgttgcggttcggatcggcaagtcggggctccagttgattcgggtcgtcgggttggtttcaatccagccgtggttcggcggggaagagcggacggctgcggaggttaagttggacggggcaccgctggtatcgatggcgaagacggactggctg

SEQ ID NO: 17934 - DNA, 458 bp, Glycine max
cggacgcgtgggcggacgcgtgggttgtgtttttgtttcctcttaatatcgtcctaactcaaacagagatgtggcttttgcttgtctgttgcaaggataggtgagaggtgagattctacttgacttggatcagccttgagctgagtatgcttatccactcctcatagcgccatacaaccattcataattctgatcgctacaatgttgcatctaacattgcagattttacagagatcatttcaatctcctgtctgagctgtgatgttcccggctgatgaaccacttctattatttaattattttgaaggtcgacatctatgtcttctctttatcttgctctcctaaatggagcagctgacaaagtcagagccaaaatcggatctctctagatatgcatactattattttagtgaggcctgtctaaattccatatggcaggatctttaaagataatattt

SEQ ID NO: 17935 - DNA, 597 bp, Glycine max
cccacgcgtccgcccacgcgtccgcccacgcgtccgcgggaatggaagagggtgacagtgaggccatttttggtgctcttaatctgaacccgcaactcttctgtaacgaagttctcaacattgtcgacgatgtgctcgacgaagctttcaatttcttctaccaggacgcatccacgaagctcaacatcgaaggcacccaaaggtcccaggatctgaaaaagggtgttgattgcgttcggctgaatgttcaatctgttttggacaaacaacttgctgcttgggagagttacatcctccgtcactgttttgctcttccccaaggttttcgtatgccaaacaccgatgaatcaaatgagaatgccctagatccaggtgctccttttgatccagatatagatgcccagttagattcattgagagaaaaactaattgaggtggggaaggagtctgaaatgcttaatcaagaaatgcaagcattagaaagaaagtctgctgtcaatgtggctggacatatcaatgaagctgtacaattatatgagcaaaattctatgcatgaggtgtttcaggagattgtgacgaccgcctcagaacttggag

SEQ ID NO: 17936 - DNA, 445 bp, Glycine max
caaacccaagagttgaagaagaatcagagttcagaatccatggcaggtgctatagtaaagtacggaatcataggagtaggaatgatgggtagagagcatcttgtgaatttgtaccatcttcgcacccaaggcgtggcagttgttgctattgctgaccctcatcttccctctcaacaactcgctcttgacttagcacactcctttacttggcctctcaaggttttctcaggtcaccaggagctgttggacagtggactatgtgatgttttggtggtatccactcctaacatgacccatcataggattcttatggacattatcaatcattccaaaccccatcatgtactggtagagaagcccttgtgcaccacaatctcacactgcaaagaggttgtcaatgctgctagaaagagacctgatatattggtacaagttggactggaat

SEQ ID NO: 17937 - DNA, 498 bp, Glycine max
cttgggttgggatgatgatgaagaagtcgaagatatggggtcgccttgggaaggtgcagttatatacataagaaatgcaacaattttacatctggagtactgcactaccttggagaggttaggtctagcaaagctttcaagtgatgtctcaaaaactagggctgctgcaatgggattacgtgttacgaaagccgtgaaggactttccaaatggcactcctgttcagatatctatagatgtgaccaggaagaagaaaaaattgaggcttgatgggatcataaaaactgtcatcactcttctttgcaataagtgttgcgcgccatctgctgagagcatattctctgagttctcacttttactcactgatgaacccattgaagaaccagagactattgatatgggtgttatttttggggaagacaaacttacaacctctggaaacagtggtgaggatgacgacgacgatgcacttattgacatggatgatcaactatattt

SEQ ID NO: 17938 - DNA, 1184 bp, Glycine max
tcatggctgtgcctgcacgggggtcatttgattatgaattggctttgaagcatgatgttccaatttgctgggttgtaatgccagatgataaaagcatcgagtctggaaaggctttttcaggtgaaggcactattgtaaattcatcaaatacactggtggggcttgacattaatggcttgtctagcaatgaagctgctctgaaagtcattgagtgggcagagaaaagtgggaatggaaagagaaaggtgaattacaagttaagggactggctttttgctcggcaacgttactggggtgaacctatccctgtcatcttcttggatgatagtgatgagactgtcccactgtgtgagactgaactgccccttattctacctgaattggatgatttttctcccactggaacaggggagcctcctctgtctaaggcagtgtcttgggtgaagaccacggatagcttatctggaagaccagctacccgtgaaactaataccatgccacagtgggctggttcatgctggtactatttgagatttatggacccacataattccaaggaattggttgataagacaaaagaaaggtattggggccctgttgatgtgtatgttgggggtgctgagcatgcagttctccatttactgtatgctaggttctggcacaaggttctttttgacattggtgttgtatccaccaaggagcccttccaatgtgtcataaaccaggggattattcttggagaggtaatttcaattctttctgcatgaaaattaggagaaaaaataactaactgtgacaagtttctaattgcttgagtggcaggttcaatatatgacttgtagagatcaagttggcaatctgatatctgctgattcaaccgacatgttgaatgaacataaactagaaataattcctgcagaaaaggtcatgaaatctggggattcttttgtcctgaaagaacatcctgatatacgtttatttgcccgcgcccacaaaatgagtaaaagtaggggaaatgttgttaatccagatgatgttgtctctgagtatgtgcagattctcttcgattatacgaaatgttcatgggaccattgagagactcaaaaacatggagtactagtggcattgaaggtgtacaccggtttttaggaagaacttggaggctcattgttggttcacctttg

SEQ ID NO: 17939 - DNA, 585 bp, Glycine max
tatgtgtggtcgaacaaattgagtatgccccggccagtgatacccgtacctgtagagcgtgcgtgaaaacatatttcaaacatcttgtcaacaagattgactctcactgaagaatgatctctgtaggcttgtggcatctcctccaaatattgacatgttttctgcttttgactcaatcattttctaaagatgatcgaaagacttacatcgtctacatgggcgattatccgaagggtgtgggattcgcagaatcacttcacactagtatggttgagagtgtcctcggcagaaattttccaccagatgctttgctgcatagctacaagagtttgaatggatttgtggcgaggctaacaaaagaagaagcaaacagaatgagaggaatggatagtgtggtctctgttataccagacagaatccataagccacaaacaacaaggtcttgggactttcttggcttccccgaaaatgttcaaagaaacattatagcagagagcaacacaatcgttggagtgatcgatagcggaatttggcctgaatctgatagctctaatgatgctggatttggtccaccaccaaagaaat

SEQ ID NO: 17940 - DNA, 376 bp, Glycine max
cccacgcgtccgcccacgcgtccgctcaaatctatattctgacaaccaatcgtccgaacttattacatttcgaagctcttcatcatctacctttgctctgggggtgtctgtcggttacttcatcgctgaccttgggatgatattttggttttttccttctcttggtggatatgagtatgtgattcatcatttgctttctttagtagcagtagcattttcaatgctgaccggggagggtcagctatacacatacatggtcctgatctctgagacaactactcctgggatcaacttgagatggtatcttgatgcagctggaatgaagaagtcaaaagcttatctcatcaatggggttgtgatattcattgcttggctg

SEQ ID NO: 17941 - DNA, 517 bp, Glycine max
cccacgcgtccgcccacgcgtccggctaaagtaagtgaagctcagcatctgaaacagagtgtacaatcccagaacaaaataagagtatcaaatatgtacccggatttgtgcttgaagaagcttgatataaagagaagcctcctgaagaactgatgcggtgtcagtctgcaggatattcagaaagccaaggccacactttcttaaaggtgtttattatgctagtaagaaatgaaggatctagtttttgtccattaggggttagcaatgatgactccccttgccaaaaggtgaaaccaacttttgtagagttgtaattttattgctaagcttctgatttgtcatcataggcacatgcaactgaaggcaaaaaaaggggcatttttttaggcttacggttaaaatgaattacctagtgcctaatttaatcagcaaaacgaaaaaaaagtaactactattatcatagtttacaacactaaattctattcataataattatggactagtcttactctttgat

SEQ ID NO: 17942 - DNA, 653 bp, Glycine max
accgggccggaaattccggggtggaccaacgcgtccgtccagccgtccgaccccaagagaccgccgaagggggaccgaatggatggtttaaaaccaaccaagggctcacaatctttttggcaccccattggtgatcacttccgatagctctcacaatcctatggcggagaacaacaacaaccaccaccttgaaaccgccaccagaaggcttgcctctgtgaccaaccacctcactccttcttcttatcacaacgcacccggcgaactcgccccgtgcctcacttccggtgggaacaacagcttccgccgcgtccacggagaagttccatcccacgacgtcgtttggaggatccggcgctccgaccacgacaactccggcaaggacttcaccgacattgtctacgagaaggccgtcggggaaggaatagccaagataagtattaataggccagagagaaggaatgcgttccgaccccacacggtgaaggagcttatgcgtgctttcactgatgccagggatgatagctctattggggtcgtcattctcactggcaagggaaccgaagcattttgtagtggtggtgaccaggctttgaggactaacgatggctattctgataatggaagtttcagtagccttaatgtgttagact

SEQ ID NO: 17943 - DNA, 1675 bp, Glycine max
aactcctaccagactcactcactctctctctctctccaccctccaactgcaactgcaatggccgtcccttccttctccgcgcgttctttctctctccccgcccaaaaccactactgccacctctcttctctcccactaccctccttcactctctcatctcgccgcccaagatattcttcttccaacctcttcacacctcttcgctctcccacaacccccatttttgcatcggcccacggcggtggcaccggaggcggacatgccggcggaggtggagctggaggtggagggggaggcgaccatgaatcggaggacagggatcggaacagagaggaggcgctgctggttctcgccgaggcagggaggccgctggagaaattgccggcggatttagcggcggcggttgaggcggggcgagtgccgggctcgattgtgaagaggttgttcgagctggaaaaatcggcagtgttccggtggctgctgaatttcggagggtttaggggagaggttactggccgatgatttgttcctcgctaaggttggccatggagtgcggtgttggcatctttacaaagactgctgcggagttggagaagcgcaaagaaaattttactaaggagcttgattttgtttgtgctgatgtggtgatggccatcgtagcagattttatgcttgtgtggcttcctgcccccacagtttctttccgaccaccacttgctgttagtgctggaactattgctaaattcttctatggctgccctgaaaatgcttttcaggtggctttggctgggacctcatattcacttattcagagaataggtgctatagtgagaaatggagcaaagctatttgctggtggaactggtgcatcactgattggtacaggtgtaactaatgcgttgatcaatgcaagaaaagttgttgataaatcctttgctgctgaggcagaggatgtaccgattatatcgaccagtattgcctatggggtttacatggcagtatccagcaacttaaggtaccaagtactagctggagttattgaacaacggattcttgaacctttgctgcaccagcacaaacttatgctaagcgcaatttgctttgctgttagaactggaaacactttcttgggctcactattgtgggtggattatgctcgctgggttggagtccagaagatacgggattaggcataatggttcttcagttacaagatattttcataggatgatttgggtcaaatcttgtctgttgattcattattgaagtacagttggtttgttgtacttttttttattcctcctgaaagcaatattgtaaattgagcaataacggaggtcagcaagcaccatgactcgagtctccaattatcaccctttatggtggccagtgaaggtataagatccatctctcgtagctagcagaaagctgcagcatgcgatgaatttgagtcacacatcttcgctagacatttgtggggcaatgcctatattgttcttgtgtgttttgccttctaaagttaaaaatgaatagagacaaattcaaattggcagtgccctaatagctgttgcttaactttgtttcttttctcattattcatctatttgcttctgtaccccccaaaaaattaaaaaaaccccccccgctcgcgatctagaaccggacgcgatgaaca

SEQ ID NO: 17944 - DNA, 479 bp, Glycine max
tacacaggtgaatccgtcgacattcattgcaatttgtgatcagcgaggaaagaaagcagggaggttctgttgtaggtgggtgagtaatagtatcggtcgtgttgtggatagatcggcatggcttcttcttcagcttctcctcgaccgagcgccgccgcggaacattcgaggaagatattagggtttatggcgcacgcgaagcaacggaaggacagcttcatccaattcttcgccatgacgggtatccttctattgagcatgcgatctttgagtcagaagtacaaaatccatggcctccaagaagacatccacgccctcagggtcgaccacggttctctcaccgaccgcatcaacaacatcaagaacgacctccttcgagaagcttctcaagattccaccggcctcttcgcttctcgccttcgccacctctttgcagaacaacactgatccctttccccttcctgttaaattggagagat

SEQ ID NO: 17945 - DNA, 780 bp, Glycine max
  unsure (1)..(780): unsure at all n locations
gccctaagtcnccaactacgccattcattgcttgtgttgggagctgttctgttttcttctccacttcatatcagcgtctcagtttcaaagcaaacatcgacaacaacaaactagaaagaaagaaaggaacacgaaacctcaaaaaagcagaacaccatgaagtttcggtacgcgatggtgtgttcttcgaaccagaaccgaagcatggaggctcatttcctgctcaagaggcagggcttcgacgtgtcctcgtacggcaccggtgcccacgttaagctccctggtccttccctcagagaacccaatgtctacgacttcggaaccccctacaagcacatgatcgaggacctccgcagaaaagaccccgatctctacaaacgaaacggaatctttccaatgcttaaaagaaattcaacagtcaaattagcaccgcaacggtggcaagaaaatgccgctgatggttcctttgatgtggtagttacatttgaagaaaaagtgtttgatatggttattgaagatctccataatagagatcatgctttattgaaaactgtgctggtaatcaacttggaggtaaaagataaccacgatgaagcagccgtgggagcaaggcttactttagatctctgtcgggagattgaagctgctgaatcatgggaagagtcaattgatgaaattattgctggttttgagaataaacatcggcggaagcttttgtacagcatctccttctactaaaattaccccagtctcccaagaaaaattagtgacccatttttg

SEQ ID NO: 17946 - DNA, 427 bp, Glycine max
cccacgcgtccgcggacgcgtgggcgcccacgcccatggccacgctccttcttcccaaccctttctccaccaagctccccgcccagcgctactcgcaccggcgcttcacctgctcctccatcaccgcccaatcacgatccgccaaggagcaactcctcgccctcatcgccgaccaggaccgcggcatcaagacccagagcgaccccgcgaagcacgccgcgatcgtcgaagccatcaatgcgatggccgcggcgggcgaaggctccgtgtccaccggggatgcgctgtcggcgacgtggcggctgctgtggacaacggagaaggagcagctcttcatcgtcgagaaggctcccttgttcggaacccaagcgggtgacgtgttgcaggtcatagatgttcggaatcggacgctcaacaacgtcataac

SEQ ID NO: 17947 - DNA, 453 bp, Glycine max
gcaccttttcttttcactctcagtctccgatccaatatgacggaggaacggaacgtgcggaagacacgtgtggtcgacgtggtcctcgactgcgtcatcccttacatcgacgaccccaaggaccgcgacgccgtttcccaggtgtgtcgacgctggtacgagctcgactcgctcacccgcaagcacgtcaccatcgcgctctgctacaccaccaccccggctcgcctccgccgccgcttcccgcacctcgagtcgctcaagctcaagggcaagccccgagccgcaatgttcaacttgatacccgaggattggggcggacacgtcactccctgggtcaaagagatttctcagtacttcgattgcctcaagagcctccacttccgccgcatgattgtcaaggattccgatcttcagaatctcgctcgtgaccgcggtcacgtgcttcacgctctc

SEQ ID NO: 17948 - DNA, 266 bp, Glycine max
cccacgcgttcgcaaactttggggaatcgtttaggttccggaaggtcttgcaaggtcaagagattttgggtgttaatactccctttgatggtattaatgctcagagtccccgggtatacgagttagggaggtgctatcctggttcaaactgttctgggattcctccaacaggaaataacatcagagtgccgcatccggcgtctgatttttcctgcaatggcataggctttagtgaatcttttcggtttcaaaaagtcttgcaaggt

SEQ ID NO: 17949 - DNA, 497 bp, Glycine max
aggacacctgctagcaggaacacgtacaatcttcgagacgcagtttcgcggtgcactactcaggtatatcccaagtcatggactgctatatatattgcgcttgacaacgtgggaatgtggaacttgaggtctgaattttgggcacggcagtaccttggccaacagttttacatgcgcgtttatacaacatcgacatcaatccgagatgaatatcctgttccaaagaatgcactactttgtggtagggcaagtgggagacacactcgacccctttgagctagctagcaagaaccttgttgagtatgaaaattaaagcagttaacttatctgcttctgattttgaatttatttcttttctgtttcagtaattatgctatgctccgatggacatgtgtgatttaaactacaaatgaccccagctcgaggtcacattcttttccagaaaaaaagaagaaagaaatttactattattacaaaaaaaaaaaaaaagggcgggc

SEQ ID NO: 17950 - DNA, 666 bp, Glycine max
catcaattgactgtattgcaaatactccgcaatcattgttgcctgggatgaaccttttcttatcacatcttgatatcgggttgagaagggacccaagtaattttcgcccaaggatcaacaaacttgattcaaccaaggacagagaacaaaagtctgccgggtcttattattaccttgatgactgagttcatactttggggctgttctttcaccaacacaaccttgcatctgtttgagcttttcatgggatctcagatttggttcagttcatgccttgaaatataagattgccatttttgccgatgaaagcatctttctcaatgaatagaggagcctgcatgcaattgcaagccctatgttggttggtgcattttgtatatttacccttatatttagtgcagttactcatcaccaggtttgctacgacttgggtgggtgaatttgaatattacatgagtttatattggtcatggttttcattcgatgtcctaagtccagaggaacattcataatgtcagactgagtttatcgcccatttcagttgagtatgtaacgaagtttacgttccttccctgttacttaatttagatagatgtcttctgtttggaatatgttgtcgttgaggctgatatcttcgtggatatatatccttacattttttagatg

SEQ ID NO: 17951 - DNA, 448 bp, Glycine max
catgactcttcctccatccttatcggagccgccctcactctccgactcattctcgccgttaaacccagccctagccatggatagtcttcaagccacttacaaagacgaagaagatgaagaagacgagccgcagcctcaaccaccaccaaccaccgccgattcacctgaagcccctcccgccaccaccagcacaccctccgacaccccaaccgaacccccgaacgacgcccgatcggagcccgagccctccgaagatctctccgaggacgaggccgcctccgacggctccaagaaatcccccaaatccggccgcgaagaaggcgacgcctccgacgaggacccaccgccgaagaagcagaagcagctctcctctctgacggaggcaacgaatgaggacttggtagcgccgcatgatggcaccaacaacgcggcggcgacgccggcaaca

SEQ ID NO: 17952 - DNA, 439 bp, Glycine max
cttgtgagacagagagtactagtgtgataaatcaagagagagagagagaatatggtttccagggttcacaagagaacagccatgtacaggaacctacacctgcttcgttcaatcagatactcacactcggtgtcagattacatacaaggtttaaagcaaaaactggaagaattgaaccagttaacagtggcaacggcacgaaaaatcgttgactatgatccaatgcctaagcttgaagttgaaacacaagaagagggttttgtgatcaaggtgctgagtgaaagcagttgccaggggttgctggtgtttatattggaagcctttgaagagctggggcttgatgtgctccaagctagggtttcttgtgcgcacagcttcagtttagaagctctcggaaacaaagagaacaatgaagatactcgcccattggatgcacaac

SEQ ID NO: 17953 - DNA, 912 bp, Glycine max
tgcgaaactcgagattggtgcaattattttaaaatgcacatgtccaactaactccctttcttctatttattgccttcgcagacacaaaaatcgccatcggaaaccaacaatgcctcctttgactttgtggctggtgctgccttttctcgtgttgctagcggcggcaacaacgtctccaacacgcgccacgacggtcgcctcgtcgttccacggtcaacgagagtttgactatttcgctttcgcgttgcaatggcccggtacttactgcaaacgcacccgcagttgctgccccaccaacggttgctgcagaggctccaattttccaacagtgttcaccatacatggactctggcctgactataatgatggaacctggccgtcctgttgctctggatctagtttcgatccaaaagagatattgacattgactaatagtttagagcaatattggccatcattgagctgtagcaagccatcattatgccatggtgggaaaggaacattttgggctcatgagtgggagaaacatggcacatgctcttatcctgtgtttcgaaatgaatatgattattttgtggcagttctgaatctctatttcaaatataatgttacgagcgttctaaatgatgctggatatgttccgtctaatactgaaaagtatccccttggaggcatcatctctgccattgagaatgcttttcacgcatctcctcaaatagtttgctcgaaagattctgttgaggaacttcgcctatgcttttataaggacttccagccacgagattgtgctcttggatctgacattaaaatcaacatggttacttctaaaaaatcttgtcccaaatatgttagcttgccggagccggtatcagtgagtaacaatggacttcaaagtcgggtctctgatgatgt

SEQ ID NO: 17954 - DNA, 568 bp, Glycine max
gaattttaatccaaataaagacagagtcacgagcactagatcaaccttcatttgtcttgttactaccttctataactatttctctctctcacttgctgcaggcacttgattggaagttgaaaatcaacaaaaacttatcaatctctctttttctctttctctctccggcacctcttgttaaaaaattgttcttttcaccgaaacccgtaaagggtcctgagctagcttcttctcgatccatggtcctggtttttcttcctcttgttttcagcttctatatgcaaaaggggggagaccgaatgatgcaaaatatttataatgtagttacctcactaaccacctaagccatgaaaacaaccttcttctcgtttgggtattctgcgaattggtgcatttgtttaaccctctagtttaagcccgggttggatctgcatttggggtgcaggagcttgggcaaaaaggttgaactttgatggttaattttgagaggcttcaagtgtgagccacatgaagaacttgaagtggcacaagcaaatttccaacagtggcaacaagttggggagaaggc

SEQ ID NO: 17955 - DNA, 558 bp, Glycine max
ctcgagccgcaaatccaaagtacaaaagtggtgttggaacacttcaccccggggaactggggaaggatattttcttcttttttggtggttctagttgttaagggaagatattgtaaccatgaatgttgaagaagaggttcagcgtctcagccaagaaatcaagaggcttggtaaggtccaagcagatggttcttacaaggtaacatttggaacactatttaacgatgatgaatgcgcaaatatatttgaagcacttgttggaacactaagagcagcgaaaaagcgtaaagtactgacatacgagggtgagctactgctgcaaggagtccatgataatgtggaaatcactcttaatcctgcccctgctgaagcagccgcagcagctgccaactgatacaatggttacatgccacactgtatcctgtgcaacttgaaccaccaactagtttttatgatccgtgtaatactattgtattatgcatgaatattatatatatatatatatatatatatatatatatatatatatatatatatgtgtgtgtgtgtgtgaagact

SEQ ID NO: 17956 - DNA, 971 bp, Glycine max
acgaggtgatttggtaggcgagtctcgtagccatcgtgattgcaacatcgaaatggaaacgccgaagagatttgaaggtaaggtagccatcgtgactgcttccacacagggaatcggcttagcaatagccgagaggcttggcctcgagggtgcatctgtcgtcatctcttctcgcaaacagcaaaatgttgatgcggccgcggaacaactgagggccaaaggaattcaagtgttgggggttgtttgccatgtttcaagtgctcagcaaaggaagaatttgatcgacaaaactgtccagaagtatggaaagatagatgttgttgtgtccaatgctgctgcaaatccttctgttgatgccatcttgcaaacaaaagactcggtccttgacaagctatgggagataaatgtcaaagccactatacttcttctgaaggacgcagtgcctcacttgcagaagggttcttctgttgttatcatttcctcaattgcaggttttaacccgccaccttctctggctatgtatggagtgaccaaaacagcccttcttggacttactaaagccctggctgctgagatggccccaaacactcgtgtaaactgtgttgctcctggttttgtgccaaccaattttgcttcattcattacaagtaacgatgctgtgaagaaagaactggaagagaagacattacttggaaggcttggtacaacagaagacatgggtgctgcagcagcttttttggcatctgacgatgctgcttatataacaggagagaccattgtagttgctgggggaacgccttccaggttgtagattccactatcaatcttctctgttgtgggccagccccacacattcctgaagctcttgttcgtctgaaattattacatgattgaggattatgtgttactggcatgagattactaggctatgtttgccattactaatgaaataataaaagttatcacttttt

SEQ ID NO: 17957 - DNA, 460 bp, Glycine max
cacctgcctttttagcttgcagctgccgtccgtgcacagaggagtcttaggaggaacaactgtagagaaaaggatctgccaaattcgctagaaaattcaccggaaacaccacccgttatccaattaaaccagatttttggatcatttgtgaagttgaattgctatccaactgctattcccatttctaaaccttgttacacgagcatcttgatcaatggtctagaaagggaaatagcagttgagtggtgcttcaacgataagttattggatttagtatttatcttagcctgttttcgtgtactttgttttgccggatggaggtatgtgattttgtctatgattcttaatacaataacctacacttactctcattgatggtttgtgcagatctaatagctatgaagcatcgataccagacacgacacggtcacgtgacacatgtaatgtctaaaatattaaa

SEQ ID NO: 17958 - DNA, 478 bp, Glycine max
cgatgcgaaaatatctcgttcatgttaatgttatgataacgaggaatggactatgatgctgttctgttggtgacgattgtttccacattgtgacgaaatctgacaatgaagcgtggagcattgttgtcagtgcttgcctgcgccttcgcggcggtgatctgggcagcgaacggcgacgacaacctcgtcccgcctcgccgggaagtgtacggcaatgggcgaatattcgacatcagtcatcggtaccaacccgagatgccggaatgggaatcgaatgacggcatagggcagttcctgtggcttcccaagagcatgaagaacggttccctcgccaacaactccgaaatgaagtttcccacccacaccggcacgcacgtcgatgcccccggtcacgtgttcgaccactacttcgatgccggcttcgatgtcgacacccttgacttggacattctcaacggacctgctctattagttgatg

SEQ ID NO: 17959 - DNA, 608 bp, Glycine max
ccatggcctccgtagcactcaccaccaccgccctcccctccctccgtctccgccgcaacaccaccgccacactcaaaccaaaccgccacgcttccatttcactcaaaccaaacctccacgcttcaatctcctccttcccaaatttctcactcaaaaaaccacacctaatttccactcgcaaaccctccgctttaacagtcagagcctccgctgcctccatcaccccggcgccggctccggtacagccatggcaaggcgctgccataaaaccgctaatagcctccatcgcgacgggagtaatcctctggttctcaccggttcccgccggcgtgaaccgcaacgcgtggcaactactcgcgattttcctaggcacaatcgtcggcataataacacaacccttacctcttggagcggtagcaatattagggttaggtgtgtccgttctcaccaaaaccctacccttcgccgccgcattctccggcttcggcgatcccatcccctggctcatcgccctcgccttcttcttcgccaagggtttcatcagaaccggcctcggaaaccgcgtcgcgtaccaattcgttaagctctttcgtagctcctcgctaggg

SEQ ID NO: 17960 - DNA, 268 bp, Glycine max
tctcgagccgaatcggctcgagcggctcgagacccgttcccgccgaccgtgaaccgcaacgcctggcaactgctcgcgatacgcttaggcacaatcgtcggcataataacacaacccttacctcttggagcggtagcaatattagggttaggtgtttccgaggccggttttgataaaacccttcgcgaagaagaaagcgagggcgatgagccaggggatgggatcgccgaagccggagaatgcggcggcgaagggtagcgttttggtc

SEQ ID NO: 17961 - DNA, 258 bp, Glycine max
attgcttcttcgttagagctcagattgagatggcttttggaaggtttgagaatgcagttacagctgctgagaaagctagtcagattgacccccgagatgttgaagttgctgttttgctcaacaatgtgaggatggttgctagagctcgactgcgtggtaatgatctttttaagtcagaaaggttcactgaggcctgctcggcatacggggaaggtttgaggctcgacccttcaaactctgtcctctattgcaatagag

SEQ ID NO: 17962 - DNA, 352 bp, Glycine max
gtgtaggtagctttcagaaacctgattctgattctggttatgtttcttacatcaaggtctcgtctggttggaggcgctggcacgggttctgggggcggcggacgtggccataagcacaccatagttgttgtggtcattgtcataatagccttgcttgtcatttgtggtctggtctttgggggagttagataccacagaagaaagcaaaggttgcccgagtctcctagagatggttcagaagaggacaatttcttggagaatttaactggtatgccaatccgttacagctacaaggaccttgaaactgccactaataacttctctgtcaagcttgggcaagggggtttttggg

SEQ ID NO: 17963 - DNA, 552 bp, Glycine max
acaaatcacaaatgtgagactgatacataattattttatttgaatcccgagctgaacagtcttctacttcatcctcattcacgcctccaaactttccttttcatacctatgatacgacgtgtccagttgcggtgattttcagggagtgtgcgtttcatgttccgttgccgtgctttctccactgaaattcctcactgccaaacaatcttttgaggccattctctcgccaactgtgagcaagaaaccctctgttcataaacaatgtggaacattgctcggacactaacaggagataatgaagatcaagaagagggtttgttgggtgaggattcaggtggcctctgctccctctctacaacgcagagaatttatggatttgcttcttgtttggttgctggtctggcttgcatgttactgtcaatgattgattttgcaaaacccatcaaatttgcagcattgttcacctttggcaacctgttagcagttggaagtacagcctttcttcttggacctgcacaacaattgggaatgatggttgaccctgttcgggtt

SEQ ID NO: 17964 - DNA, 531 bp, Glycine max
  unsure (1)..(531): unsure at all n locations
aaagggactagcaaccagagcacttcattattctggcattaccagcttagaggatgctatgagattggatcattgatcatgagaatgacattgatattgatgagatgccattggtagatgtagacattgatatagagtccactgaatcattccctatcacagaagaaatgagaatgaaagcacagagtttaagggtacaagagcgcaaaaggaaagaggaggaagagaaaagattggagagagaacgggtgaaggagaggattcaagctggttagagactccttgaggctaagcggattgcggaagatagtgatagtaaacggtatctagcattgaaaaaagcagaaaaagaagaagagaaaagagctagagaaaaagttctcaagaaaccagagcaggataagttaaatagaaggtataaacaaggattgcctttagaaggccaagcagctgtgaagatcttctgctattgaaatagaacaagaaaagaagtcaanagtctgtttataatacaacagcaaaagctgaaca

SEQ ID NO: 17965 - DNA, 710 bp, Glycine max
gtcttcttctgcgtcgtgattgttgcacattcagcaatggggaatatgtgaaagctggtttagcagaattggagttgtggtgctgccaagcaaaggaggagtatgcaggttcatcttgggatgagcttaagcacataaggcaagctgttggattcttggttattcatcagaagtataggatttcctatgatgaaatcattaatgatttatgcccaatcatgagtgtccagcagctatacagaatatgtacactttactgggatgctaactacaatactcgaagtgtatctccagatgtcctttcaagcatgagagtactgatggctgaggactctaataatgctcagagtgattctttcttgttggatgacagttccagcatccccttctcagtagatgacttctctacatcactgcaagagaaggatttctccgacatgaaaccagcggatgagctgcttgagaatcccgccttccgatttttaaatgagtaggcaagggaagcttagtgtatgtgtttatcatagtcatatagggaagcaacaaaatcagttgttggtccttgtcaaatgggtgtaatccaattttaatttttattccttttcctttctacctaataattttggttttgggtttaccaaccctacatctttgtttggcctaatccttgcatagtcattcgccctgatgtaaaataatttttcaatcct

SEQ ID NO: 17966 - DNA, 455 bp, Glycine max
cccacgcgtccgcccacgcgtccgtttccctatccttcttccatttgtgtatgtgtcaactccttccatgcatttttggccttttccacttctactctctatgcattattttttcgtcaccttttcacgcctcttcatcactctgaattctgacccttcataccttccttcaaaaaaattccatttttcttcccttcctcgcttgttttctccaaaatatcatctgggtattccctggaatttcgtggggtgcccttgttttcttcatcggaaatcgttgttgttgggttccaagcatgggaggctgttgcagccacgatgtttcggttcgagggaaggtggagagcgagatgggtgatagagaatatgagtatgatcatgagaatggtgtgtcttttcaacaaggtggagcattggtcaggttaagaggttcctctaggtttgcatcaatgtac

SEQ ID NO: 17967 - DNA, 358 bp, Glycine max
cccacgcgtccgcccacgcgtccgctgagtgtcctcttattccgtgatgatcgaaggactggaggagaggcctcccgttcccatcgcgattatcaactagagcataaggactcaaaattagataaaaggcagataggtggagagatcactgatcaaagtgaagatgacagtactactagtagtagactgcaccctcaaccccatacatcgagataactgtagtatgataactgaaaagcaatgcgtcatattatctgtcttcctagtagtttgccaatatttatcgttacttgaatgatgaaagaagcaattagttttacctctcatatgcataacgtcttcagttgtaacctacctt

SEQ ID NO: 17968 - DNA, 518 bp, Glycine max
cccacgcgtccgcccacgcgtccgcccacgcttccggaaaattttaaataggacttgttatgacaaaatacaattgcattgctccttcggcgaattggcactggtctctttgccgaacttcagcgttttggtttgggagggaaaattctaaaacctaaaaaatttcaatctcaatcaactcaacgtctgtgatcccaatcgatcacatttaataccacccttcaggattaggtagtaattccgttcccttgaataaataacatgagcaccacagtgcaaagaactccaagatccagcaggcattctttatttttccaggatttggcttcacctgtttctgcccgtagaggaaaattttcgagtccaggtcaagcagctgcagtatcttcactatggcgtgagaactttggtagttcagaccttcctccgcctcctgttttcaccttggaagacagatccgatttttctcctgaatcaggcatactagattatcaaatatcccctgaggctaagtcaga

SEQ ID NO: 17969 - DNA, 382 bp, Glycine max
cccacgcgtccgcccacgcgtccgcaacttgactcagcttgctggtttgaaccttgcaaacaacaccctttctggagaaattcccgacctcaacctgtcaagactgcacgtgctgaatttgtccaacaacagcttgcagcggcagtgtgcctaattccctgctaaggtttcctgagtctgcattctctgggaataacattccctttggaagttttcccacggtttctccggcgcctcaaccgcctcatgagccgtctttcaagtccaggaagcgtggaaggctcagcgaagctgcgctgctgggagttattattgctgctggtgttttaggcctcgtgtgttttgtttctttggtgtttgtgtgctgctcaggaagagttga

SEQ ID NO: 17970 - DNA, 550 bp, Glycine max
ttgaaacaacagcaacggagaggatgagaagagagtgaagtttgtgaaagagatggcactcgtaacaacaaacccaaccatcaatgaggggcctctgttcgccgaagttgacatgggttccgacttcaacgccccaacggttcgagctaccgttgttcaagcctccaccatcttctacgacacaccagccaccttagataaggctgagaggttgttggctgaagctactagctatgggtcccagcttgtggtgtttccagaagcctttgtgggtggctacccgcgtggttcagcttttggtctttcgatcggaaatcgcactgttaagggtagagaggagtttcgcaagtatcattctgcagccattgatgtgcctgggcctgaagttgatagattggcagcaatggcagggaagtataaagtacatttagtgatgggtgtgatagagagggacggctacacactttattgcaccgttctgttctttgattctcagggtcattacctaggaaagcacaggaaaatcatgccaactgcattggagcgggtt

SEQ ID NO: 17971 - DNA, 454 bp, Glycine max
  unsure (1)..(454): unsure at all n locations
cccacgcgtccgcccacgcgtccgcccacgcgtccgcccacgcgtccggaagaaagggttggctttggcccgaaaacccacggccactgcgagtgagtgagtgagagaaaaatgggagagggagagaacacagaaatagaaatagaaacagaaacagaatcagaagcaacatcgacgacatggagcctcggaaaacacactcagataatcggactttcggagaagctcataaatgggaacaacctcagcgccaagattgaggccgcgagggcagataaggaagatggttcggaaatcgtcgtcgtcgtcgaagacgcgcgcgaagcttgccgctgcgggtgtgatcgaaccgctcgtgctgatgctctcttcttccaacctngatgctcgccaatcctctctccttgctcttcttaacccttgtgttcgcaacgaacgaaacaaggtcaaaata

SEQ ID NO: 17972 - DNA, 580 bp, Glycine max
ggaagcagcagcagcatcttcttctttgtctctgctttcgttagcgagtgtgaaaactaggagcaaagtcgcacagaactgtcacgtgactcaacaaagacaacgttgtaatcatgtttgtgttaagaatgcaagaagaacaagggtgactgctgtgcctgtgaatgttgatgatgtaaccacagtacttgaccctgctccagtggaagtcacatggcaaattgtggttggagctatagctggggttaccccttttgtggtggcagggattgaatttagcaaaagaattatagctcaaaaaagatgcgaggtgtgtggagggtcagggcttgttcttagggaaaaggaaaaggactatctccgttgcccagaatgtggtgggtttcttccttggcaatcctggaaaagattcttctccggttaatttctacagcattgtacaaaaaaccatacttcaacaaatgacaactctattttagcagagattctctgtttgtgataacattctctatcatacacaaatgtaaacaacatagtaaagccatttgcaatgattaccaactaaaaaatttataagaaa

SEQ ID NO: 17973 - DNA, 343 bp, Glycine max
tgagaagatcatttcagacgcggttcacagagcttccacatttgatccaaaagttccagctaggatcttaaggatgttcttccatgactgtttcattaggggatgtgatgcatcaatattgctggactcaacacccaaaaacctggcagagaaagatggccctcctaatctctctgtccatgctttctatgttattgatgaagccaaggccaagcttgagaaagcttgccctcgcacggtttcctgtgctgacttaatagccattgcggctagggatgtggtagcattggctggagctccattctggcctgtgctcaaaggaaagaaagatggaagagtctca

SEQ ID NO: 17974 - DNA, 396 bp, Glycine max
catgagtttacatctatacaaggttctcttagtaatgaagccagagacaaagttgtcaaggagttcaaagatggtttgactcaagttcttatatcaacagatattcttgctcgtggctttgatcagcaacaggttaatttggtcatcaattataatcttccaaataaacacagtttacgggatgaaccagattatgaagtgtatctgcacagggttggcagagctgggcgttttgggcgcaagggggctgtatttaacctgatatgtgatgaaaatgatgaaaggctcatgtcgaagattgagaaccattttggcacttgtgtaactgaggtgcgagctcaaagtgttgaagaatataaagccgctctcaaggaagccggtttactgcaatgatgt

SEQ ID NO: 17975 - DNA, 454 bp, Glycine max
caaacaaacacaactctctctatcaacaaaaccaaccaacacaagaaagaaagaaaaacaatggacttgtacggttccttttccaccccttcagattgcttacatattgatgattttctagatttctccaacatcaccaccgacacccaccaccaccttcctcctccgcaaaactctccattcatctcccacgacgacgccaatctcttcttcaatttcccttccgttccggtatccatccatccattattatctaatgaattgctcaataaatgagtgccataaacggtgaagcagagatagcgctatttgtttcttggctgtttatttatgctctctctctgatctcaaattgagtgaagggttgatttttttttttttcttttttatgtcgaggagaagagaagtgaccttcgtgggaaagggaaaaaaattgccttactgtacggtttta

SEQ ID NO: 17976 - DNA, 404 bp, Glycine max
gctgtgcattcctacactggcttaaattggtgggcagccatagttctaacaaccctgttgattcgaaccgctacagttccactcttaataaatcaacttaaggccacttctaaacttacgttaatgaggcctcatttggaagagataaagcaacaaatggagggactgactatggatcccgtagctgttgctaaaggtcagcagcagatgaagaaactatttaaggagtaagtggtttcttaatttgcttgtaaaagatatccttgacattattcttgtggtctcttttaatctattctttatctgctgatactcattttttatcctctcaatctgatgtaattactatttactacatttatatttagtgatataatatacgatgcattagtggagcaatcttt

SEQ ID NO: 17977 - DNA, 1002 bp, Glycine max
agctattacagtagtgacatactctgggtgaagcatacttacgaatttctacagaagtggtttattgatcatccaaagtttagctcaaatcctttttacattggtggtggctcatattcaggaatgatcactggtcctcttgttcaacaagtatatgaaggatacaaagcaagacgcaagccactcatgaacatcaaaggttatgtactcgcgagcccagctgttgacgggtttcgagagcagaacatgaaagttttatatgcataccaaaggagtcttataccagaagcgctctacaagtcaatgaaagaaaattgtaacggggatgatataaacattgatccagaaaacacaaagtgtgtctcagattatagtgtttatgttgagcttgttcgttacataaacgaacaacaaattatggaacctctttgtattactacgcctggcgtgaatcgagaaatcctacaagaagttcaagatcctccaacattttggtgtagaagctattatcatatccttgttgacacatgggcaaatgatgaaaatgtgcggaaggcccttcatgtaagagagggaactaaagaggaattcctgagatgcaacagaaccatggcatacaccacaactcggctaaacacagtagaattttatcggaatctcactaatgccaatctcgaagctctcgtttactggtaattaataattaatttcccccacgaaaattcttttgagtgcagataaaattttcaggtgtgctttggttagtttgtttctctcttcttctttttttgtttcatttaacaagtcgtatttagtaagaaaatttatataaaaattagaatgtgttataaaaatgagagatgtgtggatgcacaattagagagcaactgagtttggcctcctactcacctactcaaagaaaggggcaaatatgtaaaaaagtaaatgttgtaaaaattatttttaattattaataactgacacaaaaagttgcacatgact

SEQ ID NO: 17978 - DNA, 345 bp, Glycine max
atgagttgaaagttggtggtggcgcatcgtcaaggccaggagatttggttgtgattgacatcacgggaaaaattgaaagcagtggagaagtgtttgtggtcacatttgagggggacaagaaaccattggctctagtgatggggtcaaggccatatagtaagggagtctgtgaaggtatagaatatgtacttaaaactatgaaggctggaggcaagaggaaggtaatagtccttcctcaattggggtttgtagagaatggtgctgactttgactcatgcactggtgtgcaaattcctgcacttgctacacttgaatacattctagaggttggaaaagtcttccatt

SEQ ID NO: 17979 - DNA, 376 bp, Glycine max
acacgaaggcaatgtggaaaacaacacaaataatacaacgacttcatggtgcactaatttttacgtcctcgtttttaatgaaatgtttacacttccgctttaatgcattaaacaacttaatagacatatggacacactggccataacgatgacattgggcgcttctagttcggcatcccttacgaagatctactccgccttctataataatgtctgtgatgcttgacagttgctatgaactattcaatacttgtagctgctccttcttgacttatgatgtttctcacgatgatcagaataatcagatgaataagaatgctcataatatctacttttttcacttccatgatatccatcaacagcactagaatccttc

SEQ ID NO: 17980 - DNA, 383 bp, Glycine max
ctgtgagcgagactcggtagtaatagtatagtctacaaggtttcgtattctactacttgaaacctaactcttccttcttcttctacattactcctatggctcccgatgcttccgacgcacttgcagtaaggcagaaagttcaattatttctgaacgcggctcgtactggttcaattgatctcttgaagaaattggcgttgcagctggacgagggcaaggatttggcgaaatcggtggaagcaataaaggacgccaacaagagaggagcactgcattttgccgcgcgagaaggccaaacctctgtttgcgagtacctcttaaccgatttgaagctctctgtcgattctcaagatgatgatggcgagactgcactcattcatgct

SEQ ID NO: 17981 - DNA, 483 bp, Glycine max
gtggagtattatttcagtgatttaaacttagctactaccgatcatttgatgaggttcgtcaacaaagatccagaaggttttgtgcctatatctgttgttgcatctttcaagaagattaaggccctcatagcgagtcattcccaacttgcaactgttttaaggaactcgtcaaagcttgtggttagtgaagatggaaagaaaatcaaacgccagtatcccctgactgagtctgatatagaagagatacaatctcgcattgttgtagctgaaaacctacctgaggatcattgccatcagaatcttatgaaggttttctcagcagttgggagtgtgaagaccatccgtacctgtccacctcaaacttccaatagtggggcttcttctgcttcaagattgggaaaagttgatgggatgcctttatctaacaagttgcatgcatttgttgaatatgaatctgttgagctggctgagagagctgttgct

SEQ ID NO: 17982 - DNA, 818 bp, Glycine max
tccgtcgtcaaagacaccgatttaggggttaaaaaatatcgattaacctctgatatttctcttagctgcagtctgcagtgagaatcggaaaatctccgaacccgctacttcctatcctttcaaaagagtgtgactgtaatagtgagctaaacaacatcggcagctagatcgtcgaagaaaacgaaaaagaaaagctttgaaaatggctcaggagtcactctcagaaacccccgatatctcgcccccttcgtctactgcacaatcgcagccagatccatctctttcaaggaacgtttcttttagccggctcaacgcacaggcaccagaatttgtgcccactcgcgcctccccacgggccgattttcagcaacctaggctcgttgtaccacctccacctcctcctccagcttcaggtatactacacgtttactcaccacccccaacttcacagttccatgtaccgattcaaggccatgtcgtcccggtccagaatcaccaccatcatcttgctcatcagcatcatgttccggctcactaccgctctcatcatcaccctcatcagtattatgttagctccgattctgccgtgcagcattctcaagttgacccagatcatgctctttcttccaaaagcaagatgtctgacgaagccagtcagaaaattttgaatcagattaaggccctcatagcgagtcattcccaacttgcaactgttttaaggaactcgtcaaagcttgtggttagtgaagatggaaagaaaatcaaacgccagtatcccctgactgagtctgatatagaagagatacaatctcgcattg

SEQ ID NO: 17983 - DNA, 503 bp, Glycine max
acgggccgattttcagcaacctaggctcgttgtaccacctccacctcctcctccagcttcaggtatactacacgtttactcaccacccccaacttcacaagggacgtggccgagttcattgtcatcagaataatcgtgtgggaacacccccttcaaataatacaattttcactgatcaagtcattgccaagcaaccccctgggccccgaatgccggatggtacaagaggattttcaatgggtagggggaagccggttgctgttaatatagcgtaatttgtttgatcaaatgccgatacaagtttgtagttgtgcttgtagcgagtatatgttggtgctgtaacagtgtgattgtgacagtactagtctggctggggcaattctaaaacagtcttctgtttttttcgtgtttttgtcttttggagatgctgtggcctgtggctaacagcggagaaagtagaaaaaagaaatttaaggattggccaaagtggggagtcggcacct

SEQ ID NO: 17984 - DNA, 356 bp, Glycine max
ggagaattgttctacgtcgtcaaagacaccgatttaggggttaaaaaatatcgattaacctctgatatttctcttagctgcagcctgcagtgagactaagaaaatctccgaacccgctacttcctattttctatcctttcaaaagagaaactggaaaagttagctaaacgtcatagctagatcgtcgaacaaaacgaaaagaaaagcgttgaaaatggctcaagagtcactctcagaaacccctgatatctcgcccccttcgtctactgcacaatcgctgccagatccatctctttcaaggaaccgttcttttagccggctcaacgcacaggcaccagaatttgtgcccactcgcg

SEQ ID NO: 17985 - DNA, 351 bp, Glycine max
tgctcaaggacggggccagaagggacttgatgttgaagttggctgtgatgaggattctccttctgtgcctgagccacaggcaagtgagaaacaattagaagatgcttcctttcctgatactcagctgcttgaacatgtgcgggagaagagcatggtcatgacaaagagagtgggcaaaggaaaggtcgtagccggggccggggtaagggacgtggccgagttcattgtcatcagaataatcgtgtgggaacacccccttcaaataatacaattttcactgatcaagtcattgccaagcaaccccctgggccccgaatgccggatggtacaagaggttttcaaagggggggg

SEQ ID NO: 17986 - DNA, 529 bp, Glycine max
aaaggaatggcgttcatttggcggttctgtggtgtgtctctatgcaacttcacagcctctaatgcccagaaaggtccttctccttctctgcccataaccttggacttggagcatcatataacaaccccatctttactttcttccatcgaagaagaagaaggacgcgcggttaataggagacaacttattcttcacacgccagtagctgcagcagctgcatttgcagtcccaaatgcattggcactcaatgatgtgtctgaggatgttcgtgtctacactgacgatgagaacaagttcaagattgagattcccgaagagtggcaagtgggaacaggagacggagaatctagtgggtttaaatccataactgctttctacccaacacaggcatccaattccaatgtgagcgttgtgatcacagggctgggaccggatttcaccaggatggaatcctttggcaaagttgacgagtttgctcagactctagttagtgggcttgacagaagctggcgaaaacccccgggtgtgg

SEQ ID NO: 17987 - DNA, 452 bp, Glycine max
agctgatctgaaaggaatggcgtccatttcgcggttctgttgtgtgcatatgcgagcgtctctatgcaacttcacagcccagaaaggtccatcacctcccacaaccttggacttggagcatcataaaacaacaccatgtttgctttcttccatcgaagaaggacgtgcggttaataggagacaacttattcttcacacgccagtagcagtagctgcatttgcagtcccaaatgcattggcactcaatgatgtgtctgaggatgttcgtgtctacactgacgatgagaacaagttcaagattgagattccccaagagtggcatgtgggaacaggagacggagaatctagtgggttaaaatccataactgctttctacccaacagtggcatccatttcaatgtgagcgttgtgatcacagggctgggaccggatttaattaggatggaatcctt

SEQ ID NO: 17988 - DNA, 623 bp, Glycine max
ccaagttgaattagccaggtaagggctagactctagagatttccgcgtggagaaaacacaattggggttgttccttcttctgcttatatagtacatatagcatgcaagcacataatagattgtgtttgtgtttcactttcgcaaaggactaatccatatcgtagagtcaatcacaaaactctctactttgccacaaatgagtgaccccaagtatgcttatccctaccctgctcaagggtattatcaaggtcctcctgtgatggcaccaccgcaatattatgctgctccaccaccacgcacaagacaaactggattccttgagggatgtcttgcagctctgtgttgttgctgcctcatagatgagtgctgctgtgatccctcaatcttatgtatcatctgatgtgatcaaaattgctgcaagtaggaaaaacaaaatgaagaagatacaagtacatatatatgcagtgtgatgcttccagagggcttcagttagcattatgtttagttgaatagtagtcttacttttatccagaactagaacttatgttgtgcttgattaacatggtttctttccatcttggtctttggtggggtggcatcaccagtgatttgatttgtaatgt

SEQ ID NO: 17989 - DNA, 521 bp, Glycine max
tcaagatttggattcctgagaaaacatcaaataaaatcaaaacccaaattcgcaggttattgaaaattgaaatcctaggagaaacacatccacagcaaaagaagaagaaggaagaaaccagcgtcactcatctcatcgtggttctgcaaagtcttcttttcttttcggtgaattaataaagggtttttgcgtggtgattgtgttgtgttgtgctgtgctgtgtatctgaatccgcgcaattaggttttgtgattaattcattgattaatcagagagagaagggggaataatgggagatcaagtggagggaacggtgcagaacgttctggaacaggagactctgaagtgggtcttcgttggtggcaaaggcggcgtcggcaaaacgacatgcagttcaatcctatccattctcctcgccaccgttcgctcctccgtcctcatcatctccaccgaccccgcccacaacctcagcgacgccttccagcagcgtttcaccaaaacccccaccctcgtcaatggct

SEQ ID NO: 17990 - DNA, 566 bp, Glycine max
tcgtccacgcgtccgatgagatcaagatttggattcgttgcttactctggagaaaaaaacaatctgaacccaaattcgcaggtcgttgaaagttgaaatccaaggagagacgacaaaagaagaagaagaaaaaggaagaaaccagcgtcacatcatcgtggttctgcaaaatatatttttctttttgggtgaataaataaagggttgtgcgtggtggtgttttgttgtgtttgtgagtatctgaatccgcgcagttaggtttgtgattgattgattgattgatcaatcaaagagagagagagagagagagggaatgggagatcaagtggagggaacggtgcagaacgttctggaacaggagactctgaagtggatcttcgttggtggcaaaggcggcgtcggcaaaacgacatgcagttcaatcctctccattctcctcgccaccgttcgctcctccgtcctcatcatctccaccgaccccgcccacaacctcagcgacgccttccagcagcgtttcaccaaaacccccactctcgtcaatggcttttccaacctctacgccatgg

SEQ ID NO: 17991 - DNA, 521 bp, Glycine max
ctctgctaaggcgtgttcaacaatcggcggcgaaaatgccttcccacaagaccttcaggatcaagaagaagctcgccaagaagatgaggcagaacaggcccatcccttattggatccgcatgagaaccgacaacactatcaggtacaatgctaagcgcaggcactggcgccgcaccaagctcggattttaaggtccatgtcaacctccgactcgagatttttatattgtttttgttattctagaatgttactagcaatgtgtaaactggaaaggttttagcttttggtcatgtggtcacacagagggatcattgttgagcgtttccatatctctattttgtttttgtactttttttggatattaatctgagactgagatggtagtttttatttactgccttagatttttatttttctttctttttccttcaagtttgcaaacccaatttcgtaggaatgttgaatggtgttgttctctactgcttgatgatagttagagtattacaatgcatagttgctta

SEQ ID NO: 17992 - DNA, 420 bp, Glycine max
  unsure (1)..(420): unsure at all n locations
acgagctgctaaggcgtgttcaacaatcggcggcgaaaatgccttcccacaagaccttcaggatcaagaagaaactcgccaagaagatgaggcagaccaggcccatcccttactggatccgcatgagaaccgacaataccatcaggtacaatgctaagcgcaggcactggcgccgcaccaagcttggattttaaggtcgatgccaacctccgactcgagatttttgttttggttttggttttctagaatgtcacgagcgatgtgggaaggttgtagctttggtcatgtggttacacagaatgatcactgtagagcgtttccataaccctattttattattctatttttttggctattaatgtgaaactgtgatggtagtttttattttactgcctttgattnttattttgcttccttttt

SEQ ID NO: 17993 - DNA, 574 bp, Glycine max
cccacgcgtccgatcttgttccactttttagttagggtttggtttctaccgcatatcgcagtttcttccttcatttcatactctctggcaaaaccctcgtcgacggtgaccaatcggtggatcaaacatggacaagagcatgctagcggatttggattcgctccctgaggctgataagcaaagaatgactgtcatgatcgatcagctccaaatccgtgacagtctgagaatgtataattcactggttgagagatgctttaatgattgtgttgacacatttaagcataaatccctgcaaaagcaagaggaaacctgtgttcgaagatgtgcagagaaatttctcaagcattctatgcgggttggcatgaggtttgccgagctcaaccaaggagctgctacacaagattaatttctgtttaacttcttccaatggaaaactgttaatttattattgttattattttgaatgcagttcgtttacttgcatttttgatcctgaaaaatgagactgtagagaattctaatttgctattggtacacaataatttgtgctaaataatttcatcattatgca

SEQ ID NO: 17994 - DNA, 274 bp, Glycine max
aaacactcaagtaatcatccagtgcaagaagtgttacatcacagaaaggttttgagtttttacaagccagaagatgtttcaagcctctatgtgggtctatttgcttctaaatttccacgctcatttctccaagcttttcaagcagcagagctaggtgcttcatctgacatcaaaaggggacaagacttctgagcttcaacaattgcaattcttggtgtttttggagtggctgacacaagataatggctcttcaccaccgcttgttgcttgtcga

SEQ ID NO: 17995 - DNA, 505 bp, Glycine max
gggaccacttcaaaccttagcatatcctaccatattggcacaaccccatcatcatcatcatcatccatggactggttctcttggctatccagaaccactcttgaaccttccttaatctacgactatggcctcacctttgcccgcaacgagctccaattggaagatgcttgctacttcaaccacgagtttcttcagagcatgggaatctcaattgccaagcacaggctagagattctcaagcttgtgaagaaacaagaaggaggaggagcagcacggcccaataagaagctctctggggtcatcaaaaagtgcctaaggaagtgcatgaacaagtttgttgtttctcatgatcatcatgcaatcaaacacatgccatgctccatggtgaatgtgtcagtgccgtcaccactaccaacaccaccacatgagattagttggtaccatcaagggaaattaaaagggtcacttgtgaggaagcaacaacaaaggagtgaggaacttaatg

SEQ ID NO: 17996 - DNA, 363 bp, Glycine max
gccacgcgtccgccctgttggatctgtatattatctgacgtggtgaagatgaatgatgcactctagaagaaggaccagaactcaaccttatcacttgtttggatgcggggtcatcatccgataatgcaaattcttcatcagaaacaacaacaacaacaacaacaaaccctcttggtaattctgatgctactgagcctagagtgttctcttgcaactactgccacagaaagttctacagttcacaagcactaggtggccaccaaaatgcacacaagagagagaggtcaattgcaaagagaggacacaggttttggatctcagattatggcctttggccttccccttttgcatcataacaacaac

SEQ ID NO: 17997 - DNA, 673 bp, Glycine max
gcggacgcgtgggtttgtgagagagaggcgttcgaaaaagatgaaggtttggagatgggtggtgagtttgatgttagtggggttactgcccgtgtcaacaatgggtcgattcgtggtggagaagaacagcctgagagtgacatcgccggagaaaataagagggacacacgacagtgccattggcaacttcggaatacctcaatacggtggtagcatggccgggaacgtaatttaccctaaggataacaaaaagggttgcaaagagttcgatgagttcgggatttccttcaaatcaacccccggtgctcttcccacaattgttctactcgatcgcggaagttgcttctttgctttgaaggtctggaatgcccagaaggctggtgcttctgctgttcttgttgccgacgatgttgaggagcccttaattactatggacacccctgaagaggatggctcttctgccaagtacgttgagaacattactataccctctgctcttgttggaaaaagttttgctcaaaaactaaaggatgccattattgttggcgatatggtcaacgtaaacctcgattggcgagaggctgttcctcacccagatgatcgcgtcgagtatgagttgtggaccaacagcaatgatgagtgtggtcttaagtgtgatatgctcatgcaattt

SEQ ID NO: 17998 - DNA, 341 bp, Glycine max
accaatttcagcacaacttgaaatcctagtacttttctatctattaactttttctttgggcacaaaaagcactcacaaaaatggcaaattctcgcattgctaggttcttcatggaggtggcaccaccacagtatgttactgtgatgaggcacagaacatcaaagatgttggacactattactgaagatgagagggagattagcaccagtgattctgtcatgtcaccccctaaaaaaagcaaatcagcagtagcagttgcagcttcatctgcttctgcttctgttaccaatgttaaaggaaggtgcttcctcaaagaagtgcatagatccctctcaattttg

SEQ ID NO: 17999 - DNA, 267 bp, Glycine max
aggacatcttcgcgctcctctcccgacccctacccttcgaccacggtcataaggtgggtgctgctcttcaggaagtgtggctggatagagtcaccgggaaggtttgcatgtccatttcggcgaaggcgatgacaattaacggaattgatgaccggagatactggaattggattcctactgaagaatctaggtttcacactgtggcatttttgcagcaaatatggtggtttgaagtggatggggaggtaacgttcccatttcctgctg

SEQ ID NO: 18000 - DNA, 782 bp, Glycine max
attttgagacaccaaggacttgttaagccaaaaatcatggatagaattaagtccaagagtgagatgtctctttgcgagaaatcgatgcaggttgtagtaaatgtcattaggttttcctctttctctattgctcagaagactcttggagctaccagtacaacaaaggctggtccagggtctgatatggaccctgatgaggaaccactggttgctgttcctgatcagttcccagcagcaagcaaaaggtcacaacagccacagagccgcgccaaccccacatatgtgatcaagtcagctggtagcatcggatcaaccgaacatttgatttatcaagagagagtccctggtgatgttaatccaaagaaagagcagtgtgttgatggattggcttctgactatatcagtaagatacgtaacaagctcgggcgtggtgtataaggagaaatcattacatgtttcaggaccatgtggtcctggacattctctgcgtgacatgtaactacatattttaattcacgaaaataatatgtcacatggagattgactgagaccaacatagtcttggaccatataataatttcttgtgtataagaagagacttgaaattaaaagtcttggcttatgtgctcctagtaaaactattgtcttcatagatttatgtgttccatgtattatagtactacttacataagcagccattttggtttgcattaaccagctgtaataaacttagtagttgttgggatctctagctaaaagaaatgatgtggctgtttctgatg

SEQ ID NO: 18001 - DNA, 523 bp, Glycine max
atcaccattgtgtcttcttcactccaccttcttcattcccacccaattgtctccccattaaacaataacatgaataatattaggaatggatacagagaagaaaaatcattctgctatttccaccccaaacaggtacttgttggggtgtgtcccctgtgcttgaatgagaggctcctcatactgtttgcaaaacaaggtcgccaccacaaccgttcttcttcttcatccatatcttcacacaggcttcaaagtaattccagacacagaaaaccaccctcttcttctattcacaagatctttgcttttggctctctcttcactcgcccagaatcccaccacaactatgactatgatgatgtctctcccactccagaagagtcattcatctcaatcaagtttgaagagaatggggtggcatcgtgggaaaagagcacagtgtcaaagaaggtgtcgtcgtggaaccatcaaaacaaggagaacaagagagtgatagagcatgggaagtcacgtgacacgtttaggt

SEQ ID NO: 18002 - DNA, 258 bp, Glycine max
ctcagatgaggagtgttttcctcaagtgcatgatgcaggagatggactgtggtgggctgattcgcgtgccttcgccaaaatgtgatccgttgaagaactttggagtggtgtttcctatgttggaggatattttgagctgtgctagagtgatacaaatggtggtgatggaggatgggtttaaggtgatgtgtatggtggatcctttggcgagggaggttgcggggtatcgccagaatgaggggttttggaatgagttgg

SEQ ID NO: 18003 - DNA, 798 bp, Glycine max
cccacgcgtccgcccacgcgtccgcttcacttccacgcctacatatctctctcattacctatctgccactccacttcccttcaaaaaaataatagcacagaagcagaatcaagagtggctatagcgtagatggaaggagtaggagcacgccacaacgaaattagcgacggaatgcaatgcatgaaccaccctcacagaaacaacaacaacaacaaccctggtgggaatctgcgccttgtgtctccaagataaactccgcaaccttctctcttcttctttccctacttcatcacctcctttttcttcttcttcttcttcttccccttctttcacttcttcttcctcggttaaaaccgaccacgaccacgactacgaccactacacgcgctctcgcctccctttcctcgtacccaagaaaaacatcatcatcaacaacaaaaaaccgtcttctatttcaacaaacatcattttcaagcgcagcaagtccaccgccacacccagaaggaacaacaaccagtttctcgaggaggaggactttagtcccagaaaaagaaacggcttttggtcttttctctatccttcttcttcaaatgggaagcacagagacaagtgcttgggaaaaaagagtgatcacgtgattgttatggaagaggacacgtgtttcagttcttcttccaaggtttcgagatctagatctattgggtgcggtagcaggagcttctccggtgatttcttcgataggatctcttctggcctcagcgattgcaccctccggagagtggagtctcagcgtgaagg

SEQ ID NO: 18004 - DNA, 806 bp, Glycine max
  unsure (1)..(806): unsure at all n locations
atgctaaatcacgaattgggatgccaaagctggagggcacatgtgagactttggttgatacatttgtattcttagacaagaacaaggatggatatgtcagcaaaaatgagatggtccaagctataaacgaaactacatcaggggagcgttcttctggaagaatagccatgaaaagatttgaagaaatggattgggataaaaatggaatggttaacttcaaggagtttctatttgcttttacacgttgggttggaattgatgaagttgaggacgaggaaaatgaggaggcataaacatgtcatctaaatatctgactgcctcttcagccaaggcaaaagggcttttctggttttcccttgcaataaaggccaagttgctgcacgttgaattttactgaaactgtcattcctgaagttcattatgtaaatagtaagtgtagaactcagtgccgtattgaagaaatgttcaaatttatgtgttaaatgctactaccatagtgattatgtatcggttgctgcttctttctctttctcgcttagtattcaattctgctatgtattgaactataaatagcctgtgctagtgcactacaataatgagaggcaaactggcaaagtgcatatctactcattaagtagtttagcccttcctaaagagcatatatatctacatgtgatgaaatgggttaaactagctagcaagtagcaagaggcaagaatcttgcacgcatgagatcaggccatgtggacttgatgtagtgtaaattgtctgatttttggcaaaaaaaaaaaanaaaaaaatacaaa

SEQ ID NO: 18005 - DNA, 503 bp, Glycine max
  unsure (1)..(503): unsure at all n locations
gggacttgtccttttcagacctgtctgtcgacgccactatttttccatcctcaccagaatatagaccacagtcactcatctttctctctttttttttttttgccttcttttcattcctttcttttcttcaaatcaaggaactcagctatgactaccagagaaatccttcaaaagatgaaggtaaaagttggtttgggttcatcagaccctgactcagggaaaggaaagagcaagatgtcaaagaacataactcatggttatcatttggtgaaaggaaaatcatatcatgacatggaggattacgttgtggctcaatttaagcaaatagataacaatgaattgggtttgtttgcaatattcgacggccatgcgggtcagaacgtacctaattacttgcggtcccatttgtttgataatatcttacatgagcctgacttctggaaaggacctgcagatgctgtgaagagagcatacagtaaaactgattctaatnatttagatat

SEQ ID NO: 18006 - DNA, 658 bp, Glycine max
catttactgccaatgggtgggtgcaatcatatggatcccgctgtgtcaaacctcccatcatctatggtgatgtgagccgtcccaagcccatgactgttttctggtcttcaactgctcaaagtttgaccaaacgaccaatgaagggaatgcttactggccctgttactattctgaactggtcctttgttagagatgaccaaccaagatttgaaacatgttaccagattgctttggctatcaaggatgaggttgaggatcttgagaaagctggtattactgtcatccagattgatgaggctgctctaagagaaggtttacctctgaggaagtctgaggaggctttctatctaaactgggctgttcactcatttaggattaccaactgtggtgtggaggacactactcagattcacactcacatgtgctactccaacttcaatgacatcattcactcaatcatagacatggatgctgatgtgatcaccattgagaactctagatcagacgagaagttactttcggtcttccgtgagggagtgaaatatggtgccggcattggtcctggcgtttatgatattcactcacccaggattcctcccacagaagaaattgctgacaggatcaacaagatgcttgcagttcttgaaagcagcattct

SEQ ID NO: 18007 - DNA, 348 bp, Glycine max
gaaagaaagggttaccgtctagaggctcatttctcagttctttgtccagaagtttggcacaggggcatcaacccaagaaatttgataactaggaacaagcttcatgcagccatcaaattctgtctcttctctctatctctttgcctcactcgggaaacatgggtgttggtagatcaaattgatcttaattattgtttggtgcattcatgattgattgttttagagtgtgggaggaattctagttccattttttcattgcccattcaatccatatgattttttagcccaagccaaatttcccttagggtttactttgtaattgttacagtttggtgatataatttatgt

SEQ ID NO: 18008 - DNA, 924 bp, Glycine max
gttggatagagcactttattgtcaagataaatgagggtcaaagtaagcgcattagatgcatggaacacaagtgcaattccatatgtgatgatgcccttgtaagaactctactcagtagagagcaccctcatatggcagagaaatatgaacgctttctgcttgaatcttacattgaagacaataagagagttaaatggtgccccagcacacctcattgtgggaatgcaatacgggtcgaggatgatgaactgtgtgaggtagaatgttcatgtggtgtacaattttgttttagttgtttgtcagaagcacactccccttgttcatgtctgatgtgggagctttgggctaagaagtgtcgagacgaatcagaaactgttaattggataactgttcatacaaaaccatgtccaaagtgtcacaaaccagtggagaagaatggtggctgtaacttggttagctgtatctgtggccaagctttttgttggttgtgtggtggagctaccggccgagagcatacttggtcaagtatagctggtcatagctgtggtcgatacaaagagcaagaaaagacagctgaacgtgcaaagagggatctatatcgttatatgcattatcataaccgatataaagctcacacagactcctttaagattgaaagtaaactgaaagagactatacaagggaagatttccatttcagaagaaaaagattctacactcagagattatagctgggtaaataatggactctccagacttttcagatctaggcgagtcctatcatattcatatgcatttgcattttatatgtttggagatgagctttttaaggatgaaatgacagacgctcaaagggaaataaaacagaacttatttgaggatcaacagcaacagcttgaagcaaatgttgaaaagctctctaaaa

SEQ ID NO: 18009 - DNA, 557 bp, Glycine max
tctccacgtttccgctgacgcgatggaaaacaatgaagaaaaggaaagaagtagaagaaataacgcgatgggagaacacatcacaacagagaagaaaggggccaaaagacaaatcagaaaccgaaaaggaattgaacaaaacaaaatcgttcacaaacacaaaggcaccaaccaacctcttcgaattcgcgttttcttctctcttcgcctcgcagtgtatgtactgcaatcctcccaatttggttgagactccacatatgcgacaaggactgcactctgttctagacctttgtttgaaattaaacattttacattaactttggtcattgatgtggcccatatgcttgctattcaacaagattctcaaggcaggggatgaaagagaattaaaaggagataatttgaatgtgatagatccatacctgtttcagcaaccatcaagtaacatagattcccatcctccctccttgcgccgttcacacttctttgaagtaccacacataaaccaaatatatacatgggattgtggccttgcttgtgtcttgatggttttaaaa

SEQ ID NO: 18010 - DNA, 420 bp, Glycine max
cccacgcgtccgcccacgcgtccgctcaaataccaattagcctaaaaacactcacaacccagcccaagggttttcagtttttctcttcccaaagagttttgttttgtctattgttctcatgggtgggtttgaacagcagatgaaggatagagccaaggagctcaaggtcttgctcaagaaaggggtgaagattgtgggagattcatgcaagaaggggtggaacaaagtcaaacacatcaaacgctagctgattagtgatttgtaatcatttgttgcatggcttattatcccaaagtctcttgattggttttcgtttttggtattgttatttgtactttcataggtttggtttgcatgtaaaatgtaatccttctatttttttgtccctctctccccttttttggggttggtttttgtctc

SEQ ID NO: 18011 - DNA, 410 bp, Glycine max
ctcttcaacccaaaacccatttcttctctcttaaccccaattttctcttcctatagttaggaattaatcttttttgttctccttgtttaattaattgataatttttggtgatgggcaattacatttcttgcaccttggctcctcctttgatgaagaacacaagggcagcacgcgtgatcttccccacgggcgaagtgaagcaatacaaggagcaagtgatcaatgtcgccgagctcatgatggagtgccccactcacttcttagccaactccaactccctacacatcggacgccggttttcgcctctcggcgccgacgaggagttggagtgtggcaacgtctacatcttcttcctcatgagaagactcaattccgttgtcactgccgccgacgtggcagtgcttttcatg

SEQ ID NO: 18012 - DNA, 463 bp, Glycine max
  unsure (1)..(463): unsure at all n locations
ctttgcttgcatatcatagacaatgcattctaatcttgttgggtcttcttactataaagaactgtttttatcttgtatattttcctgtttctttcaagataatttgactatcaatttccatggtaattgaatatcttggttagttttctgactagtgaatatgtggtcgcaggtcctgcaccactatacgtgctatgtttccagtaactgtgcttaagaacctaacttgttttgtgtataaagacgctcagagaccagaccttcctttttttcattttattagttttttgtttaatacttttttcttcctaattgttattattctttctattttctatattgggtatagccagatgtcagtctcggaagtgttgtataaattgaagatggggctaggaggatgagtttggagtaaatcacatgatatttgngaggtgaatggctgaaattgctgctcacgctg

SEQ ID NO: 18013 - DNA, 774 bp, Glycine max
cccacgcgtccgggtttgtgaaggtgaggccgctaagaatattcagaggccttggcatgctgtgtggaaatccaagaggttgatgaatattgttactgagattagtggaaggttggactgggattttgacgccgttcatgtggttcggggagagaaagctcagaacaaggagttgtggcctcatttggattatgatacgtcgccggatgttcttgtcgagaagcttaaatggatggttcagccttggagacatttgtacattgccaccaatgagccttattataattactttgataagttgaggtcaaattacaaggtgcatctgcttgatgactataaggagctgtggggaaatacaagtgagtggtataacgagaccacacttctcaacaatggaaagcctgttgagtttgatgggtacatgagagttgcagtggatactgaggtcttttaccgtggaaagacacgcgtggagacgttctacaagttgactaaaggttgcaaggatggagttaatacatgctgatcaggttggcacgactgatttgggtgctttttcagaatgcatggtacactcgggccttgctttttggattcagtttcagattcatgccattgggttagatatgagcttgttgttgtgcttgcttgttcctttggtgtattgatgatttatgttgataaccaggattttgtatccatacaagagaatccctttctcccctctttcctctctattgaatcaagctgctaaatccattctcatttctcatt

SEQ ID NO: 18014 - DNA, 367 bp, Glycine max
cccacgcgtccgcccacgcgtccgcgagcgagtacgacgaagagcgcgtgatggagtgggaggcgggtctcccaactgccaacgatctcacgcctctctctcagccgctgatcccgccggaactcgcgtcggccttcagcatcttgccggagccccaccgcaccctcctcgacgtcaaccgcgcctctcgcaacacgctctccacgctccgcggcggcggagggagcgtgcacaaggccttctcctcctccaacaacaaccacaactacgacggcgacggcgacggaggcgtctaggaggaggaggaggaggacgacgatcgcgacggctcggggccggattcacggaagcagcggaagatcgactg

SEQ ID NO: 18015 - DNA, 589 bp, Glycine max
actcacccttgttgcatgttccttacttcctccaacaaacacagccacacacacacacacttggatcaactttcctcgtcccttgctttccactccaacacggtaccaaccaacctaccaaatggcagccaaaccagctgaagaagctcctcaaggagaaaccctcaagtaccagacgtgggctttgaaagtattgatccactgcgatggctgcaaaaggagagttaagaaaattcttcagggaattgatggggtttatacaacagaggttaattctctgctgcacaaggttacggtcaccggtaacgtggacgctgagactctcatcaagaggctttcaagatcagggagggtagtggagctttggccagaaaaaccacctgagaagaaagataataagaagtctgggaaatccaataagggtggtgctggtgatgctaataaggagaaggaagaccaaaagaatagtgaaccagattctgatggtggtggttcaaatgagggttctaaagacgctcccggtgaagattctgacaaagaaggtcatagttatgaatgtgaggaggcaggtggtgctggtgaaggtggc

SEQ ID NO: 18016 - DNA, 340 bp, Glycine max
ggataatggaagctagtcttaggagggcgaggcagaggaagcgataatggcaataagaggcataggaatgtcgttctctgctccatcaacaacaagacccatactttccctcaacccacgattcatttcagcgtcatccacaatcccattatttctcgttcccagcagaagcagttatctgttattatcgttctctttcagcaggcccgaaacagagtgccctgttccgcacgagcagcagcccatcaacgagtaccaagccctctcgacttcgttcccgttctcgtgggcccgccgcgacgtgggtgagtacgccttgcgcctcttcctgacgggggcg

SEQ ID NO: 18017 - DNA, 728 bp, Glycine max
cttagaattgcgaagccacagcattttctacccatacatggagaactcttgttcttgaaggagcacgaattacttggaaaatcaactggcattcggcacacaactgttattaagaatggagagatgcttggagtttctcatttgagaaatagaagagtcctttctaatggttttatttcacttggaaaagagaatttgcagttgatgtatagtgatggcgagaaagcgtttggtacatcaagtgacctctttattgatgaaagattgaaaattgcattagatggcatcatagtggttaacatggaaatatttcgccctcaaaatttagacagtccagttgagaacaccttaaaaggaaaaataagaattaccaccagatgcctgtggcttgacaaggggaagctgttggatgctctccataaagctgctcatgctgctcttgcaagctgccctgtaagctgtccactggctcatatggaaaaaattgtgtctgagatgttgagaaaaatggtgaggaagtacagtggcaaacggcctgaagttattgccattgccatagaaaatcctgcagctgttcttgctaatgagataaacacaaagttgtctggaaaattaaatgtggatgggatgtcggcattgagaaaagtggtggatggacatgagaaagagaatcagagaaccgaaatgcaaataagagatcgtattgatgtaggtggtctactacctac

SEQ ID NO: 18018 - DNA, 676 bp, Glycine max
ggacggagcagaggacaagatgggtagtgtgagttatagcaatctgaagaacgccatgatagcattcttggtccctctaccctccatcctattctacctctcattccaatcggccattagtactccttcttcttggtcttctctgtggacatggtgctatcaccaccctctgctattggccaatgtccttttcttcttcaatgtcaatttcctcttctggctcatcggcctaatccaatccagccactggatgattgacccgtattggacagtgatacctgtgatgcttgttcattactattcaactcaccctttggcacagtatcagtggtggaggtcgaggatcgtaacgttgttgacttgggcgtggagtgttaggctgatccacaactacttcaggcgagaaaagtggcagtggggtgccagggaggattggcgtttcactgatttgagccatcgctatggaaggcattggtggtgggcttctttcttcgccatctacgtccctcagcaggtgtttctgattggattgtctcttccgttctatgtcatccactcggtgaaccagcctctgagcatgtgggacttggtagccctagttgtgtgtgtatctggcattgtcacggcatacattgctgatactcagctttacaactttgtgagtagaaagaacaag

SEQ ID NO: 18019 - DNA, 431 bp, Glycine max
  unsure (1)..(431): unsure at all n locations
gncattcaccttcattttgtcattccttcttgcaaaaacaaaaaagtcacaattgattatttcaactgatcctcattgaattatggtcagttatattgtaccacttttgtttctgttgccatttgtcttttctttatcttctgtactctattctaaggctttttatatataggggaaatatcaaggttcatcttatctcatttcgtggacacaactcacccatcatttatgctcctgcttggatgtgaagtgtgaactgccattttatgtctccattatggattcttctgaactacgtgttaaaaacgagacttataataatgagttgatgtatcaatcataaaatgtatttagaatagttgtggaaaaaaatatttttttaataacagcttatatgaaattagttttgtgattagatgtattatatgaaa

SEQ ID NO: 18020 - DNA, 747 bp, Glycine max
gttctctccatctacataacacctcaaattctgtgattcgggtaatggccaccagtggaggcgatgaggggcagaacaaccctgccctcgacccggatttggatgctccggatgacccggatcacgagttcgctgagttcgggtcgggttgcttctggggtgctgagttggcctttcagcgagttgtgggtgtggtgaagactgaggttggttacactcagggtcacactccggatccgaattacaaactggtttgcaccggaaccactaaccacgttgaagtggttcgggtccagttcgacccgaaggtttgcccctacaatgatctactcgctctcttttggtctcggcatgaccccacttccatcaaccgtcagggcaatgatgtgggtgcacagtatagatcaggaatatactactacaacgatacccaagctcgtttaggccaggaatcaaaagatgcaaaacaattggaactgaaggagaagattgtgacagaaatacttccagcaaagaggttttacaaagcagaggaataccatcaacaatatctggagaagggtggaggtcaaggcaacaaacaatccgcagaaaaaggctgcactgatcccatcaggtgctatggctgatgaatgatgatcactttcttgctgcacacttcaccatgtctggcttctatcagccatctgttgtgtactccaatataataatattatcaaaaataaaataagtcatggtgtatcttca

SEQ ID NO: 18021 - DNA, 418 bp, Glycine max
  unsure (1)..(418): unsure at all n locations
gacccacgcgnncgctcaatnnggctcataacaagctctctggggagttatcagatgtggtgtgctctttgagaagccttgcaaatctaacggttgcttacaatatcttttctgggttcagccacgaatgctcaaggcttttctttaggaatgttggttttgatttctcactaaactgcattcctgatagggacatgcagagacctccacctgagtgctctggcataccaggtggaagtcttagttgtctcagaatccccacaccaaggcctcttgtttgtggttcaatggctgtaagtaagtctaagaacattattgatcccacttcatcatctcctccttgatgatggttattattagttacattacattacattacaggttggtcatagctgttccattaattactgctaccaat

SEQ ID NO: 18022 - DNA, 416 bp, Glycine max
gcgcccacgcgtgcggtaactttgcacaagtgtggaagatgggaggctcgaatgggccaatttgggggcaaaaagtatggttatctgggtctgtttgacaccgaaattgaagctgcaagggcatatgataaagcagcaataaaatgtaatggcaaggaggctgtcaccaattttgatcctagcatctatgatagtgagcttaattctgaatcctcaggaggtgtagctgcacatcacaatttggatttgagtttgggcaattccagctctaaacataacaatagtcaaacatcggggaatcacttcgcaaattctgcaaccgatcagcatatgccacctgaatctaattggcggaatgggggaagcaagcctaagctggtaaatatacttccaaaaccatgtggtagaagcaacat

SEQ ID NO: 18023 - DNA, 919 bp, Glycine max
ggtgacagcaaagcaaaggagaccgtagctgaagcattacacctcatgagtcttggaacaaatgacttcctagagaactactacaccatgcctggtagagcatctcaatacacaccccaacagtaccaaatttttctggctggcatagctgagaacttcataaggagcctctatggtcttggtgctaggaagatttccctaggagggttacctcccatgggatgcttgccacttgaaagaaccacaaatattgttggtgggaatgactgtgttgccagatacaataacatagcattggagttcaatgataagctcaagaatttgaccattaagctaaaccaagagctccctggactcaaattggtgttttctaatccttattacattatgttgaacatcataaaaagacctcaactttatggatttgaatcgacctcagtggcatgttgtgctactggaatgtttgagatgggttatgcatgcagcaggggccaaatgttcagttgcactgatgcttccaaatatgtgttttgggactcttttcatccaactgagatgacaaatagtatcgttgcaaagtacgtggtgctgcgtgttttatatcaattcttacaataaacaaatagctactagtgaaattttatttatgtacggctatctcttcatgtttgcacattcattataaagtgccatttgggctttctatgaatgactgcatgtcgatgtgtacatatataaaaatgtcaattcagcacatccaccatatgatatgatgtgctgataattagaaataagtcgttttgttttgaacaatatatatagtatttatacttttcaggccctttactagatccagtgtcctccatgtatgttttcctatatatatatatatatatatatgtcctattatgatgggtct

SEQ ID NO: 18024 - DNA, 371 bp, Glycine max
ttttatatcaattcttccaataaacaaatagctactagtgaaattttatttatgtacggctatctcttcatgtctgcacattcgccataaagtgccatttgggctttctatgaatgactgcatgtcgatgtgtacatatataaaaatgtcaatacagcacattcaccatataatgtgctgataattagaaataagtcgttttgtttagaccaatatatatatagtatttatactttttaggcactttactagattcgggtgtcctccatatgtatgtcctattatgttgggtctatagtttgtaatatctatccatggtttggaaatgtcaaattccaagagagaattttctggttaaaaaaaaaaaaaaa

SEQ ID NO: 18025 - DNA, 633 bp, Glycine max
gcgatttgggccaataatgccaatcgtcactgtagacaatatagaagattgctacagtataataaaatcaaagccaaaacctcttgctgcatatctcttcacaaacaatgagcagctgaagaaggattatgtggataagatatcctcttggagggatgctcatcaatgacgcctgtcatccatgttgcaactcgtgggttgccttttggaggagttgaaaagagtggaatgggttgttaccatggaaaattctcttttgatagtttcagccacaggaagtcagttctctatagaagttttgatgcagattctaccattaggtaccctccgtatacacctcagaaggaaaaattattgaaggcccttattagtggcaatattgttcaaattattctttctcttttggggtggtcttaaggatgataaggtccctttaaaaaaaaaaaacgttcatgaattagaagtactgtactaaaacaatgtgcaagggcagtgactcgtggcttcccactttggttgaagtggcaaaagataattacaattttcccctcgagttttcaatctcatgaagtcagttctctatagaagttttgatgcagattctaccattaggtaccctccgtatacacctca

SEQ ID NO: 18026 - DNA, 588 bp, Glycine max
gttattctctcattttccttctctatgtttaagcaaagaaagcttgtgaaaagacatgcagccgagattttcacctctgtcatcatctcaacagtgttctcactgtactcaacagccttagttggacggcttgttcaattagaaccatctttaactgtgtccattctacccagatggcgcacagatggcattggccctcagcatggtatccttatttgacggagccaattcatctctcagcagcagctgtggttgtattaaccggtctggttggagcaaattttgtgcaagcaacccttgataaactcagctttcgtgatccaattgctcggggaatagcaactgcttctagtgcccacgggcttggaacagcagctttgtctgccaaggaacccgaggctctcccattttgtgccattgcttatgctctgaatggtatatttggatccatactttgctcgattcctgctgttagacaaagtttgcttgcaattgttggctgagactgtcatttatgtcacggcctggtgctattcattccattcaatgccataataactccagtgcttatctgttggctgcacaaaa

SEQ ID NO: 18027 - DNA, 412 bp, Glycine max
gcggcggtggtggctgcaccattgattgcaaaaagaagtgcatcgcttattgctaagccataatatggtagcacttatcatcacttgtactagtattattgctagtattactattattattattatgtatgcaattaaacttatattatatggtcatcttggttacccttttagataaataaatgaaaagtagatacatctctatgtaggtgggtttctttttggtgttttgggtgttgcttttgactattatatcttgttaaatctatgggtggaaaaaaatattatgagacactacttggtgggtgagaggagtgttaagcatgggctgtaattttggttactaaataatataaagatggggaagtagtaaaaaaaaaaaaaaaaaaaaaaaaaaaaaggggggtccccc

SEQ ID NO: 18028 - DNA, 381 bp, Glycine max
gaaagtgtgtatctgaactttgacaactcaatttcaccttacgagttttttctgtatgcaatgttacacgatggggttccattgtacactactaccattattggttgggaatttgtgagatttaagcaaaaatacaaacttataaactgaagatattgcagccccatctcccatctcccttttgtactgttctggccttgcaggctgtataagttatctgacagattgtgcaatcattgtaaacatgtatgctgacatactttagtgaatcacatatagcatatggatgattatttgtctctgaaattttccatgatgatggaatgattgagtccgttgattttaataatggaaggcccctaattcttggaaaaaaaaaaa

SEQ ID NO: 18029 - DNA, 502 bp, Glycine max
gttcttgggttttcaactggcgtggccacaaatggagtgagcgatgagagacagacagattcaatggaagagtgttcagaatggttgaaagcacatggggccagcggaattactgataacaacggagatatgctgctagatacaaaagtttcatcatctaatctgtttgtgccagagccagaggatgctgttgcccacggagatgccaatcttgctggtgatgactttttagcacgagcgcctttatagccaagtttgttgtttttgaagcgcatagtgagatgtcattcaggaaagtagcagaaaatatgccgcagccttcatgtgcttatattgcaagcaggctagaaaaaggctgtgatggtgattagtaaactggaatatacaatattgaaaggaaaaaaaaagccgcctaacgttctctaatgaaacggggcttataaaaacattgggtgcttgcttgctagcttacaccattctttcctggggaaggacaggacta

SEQ ID NO: 18030 - DNA, 763 bp, Glycine max
tttgccttcccatatctattgcagtttattcgtgagtacactggcaaagtcgatgaactagtgaaggacaaaattgaagcacaaaatgaagtgaaggttaaagagcaagaggaaaaggatgtagttgcacaacagaacatgtatgctcaattgttgcctcttgctttgcctgcaccaccaatgcctggaatgggaggcccaggaggtatgggaggaggctttgctcctccccctccaatgggtggactggggatgcccccaatgcctccttatggcatgcctcccatgggcagcagtttttgacaagtttagcatgaacttggcccctgtgaagagcaatgtaggaacttccaagttttgtgtagaagaatatcttgtgtgatttggatgcagcattctttctttgcttcgggtggcggtgggagatcccaagttaaaataatgtgaagtttttcggtttagattgtgtcataatagtcttgtaagtttattgttttttctgtgttgtagtcgaggcattttttgggctgctgattctagctaaccgataaatttctgtattctaccatttttcttgtaataaatgagttagtcctaggtagaccaaacaaaaaatgaattacatctagtatatataagaaattttccgactttaacaagccagctttatatgtgcatgctgtggccaaaatttcctcacttgatgtggatcacttgatgtggaagctacctgattaaatcctgttgacatgctgcttttccc

SEQ ID NO: 18031 - DNA, 368 bp, Glycine max
cttgccttcccatatctattgcagtttattcgtgagtacactggcaaagtcgatgaactagtgaaggacaaaattgaagcacaaaatgaagtgaaggctaaagagcaagaagaaaaggatgtagttgcacaacagaacatgtatgctcaattgttgcctcttgctttgcctgcaccaccaatgcctggaatcggaggcttactttgctcctccccctccaatgggtggactggggatgcccccaatgcctccttatggtatgccacccatgggcagcagtttttgaagagtatagcatgaactcggtccctatgaagagcaatgtaggaacttccaagttttgcgtagaacaatatcttgtgtgattt

SEQ ID NO: 18032 - DNA, 468 bp, Glycine max
atcaggcttggagttctgtccctggtgctggagcaggcagagtcacttcgaaccggtggaacttcactcacccttttcaaaaacggatggatggtacttgatgcaattggtgcagctaatgatctcagaactcaattcttagaaattcaaggctgagcttgatctggttcacaatatcagctgtacaggatggtggtgaagtccgtggatgggagggaactacgcgccttcaatttcaaacaagaggatcaaagccaagaggtacgtgcagttgagaggagagtgcttttggaaaccttggctagtcagctacctcgggatagcgttcaatattcttcacaattgcaaaggattgaagccagtccaaacggggataccttgttggaacttgtggatgggtctaagctgcttgcaaggattgtgatagagtgcgatggaattcgatcaccaatagctaagtggatgggg

SEQ ID NO: 18033 - DNA, 621 bp, Glycine max
cgagtctagaacaacgtcgaattgaatgtgcctatttaataagaacaaattgaagcccttattcccaattctcctttcaattcaattgcagcaatcttcgtctctgatccatggcttacgttgagcgaggtgttgtcaaatcaaagcgatcaatatggcgacttaaaacaatcactgattttttctgggccattgttaacttcataggcgtgtttttcgcaactatgttctcgatggaaaagtcagatgcgtacagaaaacgttctgtgggtaagaaatgggatggcggtgctcctggaggaggtcctggcggcggtggtggcggtggtagcggtccacgaggccctcctcgtgggggtctcgacaatgttcgtgggctagatagtataaggggacgtgatcatagttcacttcctgcctgcggttcctgctgtggctgaatgttagagatccaatttgtgtatatgccttttatatgttacggtttgtatctggtgttgaactggtataatatgtaaacaaacatcgatacgactttcaagctttatatgtggccataagctgaaataacaaaatttaactatattgacgtaaaaaaaaaaaaaaaaaaaactcgctcgt

SEQ ID NO: 18034 - DNA, 493 bp, Glycine max
aaaatgcaggaagggccacgctgaaaattaaaaaaaaaaaaaacaagaagaagaaaaaggcggggctcactgaaaaagcagtttcccgaattagtaagtaatgaccggaaaaccactgtcagggatactgaaaaccgcctcatctctgaaatcttgttcgtaaccattaatacaacgttggtagtaactcacaaaagcctctgttccctccctttccttcactttaccatgtccatgaaccaatagtagctacctttcacgaacacaaacaaagccactctctcgttttatatggcgtaccaccataacccccaagagcttccacttcaccatttcactgaccaacaacaacaccataaccaacctctcggtgacaactccttgctctccgaccctgcttccaaacctgcctccgatcctcatcaacccgcgccaaattggctcaacaacgcccttctccgcacgcactacactgacaaccacaacaacaaca

SEQ ID NO: 18035 - DNA, 412 bp, Glycine max
gaagagccatgacgtggcacgcacccgtacgttcgcaattcgtttcgcgggagaaagaacaaagaaatgggaagttcattggtggaaatccaagttcccgggcagaagtttgtgaacggagttccgttccccgctgtggtgtctcctccacctgcaactgcaagtgcggttcctcttacggactccgtcaaaacccagaaagctttccttgaatcattgctactccaatcgggtgctgtccttttcaggggattcccactctccaccgcttctcacttcaacgacgtcgtcgaagcattcggctacgacgagcttccctacgtgggcggcgccgctccccgcaccaacgtggtgggtcgcgtcttcaccgccaatgagtccccacccgatcagaagatccctttccaccacg

SEQ ID NO: 18036 - DNA, 646 bp, Glycine max
gttggccgggaagcagctgaatatttgagtgaactcactttaaacagtggaaaagagttcagggccaaggttgaggagaaagatacttccggaggaaaagtgaaagggcagggaactgggacagtccttgctgtaactcttgttgccgtggatgctgaaatcagcgttaatgctgccatgctacaggaagggcttgctaggacagaaaaaagaaacaggtgggacagaaaagacagacagacagctcttgataatttggagaatttccaggaagaagcaaagaccagcaggcgtggaatgtggcagtatggagatattcagtcagacgacgaggacactgctcctcctcctagaaaggccgctggtggccgtaaataagtgtaacaggaggtaaattataaaatagacatcttgagagaacatgactgaagttaataggcttgaacaatttttatttttttttgagctagagagaaaaaagaaaatgccgtgcggattcctttgtaagttttgttttattttttttgtttatattttgtctttaggttggtggaacaattgttttctatagatgtcttaataaggtacatgcggcaaggttctctgttaccatgaggacaacaaagatgttttgttgtcgtttaat

SEQ ID NO: 18037 - DNA, 572 bp, Glycine max
cccacgcgtccgaaaagtagttattgcgagctctggtgtgaacatgatgaagagcagcaacgtggcgttggtgcagagggcacaattggaaaagatcgaggatctgatgttgcctcctacgccacaacatttgcgaatattgatgtcgctgtccattcacaagcctccccaactcttgcctgattttttacttcgggacttcttggataaattatatggagaaaataagaaggaaaaaatggagcttctgaaagggttaaccatcggaagggatgatacttcaagaatttcacctcttcaacaagaggttctcatcgtctggggagaagaagaccgaatatttccggtgaagttggcccacgaactaaaagagataatcagtaaaaaggcaagattggaattgataaaagaggcatcccatgtgcctcaaatggaaaagccaggagaattcaacaacattctcctaaatttcttacaggagcattcttgagtattatataaattaggggcacaatttgtctacatgcgaacgagaatggctacaacaagcgaatacgaaaaccaaaattcgc

SEQ ID NO: 18038 - DNA, 1600 bp, Glycine max
gagcctcgaaaatcgaaagtgaacaccctcccctctcattcattctcccacaaagacatggactcgcattgcttcttcttacgtttccgcttcgcatgttttgttctcttcgcttccgtcgcatgttgcttttcacacccttctctcctcggtatacaccctctagatgagaaatattacaactctgaggtgatcaagtgcagggatggatcaaaatccttctccagagaccgtctcaatgacaatttctgtgattgtcctgatggcactgatgagcctggaacttcagcttgccccaacggaaaattttattgcagaaacctaggtagcaagccgcagtttatagtttcttctcatgttaatgatcatttttgtgattgttgtgatgggagtgatgaatatgatggaatcatttgttgcccaaacacatgtgtcatgggtgggaatgctgagtccacgtttagcaattgcaagtcagaagcaagtcaaaatggagtgaagtcagaggaatcagttcatactggtttgaagttggtgattattctacaagtggttctggttatttttctggtatttctctggagttttcgttgccgcaccagatctagaaggagacattaccgttgaattgaaagagactttgctttttacctgacattgaatggtggtaatattttaaaatattttcttcattttccctttctgagttctttgtgatcgtaatttaatatacttttgaattagttgatgtcagggttcatttcataagaactttccatagtatttgatgaacaacagaaacagtgagaattaggagaaagcatcttggaatttatcatctttttaatttgttttcattcaggaaagatacttaagaaaccatatattgcatgcagtacaacttaagatataaaacctttttccaaatatatttttaaattgactggttgttgctgtatcattgaggcatcaggattaaggtgaagaatatagatataataagtttattctacaatatgatgcttccctttgaccatggcaactatttgtggtagcttaacaccttttgtttttttacacattgatgtcttattctcttaaactttcaacatataattaatggttctttagtatgctattcatgccatggatattagtttttttttttttttggtatggtagatttggcttaaaagatcattatgctataaggcaagcttagcaaacatgcttatctattacttgttgctatttaatatgaacttgactaatttaatttagagtggtgtatttcaatgttcagtatattggttctgttcatatattttacattgtaatatttaaatagttatatgtttgttattgttaaattagacataagtggctgtacatttttgtgtacatatcatatcacgacttttgttattgatgtaccaaatgagttgttactttattgtgattttataattatgtgataatttttcaccagtggtaatgttccattctttataacatgatggagaaaaaattgatattttatgtgataaatgagagggtggctgacatgggtgagttagttattggcactgctgagttcaga

SEQ ID NO: 18039 - DNA, 826 bp, Glycine max
tgccgcaccagatctagaaggagacgttaccggtgaattgaaagagaccttgcagtttacctggcattaaactgtgggtttgatgtttgttatggtacaaggtgctccagtactgtattaatttatcaacagccgtggctagatcaacaatgcacctatttcttcttcatttctgcccttttatgtaccaatgcccttcaattagtccatggtcatcattataaaacctagagcaggctactggagcacaacggactcaatgttctggttgcattccagttcctcaaatcctagtttctctcatctgcaccacgaattcaatgtctgtcacacagtcattttgtatctaatattttacttgaggtgcaatcaattggataacatcttgactgtgggacttgtaatatatctactatcatatcttcgtacagttgatcagttggagttgaagtcctgaaggttatggatttagagtcacaacattgttatgagtgcagtttgcgagttcaagagtttccaaggcactgaatttaatgaatagtgaaatatggatcatccggcacaaggaacattggtgaaattgttggcagcactacggtcaaacagggaaatatataaagctgttgagattattgatttcctggagacagttatgccctactagatttgaagattatatttagcagtgactgaatttagttgtatttggcaagtacatcaaattacaacgatagtacaataactgtggtgcactattgatacacacacccaccgggaaacaatttaagaaattaattgaaatggaaagttaatcaaatttgaagat

SEQ ID NO: 18040 - DNA, 621 bp, Glycine max
ctggtttaggtttgaagttggtgattattctacaagtgattctggttatttttctggtatttctctggagttttcgttgccgcaccagatctagaaggagacgttaccggtgaattgaaagagaccttgcagtttacctggcattaaactgtgggtttgatgtttgttatggtacaaggtgcttcagtactatattaatttataaacagccgtggctagatcaacaatgcacctatttcttcttcatttctgtccttttatgaacgtccttcaattagtcaatgatcatcattataaaaactagagcaggctattggagcacaacagactcaacgttctggttgtattccagttcctcaaatcctagtttctctcatttgcatggttggaggcttgaagcagcaatgtctgtctcatagtcattttgtatctaatattttactggaggtgcaatcaattggataacatctcgattcttgattgtgggatttgtaatatatctatctactatcatatcttagtatagttgatcagttggagtcgaagttctgaagggtatagatttagagtcacaacaacattgttatgagtgcagtttgcaaattcaggagtttctaaggc

SEQ ID NO: 18041 - DNA, 621 bp, Glycine max
tgtgaatcaaataatacattactccattctgatactctactgttgttttctgtttacactgcaatcttccattacattttctcaatccctggccttatcttttcacatatttatactgtctctttagtctctaggtgccatattgatcagatctaagtatctttctgacaaacctctgcagggtttcatgtttgttatggtacaagtccagtactgaattaatttatcaacagctatgattagatcaacaatgcaccaatttcttcttcatttctgtccttttatgaacgtccttcaattagtcaatgatcatcattataaaaactagagcaggctattggagcacaacagactcaacgttctggttgtattccagttcctcaaatcctagtttctctcatttgcatggttggaggcttgaagcagcaatgtctgtctcatagtcattttgaatgtaatgtttttttgtcggtgcaatcaattggataacatcttgattcttgattgtgggatttgtaatatatctatctacgatcatctcttagtattgttggtcaggttgagtaattagttttccaaagtataaaaataaaatcacaacaacaatataataagaacaat

SEQ ID NO: 18042 - DNA, 324 bp, Glycine max
ctcgagccgggagttcaacccaagtcacacgttgcagctcccacaaaaccatttttgctctactttgtatgtatattttgattatcttgatgaatctcgaattaggttttgggtgcagatgagaaatattacagctctgagatgatcaagtgcgaggatgaatcgaaatccttctccacagaccgtctggatgacaatttctgtgactgccctgatggcactgatgagcctgggccttcggcttgccccaacggaaaattttattgcagaaacctaggtagcaagccgcagtttatagtttcttctcatgttaatgatcatttt

SEQ ID NO: 18043 - DNA, 455 bp, Glycine max
ggacgctagtaagtttttcatccaatatcacagaatcacaatagcttttctctccgtgtagactcatccaaacaaacactgtaaaaaccgcaagaactctctatcactttgccacccttcattcataaacactttccattattctatgaactcaaactcaaaacaatgaccactttttctctctactctcatttcctttcctccaagaactctattttccatgcccccttcaaaggaaacaacaacaccaagcaattcactttttccaaagccgcaaatctcttgccgttgcagccacggttaaatgtctgcttttcttcttcaaaggatgcaggctccagtgacaacacaccgagcaacttttgcattattgaggggccagagacggttgaggattttatgcagatgcagctgcaggaaattcaagacaacataaagagcatgcgcaataagat

SEQ ID NO: 18044 - DNA, 2429 bp, Glycine max
tgaatccctccaagctatggaaaaatgtggcagctcaactttctgtctcttgcagggaatgatttgagaggcttcataccaagtgagcttgggaatctcactaacctgactcatctttacttgggatactacaatcagtttgatggtggaatccctcctcagtttggtaagctgaccaatttggttcatctagacattgcaaactgtggcttgacaggtccaattcctattgagttgggaaacctctacaagttagacactcttttcttgcaaaccaatcagctaagtggttcaatccctccccagttaggaaacttgactatgttaaaagcccttgatctatcattcaacatgctcacaggaggcatcccttatgagttctcagcccttcatgagcttactctcttgaacttgtttataaacaagttgcatggagaaattcctcacttcattgctgagctacctaaattggagactctgaagctgtggcagaacaacttcactggagtgattccttcaaatcttggccagaatggaaggttgattgagcttgatttgtcaacaaataagctcactggtttggtgccaaaatctctatgcgtcggaaagaggctgaaaatcttgatcctgctgaagaactttctgtttggatctttgcctgatgatcttggtcaatgccacacactccaaagagtccgtttgggccagaactatttaactgggccactgccacatgagtttctttatttgcctgagctattacttgtggagctacagaacaattatcttagtggtggctttccacaatcaacaagcaacacatcctccatactagcacagttgaacctatcaaacaaccggttttcggggactcttccagcctcaatttcaaattttccaaacttgcaaatccttctgctcagtggaaacagattcacaggtgaaatcccaccagatatagggagattgaaaagtatcctcaagttggatattagtgctaacagcttttcaggtactattccccctgggataggtaactgtgtcttactcacctatttagatttgagccaaaaccaactatcaggccctattccggtccaagttgctcaaattcacatattaaattatctcaatgtctcatggaaccacctaaaccaaagcctgcccaaggaacttagggccatgaagggtttaacttcagcagatttctcttacaataacttctcaggctcaatacctgaggggggccaattctcactctttaattccacatcctttgttggtaaccctcagctatgtggatatgactccaagccatgcaatctttcttcaacagctgtgttggaatctcaacaaaaaagcagtgcaaaacctggggtccctgggaagttcaagttcctctttgctttggcattgttggggtgttcattgatttttgcaacattggcaatcatcaagagtagaaagacaaggaggcactccaattcatggaagttaacagcattccagaagctggaatatgggagtgaggccatcacagggtgcataaaggaaagcaatgtcataggaagaggaggatcaggtgttgtatacagaggaaccatgcctaagggagaggaagtggcagtgaagaagctcttaggaatcaacaaaggctcttcccatgacaatggcctctctgcagaaataaaaacattggggagaatcaggcacaggtacattgtgaggctactagcattttgttcaaacagagagaccaatttgcttgtttatgattatatgccaaatggaagcttgggagaagtcttgcatgggaagaggggtgagtttctcaagtgggacactaggctcaaaatagccatagaagctgcaaaaggactttgctatttgcaccatgattgttcccctttgatcatccatagggatgtaaagtcaaacaacatattgttgaactctgactttgaggctcatgttgctgattttgggcttgccaagttcatgcaagataatgggggatcagagtgcatgtcttccattgctggctcttatggctatattgctccagaatatgcatacacattgaaagtggatgagaaaagtgatgtttatagctttggagtggtgctgctagaactgataacgggacgaaggccagtgggggattttggtgaagaaggattagacattgttcaatggaccaagatgcaaaccaattggaacaaagagatggtgatgaagatccttgatgagaggctagatcacattcctttagctgaagcaatgcaggtgttttttgtggcaatgttgtgtgttcatgaacacagtgtggagcgaccaaccatgagggaagtggttgaaatgcttgctcaagcaaagcaaccaaacacattttaaatgtagtgatctagaaaagtataagataacaagtt

SEQ ID NO: 18045 - DNA, 642 bp, Glycine max
  unsure (1)..(642): unsure at all n locations
gaattcggtcgcaaagcgcgccgaggcagaggccatccacaccagagagggacagggttggatcagcaaagaaaaggctttcttttcctgctcctgacccttatggtgtgggagtgagttatggaaactatggacatagtttaaggagtccaagcttcaagagtgtgagtggatcacactttggcagggttagagcaacaatcaaactactcctcttgctacactgagagtattggtggtggtggtggtgaggtttctccttcttcaactggtgaccttaggaggtggttgagatgatttgttgcacactttaatgagaagaaacatgaccggacccattattaggccatggccataattcacttcatatttgatttttatttgggctttttgtgatgttagagttaattttagtttaaccctttctcaccctcccaaaagaaagttatttaattacccccgggcgacctgaatctgatgttaggaaccagagaagcaagcaagtactttttcttgctaggaaactcagaacaatttaatgtgttcgtttatcattcgtttttcatacttttcttaagatgccaagataaaaagtgagccctatgtggtggcctacctnnnnnnnnnnnnnnnnnnnnnnnn

SEQ ID NO: 18046 - DNA, 1864 bp, Glycine max
cccacgcgtccgcccacgcgtccgcccacgcgtccggaaaatgttgttcgggattctagtgggaaaaagatccaatcccagctggtgccgatacttgatgattttcttggtttaagaaactaccacactgtggcatactcgggagtgtctccaactgtaaaacccaaatactggcttgctttttcagcagctgttcctccactcggttttagtgcacttactatgtatcctatgccaaaaaagaagctactatttcagatagagatacagcttaccaaccagggaataagagtgatacaattacagtgggcctaaaaaaacttgaacctagtttattctgtgaaggaagggaaacttattcaatatatcaacagcagaagcaaggtcaatgaatctctagagcaggcatataaattttacgctgggtatggaaatgatggaacagaaactgctcaggcttctggagcatatattttccgccctgatggttcaccctctcccatcaaatccaacgggaagtctcctctcacagtttttcggggaccaattgtgcatgaagtgcatcagaagatcagtccatggatataccagactactagactgtacaaggggaaagaacatgctgaagttgagttcattgttggacctatacccattgatgatcgagttggcaaagaaattgcaactgagatcaaaacaaatctagcaagcaacaaaaccttctatactgattccaatggacgtgatttcattgaacgtgttcgagactatagagaagactggcacttggaagtaaatcaacctgttgctggaaattactaccctatcaaccttggaatttacctgaaagataaaagcaaagagttctctatattggtagatagagccgtggggggctccagcatcatagatggacaattggagctaatggttcataggtttgttatgctgttcaagctcaactgcttatgctcattgtgtatcattcaatattctaccaatcaaactccactgtctccatttccccgcctattttatataggaggttacttgaggatgattccagaggtgttgcagaggcactgaatgaaacagtttgcattcatgataactgcactgggttaactgtgctagggaagtactatttcagaattgatcctgtaggagagggtgccagatggcgccgatcatttgctcaggagatatactcacccttgcttttagccttcacagagagtgaaggtcactggggagattctcatgtcacaaccttctcagcaatagattcctcatacaacttaccagataacgttgccatagtaaccctccaggatctgggtgatggaagagttctcctacggttggcacacttatacgagattgatgaggacaagtatctttcagtgaaggcaactgtagaacttaaaaaggtgtttcccaacaagcagataaacaaaataactgaagtgagcttatcagcaaaccaagaaagagcagaaatggagaggaagagattggtttggcaagttaaagggtcacctccagaacccaaggtgtggaggggaggaccagtagatccagaaaatctaattgtagaacttgctccaatggaaataaggacttttatcatcagttttaggcattaaaagtccactaggagcactactgaaaaataactaaaataagaaattgcatcagattagatatttccaacatcatgtaagccagcaacaagaaatatgttcagagttcgtttggctaaaggtgtatggactcaatcaagttcattgccaataaaagtgcattgcttctccccttttctattgacatctaaccaaaatttatgactactttttttttcttg

SEQ ID NO: 18047 - DNA, 594 bp, Glycine max
gactgtacaaggggaaagaacatgctgaagttgaattcattgttggacctatacccattgatgatggagatggcaaagaaatcgcaactgaaatcaaaacaaatctagcaagcaacaaaaccttctatactgattccaatggacgtgatttcattgaacgtgttcgagactatagaaaagactggcacttggaagtaaatcaacctgtagctggaaattattaccctatcaaccttgggatttacctgaaagataaaagcaaagagttttctatattggtagatagagctgtggggggctccagcatcatagatgggcaattggagctaatggttcataggaggttacttcaggatgattcccgaggtgttgcagaggcactgaatgaaacagtttgcatccatgataagtgcaccgggttaactgtgctagggaagtactatttcagaattgatcctgtaggagagggtgccagatggcgtcgatcatttggtcaggagatatactcacccttgcttttagccttcacagagagtgaaggtcactggggagattctcatgtcacaaccttctcaggaatagatcctcatacaa

SEQ ID NO: 18048 - DNA, 440 bp, Glycine max
tcggctggcacacttatacgagattgacgaggacaagtatctttcggttaaggcaactgtagaacttaaaaaggtgtttcccaacaagcagataaacaaaataactgaagtgagcttatcagcaaaccaagaaagagatgaaatggagaggaagagattggtttggcaagttaaagggtcacctccagaacctaaggtgtggaggggaggaccggtagatccagaaaatctaattgtagaacttgctccaatggaaataaggacttttattatcagttttaggcattaaaagtccaccaggagcactactgaaaaataacgaaataagaaattgtatcagactagatatttccaagaaatatgtccagggtttgtttggctaaaggtgtatggagtcaagttcattgccaataaaagtgcattgcttctccccttttgag

SEQ ID NO: 18049 - DNA, 1032 bp, Glycine max
  unsure (1)..(1032): unsure at all n locations
aaccgtcaaacccttaacctgaaacatagctttaagcttttaacagtcaaaacttactacaacccagatcaattgcagggactaatatggggataacaaaaattttaatcagttataatttttctgttcttgaaaggtaaagtaggacagtggtgtgaaattggtggaaagaaaaaacatcagtgatcttgagtaactaacaatccatccgtgtaaaacgtgattggatttgggtcagtaatttaatgtacgaattacgaggtggcagcgactttaagtgttgaatggtgtgcaacatagaatcgcattggcgcgaacacgatgatgaggtcaaagatagtgttgtttggagactccatcacggagcaatcgatccgagagaatggatggggtgttcctcttgccaatgcctattctcgcagggctgatgtacttgttcgtggttatggtggatacaacactaggtgggctatgttcttactgggccatctcttccctctggactcaactaaaccacctactgctaccacaattttctttggcgctaatgatgcagctttgttaggaagaaccagtgaaaggcaacatgtacctattgaagaattcaaagagaacctcagaaaatttgttcgacacttaaaggaatgctcaccaactatggtaattgtgcttattactccacctccacttagcgaggaaggacgcctggcttacgcaagatccgtaaatggtgagaatgctaccaaaatacctgaaagaacaaatgaagtaactggtcaatatgcaaacgcctgtgttgaggtagcaaaggaaatgggcgtgtggtatatcaatctatggtccaaaatgcaagaaacggatggctggcaaacaaaatttttgagggatgggttgcacctgacaacagaaggaaatgcagtagtctacgaagaattgataaaggtgttcgatgaagcaggactttctgctgttaacatgccaatggatttccctcaccactcanaaattgattccaaacatccagagagagct

SEQ ID NO: 18050 - DNA, 482 bp, Glycine max
tctcgagccgaatcggctcgaggcgagcgaccatcccatttttttgacttattttgttattcagtttttgtaagtgaaccttatctctcaagcttatagttctagctcttgttccctcaagagtcttggtttttagaagggaaacagcatgtgctctttctcttcaaaacagaccctttatttggcacttcctcgtccatggacatctaagagacaccaccacagtcacaggcaccttcggttgggcatgctcaacagaaggagggcacacttgaaagaagcaagacaaaggaaaaggattgttgtgaaatcagagattcagatgaagaacttgaagttgtacatggagaaccaaaccatcatagaggagaatgagaagttgaggaaacaagccatgcttctgcacaaagagaatcaggccctctcgtctcagctccaaaagaagctttcaggacaaaacaacaataccaacaataactagc

SEQ ID NO: 18051 - DNA, 393 bp, Glycine max
  unsure (1)..(393): unsure at all n locations
aaagtccagaagtaccggactccactgcaagttgcaacttttgacgttttgattttgttgtatagaacaacatggtgttactcgctcactgagttgagttcactggttacacaatgtcgaagagagaagaatttgctccgtggcacttcttttttcttcttcttcttctatgggggtttgtcggcggcgatgcgccggggagggaggtgtggtgcgtggcgaagaacaactcggaggacacggcgctgcaatcggcggaggagtgggcttgcggcgcatgctgatccgattgcggagcgattcatggaggaggaccctgcttcgacccttccagtatgcagaatacggcgtcgtatgctttcaatgattatttncgtaaacacgctatctctg

SEQ ID NO: 18052 - DNA, 910 bp, Glycine max
tcggggacaatctcactgttgggacgtaacctatttgaaattttcgactgacagtatcatcccagctttggtggaagcattgcacaaggaacctgacacagagatgtgtgcaagcatgttggattcattaaatgaatgcttacagatatctggaatgcttttggacgaaagccaggtcagatccatcgtggatgagataaaacaggtgatcacagctagttcaagtagaaaacgagagagagcagagaggacccaagctgaagagtttgatgctgatgagggggacctgattaagagaggaaaatgaacaagaggaagaagtttttgatcaagtgggtgagatataggaactttaatcaaaaccttcaaagccaacttcttgcctttctttgatgaactatcatcatatctgacacctatgtggggaagggacaagactcctgaagagagaagaattgcaatttgtatttttgatgatgttgcagagcagtgtcgtgaagctgctattaagtattatgatacctatctcccattcctgttggaggcttgtaatgatgagactcctgatgtcagacaggcagctgtgtatggtctcggtgtttgtgcagagtttggtggatctgtgttcaaacctctggttggagaggctctttcgaggttaaatgctgtgatccagcatcctaatgctcttcattcagataatgtaatggcatatgacaatgctgtttccgctttgggaaaaatttgccaatttcatcgtgacagtattgattctgcccaggtagttcctgcatggctaaactgtttgccattcaaaggtgatttgattgaggccaaaattgtgcatgatcaaactttgtcaatggctgagagatctgacagtgagcttgtgggtccaaacaatcaatac

SEQ ID NO: 18053 - DNA, 560 bp, Glycine max
cccacgcgtccgtattgctcctggggacaaccttaaccattggccacaaaaactagaggtcaccagtgactacttgtatttttccttccgatctctggtgttggaattcctgataacacaaaccatggctgaattatttatcttcagcatcgctgagtctctcataacaaagcttgcttctcatgctttccaagaagcttctcgggtggtgggtttgtacgaccatctccgagaccttgaaaagactctctcattagtcaaggcagtgctgttagatgctgagcaaaagcaggagcataaccatgagctgcaggaatggctgaggcagctcaaaagtgtcttctatgacgcccaagatgtgttggatgaattcgagtgccaaaccctgcgaaaagcaggtgctcaaagctcatggtaccatcaaagacgagggaagttacagaagacaatgaaattgctctggggtgctagaatcagcaaatccactgaaattggaatcacttttcagcaggcttccaaatatgttcaacatagttatcctctctattcatggatacttt

SEQ ID NO: 18054 - DNA, 493 bp, Glycine max
  unsure (1)..(493): unsure at all n locations
ggtgttgaagactgttcaagtgttttgatattggtttgggacgaggagtaagttaatttgtgtggcgtttccattaaaacggcgtcgtaatcatacgttggtattcagacagcatgaaaactccgatttcgggtttctacagaaaccccgtgaagttcagaatgccaactgcggagaacttggttcccattcgattggacatcgaaatcgaggggcagagatacaaggacgcgttcacttggaacccttctgatcccgattccgaggttgtcgtctttgcaaaaaggactgttaaagacttgaagctccctcccgcctttgtaacacaaattgctcaatcaattcaatcacagctttcggagtttcggtcctatgaaggccaggatatgtatgctggggagaagattgttccgatcaagcttgatcttcgtgttaatcatacgctcgtgaaggaccagtttttatgggacttgaacaactntgagagtgatcc

SEQ ID NO: 18055 - DNA, 447 bp, Glycine max
acgaggccgcttgaggatttcttcaataatgtctttgtaatggtggacgatgacaagatcagagtaaacaggttagctctgctaaaaggaattgctgaactccctaaaggaatagcagaccttactgttctgccaggattttaaggattggtaaaattatttatttcccgtaggatatagaccatattttttttaggctccaaaagttgaccaattaggccgtctttattttttgcgccctcttgattgttgtcttggtccgaatttggcccacttgatttaacaagagtttctatccgtgcgttcgtttctcctgtggcccagttgagtctgtaaatttctgaagctgtgtattgtacgatccatttgtaatattcttcattcatataatagaacttaggatttttattactaaaaacttcctaacgtctttgtgacacaaattgc

SEQ ID NO: 18056 - DNA, 480 bp, Glycine max
ctcaacacgtaaaagttacacttatccgaggtatcgggcgcacaactcatagttgttagcaaatgggtacctcgaaaagttgcaaaagtgaagaactttgcacagaactactcgaatcccaaactggggacacttccactgggtctgtgattcaaactttgcgtcttcaagtatttggggtgctacattgggttgtttcactaggcctcattctggccattgactttctcttgaagaaagccttcgtagcagcttcgattgagttcccaagtgctctgtttgggatgttctgtattttctctgttttgattattcttgattgtgctataccttctgctgctgtggctttgatgaagttttttgaaccagggattatgttcattcagagatggctccctttgttctatgttccctatttggttgtgctgcccctttctcttaaagatattcccccttcttctgccatcaaaatttgcttta

SEQ ID NO: 18057 - DNA, 421 bp, Glycine max
cccacgcgtccgatcgaatcatccatcgtgcgaagatgagacccaccgcgcgtcggcaagcgaaggactccttcattcccccggcgccgcccactccgctggacttccaccaccgccagtactcctcccgcgactccgacgtcagcagccgcccctcctccgtcggcatcggcagacgccccaccctagacctctacaatgagccttcctacaagcaaacggtggtttccaccatcaactccttcctctcctcccacaacttcccaatcaccttcaaaacgacgctcccctctgccaaagacatccacgaaaccctaaaatttctcctctctctcctcgacttccctttctccaaactcgaagaggatctccctcccctcctcaaacgcctcaattatccttttaaactcaacaaatccat

SEQ ID NO: 18058 - DNA, 493 bp, Glycine max
gagggaggcatgagattccgacggaagtgattgaggtgaagcaagaagagttgattaagaatcggccaagagaggatcaggtcaagctaactgggattgcattcggacccacttatcagcctgcttcgacaaaggggaagcctacaaagctgcacaagaggaagcatcaaattggttcattgtactttgatatgaaacaaaacgaaatgaaactcgctgagcggcgtgcaaagggcatgcttaccaaagctgaaacacaagcgaaatatggatggtgatttgggacgatgatattggaaatacttccattgaaacgtgaaatagcaaagtcgaagttttcatatttagctgcagtccttgtgtttcactgttctgtctaatgatatgtacgtttgctccctcttttcagtgcaaattatgtatttctatccttatagacagtggaatttcatacagtacattttttatgacaaaaaatcatatttcttccttt

SEQ ID NO: 18059 - DNA, 818 bp, Glycine max
ccaggatttcggcctgcagaaagggttgaggagaccgggcggcgtttggcaaactactgcaagaagttcaaggtaccttttgaatacaattgtcttgcacagaaatgggaaactataaaacttgcagatctcaagatagacaggaatgaagtaactgttgttagctgcttctaccggctgaagaacttgcctgatgaaactgtggatgtgaagtctccaagagatgccgtgttgaagttgataaggaggatcaatccaaacatgttcatccatggggtggtcaatggcacttacaatgcaccctttttcctgactcggtttagggaggcactctaccacttctcatcactgtttgatatgtttgaagctaatgtgcctcgtgaagacccggaaagagtgatgcttgagaatgggttgtttggaagagatgccatcaatgttatagcgtgtgaaggggctgagagggttgagagacctgagacctataagcagtggcaggttaggaaccagagagctgggttcaagcaagtccgatttgatcctctattggtgaatgatgaaaaagaaatggtgaagaaggaatatcaaaaagattttgtggtggctgaggatggcaagtgggtttggctggggtggaaagggcgtattctgaatgccatttctgcttggactcctgcttaagcaatgtccagaaagtgtcttgtaactagtaatctactcttaggtcggttaatgaaaatgcaataaacacctatttactatttttctttctccatttgtttccccattcttagatattgctgttcaattcgcttcct

SEQ ID NO: 18060 - DNA, 680 bp, Glycine max
  unsure (1)..(680): unsure at all n locations
ctcgagccgtgctaactaaacactaccctgctgcaccaaagtgccaagtcacacgcacaaccattttcttttctttctctctcactctccaacttgcacccaacccaataataacaataacaaactcaacctcgccaggatccaacacaacgcactccttacacagaccaagattctcccccagtggtgcagttgaagggccgtgaggatgttagagaaagtggaggagtttaacatggataaagttatacaagagtttgaattattgacaagggatgcagaaagagttcagagggaaacactcaagaggattttggaggataacgcatcagcagagtacttgcagagtttgggtctcaatggaagaactgaccctgagagtttcaaggcctgtgttccaatggtcacccacaaagaattggaaccttatatctacagaattattgatggtgatgcttctcctattctcactggaaaacccatcacaaccatgtcctctaagttctggcactacccaggggaaaccaaagtatgtaccttggaatgatgaattgtatgacaccacaatgcagatataccagacctcttttgcctttagaaacagggagtttcctataacaaatgggaaggctttaagcgttatatacgngtagcaaacagttgacaacaaaggggggtct

SEQ ID NO: 18061 - DNA, 397 bp, Glycine max
gtgccaagtcacacgcacaaacattttcttttctaatttttacctacctccgactttggttctctctcactctccaacttgcattcaagtaacaacaactctactgaacctcccttcagatcgaacacaactcactcctcaaacaagaccaagattctcccccagtggtgcagttgaacggccgtgaggatgttagagaaagtgggggagtttaacatggataaagttatacaagagtttgaattattgacacgggatgcagatagggttcagagggtaacactgatgaggatttttgaggataactctttatcaatagtacttgcagagtttgggtcgtaattgaataattgatcttgatagtttcaaggccttgatttatacttgtcacccacaa

SEQ ID NO: 18062 - DNA, 752 bp, Glycine max
cctactcgtccgcccacgcgtccgttcacgcgtccggccaatctgagaaggagttcaaggttgaagtggaagctataggacgtgttcgccacaagaatttagtcaggttgcttggttattgtgctgaaggagctcatagaatgcttgtttatgagtacgtggacaatggtaatttagagtcagtggctgcatggggatgttgggccttgcagtcccctaacttgggaaattcgaatgaacattattctgggaacggctaaagggttaacttatcttcacgaggggttagaaccaaaagttgttcaccgtgatattaaatcaagcaacattttgctcagtaagcagtggaatgcgaaggtgtcagactttggcctcgccaaactccttggctccgacagcagctatatcacaacccgtgtcatgggtacatttggatatgttgctcctgaatacgcgagtactggcatgttgaatgaacggagtgatgtttatagttttggaattcttattatggaactaattacaggaaggaatccggttgattatagtcggcctccagaagaggtgaatttggtagactggctcaagaagatggttagcaacagaaatccagagggggtgcttgatcccaagcttcctgagaaaccaacttcaagagcactaaaacgagctcttcttgtagctttacgctgcactgatcctaatgcacaaaagcggcctactatggggcatgtgatacacatgcttgaagc

SEQ ID NO: 18063 - DNA, 489 bp, Glycine max
ggttccccaaccgagtatatgaaaaggctgtgtccgttactcgggagtggaagatggcgacggcgccgggaaatcaaatgttggagggcggaggaggagcgccgcagcctccgggtacagacatgaccggaatatgcttccgggatcagctctggctcaatagcttccctctggatcgcaacttggtcttcgattacttcgcactctcccctttctacgactggacctgcaacaacgagcagctccgcatgcgctccgttcaccccctcgacatctctcaactctcgaaaatgacggggacggagtatatgctcagcgaagttatggagccgcacctgtttgtcattcgcaagcagaagagagatagccccgacaaagttacacctatgctctcgtattacatactggatggtttcatttaccaggcaccgcaactgtgcaatgtttttgccgccagaattggaagggcgctttattacatacaaaagg

SEQ ID NO: 18064 - DNA, 545 bp, Glycine max
aattatatggccgccagtggtgaaaaagaataactcgatcgtcgacaacttgatcgtcaacaacttgataaaagtttatacggcagttgcaagcaaagccaactctagcccagactccttcctcgggccagcattcgaagttggttctgatcctaagaaacactttggatctctggaatctttgcacaatactgtccacagctggaccggtgaattagaaaaacctaaccacgacatggggttgttggctacggctgcaagagatcccattttctttgctcaccattcaaacgtcgataggatgtggaacatatggaagacagaattgctggatggaagaagatttgatcacaaaagtgacgaatggttggaatccagtttcttcttctacgacgagaacagtaactatgtgcgtgtgaaggtcaaagactgcctcgactccaagaagatggggtatgattaccaacgtgttgaccttccatggctgttggctggggaactcatcaaaccaaagaaggagattaattcccttcgttcaaaaacag

SEQ ID NO: 18065 - DNA, 578 bp, Glycine max
tcgttgttttgcatctgatagaagacacatgaaagatgctggtggaaactggattgaagaacaacgaagaaatagcggggcatgcacaactctgaataatctattataatcagaaaaaagctgaaaagacggacgaattgtttcagacacatatgatggtagagctcccacaaaacaaagtgcacgttgcacctgcaatttataattaacttgtgcaatggcaaagcctagagttgatgctgagtatctgaaggaaatcgagaaggctcgtcgtgaccttcgcgctcttatctccaacagaaactgcgcccctctcatgcttcgattagcgtggcatgatgctggtacttacgatgctaaaacaaacacaggaggccctaatggttctatcagaaacagacaagagttgaatcacgcagcaaacaagggactggaaacagcacttgccttctgtgaggaagtgaaggccaaacatccaaaaatttcatatgccgacctttaccaactagctggtggtggtgcagtagaagttaccggggggccaactattaactttggtcccgggagaaaagaatcat

SEQ ID NO: 18066 - DNA, 601 bp, Glycine max
aattaattcttaactctagatgaagggataccgtggttaagaaaaagagcatatattagtacctacagagggcacaagaacaagtaccagaacaataggagcatcatggttaggctatggtgctcttctctctcaattacacttttattccaacagctcatcagattgtgcatttcttggagtgtgcaaaccccaacacccccattgccaatcctccctctcccaacatattcccagttgaaatggcaacaaagggagatcataatgtttttccattttggtgtgaacacattcagtgacagacaatggggcactggccaggaaaacccagcaatcttcaatccaacggggctcaacaccacccagtgggccactgtggcagcagatgcaggagtttcattaatgatattaactgcaaaacaccatgatggcttttgcctatggccttccaagtacactgaccattctgtcattagcagcccctggcaaggtggcaagggtgatgttgttcaagactttgtcaatgcagccactgcacaaggaattgatgtagggatctacctttcaccttgggatagacatgaccctagatatggcaatg

SEQ ID NO: 18067 - DNA, 353 bp, Glycine max
cccacgcgtccgcccactcgttcgcatatttctctcccttttctaattcattttctaagcccaacacatacaaccttatattctcccattcatcataaccaaaaactttgtcactggcttatttattctctattaatattatatcctttgggtattgtattgtatcgtattgctttatacaaattcttaactcaattagcctagctagctaggtcattataaaaaaaattaaaatagtgttccttgatggctgaccagaagaatctaaacccggattcgggaaccattagtgttgaatcagcaaaagaaaaaagaaggaacaaacttcccaacttcctgctatcagtgagact

SEQ ID NO: 18068 - DNA, 328 bp, Glycine max
cccacgcgtgcgctctctgagtatctctctcccgccattgatgtaaagtaactatctatcgttctgagaatgagaatcaacgcattctgtgtctccgcctctgcttctatatattctccttttcctaatccacatggtgcgctactgcaagattggaagcttcggaagcataggtttagcttgaagctcacggcatttcctttgaattcgagttgcaggaagaggaggacaacgttcatatgtgcagccaatcaagaagccgatgttgcttttaagaagactgatgaagatgataggctcatagatatgctcatagaatggaatcctc

SEQ ID NO: 18069 - DNA, 552 bp, Glycine max
gctgttcattccacagatcctgttgctttatatcaagttgacaaggtgctactgcctgaggccattcttggcactaatatacctcctgcacctgctcctgcaccaactcctgatattgcccctgctgctgattctccaactgaacacagtgcagatagcaaagcatcatctccatcatccactcatgatggctcctcttctcacaagttcatcagctatggaatctgggccaaccttgtcttggcaacttttggtgtgctggtgctcttctgatggcactcttcctattgaatatttaatttagattatgtttatgtatctacatttgctgccacttgctttgatttgaatccatttttttgaacataagtgttattcaatgtatgtatgaatgtgatttcttctattagactatttttttgttaaatctcagcatgcggatgtcatggtatgttacgactgaatctaccttttttgagagttttaaggccgtcacttaaagttaaagtctattcctaaagttgattttattccctagagggatgtttccgg

SEQ ID NO: 18070 - DNA, 451 bp, Glycine max
acgcgtccgtaagctcgaaattcggttcgcgttttaatctaatttttttagaatagtgttttagaaagaagagtgtctagcattttgaataaatatgtgatccaagtccatgaataggcctgattgttatggggtggttggattcactatggagaagaggacgaaagtttattaaaaggaaagacagtgatgctggcgatgcaggtagagcactggaagaactcagagcttctctctacaatgagatccgaacctcagaaggagccaagcgtcaacagcaaagatattgtggaccagtggtggcactgtccttcaattttatggttgctgttgggattatcatggcaaacaaattggtgatgggtaaagttggcttcaacttcccaattttcctgacatttgtacactacatcactgcatggcttcttcttgccattttcaagacactctc

SEQ ID NO: 18071 - DNA, 492 bp, Glycine max
aaaaagtagtttgctttaagagagcatgtgagtagttgggataaggaagccatctttgaaacctttgacattttgaaattttgataaaacgttacatcgttgcaacttcctagatgggttaattgaaagatgtagtgggcaaagtgtctgtgtccaaagattgtatcagccaactagatgttgctagctaatgcaagatttgttagctgatatatagcactttgaagaacttttcagttagcagtcacccgtggaaggcttgggttatcaaacaagtttcttggaagcttcctgattatccttttggataaaatgtaatacagacggtgcagctaaggggagtcctggtttggcaggttgttgcggattgttcatacagtaaaggagtgaattcagctttctttgctgaggtaatggcagcaattattgcaattgataagcctgtggaaaatagatgggatttcttttggctgaaaacttattcaagcttac

SEQ ID NO: 18072 - DNA, 1097 bp, Glycine max
taacgttgttgttttaatgtgaacatttttttcaggtacccaaccccagttgcgggaccagcgcgtgctcccttctacttgacttatggtagctcctcaatagctgctaatgtggtccaagacacagttactctagccactgaccctattcctgactacacctttgggtgtgttgcaaagactactggggccagtgcaccaccacaggggctattgggcttgggccgaggcccattgtctctgttgtcccagacccaaaacctctaccagtccacattctcctactgcttgcccagcttcaaatcacttaacttctctgggtcgctaagacttgggcctgtggcccagcccataaggattaagtatacccctcttctcaagaatcctagaagatcttcactctattatgtcaacttggttgcaattagggttggtcggaaagttgtcgatattcctcctgaggcgttggcgttcaatgcggccaccggagccggcaccgtctttgattctggcacggtcttcacccggctagttgcacccgcgtacacggcggtccgggacgagttccggcgacgagtcgccatcgcagcaaaggcaaacctgacagtgacatccctaggaggctttgacacatgctacacagtcccaatagttgcacccaccataacattcatgttctcaggcatgaacgtgaccctgccagaggacaacattctcatacacagcactgcgggcagcaccacatgcttggccatggcttcggctccagataacgtgaactcagtgctcaatgtcatagccaacatgcagcaacaaaaccaccgtgtgctctatgacgtgcccaattcaaggcttggagttgctcgtgaactttgcactaaataattaaaaatggttaattaacacctaagttgtcatgatactttggtgacaacgatattgtcaaattaattggactattattgcaaagtcttttgggtattgatatttcttctatattggtgagtttggttttagggtaatgggaatatataataaggtttcattgctaactatatatagtggaagattttcgactattatttatgttatggaat

SEQ ID NO: 18073 - DNA, 495 bp, Glycine max
ctcacttgtcatgcactgttctctaatgcatttattctcctgctgagattatggcggtttgatcgtccacctgttgaacatgtgatggggggtgcagcaaccccagcattaggatcacaattaggtcctgagtaccttttattggttcggaattgtatgttagcatcctatgggaaatctccgagagatcgagtaagaagtagaagattgtcaaaaatgataagtttttctctcgagcccttatttatggattcctttccaaaattgaacatttggtatcggcaacatcaagaatgtattgcttccacctgcaatactcttgcacctggagggccagtttctcagatcgttgaagcactacttagcatgatgtgcaagaaaataaatagaagtgctcagtcattgacgcctacaacttcaagaagcagcaattcatctctttcttcattggatgatgctatgattgtactcaaagtgcctgcatgggacatcctt

SEQ ID NO: 18074 - DNA, 607 bp, Glycine max
  unsure (1)..(607): unsure at all n locations
aaggaatcaaggtgcttgtgtatgctggagaagaagatctcatatgcaactggctcgggaattcaaggtgggttaatgcaatggagtggtctggtcaaaaacaatttggggcgtctggtacagtcccatttttagttgatggtgcagaagcaggaacgctgaaaagccatggacctctctctttcctcaaggtatacgaggctggtcacatggtccctatggatcaaccaaaagctgcacttgagatgctaagaagctggatgcaagggaaactgacaatgacaaagagtggagataatgtctctcctaaatgatgcactcacagcacaaaaaccaaaaccatccctctattgctgcatagatattgatgtcatttccttgtgtatactgggagggtggaatgtaattctttttcttttttcttttttttttctttctctagtttctcttatccctgaccattgagggatttggaactaatcatctatcattgtcaccaaatcacgcacaactttacacttgtaacctgatttcaatcaaagcaaatttcaattcttgaaaaaaataaatttcnnnnnnnnnnnnnnnnnnnnnnnnnnnnnnnnnn

SEQ ID NO: 18075 - DNA, 287 bp, Glycine max
caaggatcttgaggactttctgcctgctgactttggttactttgagttcatgtccttaattttgtccggctcataggacctagattatggctgctataagagttgtggccaatatgagctagatgttgaatctagttcaccaattcaaccaagaaattgccgaacaaacaggaagcggcgtgggaacgactttcaaagtgaaattctcccgagccttgcttctctgtcgcggtacgaggtaaccgaagatcttcaaacaatcggaggtctcttggaagaggccagaa

SEQ ID NO: 18076 - DNA, 319 bp, Glycine max
  unsure (1)..(319): unsure at all n locations
cccacgcgtccggaagaagaagctaatatgtagtatgagagtagaacccaccaaaggatgtgattgatattcatcctggaaactgaagaacaaaaatagagaggatttcatatggatacaaccaatgcaattcactcaatattagatgtatacatgaattatatttgttaggttatcccatgtattgatgtcctttttctttaacgaatattatcttttaaaagatagtatctggaaaggaaaattgtcaagcaaatagttagttgatttgttacttantataaataatatatttattatattttattatttttttttt

SEQ ID NO: 18077 - DNA, 437 bp, Glycine max
  unsure (1)..(437): unsure at all n locations
ggaatttccggggggacggacgcgtncgaagaataataagaagaagcaagagatagagaggagagaatatggcgaccacaggcgctttgtgtggcactatgttgaacacctccttcctgaagaggcaggcatcagtgaacatgacaagcttcaaggctaacgctgctgtctttggtgtaaaaggaggacgaggaggtcgtgtgagggccatggcaacttacaaggtgaagctgataactccagagggagagcaagaatttgaatgcccagatgatatatacattcttgatcaggcagaggaaaatggcattgatcttccctactcatgcagggctggttcttgctctgcatgtgctgccaaagttgggagtggcaaactagaccagtcagatcgtagctttcttgatgacgaccaacttgatgcaagatttgttctt

SEQ ID NO: 18078 - DNA, 636 bp, Glycine max
gaaaaaatctgttttggtactatactaaaagttgaagatgaaattgcagaccaggggccaagtataaagtgaggtgcgttgggttcatgaaattcaaatctcaaactcaaactcagcctccacagcactactgttatatatggattcgatgcttcttcgatcttttcctaatattaacaacgcttcttctctcgccaccactggttcttatttgccaaatgcttcatggcacaataggaaaatccaaaaagaatataattttttgaggtttcggtggccaagtttgaaccaccattacaaaagcattgaaggagggtgtacatgtaaaaaatgtaatataaaatttgttgtgaaagcgacctctgaaaaatcttttgagtctgaacctcaagcttttgatccaaaaagcattttggactctgtcaagaattccttggatgctttctacaggttttccagacctcacacagttattggcacagttaagttcaagcttttccataattactcttagaacgaaccctcaaatacttatattcatttggacgaatcacttttctagatgaaagtaatattctgaaggttttaaaatggctctctttttctgtgtttgggcaggcattaagcataatttct

SEQ ID NO: 18079 - DNA, 431 bp, Glycine max
cctcgcgtccggcctccacagcactactgttatatatggattcgatgcttcttcgatcttttcctaatattaacaacgcttcttctctcgccaccactggtatgtctgcttataatttctcgatctgttttccgtctgagacagatattcccactggcaggtggaaatttctgcagaactaaatgtttcgccaacatttaccatgcaagtatgtcggctcattatcaaatatgcatataccccccctttttttaatttatttctttattattattattattaggggaaggtcctttctatattaatatttttttaaaattaaaaaaaaaaaaactgagagagaaagaaaggaggttgggatggactattaagtgcacctttggaaaacttaagtttgggccaaacaagtttgttaaagtacctgatttttc

SEQ ID NO: 18080 - DNA, 676 bp, Glycine max
aaagaagaagaaaaaatctgttttggtactatagtaaaagttgaagttggggaagtataaagtgaagtgtggtgttattgggttcatgaaattgaaatctgaaactgaacatcagcctccgcagcagtatatatggattcactgcttcttcgatctttccctaatattaataacgcctcttctctcaccaccactggtgcaaatttctccaggactaaatctttcgccaacatttaccatgcaagttcttatgtgccaaatgcttcatggcacaataggaaaatccaaaaagaatataattttttgaggtttcggtggccaagtttgaaccatcattacaaaggcattgagggagcgtgtacatgtaaaaaatgtaatataaaatttgttgtgaaagcgacctctgaaaaatctcttgagtctgaacctcaagcttttgatccaaaaagcattttggactctgtcaagaattccttggatgctttctacaggttttccagacctcacacagttattggcacagcattaagcataatttctgtgtccctccttgctgttgagaaaatatcagatatatctccattattttttactggtgtgttggaggctgtggttgctgccctgtttatgaatatttatattgttggtttgaatcaattgtctgatgttgaaatag

SEQ ID NO: 18081 - DNA, 448 bp, Glycine max
ggccaacactgaatttcatagcttgaatccaagttgggaagaaaacaatggtttcagcttcgcttcaattctggtcttggatagcacctactcctatatcccaccgttacacccataaatttgcttccctaacctcactcaaattagccactcctgtttcttctactaataccgtttatcttcccaagcctctagttgtgcgttttgctctaactgagtccgactcgcccaaatccatagaacctgaccctcaaactcttctccaagaaattgctgacagttttgatcttccttccgattacttttcaaagcttcccggcgatcttcgattagacctaaacgacgcggcgttcgacctttcaaacggacctgttttagatgagtgtggccaagagtttgggagagactttgcttgaatctctttcgagcatgggaacttgcttacaca

SEQ ID NO: 18082 - DNA, 1350 bp, Glycine max
gagggaattaatcaaattcaaagagatgctatgattccaattaaaaattcgttaggtcctttaggaatagcccctcaagttgcccattttgatttttaccgtttaataactcataatcagatctcgataattaaaaatgggcaacttgacaaattaaaagaaacttttcaagtattccaatattatttcctggacgaaaacgagagaatttataaacctgatctgtgtagtaacatcattttaaatccattctatttgaattggcattttctccaccataattattgtgaaaaaacgtttacaataatgagtcttggtcaatttatttgcgaaaatgtatgtatagttcaaacgaaaaatgcaccacacctaaaatcgggtcaaattctaacagttcaaatggattctgtaggaataagatcggctaacccttatttggcgactcctggagcaacggttcatggccattatggggaaatactttctgaaggagatatattagttacatttatctatgaaaaatcgagatcgggtgatataacacaaggtcttccaaaagtagaacaggtattagaagttcgttcgattgattcaatatcgatgaacctagaaaagagagttgatacttggaatgggcgtataacaaaaattcttggcattccttggggattcttgattggtgctgagctaacgatagcgcaaagtcgtatttctttggttaataaaattcaaaaagtttatcgatcccagggagttcacattcataatagacatatagaaattattgtgcgtcaaataacatcaaaagtcttggtttccgaagatggaatgtctaatgtttttttgcccggtgaactaattggattgttgcgagccgaacgagcagggcgttccttagaagaggcgatttgctatcgagttctattattggggataacaaaaacatctctgaatactcaaagtttcatatctgaagcaagttttcaagaaactgctagagttttatcaaaagccgctctccgggggcgcatagattggttgaaaggtctgaaagagaacgttgttttagggggaatgatacctgttggtaccggattcaaaagaataatgaaccgttcaaagcaaaggcaatataacaagatgacctcggaaacaaaaaaaatagaatttatttgagggcgaaatgagagatattttgtttcaccacagagaattctttttttttgtttcaaagaatttatgcgatacatcgcagcaatctagtatttaataattcctaaaataatgattcttaagagcggattcatcttcggtcattttattttgtataataaaagaaagataataaag

SEQ ID NO: 18083 - DNA, 410 bp, Glycine max
cccacgcgtccgcccacgcgtccggagactggttccaagcacatcatttattattattcttctatatagttttatataagaaagagggtatcaaagccatatcatatcagaaaacacaaaggaataatatattgcgggggtgtttgtttctcatatggggtctcgctctgcttctccatagggattacatttattaccattcttttgttagctatcactaccatacggaatgttggtcaccctcatacactccctaaggtagcagcatttaattaacactactactactactttgatcactactgctcagctttcatcatggaaaggctccaaggacccctcaattcctgtttctttggagaccctttggaagtgaattgtttggaccaagttctggtggatgaagaaag

SEQ ID NO: 18084 - DNA, 827 bp, Glycine max
aaagactttctctgtccacaaccatcataccattataccttaccaccccttccttccaccaccctttctttctctcctttatacacacacaggacacacacatcacaagaaagagggagaaaaataaaaacaaaaacaaaaacaaaaggtggtagatgcatgagccacaacacaacacacattatctcataccacactcaccaccttgtattccccaaaattcacataattccccttctcttgccttttccctcagatttctcaccccttctctcttctgtgttgctacccttttcaggtactcttcctactaaattgaaggaaaaagttggtattataggaagttaatcactgctttgatgacttggtaagaaaacttgaactaacaatggtaagtttgagaaggcgcagacttttgggactgtgctcaggaaacagttcctttgtcacaccacttcctctatattgtgagaatctatctggttttgaaaattcaaaccagcaagctaaaactaagagtgaacagcctgggctttccgatgatgcaagcaacccagacagtaataatgctgtgcaagaagaaccgggatcatcaaatgcttctggttctagctcatcgaaagaacagcttattcaacaaattacaggaccttctattaaacgcagaaagcgacatagaagaaagaatttgcacaatcaagaacaatgcgtaatgcgaggtgtctacttcacaaatatgaagtggcaggcagcaataaaggtagacaagaaacagatccacctagggactgtcgggtcacaagaagaagctgctcacttatacgaca

SEQ ID NO: 18085 - DNA, 291 bp, Glycine max
ctctacaaagactttctctgtccacaaccatcataccattataccttaccacccttcccttctctcttttatacacacacaggacacacacaggaaagaaagagggagaaaacaaaaacaaaatcaaaaggtggtagatgcatgagccacaacacaacacacattatctcttaccacactcaccaccttgtattccccaaaattcacataattctccttctcttgccttttccctcagatttctcaccccttctctcttctgtgttcccacccttttcaggtactcttcct

SEQ ID NO: 18086 - DNA, 682 bp, Glycine max
gtggcggctaaggttggtgtgcttcctctctctccggttagggaaagaaacgcactttttggttttggttttggatttcgatctcactgcattgccttctgctactgctagttgcatgatggttgtgcagaactttgtagttgatttgaataaggcccttgttttccaggttgggcatcttggagaagcttatgaagagtgggttcaccagcccattgtcagcaaggaaggcccccgtttctttgaaaatgagattctggagttcttgacgcgcacagtctggtgggcaataccagtcatttggctgccagttgtatgctggtttatatataagtccatacgaatgggcctcagttgtcctcatttagctctattggtggttcttggcatttttgtttggacactgcttgaatactcattgcatcgttttcttttccacattaaaacaaagacctactgggggaataccttgcattatcttctccatggctgccaccataagcaccccatggatggcttaagactcgttttccctcctgctgcaacagctatattattgatgccgttctggaacttggtgaaactcatggcgaccacttcaactgctcctgctttgttttgaggtgggttattggggtatgtaatgtatgattgcacccattattacttgcaccatggtcag

SEQ ID NO: 18087 - DNA, 516 bp, Glycine max
ggccaaaaaaaagttgaaaaactcaacccccaatttgaaggggaaaaaaaagaagaaaaaagcactttaggaaacgcaggttttggttcgattgttttgtgcagagtgcaaaatcagtgaaaccaccatgcttcgtagcttgacgaaacttcgttgtttcgccgccgttcaatcacgccaagttctatcacctccctcttctcgccgtctcctccaccactcgccgccgccgcaaccgcttcactccgcttccaatttccgcatttctcgtccttccttcatttcctcctcatggcctctccacgcatctcatccttccccttccttggttcaagtgcggcatgcttcgtccaaggagagaaagcgaaagccggtgcctccacccgtttccaaggttaagaaaaccaaaatgaaatcttattcgtctttcaagtccagattcagagcaatgaatgatgggaacatcaggcgctggaaggagggcaagcgtcacaatgctcatctcaagtcaaagaa

SEQ ID NO: 18088 - DNA, 1171 bp, Glycine max
  unsure (1)..(1171): unsure at all n locations
gtntagatgatatactttaaagagttgagtagtatttgatttgggtcggagtagattcaactcggaagtttgagtatagataggttctttgcttggagtgagtgcgagtcaattcttcctggtttctttcgttagccttggaacaaacaaacataccagtcaaaaatcaaaatctcagagttgtttgaacgagaaattgaaatgtctcagaccaagaaattgacgccgaatctggatcagcagagcacgaaggtgctgaatctcaccgtgctccagcgaatcgatccgtacatcgacgagattctcttcactgccgcgcatgtctccttctacgacttcaacatcgaaagcaaccagtggagtcgcaaggatgttgaaggatctctcttcgttgtcaagaggaattcacaaccacggtttcagtttatcgtaatgaatcgccggaatacagataatctagttgagaatctattggattttgagtatgaacttaaaaagccgtacctgttatatcgaaatgcagctcaagaagttaacggtatatggttttacaatccagatgaatgtgaagaagttgcaaatctctttaacaggatacttaatgcgtacccaaagacacctccaactacaataccgcctgttaacataagtgcgtctgaggaacttcagccagtgtcaattataccggaaagccctctagagtcatcttcagttgctgcttctgcaattgatgctgttgaagatcctgcatttacaaacttcttcagtacattgaaggttactggaaattatgcttccaatatggaaaattttagacagcattctgcaactgtcacttctgctcctggtggtttgttatctactgcacctactgtgcaaataccatctgcctctcattcaacttcatcgatatcaggcttcccccttgactctcttgaaacagccaagagtggcaatcaagtcattaatcttgtttagccttctactttttttgcatcaacgtcttcatcttcactgttagttcacctatttattcatctgtgccgcctagtgcagttgttcatcattccctgaatgtgccacgccaatacggcactccagtacttcaacccttccctccccctaatcctcctctttctcttacccctatttcaagctccactccaaatag

SEQ ID NO: 18089 - DNA, 497 bp, Glycine max
gtcgatttgggtgggttcgaagtttgagtatagataggttctttgcttggagtgagtgcgagtcaatttttggtttcttgcgttagtcttggaagaaacaaacacaccagtcaaaaatcaaaatctcgagttcttggagggtttgagcgagctagttagtgtgagaaaataattgaaatgtctcagacgaagaaattgacgccgaatctggatcagcagagcacgaaggtgctgaatctcacggtgctccagcgaatcgatccgttcatcgaagagattctcttcaccgccgcgcatgtctccttctacgacttcaacatcgaaagcaaccagtgggttcgttcttttctttctttctcttcgcttcttcccactttcttctctcatcttctgttttactcgttctagagtcgcaaggatgttgaaggatctctcttcgttgtcaagaggaattcacaaccacggtttcagttcatcgtcatgaatcgacggaatac

SEQ ID NO: 18090 - DNA, 408 bp, Glycine max
caattgtggtggatgtgttgaattggactgattcgccggaatgccaggagaaggcatcatgcattttgatggttatggcacacaagtcctatggtgacaagcaggccatgattgaggcaggggttgcatcatccctgcttgagttgtcccttttgggttccacattggctcagaaaagggcctcaagaatattggagattttgagggtggacaaagggaagcaagtttctgggagctatggcttgggtgcagctgtctctgcccctatttgcggctcttcgtcggcgaggccagacggaagaggaggaggaagagagtgttttgaggaggacgaagagatgatgagtgaagagaagaaagccgtgaagcaattagtccagcagagtttgcagaacaacatgaggaaaa

SEQ ID NO: 18091 - DNA, 530 bp, Glycine max
gagtaacaataatttcaacacgttgcatcttcaacaaacattcagctactctagccatggctgctgctagtactatgatcacactcaagttctcattcctctggagtctccttctctcagttccactcttgggtgtgaagtcatcacatagccaccaaaatggtgggagaagaacaattcctccaacatgcaagcgcattgagtgccccacccatgatgtgattgaagtgggtgatggctatgaaatccgacgctataataataattcaactgtgtggatgtcaacttctcccattcaagacatttctctggttgaagctacaagaactggcttcaggagtctatttgattatatccaaggcaagaacaactacaagcaaaaaattgagatgacagcgcctgtgatcacagaagtttcacctagtgatggacccttttgtaaatcctcatttgttgtcagcttctttgtgccaaaattgaaccaagcaaacccttcttctgcaaagggtctccatgtccaaagatggaac

SEQ ID NO: 18092 - DNA, 848 bp, Glycine max
attataactgtccaacccgaacccgaacccgaacccgaaagcggttaaattcagtttgcctgaggaggatgatttgtctgatgatgaattagacgagtttgatgatgagttcgacgacgagttcgatgacgatgaaatggatgatcctcagcatcctctgaataagatgatgatgatgaagccccctatgggtggtaagcctcctgtgggtaatgtccctatgggtaatggggcttcgatgatgttgaatagtatgatgaatgctcagaaaggtggcaatggtggtggtggtaatgggaagaaaggaggaggtggtggtggtggaggacctgtgcctgttcaagtgcataacatgggtggtggaaatgagggtaaaaatggaaatggaggaaagacaggtggcggcggaaataatcagaatcagggtggaggtaacaaaaacaacggtggcaaaaatggaggtgggatgccagagggtaagaatggaaacagcaaaaataatggtggtggtggaattccaaataacaatgggaatggaggtaaaaagggtaataatggaatgggtgaaggtgttcaagctatgaacatgttcccaaacatgggtggtcataatcctagtatggttggggctaatatgggccccatgaataacatgagcatccctatgggcaacatgcccatgacccaaatgggcaacatcccagcagttcaaggcctaccagctgctgccgcgatgaacggtggtgccgccggcggtggatacttccaaggtggtggtggtggtccagatatgatgcctggcggcaactcttaccaacaacaacaatacatggctgcaatgatgaacc

SEQ ID NO: 18093 - DNA, 740 bp, Glycine max
  unsure (1)..(740): unsure at all n locations
gcatggcacgcccgtacgtaagtctcgtgaattcggcttcgagcccggcatttataatcagcttgatgattagtacccaagattctggatcaagggtgcgaaagttttcagttcaaggtcttttggggaaagaaatgtgttccagtgcttttgttgatggaccaatggtgattttccgtttggcaccacaggattatcaccgnttccattttccagtatcaggaattattgagcaatctgtagatatccctggatgctggtatactgtcaatcccattgctgtaaatagcaagtactgcaatgtcttcacggagaacaagagagttgtttcaatagtttcaactgtagattttggaaaggtggcatttgttgcaattggagctacaatggttggtagcattacttttacaaagaaaaagggcgactatgttaagaagggagatgagtttggatatttctcattcggtggaagcactgtaatttgcgtttttgaagagaattcaattgcaattgatgaagaccttttagcaaatagcgccagatcactggagaccttggtgtctgtagggatgagattgggtgtctccacgaggaaattgtcttgatatataggaaatgttgaaattgaactctgatttcttttaatcatgacatcataggataatcatgggagatgttttcccaacttgtaaagtgaacctttttcaacattattgtatggtatttactcttgctgactc

SEQ ID NO: 18094 - DNA, 808 bp, Glycine max
ggttagagtaaagtattaaggaaagagaaagaaaacctcgtttattagcagtagcttgggtgttcttaatgggcgtcctttgggcctctgcaaaggctcctgaccctgtccgtcatatgatagagggactttgagaatttaagcgatcaattatcaacgattgaaggaagagttgagaaatgagtcaaatgtcatctggaattgttggtgttggttatattggcaccaactatatggtcccattattactaccaccaccattttcttccttgtgttttaacacctttatcaaacacaagggattggtgttggatagtaatcataaaggaaggagaagaggacatgggattgtggcatctagcaacgttgcttcaccttccatatgggatgattggaaacctgtcaaagccccttccactccttccctcagtgacattctttggccctctgctggggcatttgcggcaatggcaatattgggaaagatggatcagttattggcaccaaaaggactctcaatcgcatttgcgccatttggggctgtttctactatcctctttgccacacccacagctcctactgcccggaagtacaatgtgtttatggcccaaataggctgtgctgcaattggtgttctggcattgacaatatttggacccggatggctggccaggagtgctagtattgcggcctccgttgcttacatgatcatcacaaactctgttcatccaccagctgcaagcatgccattgcttttcattgatggtcctaagttccatcacttgaatttctggtatgctttgtttcc

SEQ ID NO: 18095 - DNA, 649 bp, Glycine max
gcggctagaggatattggccatcatttgaaatgtgagtgtattgtaactgatgtgtttggaaggtcaggtgaggcggtatgcattgagacaaaacctgtattgccagggatccctagaatacacaagctggagattgagggaagaggatttcataccaatctctatgctgttcatggcatttacagtggtgggaaggaaggcaaaagtagagttcaatggcttagatcaatggttggaagtcctgaccttatctctataccaggagaaactggcagaatgtatgaagcgaatgttgatgatgttggctataggctggtggccatctatactcctgtaagagaggatggagtagaaggccattcaatttcagtatccacagagccaattgcagttgagcctgatgttcttaaagaagtgaaccagaaccttgaacttggatcagtgaagttagaggtattgtgtgacaaagaccaaactctcaaaaaagatttcatcagtgggcacatatgagagacgtatcctcgaaattaacaggaaaagagtcaaggtggtaaagcctgccactaagacttcttttccagctacagaaattcgtggtagttatgcccctccctttcatgtggagcctttgaagaatgatcaacacct

SEQ ID NO: 18096 - DNA, 722 bp, Glycine max
attgaactttatctctcaaggatacctcgacgtagcaaacgagagaagttttggaagaaaggaaaagattggtataggttggatggaaggactgagagttctgagaggcagaagcttgttgagagatttaatgagcctttgaataagagggtaaagtgcactctgatttcaaccagagcaggctctttgggtattaatcttcatgcagctaatcgtgttgttatagttgatggttcttggaatccaacgtatgatctccaggccatctatcgatcatggaggtatgggcagaaaaagcctgtgtttgcttatcgattgctggctcatggaactatggaggagaagatatataagcgccaggtaacaaaggagggacttgctgctagggtggttgatagacagcaggtgcataggaccatttctaaagaagaaatgctgcatctgtttgagcttggtgatgatgacaaccctgagactttggctgatctaagtcaagaaaatgagcatcaagacaaccctattttggttgggcattcactgaaacacacagcaccacattcaaatggcagtagttattctgataagttaatggaaagcttacttagcaagcatcatccgcggtggattgccaattttcatgaacatgaatccctgctacaagaaaacgaataggaaaagctatcaaaagaggagcaagatatggcttgtgaggtttaccagaa

SEQ ID NO: 18097 - DNA, 561 bp, Glycine max
gaaggagaaaaagaaatcaggagttccgcccctgcgtaaaatgttttcgcaccctatggaataaagacataaacttggtaatctcaattcatctgcaaatgatgttgggaggtgcaacagcaaggggcgtttccctgattaaacttcttcctccgttccgctttcgcttcaaacactcctctgctctttcaaaaaccatttgttttcaggtttattcgacagaggcatctcctggcatagagagagtgacacatgaagtcctgaaagaatttcttgccactgttgaaaatgcaccaacatccaatgcaaaagtctattacggatatatcgataagatatgcaaggctggaaatctttcagttgccagtaaaatgctagaaattttaaatgataagaacattgttgttacccttgatgtgtataatctcatattagtggaggcaagtcagaagaatgacattgacctttcttgtcaagttttctggaaattattggtgtcttgtgaatccccaagtgcaacctcatgccttaagtttgcccaggctttctcaaaggtaaatg

SEQ ID NO: 18098 - DNA, 502 bp, Glycine max
  unsure (1)..(502): unsure at all n locations
gggctgataccattgtttttggttaatttattaaaaaaaacgctcatttttgcatttnggaaaggaacgaacgacaaacttggcaacaaagagcgccgggttggggacggggtgctggaaaaagcacaagacttttcgataatccatttgtgttagggtttggtctctctctcatcccatctaacaccactgctatcagaataaacacacacctcaatagcaattgcgacacgccgaagcttcattcatactcaattcttcaccgccggcgacccatttcgatagatgcattgttaggaaactagggtttaaggaagcttttgctttggatcatatggaggggtctgctggagcaggtgagaatatgattttgtagttttgctcagtgattgtgagaaggttcttgggcgaaatgacaatatccaatcacagtttttctcgaattgacacattggagctgaaagctctgattgttcggcaggttggacgtcagagagctgac

SEQ ID NO: 18099 - DNA, 615 bp, Glycine max
cccacgcgtccgctcagaaacgttcctgttgttggaggctgcagaagaaacaagcgtgtagagcgtcctataacaagcccttgttctgccgccattgacactgcttctaattcttctaactcttcttctgctcccactgctgctgcttcactacaaccccagatcgacactgcttcaacctcaaatcacatcaaccctttgttctatggcttaccaagtagctctagcgatgtgaatcttccattgttctctaggttcggttctagaatctccagctccgggtttgatcttcagctgaataatgccctcggattaggcttttcatcccgggttttgtccaatgaagctagtgataataaccgttacagaagcgggtttggttcaaacaatacgcttctttcaagttatacatccaccactagtactactactccagctatgtcttctcttttgagctcttctttgcttcaacagaagttcatgacagatggtgttgatagcaccaacactttccagcatggcttaggcttaaccccactagagcagttgcaaatggcaagtgatcatagcagtgaggcagggatggtggccttaaaagacgtgaaagtagaatta

SEQ ID NO: 18100 - DNA, 514 bp, Glycine max
cccacgcgtccgggagtacattgtttagatgcaaacaaatatattggggatctcctggcagaatttaaagctgcaaaggatcggagtaaaggagaaatcttgcactgtaaactgatattcaagaaaaagttatttcgtgagtcagatgaagctgtgacagagcctatgtttgtgcaattatcttatgtacagatgcaacatgattatattttgggaaattaccctgttggaagggatgatgctgctcagctttctgccttacaaatcttagctgagattggatttcttagcacaccagaatcatgcattgactggaattcacttctggagcgtttcctgcccagacaaatttcaatgacacgagcaaaacgggaatgggagtatgacattctttctcgttatcgctcattggagaatctgacaaaagatgatgcgcgacaacaatttctgcgtatattgagagcacttccttatggaaattctgttttcttcaatgttcgcaagattgatgatc

SEQ ID NO: 18101 - DNA, 1024 bp, Glycine max
  unsure (1)..(1024): unsure at all n locations
gcagcttgcaagtgaactgagatcagagttcctcagcacagtggaaaataacaggagctcagaagaatatgtcttcaatcactcaaacttggccaggcgtgctctgaagaatgttgctcttgcttatcttggatgccttgaggaaaaagaattcaccgatcttgtgttgcatgagtataaaactgctacaaatatgactgagcagtttgctgccttggctgccatagctcagaaccctggtaaaacccgtgatgatgttcttgatgacttttatggcaagtggcagcatgatttcttggtggtgaacaaatggtttgctcttcaagcaatgtctgacattcctggtaatgttgagaatgtgcggaaactgttaagccacccagcatttgatctgcgcaatcccaacaaagtgtactctctcattggaggtttctgtgggtctccggtgaactttcatgcaaaggatgggtcaggctacaagtttttgggagagattgtgctgcaacttgacaagctaaatcctcaggtagcctcgagaatggtgtcagccttctcaagatggaggcgttatgatgaagacagacaaaagcttgcaaaggcgcagttggagaggatcatgtctactaatggactatcggagaatgtgtttgagatagcttcgaaaagcttagctgcctaaaagtgttaatggcgtatgaaaaactgccatgatgtgttagtggcgaaagcaattgcagcaacgatcccaatatcttttgcaaagctttggcgccacaatgggtagctctctttttgcatccatgtcttaactcggggtgatttctttatctttttcccaaggatgtgtagggcgttatgcaataaaagctgaactagtttatctacgtaactttaaaatgtgattcagtggatattcgtttgttataccgttttttatttttggttttattgataatttgacaaggaaatatgagtgcgtttgatttattttttttttaactataaaatagttgagaatnnnnnn

SEQ ID NO: 18102 - DNA, 369 bp, Glycine max
cacaaatactgttagtgttaagctatggaatcctgtgcaactcttccactttctcagcttgcttatggctacccgtcaacacgtagcagcaacaaagcttatcctttttggccttgcaagcgatggagctcatcacgaccaacacgcttacactgcagcatgatgcttgtacctggatttggagaagcatcaccagaagcaaaggctgctcaaaacctccacaatttcttcaccttcgttgcagcgaacactgttgctgctcaacttgagagctcccatcatgaagcatatgaggagctgatggaattcctgagtagacactgcgtgaatgatggtgaccagatctgtgccactatgttcatagaatca

SEQ ID NO: 18103 - DNA, 1232 bp, Glycine max
acgaggagagagagagagagagagagagagagagagagagagagagagagagagagagagagagagagagagagagagagagcgccgcttaaactggcacatctcagactcaataatcctcgctccttcctttttgcttctcttgcgccagcatggccgttgctgaccccaagcctcactccgaacactaaggtctggaatttcttcaagcttccgttccgccattccgccaccaccaatacgacgccgtcttccgctaaccttcaccatcttcatcatcatcaccataaccatcaccacaaccctaataataatctccccctcgagggttccacttccaacacctccaattccgctccctccgttgcgagatcgcttctcccgacacgacgtcgtctcacgctcgatccctccaacaagctttacttcccttatgagccgggcagacaggttaggagtgccatcaggattaaaaacaccaggaaatctaatgtagctttcaagtttcaaacaacagcacccaaaagctgtttcatgcgtcctcctggggctatccttgcacctggtgagagtatcatagcaacagtgttcaagtttgtagagcaaccagaaaataatgaaaagcctgaaaaaactggactcaaatttaaaatcatgagcttgaaggtgaaaggattaattgattacgtccctgaactgtttgatgagcagaaggaccaagtagcagtggagcagattttgcgagttgtttttctagatccagagcgtccctgtcctgctttggaaaaactgaaccgacagctggctgatgctgatgctgcccttgaggcacgcaagaaacctgcggaagatgcaggtcctaaaattatcggggaagggctcgtcatagacgaatggaaagagaggagggaaagatacctcgcaaagcagcagggtgaagtggttgtagattctgtatagggcgttggtctggaatacctataggtaatggcattgcagccaaggaaaatgctatcttaagagaaacaatgattaaaatcacagcgtctttttcttagaaaattttcaggtgaatggcaagtgtactttggagaaaactatgcgtgggtgtggtgatctgatcattctctatgtagataaatgtcattttgtttttaggcttttttgtcgtgggaataattttgatggattgatgtgaaatagcttattcaagttcttatgatcaatgtttt

SEQ ID NO: 18104 - DNA, 510 bp, Glycine max
ctttcacaaagaaaaaataaaatagaagaagaatcaccaaacgacgccgtttaaactgcgatctctctacgtccttccttttccttctctcgcgcgattatcgctgtttttcccgaacaagagagcatggccgtagctgatcccaagcctcactccgaacctaaggtctggaacttcttcaagcttccgttccgccattccgccgccaccaatacgacgccgtcttccgctaaccttcaccatcttcatcatcaccataaccaccaccaccaccaccaccaccaccacaaccctaataatctccccctcgagggttccacttcccacacctccaattccgtttcctccgtcgcgagatctcttctgccaacacgacgtcgtctcaagctcgatccctccaacaagctctactttccttatgagccgggcaaacaggttaggagtgccatcaggattaaaaacaccagttaatctagcgtagctgtcaagtttcaaacaactgcacccaaa

SEQ ID NO: 18105 - DNA, 287 bp, Glycine max
ggaaagagggaggccacactttcccagtgagcaaacgccaaaaacgcgtggactcaaaaactcttttctccatcgcagttcataatcccccctcatatccgcgtctgcaacaccactttcacaacgacgccgtttaaactgccacatctcaaactcaataatcctcgctccttcctttttccttctcttgcgccagcatggccgttgctgaccccaagcctcactccgaacctaaggtcaggaatttcttcaagcttccgttccgccattccgccaccaccaatacg

SEQ ID NO: 18106 - DNA, 526 bp, Glycine max
cttgagcattatgttgtcccaactcccgcaactgctgcaaattcagcacatgtatatgccgctaacatgacagagaatccaaggtcactaatttgtgggtctggcagcagttcatatcccatcaaggagatgcaggttattgtgcctgatccatctaagatttttcaaagttctggaatggttgaatccaagtcagttggaacattttcaccgctgcaaaagcaagagagtcagaggggactttttgttgatagaggtgttggatcttctagacctgtaaaatcttctagttcaaatattttctctactgatctcaatttggatagcgataccaagaattcaatgccagctgctgctggagctgttgctgctgcagctgttgctgatcagatgctggatccccaggaagatagacatttggcaatgatcctggtgtgtctgtcaacccgttgtaaaacgatcgctgtacttgaacttactagatatcttaactggttaggtcatgataacgaacacttctatgatg

SEQ ID NO: 18107 - DNA, 845 bp, Glycine max
cacaaaacgtagcaagagcaggtacaaacgttcagtgttgttttttcaattcagattcagaaggagacgatggaagaacccgtgaaggaacagcccctctctgctgggaactctgcgcgacccaagcttcagagatacgcgcttcgttcctcctctaaatccaaggaaaacaagcaagacaccgcacccgatctctccatttcttctgaatctaagagggggttaagtactccacacgtaagcagaagtgtaggtggtcttgatttctctggcaacaaggacaagtctactagtgctaaaccaccaagaaggctctccaatcctgtgaaagcatctcccactccaaacctaaagttggttggtaacattaccccaatctcagagagcagaacaatgaggtctggtaaaggtcaagtgtctcaaagcagaagccagacaccggcctctgacatttccagaacatcgagcagaatgaagttcaatctcctatcttcctcttcatattggctaaaccagatcaagctctctgagtctgctgataagcacacaggttcagtggattcagtgtccaagggttcgggtttcagttttacagtcgccatggtggatgcagaactgcagtgaacttcgtcaccatcagtggatcgagttccctcttctggcacctgtgaaatgctctcagacacttgtggctgctctatattttcagcaatgtcataggtttgacgcagcgcttgcacttctccaagttcagcaagctgatgtcgttgcacataagactctagctcatctttcatcttctggaacggctcacatcttgcctcccccttctgtttcggctcgag

SEQ ID NO: 18108 - DNA, 405 bp, Glycine max
cggtaaaacccaaaatagtagggattagaaactttcttttacatgttttgtttaggctgtttaagcatggcaacgggcttggacccgtggagctcaatgtccccattttagcagaaaatccgaagggtcgagtttgggtttttcccacggtgttcgaagtccgatcaggagtcactctcaaatccacccatatatattgaagccctgaaacggatttctcaattttcactctcactcaccaatactactccgtcgcttctccgttctcactccctaagacctcatgccagaaccctatcgcaccttccaagccaacattatcgcaccttcacgaccaacaacatcaaccttctcgtacttttcacttcttctatgaacattggtagccttgaacttacatttttt

SEQ ID NO: 18109 - DNA, 540 bp, Glycine max
gccagaagccggagagcattcttggtctcagctcaacaacaaagcgatgttaaggaagcagagagcttgaaggtagaagaggagcaagagcaggaacaaatgcaaactcaaacaccgaagccaaaaggaacaacacctaggccagtggaacctcagttgaatgtgaagagcaaaaacatgctgagggaatatggagggcagtggctgagctgcgccacacgccatgtgaggatctatgctgcgtatatcgacccggtgacttgtgagtttgatcaaacccagatggataagctcacccttattcttgatcccactgatgagtttgtgtggaatactgagacttgcaacatggtttattcttacttccaggagcttgttgatcactacgagggcgctccattgacagaatacacacttcgcctgattggttcagacatagagcactatataagaaagatgttatacgatggggcaatcaagtataacatgaatgcaagggttctgaatttcagcatgggcaagccacggatcatgttcaac

SEQ ID NO: 18110 - DNA, 385 bp, Glycine max
acggtatgaactgctcaatgtttttgtggaatgttttattgcttcctcttggaatttctaatgagaaaaattggcatcatgctcatcacagttcacctgagtttacgaatagagatttgagaagccagtagtaccaacagttgcttcttactgttgcaacagactctgtgcatcttgtagcttatccactgaacacatggtggattgacgtgcaagaaaatgggaattggcttccagatcatgcgttttgttatgctatctgttgacattttagattatgtgctccttcatctaccacgccttgcatgtatcagaatattcctatattgcagatggttgcatatatttgacaaaatcccttttttaaaataaatttaatctttat

SEQ ID NO: 18111 - DNA, 673 bp, Glycine max
tggggttataatgggacaccgcaaaaggacacgtgtgaacaaaacagcaaaacagtgaaacctgagaatctgaactgagaggaagccatggcagtgagaataaacagctccattcaaaacaccctctgtctcctcaaccctcctctgttttccctccgttacagagcttcttccctgaagttgaaaccccaattgcattttcgtcaaaacccctctcgaggagctttattctgcacatgcgccaccaccgatatcactccccaaagtaccgaacactttgtcctcactacccctctctactacgtcaatgctcctccccacatgggtagcgcttacaccaccatcgctgccgatgccattgctcgcttccagcggctattggggaagagtgttatatttattactggcacggatgaacatggggagaaaattgcaactgctgccatggctcagggttccacccctcctgaccattgcaatctcatatctcgatcttacaagacgctttggaaagatttagatatttcttacgacaagttcattagaacaactgatagcaagcatgaagcaattgtgaaggaattttattcaagagtgcttgccaatggtgacatctaccgagctgattatgatggactttattgtgtaaactgtgaggaatataaggatgaga

SEQ ID NO: 18112 - DNA, 207 bp, Glycine max
tcgcaattatttgggcttccattttggctcaaatgttgtaatcattttcctatagctgtgtagggagtatcgtctaagtgttccaagtaactggattcagtggtggctttgactgtatttggcatctgatactattatgaattaatggcttgtattatcatgtaaatgttaatatgcatgtctggctgtctttacagcggctttgat

SEQ ID NO: 18113 - DNA, 577 bp, Glycine max
caaaattccaaaccagttcaatccttttcagtcatctctttggtcacgttttcacagtaacataacatattctgtggaaatatggcaaaacttggagactgtgcagctcatttttttattgcagcaatggttttgagcacgttttacgtgaccaaaactgtggcacaatcagaaattgcacccacatcgcaaatggagactggtgcagggtttgctttgtctgtttctggggtgaccttatgttcttctgtgttggtttctattgtggcatttatgatgcagtgaattgcaaggcatattggctcctattcatgtttgattggtcttatcatgtacgtgttgaaattatattttatgatgaatttaaagggttgtttttgtttctttactatgcttgcttcttgaacacggtcctgtcgtttttggcattgtaacctagtactagctttatgatgagttacatgtttgtaattttcgccaagtacttaactggtgcatgtgaatagatatgttgtaattatatattttgattccattatctatcaaaataaataaagattttttctttgtttttaaa

SEQ ID NO: 18114 - DNA, 602 bp, Glycine max
cccacgcgtccgcccacgcgtccgcccacgcctccggcgagctgaagaaacacgagcagcctagaaatagtcaccgcagttgtatcagtgaacctagagggtactaaggttcccttatatggggctggatccaccataactgtatcccaaactggtgttgaagttccactcacattgaactttgaaatccgttcgcgtggaaatgtagtgggtaaactggtcaagacaaggcatcgtaaggaaatcacttgccccttggtcctcaactcttctcgatcaaagcctatcaaattcaaaaagaattcatgcacctatgattgatcagtgatcaatgtccattttcatagcttatctgttttgagagtgtagcttaaaattgtataatctgtgttttgtgccaagcttcagatcataaggtccatttggtttgcaatagaagcaaaatatgcactcgaaaaaatacttcttacatacaactagtccccctgaatcccccctctgtactttactcttatgagccttgtgcaaataaatgcatgtatgtaaatttgtatatgcatatgcataaaatgaagaaacaattcgcgagttcattactgagg

SEQ ID NO: 18115 - DNA, 650 bp, Glycine max
tgacaaggtccttcctttttccaattcaaattcccgcccggtctgaacaccgaagccacgccaaaccccctttgttgttgtgggctatctttcattctttcttgatctggcacaagaaaaaatgtatggaaccaaaagcaaaatagaccttgcctttgaataccaatcccaagttgcagttttgaggcccagcatccattccaggagagcaaatctgactgtgaaattccaagacctttatgggttcacagttgaagggaatgtggatgatgtgaatgtgttgaatgaggtaagggagaaagtgaggcaacagggaagggtttggtgggcattggaggccagcaaaggggcaaattggtatttgcaaacaaccatagggcaaggcagtgccctcacatcctcattgaaattctcagcaatggctaatgctataactttgaagaagttgatcaggaaggggatacccccagttcttaggcctaagatttggttttccttgtcaggggcagccaagaaaaagtccaccgtgcctgacagttattatgatgatttgaccaaagcagtggaagggaaggtcacccctgctacccggcagatagatcatgatctacccagaaccttccctggtcacccatggctggacactcctg

SEQ ID NO: 18116 - DNA, 514 bp, Glycine max
cccatcaaaccaatcattcccctgttaccaaaaccacactgtaacccccctgttttgggtttgggcttcaaatgagttcggctactaagaacgcggcaaacgcggttggggccaaaacggcaagagcatgtgacagctgcataaccaaacgtgcacgttggtactgtgctgccgatgatgcttttctctgccaggcctgcgactcttctgttcactcggcgaatcctttggctcgaagacacgaacgagtccgcttgaaaacggcgtcctacaagtccactgatgaacaacaacaacaacaacaacaacaaccttccacgtggcacactaagaaacctcgaacgccgaggcacgggaaacattctcgtaacaacaaccctttccatttggtccctgaagagggttcggaggaggcgaattcccatgatgagaacgaggagcagcttctttatagggtccccatattcgacccttttgttgctgagctatgtgggactaatagttctccttctcc

SEQ ID NO: 18117 - DNA, 475 bp, Glycine max
tttaagagggaaccttacttggcattatctatattgtgtttctgtttaaggattattctaggggtgttgcccacgattatgtgacgtctcaaagaattctggacttcctatgcttctcatttgaacatgcaaatatttggcgaggtgatggaacgtgttcttaatgtaattgatgtcaagaggatttggaccaagctaagactatacaagaccaggaactttcatgaaagggtgaggagtgcccgggtttgggcatcacactctggcttctgtttcccttggtgactcatcagctaggcgatggtctcaaatctcaatgtttgaactttgaactaaccatgttgttctagtcattttgagggttgtgaagagtttatcagatgaccttttgcacataactccctagttctgttactaattttgtttgttagtagttaaaagatgctgatgtctgagttggactttgggagaaagt

SEQ ID NO: 18118 - DNA, 1230 bp, Glycine max
cgaaaagaaaaggggaaaagaaaaatgaaaaatagcacaaggccaaaaatatcacctgatctgaaacttggacacgaaagaaaggctcgtatgcgcgacttctctctcttgcattgattcaacgttgtccattctccgaaacatcacaaagaaacccaactgagagagtgaagaataagaagaataaaaagaagaagaagggacgacaacaatggggggtttcgcaatgggttctgccttcgattccaaatctgggcagattattatggctgctttgcttttgatgattatgtccttctatgctggcaacctttttggcaacaatgctcccctttacgtctctcagcttgcttctcattcttctcccaacaatgtctcctccaacggtgctaccaaatttactaacaaagttgctctgacttactggaaaaccccgcttgtaattccagaaactggggtggatgtgtgccctttgacattcaatgagtatattccttgccatgatgcttcctatgtggcaacattggccccgactcttgatttttctagaaaagaagaactggagagacactgtcctcctcttgaaaagcgcttattttgcttggttcctccaccgaaggattataaaatacctatcaaatggcctcttagcagggattatgtttggcgaagtaatgttaatcatacgcatcttgcagaagtcaaaggaggccaaaattgggtacatgagaaggatcagctctggtggtttcctggtggtggtacccatttcaaacatggggcttctgagtacatagagaggttaggacatatgattaccaatgaggctgctggtgatctgcgttctgctggggtagttcaagttctggatgttggctgtggtgtggccagtttttcagcatatcttcttcccttgggtatacgaacaatgtcctttgcccccaaggatggtcatgaaaatcagattcaatttgcattagaacgacggattggtgcaatgatctctgccttgtccacaacacaactaccgtatcctagtgagtcatttgaaatgattcactgttcacgatgccgaatagactttcatgaaaacgatgggattttactgaaggagttgaatcgccttcttcgcttcaatgggtactttgtttattcagctccccctgcttatagaaaagacaaagattatcctgtaatttgggataagttgatgaatctgactacagcaat

SEQ ID NO: 18119 - DNA, 520 bp, Glycine max
cagcattgaaattttctggaagaaaatagtcagttgaaggatcccaagttgatttgtctaatccgtaaggagcaatgaccaacttgtccctgcaaccaaatgtaattttccaaagacaaaataatccatcatcaaacgttaaacaagatcgaaagtatgttatgacagcatacttacctatggacatttaaagtgggctccagttcatgactcgggttatgaacaattacgtgcggtggatcgatagatgacattattacaactctattcgaatagacaacttgacactttaaaatatacgacaagtcgtgtagtaaaatgttaactggtaaacatatcaagtggaaaagctttttagaggacctggattgactacaaaggtctgtgattatcttaacattctacctactattcttgagagaggatcatgtcattgttccttacttgtgtagcacggactatgataagatgtatcattgagaaacttaatgatcctattgtcgtaatttgatatgcaatt

SEQ ID NO: 18120 - DNA, 495 bp, Glycine max
ctcgagccgctcaattccgcgctttaacaacagaaagaaatccacacatttccctttcaatggcacgaaccaagcaaacagcgcgcaagtccaccggcggcaaggctcctcggaagcagctcgccacaaaagccgctagaaagtccgctccggcaaccggcggagtaaaaaagccgcaccgttttaggcccggcacggtggcgctgagggagatccgaaagtaccagaagagcacggaacttctgatccggaagctcccgttccagcggctggtgcgcgagatcgcactggatttcaaaaccgatttgcggtttcagagtagcgctgtttccgcgcttcaggaagcggcggaggcttatttggttgggttgtttgaggatactaatctttgtgccattcacgcaaagcgcgtcaccatcatgcctaaggatattcaacttgcacaggaggatcaggggcgagagggcttgaggttttaaaatgtttcgtcaccgc

SEQ ID NO: 18121 - DNA, 1208 bp, Glycine max
acaaaattctgttcagtttcacccactaaaccaccactactcctaagatctccttcaaaacacaaccaaaatcttaactttcttggaacctttttaattgtttcttctttaaaaatcaatttcctttaaggctttaactttaatattagagttctttctctttcattcatccttggtaatggcttgtgcattgcaagcaaccttagcagccaacacctatgccttttcttccaggagattctccttgaagcaccaaaagaacagtaagagaaggttttctttgttcactgttagagctgattctgatgactctgactgcaatgaggaagagtgtgccccggataaggaagtagggaaggtcagtgtggaatggttagctggggagaagacaaaagtagtgggcacattcccacctcgtcgtaagccgggttggactggctatgttgagaaggacactgctgggcagacaaacatatattcagttgagccagcagtttatgtggcagaaagtgctataagttcaggaactgctggctcttcttctgatggagctgagaacacagcagcaattgttgcaggccttgctctgatatcgattgcagcagcatcgtcgatactgctacaagttggtaagaatgctcctcctcagatccagacggctcaatactctggaccatcacttagttactacatcaacaaattcacgccgccggaaattactcaagtgtctgtgccaagtgaggctgaactatcctcatctgttcaacctgaaagcccacctccggaagtttcccaggttcaggttgaagctcaagcttctgagacctctagtgtgaacattgaatcgtaggtgtatcaagtggttaccacttttgctaccaaaacataccaaagaagtttattttgtgtatacacaactaaaggttaatggatgcaaatgttgaacatcattcttggtatgccactgctaccaactgaaagtgtgtttatcttttgcaggggaaagtgatgatatttagtttcagttttatataatcctcaaaatagtgaaaccacattggaaatttttataatgttctgttggttcctgaggtttttttaggcatatttaagatccttattcatctgttcacttaggcataacaagaattggaagatgttgagagctaaaattgcaatatatatatatgaattgaaactattatttt

SEQ ID NO: 18122 - DNA, 453 bp, Glycine max
atgacatatcccactcaatttgttgtcccttaaaggtttaagctccaccacgaaactccaatcctcaatacacacaaaattctgttcagtttcacccgctaaacaacgtcacctaagagatctacttcaaaacacaaccaaaatcttaaatttcttggaacccttttaattgttttttttctttaaaaaaatcattttcctttaaacttcaattttagagttctctctctgattcatccccagcaatggcttgtgcattgcaagcaaccttagcagccaacgcctatgtcttttcttccaggagattctccttgaagctccaaaagaacagtaagagaaggttttctttgttcactgttagagttgattctgatgaatctgattgcaatgaggaagaatgtgccccggataaggaagtagggaaggtcagtgtggaatggttagctggggaga

SEQ ID NO: 18123 - DNA, 339 bp, Glycine max
gtttcccaggttcaggttgaagctcaagctcctaagccctcaagtgtgaccattgtatcgtaggtgtatcatgtggttaccccttttgctacgaaaacatagcaaagaagtttattttgggccaatagtatgagccagtgtatacacaactaatggttaatggatgcaaatgtttttgttgaacatcattcttggtatgccactgctaccaactgaaagtgtgtttatcttttgcaggggaaagtgatgatattagtttcagttttttatacaatcctcaaaatagtgaaaccacattggaaatttttatcatgttctggtggtttctgagggtttttt

SEQ ID NO: 18124 - DNA, 487 bp, Glycine max
agatcccattgccataaattactttgtccacaatcttgatttcacgctcagcctcgcgtcacctaacaattttgaagcatttggggttgcaattgaattcttctgagcaaaccttgttcttatcgtcgccacaatagacatggtttatcattctagttttgtgaatgaagatggagtgagtagagcttgtgggtgccctcttcttcctctcaagagccacattaagggacctgctcctgtttcagatcaagacagaactgatattgtggatgaagccataaccttcttccgagccaatgtgttcttcagaaactttgacatcaagagccctgctgataagcttctcatatacttgaccttttacattaatgttgctctcaagaggcttgaaggttgcagaaccttggcagaaggaaccaaggcaatcatcaacttgggtctcgaaaaggttcctgtccctggagagtctggctttccattttcgggc

SEQ ID NO: 18125 - DNA, 535 bp, Glycine max
  unsure (1)..(535): unsure at all n locations
actcggtctggaattacccgggctcgactccacgtcgtctcgtcccatctcgtctcgtgcccatataccaaactctacatatatgatggtaatagcccaatgaaatgacccctagtggtgcctanntaatgcaaccaaatcagagtcacatatgagtcaatggagtgcccatgaggaaaaatccccagcttcttttccaatgacctatccatcaacttgggtcaggaatccactcaccccaaaatgtgaacaacaactaacacaagcggtcactctctttggtcagcttccactcttccttgcccaacactgtcttgtagttttggtgctatgctatcaaagcttccatatgttactccttccaataatccccctcaagttcttgaaaccaataagaccaaccacaaagtgaagattgaggagtgcagatttcatggtgctgctaatggagatcagaacaaaaatgcatggtggaatccttgataaataagagagaaccgctagcaacacactctnttaaacacatacttcattg

SEQ ID NO: 18126 - DNA, 416 bp, Glycine max
acgaatattaataaaattaattaaaaatcagttaaattaatatgaaccttaatgattgaaagcattaaaaggaatcccagtgacccagtagcccttcctggggtcttcaaaaagatgactgcaaagtaattttctttactgctctcaacattttatcaaaacataacagatcaattacatgccattcatgcataagtggagtcggatgatgatgcagcccttcttcttggcaaagtattcctcaacttgagcaaggttctttgcaacttaaagcttaacccacttcttgcgcccaagcaatacggtgagagagcaaccggcagcctcgagcttttcctttgcagatgctgaaaaggcacgggccttcaagttcagctttaccttcagcttcccgtcaccaagaatcttcaaaggga

SEQ ID NO: 18127 - DNA, 429 bp, Glycine max
gattcttttaacaacaatgatgatttattactactacaaatgaagaaaaagccttaaaaaatgaagcatgaaatgccattacaaatgaactcattaaaggctcccacaagcagggacatgaacatcattcctccgaccaaactgaacaaacataaatcaaacagacaggaaaaagatgattaaatcttggtctagttgatgattatattatatagtatcatatataattaagcggtaagctgttcctgcttgtgggtctcaataacaacatcactctgagggtaagcaacacaagtgaggacaaaacctgcagcaatctggtcatcatcaaggaaattaccgtcggattgatcgacggagccttgcttaatcattccggcacacgaagaacaagacccagccctacacgagaacggaagatcaatgcct

SEQ ID NO: 18128 - DNA, 559 bp, Glycine max
tcgacaccggaatctggccggagctcaagagcttctccgacgaaaacctctccccaatctcctcctcctcctcatggaaaggctcctgccaatcctcacccgccttcccttcctccctctgcaacaacaaaatcatcggcgccaaagccttctacaaaggctacgaatcctacctcgaaagaccaatcgacgaatctcaggaatcgaaatcgccacgcgacaccgaaggccacggcacgcacaccgcctccaccgccgcaggcgccgtcgtctccaacgcaagcctcttccactatgcgcagggcgaagccagaggaatggctacgaaagcaagaatcgcagcctataagatctgctggaagctaggttgcttcgactctgacatcctcgccgccatggacgaggctgtctccgacggcgtccacgtcatctcgctctccgtcggcgcgtccggctacgcgccccagtactaccgtgactcaatcgccgtgggagcgttcggcgctgccagacacaacgttctcgtctcgtgctccgccggaaactctggacctggtcc

SEQ ID NO: 18129 - DNA, 594 bp, Glycine max
ttgtggacgcgtgggcggacgcgtgggcaaaattgaaaatcaagattggttgagcagagagagactttgaagttgtttcgtgtcgtgtggcgtttctgggaattaagtgcttttcttctgcaaccacagtctcattcatcaatcaatcggcatcctcatgtctgacgcttattggagatacgccgccgaatcccggcaggccccctcttccatcgccggcaagcgctctcgttccgactacgatgtttctggcgttcacgacttgcccggttactttccccatgacgatgatagaggagggctccgagtaattagagatactgaatcccttgatgcatcttatgagcgttacctccgtagtgcgcaagtttcatcatatggttcgggacagtctactagaaccattagtgggagaattcccaatcgtgctattgatgattcacatgttgccaatattgggggagtcgacaggggaacaaatgcaaaagacaaaatgccgggattaagtagtggaagggctgaccattctcttccaccagatgctaccagtacactggttggggagggtttgccttccaactgtacaagacggga

SEQ ID NO: 18130 - DNA, 521 bp, Glycine max
  unsure (1)..(521): unsure at all n locations
gcctcgccattcatttgcctccttccacttccaccctctatctatcttccttcatcatggtccatatacatttcgtgtttcgccacaaagacttcattttttcacactccttttcttctttctcttttcttcccgaaatttctgtgtgtgtgtgtgtgtgcgttttggccttttgaagcttccgaggtggcaaagatgaactgatcccaaaatatataactcaagttttacaattcaagccaacatgaatcctgtaataccatgctctattggcaatgtttcaattattcctgtattcatctattcaacaaggaagaataacactttaacaagattcaacttgtcaaggagcactgtaaaacctggatcatcatcttggagatttctattaccttcatttgttgccagtggagcgtttccacaaaacaaagggatacgctcttttcataagaaatctagcaactccatatcagccacaganacagatgtaacagtggaggaaccaagtcctgttgctgatg

SEQ ID NO: 18131 - DNA, 508 bp, Glycine max
cactccctcacccttacccttttgcctacataaacagaacaattctttgtgtacggttccctcagccccgccagccaacggcatcatggaagacagtttcagagtacgagcagagagagcctttggttctcttccaatcccttcttcttctctcaacactctctggtctctcaccgaagacgaaatcaataactccccttccaatcgcacccccaaacctaaacccaaaccctacccctcttcaagctcccgggttcagctccagaagggcctccacgatctcgacgacgacgacgacgacgacgacgaagaagaagaagagcctcgtggagtctctaaaccccctgattacgacgatgaacagtggcagattagggctggtattggccgagattgcaccctcgattacgaggaagaggaggatcaatatgacaagcaggctataggcaaagagaattcgggtgatcgtgtgtatatgaaggatctaaacgacgatggagttgagatt

SEQ ID NO: 18132 - DNA, 449 bp, Glycine max
tcttgacaaacttgcactaaaatatgatcgggaaggggaaccatcacagctagcagcgtgttggcatttttgtcagtactgttgatccattaaaagaacccccgcttgtgactgcgaacactgtcctatctattctttctgttgactacccagtggataaggtctcctgttatgtctcggatgatggtgctgctatgttgacatttgaagctctggctgagacatcagaatttgctaggaaatgggttcctttcagcaagaaatataatatcgaacctcgggcacctgagtggtattttgcacagaagattgactacttgaaagataaggttcaaccatcatttgtcaaagatcgtagagcaatgaagagagaatatgaagaatttaaaattcgcgtcaatggacttgttgcaaaggcacaaaagattcctgaagaaggatgggtgatg

SEQ ID NO: 18133 - DNA, 409 bp, Glycine max
cacgaaaacccctaaaaactttcctatctttttatgtcatgaattcatctttatagcttcatcttcacagcatccaaggcttcagttttacagtgttcgtaggttattttttcaggttcagtaactcattcacagaagaagaatccaagcttgtggattagaaggggttcattttgccgattcccaagctatggctgctaagcttcttgcaaacttaattgtaattggtggaggaataatgacaagagcatttgttcaggcatatcgtcaagcactttctaatgcctcaagaaatggtgttgcacaagagacaatacaaaatactatccgcagagctagcaaagggatgacacaacaagaggctcggcagattcttggtgttactgaggaaacttcctgggaggagatt

SEQ ID NO: 18134 - DNA, 644 bp, Glycine max
ctcatttttcttcttctctgatatcaatcacaatttctctctcttcttcactcttcattctcatttctcttctgaattattgccatggctaagagctcattcaagatggaacacccacttgagaggaggcaggctgaagcatctcgaataagagagaagtatcctgacagaattccagtaattgttgaaagggctgagaagagtgatgttcctgaaattgacaagaaaaagtatcttgtacccgctgatttgactgttggtcagtttgtgtatgtggtgcggaagagaatcaagctgagtcctgagaaggcgatcttcatttttgttaagaatattttaccaccaactgcggcaatgatgtctgcaatttatgaggaaaacaaggatgaagatggctttctatatatgacttacagtggagagaacacatttgggcttgtgttctgaaataatccgtcgtgacaggcaaccatctgaatagaacttcctaaaattgaccaatgttaagaagtcagcttaattgtaaattctctggtttgatgctttttatgtaaagtttattatgtctactggaacttatttgaaaattgtcgtgtttctatcagttctaaattgaataagtttaagggtatgtttgttctttg

SEQ ID NO: 18135 - DNA, 535 bp, Glycine max
gttcatgatgtgagtgtgagatgtgatgctcattattatttcttttttaccacaaataaagcaaatttccacagtaaacccctctcttttcccttcaatactcacttcttctctttctcgttgcactgatcttagaggggtttgtgttcttggtttcctcccctttctctctctctctgccttgcatttttggctcgttttctcaataggggtttcgaaaatgccgatgtttcagccttgtcggaaggacttggttgccgggtacgagggtggtggcgacggccagattctagatctggacaccgccgtgaaagacggcgttttgggcggcgtggagggcggcgtcctgggaggtggggttggtgagaaggtggatctggggaagatgattgaggagcttgagttatgtgaagtgccgagtgtgttcatttgcccaatctcattggaaccaattcaagaccctgttactctctgcacaggccaaacctacgagaggtccaacattcttaaatggtttaacttgtgacacttcacc

SEQ ID NO: 18136 - DNA, 409 bp, Glycine max
ggtggcttcgtgtcacagtgctgaataataatggtgatggcttcgtagttgtaagttgtgataataataacagacaacgaaaccctcaaacgaagggaacaatgcgaatataagtgagagaagaatatatcaatatcgtctccaaatacgacgtcgttcaggttggagttttagcacaagatgtctctgagaataaaagcagtagtagataagtttgtccaagagttgcaggaagcgttagatgctgatattcaggataggatcatgaaggacagagagatgcaaagttacattgaggagcgtgaacaagaagttgctgagcgtgaagctgcttggaaagctgatctttctcgtcgtgaggcagagattgctcgtcaagaagcaaggctgaaaatggagagagacaatc

SEQ ID NO: 18137 - DNA, 285 bp, Glycine max
ctcacgcattcattcacctttcgcgtgtggcttcgtctcactgtcactgccgaatgacattggtgatggcttcgtagttcatagtagtagcagaagaaaacgaaactctcaaaccaagcgaaactatgggcatataactgagagaagaatatatcaatatcatctccaaatacgacgtcgttcaggttggggttttagcacaagatgtcgctgcgaataaaggcggtagtagataagtttgtccaagagttgcaggaagcgttggatgctgatattcaggatagg

SEQ ID NO: 18138 - DNA, 496 bp, Glycine max
tttgactcccaaggctccaagtcaagttagtattgctaagtcaactgtcattcgttatggttccaggccagactttaaagaaatttatgaatcaatgtcagagaaatggggccttgttgatgtgggtgtcatagtttgtggcccttcaacacttcagacaagtgttgctgaagaaatcaggtcacacagtatgacaagacaacgccatcatcccatcttccatttccacagtcacagctttgatctctagttccccaaaaggaagatggaagacatgcattcactaaagaaaaaagcatatatatatataatgtgtattgtatatagcagtaatcaaattctagaaccctttgtagcattggtgctatagtagcctacagtccttagaagggttctaattctaagcgggatgatatgattttactccttaattatgtgaatatatacattatcactagacatattttatatgcaattttagcttccttgtatattt

SEQ ID NO: 18139 - DNA, 557 bp, Glycine max
aagatagtaatggataacaaacatgatcactgatcaaaactattcacatcttcacgcagttcctcttcacatttttagatatcatccttctacctttgcctatggaggctttctccgtacaatcactcaccgccaccaccattccctcctctctgtcacgtagaggtgccactgacaaaccttctgccacctcccatgttaacctttcccatttcatgaggtacccttgtaccacaagatcaacaaaacaaaaaattctttgcaccagagctcaagcttcaggttcaacgaaatctagtacgggtagtgcagaggggatttctgagaaaacagattccaaggatgacaacttagtatttgttgccggtgctactggtagagttggttcacggacagtgagggagcttataaagcttggatttagagtcagagctggagtgcggagtgctcagagggccggtgcattagttcagagtgttgaacaattgaagcttgatggtgcaagtggagggggacaagctgtatagaagcttgaaattgtggaatgtgatttggag

SEQ ID NO: 18140 - DNA, 447 bp, Glycine max
gtgacgtaccacacgtacgcgatggggaggatggagagcgtgtgggggaaggactgtaccgaatttaagcccgaaaggtggttggagaatcgagccgagagtccgtttcggtatccggtgtttcacgcgggtccacgaatgtgtctggggaaggaaatggcttatattcagatgaagtcaattgcagcttcgttattggagaggtttgagattgaggctttggataaggacacgtgtccggagcatgttttgtctttgaacgatgaggatcaaaaggagggtggcctgtgagtgtaagagtaaggattgaatgaatgctagggtcaggaatattctctccacatgtacctggcttccaccactctgcaaaataattgtgaatttctgctgttttaatgaaatcattagttaaaaatatataacatgatcaacgggttctaattaatt

SEQ ID NO: 18141 - DNA, 404 bp, Glycine max
agcgaggcttatttgttcattcattcaatatctggtgcaaagtttcagtatttcccagggaaacagttatggatctctccgtttctttctccaaaacccgtcctcctccgttctctccctctttctgccgtccaatcactccgcaactgctgcgattctcccgaaactccggaacctttcgccgccgttgatttcccgccaaaacaagctcgcggtcacagccattcaggtttcggatctatccgagaattgcgacgattctgtcctcgaagacgttccgcacctcaccgcctttcttcccaatttgccggtgatagacaaatcttttggatttaatactgctgtggaagaagcccacatagccattaacgctgcacatggggaggttgaaaatgttgaaaatg

SEQ ID NO: 18142 - DNA, 451 bp, Glycine max
cccacgcgtccggcaaatactgatgcaactttggttaacaccggcgacactggtgcgggctgactccagcaaacaacaccggtgcgactctgtctctagcgaacaactccggtttgactccactcaacactgttctgatgaatcaagatatttccactttgtcgttccctatgaattttatttttttttgcatcaaatcacaaaaaagttaaatgataagaacttcttgctgtggcgacagcaaatcaagtcagcgatcactatgcgtggactcaatcgcttcgttgtgaatcctcaaatccctccgcaatatgtctttgatgaagattgcgatcttgatcgcgttaatcctctcttctcgatgtggtaggaacaagaatagtttcttcttgttggcttcagtcaacgctctcgagctcgatgcttgctcgtgttcttggatagacgtact

SEQ ID NO: 18143 - DNA, 594 bp, Glycine max
atttgcaattatcttgggttgcaatggagggagtgttgcttcccgtgtgtccttcaccttcttcttgctctgcaactcctaaacccagaatccccattccgctacgctcttctttcccttctccattattacacaaccgtttcttctcccaaaacgcagcgttttcccttcgcaactctctccgcacttccaccttcgcactcgcgcaacacgaagctcccgttctgggcaaacccgataacaacaacaactcttcaccctatcttcccaaaatcgataagacgggacgcttctgcagccccagagccgccagagaactcgcactgtcgataatctatgctgcgtgcttggagggaatggacccggttcggctctttgagaaacggatgaatgcgcggcgagaagccggatataaatttaatgaggaaaagttgttggagtataatcatatgagtttcggagggccgcctgttactgttggatcggacgaagaagcaaatgagctactgcggcacattgaagaagagtctgccattgaagcagaagtccttacagctcctccaaagctggtatacaacaaactgattttaagat

SEQ ID NO: 18144 - DNA, 1632 bp, Glycine max
cctcgagccgctcgagccgattcggctcgagcgacacgagcgaggcagagagaataataacactttaaaacagttgtgggttgtcagccgcggtcttgcactcttatttggcagttctgaaaaggacgcgccgggagaggcgcgtggcagattatggatggtcgaacccgcaagcattatatgattggtgtggtgcgtgttgcatcagaggtggacgcaattcagaataacaataaagggtggatgaggatccagaggttcttggccacactggccataactgtctccatactcttgggaaatggaaaccccgttcagtgcttcgacggcggtagccaccaaaaacagcaacacagtttgtgtgaagagctcattatcccctacggttacccctgctccgagcatacgattcaaacgaaggatggtttcttgttaggtcttcaacgtgtctcttcttcttcttctcttcggcttcggaacgatggagaacgaggccctccggttctgcttctgcatggcttattcatggcaggtgatgcatggtttctaaatactccggaccaatcacttggcttcatacttgcagatcatggttttgatgtatgggtaggaaatgtgcgtggaacacggtggagccatgggcatatatctttattagagaagaaaaagcaattttgggattggagttggcaggaattagccctgtatgatgttgcagaaatgatcaattacattaattcagtaacaaactcaaagatatttgtagttgggcattcacaggggacaattatatcttttgctgccttcactcaaccggagatagtagaaaaggttgaggctgcagcccttctttctccaatatcatacttggatcatatcagtgcacctcttgtacttagaatggttaagatgcacattgatcagatgattcttaccatgggcattcatcaactaaacttcaaaagcgaatggggggccagtctcttggtttccttatgtgatacccgcctaagttgcaacgacatgctttcatccataacaggtaagaattgttgcttcaacgagtcacgtgtggagttttatcttgagcaagaacctcacccatcatcctccaaaaacttgaaacaccttttccagatgatccgcaaaggtacctactccaagtatgattatggaaagctaaaaaatctgatagagtacggcaagttcaatccaccaaagttcgaccttagtcgcatacccaaatcattgcctctgtggatggcctatggtggaaatgatgctttggcagatataactgatttccagcacacactcaaggaattgccatccacaccggaagtggtttatcttgaaaactatggtcatgttgacttcattttaagcttgcaagcaaaacaagatctttatgaccctatgattagttttttcaagtcatccggaaaatttagtagtgtgtaaatttccttcattccggtatgatggatgcaatacaatggtctacgtgtttatatattactgcactttctgtaaagtgaaaatattaatattgtgtggagttcaccttgattttctgtatgtaaatatgatgacagatataataaagagtggcgttgcatggcctatttctgc

SEQ ID NO: 18145 - DNA, 404 bp, Glycine max
gtccgcccacgcgtccgcccacgcgtccgaccacgcgtccgcgtagtgtctgcagtgtgcactgctcttgcatagggagggaaagagcgaagactagagaagaaagagaagcttctgctgcatcactatggcgttggcgctgcttcttcctgttcttcttcttcttcccacttcgctttctgtttctgctcaaactcaaccaaactaccactacgcctcccaaatcagccaaatcaacctcaaaatcgctcacttagaatcggttcttgaagaaagtaacacacgattaaaggaaagggatgcgcacctggaagagtgtgagaggcgaatgaatgaattatcggaaaaaattcaccatctgcattctactctctctgcaatgaaggctgattcattgcattctg

SEQ ID NO: 18146 - DNA, 476 bp, Glycine max
atgtattcgagcataatttattgttctgtatacttcccacttgcagatcttctaaaaatagttgagagaacagttaggtcagaacatcaacgttcaccaaatagacccatatatcttgttggggaatctttaggagcatgccttgcgctggctgttgcggcacttaaccctgatattgatcttgttctaattttggcgaacccagctacttcattcagcaggtcaagcttgctacttctaacaccattattggaagcgttgcccgatccactctctccgggcctgcctaacattctcaggtcgacaggaggtgaatctctgaggatgctgttggataatgtggtccaaggacttcctctacaaaatacagctggagagctagtgaaggattttactgctttctcattatctctgcctgttcttgctgatatattaccaaaagaaacacttgtgtggaaactaaagatgcttaagtc

SEQ ID NO: 18147 - DNA, 513 bp, Glycine max
cgaagatacatgagggtttaaagtctggatcattttggtacaaacccatccaagtgtgtcatcctcctcataagcttggagttagcttattgatattttgattgcaagtgtgataattgatgcaaccaaactttagcctggacaccaatggccgatgttgcttacgaatactgtgggctacttcattcagcaggtcaaacttgttacttctaacaccattattggaagcattgcctgatccactctctccgggcctgtctaacattctcagatcgacagaaggtgaatctctgaggatggtgttggataatgtggtccaagggcttcctctacaaaatacagcctgagagctagtgaaggattttactgctttctcattatctctgcctgtaaggttcaattattgcttttgttcaaaaaataaattggaatagcagcgtgtgactttttctttattctttgaatatatgaagcattttgtatgagaagtaatgaccatgcatgaggcatatt

SEQ ID NO: 18148 - DNA, 446 bp, Glycine max
gataatttgtcgtgtgaattataaatcctaggattggagcaaaactcaagaacaaggagtttgagaccaaatttgcagagctggcaataactgacaaaaatttcaactacctgtcagactcagttacctatttggaagctaaaaaaggcaaatacaatgacataatacactacgatagacaggaagaaatatttcttttatatgaatggaaaccagcaagttagcaacggataaaagatcacatgtaagagagtgctctgtaggttattgggagtgtcatttaagggcataacggagttggaggatcagaaagtcactgtttcgctctttctactcagatcttatttttatcccccgtatcttttgttttgctcttgcatgtaatggcaagtgaacctttttctaatgtgtgtaactttagttttaacagtggaaaaaggggaggg

SEQ ID NO: 18149 - DNA, 1194 bp, Glycine max
ggaggatgaagcgaataatgagatatctttgagcaaaggagctcacagtcttatgttatgcaatcatctttcagtctgggcaagaggaatcccaacttacttccgcagcaatttcgccagacgagatgtacagctttgtcttttctcctgttgatgaagagatggttggagacccttcttacttggttgctatcattattgagtttcttcacagtgcaaattcagagaagattcgcatactcccaaatgtttatgtattaataattcaacttctggcccgcaatgaacattatgcagagctcgggttatttgtcttaaacaagattctggagccctctaaagaagttgcactacaactcctagagtctggtcgtcagaatgcccaaactaggaagcttggtctggatatgctgagacaacttggtttacatcatgattatgttttactgcttgtgcaggatggatactaccttgaagccttacgatatgcacggaagtacaggccggtggataccatccggccatcattgttcttagaagcagcatttgtttccaatgactcccaacatcttgctgcggttcttagattctttacagatttccttcctagcttcaaaaacacctttgaccataatagatactgccgcatactgaatgaaatgaactcatccacgactgtttgagaagtaaaaaaaagggagaaattttaggtcattatcattgggtattcttgttcaaccgtgtcgattacctcgttatttatgacatccggtttctattagatacggaatagatttggtaatagtttcatgttgtaggttaaataaacgtcctcctagttagattagttttagatactgtcatctaaatgaaattctttacattgaaatttactttgtttaagctttgcgggtgtattgcatagttgtctaatactaaatttttggagggagaggagagtacaatggaatttcgctctcgtcaagatgctaagatttcagaatggaacggaatatcattattcatgtaatttatttcatgcctttatttttagagccaaattaatcttttggttcgttaatttatttttgtttttttatttactcttataacttttatttgttttattctagttcttttaacatttggtattttctgtaagtttaattcattaataacactattatttcctct

SEQ ID NO: 18150 - DNA, 363 bp, Glycine max
ctccaacgtgcgacccaattacatgtcagcatgctcttcttcaggtttgcctgggggggttcaaatggctcaggctaatgctatgatgggttcttcatcgatggtgtccaattttggagttcatcatgcgggttctaataattcaagctgtgcatatctttcactagggaaaagaggggtagcaggtggaagtactgtagtggacatggcttctatttataacaactctgagggtcaaaacaagaattcaaagcctgcttcacctatgtcagcaactgcgcttcttcagaaagcagcgcaaatgggttccaccagaagcaccaacccttccattttcagtggtagttttggagtgattaactc

SEQ ID NO: 18151 - DNA, 406 bp, Glycine max
accacgctctcctcctcaccatcgtatgcaactaatttacatatacttatacttcaacaagtataacaatgaagacaattaattcattgtttggcctcttgttccttctcctaattgcatttaccatgaagcctgccgttgctagtggtgttcatgacacagatgatcgcatgttagaaaatggaggtgactacttcatcttacctagttttgatgaagagggtggcggagttacacttgctagcattggtgtgacacaccctcttgcagttgttcaatcttcctcaaagaaccatcttggcttgccagcatcaattaaaactaaagaaacaatgatcatcttcactgatgaaatggtaagcattaaattcaccaatgttcctgactacaataatgcgtccacttg

SEQ ID NO: 18152 - DNA, 511 bp, Glycine max
cggctcgagagttaagttactttctcgttcgttccctctcaaccaaaaccaaccacttcatgttatcattgctatgacccttcaagcttttcatggctctgcatgttgtttccgttcccaccttcttcacttttcttcttccaccgcttcatctccaccattccttgcttcgaggaggttccaatcatgcccttcaacaagaaaatctctcaagttgaattgcagttcaagtggcaataatggtgaccaagattaccttctggatgctccagtttctgttggagatggattctctttcagtggagggaagtattcagatggccctagtccaagtgatgaatggtttaagcaagggaaaaaggttaaagcctattcaatacctggcactggtgaaaaggcaaaagatccgatttttggacttgctatgggttccggttctcaagctactggcgatcgtttcagatggttttgtgttgaaagcggaagtgctgataatccttcagtgatatta

SEQ ID NO: 18153 - DNA, 377 bp, Glycine max
aaaaacctcaaactcaaaactaacgacgacccaccgaacctaagcacacaaacagagagttagagacgaaatcctcatctcaccaatggcgaactgaagacgagcattgattcatcgttctgggacttcaacgtggcgtcccctcagctgcacgaaggatgggtcaagtccgttccgggcgacccgtttccgttggacggctccgtcgccagcagagtgctccggccacgacagctctccgtcatcggaaacgggttgcctcttcccgtcatcgttccctcgctctctcccacttcgcccaaggacttgggttccttctgtctccagtccctcctcctcaaactagctaatcctcgctggtggcttaccatgactgg

SEQ ID NO: 18154 - DNA, 393 bp, Glycine max
ctctcagcaaaaacacgccgcgtccgttgctgaagttccaattgccaccgtgtcggaggacgacgacgacgacgacgcaattgacatggatttcgaacaactcggtaaggcactcttcgaagccgggacgctcgcttccaacaccaagcgcaagaaaccgcggaagaaatgccagaacaagctcccttcgtcttctccacatccaaaaacaacaacaactatagttcaaaatgacgtgcctgtggtgccatgcttttatatataggcacaggaagagcagtctttggggcgatattagttctgtatgttctagttactcgtccctttctattaaagggaatggaagtgacgtggaggatcccgatccttcacaggctgaagaaacctgggaaa

SEQ ID NO: 18155 - DNA, 508 bp, Glycine max
caaatcacacatacacacactcaaatacatacactagtagtgtggtgtgtgcccttcctttatccttttgctttttgtgtgcaattaacacacactcacacaaaaatgacggcatgccaagattggccagagccagtgattcgagtccaagccttggctgcaagtggcttagccacaatccccgaacgtttcataaagcctaagtcccaaagacccactaatagtaacaattatgctccaaagaccaattcctctcaaattggtcatcataagaacaataccaccaacagcaacatcccagtgattgacatgaagcacatctacggtggtgacgagggaaagagggctgagacgctccggctcgtgtcggaggcgtgccaagaatggggttttttccaggtggtgaaccatggagtgagccatgagttgatgaagggggcaagggaggtgtggagggagttctttcaccagccacttgatgtgaaagaggtgtatgctaatacacccc

SEQ ID NO: 18156 - DNA, 468 bp, Glycine max
aaaaacgaggagtggaataggcccgcggggcaccccatctagagtcgcttgactttaagtacgctctctcacactctattcccaatcaattttttttccttcttttaaaaaccttagtcaccaagaaattaaaagagcatcatcaccgttgaagctaaacgtgttgtgtgtgtgaagaacaaaacaacatcctctgcacacacacacaaacatcattattttttttcttcctcttcgaaccactaaaaaaaatgtttgatccacgaagaaaccaacccacaatttcgtttccattgtccaatgaaataggacaaataactcatggttatgacacatggggtgccacaaacactgattttatggcatcaaagaaaccacccaaaaattacaagaattgtcacagctacaacgacatggaagtgcaattgggaacaggatcaaaggtggatgataatgaatctggtattt

SEQ ID NO: 18157 - DNA, 655 bp, Glycine max
  unsure (1)..(655): unsure at all n locations
ccgttcggattccgggtcgacacgcttcttcttttctctttgtctgaggtccatttttgagcaatggcgagaaaactaagcattgttgtactttgcattgttcaaatgctgcttcttcttgtggaaaacgatgctgagattgttgtgtccaccgtggaggctccagctccgcagcctcactagaacaccacccacaccctgtccagcgctccagctccgctgcctcacacaaacaccaccaagtcccatgttcccaatttgcagcatggcatcaccgaaggcagtcttaaaccacaagaatgtgggccacgttgccccgctagatgctcaaacacacaatacaagaaaccgtgcttgtttttctgccaaaagtgctgtgccaagtgcttatgtgtgcctcctggaacttatggcaacaagcaagtttgcccttgctacaacaactggaagaccaaaaggggagggccaaaatgcccctgaaactataaattttacctattaagtctcttaattaatgccttgctagttgctaccagcactccatgtatttatatatggacccaccagattgaaattaagtatcttaattttaatgtaaaaaaaaanannnnnnnnnnnnnnnnnaagcgnccgctctagaggatcctagcttacg

SEQ ID NO: 18158 - DNA, 730 bp, Glycine max
tcacaccttgagagagagagatagatggattgagaggcaccctttaacgcttgcttttactactgagcaacagaaggtggccctccatctatatttcttattttttgtacctttccttctttcattaccatttgctctttcttcctttcaaacataagtgaggtgattctgtgttttcttttttaataggatctttgaggccaaaccccatctcaatcaaccctttatttctctcttagtgccttgaattttctatagcctttctgtgcaaaatttgcatcccttaattcttgtagaattgatgtctggtttgtacaatcagatttcctcaccttcaacagcaagggccaattcaccaaacataaacatgagaagcaattttgaggctgaaagtcagtacttaacggagctgctagcagaacaccagaagcttgggcctttcatgcaagtcctacccttgtgtaccaggctcttaaatcaagagattttaagggtttctggaaagaatgggatggttgcagaaccaagggcttagtgactatgacagagtgcagttcggaagccccaaacccaatcttatgccttctttagacatacaacctaattttacaggctggaacagcttgtcacatgaagggttagcaggagtacaaggactaaacgttgattggcaaacatcaccaggtgtcccaagctctcacattgtgaagaggacattgcgcttggatat

SEQ ID NO: 18159 - DNA, 763 bp, Glycine max
gtttcttctcccttaccatttttttctctcgtctctcaagcataataggttaggtgattgattctgttttcttcatagcaggatttttcactaatcttttttcttcttcctttgttgcctttgaaattattctctagtccttctggccaaaccaaaccatattacaaattgatgtctaatttgtacaatcagatttccttaccttcaccccaaggagccaattcaccaaacataaacatgagaggcaattttgatgttgatagtcagtacttaacggagctgctagcagaaagacagaagcttggacctttcatgcaagttctacccttatgtaccagactccttaatcaagagattttaagggttaccggaaagaatgaattattgcagacccaaggatttagtgactttgatagaatgcgattcataaatctgagtcatatggcttctccaaactcaacaccaaacttcactggctggaacagcctgtcacatgaactggggtcctcggtcttatgttctattcagtgtaaaattctctaccactccacagtctccatttcctactttttcttgtccccccaacataaaatttatgtttcatttatgcattgttttaaaaaaaaaaatctgattcttaacctatccagttctggtacttaattgcttagattccctcttctccattttgtttaaggtggcaatattgcctctttgttaaatgtgtatgctttaaactttgttatataacacacagtaacta

SEQ ID NO: 18160 - DNA, 450 bp, Glycine max
acgaggtccctttgtacattgaccttgccgttgggaaacctggtagttagatttgttgaagacaattacaaggacataaataagattttcatggctaagtactttggtgtgaggctgcatgctatgtttggagttgcactggctttaggactagtgctggctaggaatacaaaatttacatcatggccaatattgagttgaagattggcttgtcgaaagaggaagtaatgtagcgtactaaggggattgctcaagaggaccaaggatgcaagtctgcatggtgcaacagccattaagatttcggtcatgagcaatttttctgcagggggttttgaatcagttctcattttcttcccatttccgtggccaaataagcttgaaagaaactgcatgacactgataccaatcaagagttgtgtgcagcaagcttacctcatcaatctcatgtca

SEQ ID NO: 18161 - DNA, 420 bp, Glycine max
tcccttttcattttctttgcaaggatattctcttttaaagatactatttgataccttttgactagctggctaacattctgaaagatgtgaatagtgttgtaaattttgaaggaaattagagcgattcggtaaattttcgtcttctgagtatagaagagaggcgttcccacgccgtcttacgtcgctttcgccgattccgagcctttgatcgaattcagcagtgaagatgtaagtgtagctgtgactgatatcttgaagctacctctgatggataaaagcaatggctgcagcttctctagtatattttcaattgctgtcttttcaagtgccatttttgttgtctccttgattttggttcgtctcctttatgtcttatatcgtagcagcaggcccttgagcaaaagggcttcaaaacctgtt

SEQ ID NO: 18162 - DNA, 531 bp, Glycine max
cccacgcgtccgcccacgcgtacggttgtgctctttgccatgggtggctacggtacctatctgggttttcgcattcgttattctgataatctggaggaaaaggctaaagccaaggatttgcatcccaagcttttagctggtatgtgattcttctttgctcttggagctactgctggaattacagctctactcacttcggataaacccatttttgagagtcctcacgctgttacaggagtcattgggcttgctttgctgacaatacaaactatactgcctacactctttgagggaaatcctggactaaggaatgttcatggtatcctgggtagtggtatcatgacactttttcttggtcattttgcccttggacttcaactaggcttcagttactaattacagcttccatttgaactcttgttatgttgagggtattgtattttagtcatggtgtacattctttcctgcactggttcttagctccaattctcaactctgattaccatgatgttatgttctcctctatcaaaa

SEQ ID NO: 18163 - DNA, 390 bp, Glycine max
cccacgcgtccgcttttggtccaatgcagcataaacacctaatagtttagccattttttctctcgttttattcagtaacaacaatttcattcagtcaagggtgcaaagagagtcatggctggagcattaaaaaagtgcatgatgctgtgttgcacgagcatgattgtctcgaaggaagaaatggcaggagaatcatacgaggaagccatcgcgagtctgaccaagcttctcagtgaaaaagctgacctcggtggtgttgccgccgcaaagatcaaggatctgacggctgagcttgatgccgacggttcgaagccgtttaacccgtacgagaggatcagaaccggcttcatccaatttaagaatgagaaatttgagaaaaatcctgatcta

SEQ ID NO: 18164 - DNA, 304 bp, Glycine max
caaacacaaacttccttattttcttccaaatctcaccacccagaaagcacaaaagctacacacatatccaatcttttctttttcttcatttcgtccaccagattcatacacaattcacgtatacgtacaattattaaaaggaagagatggcaggagaatcatacgaggaagccatcacgagtctgaccaagcttctcagtgagaaagctgagctcggtggcgttgccgccgcaaagataaaggagctgacggcggagcttgatgccgccggttcgaagccgtttaacccggaggagaggatcag

SEQ ID NO: 18165 - DNA, 251 bp, Glycine max
agcagaaacacctaacagtttagccattctttctctcattttatttggtaccacccctttctccctctggacaagctagaacaaagttcaaccacactaaaccaaattagctacccttttgggtaaagagagtcatggctggagcattaaaaaagtgcatgatgctgtgttgcacgagcaagattgtctcgaaggaagagatggcaggagaatcatacgaggaagccatcacgagtctgaccaagcttctc

SEQ ID NO: 18166 - DNA, 532 bp, Glycine max
ctctctctctctggtgccatggaatccggtagtgcccgatgtttatatgctctcgggttctgaaatcagcgccgaggaaataacaaatgcaacttccaaacctcgcgaagcttccttcacacacttccttctattccttgttcgtcgaacaagctctttaacattccatcaccacaacttcctacctacaccttccgatattgcatcttcaactgtttaggttacatttcacacgtaataattgattgcttctttcgattggatcggtcggaaccatcgctcgaagagaatctccggtgacgtagaagcaatatcagtttactgtatgtattggttcggattaataataataacgaagaaattgaaaggaaatcagaggtgaaaatagccagaagaagattaagcgcgatgttggatcttaatctgaatgccgagtcgactcagaacaacgagtcgctggtgctgttggacaagtttcccgaagcttcgttgggaacttcgaattcctccgtcgtgaatgcggagggatcga

SEQ ID NO: 18167 - DNA, 895 bp, Glycine max
gataatgttagcccagattccacttcaccctctaaagatgctttgcttgaggaggcttgtaagaagtatgatgaggccactcgtctttgtcccacactgcatgatgctttctacaattgggctatagcaatttctgatcgggcaaagatgcgtggccgcacaaaggaagctgaagagctatggaagctggcaacacggaactatgaaaaagcagttcaacttaactggaacagtcctcaggcgctcaataactggggacttgctcttcaggaactcagtggcattgttccagctcgagaaaagcaaaagattgtgagaactgctatcagcaagtttcgtgcagccatacagttgcaatttgatttccatcgggcaatttacaatcttggaactgttctgtatggattagcagaggacactttaagaactgggggatcagtgagtgctcaagaagtttcaccaaatgaattatacagccagtctgcaatatacattgctgctgcccatgcattgaaaccaaattattcagtttatagcagtgccttgcggttggtgcgttctatgctaccattaccacaccttaaagttggatatttaactgcacctcctgtgggggcatcgattgcacctcataatgactggaaacgatcagaattccttttggatcatgaaaagcttcagcagatacccagaggagaatataaacaagtaccacctcaaaatctctcaggcagatcggtagatgcagggagtggagataggaagactatcaaagtaaatttagcaaatataatttctgaataagcatgtgctgatctaacctaaccacctggtgcaggcctttgcatagatccaagttatggatcagttaacttggttgctgactctggggaat

SEQ ID NO: 18168 - DNA, 594 bp, Glycine max
cggacgcgtgcgccgactcgttcgtaaggcgccgcacaaacatattcacaagaagatgaggaaaacactcttcgtcgcaccaacgtcagtgcttgtgtcacgtttaagtgttttccatttgcgtccagccccacccatcttcgaatttaacacgatttttgggtcccgtgtgaagatgaagcgtgaccttaatgctattacccttttcaagcacatgcatgttaaggggattgttggaattgttgaaccaggtcttggtattttcaagatcttggtcagctgttcctgccacctgggtcatatgaaatttgccttttttatgtgacaaaaggctctgtcttaatggtgaaaattgcatggttgttcgataaaactgttgtgataatgtacaacacaattatcgataacttatgcaaaaataatgtttgtttctgaaatggttggtaagaaaatttctttccatatcatcacttacaattccttaatccattagaataacaagtgggtttgttgactgaaatagttgaaaaacctaatgttattacttatcattcttagatattttttaatggatgggtattgtttagttataat

SEQ ID NO: 18169 - DNA, 385 bp, Glycine max
cactcttctagctccttgcaatggctgactttgatcgctcttctagtgaaatttctacacgttctactgattcagggaggcgagggtcttccaaagttgaattttctgaagatgaggaaaccctcatcatcaggatgtataaactgctaggggagaggtggtctttaattgctggaaggattcctggaagaacagcagaggaaatcgagaagtattggacttcaagattctcgggctctagtgaatgaagctgccgagagttctactacgattggtgttcagtctacgacgagcaagaagattttgcgtgcaagattagtgtgattttgtgggacataaaaactgaattaaagttggccttattgtatacgtatgtgtatttgta

SEQ ID NO: 18170 - DNA, 865 bp, Glycine max
  unsure (1)..(865): unsure at all n locations
gaaattgtcattgttgatgcaataggaagtagtggcttggacttgaaggtgccaccttaaacttaaacattctgcagttagttcttttatttatacagactgacccaggtgtgccagttgtatatgctggatttggtgctctaatgatcactacttgcatcagttatttgtctcattcacagatttgggctttacaagacggcacagcagtcttcattggagtgaagactaacagagcaaagatggaatttccagaggagatgaaccgtttacttgataaggtccctgaaatagttgagtcaagtctacctaagcaagctgatagcattagtggttagcttatggcttttgagaaatcaagatgggtaaagaagacacttcaattggatgatagcaacttatatggattatgattcaatttggatacacttatccattagcacctatagaagagataaaaaaaaaattaaatgaatcaaacttctcaaataaattaaaatcaccttatgcatctcaaattctttggaagttttttcatttaacttttgcaaaagctgagatgtataacttggttttaacttaaaggataaatttgaatttttatctccttatttcttctttataagtgcttattgaaaagtttattcaacttatgtgataaagtactttggcatacaaatacaaattgaacttcatcattgaagtgtccagcagttgtcttgctggttgatcatcagggaatttacaaatgctcgaaggatgcctacaagaagtatatcaagaaaacttttgcagctcatattatttgacattatctagatacactgagttcaacatacatgtatatttcctgtatttttntagt

SEQ ID NO: 18171 - DNA, 749 bp, Glycine max
ccacgcgtccggttctaacatacatcaaagatattgctagatgttcaaactgttaagacacggggagtgtaactttcaatctctgtaattttcgaatttgttggacaggggatggttaggtctgagaaaacaaataattttttgatatttactgcaaaagtttataacttatgctgaaaggtcttcaaagattcagtgagattaatgatttcaggcgcgcatgcaagaaatgaaggaaaaagaactcaagtaccttgggaacggcgatgccaattcccatgtttgtaaagtatgttttgaatctccaactgcagcaattctgcttccatgccgacatttttgtttgtgtaaatcttgttcacttgcttgttctgagtgtccaatatgccgcacaagtattactgataggatttttgcttttacataacagagggctctatcccattgaattaatatactccatgctattacgggtgcaattcttttattagtttgcctgtatgtaacggcgtttaaaaggtatatcaatatctttcttttatactaccccaggggaactgtattatagggggacaaagggggtgcggagaaagaatgtaaaaagaaaaaaggtgtaaacagcactgctgaagtacatatgcacaatatatgtttgctttatgtaatccagcagaattttgttgcccatcctctgtatgttctttactgagtgtaagagctgaggtttcttattgattccctcctgctgc

SEQ ID NO: 18172 - DNA, 473 bp, Glycine max
aggcttgcaatcaacaaagcgtgactcttatggtagactcattttaggtgacatcataacatctgtgaatgataagaaggttactaatgaaagtgatttatacagaattcttgaccagtgtaaagtgggtgataagttgattgtgcaggtgttgagaggtgaccacaaggagaagatacccgtcattctggagccaaagcctgatgaatcatgatgatatgcaattcattatccatccatccatcctatactgcatgtatatacatttcatatgccaggaatgaatgcagctgtgtatgtgtattcttaggttgtatcttgcttcataaaaacaggtccaagtgtacatatgtactatgggactgccagctcatcatccttttaactttctcattattaaacttaatataatttgccacgtctattttgcccccatacaaattcatacaaggggttgaaaaaaaaaattttaa

SEQ ID NO: 18173 - DNA, 507 bp, Glycine max
ttcgacgccacgcgtccgcactcacaaaatccatgccttcccaaacgtaacaccagagttaaaaacaactctgcaattaaacttcacatcttatgatctccccaaggcaagaccctctgttgccccacacccacttctctaccatgttcaagctcctcaacaagaacctccgccgcctcctccgccgtctccggtggccaattcgccgccgctcaaagcccaaagtagtagtgatcaacaagctcggaaagaacgccccaaaagcccaaaccgaagcaagcacaaatttttccgccgcggttcatccgaacgcgcaattgggtactccgaaacccattcgggtcgcgaccttcaacgccgccctgttctccatggcaccggcgctcccaaaacccacgttcgaggaccaaaacggcatcgcttcgaagaaccccgaaaacctgaattcgcgatccaggtcgacgaaggagcgtcccagaagcatactgaaacaatcgcagtcagtga

SEQ ID NO: 18174 - DNA, 461 bp, Glycine max
cccacgcgtacgcccacgcgtccgcatcgtttcccatcaccaacacccacacccaccaccaccatctcctcccaaaatattggcgcgctaccaatgaccaccattgtcatgcaaacataaaccgatccttttctcttgcattccatctgcaatttctttgttctcatggctccgaaacgacgtcctaagaaaggcgagtcgcgaatggacgcagcactcgacgccatgaaaccctacggcttccccaacagactcgtccgaacaaccgttaacagtctcctcaaagtttacggtggcaacggtggctggttcttcatcgaagaatccgcgtactctctgctgatcgagacgcttcttgaaaaacaagccaattcttcacctcaggatcgtttgatagaggctaatccagatggtcccaaataggtaacacctgctggatgctcaaacagtgccttctagct

SEQ ID NO: 18175 - DNA, 488 bp, Glycine max
gaagacgacagaagggggagacaatgcctagtgaattagctatgaacaatgatgagctacatgtggttatgttcccattccttgcatttggccacattagtccatttgttcagctctccaacaagttgttctctcatggtgttcatgtcactttcttgtcagctgcatccaacattcccagaatcagatcaactcttaatctcaatccagccatcaatgttatctcactaaagttcccaaatggtataaccaacactgctgaattgccacctcacttagctggaaatctcatacacgcccttgacctcactcaagatcaggtgaagtcccttttgttggaactcaaaccccactatgttttctttgactttgcacaacattggctcccaaaattagcttctgaagttggcatcaagtctgttcatttctcagtctactctgccatttctgatgcttacattaccgcgccttctagatttgctgatgtt

SEQ ID NO: 18176 - DNA, 440 bp, Glycine max
tcagattccaaatatagcctcacatgaaagcaaagcatgaaacataatcaacatttactgggaggaatccttggatcatgaaacctcaacatttcctccacatcctcccatgaagcctccgacgaccgacccgaacttgtagggcatcgtgacgatgtatttggcttccggcagcgcggaggggaaccaacgacggcagcagtgctgttgctggggaagagaatgatgttcgcagacgccgcagtgttctgggtgctggttgctatagaccccaatactttttttctcgaatgccattgttcctagtttcattgaacataagtgaggattttgttgtgtgataacgattccaagagtttttaaggggtttttgttcttcttttgacatcctcaattcaaaccttttcctttctttatttggtattaaatattttttctga

SEQ ID NO: 18177 - DNA, 576 bp, Glycine max
  unsure (1)..(576): unsure at all n locations
tcgcccacgcgtncgatttttatttatattattggttaacaaatgattgacccttgccttttacttgttacattcgcactaatttaacttggggaggacgaaaataagtttctaattgatgctggattttgcaggccttaatcttctgtttctgcagaccttacctgttctcactgaatgctgaagtagcctaatcatcgatgcaaagggacataaatttgtgaggtttgaggactggaaatcagagtcatcttttagtccagagcaagaaaattctattgacaatgggaatcacaaaagaagacctagtgtgggtgcggttttaaagagtataagaagaaggctggagagtgtgtcagagaagatgaagaacttgacaagagcttcagctgtccatcctgtaagtgatggacagaaaaagctgccacctaggaagaaaattcttgatccacagggtccggtccttcagaaatggaacaaaatctttgtaataacgtgtgtgctggctgtctctgtggacccgctcttctcttacattccggtgataaataatgaggaaaaatgtgttcatttgga

SEQ ID NO: 18178 - DNA, 268 bp, Glycine max
ccaaaattttatttatccaaacctttctatttttagcaacttgttcttactgaaaccaaacacggtgtcatgttggttgatgtgtttagccttcgtcttgtatctgatgagagtttggtgtttcacacatgataaacaagtccctagccttaatcttcactttctgcagagcttacctgttctcacttgatgctgaagtagcctaatcatgaatgcaaagggacataaatttgtgaggtttgaggactggagatcagagtcatctttt

SEQ ID NO: 18179 - DNA, 545 bp, Glycine max
catgccttccattaattaccttgatgtttcctcaaataaatccactgggatgcttttcaataacatgtcatgcaatgatgatctccactttgtaaatttgtcttcaaatcttctgaaaggtgaacttcccacttgtttagaaccaaagaccagggttgttcggtatgctagaaactgcttatcaaacaagaaccaagatcagcacccttcagatttctgcagcaatgaggctttggcagtgacaatcataccccatcagcagaagcacaagagaacaactagtaaagcaattatcgtatcaagtatgggaggtcttgttggtggaatgttgattgtaggagtggttatcttggttgttagccgagttcataagaaacaagtagggaaaataccttcaaagtccactttggagcatgttatcagccaggagcacaatgaagatgaagtgaaaactactacaaggtccataatggagcatatcatcaaaagggttcctgacaaaggtgctgtggaaacactaacaagatccataaaggagtacgtca

SEQ ID NO: 18180 - DNA, 452 bp, Glycine max
  unsure (1)..(452): unsure at all n locations
agctgaagaaggtgtttgcagggaaagatcaagttgagatgctagagattgctcgcttgattagccctcacttccttaaaagtgaaagtgaaagttaagtttttgtatgaaggtcatgctttggtgtattgaacaattacatttggccttgagacatagtagcgtttagtttttgtggtactctgaatacagaacgagcattgttgaagagttcgttttgattgatgtagtctcttcaacaagttagtatttacctattaggtttctatttgacatcttaaatattatggttctatgttctcattattattctgctgtttctttgggaaccgagaaatggagtaaccagcagcctccacattgaaaaagatgggatgccattggagatgataatataattattggttggtttnnnnnnnnnnnnnnnnnnnnnnnnnnnnnnnnnnnnnnnn

SEQ ID NO: 18181 - DNA, 1005 bp, Glycine max
  unsure (1)..(1005): unsure at all n locations
ctcgagccgctcgagccgaatcggctcgagcaaagaccaaaccaaccctttttatttgaaagcttgtaaaggggcacacccctttctctctcctccttccccctttaatttccttttccttcttaattgtcttaatttcccttgtattctggtaatctagctaaccctttttatttccattagccacgatatcatcaccatcgccaccttctaggtgggatccagggctcaatatataatatcacactcaacacagttaccagctccaaatctcaacaaatggatagcaagttcagaaaaaagaaccgcaacgttaactcatataccagtgaacaagatcaagacactgatatagctcaagaaaaccttgccgagtcccctccttcttccactgtgttcaacatcgatggcttagtcccctcccccacttcctcatcaaagagaaggagggcaatacagaaaagggtggtgcaaatcccaatgaaggagacagaagggtgtaggctaaaaggagagagcaacaccccaccctcggattcatgggcatggagaaagtacggccagaaacccatcaagggttccccttatcccagagggtactacaggtgtagcagttcgaagggctgtccggcacggaaacaagtggaaaggagctgcgtggaccccacgatgctagtcgtcacttactcctccgaccacaaccatcccctgccaccttctagaaaccacgccaggcccaccaaaaaaccctgaaaccggcccggaacccgtcgaaacccggaaggaaggtcgcggacgatccatgataacaacccggcgaagaaaaatgggtggcttgggggagaatgaagcgacggtncccggtctcgaaaagccgntattgctttcacgtaccattggtgcgtggcctttntttttcccaggaggaagagcagtctttccgccctcgaaagctntgcccgaggtttcttgaggtcggagggcttttggggagggngggtanac

SEQ ID NO: 18182 - DNA, 484 bp, Glycine max
gttaagagaaataaatggaaaactgaggaagttaagaagctaattggtatgcgtgaggaactaagtgaaagatttcaagttgtgaagggaaggatggccctctgggaagagatttctcaaaaattgttggctgatgggatctgcagaagtcctggacagtgcaaatctctgtggacatctttggtagtcaaatatgaggggagcaagaatgagaatgatagcaagaaaagttggccatacatagaagacatggaaaggataatgtctgataaagaagcccctgcaacaaaatgattggaaatatggtggacactggtcagtataataaatattttggagagccatctacattaaaattggtgataagtttgagcatggtggccaagaagataattcatgacttgcatgacattgaagattcataattttttgaaggctgagggatacacaaacattaagggggtggcttttatactgacaccgg

SEQ ID NO: 18183 - DNA, 710 bp, Glycine max
caatgttacagtaaacaagtatgcttcatctaatctgcaagctgttcccagaacacaaggaaaagtagcaaccaaaaaaaccacaccaaccttaagcaccaatgtggaaatgggaagaagaggacttgtcttatccactgtaatcgccaccacgcaagtacctgaacctgactctaggactcagcttcttaaaaaatatcagaagaaatcagaggaaaacaaggagaaaaatgacaaagagaggctggagagttattacaagcgtaactacaaggattactttgaattgatggaagggacattgaaggcaaaggatgggaagctttctgatacagaaaagggtatccttgattggcttcaaaaaaacaagtgaaaggttttcttaattgttttactttccagtcggtggtgctcagatgacattgaatttgcttctgtacactgttgctttacctatggaactgtacattagagatgtacataggtaccttgtagattgtgattcccgtgtccttgaaatcctccgagtacaactatttcaagtgatcgagttaatgccgttaatttgacattcgtattgagtggcatcaaaaaaaaaaaaagggggggcccccgattaggggccccgtcgccccgggaataaatcccggacgggccccccgggggtaccagtttcccccaaggggggccgtattagacctgggggaaac

SEQ ID NO: 18184 - DNA, 481 bp, Glycine max
  unsure (1)..(481): unsure at all n locations
nnnnnnnnnnnnnnnnnnnnnnnnnnnnnnnnnnnnnnnnnnnnnnnnnnnnnnnnnnnnnnnnnnncagtaaagaaaagaaggtgggtaatgaataccctttattaacaacttattcataggcgaccttacaattacagtacaagaatacagacttcttctggactctcctaacaaaccaataaccttaccaactgtataaacttttttcaccttgaacccaatattcggcaagtgaaaaaagaaaaaatgcccctaaaaattgaaggggcatgcttccagcagcacaagttctatgacgcaaggcaaagagactttgatgctgctaggaacacaaacaatatcaggagtcgtctgttattgatgttagaaagaacaaaatccatcacttatgtaccttgccaaaataacaaatcacagaaccaaacattcatcgcatatcacttacttcttatgagatggtgcatagaaatatggcaac

SEQ ID NO: 18185 - DNA, 510 bp, Glycine max
tgatattcatattaatcgtacgatagagataaaaacaagaaaaaaaaaaaggagaaggaaaaaaggaggtgaggaggaagacaagagggtattgggaatttggcaaacgagagagagtaattcccaatcaagtaaagatttagattagcaggaatgaagaagaatggagtatagtagtcatcaaccttgttagcagtctcagtcacactgtaaatttttggttacttatctctcaaaatctcaaatgcatatgcaattgcaaagcatttccgatcctgagggagagaacttttgtgacagctgtatccactccgattgttgattttttattttctttctcgcggcaagatctcactctgcacctagggttagggttttggcatggcgacttcttcttcttcttcttcgacttcgagctggcgcgacggcatgtcctccgactacatacagggactgcgtctcgctctctcctctagcttcttcatcggtgccagcttcattgtcaaaaag

SEQ ID NO: 18186 - DNA, 607 bp, Glycine max
cctttcttctctctctttcgctttcagcgcaacacaaccctcgttgttccgtgttcaggtgaaacgacaccgttttacccttcctcttctcggcacagcatctagcaggttgtagaaaatatggccaagcatcatcctgatttgattatgtgccggaagcagccagggattgccattggacgactgtgcgtgaactgtgacggcacggtcgttgtgtcatatgcggaggagttggaatatctgatgcctactactgcaaggaatgcacacagcaggagaaagatagagatggttgccccaaaattgttaatttagggagtgccaaaactgatttattttatgaacgcaaaaagtatggttttaagaagagatgatgaaggtagattactgaggcatgcgtatttctctaaaactttttgtatgtgtattgttcggatataagaaccggatgtgaaaccttgagcttgtaaacttttttatggtacaattatgaatcatgatataataaatgcttgactagtttgctactggtaaaaaaaaataaataatttttttttatttaaatataaaaatttatattaattttatttattttaattataattta

SEQ ID NO: 18187 - DNA, 421 bp, Glycine max
attcagttcaggattcagctcgcgctttcgcttccaccgcaacacaaccctcgttgttccgtgttcaggtgaaacgacaccgttttacccttcctcttctcggcacagcatctagcaggttgtagaaaatatggccaagcatcatcctgatttgattatgtgccggaagcagccagggattgccattggacgactgtgcgagaaatgtgacggcaagtgtgtgatctgtgactcttatgtgcgtccttgtacgcttgtccgagtttgtgatgaatgcaactatggatcatttcagggtcgatgtgtcatatgcggaggagttggaatatctgatgcctactactgcaaggaatgcacacagcaggagaaagatagagatggttgccccaaaattgttaatttagggagtgccaaaccggtt

SEQ ID NO: 18188 - DNA, 385 bp, Glycine max
ttttgcttgaatggtgaatctgtttgttgattctttatgtgcggaaatttgtatcggtgggcaatatgatcgcgtggctgattctgtattgggagtgctgtgtggtgtattggtggggtctgaatgtttcatgtgcatgaatttagagcactgccttgtattgctgtgctgtgccattttttagggatttctccaagtcaactggttaaagcttgaatagtctatgaaataagactatgtactctgtccttacatatgtagtctacaacaagaataacgagccttatatttcactaggcgaggttaggtatatagactacatgatgtcattggactgcggcaaaaactgcattttcagggacattattccgtgagatccgttttt

SEQ ID NO: 18189 - DNA, 463 bp, Glycine max
gaacaaaggttacttcttgatgatattcgaaaattgtctctttggtgtgacccttctgtggatccacatcaagaaaaggaaagtgagggatggatgatatctggtgggagatctttgttggtccagggactgaagagagagcttgtaattgctcaaatatctagaaaggcagcatctgcgtcattaaggacggctcttcaaaaagctgcgcatctacggctaacagaaaaggagaagaacaaaagtccttcctatgctatgcgcatatctttgcaaatcaacagagcttgcttggagtatgcttgctgatggtaaatcctttgctgaagctgagattagtgacatgatatatgactttgaccgggattacaaggatgtcggcatcgctcgggttacaacaaaatattttgctgtcagaaactgcctgcctaatgtcaaatcagatatgcgtttgtcagcatgg

SEQ ID NO: 18190 - DNA, 458 bp, Glycine max
cataaagtacaaaatagggattaataattcatattaatataataaatttcgatcgatttatcaaatagatatctatttgattatttcaaaaatattattattgtaaattttagtaaagtaactaataataataattaggaatttcatatttctaaattaatgtctaattctacattaaaagaatggttacttatagccattcgattcgttttagttctatcaattctatatgaataaatggattgtttatttcaacaaaaacaaaaaaatgaaaattttcatttttttgttttgttatagatagtctgtatctgtttgctttaaggaaaaaagaaaaaaatgaaagaaagagaaaagccccccctagatcataataaaagactcccaagttttcagtcggaaagagaagataaaaaactaagatgaaaaaaaaaaaagaatcgcccattcgagtcccc

SEQ ID NO: 18191 - DNA, 178 bp, Glycine max
accacgcgtccgattgcatcatcacccatcgcccatgaagcgagagagatgctcggaactggaagagcaaaccctcctctccaaatactcctagctcctccgttcaagaacccttgccaagcttaaaacgcgtgagaagaagttcaagccggtggcggagcacgtgaacgcggtgcat

SEQ ID NO: 18192 - DNA, 402 bp, Glycine max
cacgtgcatgactgtgacacggtccgaaacaatttcgcttttcccttcaaacttccaagttccaattcaactctgatccttaaattcatttgcatattcagtcctttgaattattccactttcttcaaatcattccaattccacaaccaacgaagatccaatcatcaacacaacacaacaatgtcaaaaacaacaacttcttccgaacaaactgcacgaaaccgtttggccaccctcgcagctcacttgcttccctccgacgccacctccgccgccgcgatcctccacccccaccggctctccgcccccgccggagcctcgccgccggcgaacctgaagggcaccctcaccgtcgtcgacgagaggaccggcaagaagtaccagatcgaagtcaccccagat

SEQ ID NO: 18193 - DNA, 817 bp, Glycine max
acgaggttagccagaattggggggccgatgggtatttcgatgatgaccaccagagttaacactgaggtgaaaggtagcattggatatttggatccagagtattacaagcgtaacattttgacggagaaatctgacgtgtactcctttggagtggtgctcttggaggtattatctggaaggcagcctttgctccattgggaggagaaacaacgaatgtcacttgttaaatgggcagagcattgctatgagaagggaattctgagtgagattgtggatccagaactcaagggccagatagtacctcagtgtttgcgcaaatttggtgaggtggcactgagttgtttgcttgaggacgggactcaaaggccctccatgaaggacatcgttgggatgctggacttggttttgcagcttcaggatagtgctgttaattatgaagatagcagtagccatagtactgtacctctttcagattgtagtgagaacactggattgagcacgacaagtgatggagatcgtagctatggcaggatggaatcttttgtgttgataccggatgatgttttctctgagactaagaatccaaagcgacgatgaggttgaagcagtagtattcaagttagcatgagtatctatcgttgcaggatggaatcttttgtgttggagtttgttttctctttcagtattatttttttaaccctctagttaaatagtaaaaaagattttaattaattcgaaatttatctggaaaataagtaatcttgaccaagaattctttataatcatccaattctatacaatatcatattcaataatt

SEQ ID NO: 18194 - DNA, 329 bp, Glycine max
gtctactcgtttggggtggtgctcttggaggtattgtctgggaggcagcccttgatccgcactgcggagaagcaaaagatgtcactggttgattgggcaaagcatcgctacgcaaagggatctctgggtgagattgtggatcctgcactgaagggccagatagcaactgagtgtatacacaaatttggtgaggttgcgctgagttgtttgcttgaggatgggactcaaaggccctccatgaaggacgtcgttgggatgctggagtttgttctgcagcttcatgacagtgctgttaatggagtggtgctcagtggaggggattatgaaga

SEQ ID NO: 18195 - DNA, 512 bp, Glycine max
  unsure (1)..(512): unsure at all n locations
gctgattcagatccagcgtagccataaccccaaacaactcttttcctttctgtgacattcagatctcagaagaaaaaaatgaaggactcaaactccagcagtagcagcaacagaaccgaacccattgcccaaaacatcatcaaactcattagcaacctctgcttctccctcttcgtcttctctgtcttaatcttcaccgtcatagccataacctaccagcccccagacccatggctccagtccaccccagccctaaccaacctcttcacccaatcagaaaacgccactttccgaatcgactcctccgtcctcagaaccggcgaagacctcgccccctccccgcaagaccctcccctcccgccaccgcccccctccgaacccctcatcgatataacccaacagcaaatcgccaattccaccgttaattccaccgtcgactctaccgcttactccaccgacgcgcagcctncctctctccctgcctgcgatgaaaccctaaactgctctaaccc

SEQ ID NO: 18196 - DNA, 352 bp, Glycine max
gccatgcgttcgcctaaattcccgactcctcccaacccattcggttcactccctgcaacatcgaagagtaaagaatgggagacaaaaagaagaaggctcagatgtttgtaaagctagtgtctgctgctgggactggattcttctatgttaagcggaagccaaggcagttcacagagaagcttgagttccgaaaatatgatcctagggttaatcgtcacgttctgtttacagaggctaaaatgaagtgataggacctttaatggcttcctttgcattgtaactgaatcattcttgtatttctccctgagacaattatctcatttggtattagattttgaatcatgccaatctt

SEQ ID NO: 18197 - DNA, 444 bp, Glycine max
ccacgctttctctttctctcccttttgaggttcaattagactatggtgggagtggtgcaccctcgacaattcatcatgttgaagctttttcagttctgattcatctgggtctcgcgattgctcggtgctgatttagtattttagggtttcaaatttagagaagccccatagaagctttgtactctgtctatgttctcttttgcaatgaaatgcttctgggtggccttgtaatttcttgtttcgtgtttttgtggtctaagttcactgctttgaacgtttcccccaaatagtgtacaatcgacaattatcatggcgttgctatagtggtctttttttttttttccctttaattttttcctcttcttggactatcatcctggttttatttgattttgttgggaaaaaaaatgaaaaatatgatcaataactgataactctcacagc

SEQ ID NO: 18198 - DNA, 640 bp, Glycine max
tctccatcgcgtgtgcttcaattccatggctaaaccgaaggctccaagacgaaccctagagtcatactcagtcaaacacataagcaaaaccattagagctggcgattgcatcctcatgcggccctccgatccgtcgaaaccgtcgtacgtagcgaggatcgagcggatcgaagccgacgcgcgcggcgccaacgtgaagattcacgtgcgctggtactaccggccggaggaatcaatcggcggccgccgccagtttcatggctccaaggaggttttcctctccgatcacttcgatgttcagagcgccgacacaatcgaagccaagtgtacggtccacagcttcaagagctacacgaagctcgatgctgtcggaaacgacgatttcttctgtcgttttgagtacaattcctccaccggcgccttcaatcctgatagagttgctgtgtattgtacatgtgagatgccttacaaccctgatgacctaatggtccaatgcgagggctgcactgactggttccatcctgcttgtatagacatgactgtggaagaagccaaaagacttgaccacttcttttgtgaaaattgctctgctgaaggtcaaaaaaagttgcaaaactctcattctgcttctagacactca

SEQ ID NO: 18199 - DNA, 699 bp, Glycine max
ttttcgagccgattcggctcgacgacgccgtctcgggcaccgccgtggtcggctgcgtgggcgaggtcgtcaaacacgagcgcctcgtcgacgacaggttcttcttagtgtgcaaggggcaggagcggttccgcgtgaacgacgtcgtgcggacgaagccgtgcctggtggggcgcgtgacgtggctggaagacaggccgtccgagattaatgtcggaggcgatgacgtggaggggctggcgcgtgaggtggaagggtacatgaaggacgtgataaggttgtcgaataggttgggagggaagaagggggagaataaggagattgggaacttgcgacggaatctttttccgacgccgttttcgttctttgtcggaagcacgttcgagggtgctccgagggagcaacaagcgcttctggagttggaggacactgccaccaggttgaagagggaaaaggacacgttgaagaacacgcttaattacctcactgctgcttctgctgttaaagatgcctttccttcttcctcttaagtcaaaactggtacggggatataccaatagtacaatacaagttgttaattttgattcgtaatttcatctgctcgatatttgttaatactcaccactactttaaatcatagtaaatataataattttgctgcacgtaataatatttctatataactggaacatgattatt

SEQ ID NO: 18200 - DNA, 425 bp, Glycine max
aaaccggagaaggaggttggggatttgagacgaaacctctttcccacgccgttttcgtttttcgttgggagcacctttgagggcgcgcctagggagcaacaagcgctgcttgaattggaggacactgcggccagattgaagagggagaaggaaacgttgaagaacacgcttaattacctcactgctgcttctgctgttaaagacgtttttccctcttcttccaattcttcttgattggggcttatactttacctaaggtattgttgcttttaagtgtaacctcgtctcaatatattcagaaaatagatgtaaattatttttgtgcctaaacgctagttgttgtttttttttttcatttgtgatacattttatatactccgctacttgataaataaaaaatccgacacatacaattttgcggatat

SEQ ID NO: 18201 - DNA, 249 bp, Glycine max
tcggtcgtcacagttttccaatatttttacttttttaagttgataggttgtgtcttggttacacgagttttgttccaccagagagagagagagagagaggagggggggggggggggggggtatgatctgacttgtattttccagcgtatttagttgttaaattgtgtgagccgtaacttgaaaatcaatttcaactgtgttgcctcaggcagcgcatcatttaaattttgattgagacaataattagtt

SEQ ID NO: 18202 - DNA, 722 bp, Glycine max
aaatatctcaatccattattctgtccctcaatttgagtgtccaacatcacaccaaattatctaatcctcaccacttcaattgttcattactcagtcaacttaaacaaagttatactctaaatcttcccatgcttcctgccctgtgcctacgttctcccaatactacaccagccccaggtattggtaaagaaagccatacaaatccaaagcattttggagtcaattatgcgtttcaagtccctattgctaccaaatatcgctatgtcattaccaaggctgcaaaagacaaccaaagcacaaaccgaaacacaaaaccgaatagtgtgatttgtgctgactgtgatggaaatggagctgttctatgctctcaatgcaaaggcagtggggtgaactctgttgatattttcaatggacagtttaaagccggtgactcttgttggctttgcggaggcaggaaggagatgttatgcgggaattgcaatggagcaggctttgttggtggcttcttgagcacttatgatcagtaggaaaaaagtccttgtagccatatgcgcaataacatacacatgtatattgtgtctttaaatactttcactctgtagatttcatatttggtaattctcagttcacttgtagacatagcggtcgtttaaaaatgaataaacagatttatgtagtatcatatttgagatgtggtttagctgtcacaactcacaacactc

SEQ ID NO: 18203 - DNA, 426 bp, Glycine max
cccacgcgtccgctttgttgttgttgctctgtgccaatgtctttgtagccaatgtggttgcggggaatgtggcaactgtgggaaatgatgaagatgcgggtggcgggtttggcggaggagcaggaggcgggtttggtgcacgaggtggatttggcggtggtggaattggacaccactagagcgttgcgaacgttgcatgcatgacaaagttatattttaacgtcctttgtattagccatgataaattggtttattgaaaaatattgcgcttgtaagacagatagaattaattattaatgttggcttaataatattaacgtactccgtttcttgtaataattaacgttgaatgaaagaaccagagatatatgtactctttttgtattcaatgagaagaagaaatggcacgaaaatcaaaaaataaaa

SEQ ID NO: 18204 - DNA, 386 bp, Glycine max
cagttcagatcttctggacaagtccacctcgtagtggggttaacgggacaacagaggcagagcaagagagtgttcggagaaaatgaacactgttctttcaccttcttcagcgtttcctacgttgtccaaaacctatgtttcttttggtcccttattttccagtttcgctgttccttcttcttcttcttcgcacattgaacttccccgcaaaaggggttctcaaaacactggacttcgctgcaactgtagcatctggccaggtggccctggctctggtgatagtgatagcagcaacagaagtatcctggatgcatttttcttgggaaaagctgtagctgaagctctaaatgagcgcattgaatccactgttggtgagattttgagca

SEQ ID NO: 18205 - DNA, 462 bp, Glycine max
gtgttgctgaggatgatggaactgattcttgctggcgtgtattgggctacctaatgatgaagctcccaagaagtgtaatttatggctacagttgttctggattagcagaagtgagctgttctgggattataagatatcaactgtcagtgctgacgtgatcaaactggcaggtagatcttagtgtttccctcatagtacagagcatggaaacaaacaagatcggtgttatttattgtttgtaacttaccttttagattaactacccttgtgggtagaagtagaggtttgattcgactggtaaagggaaattgttttgagatggatttagatgctacagtttgatactctgataatgggggtatgaaatagatcgctttataacttgaaaggtccatcatccttgccatatgaatgaaatcccgttgaaaagttttagcttctggccaaaaaaaaaaaaaaaaa

SEQ ID NO: 18206 - DNA, 822 bp, Glycine max
cggatgccaaattctggggatctttacaacagaacatttgggatgtgaccttttgctagttatgttgtcattgtatggttggaaatggtaaaacctagctaaaatggacaaacaattttttgtgttgctgaggatgatggaactgattcttgctggcgtgtattgggctacctaatgatgaagctcccaagaagtgtaatttatggctacagttggtaattactaattagtaaacttcctctgttttcatgatttaattggcttatatgtcattgcccatcttgcatacacatgaaagtgtgtctttacctacctgtgccaaaacaaattttatataaaaaaaagttttctttggttcatttttgtactgggtttcgtattttctatgtcaagaatgacattggtgttttgcttgtttggtaattgtgcactcatttccctcttttttctttctagttctggattggcagaagtgagctgttttgggattataagatatcaaaaatgtcagtgctgacgtgatcaaactggcaggtagatcttagttgagtctttccctcatagtacggagcatggaaacttgttgattcaaaatcaacaagatcggtctcatttattgtttgtaacttaccttttagattaactacccttgtgggtagaattataggtttgatacgactagtaaaagggaaattgttttgaagtggatatacatgcttcagtttgatactcataatatatcgctttttaacttgaaaggtccattatccatgtgatgtgaatgaaataccgttgtgctgttagagctctggccaatttttt

SEQ ID NO: 18207 - DNA, 464 bp, Glycine max
  unsure (1)..(464): unsure at all n locations
taaaaagtgttgtaagtcgtaataatcatagacaggcacagacacagagggccaatatgaagactcgtacctctaagaagatctctgcaaaatgggttccaattttctctgtatcttccttccttattggaatgctcataacaaccaggatgtgggaaccaccagaatctaacggggtgttactgtcaaatcaccgacatgagcaagaactacaagtggtgtcaggggattgtgctactaaaaagcctgtgcaggatgaggatgtaatgagtaaagtgtacaaaacccatggagccattcaatctctagacaagcaagtttccatgcttcagatggagctggcagcagcaaggagtactcgagaacacaagatttcggatggttcagctaacaccttggcctcggnggtctccactgaaggccctcccaggaagaaagtgtttgtagtgattggcataaacact

SEQ ID NO: 18208 - DNA, 465 bp, Glycine max
cccacgcgtccgcacgcctctccctccattctttaacagtcaccaacttctttctctctctctctctccctcgcacacaaatggccttagcttccttctccaatctctccacacaacacttgttctctcactacaaccacccctctctacaaacctgcaccatcacaatcccccatggaactctcatcttcttcccttccaagctcaaacattgcactttcatcacgtccaccgctcatttcttccccactacagtcacagccatctccagggttggtcctaggatcgggccgcccttggccatctcctcagctggggatggtggcaggtcgtcggggagaggcggcggcggcgaaagtggcggcggcggtgatgaagaggaggaagagagggaccgcaatcgggaagaggtgatggtggcgctggcggaggctggcagtcgctggagagttcccggagatttgc

SEQ ID NO: 18209 - DNA, 530 bp, Glycine max
agagagagaggtaaacatatatcaaatgatgatcatggcatgagggtcatcatcacccctatctgatcttctatttctgaggaagtatttctcatcctttgttcctaggttggtttcatggtagctctatgttggcttattgagagaacaagtctgagataaaaaggagcttcaacttactctccagatcaccaccgtcgccgtccagaagtagcttccaccggccaccgaccaccgcaggcgccacaaccaccaccaaccctactttgatgcgtttcccacatacctaacacagattattccactcttccattacgcctttggattctggtgcgtgatgaaacaactcaacaagccaaccatatcccttgcagcaaatattccagcaacataagaaacctgaagcagtataagtaaccggtgagaaagcaatttgatcaattgagaagaactttagcaattggtgaagagctttattatataattaatttgatggctcgacaaccttgtgatgacaaatcatctggatt

SEQ ID NO: 18210 - DNA, 496 bp, Glycine max
  unsure (1)..(496): unsure at all n locations
cttgcattgacccacttctaagagagagaaagagaaggagagagagagagagagagagagaggtagacatatatcaaatgatgatcatggcttgagggtcatcatcaccccatctgatcttctatttctgaggaagtatttctcatcctttgttcctaggttggttttcatggtagctctatatatgttagcttattaagagaacaagtctgagataaaaaggagcttccacttactctaccaattaccaccgtcgccgttcagaagtagcctccaccgaccaccgcaggcgccacaaccatcctactttgatccgcttccctcatacctaacaaattattccactcttcttctattacgcctttggattctgttgcgggatgaaacaactcaacaagccaagcatatcccttgcagtaaatattccagcaacataagaaacctgaagcagtataagtaactnggtgagaaagcatttgatcaattagaagaagaa

SEQ ID NO: 18211 - DNA, 625 bp, Glycine max
agctaaacttggttctgatgatctaaggacacaggatgcagctccatggctagaatactttgagtcaaaggctctggagcaacaggaggctgcacggaatggtacacctaaaccagatgcctcaatctccagcaaaggtcatttaagtgtgtcagacctcttggattacataactccagatgctgatcagaaagcacgggaagcacagaaaaaggcccgtgccaagttaaagggaaaaccaggccaaaactgggaaacagcttcagatgaaaatcagaaggatgaagacatgtctcgtggttattcaattacagagattactaacgataaagagaataaatctgaagctcaaattaaagatcacgggattgataaagttgagtccgctcacttagaccaaacaatgctcaatgaaagtgataatctggcacaggatgacagctcagatgaaggatggcaggaggctgttcccaaaggtcgttcactcactgggcgcaagtcatcttcatcaaggaggcccaccctagcaaaactgaatactaacttcatgaatgtttcccaatcatcaagatatcgaggcaagcctactaatttttcctctccaagaacaaatttaaatgagact

SEQ ID NO: 18212 - DNA, 346 bp, Glycine max
acgcgatcaaagcttggagaactcatccaggcctgtggaggcttgtttacatatcctgtaggcctgaaactttggtggcaaatgctattgagctttgtacgccatcccccgtaaaaattgagaaaggaaataaagacaacagaggatggagaaacatgagcagtgctggtttagcacggcacagggccaagtctatgcccatctcagaggcattccatcctgtaaaggctatggctgttgatctttttccacatactcacactgtgaattggttatgcttcttgagaggtaggtcataggtggaccagacaccaaagtctgggttaggtttattttatgtgctagg

SEQ ID NO: 18213 - DNA, 864 bp, Glycine max
cgccgccggagaatgcagttcctcgagtcgcgacggcgacgttgacgtcatgattgtcggagctggtgtcgccggctccgctctcgctcacactctcggcaaggatgggcgtcgggtacttgtcattgaaagagatttgagtgaacaagaccgaattgttggggagttgctacaacctggaggctatctcaaattaattgagctgggacttgaagattgtgtggagaaaattgatgctcaactagtgtttggttatgctcttttcaaggatgggaagcacacaagactctcttatcccttggaaaagtttcactcagatgttgctggcagaagctttcacaatgggcgttttattcagaggatgagagagaaggctgcctccctttccaatgtacgactggagcaaggaacagtcacttccctacttgaagagaagggtgttattaaaggtgtgcactacaaaacgaaggatagtcaagaattatcagcttgtgcaccccttaccattgtttgtgatggctgtttctcaaacttgcgccgttctctttgtaatcctaaggtagatgttccctctcatttcgttggcttaattttggagagttgtgaacttccttgtgctaatcatggccatgtcatactgggagatccttcgccagttctgttctatcggataagtagttcagaaatccgttgtctggttgatgtccctggtcagaaggtcccatctatttccaatggtgaaatgacaaattatttgaagacagtggtagctccatagattcctcccgagcttcatgacgcattcatagccgcagtggacaaaggcaacatcaggacaatgccaaacagaagcatgccagcagc

SEQ ID NO: 18214 - DNA, 606 bp, Glycine max
cactcccccaccagccccactcagctctcctccccctgcctcccctcctccttcatctccaccacccgcatctcctcctcctgcttctcctcctcccttttcaccaccaccagcaactcctccaccagcaacgcctccacccgcattgacccctacacccctttcctctccaccagccacttctccagctccagctcctgccaaggtggttgctcctgcactctctccttccttggctcccggccccagcctctccaccatctctccctctggcgatgatagtggggctgaaaagttgtggtcctttcagaagatgattgggagcttagtattcggatgtgctttgctgtccttgttgttctagacatcatcgatctctgtcttcggacttgcagatttttctgccaattcatgttatttttctatttaccttacctttatatattattattttgtggatgtgatcatgggagtttattaattactgtatttgaattatatacgtacattgcttgcattcttgggagatttgaggggaggttttgtattcgaggacagttattttgtatggcactattattagtgtatcgatcgttgcattcgagt

SEQ ID NO: 18215 - DNA, 274 bp, Glycine max
tcccgcctctcctcctccttctttttctcgccccgcctcgtcccctcctttttcaccacctcctgccactcctccccccgccactcctccccccgcagttccaccaccctcattgaccccaacagttacacctctttcttctccacctgtctcttctccagctccgtctccttccaaggtgtttgctcctgcactctctccttcccttgctcccggtcccagcctctccaccatctctccctccggcgatgacagtggggctcaaaacttgtgg

SEQ ID NO: 18216 - DNA, 404 bp, Glycine max
cccacgcgtccgaaaaaaaacagtaatggatatctccgtttctttctccaaaacccggcctcctccgttctctccctctctctgccgccaactttccctccgtccaaacgctccgcaactgctgcgattctcccgaaacaacggaacctttcgccggaagcctccgccgacgatttctcgcccaaacaagctcgctgtcacagccattcagatttcaaacctatccgagaatgaagacgattttgtcctcgaagacgttccacacctcaccgactttcttcccaatttgccgtcatatccaaacccattgcaaaagagccaaggctactcaattgtcaagaaaacttttgtgagccccgaagatgtggttgctgaaaatgttgttattcaaaagggaagtccta

SEQ ID NO: 18217 - DNA, 561 bp, Glycine max
  unsure (1)..(561): unsure at all n locations
ggagtcanattgagaagaaaaatcttcaattgtgggtcctgaacccacttgattcaccccaacccaataattttagccaccagtgtgtagataacttaagccaaaacaacccaccaattcttttggataccaccttccatatattgatattgcaaaagatagttaaatttcattccgaaacaatgatcaacaaagtagcagttctattagttgttttgcttttcatcattgctgctttggcttctgatcctgatccagtaatggacttttgcatagccaaatcaccagacaatagcttcagttgcaagaactcatctacagcaacagtggaagatttcacctattctggcataaagtctcctgggaacttcaagcaaactggattctcttctatggcagtgaattcgaatgtctttccgggtttgaacactcttggtgtgtcatttgtgcgagcagattttggtgttggcggcgtcaatgtgccacacttccatccaagagcaacagaggttgcttttgtgctggaaggaaaaatttattcaggatttgtggacaccaaca

SEQ ID NO: 18218 - DNA, 296 bp, Glycine max
ggtagtggcaatgagttccccttgcagttgcgcttgcgcttctactaattggagcgttgattatggttatggaggtggtggcgtgctttcaaattcaaaggtaagaagcaggaggtccaaagaaatatccatggcacattcagtttgtggttcgagaaggtccactgcacttgtgatttcatccctgcctttcggcttccttttcctatctccgccagctgaggccagacgcaccaagaaggccatccccgaagaccaatacattactagccctgatggattgaaatactatgatt

SEQ ID NO: 18219 - DNA, 490 bp, Glycine max
ctttcgattagtcccgatctcctcctgatacaaatcaatgatcccaacgttgaatctgatgagaccaaacaggactcccaacttaactataattaccggaacatgccattgccataacataaccctttctcactgttgtttttttctttttcttcccaataaataacaacaaacaatcactctcataacagaaaaacccttttttccccttcctctgaagcgaaacagattcgcaaaaaaaaattaaaaaatcccaattctcttcgcaaaaatcgaaatcaatgtcgaaaactccgaaggagaaggaaacggaggagcctctgccagaccacctccgctgcgggcgcacggacgggcggcaatggcgttgccggcggcgagtgaaggagaatctgaagctctgcgagattcactacctccaaggtcgccaccgccagtacaaggagaaggttcccgagtcgctgaagcttcagcgcaagcgcaaactaac

SEQ ID NO: 18220 - DNA, 502 bp, Glycine max
  unsure (1)..(502): unsure at all n locations
aattaaaaacaaagcacacgctccacattgtgttttccggtgaatattccggcaactgcatgcaccggtgaacgacgccggaaatggacgagtcacagagaattggcatcgacttaatgcgtggtttccctcgccggagatcggtggaaaaccggtcatcttcccggcggagacgctccatcttctccggcgccggcaattcggaatctgtggacgccgacgacttcgccgacgtctttggtggcccaccgcgaactctccttgcgcacaaattctcgagctccgggtcgttttacgaggaagttttccggccgccggagttcacgtgcccggcgccgaagggtggccggagcttgccggtgttcaggattccggcgaggaatgagggattttacagcgacatattcgggtcggacgatgaccggagatcgagagagcggtcaaggtcactgtcgaaagagaattcgcgtcgngcgatgagtncggagagtaagccctcgcc

SEQ ID NO: 18221 - DNA, 469 bp, Glycine max
cacaactctctctctctctctcactccagttcacttctgccacctatgaagtttctttaatttgtgcatattccatcactctctctctcttcttctctgccagtttatgtacactaactcaatacacaacactcattaacatttcttttcctcatggaacttgagatacgtgcttgtctcttgttgtttctctttagtctcttctcatgctctcaagcctacactttctatgttggtgggaaagatgggtgggttttgtacccttctgagacttacaatcattgggctgaaaggatgaggttccaagtcagtgatactcttgtttttaagtacaagaagggctcggatactgtgttggtggtgaacaaggatgattatgagaaatgtaacaagaagaacccgatcaagaagtttgaggatagtgaatcggagtttcagtttgatcgatcgggtccattttacttcatta

SEQ ID NO: 18222 - DNA, 663 bp, Glycine max
  unsure (1)..(663): unsure at all n locations
cccacgcgtccgcccacgcgttcgcccacgcgttcgcacaattaaacaaacagtactatggatgtttggtcatggatatgtgagctccccaactcggtggaggggaccgagtcccactcgccacccatgaagttcgaaatcgcgagtgagaagaacgacgacaagctggacaactcaactcgttccattcacctgaaagctgagcgaacctccggctcagactcggaagctgcggtgatcttcaccgtatgcttgcaaggctttcacccacacaacgctcacaagcctctatgggtctccgaaaagtgccacctctcatcagaaaagccgttcctccctctcctcctccaactcctccaggaaatcatatcccactcccccacggcgcacgatagcacctgcccccgttcccagctccagaaactaaaacccgaccccatcgcatggatcatggactcgcacacacccgagtccctctccaccttcttcaacctcgtcttcaccatgcgcctcttctggctctgcgccttccacgctccccccgaaatcaggttgcctctacttccagtcnctcttcgcccccggtctccacagttngtcgtccaaactggaatcttcgggcttcggacctttcttcatcaccgtcggcgtcgacaccgaact

SEQ ID NO: 18223 - DNA, 264 bp, Glycine max
ctccttacaaccccgttccccctcacactcaatactccacatcaattcacaacacacaattgaacaaacagtaccatggatgtctggtcatggatatgtgagctccccaactcggtggagtggaccgagtccgactcgccacccatgaagttcgagctcgcgagtgagatgaaggacaaggacaactcaactcgttccattcacctgagcgccgagcgaacctccggctcagactcggaagctgcggtgaccttcaccgtatgc

SEQ ID NO: 18224 - DNA, 912 bp, Glycine max
agatagctaaatttttcattagtattccttgtaggccacctagctttcctctcttcttactatttttgtgttcatgtgaaggttaattgaaacataaagacacactcacacaccctgggttcataaatttcattttgcagtaacaacaaaaaataagcatgagttgcaacgggtgccgcgttcttcgaaagggatgcagcgagtcctgtatgttgcgcccttgtttgcagtggatcgaaaccgcccaagctcaaggccacgccactgtcttcgtcgccaaattcttcggccgtgccggcctcatgtccttcatttccaacgttccagaaaatcaaagacccgcgctgtttcagtcgctgctcttcgaagcgtgcgggagaacggtgaaccccgtgaacggcgccgtgggacttctctggaccgggaactggcacgtttgccaggccgcggtggagacggtgctccgcggtggcacgctgaggcccatgccggagctcatgggcctcgacgctcccgccgccgcggccaccgatgaagcatcggaggccgaagtggcctgcaccgacacgtggaggatccgaaacccgaacccgaattgccggttcacaagctcgcggtcctccggctgcggcggcggcggcaaacgcaagcggtcggaggagctggcaaagcttcaggcgcagccgaatctcgatctccggctgacgccggttttttcgcagaaggttgagagccgccggccggaatctccgtcgatgacatcggtggaatccggaacgacgacggagaacacgtttggggatcagtggggtcaccggtaagttctcaacctttatcatttgagacatctcctatatgtttcttcgaggggtatggtttttgtgaatgctattaacgagttatgattagtta

SEQ ID NO: 18225 - DNA, 571 bp, Glycine max
gttggtaatgagaaatgaggatggtaggtattagttaagttagctttatctggaactgctggttctcacttctcatactctctgaaagcagagaagttaacaaccaatggccaccatcattgcttcttcctcatccactgtgctcttctctgcatcctcttcctacctcctcccattttcacacccttctacttcgcgcctttctttctcttcttccctttcctcctcctcctcttctctatcaatttctcctttctttttatcatacacttcttcaaattctacacactttgccactcatgctgccttcagcatcagtgccagcgccgccgagaagaagaaggtgctcatcgtcaataccaacagcggcgggcatgccatcattggcttttactttgccaaagagcttcttggtgctggccactcagtcaccatactcactgttggtgaagaaggctccgacaagatgaagaaacctcctttcaacagattctcagaaattgtgagtgccggagggcgcacggtgtggggaaatcctgcagaagtagggagtgttgtaggaggggcagtg

SEQ ID NO: 18226 - DNA, 1325 bp, Glycine max
tatgtttccaatgtatcacatggaattgatacttacagcattagagaaccacttggtgtttgcgctggtatttgtcctttcaactttcctgcaatgattcccttgtggatgttccctatggctattacctgtggtaatacctttgttctaaaaccatcagagaaagacccaggtgcttctgtaatgcttgcagaattggcattggaggctggtttgcctgagggtgtcttaaatatagttcatggaacccatgatattgtgaatgctatttgtgatgatgacgacatcaaagccatatcctttgttggttcaaatgttgccggaatgcacatatattcaagagcagcagctaaagggaaacgcgttcagtctaacatgggagccaaaaatcatgcgattgtcatggcagatgcaaatgttgatgctactcttaatgctttagttgctgctggttttggtgctgctggacaaaggtgtatggctctcagtacagttgtttttgttggaggctcaaaaccatgggaggataaacttttagagcatgccaaagctcttaaagtaaatgccggaactgaacctgatacagatcttggtccggtgatcagcaagcaggcaaaggagagaatacacagattagttcaatctggggttgaaagtggtgccagactactgcttgatggaagaaatatagtggtcccaggatatgaatctggcaattttattggtccaaccatcttatcagatatcaatgccaacatggagtgctacaaggaggagatctttggcccagttcttcttttcatggaggctgatagcttggaagaagccataaacattatcaacagtaacaagtacggaaatggtgcttctatatttactacatcgggtgttgctgcgaggaaatttcagactgagatagaggctggacaggttggcatcaatgtccccattccagttcctttgcccttcttctcatttaccggcaacaaggcatcgtttgccggtgatctcaacttctatggcaaggcaggggttaacttctatacacagattaagacaataacacaacaatggaaggattcaactggtggtagcaagattaacttggcaatgccaacctctcaaaaataatgttgatagccagagcgtgtaataaggctgtttctgaagtctttgttctcttgaaaaaaatgtcaaaggtcacctgctatgctttgttttgaaacctttctcttttctttttcctgatcttatctgtctcttgtgtctccacgtggacaatacaattctttttgcttaattttctaaagtcaaggtttacgtgg

SEQ ID NO: 18227 - DNA, 474 bp, Glycine max
attcattcttcttcttcttctggtgctaagtgcctaagcttaaatggcgtcgtttttgtcttctctccctgccgtttccgctcgtcccatccccactagtgccttccctcccagaaaacctctctttcaaactccacccaccttgcatttcaaaaatcataggtttgccgttagctgcagttacgcagaagcaggtgtcaacgctgattctagctctaacaccatagatgttgtggctgatgttagaagtgaacggattgtagtcttaggagggaatggctttgttggttctgccatatgcaaggcagcagtgtccaggggcatagaagtcataagcctaagcaggtcagggcgacctacttactcgggtgcttgggtagaccaagttacttggatttcaggagatgttttctatgtaaactgggatgaagtacttgttggagctaccgcagttgtttcaacacttggaggttt

SEQ ID NO: 18228 - DNA, 1204 bp, Glycine max
gcgcacgcgtacgcagaccccaccccaaaccctcgattccgattaggcgccgcaaaccacccacgccacccaagcccctttcctcctgcacctgggcttcaatcaggactccgggtgcttcgccgccgccaccgaccgcggcttccgcatctacaactgcgaccccttccgcgagatcttccgccgcgacttcggccccggcggcggcgtcggcctcgtccacatgctctttcgctgcaacatcctcgccttcgtcggcggcggctccttccccgacccccgctaccctcccaacaaggtcatgatctgggacgaccacctgtcccgctgcatcggcgagctctccttccgctcggaggtcaagggcgtccgcctccgccgcgaccgaatcgtcgtcgtcctcgcccacaagatcttcgtctacaacttcgccgatctcaaggtgctgcaccaaatcgagaccattgcaaaccctaagggcctttgcgacctttcacatgtctccgccaccatggtgttggtctgccccgggttgcaaaaggggcaggttagggttgagcactacgcttccaagaggaccaagttcatcatggctcatgattcccgaatcgcgtgttttgcactcacgcacgatggcaggttgcttgcaaccgccagctccaagggcacactcgttaggctcttcaataccctcgacggttcactgctccaagaggtacggaggggtgcagacagagcagagatatacagccttgctttttctcctactgcacagtggctggctgtctcaagtgacaaggggaccgttcatgtcttcaacctcaaggttgattccggactgttggggcatgatagatcgcacagtacttctgaggcaaatcttgctagccccaccgcgatgtcgtctctttccttttttaaaggtgtgctacccaagtattttagctcagagtggtctgtggctcaatttcgcttgcaagaaggtttgcaatatgttgttgcatttggccatcaaaagaatacagttgtaatactaggcatggatggcagcttctatcgatgtcagtttgattctgcagctggtggagagatgacccaacttgaatattacaatttcctaaaggcagaggagacattctagtctagtatggatgcatcatgtatagatctttagtggcagttgctgtgaatactatttgaattt

SEQ ID NO: 18229 - DNA, 366 bp, Glycine max
cccacgcgtccgagatggccaacaagaaaactatgaacagcagattaggagcctggaaacggatgtgcgtcagttgcctaatcgaacaggaactttggagagtagcacaagtgagagtattagttggcaagaagctagtaatcaaggggggaattggcaggaacaaattgctgaagaagggggaggaaactggcaacggagtccatttgatcagacgagagatggaagggcagtcagtgattggccacaggaaccttccagaaacttaactggggaagatcctcatccccaggaagctcaaagaatttggcatgaatgataacacaggggaaactgttggtaattggtccgaaggactttttgaac

SEQ ID NO: 18230 - DNA, 850 bp, Glycine max
ccctcacagcgtcacccagtcggcattgtgcaggagcatttctctcccgtcggagcaacttcagagattcaatgctagttgtttggactttgaaaatatgaaagtaataagcttttccggtggcataacaaaaccctgtttttttattgcccaaacagaaatgcctattctaacatttgctcattgtaagctgagtgctaccctagctcttaggaggatggggtccattacgagacttcaatattctgttgctgataggacattcacttctggttccgtggatttgccggcttccaaaacggactctggtcgagtgaatcggaggcggggaggcggctcatcctcggtatatagccgtcctagtttatcagaaatgaagaaggagaaggcagcaataagggaaaaggtttatgagttcttgagggcaattggcattgttcctgatgagcttgatggtcttgaactccctgtgactgttgatgttatgagggagcgcgttgattttcttcatagtttggggcttacgattgaagacatcaacaactatccgcttgttcttggctgcagtgtcaagaagaacatgattcctgtgcttgattaccttggaaaattgggagtgaggaaatcctcgatcactcaattcttgcagagatacccacaagtgctccatgctagtgtggttgtggatcttatgccggtggtcaattatcttaaggggatggatatcaagttcgatgattgtcctcgtgttcttgagaggtacccttaaattctcggattcaaacttgatggaactatgatcacatccgttgcttatttgatttgaattggagtatgaagaagaaaaatt

SEQ ID NO: 18231 - DNA, 519 bp, Glycine max
aggagcttggtgcaccaggagaaaatgcccgagaaatgatgcagctccttgactcaaatagtgatggctccctcagttctgacgaattccatatgttccaagaacaggttgagttggtgcgtaatttagaggtccgagatgatcaatacaagaaattattggatgagaagcttcatatggcagatgagagtggtttaattcaagtttatagtaaggagttcggcaacaggcttgcgagctagtgcttcatccatttgaaacgaatgacagaacaaaacacactcaatttactccacttgtgatatgatcattaagctagagccacgcgtaagtgatgtaatttccatgtaaattaattaatgccagaaattccagagataaagaaatttgcaatatcttataaaaaaaaataagaattaatattcataataatatatatgtaaatttttctttattattctatttatttttaatattattttagttatttcattaaatttgcttttattattacttttt

SEQ ID NO: 18232 - DNA, 364 bp, Glycine max
gtaaaagagagaaagacaaatggtaggaacaaattgctactcaaacccggcaaccctgaatgcatcaagtggtgctggctatgttaccaacattgctggtgttaattcctatgtcactggttcccctctctccgtgctcgtctgttttatggtctccgatatttttgggatcaatgcaacactttttagggacttggcagacaaggttgcaagaaaaaacgggtgttattgtgtctgtcccgacttcttcaatggggacccttttgatcctgagaatgagaacaggcctttacctgtttggttaaaagatcatgaaccggaaaaaggtattgaaacatcaaaacctgttattgaaaccttaaaa

SEQ ID NO: 18233 - DNA, 1513 bp, Glycine max
cggacggatccaagaaaatacagagtagagacacaaaatccaaaagagtctatagttgaagggtgagtgtcaccttggaaatccatccatggctcccactcttacatccaattcatcttttataactagcactcctcattcaagggtgaccctccggaatccaaggctgagagtctttgccaagaagtctggatcattcccatcttttgggctaggcaagcccaaagatgattcttcttcttcaactgaagaaaaagatggctcatccaattccaacccctttcgtttggactttggaaagatacccgatgtaacgtctttcatcccatctacaagcaacacttgtgcgccaagcttttctttaagaaacacaaggcgcaaggacccttcaaacagtgtttgttgcctgcgcaaccgaggcaggctggtattcgcattgcacaaacgttgttaagggaaggtttcagtgtacgggctggagtccccgaacttgcttccgcccaagaacttgctcgtctcgctactcaatacaagattatatcaaatgaacaggcaaagcgtctgaacgctgtgcaatcaagctttgacaatgcagacacaatagccaaagcaataggcaatgccggcaaggtggttgtcaccattggtccgacagagaacggtccaaccgcagaggtatctgcatcagatgccttgcaagtggttcaggcagcacagctggcaggagtaggccatgtggccatcgtctacgacgagagcagcgctggggcctcaacctacaatgtactggatggcctctcatccttcttcaacaacctcttctccaggtctcaaccgttgaccatacaagagttcttgcagaaagtcattgaaacggatgtcaagtacaccttcatcaagacaagtttgaccgatgatttctcaccggagagttcctacaatgtggttgtcttgggcgaaggaagcgccagtgcaaacgactataaagtagcaaagtccaagatcgcatcgttggtggctgatgtcttctccaacacagaggtagcagaaaacaaggttgtgaaagtgcactcggatcccagtgcccccttgaagcgtgtagatgaacttttcagccctattcctgaggatggaagaaggaaagcctatgctgaaatgcaggaaaaagcaaaggcagaggaagaagcaagagtggcagctgaaaaggccaatgaagcttctgaatcagcaaagaagttggaagaagaggtgaagaagcttttgcagcaagaagcacgggctgcaagtctggctcaggaggcccaagagaaggcagaggcagctggggcttccgtggaaaacctcttgaacaaggcaaaagactttggtgcagggttttcctgggaaaagttgagctcacagattactacttcaatccaaaagcctgatgaggatgagaaaccaaaggtgcagctagccactgtaaggggacaggccaaggctcggaatctcgcgcctaacaaagcagtggtca

SEQ ID NO: 18234 - DNA, 474 bp, Glycine max
cccacgcgtccggtctcattcaacaaaaggagtagataaggagctcttgtgaagtctatatttgtcttagaattgttttcacaacttaaacttttgtttcttcttctgaagcaagtaacaagagcatggaggtggatttcaagtctccttcccttgaaaagacagaagctgctagcctcaagtagaagaaaacatgcgctttcacaagtctcttcaggagctaagagaattgcagtctcagttgcaccatgccgcagattattgtgaaacaactttcttgaaaagtgaagctaagagagatgtgttggaaaatacaaaagaatacatatgcagggccatggttactgttgttgatcatcttgggaacgtctcggctaatcttgatggccttatttctcaaacaaatgcattttctgaggctgagtctagaatccggtgcctcaaacaaagacttttctcatgtgaacaatatgc

SEQ ID NO: 18235 - DNA, 392 bp, Glycine max
cccacgcgtccgcgcttcaaccccaattgttcatagcccgatctagtatatacctaaaggattggatccttttcttggttaattctgaaaggctaaaactggtagaataagagtttaacggaaaattgggatttgggtcaacagctataaaccctaatcaactaactacaatttgcgttgctaaatggaacatcggaacacaggatcagatgctggagatgtttcttcagccacagcagttctccttggagctttagctcctggtgttaatgggcctacatggattactttaaagtccacttctttattgctgggtctctgtcttgctgttatgctggccttagcattctcttccagtgattcatggttgatttcccatgttgcattccttg

SEQ ID NO: 18236 - DNA, 337 bp, Glycine max
ggaatgaggttggtgtgaagtgaaattgttaagccacatgtctgctcaagggctttgctagaggatggttcttgttcatcgattctcatactctggaactcgaatggggttgtaaatttcagagacaagaattaagacaccattttggaaacgttctaagtgaagggtagagacagagtgaactccaactctcaatatttctcagacattggagatgttggatgtgatgtctttgagttaccccttccaaacattgttgttaggttgttgtgtaactactcctagtcgtagatacttgaacaagacaaggcggtgcctatttcaagccacaccccca

SEQ ID NO: 18237 - DNA, 427 bp, Glycine max
gaattttccaagatgttatagtttccaccgttgcctcatgcatttaggtaaaaagaatcccgctccgaagatgaagaccgaatcgcgttcgaaagaggaaacaaagacgtatcaggaatggtttaatttggcagattcagatggagatggtcgaatctctgggaacgacgccacaaagttcttcgctctctccaacttgtcgcgctcgcaactgaagcaactctgggctctcgccgatgtcaaaaggcaagggtttttgggcttcacagagtttgttactgcaatgcagttggtttcgctagcacaagcagggcaggaacttaaatcagatatcctcaaaacgcatagcatgtttgacaaggaaaatattaaacctcccgtattggaaggactcgatgctttagtagcacaaatgagtttaacaatt

SEQ ID NO: 18238 - DNA, 729 bp, Glycine max
acgagaggagacaggagagggaaaaaatgaggaagttgaagtattatctcaagttagaagaagagagacaacaaaaattgcgtgaggcggaggaagctcggaaacgtgaagatgctgaaaggaaaaagaaggaagaggaggagcgcctgcgtaaattggaggagatagctgaaaagcagaggcagagagagagggagcttgaagagaaagagaaacaaaggagagaagcattgttgggtagagctgctgctgaaccagctcctcctgcccgtccattggaatcgggatctgctgctcctgcggcagctgccgccgccgccgctgctccaacacctgggaaatacgtacctaagttcaggcgagagagaaccgaaagcgcaggagctgcgcctcctccagaaacagatcgctggaacagtagcagcaggccagatggtggtgacaggtggcgaagtgatgatcggagaaccgcatttggttctggtggaggttcaaggtcatcttctacttggtcatcttccaggaatgcccgttgaacattttgtggcctgatttattgctggcgactttttgggagttctctatgtaccgagttcttaaatttattatctttttaatacttacgaagtcctctattggattggggagcctgccaacaaaattttctatttatgattgagtggattgcatatggtattcgaagtttcgattagacgagtacttccgaac

SEQ ID NO: 18239 - DNA, 856 bp, Glycine max
cttcaatttcaatagtctcttcttcatcttcattcgtctccgattctccttccacttcttcccctaccaccagaatcagacccttcttcttcccttcctccaaccgaacccctctttttgtgttccccagagctccccttcccaatgctaccctcagagcctcttcttcttccgtttccgcaccgcaggaaaatgggtcgccggaacagttcctgaagagcaattccatcgccgatttcttgcggttcaagcgccgggccgatggtggtgtcagtgccgaattgcagacagctcttgtcagctataagaagaggttcccttggtcacttatgcgccctttccttcaggttgacttggtttccacaattcacatcgctaatgaagagtattttctggccctccaaaaggaactcgagagctaatgattgtgtcctttacgaaatggtagctagcagggaaagtttagaaaatagaagaaatgctactactacaaaaaggttacaaagttcacgcacaaggggttttaacattttgggatgcatccaaagacagatggctcgaattcttacacttgatttccaattagattgtctcaattacgagtcttcgaattggtaccatgcagatcttgattatgagaccttcaaattacttcagcttgaaaaaggtgaaagcttcttttctttcgcaaaagatatgactcttaagtctacaaaggcagtattgcagccagcttcaattccggaagatcttgacccattgagatccaaacttttatgggcttcacgtgtacttcctatgccccttgttggccttcttatcattggaagtgtttgtacagatgtgggaagtcaag

SEQ ID NO: 18240 - DNA, 745 bp, Glycine max
gtaatttgaaaaacaaaattatcgtaaatggaggtggaatttactccaatggaaaatgtgttgcgcgccaggaggcactgccctctgctacttgtgagcggtaaatgcaaatttcagttctcattctcaacaacaacgcactgaacgaagatagaaaagagttttagcatcgtgattcgtgacctatcaatggcgcagacgacccatcccatggacatcgacgaccacacttacaccgccagtcctgacaagggcaaaagtgtcgtcttcgccggaaaccctcccgccgccggcaaggccattccgtgggtcgaaaaataccgccctcagtccctcgacgacgtcgctgctcaccgtgacattgtcgatacaattgataggctaaccactgagaacagattgccccatcttctgttgtatggccctcctggcacgggcaaaacatcaacgattcttgctgtggcacgcaaactgtatggttcacagtaccaaaatatgattttggagctcaatgcatccgatgatagaggaattgatgtcgtgcgccagcagattcaagattttgctagcactcagagcttatcatttggtgttaagtcctctgtaaaattggtattgttagatgaagcagatgccatgacaaaggatgcccaatttgcgctacgtagagtgattgagaaatatacaaaaagcactaggtttgcacttatctgtaatcatgtaaacaagattattcccgcacttc

SEQ ID NO: 18241 - DNA, 434 bp, Glycine max
ggcgccactagcctctgctgtcacttgtgagcggtgaatgcaaatttcagttctcaactacgcactgaacgaagaaagtgcgtattatcaccgtgacctaacaatggcggagacgaaccatcatatggacatcgacagcgacgaccacacttacaccgcgaggcccgacaaagctaaaagtgtcgtcgtcgccagcaaccctcccgccgccggcaaggccattccgtgggtcgaaaaatatcgccctctgtccctcgacgacgtcgccgctcatcgtgacattgtcgataccattgatcggctgacccactgagaacagattgccccatcttctgttgtatggccctcctggcacgggcaaaacatcaacgattcttgcttgggcacgcaaactatatggttcacaagtccaaaatatggatttggagcttaat

SEQ ID NO: 18242 - DNA, 266 bp, Glycine max
tttagattagaagagtcattgcttggttgccaaggaaagcatcttcgggaaacgaacagaatgatgatcgactaagtgggacctgcacttccacttccattcgctgtgttcaaatggggttagcaacaacaatcaccaaccattctcatttgtcttttactatcttctttcactgcggagcacagtctgcatcaccatcatctttaccctcacctacaccactttcttcttcctcctccttattgcgcttctcacggcgctcttca

SEQ ID NO: 18243 - DNA, 338 bp, Glycine max
aacagtttctgacaccgaaattgagccaaaaagttgaccctctttggatgaatgagaatatcatgttcctcacattaatacaacatggagattccaacaattgaaaactcctaaacacccttctcttccaaccccgtttcatgcttccttccaatcctttggtgtgatttcaatcgtttcataagaaaacagcactcagttcttcttcttcttcttgttctttcatcaatcatcatctttttcattcaatttctctgattgacaaaattgccacacagatcaatgattgacccaattgagaaaaaccttaaaagttccttttttatattttaattttg

SEQ ID NO: 18244 - DNA, 761 bp, Glycine max
cgcacgcgtcctgtgagtgaatagggatcagggatgtggaggctgaagatagcagatggaggaaatgatccatacatattcagcacaaacaatttcgttgggaggcagacatgggagtttgatcctgaagcaggcagtccagaggaacgggcccaggttgaagcagctcgtcagcatttctaccacaaccgcttcaaggtcaagccctgcgctgacctcctttggcgttttcaggttctcagagaaaataacttcaaacaaacaattcctcgtgtgactatagaagatggagaggaaatcacataccaaaaagtcacaagcgccgtcagaaggggcgcacaccaccttgcggcactgcagacctctgatggccattggcctgctcaaattgcaggtcctctcttctttcttcctcctttggttttttgtatgtatattacaggaaatcttgaatcagtatttccagaagaacatcgcaaggaaattcttcgttacacatattatcaccagaatgaagacggaggatggggactacacatagagggtcatagcactatgttttgtactgcactgaactatatatgcatgcgaatgcttggagaaggacctaatggaggtcatgacatgcttgtgctagagcaagaaagtggattcgagatcatggtggtgtaacacatataccttcatggggaaaaacttggctttcgatactcggtgtatttgattggtgcggaactaacccaatgcccccagagttttgg

SEQ ID NO: 18245 - DNA, 409 bp, Glycine max
cctcgagccgaatcggctcgagcgtaatcaacatttcgcagtgtggaggatcgtcttcttcatcccacccacacagagttcacgttcagttaggatatctattttttaatggctaatagaccggatccggatattgatgatgattttcgtgagctttataaggagtacactggccccctggggactgctactacaaacatgcaagagagggcaaaatcaaataagaggtctaatgcagggtctgacgaggaggaggaagcccgggaccctaatgctgttccaactgatttcaccagccgagaagctaaggtttgggaggctaagtcaaaggctacggaaaggaattggaagaaaaggaaagaggaggaaatgatctgcaagctttgtggagaatcagggcatttcactc

SEQ ID NO: 18246 - DNA, 453 bp, Glycine max
gtgggccttccttttaacttgcaaggtgaactatctgcagcctttatgatcaaggttatacttcaattgggagcatatacgacacagttcccaactcattattatgcattagcaattcttccaataaattcaaacctgcatatttacttgctgacggaagattagagagggcagggagggctaaaaggccatctacttcaactggtggacaaattcctgcagagagcaatggcctgactagccaggattcatataaaaacagcatgctcacagcatcaatcattgctgtgggagatgagattctctcaggtttggcaatcttgaagatctgttgggaccttatttgtgtaggaaactgcattcaattggttggtctgtgttacaacattctgctgtgcacaacaatatagattcttgggccgaagaagttgagagacaaaaatctaaaagtga

SEQ ID NO: 18247 - DNA, 356 bp, Glycine max
cgcccagggtaccctgggggtcctctgcgaaatcctcttggcgctagctaaagatattaatagcggtcatgactggtcgcttggagagattaagaatgggcgactcgcaatggtggcaatgcttggcatctttgtacaagcttcagtgactcatgttggaccaattgataatcttgtggagcatctttccaatccatggcataaaacaattattcagacccttgccaattctagctcttagttctagaaagtactgtatgaatatgtggcttgggcttgagcttatccataaaatgaaattactttttatttttccacctcgatcatactgtggtcaaggatcaagtttagatgta

SEQ ID NO: 18248 - DNA, 423 bp, Glycine max
  unsure (1)..(423): unsure at all n locations
cccacccctccaatatgcttcaatcaaggtcatagaaaccgggtctantactnatcatcggcggtgtctgactgattgggttctctattcattcatcacactcttcnagctcacatttgccaaagttcttgaagtgcttgccatatggccctatgccaagttgatactcacttgctggttggttcttccaaactttaatggggcagcacatgtttataggcactatgttagaccattctatatgaatccacaaatgcctcaaatgcctcaaatgcctcaaatcccaggaacttctcaaatgtggtatgttcctagaaagaacatctttagtaagcaggatgatgtccttactgctgctgagagatacatggaagagcatggaacagaagcatttgaaagactcataaccaaggctgacagaga

SEQ ID NO: 18249 - DNA, 609 bp, Glycine max
  unsure (1)..(609): unsure at all n locations
tccaggagttttatgacgangaagtggcatgcacctgtttcttttttatttaaattgtgaactgattattcctttatatttaattaaactgaaatgcagaatcatgatagacaactatggaagttaggaacactgccaccgggtctcataacattctggaaacgcactttccctctgaaccgatcttggcacatcttaggtcttggctacaaccccaatgtcaaccaaagagatatcgagcagtctgctgttgtacactacaatggaaacatgaaaccgtggcttgagataagttttcccaagttccgaggttattggacaaagtatgttgactatgatcttgtgtatttgcgagaatgcaacatcaatccataatagatggatctcgtggcatgtgtagggcttgtaatttatattaaagcattatgacaatttttttatagattttcaaagtcaggttttaatttgggcatctctgtacttgtaaatgaaatgtgtctgtgttgtttcctttgtatgtatggttttgcaacttccctattggccttgtggtaaagtgggtttgggagtggtcaagaaatgttaatgaaccgagacaatgcgatggac

SEQ ID NO: 18250 - DNA, 695 bp, Glycine max
  unsure (1)..(695): unsure at all n locations
gctcaacaaagtgctgtttttggatgatgatatagttgtgcagaaggatctgactggtctttggtcaattgatttgaagggcaatgttaatggtgccgtagaaacttgtggagaacgtttccatcgttttgatcgctatctcaacttctcaaatcctcttatcgcaaagaattttgaccctcgtgcatgtggatgggcatacggcatgaatgtttttgatttggtccagtggaagaggcaaaacatcaccgatgtgtaccacaaatggcaaaagatgaatcatgatagacaactatggaagttaggaacactgccgcctggtcttataacattctggaaacgcactttccaactgcaccgatcttggcatgtgttgggtcttggctataaccccaatatcaaccaaaaagaaattgaacgggctgctgttatacactacaatggaaacatgaaaccgtggctggagataagtattcccaagttccgaggttattggacaaagtatgttgactacaatcttgtgtatttacgagaatgcaacatcaatccatagaaggatctggtggcatgtgtagggcatgaaatttatttaaagcttttatgattattttttatacattttcctccctgtatggaaaaagatcccaagccaaaatcacgagtatgaaatgtgntcgttcgtttcctttggctgt

SEQ ID NO: 18251 - DNA, 455 bp, Glycine max
acgaggacacgccagattttggttccttgaacttgaactttctttaaggcaactagtgttggttctgctctatgtgaagtggtactttctggaatagcatttgcatgcatgtagaaccaaagaaactaatataactatgttattgctctcgagaccatattttatgcctaattagtgaacttgaatgtgtcaactatgacatgaaagttgggttattttggattataatgcgtagaaaatattcattatgctcagaaaacctgccccttttaaatgttattcgtagaccttaatgtatttggacaaattgattatcgattgtgttgtaaaaaaaaaaaaaaaaaaaaaaaaaaaaaaaaaaaaaaaaaacaatataataggaaaatggaaccttggcttgagataagtattcccaagttccgaagttactggacgaagtatgttgactacgatca

SEQ ID NO: 18252 - DNA, 1465 bp, Glycine max
  unsure (1)..(1465): unsure at all n locations
aatgaaacctactactagttccagttgatcctgcgtttacagcactacagttccacagcattagccattagcactataaataaatagagaacacgcgaaacacctgattcccctccccagacgccgcagagtcagagagagagattcactgaaacagagcgcagaagaaaatacataaactaatccagaaaatgagcagcggcgctggaaaggtggtgtgtgtcaccggcgcttccggttacattgcttcctggatagtcaaattcctcctcaatcgcggctacaccgttaaggccaccgttcgcgacacaagtgatccgaaaaaaataaaccacttggttggcctcgacggtgctaaggagaggctgcacctctacaaggcgaatcttcttgaagaaggttcctttaactctgtcgttcaaggttgccatgctgtgtttcacactgcttctcccttttatcacaatgtcaaggacccccaggctgaattgttagacccagctttgaaggggactctcaatgttctgaaatcgtgtgtaaacttgccgacgctggaacgcgttgttttaacctcttctgttgctgcagttgcgtacaacggaaagcctcgaactcccgatgtagtagttgatgagacttggttttctgacccgggtttctgtagggaatcacagatgtggtatacactttcaaagactttggccgaagatgctgcctggaaattcgtaaaagagaacaacattgacatggttactattaacccagcaatggtgataggacctctcttgcaaccagtccttaacacaagtgctgcttcaattttaaacgtaattaatggtgcacaaacatttccaaatgcatcttttggttgggtcaatgtgaaagatgttgcaaatgcccatattctagcatatgagaatgcttcagctaatggaaggtattgtttggtggagagagtggcacactactcagaaattgtgaagattttacgtgatttgtacccgacattacaacttccagagaagtgtgcagatgataacccatatgtgccaatatatcaggtatccaaagaaaaggcaaagagcttggggattgaatatactcctttggaagtgagcctcaaggagactgtggatagcttgaaagaaaagaagtttaccaacttttaatttgtgatatctcctagaggagaaaacgttaataatagaaaccttgtgtggttggtcacttggcttgtgatgctcatgcttctgaacaaacttactattaaataagacttaaatcaagattggtataagtactgaaagaagccattcttggtctgatttgtaccggtgacaattaagtttcaaacatgcgtttccaagtagagtttgccttacaaattggatccccgtttttattatattactaggaaatgtttgatgcnnnnnnnnnnnnnnnnnnnnnnnnnnnnnnnnnnnnn

SEQ ID NO: 18253 - DNA, 557 bp, Glycine max
catcattccttttccctctttctttcggctaaggccggtggcagcatagtagcaagcgcacaccacaatcaaagaacaatctccactccaagcaaaccaaagcgaatcagagatccaaactcagttctccaactctctgatctcaacttccacttcagcttcacgaccaatggccaacgacgattgctgcgccacgcaactcatcgacggcgacggcgagttcaacgtcgccggcctcgacaactttatcagaaccgtcaatctcgcctcctgcggcctctcctatgccgtcgtcgcaatcatgggacctcagagtagcgggaagagcacgttaatgaatcatcttttccacacaagtttcagggagatggatgctttcaggggaagatcgcaaacgaccaagggcatttggatagccaagtgtgttgggattgagccaagcacaattgctatggatttagagggtactgatggaagagagagaggcgaggatgacactgctttcgagaaacagagtgctctttttgctttggcaatatcagatattgttctgataa

SEQ ID NO: 18254 - DNA, 600 bp, Glycine max
cccacgcgtacgattaaaaccagtgatgatcgacgaatgctgacaatcgatatttgattttgatagggaaaacaaatcaaaacaaagatattaaataaatagagacaaagaagacgcgattgataatgtccggcacaagaagggtttcgtccgatacacactctctctccgtcgaaatggccgcttcttcttcctctcccgacgagccttctcgctccgtcttcctcggcgtcgacgtcggcaccggcagcgctcgtgcaggtctatttgacgaggaaggaaagcttcttggttcatctagcagctcaatacaaatatggaaagacggtgcctgtgttgagcaatcctctacagatatatggcttgcagtttgtgcagctgtaaaagcagcttgctctaaagctgaagttgcaccaacagaagtaaagggtatgggattagctgctacttgttctcttgttgctgcggattccgacagctcacctgtttcagtttcttggagtggagattcaagaagaaatgtgattgtatggatggatcatagagctgtagaacaagccgaaaggatcaattcctctaaatcacctgtattggagtact

SEQ ID NO: 18255 - DNA, 508 bp, Glycine max
tcgttttcgcgtttttccacgcgtacgatttaacactagtaaaattggcgaccatacacagagatgagattattcgtaattaaaaccagtgatgatcgacgaatgctgataatcgatattagataggaaaagcaaaacaaagatataaataaatagagacaaagaagacgcgattgataacaagaagggtctgattcacactctctctccgtcgaaatggccgcttcttcttcctcttccgacgagccttcccgctctgtcttcctcggcgtcgacgtcggcaccggcagcgctcgtgcaggtctatttgacgaggaaggaaagcttcttggttcatctagcagcccaatacagatatggaaagatggtgcctgtgttgagatatatggcttgcagtttgtgcagctgtaaaagcagcttgttctaaagctaaagttgcatcaacagaagtaaagggtatgggatttgcagctacttgttctcttgttgcagtggattctgacagctc

SEQ ID NO: 18256 - DNA, 1024 bp, Glycine max
gcatgccactcgagccgagctcttacactcgtctggcgtcaagactctggaggagccttatcccgatccgcaagaacacgcaaacaccgatcaattaattttctttatgctagatggggagtgcatcagagttcgacccagcgcttgcgctttcccacaaattccctgatactacgtactcttataccgaaagggatgcagcactttatgccctaagcgtaggggtgtgtttgtcggacgctgttgacgctgatgagcttaaatatgtttaccatgaaaatggtcaggagtctatcaaggtcttgcctacgttttctactctacttgtacttagatctggggcgagtggttataatctcccaggcttgaaatatgatccacgtcttctgcttcatggacaacaatacatagaattatacaaaccacttccttcaagctgtcatatacacaataaagtaagccttgccggattacatgattaaggtaaagcagcaattttggagattgaaacaaagagctacgagaaagaatctggtgatttattgtgcatgaacaggacaactgtctttctccggggtgctggtggcttctcaaagtcatctaagccattttcttatacaaactaccctgtgaatcagaatccagctgtgaaaattcctgaaagtaaacctttttcggtgtttgaggatcgaacccaaccatctcaggcattgctctataggctatctggtgattacaatcctctgcattcagatcccatggttgcaaaggttgccggattctcgcggccaatattgcatggtctgtgcacattaggatttgcagttagggcaatcatcaaatgcatatgcagaggagatccagacttggtaaaaagcatagcgggcagattcttctacatgtctaccctggtgaaactctggttactgagatgtggcttgaaggctcaagggttatatttcggactaaggtgaaagagcgaaagcggacagtcctttctggctacgtcgatctgcgtggtttg

SEQ ID NO: 18257 - DNA, 508 bp, Glycine max
agctattgcacattcctgaagattctgtcccttgtaaaatccgtgctaagcgaggttgtgctactcatccccgtagcattgccgagcgggagagaagaacaaggatcagtggcttgctcatgaaattacaggaccttgtacccagtatggaggagcaaacaagctatgcggacatgctcgatttggccgttcaacacattaaaggtcttcaaactcaggttcagaagcttcacaaagaaatggagaattgcacttgcggatgcaaacaaagcaaataacttcttttttttacgagattctatagcaacgtgcatagaagtcaaggttttgatggcaaagattgaaaactgattttgtaccgatctacttaaatgaataatgaaggaactgaaactttgtaggttgtcaatgctacaattgtacagtgtatgttgtaatatggcagtctagaaaaatttcttcgttttcttcaagaattggctacaaagtccatgctgattttactatt

SEQ ID NO: 18258 - DNA, 399 bp, Glycine max
gtcacgcgaccgtgcgatcgtgatccggacatggaggaacaggcacctgccatcgacaggtcatgatgaatgagaggaaacacaagcctgtggcaggtattcttgacctaaattcatgcatgaacgaggatgagaatatgccaattgatattgatttacaagcacctgtaagtccagaaaacaaggagtgttctccacccagaggagaatctgatgaaaaccagcttgagatgctcttgcaattggcagggcaggagcacgagcaggaacaggaacaggagcaggatctggaagaacaagacgaccaaaccggaattgcagctgaggcttcggtttccatatcacaaactgtggcctatgatgacctccaaatgacaacttgtccatcatctgaatctt

SEQ ID NO: 18259 - DNA, 398 bp, Glycine max
cgctaacaccgattctcgacatgacacaacacaacacaacactcatctccttccttccttgctagttcttgttcaactgcctgcccctccgatcccataatcctatgaaatgacaccctgcactcacaatctcaacctcgttcataacgttgtttttcaattaacaaagcaaaacattgttgctcgccacaaccactacaatgtcgtgtttgttgccgcacttcaactgccacctcgacactttcaggactcatccctatgctcttcctacccatccatctaaaacaagaccaaatttgtgtttccagccgcaatgtgtgttgtctgccacatcttcttcaacgctgcttagtttggaaaagaagatggcattacatgctccttttgatccaaacacg

SEQ ID NO: 18260 - DNA, 247 bp, Glycine max
aacgctcatctccttccttccttgcttcttgttcaactgacatgacacccttcactcacactcacaacctcaacctccttcctaacgttgcttttcaattaacaaagcaaaacattgttgctcgctacaaccactagaatgtcgtgtttgttgccgcacttcaactgccacctcgacactttcaggactcatccctatgctcttcctacccatctatctaaaacaagaccaaatttgtgtttccagc

SEQ ID NO: 18261 - DNA, 623 bp, Glycine max
cccacgcgtccgcccacgcgtccgcgcacgcgtccgatatgaaagaaagagacatctttgatccaatatcgaaggattcgaaccaagatttccaggtggataggatagggtattcgtatatctgactcatgatttaaatatatcagcttatcttcgaaaaagggaaaaatggaatgaattgatcgcaaattattataagattttacgatttcgaattcccttaaggaagatatacaaaattgtagggaaaatagaatctccacgacgacaccaaaaccttctaatattacttgagaataaaaatgattgttataacccataaaaggatttttgttagaatcgttagtaaaaatgatgaaatgagtctgttgatacattcgagtaattaaacgttttacaattagtaaactaaatttattgttataaccgacattttctacaaaaatggacccatgaccacaagctagtccgtaaatagattcccggaaaaaaagagggtatagggtgtcctggtgtcgagatctatggagttctaaatatgctcgagattcctccatttaaaattaaaaaagtctatttattcaaccacagaatcagacacccattggattatcaaatgatac

SEQ ID NO: 18262 - DNA, 293 bp, Glycine max
caccacgacactattctcttctcttcgctccttcacttcaacttcaacgccgccttttgagtctcttcccgcccatcatggcgacggtgctagcaccgccaccgtcgctcaccgtgcgcgcctcctcgtgccgccggcatagcaagaagaagcagcagcagaagcgagcattgggagacttcagcctcttcgcacaagtggttcgcaaggacgtggaattcctcaagagaggaatcgatacggtgttgcctgggccaaggagaccttccgtattcccgaggttgccaagaaaa

SEQ ID NO: 18263 - DNA, 514 bp, Glycine max
tcgctgatcgcgtggggttttagattgagaggattatcttttccctgaaaatccatagcgttatcctcttttgcctccaaaggttgttatggatagatagatagatagaacgctgctttgagtttcctcaactcaagaatggctgccaacgactcgtccaccgagattgatactaagaagctttcgaattgttggggaaatgctcaaatgccctttgcactccccactctcctctcttcaccaccccaacacctccacacatcattcaccactgccgctgacaattttttcagatttctacactcccttgcttctcataactctttcctcaacaaaattctctctctcccctccgaatttcacaccctttgcgtgcagattgggaagcaaaggaacgtgaggttggtttctggtcataatttcgctgccgttatgcctggggattcggtggcagggctggtggtggcgaatggggttctgaatctcttgaacatttacaacactttgctcattg

SEQ ID NO: 18264 - DNA, 588 bp, Glycine max
cccacgcgtccgcccacgcgtccggtgtgttggggaactgaatttgaatgtggagaggtgaagatgatggagcgaagacagaatcgaactccacaagaccaaatagctaggattctggttgaatttttggaggtggctattactgctgttgtttttctcaaaggagtttatccttctggtgcctttgagcggagaaggtatatgaatgtggtggttcaaacggctagccatcctcagcttagatattacatacatgccactgtttcagggcttctacccttcattcactagggaatggtggagagagtagctgttattttcttcaatgctgacaatgttccactggagaaatttgtattcaagcttgcaatgaaccaaacttatagttcagaggtggaagaggttgatcttgagttctctctcagatcatttctcatcaaactgtcaaactcagaatctctttctaaagggcttcctcctgattgctggtgggagataactggttactttcgatcccttcctgagactggtacaagcaaggaagcagacttgtggatccctactgacacaaaacaatggcagcagcct

SEQ ID NO: 18265 - DNA, 419 bp, Glycine max
ctcagatggaagagggattggaagagttaagactccatgttaaggaattacagaagcggtctaagaaactggaggatgcagtgatcaatgcaaagaaaaactcttcatatcgtcagatgcagttgatgaagctgcataaaggttttctgcaagtgaaagattgcacagaaaaactaaaaactagtgaaaaagaacttcaggctctaattgatacagcaatgtcagagattgactgtgatggattaaaggatggacaactaacaaatggaagtcttgatggtagattgtaatatatctttcggaggttcagattgtgtcattgatgcttaaaatgtgtttagcacagaataccctaatgttatatggagaagaaaaaaaggctggataattattctcttttattattccgctccagtctc

SEQ ID NO: 18266 - DNA, 447 bp, Glycine max
tggatgcgtgggcccaggcattggttgggttccttaccactttattattattattattggagatgactagaaagaggatacagatcaagaaaatcgacatcatctgctccaggcacgtgactctctccaagagggggaaagggctcttcaagaaggctcacgaattgtcaaccctttgcgatgcagacatagctctcattgttttttctgcaactagcacgctctttgagtatgccagctcaagtatgcatcacgtaattgaaaggcgcgatagccattcagcaatgaatagactgcatcgcccctcaattgagctgcagattgagaatgactccaatgaaatcctgcgcaagagcgcagaagataagacccgtgagctgaggcacattaatggggaagatctgcaaggattgacattacaagaactgcatagactataggaacacc

SEQ ID NO: 18267 - DNA, 421 bp, Glycine max
cccacgcgtccgttcagcttcagaatgtcttctggaagtcatgaaccttgccatggacgtcccttcagttggcgccatcaatgaaggattcaaggacgagctgcttcatcagtacgagatagagaagaacgaaggtgcaaagtcaatattaaaaaagtgtgtcaacattcttcaagactggaaatagtaaattgtacgagctatagctgtaaccctcatttatcaaattttgggtagatgaagcatttaatatgtatagctcgtgcttggtgtagtaggtccacatatagcgatgacaagaaaactactagtacccttaggtgaaatccgttacggattgaatttttaacacgatgagggtggatagcaaggtatctatattttatgaatattcataatttgaaattacttaaatgtcttt

SEQ ID NO: 18268 - DNA, 761 bp, Glycine max
cccacgcgtccgcccacgcgtccggtcagggatgggtccctgtatctgctcctcccatgctcagcgtctcccctatgcagcaaatctaaaccctaattcttctattctccggcgacgcgcacaattcatcagcttcgcctcgaattcttctccacctcaagacgaggaggccactgccaagaaatcgtttgccgtggcgaccggcgagctgtttctagggctggcgacgcgcctgattaagagccgaaacaagggaagcagcagcctcgcagaagattcgggttcggtgggcatgtttgagaataattctgacgagagaatcggagcggtggtggaggacgagattgatcccgacgtggtttgggagcaaagagtgaaagacgtggaggcggagcgcaataggtatagccgcctcgtcaccagccctggctttagtttctctgccgctggacttctcttcccttaccatcttggtgtcgctcaatttctcattcaaaatggttacattaaggaaacaacaccgttagccggttcctcagctggagctatagtttgtgctgtgattgcttccggagctagtatggaagaagccttgaatgctactaaaatattggctgaagattgccgcaatcgggggactgcattccggcttggggctgttctacgtgatattcttgacaagtttttgcctgatgatgttcatataagatctaaatggagagtccgagttgctgtgacacagcttctttggagacccaggg

SEQ ID NO: 18269 - DNA, 406 bp, Glycine max
gtcagggtcaaggatgggtcccagtatcttttcctcccatgctcattctcaccgtctcccctatgcagcaaatcttaaccctaattcctctcttctccgtcgacgcgcacaattcatcagcttcgcctccaattcttctccacctcagcctcggcctcagggagggttcaaagacgacgaggccaccgccaagaaatcgtttgcggtgtcgaccggcgagctgtttctagggctggcggcgcggctgattaagagccgaaacaggggaagcagcctcgcagaagaagattcgcgttcagtggccatgtttgaggagagaatcgaggcggcggcggtggtggtggaggacgagattgatcccgacgtggtttgggagcaaagagtgaaagatgtcgaggcggagcgc

SEQ ID NO: 18270 - DNA, 526 bp, Glycine max
gaaatctctagctcactgagtaacggcagtgtgaacaccttccatagagaaaacggacggggtggttatagttactcatcattctccattgctccattctccgcatacactcactacccgcttttctctctcaaacatcggggccggccttccctccgattcatctccgtcggcctcgccgacacgaaaccgtagacgaataactccaacaattctcagttctttctattaatattttgagaggagcaccaggaatcgtttggcactaaagagaaagtgagagagggagatgaaataagttcgtactgaagatggcgtcgaggcaaatggaagagattcggaagaaattggctgaccttaattacccgagagcgaatgcccctgcacagtccctcctatttgctggcatggagcgctatgcccttctagagtggctcttctttcggcttttaggtgataagtcacccttttctcaacagagcatacaaggggatggccttgatcgtgatgaggagacggtcgaatt

SEQ ID NO: 18271 - DNA, 394 bp, Glycine max
cagaaaacgggggtgattggttactcatcattctccattctacgcatacacactaccggcttttctctctcaaacatcgttatcgcccttcgctccgattcgacgccgttattcccgccgccgttcgatctcgacggcacgaaacctgagacgaacaactccatttctcagttatttgcttatattttgagaggagcacaaggaaccgttttgtactaaagagaaagtgagagggggagatgaaataagttcttacagaagatggcgtcgaggcaaatggaagagattccgaagaaattggctgacctaaattacccgagagcgaatgcgcctgcacagtccctcctatatgctggcatggagcgctatgcccttctagagtggcttttctttc

SEQ ID NO: 18272 - DNA, 421 bp, Glycine max
ctcaagtgtgaagcttcgtgaggcactttggtgtctgagctgaaggaacaaccttggtggcatgaaaggctacaaggcttggacctcaaccttcaacagcagcaccaccaccaccttcatccctttcaataataatctctccccaaattacccgttaacccctccatcctatactgcttcaaactgcttcccatccttccaaagccaaagaccaaaacttatagctcagaatttcaaaccccacattcttctatgcacctctctgcccagtccacaggcaagcagtgcttccacagctcaagctgaggagcatgaggttgaaattgcaaagggttacactatgacacaattttgtgacaaaatgatagatttctttttgaatgaaaaaacgaaatcaaaagaatggaggaagtacctgata

SEQ ID NO: 18273 - DNA, 394 bp, Glycine max
cccacgcgtccggtttcatgctctgagagatcaaagagaaggttttctttctcggacgtggtggatttggtcatggagaaaagcaagtcattccctgaatactcctgctcttacactgaatttgggttcagtgaaagatccaactcatacaatttcaatgggccaaaccagaagggaaatgggttttctgcatcaagtgatccagaactcaagagaaagaagagaatcaaggcctataatgtgttgacagtggagggaaagcttaaaacaagtgtcagaaacagcttcaagtggatcaagaacaagttcagtgacattcgctatggtgtgtgaactatatgaccaaacataagagttgcttgccatggggctagcatgtgttcagtaatatcaa

SEQ ID NO: 18274 - DNA, 429 bp, Glycine max
  unsure (1)..(429): unsure at all n locations
gctgttgcaaacaagggtgctggtggaaggtccagtgcaaagaaacgaccannacatgggctggaaaaaatgcctccacagaaagagaggatccttcagagttcatcacgcacggagctacagattttctctctagcataaaggatatagagcataggttcattcgagcttctgaatctggtacggaggtcttgaggttgttagaggctaacaaaatcaaggtgggatattctgaggccaaagggaagtcgtctaccactgctttgttgtctgctgtccagcctgtttgttgcggtagaaaggcttcacctgttttccaggaacctgcccaaaaaattattagttggaaaaggacagcatcttctcgatcatcctcgtccaggaatgctttggctacaaaaacaaaggaagatattgatgatcgtggaa

SEQ ID NO: 18275 - DNA, 506 bp, Glycine max
cccacgcgtccgcccacgcgtccggccatttacaaaaatggtaaccattaaagcatcttacacagtccttccaaatgaaccaactccggagggccttttatggctatctgatattgatcaagtggcacgtctacgccacacacccaccatctacattttccatgcaaaacacaaccatgatacattaattgagaggatgagaaactctcttagcaagattttggttcactactatccaatagccggtcgattgagaaggatagaaggtagtggtcgattggaattggattgcaatgcaaaaggggtggtgttgcttgaagctgaatccacaaaaacattggatgattatggagactttttacgtgagtccatcaaggacttggttccaacggttgattacacaagccctatagaggaacttccctcgctactagttcaagtaacaacattccatggtggtaaatcctttgccattggagttgccttatgccatatcttgtgtgatg

SEQ ID NO: 18276 - DNA, 424 bp, Glycine max
ctgataacaaagttgaagaagaaaaggccttagtgctcagtgctagagaacttttttttgttttcttctttttttcttttttcatctcttacttccatgatttgttgtgggcttctcaacatcatacattgactctatcagtttcattcctgaatcaattagtttcttcactttcactttctaactgggaggatcaaagtgtgtgtctttgtcctcttggtgttgtttcttcttcttcttcaagtgtgcttcataaagcagtaggctttggaagcaacaaaagagttgcaaagtgggtagtgatcatggcagctgtaaagcctgaggagataagccctccaccaatggaccaacttcaaggcttagaggattggatttatttttcactgtgagtgatatatatacgttgaactgatatcagctg

SEQ ID NO: 18277 - DNA, 308 bp, Glycine max
  unsure (1)..(308): unsure at all n locations
gttagatctggcccaaagtcttctgctgttgatcttcatcagttgcctcacgaaaaaggggtgagtggaacagttggtcggagcgtttttgaattggattataccccactttatggattcatatctatgtgtggaagaagacctgagatggaagatgcaggtgcaactgtacctcagtttctgaaaattcctattcacatgctaattggtgatcgggttattgatggaataaacaagtgttttaatcagcagatgacccatttctttggagtctatgatggtcatggtggctctcangttgcaaacta

SEQ ID NO: 18278 - DNA, 448 bp, Glycine max
gtcaggagatattcaaattatagtaaatgggaagtcatgccttttgagagtttgaggaaagaagcacgggatcattataaccagatgcaaggggtctctgtatataaaatggatggcaataagttggatgatctagtctgtgtgagacattccttaaaatccgaggtgtaaatggctgcctttgctgtctatattgtttttctctgatcacaccctactgtcttctaaatggaatctgggatgaagttactttccgagggcttcatggctcctcatccgtcgttctgtctcatcacttattgcagctacagagcacaacacgaatctcaactccaaggaaactgaggtagtcaatatgcgtaatttcatcgatccagatgattcatattttaaggcgattcatggtaaggggtctagaaatcttaatacaggaattctgaccagagat

SEQ ID NO: 18279 - DNA, 493 bp, Glycine max
gccattcatgggctcacacgctcctcatatcttccacacgctcctgcatcttcgccctttgaaatctcgaccccatcagaagctaccatatctgagactcctagatggtcgtcctttggtaatgggcctgaagccaagcccggcacgtggggtcagcaagctttgtctattaccctccttgagaataagatgcgtagagttgatgctgcgcctccaaaggaaagattaaaggcattctataacacccctccctccacgtatgaaaccattgatcagggacgtgggccttgcttcacggtgataagaacggcttttgaggatatttatctatcaagccctggttccttgtcagagaaatatggaaaggactacttcatctgcactggccctgcttcaatactggtgcctgtgactgtaaatcctggttaagaatggagaggggcacaagttattgagcatgataatttaacattggatagcttgttaaaaattc

SEQ ID NO: 18280 - DNA, 357 bp, Glycine max
cctcaattaaaaaataaatgtattttaagaaagagcgcgtgtatgtactcctttgtttagtaaccgaccgcgagagagagagagagagaggagtctatattcgcgcctcgctctctttatttctccgccaacgacaccaccgcatctttctctccgttctgcattttccattctcttccgatgccgctactctccaattcctcgccctgctgcaccgccgccgcagtggttaactcctcggaccggaagcccggattcgtctctccttcatggaggaactgcaaggtcacatctccaattcttcggctgtctcagaatgacaaattcaatgtgtctcgggtagctcttaaccactct

SEQ ID NO: 18281 - DNA, 305 bp, Glycine max
agagagagagagagagagagacggctatattcgcgcctcggtctctttatttctccgccaacgacaccaccgcatctttctctctttccgttcccttctctctccgatctgcattttgcattctcttccgatgccgatattctccaattcctcgccctgctgcaccgccgccgccgccgcagtggttaactcctccaaccggaagaccagattcgtctctccttcttggaggaattgcaaggtcacatctccaattttacggctctccgagaatgacaaattcaatgtgtctcggttagctccta

SEQ ID NO: 18282 - DNA, 674 bp, Glycine max
  unsure (1)..(674): unsure at all n locations
aaagttagtgatccccagaaactcaggctagaagctgaaaaaagagatgatgttgtatgcatatctgctttaagtggtaatggcttgcaagaattttgtaatgcagttcaagacaagctaaaggactccatggtttgggtggaagctctggtcccatttgaaaatggggaccttctcagcaccatacaccaggttggaatggttgagaaaactgaatatacagagcaaggaacatatatcaaggcacatgtgcccctgcgttttgcaagaatgcttacacccatgaggcaactgtgcgtatcgcaaccttaactttctttaatatatctaattttgcagcataacatgtacatatgtatgtgtaattattgaaatcatgttcgacacgttgggatggcagtgcaaattggtttgtagctacagttagtagccatgcatatccaatccgatttcgatttggattctttcatgttattgataaacatgacagggttatggtgaaagagaaagataaatggatcttataagttattaccaatcacagtgaatcctggtttgataagaaatgaacgtactcctatctgtctttaacgtgatcataatcatatcatgttaccaacatgagggaattcanatgcatcttactctgtgtttcaatggtagatattatttag

SEQ ID NO: 18283 - DNA, 976 bp, Glycine max
atctggcaaggttacaacaattggcttcaaataacaagttaacttctgaggatatatgtggtggtactatcactttaagcaacattggagcaataggtggaaatttggttccccccttatcaatctgcctgaagtctccattattgccgttggtagaattcagaaagttccacggtttgctgataatggaaatgtgtatcctgcatcactcgtgaatgttaatattggtgcagatcacagagtcttggacggagcaaccgttgcaagattttgcaacgagtggaagcaattaattgaaaatcccgagctcctcacgctgcatttgaaatgaaattttcattacatgaaggaagaattgttgaaattgtaatttagatggttaatcactatattgattacaatgagaaatagaacaaaagcatttaaaattgatccaaataaagctcgggacttgttcctcgtgccgaattcggcaccaggaacaacttcatatcatcaccatgaatcactctagcaacaatcagcaagaaacccctttatcatatctaccagaaggccaggccaattcttcagctccatatgtcactgccccaccacctatgggttatccttctaagaatggttctatagaacaaagggttccagaggaaaccacaagcaggggtgatggcttctggaagggatgttgtgctgctttatgttgctgctgtgtcctggattgtgtcttctaattgaatcaagatacagatttgtgtttattagtatatacatttttttttcctttctctcatttggattgtattctttgtagtggtagaagaataagtatatatatatatgtgtgtgtgtatttatccatttgatggaagctggaagctgttcttttttttttcttctcatcttactttgaaattttcgtgatgtatttgttaattgctcattattatattataatttttaaaattattaaaaaaaa

SEQ ID NO: 18284 - DNA, 454 bp, Glycine max
ttcactttcaactttcaagtcaaaaggacaatagtttcaaggatcaaactcttggtaagatttcctatatgtaacccttcttgtcttctagctgttgagaatttgggatagttataactctataaggaaatactccctttgatcattatgcatgtctggccctgtggccacagttgataatttggatggagcactttcttgtgcagagagaacaaaatctcttgatgccatttctgaaatagactgtttatctatatttacaatcggtgaagctgctcattcctctgaagttgctggatttagagtaggggaactctcacttcctaatggagaatcatattctgggtcctttcttggtaacattccagagggtcagggtaagtatgtatggtcagatggttgtgtatatgagggtgagtggagacgagggatgagaaatggatatgggaaaata

SEQ ID NO: 18285 - DNA, 595 bp, Glycine max
gaatatgccaatttgcagaggggaacaaatggacagtcaattttggttaaaaagcgaaattttcgcatttggtcagaggatgaattgagaaaaatggttacaccagagcttgtttgtgcttacgaaagcatgcaagctgacctctaccgtctaaaacatttaggaataactgaaacacaccccactaatatttcatctgcaatgagtcgtcttcctgatgaagcaatagcattggctgctgcatcgcacatcgagagggaactgcagattactccttggaacttgagttgcaattttgttgcctgtacaagccagggtaaggaaaatattgaacgaatggaaattactggtgttggtgatccttctggtcgtggcatgggttttagctatgctcgggcacctccaaaggcaccagtgtctagtgcaatggtgaaaaagaaagcagctgctaaccgtggaggttctactgttaccggtacagatgctgatctacgtagattaagcatggatgctgcactagaagttcttcttaagttcaatggtcctgaggaagtcattggaaaacaaactatgtggcatcgcattgctatgatac

SEQ ID NO: 18286 - DNA, 351 bp, Glycine max
cccacgcgtccgaatatagcacacagtcacaggactcttaaaccctaaaccttggcttgcggcgtgggaggttgcaaaaatggaggaagcaagagttctgaagaatttcccggtgaagccaaagctgaaatcgaaagccagaacccctaagcaaacccctgaatccaagtactggtcctccttcaagacccaacaaattcccaatctcatctccgttccttccatcacgttctctccgacaccccctcactctttcgccgccgcacattccgcctccctcactctcttcagctcgcaaacgctctcccccgccgccaccatctcctccttctgcgacgccgtcacctgcgc

SEQ ID NO: 18287 - DNA, 1010 bp, Glycine max
tgaagaccgtgagaatcacaaacgtattgctcccttgcttcgttttttctcgtcccaaagtgatgaagaactgatcagcttggatgaatatgttgagaacatgaaacctgatcaaaaggatatttattacattgctgctgacagtgtgactagtgcaaagaacacaccgttcttggagaaaattgcagagaaggatcttgaagttctgtttttggtggatccaatagatgaagttgctattcaaaatcttaaatcatacaaggaaaagaattttgttgacattagcaaggaagacttggatctaggtgataagaatgaggaagaggaaaaggaaatgaagcaggaatttggccaaacgtgtgactggatcaagaaaagattgggagataaagttgcaagtgtgcaaatttcaaaccggcttagctcttcaccttgtgtcctggtgtctggaaaatttggttggtctgcaaacatggaaaggctgatgaaggcacaatctatgggtgatgcatccagtttggaattcatgaggagcagaagggtgtttgagatcaaccctgaccattctattatcaggaacttggatgatgcatttaaaacaaatcccgatgatgaagatgccctaagagctattgatcttttgtatgatgctgctttggtttccagtggttttacgcctgataatccagcacaacttggagggaagatatatgagatgatgggtatggctctcactggtaaatggtccacacctggtcagttccagtccacagtaacccagccccataccccagaaattgtagaagctgaggtggttgaaccaactgaggctggtggtcagaagtgagagaggacagtcatgtggacattttttgttttctacccgttcctttctgttctttcttttaacactgcttacgggtgaaattgtattcttgaagaacatgggtattggtagttagtattagtaatatctatagttgatcctttccgttttgatttaattagtc

SEQ ID NO: 18288 - DNA, 508 bp, Glycine max
actacatcagtgatttctcctgatgtttcatatgcaagcagctcagcaagaataaatgagatatatgaggttggagagttgtttgatttaagcatccaactgatatacttggtattgctattgggtttgctagggactgggactttctttgtgattcgccaagttcttgtccgcagagaactcgacctatctgccaaagagttgcaggagcaagtaagaagtggtgatgctggtgcaactgagctttttgaacttggtgcagtgatgctgcgcaggaaattttaccctgctgctaccaagttcttgcttcaagcaattgagaaatgggatggggataatccggatcttgcccaggtttacaacgctcttggtgtgagctatgtccgcgatgggaaagttgacaaaaggaattgctcaatttgagacagctgtcaagcttcaaccaggctatgtcacagcttggaacaatctcggtgatgcctttgagaagtaaaaaagacttccagtc

SEQ ID NO: 18289 - DNA, 649 bp, Glycine max
gcgatttgccacgaaggtgaaagagagcaacggggcaggtaatgattcggcggcgctatggactttgattccattcgcattcgcaggtcttctctgctccgctccagtatcagcacgcagccatggcggacccttctcggagcttcatgaaggacgtgaagcgcgtggtcatcaaggtcggcaccgccgtggtgactcgcgaagagggaaggttagcggtcggaagattaggcgctctctgcgagcagattaagcaactcaactctctcggatacgacattattcttgtctcctccggcgccgtcggcatcggccgccaacgactccgctaccgcaaattgatcaacagtagcttcgccgaccttcaaaaaccccaactcgaactcgacggcaaggcatgcgccgccgtcgggcagaacagtctcatggctctctatgatattctcttcactcagctcgatgtgacgtctgctcagcttcttgtgacggataacgattttcgagatgaggatttcaggaagcaacttactgagaccgtgaaatcgttgttatcgcttaaggttattccggtgctcaatgagaacgatgctgtcagtactaggaaggctccctatgaggattcttctggtatattttgggataatgatag

SEQ ID NO: 18290 - DNA, 473 bp, Glycine max
  unsure (1)..(473): unsure at all n locations
aatcactcttctcatattcattccaatgtcaaatcctcaaacaaacaataaccgccgccggcccagccgcctgcagcggcgagccccctcctccctgcaaataaaccgcgccgtcgagtggaacgtcgccatccccctcctctcgccgctggcatcatctccgacgccgatcgagctaaaaccgccgcacgagccgccgcagagggagccggagaaggtcaccttgtcgttcaagaagcggcagcatcctgcggctcccttctgttacgagcccgctccaatggtgcccgccttttgttcctgcgtagatgaacgaacgacagagtcctaggatgctatctaatggttcatatttagagagaatgaagaagaagatataacgctgtnattttaattaaataattaataatgttcctttcttctttttggtggggagaaggctttgccttattttgcacacggtgggatttatc

SEQ ID NO: 18291 - DNA, 1292 bp, Glycine max
gagaaacagactcgctgcttagtttatgagcttgtccctaatggaagtgtcgaatctcacttacatggagctgacaaggtaacatgatccactggattggaattcccggatgaagattgctcttggtgcagctcggggattggcctatctgcatgaagattcaaatccatgtgtcatacatcgagacttcaaggccagcaacatcttgttggagtacgattttacacccaaggtctcagattttggattggctagaacagcactggatgagagaaacaagcacatctccacacatgttatgggaacatttggctacttagctcctgaatatgcaatgactggccatcttctggtcaagagtgatgtttatagttatggagttgtactccttgagctcctaactggaagaaagcctgtggatttgtcacaaccaccgggtcaagaaaatctcgtgacatgggttcgtccacttctcacaagtaaggaaggcttgcaaatgatcatagacccatatgtaaagcctaacatttctgttgatactgtggtaaaagttgcggcaattgcatccatgtgtgtgcaaccagaagtctcccaacgtcctttcatgggagaagttgttcaggccttgaagctagtatgcagtgagtttgaggaaacagactttataaaatcaaagggttctcaagagggtcttctaaccgatgtgaaaggaattttttccgaagcttcaggtgaaagagtggaattttcagagtgtcaaaaaactttttctggctatcaatctaatgaagaaaaggtaagattatcagcatcagagttgctcagtacttcaggtcaggaatttgagtcgttcaggcagtattctcgttcagggcctctaattattgggaagaaaaggcagttctggcagaagttgagaagtttgtctagaggtagctccagtgaacatggatcccattaagcttttcgtaatcttgcgttttccataccgaattcatcgagttccatgaatcgcatgttagattcacttgagagaaaatattgtgataataatgtaacaaagtcacaaactacaacaacttttgtcaatgtataaactatgtccccatgttggtttctaggtaactatgtttgaacaattggtactgcggtacgtgtccataatattagttgtctgatatttaaaaatggactaatttgttgaaaggagttaagtggcacatgcagatatatatataaaataggaagggaaagcaacaactgttgctttttacacagattgcgttgatagg

SEQ ID NO: 18292 - DNA, 445 bp, Glycine max
cccacgcgtccggtaatccataagtcatcgcttgtgtgggaaaactgccttctattcatgtgcatcatcctgtattaaatatataacgtgttcgtttcattttcttgatgttaggggtggaaattttttatttttcatgtgctatttcatgtacagtattgttgtattgggatgcgaattataatagtactaattgttattaaaaaccctaaacataataaaatgggctaagtagcaaattgtttcagtagtcatgttttttgtactaattttatttgttttcaactcagtttaaggtggttgtgttattgttcacatggagaaaataaacagtgggggttcttccatcagagggcgttcattgagcatatcaagtcacataagccatcatacagacaatgatgatgatgctgaatgtgagagtgtttcagaggctggagacatt

SEQ ID NO: 18293 - DNA, 427 bp, Glycine max
cccaaagagaatcaaatcaaaacagagtggaagaggcatggagtcagtgactactcggctttccccaaacgtagttggaggggcaaactcccaacatggcgtggagtggtgtgggcactttcagatgccactgcactatccaaggtacacccaagctgactatgaggcaatgccagagtggaggcttgactgcttgctcaaagagtatggcttaccaatctttggggatgttgagagcaagagaaagtttgccatgggtgccttcctatggatcaagtgagcttccaatgttcttaggcatgttcttgccatgaccctcttggaattttgcacttgttatatttgatataagtgtgggagtttttaataatgattagtattagttagttaatactagtatgttgtggtataattaacacataattat

SEQ ID NO: 18294 - DNA, 513 bp, Glycine max
aacgaaacataggtatcaactgggaatacgaggccatagatatatctgtcgccaattctttggttcctcattacttctttgatccacaatatttcaaaatcctcactctctctcttccactcttttgctgttcccctttcccaatccacacctcattcatcagcccctttccgtgattgatacacgactcattgacttgatagcatacacccgtagcaacatgagggcatggcattagttaagctagataaactataaaatgctgtcaactactgccgctgctcagcttccaagttgctgatagccgaattcccctcagaaacttctatggcctaagtcttcctcaaacccataattgcagcaaagggaaagaaagcaataacagggctagatacaattccaatttaaatcagaaccacagacatttattatttctacagttcttccctgacagtgacacagaagacagcaataatcaaaatccaagaaccagaaaccactgtcaacatcaag

SEQ ID NO: 18295 - DNA, 546 bp, Glycine max
cccaactaaaagtctccacattattatagagcaacaacaataataataatatgggtaacagcttaaggtgttgtttggcttgcgttcttccgtgtggagccctagacttgatccgcatagtgcacttgaacgggtacgtggaagaaatcacgcgtccaatcacggcgggggaagttcttaaagcgaatccaaaccatgtcttgagcaaaccgacctcccaaggcgtggttcgccggattctgatcctctcaccagataccgaactcaagagaggaggcatatacttcttgatcccgacagcatcgctgccggaaaaaaagaaaagacgttgcagtgacgatggtggtaatgataatgatcatcctaataagaatgaccttgtcaaagtgtcttccaagaagagcatgaagagcaaccatgatttgccatcatcacaacaatgtgataatgagggctttgtactttctaaggagaagaaatgctcacggcgggatcaccggagccgtcgcggcggattgtggcagcctcggttggagagcatctcag

SEQ ID NO: 18296 - DNA, 490 bp, Glycine max
gatagatttgatttttgtttgataccatttccttgaagtgaagcaattgataaatttattgcgattgagaatcggagaagagaagcaaaataaaagggatgcgagtggcgcgagaagaagcaatgggtggtggaaagcggaacacggtggagacattcttcttagccactctaattctctggttcgcttccctttgtttccagattttgttgaacaagcgctgggagcttctctctgtcatcgcgggttctatcttctaccagacatctaactgcctcatccgattcttctccccacataaagacaaagacgctctcttcgttaacacctccgtctctcttctccactctctcctcacctcctcctcagtgatcttcatcttgttcagagagttgttaagtaatgggccaagtggaatgtctggccactcacagttggtcgaagatgcttggtcatgggcatttgaagcgttgggcttgtcttgtggcta

SEQ ID NO: 18297 - DNA, 673 bp, Glycine max
cacacaagaaaatccatggttttacaccattacccatgaaaatgtgaattcgggagccatgtacgagccttctttgaaaaaatggcatcatccaactatatcaacaccgcccacaaaattgattgtcttacctgtggcttcttctggcggcttagtttgctttcttgacattggtcatcgaaacttctttgtttgtaacccactgactcaatccttcaaggagttgccagctcgatcagtcaaggtctggtctcgtgttgctgtagggatgatggcaaatggaaactttgctggttcaggctacaagatcgtatgggtaggttgtgatggagaatatgaagtatacgactcagtcagaaattcttggagtcgtccgggaaacatgcctgcgggcatgaagctgccattgtcgctcaactttaggtctcaagctgtctctattggcagcacactttatttcatgcgttcagacccagacgggattgtttcctatgatatggcaactggggtttggaaacaatatataatcccagcgccattgcatctgactgatcacactctggctgagtgtgatggccagatcatgctcgtgggtttgctcacgaagaatgcagccacttgtgtatgcatatgggagttgcagaaaatgactctcttgtggaaggaggttgac

SEQ ID NO: 18298 - DNA, 488 bp, Glycine max
taaactcttggtcttggagcaccgttctcttctctctgtgttagagcttctttttcctttcgctcatgcctctccagtctccaccctctctctctctctctctctcattcaccctgaaaaacaggattctgaggttttaatgactaccctccatttttgaacctctctctttctctctctccgagtctgagcctcgctcttcagactcgctttctctgctcactcagagactgagacacttatcttttctgtcattggctctctgtgtttgcttccaaaagctctacacgataagccaaagattgaaagaccctctctagcctattctctgttttttttccctgtcccagttgctcagatctactaccacccctttctgcattcccgtttttgtttcaatcttttggtccattgcgttgtaagaccatgagtaaagaagagtttttgaagatacagaaatgtgttctcaaagtgaacatacactgtga

SEQ ID NO: 18299 - DNA, 552 bp, Glycine max
aacaaacccaaataggttcccaataagaaagaagagtcatcacaaggaaaaaggggaaagaaaagatgccttgcctttacatctccaccaacataaacttagatggagttaacatcgatccaatcttttctcaagccaccactgcagtttccacaatcatcggcaaaccagagaagtttgtgatggtcatattgaaggggtcagtgccaatatcttttgagggtaacaaagaaccagctgcatatgctgagatagtttcaatgggtggtataaatccagaagtgaagaggaagctaattaataccattggcaccatattgcagtccaacctatctataccaagaacaagattttttctcaaagtctttgacacaacactattccgtactaaatccaaaatgtaataatatgcttgatctgattatgacatgccccaatattgttccctaatcatttatcgatgagttttaacgtatgttgcccctaaaatatgcccatgtgattttcatttttgcactcaataaaaagaatgccccgtaatatggttatggg

SEQ ID NO: 18300 - DNA, 459 bp, Glycine max
accaattctagttttttgttctcactacttcttcatacactcacaaaacaataatagattaatatcctaatatcgtattcatattcctgagaaagtgtttgtttctctctatctatatggcagccttcatcctcatctccaagtccaagcttcaatccacagtacttgttcttgtcctaaacctatctttcttcttcctcttctgtctccttctaaaggcttattatctccaccctcctaactcaaattctcaatctaatggccccctcaaaaccttcaaccatgaaagattgttcagagatgttagtgttgaaggctgctctgacctccacaagtactcagattatgagtccaaatgtttgtatgtgaagagccatcttgactgcaggtcaaaagggtacataaactatctccaaatcttctattgcagctttgggaaatccaaattttgggacaaac

SEQ ID NO: 18301 - DNA, 447 bp, Glycine max
ccaaactcgaaacttttctgcatctcacactgtccgattcatcacaatcacatcatttattattattattattattattcggcaacaagaagcataagtctcttttgcgtgatgacgacgtgcgtatcgggcatcatcgtcggcgatccccctcatcgtcgccggtagtagcaatctccgtccccatggaaccgtaattccccaaaacggcaaaaaagtctcttcatgttcccgtcgtttacgtcctcccactgtcgttttcgcgttccgttgaattccacccacccttctcggaaaaatcaaacaaattgcgaaagcgctattattccattccaatggcgatgaaaaaggcgaccatggatcacgtgctgctagcgtcacatgatacgaatgaaacacgtcaggtgcggattcagagacttttagaatttatacacagacagaatc

SEQ ID NO: 18302 - DNA, 532 bp, Glycine max
gtaggaagccatggaaaccttctccataactggaaactcatcttccttcatcattctcactagaccatcaacgaggcacaagccaatcttcctgccacagcgtcacactttcaaccccatcagatgcaccaatactgataataataacaatagtagtagtagcagcagcagcaacacaaccaatgatgatgcaaactcggttcaagttcaagcaccaaccacgacaccaactactcccgtagaaataagcttccggagaaggtcgagaaggcaagccaaacgactgcgagagaacgagaacagcggcatgcaaaaggcgagggtggagactccccccaagaagtgggaggacatgtctctgagtgagaaagcagtagagctgtatgtgggagagaagggtgctctcttctggctcaacaagtttgcatatgcttcaatcttcatcatgattgggggatggatagccttcaagtttgtgggtcctgcattcaacctttaccagcttgatggtcctctactctccccttctgat

SEQ ID NO: 18303 - DNA, 399 bp, Glycine max
tgacctgccccccaatcccattcatcctctgactcttcttctcttcaaaacaaacaaaggaatatccgtttttccaaaactccattaccattaccattcacaatgagttattacaaccagcagcaaccgccggtcggagttccgccgccgcaaggttatccgccggaggggtacggaaaggagggatatccaccgccgggatacccgccagcgggatacccgccagccggatacccaccgccgggatatccgccacaacaaggctatcctccgccgccctacccggcgcaggggtatcctccgccctacgctcctcaatacgctcagcctccgccccgtcaacaaaattcaactggccctggttgtttggaaggctgtttggctgctctctgctgctgc

SEQ ID NO: 18304 - DNA, 270 bp, Glycine max
aagcaaacaaacaaataaatattcctatttccaaaactccatttcgcaatgagttattacaaccagcagcaacaaccgccgccagtcggagttccaccgccgcaaggttataagccggaggggtacggaaaggaaggctatccaccgccaggatacccgccgccgggatacccaccgccgggatatctgccgcaacaaggctatcctccgccgccctacccggcgcaggggtatcctccgccctacgctcctcaatacgctcagcctccg

SEQ ID NO: 18305 - DNA, 341 bp, Glycine max
cgcaggaagttcgccgagaagccgaagacgaaggagttcatcgcggcgatgaagcggtgggggctcgacccgaaggagaaggcgatgttcttgatgacggaggtgccggagaacgtgaggctatcgagcaggaacattgggaccttgaagatgcacacgccgaggacactgaatttgtatgatattcttgatgcggataagcttgtgctcacgcagggtgctgtggattacttgaatcagacgtatgggggtgattatcaagggagtgatgatgaagatgaagaagaagaagaagagggatattaaaagggtgaagaagaaagtgtaatggatggtgaaaa

SEQ ID NO: 18306 - DNA, 635 bp, Glycine max
gaatctccttcctcttcgcatcatgttctggcctgtattttttataatgaaatctagtacaataaagttttcctgattttatgctgtgtcctgtcgttagtaatgtctgttttagtacacaccttaattatcaagaacatggcttccaaaagttttaagaaactagctattttaattttggtttggcacagacacacatgcttatcagcatagtttagatttatttacactatttcctgcaacttcttctatgctgctagtcaattacttaactttaggagagttgtcgtagacatcttcctttttaatttaataagcatgttacatgcaaaccaaaattatgtagttaccaaacaaacataattttgaattcaagtaggtgccatatagttcctttgattgtagttggctgtagactgtacagggaattcaattgcactgaactccatgaataccaattgagttggatgcttggataaaaatggctgttcaaaactctctccaaataactagaagtggtagtggtggttatgacgatgacgggcgtgctaaaaggactggaactttatggagtgctgtggctcatatcatcacagccattatcggtgtggttgttctgtctttagcttggagta

SEQ ID NO: 18307 - DNA, 515 bp, Glycine max
gtacaatcctgtatgtgattctgtactttcagcagatgcaaaggggataattgaatactggagccctgctacactgcaattcccagagaatgtggtcgattttaaattgaaaagtgacactaacctctttgaaattgcaaaatgcaagacttctgtttcggctattgaggttagtccagatggtaagcaattttccatcacatcacctgaccggagaatacgtgtgttttggttcagtacgggtaaactaaggcgggtttatgatgaatcccttgaggttgctcaagatctccaaagaagtgatgctccattatacaggttggaagccattgattttggtcgaagaatggctgtcgagaaggaaatagagaagacagaaagtgcaccacttccaaatgcagtttttgacgaaagttccaattttcttatatatgcaaccttgcttgggattaaaattgttaatctgcacaccaataaagttgctcgaatacttggaaaggtggagaataatgata

SEQ ID NO: 18308 - DNA, 475 bp, Glycine max
catgatggaaaagtatagcggactggagcatttgaatgtagggagtggaaagaaggttactattaaggaattggccgagttgatgaaggaagtggtgggatttgagggggatcttgtttgggattctacgaagcctgatgggactccaaggaagctgatggatagctccaaacttgcaagcctgggttggacaccaaaagtctcactcaaggatgggcttgctgatacctacaagtggtacttggagaacgtaaatctatgattcagatggttaagcagaatgtgccgtgtcaaattttataggtacttgtcatttcacaacgaagaattttttgttaaaaaaataattatccagagaacagtacttgaccaatttttctgtaccaattatgtcatgtgcaatgaaaatttcagtgctttttttcgtgttttctagagatcacgagattaagaacccgtgttaaaaactatgaac

SEQ ID NO: 18309 - DNA, 519 bp, Glycine max
atgcactggagcaagctgagcctctttcacactttgcactctgttcaggaaaccattctgatcctgcggtacgtgtatatacaccaaagagggtgtttcaagagctagaagttgcaaaggacgaatatattcgagctaacttaggcatacgcaaggaccaaaaaatactcttaccaaagcttgttgagtcattcaccaaggactcaggtttgtgccccaatggtgtcatggatatgatcctagaaccactacccgaatccctgagaaagagtgttaagaaatgtcagcttgcaaaatcccgcaagtgcatagaatggattccacacaacttttcttttcgatacctcatatctaaggatatggtcaaatgattactttgcagcgttacttcttactgtggcaagaaaagagcatttgtttgatctatgtataattcttttttgtacaaagtagaaacggtacagcgaaatacaatattgcagtccgacaaccctgtaaataatctttgttggtactctg

SEQ ID NO: 18310 - DNA, 543 bp, Glycine max
  unsure (1)..(543): unsure at all n locations
cccacgcgtncggatagttcaaaattcacggtgggtcatttgacacatctcatgacagtatcatatcgttgttcaggcaatttgcctcattttttctttcctttccttttatctttatatatacagtttttctttactgattgcaactacaaagatgaagatttgccatgtgctactagagcataatatacgttgtagtgtcactggttgatgtcagtggaaaaatggatttggcatctgttcttttgctattgactagcttatgctcttcttctgcactgcatgagcttgattcacaagaagatgcattgtatgctttgaaggtatcattgaatgtttctgccaaccagcttacaaactggaataaaaatctagtaaacccttgtacttggtccaatgttgaatgtgaccagcttagcaacgttgttcgaatttcactagaatttatgggattcacaggatcgttgacacctagaattggatctctaaaaagtcttacaattctttctttgcaagggaataacattactggtgacataccaa

SEQ ID NO: 18311 - DNA, 556 bp, Glycine max
gtcccggaaacaagtttttaggtttgggcagtttgagtgctcagtgaaggagaaaatggcgaaggagttgttgactcttgataatggcacaacctgcacatcatggaactattctggcaccaggctcgctgcgggttccgccgatggcactctttcaatcttcgattcccgcgagccgccttcttcttcctccctccgttctactttcaaatctagggttctagaaggaaacatcgtgaagattgtttggattccgccagaatatggtgatgcagttgcgtgcatttctgccgatggaattgtgtcattgtgggaggaggtcgcagaagattcccagtctcttcagtggaagatgtgtaaaagctttggaaacagttcaagcaaagtccttgatgttcaatttggaatctctcttgctagtttgaaaatggttgctgcatattcagatggtaatgtaagagtttttgagctctcggatcccttggaactgagaaactggcagcttcaggctgaatttcaaaatgttattgagtcagtgtcttcatttggaaaggct

SEQ ID NO: 18312 - DNA, 464 bp, Glycine max
ctcctccccacaccctcctccgaaccttcccccaaaaaaccaccccccaaaagaacctccaccaaagaccggcacacgaaggtcgacgggcgcggccgccggatccgcatgccggcgccctgcgccgccagggtgttccagctcacgcgtgagctgggacacaagtctgacggcgagaccatcgagtggctcctccagcaggcggagcccgccgtcatcgccgccaccggcaccggcaccatccccgccaacttcacctccctcaacatctccctccgcagctccggctcatccatgtccgttccctcccaactacgatccagctacttccacaactcaaacttctccctccaacctagaagaagcctattcctagaaaacaccaacactccttccacaacaacaacactccttcatttccaatccaacaacaacaacgccatcttccaacccaagcacgaatt

SEQ ID NO: 18313 - DNA, 464 bp, Glycine max
aaaagtgcttatagagaagcttggttatatgagataacaagatcatggaattggaagctgatcatcaaaatgggattcgaagcagactcaatttccctctgcagctgttagagaaaaaggacattgatgacgtcacggaacaaccttgttccaccaccagcgtggtaactgctactactactgctattactactactactacttcagataacaacgacctccacttggcggagcagtccaagaagcctccgccgaaacggagttccaccaaggaccgccacacgaaggtcgatgggcgaggccgccggatccgcatgccggcggcctgcgctgccagagtgttccagctcacgcgtgagctgggacataagtctgacggcgagaccatcgagtggctcctccagcaggcggagcccgccgtcatcgccgccactgggacaggcaccattcccgccaacttcacc

SEQ ID NO: 18314 - DNA, 409 bp, Glycine max
catattataaatctccgcgcctgcaacccttgcaatttttggcactggtttgcgttgtttcgcggcgttgttaacttcccttcactccaaacaccttccatctccaaacatgggtcggaaacacgacgccgttttggtcagcgaaccagtcgccgaagaagttccctacagccccgagctcgattccgagaagaagaagaagaagaagaaaaggaagaacaagaacaaagacaagcaccaaaccgatagcagcaccaaacgaaagctcgacgaacaactcgaccctcaaaacggcaccgaatcgagtaagaagaaaaagaagcaccacgagtccaaacagaacgccgaggaaaccaacggcaacaacaacagtgacaacggtgctaatcgcgacgaaacggtggcggac

SEQ ID NO: 18315 - DNA, 308 bp, Glycine max
gagaaaaaagaaaagaatacaaactctacacaaaaaaggaggtaatggggttgatcaaagcagcaattggagatggagttttaacatcaatgtgggttttcatgatctcaacattgaggattgtcacaactgaggtggcacttttccttggcctccaacctctttcacttgcaggcctcataatcagcaccatcctaaacagtttctatgtcctcaccataagcttcattggaagaatcttaggtggtgcaaacgtcaacccttcaacaagtctttcattctacactgcagggttgaggcctgactca

SEQ ID NO: 18316 - DNA, 547 bp, Glycine max
cccacgcgtccgctcaatgtgaatttgggccgaacacccgtctctctccgggacagttctggtgtgcagagtacactactcttctccatcaacaaccaccaccagattctcgtttaggtcattcttctctctcccttcgcactcaacaatgtcattcttctctctttccataccctaaaaccgaaaagtgttccacttttctcctctcacacacattcccccaattccccctttcttccaccgttatgtcgggccggaaccgcggacaacccctttcttcgccgcacgcggcggggctgtcgccgccgctccacgatcagctatacggcgcgcgggcccaccaccaccatcatctagtgggccccgtccctccccatccccaccaccttctagaagacttccgcgactcgcagctaaggctgggcccgccgcgaggtgggcccatcccgctgcatccggcggcgatcatcgaggagcgcctggccgcccagcaccaggacatccagggcctgctgggcgacaaccagcgcctggccgccacccacgt

SEQ ID NO: 18317 - DNA, 554 bp, Glycine max
aggagctcaaactgcgtttagaggctttggagcaggaagcacagcttagagaagatctcaatgaggcattgaaggaagaactgcagcgccttagggcacaaagtactcgtttgggtgctattggtggtaacccttcttttggtgggatattcaaccagttggcttcccaattagccatgcaacagttgtctaattctgcaccccatcagcagacacaacaccagccacaggttggcatgcctcctcctccctctggacagaaccaccctaacttcatggacttcaatcagcagaagtaactcataatagcagtagcagtaaatgattgattacatgaatgtataactggtgagacttgtgaagggtatattgtgcagttcagtgtctttagtcctgtgttgtttatcttcagctctaggatgtgtactttacgcagttctaggttagaagcgcagcctctgaaatgttgtgttatagctcttgggtgaatgaagttaacataaatatgtagaaagacttgttgataatactatagatggtgaatgaagtttatt

SEQ ID NO: 18318 - DNA, 657 bp, Glycine max
  unsure (1)..(657): unsure at all n locations
acgagcggcacgagatcaattgcaggtgctgttgctggtgttagctcaaccctatgtacatacctcttgaactactcaaaactcgccttactgttcagagaggggtgtacaagaacttacttgacgcattcgtgagaattattcaagaggaaggtcctgcagaattatacagaggcctcacctctagtctaattggtgtagtcccttatgctgccgcaaactaccttgcttatgacacacttagaaaagcttacaagaaagctttcaaaaaggaggagattgggaatgtgatgactcttctaattggatcagctgctggtgcaatttcgagcagtgcaacatttccacttgaggtggctcgtgagcatatgcaagctggggctctaaatggaagacaatatgggaacttgcttcatgcccttgtgagtatacttgaaaaggagggagttggtggcttgtatagaggcttgggaccaagttgcttaaaattggttcctgctgctgggatttctttcatgtgctacgaagcttgcaagaggatacttgttgaaaatgaacaagattaattacaagtggatcactgcatattctttccatgggatatatnggcattgntttgtgtttatgaagagggaaataatttgtcgagctaatttt

SEQ ID NO: 18319 - DNA, 274 bp, Glycine max
cgccattttacactcttttgttctgtggctaagccgtctctctcactcaacttttcttctgcatatatttctatgagtcatgagttatgagttattcttcagccactgttggtttggttcattgtgtgtctctctcagtcgaatccaatgagaattccccatgttcccttcctttccttcatattctgctactgcttcttgatacaccacagtgtttactacaccggggtaaaagcccaaattgttgaggatcaacaacaatcattgctcaaac

SEQ ID NO: 18320 - DNA, 1035 bp, Glycine max
gagcccttccgcttcaccgacctctccttcatccgccaacggtatcgccgctcccgatttaactctcgtctatgtccccgagggctgccacgtcgacatccccatccactggactacatgctccctcccactccctccaccgatgattccgacgccgccatgcatctctccaatcctagggctcgggtcgtcgtcgagaaaggagcacacgtcaatataatcgaggactttcccgcttctccagagaatcagaatgactcttactggagtaatgccgcatttgaggcagtgattggtcaaggtgcagagcttacgcattcttatattcaaactcagtctttccgtgctgctcacatcaaatggacctccattcgccaggaagcttctagtacatatgagcttacagaggtaagcacgggaggaaaactggggaggcacaatcttcatatccagcaattgggcccagacaccgtcactgagttatcaactttgcacttgtctgttgctgatcaaacgcaggatctccacagtactcttgtgttggatcatccacgcggctattctcggcaactccataaatgcattgtcacacattcacagggacaagcagtttttgatggaaacattaaggttaacaggtatgctcagcagacagatgcaggacagttaacaagaacacttctgcttgaacctcgtgagactgtaaatgttaaactgaatcttcagattgtggctgatgatgttaagtgctcccatggagctgctatcagcgacctggaagaaagtcaactcttatatttccaagctcacggcatttacatagagattgctagaagagttctggtttttgcttttgggagtaaggtgatagataagtttccttattcttccattagagtcagagtgcgtagtcagattaaatatttgttggatccatcatcgaattgatcatcattttaggggtgtcttgaatgtaaacattttaagctacctgatgcaatgattaactgaaatcacaatgaaactcgtttcccc

SEQ ID NO: 18321 - DNA, 569 bp, Glycine max
cccacgcgtccgtccacgcgtacgcaacagtggactagttggtcttcaacggcaaattatgagagagcaagacgatggccttgagaaattggaggagactgtaatcagtactaaacatattgcattggctgtgaatgaagagctgaatctacataccagactcattgatgacttggaccaacatgtagatgttacagattctcggctgaggagagtgcagaagaacttggcagtgttaaacaaacgtaccaagggtggttgctcctgcttgtgcatgcttttatcagtgattggtatagtgggtttggtggttgtcatatggctgttggtcaaatatttgtaaagataaaaaatacccaactcgtgaagtttctctttttttcatgtttctgaatgtgcattgaaacatgataacgtgtttctttgttttttcttggtgctttggcagtggcatggaatttattaaggtattgaaaggcttttttatgtaattgtcagatttcaaatgttgatacccttgagtgttgttctctttgtaaaaatcagtaaaattgaggtgacttccattt

SEQ ID NO: 18322 - DNA, 448 bp, Glycine max
gtagatgttacagattctcggctgaggagagtgcagaagaacttggcagtgttaaacaaacgcaccaagggtggttgctcctgcttgtgcatgcttttatcagtcattggtatagtgggtttggttgttgtcatatggctgctggtcaaatatttgtaaagataaaaatatccaaactcgtgaagtttctctttatgtttctgaatgtgtgcactgaaacatgattgatttttcttggtgctttggcaatgacatggaatttatcaaggtattgaaaggctttattatgtaattgtcagatttgaaatgttgatccccttgagttctctttgtaaaaatcagtcaattgaggtgacttccattaatgacttgagctcttgcactctgagcgtttgcgtgggtgggaagggaaataatatgtattgcagaagccgccatttcgttttac

SEQ ID NO: 18323 - DNA, 700 bp, Glycine max
catgagtctgctgataagacaaagaagcaagttatcaaagcagtagagaaggttttggcaggatctataaggagagaaatggcccttgaagagttctgtgccaagcagacctctgagataatgcagcttaatcgcctggtgcaacagtacaagcatgagagggaatgcaatgccataattgcacagacaagggaagataaaattcttcgccttgagagccttatggatggtgttttacccactgaagagttcatggaggaagagctagtggctcttacccatgaacataaggttttaaaggataagtacgagaatcatccagaagtttggaagatggagatagagttgaaaaaagtgcgagaggaactagagacgtatcaaaatttctacgaattgggggagagagaagtgctgatggaagagatacaaagcttatgaagccaacttgaattttatgttgactctttattcacatcatcaaggaagcaatatccgttattgtaattgacttactctgctgaaccacagatgtgagcgaccctcactgtcattccagagttgacagaggagacagaagacacagatgaaacttgtgcatcatacaagaatgatactggagcacaatttgaacaagaaagaattaaattgacagatgcagaaagcacgttgattgctctttctgaagaactgaaagctgagc

SEQ ID NO: 18324 - DNA, 467 bp, Glycine max
  unsure (1)..(467): unsure at all n locations
aaaaagtgcatcatatttcccacgctacagtgtatttatnntacatgatttnaaagccaagagaacttgatgttaacgtgcatgcaataaaaggtatttatataatcttggttaagccacaggagaagaatcagaagcattctatttccgaagcctactagttgtcctttgtcctttctgggtttgcagaatttcttacaaccctgtatcaaacaaggcatctttgattcttctctctcacacttcttttggcacttcatgcttcaactctgacttagctccttgccttcaatataccagacatgctattctattgagccctgaataatataatccataagacagaagacagtgaagaggcatggcatccctcattcctggagttctactgaagcttctccatagtatggattctgatgtgaaaggtaatggggaatatacatcagtccttctgcatgtgatcaaca

SEQ ID NO: 18325 - DNA, 603 bp, Glycine max
aatgtattatttaaagttggcaattatcagcgagcaggaaagaaatatgaaaaggctgctgattttgttgatgaagacggatcctttggggttgatgagcaaaagcaagctcagacactgagagtgtcatgctggttgaacggtgcagcttgtagccttaaacttaatgactttcctggagcaatcaagctatgttcacaggtgcttgatgttgaattttgcaacgcgaaagctttttacagacgagcacaagcatatatagaaactggagattaccttttagcagatgtagacatcaagaaagctcttgtggtggacccacaaatcagagatgttaaggtaattcaaaagacatggaagcatcttgaagctgacagtgacaaagtagatgctagactatatgaaaacatgcttggatgtgaaacagacgacccatctatggctataaagagattgaacgtcgagaacgatgaggcggataatgtagaggttgcatgaatggaaattgacgaacttgctgatagcgcaatgattcaatagatgattcatggtgaacatgtatagagtataatataaagcttctattaacaaaatactgaaact

SEQ ID NO: 18326 - DNA, 543 bp, Glycine max
  unsure (1)..(543): unsure at all n locations
gggacaatgactatgtggtcgttagttactgccactggtttttggttggatgatgctgttgggagtttcattgcctcacttctcattcttaacgattccttttgagttgagttcagataccagaaaaccgaagtgaagggagtgagagatgacagtactgtctccttctctttctctgccaaagttgcattcttcttttctttgttgccctctaaaatccaagctatcatcatcagctacaaatagaattcaacaaaaacccacttcttatccacgcattagagctttggaccttgatcaaaacacggttgtggctataagtgtaggccttgttagtgtggctgttgggattggcattccagtgttctatgaaacccaaattgataatgctgctaagcgagaaaacacacagccctgtttcccatgcaatggatctggcgctcgtaagtattttcctcttcatcatttntcatacttaaagcttggactctatagggaaattaaattttcaatgttgaccattattaaagcangtcacaattt

SEQ ID NO: 18327 - DNA, 478 bp, Glycine max
  unsure (1)..(478): unsure at all n locations
gattgcctcaattctcatttttcagttgagttcagataccataaccataccataccataccagaaaattaaactgaagtgagagagagatgacagtactgtctccttctctttctcggcctaagttgcaatcttcctttctttgttgccctctcaaatattctaagcctacaaatagaaatattcaaccaaaacccacttcttatccacgcattagagctttggaccttgatcaaaacacggtagtggctataagtgtaggtgttgttagtgtggctgttgggattggcattccagtgttctatgaaacccaaattgataatgctgtgaagtgtttttgactccacactataacatttattttatgtattctaatctaatattcgtttggcaattctagttgggttttgattacagcttctctttgtttcangctaagcgaagaaacacacagcccttgttcccatgcaatggatctg

SEQ ID NO: 18328 - DNA, 833 bp, Glycine max
tggacgcgtgggctgatatgatacattccctctgtctctctctctttcactcactcaaactcactatataagattcccttctcggcccattcttcttcttctgctacaccattcattcgagcattcggttttgaatcttttgagcgaaaatgcagtcgagtcctttgcttctggaggaacccataaggatggcctccatcctcgagccatccaagcctagtttctttccagcgatgacaaagattgttggcacacttggcccaaagtcacgatcggttgacgtgatttcccaatgtcttgaggcaggaatgtctgtggcaaggtttgatttttcatggggtgatcctgaataccaccaagagacgttggaaaatttaagggctgctatcaaaagtaccaagaaactttgtgcggttatgctagataccgtgggcccacatccacaagtagtcaacaaaactgagcacccaatttcccttcaggctgacacattggttgtcttaactcctgatcagaacaaagaagctacttcaaatcttttacctgtaaattttagtggactttcaaaggctgtgaagaatggtgatactatttttattggtcaatacctgtttactggaagtgaaacaacctcagtgtggctagaggtcagcgaagtgaatggtgatgatgtcacttgtgtcataaaaaattctgctactcttgctgggtcactgtatactttacatgtctctcaaattcatatcgaccttcccactcttgacaataaggataaggaggtaataagcacttggggtgctcaaaacaatatagacttcctttcattatcatac

SEQ ID NO: 18329 - DNA, 221 bp, Glycine max
tccacgcgtccgcccacgcgtccgcccactcgtccgatttatttgtcttttcataggtatgcgcttatctaaagtgggggaaaagataaggctaatttgcacattgattggatggtgtcatcaagagtatgatacacctgaaatttgttgatatgtatgatactgtagtcttgacatgttataggtaaatatatgatgtccatgaatgaatggcttgttat

SEQ ID NO: 18330 - DNA, 439 bp, Glycine max
ctctctctctctttggaatcttccttctgcttggaaccctaaaaatctgattacgtacctacccattatttaattggtccgtttttataattggggttgtcggctgaactaattaatcatttggggttggaggaacaagaggagtgagagcttcaatttttctgtttttaaaaattagggcttcttcatttggtacccgattcccttgtttcttgggcttctggaattgatgcaaattttaggtctggtgggtggtggttgttaaatcaaatcgacgacaaaaattagttttttttcttcttctggggtgttgggatatggatttgggggtttctgatgagatgttaggcacttttgtgccaatagtagtttactggatttattctgggatttacgttgttctggggctgtttgctgagaattatcggttacattcgaa

SEQ ID NO: 18331 - DNA, 402 bp, Glycine max
cccacgcgtccggttaaggactagagaatttccataggacttcaagaagacagtgggcagggctgggcttttcatatggagaaatatttctgttgcttggagctactgctgctctgatagggccaaaggatttaccaatcatatgcagaacagcaggaaggctagctggtcgagctattggatatgtacaattggctcgtggtcagtttgacactgttatgcagcaatctcaagctcgccaggttcataaggaactgcaagacacaatggctcagctagatgccattcgccatgaaattcgaagtatatcaatcataaatcctggccctttgacgcggaggcttgtggatgatcctgaccagacatctatctcaaatgaaagtaggaaaccagaaaaatctg

SEQ ID NO: 18332 - DNA, 482 bp, Glycine max
  unsure (1)..(482): unsure at all n locations
ggagatcaagcaccaaacccaacacacacctctctctctctctctctctctcttgtgctgttgttcgatttctcggtctttcgcaagtgaatgttgaactgactctgcggttcggttcggtttttttttttttctgtttatggatccgggcgcgatgatgaacgagggttccttcgcgaacaatgcgagcggtaatacggcgccgtttagcttggcggagatctggcagcagttcccgccggcgattagtggcggcggtggattggggctcagaagcccgcagttcggtcacgggccaagagggcagtttggggatttcaccaccgggccgagccacggactcggacccagtaacagcagaaagcggcgcgactccgaggaggacgattccgctaagggcgtgtccaccagcaatgccgtgaatganggtgatggaaaacgtgttaaagggaataggaacgaaggtggtggtgatggtggta

SEQ ID NO: 18333 - DNA, 388 bp, Glycine max
ctccttcctcgtaacaatgtccgccacggaaaccacgcccgaacaaccctccactccgccgcaaacggaggctccgccgcagcccgacccctccgccgccgtctccttcagcatatggccccccactcagcgcacccgcgacgccgtcgtcaaacgcttgatcgagaccctctccgccccctccgtcctctccaagcgctacggcactctctcctccgacgaagcctccgccgccgcccgacagatcgaggacgaggccttctgcgccgccaccgcagcctccgcttcggccgccgccgacggcattgagaccctccaagtctactccaaggagatcagcaagcggatgctcgacaccgtcaaggccagagcttcgtcgagtcccgcc

SEQ ID NO: 18334 - DNA, 440 bp, Glycine max
cccactggtcacgtgttggtccaaacatccttcttctttttattttccgcactttaaaaaccagtattccacaacacacaccaccaaatctccttcctcgtaacaatgtccgacacggaaaccacgctcgagcaacgctccactccgccgcatgcccgacccctccgccgccgtatccttcagcatatggccccccactcagcgcacccgcgacgccgtcgtcaaccgcttgatcgagaccctttccgccccctccgtcctctccaagcgctacggcactctctcctccgacgaatcctcctccgccgcccgccagatcgaggacgaggccttctccgctgcctcctcttccgacggcattgagaccctccaggtctactccaaggagatcagcaagcgcatgctcgacaccgttaaggccagagctgcgccgattccct

SEQ ID NO: 18335 - DNA, 1115 bp, Glycine max
  unsure (1)..(1115): unsure at all n locations
gggctgctcgtttcgcggcncgggattcacgcttctcccacaagaacgcgctacagcgctgcctggaacacgccaggctgtggcttaccaagtcggagcagcccattgaacctgatactgatgttacttatgctgcattgagggagaagttgaacaagattatgtcttcggagtactttactacgacacctgagatgaaggctccggttgaagttgctgcggcagctgctgggggaaattacgtttccttccatgtgccggtgcatgggtctgtggttccggttgaagtggagcagcctgtttttcagtctcaggagaaggatgaaggaactgcaattcaaggacatggatctgaagaagatccctctgatcctgagggagagcttctgaaggatgaagtagaagcagaaaatgcaggtgaagtggtgtcagctcaacatgaacaggcgaaccaacaagcagatgtagagtataatgagcgagatgtagaggcaaaggaccagcagtcataccccaggaggggttatcagaaccatagaggtggtcgtggtggaggtggtcgcaggggttactcaaatggtcgtggaggtcgaagtggtggcagaggaggctaccaaaacgggcgcaatcaatactacgatcagcctggaaattattatccaaggaacaactattataacaacagaggaaggggcggcagaggtggtggctattacaacaaccatggtgcaggcggtcaagttaatcatgtcgcaggtgatgtgggggtgcaatcatgataagttatgagttgtttatagtggttattactgtcactagttggtggtgaaccattttttatcctcctggcatgaaaacatgttttgaacaattttgtttgacacttgaatgttcaaacgtctagactccactattttgtagtccagtggctagtgtgggcctttgtccgaaatctcactctggagattggaatgttgcccttgttttcgctttctgcgatagccgccgactagttggcacttgtgtcgccccttgtttaggtaggtagatattttcgtaaggcacaaaattgcaaaagcagtatctcgttagaaaaaaattgcaattgcaattgc

SEQ ID NO: 18336 - DNA, 426 bp, Glycine max
cccacgcgtccggaatggcaatgcgtgtgtctccttcagcttcaagtgcactctctctcctaaactgcaagcaaccacctccagtttcatgcatccgtgtaccttgtctctctcgctcctcgccgccatcgctctcctacaccttcaatcctcttaggtccttcatcggtcacggcggaagcagaagcccagggtttcgtgtccattgctacgctcctgctcctctcactcctcccaatctgcaatggatctctaccatttcctcagtggttttgatactggcgagaggcaccgcggtgccgaaatcgtatattgttccgttgtttgctctgcaagcacctgcaggtgtcgtttcctggatcaaaggtagatatggtgtgtggacagcattcttggcacttctgattcgtctattcttctatattc

SEQ ID NO: 18337 - DNA, 622 bp, Glycine max
cctatatttacaacgcaatgaatgaatcatgtattgtgtggatgaggacagtgtagtgtagtgccattgagaagcattaatgatactagttagccatatccaagctccttgcgtaggagccatgttttcaaagtgttgttctctattgtctctacccaaattcatcactgttacaaacccaccaacgttttccaaccctgtacctaatttcatcactagaagaataagctccacaagaccctttcatctcacactcgccaaagcagagggaaacctcgattcagattcaccctcaaccgccacttcctctccttctccttctccttttgccactgaccaaacggttttcgtgactggcgaggatgttccattggagggtgtcatccagttcgagaaacccacctcttctcctccttttgaaaaatgggggcgtgtggctctgctagctggtgcggatgtgttggccttgtttgtgttttcgacaattggaagatatagtcatggactttctgttttggaccttgagacactgcgcactgctgacccttttattgcggggtggtttttgggtgcttacttccttggaggttttggggaggatggccgcgggatgaacggtctc

SEQ ID NO: 18338 - DNA, 587 bp, Glycine max
gtagtcttaaaatcacacatgtaacgtgtaaaatcaaacacgctgtagtaaaatatgcttaatagagtcacaagcaatgggctatgagacatacgggattaggtgagaggaaattaacgtctgtgtaattaaattggtcaaacaaacaaaggagatagataattgtttttggaaaaactagagtctagagtgaggtttgagaattttttttgggaaggatgagatcaatcttcccttatctatctatttatatacaaaatgtgttgcaataactcttcactttgtaacattaatccacagctagcaacagaagatgtcgatcatcgagcatgtggtgttattcaaggtcaaagaagatgttgcaccgtcggaggcagataccatggtggagcgtatcaactccctagcctcgctggaacagctgcttcaccttaccgtggggccattatttcgcatccgaacctcccccccttcgttgaaattcactcacttcttccacacgcgtttcaactccaaggacgacctccgctcctatgtggcgcacccagcccacgtggccgtcgtcaaggccaacacgcccttggtcg

SEQ ID NO: 18339 - DNA, 1374 bp, Glycine max
agacgggccccattaccattttactgagaagagtataatggagaaagaaatcaaagagggaaagcttcttgagtttgcttccgtccatggtaatctgtatggaacaagtgttgaggctgtcgaactggtatcagatgcagggaaaagatgtattcttgatattgacgttcaaggtgcaagatctgtgagggccagttctcttgaagccatattcatctttatctgtactccatcaatggaggagctggagaagcgccttcgtgaccgggggacagagaccgaggaacagatccttaagcgactacgtaatgctgaggctgagattgagcaagggaaatcttctcaagtatttgatttcatcctatacaatgaaaaacttgaggagtgttatgagagacttaagaaactattgggacttgacggtttcatcactgctccacctaaatccggacctatagagattgatttaccaatggaccattcagtgtccaaaattgataacaaaatcatcataaactgcatctcctcaggagaaaaggaatccaagaatttgatcattttggatgtttcctcactaaaagggggtgtacctggacggacaagaggcctaaatttccaagccattggctcgttctcaaatggcttgaatgggatagatcaacttagctaacattcaatgaacttggccaactaacttggtattgaagaaatgggacacattgataaggcattggattcacgtcttaaacattttttgtaggcttaattatacaattggttccttaattataattaaaagttcaatttggtgtctcaattattaaaaaatttaatatggtccctcaattactaaaaagttaggtcctctaattatttgaaaacactataatcataccctttttgtcagttacactagtttgattgatgtgtttgtaaactaacagcaaggttacaattatagtgtttttaaaaaattaaaagtcttaattgaactttttaataattaagggacctaattgaacttttaattctaattaaaggatcaattgtataattattattattttttaccctcgtggcgttctttgattgttatgactattgaattgacttgagagttggcaatcgctccattattattccctacacaggcaatgagattatgttattgtgtgcaaaggaaggcaaactatggtgtacgtttctctattcccccaccctaagatctgttgtatgaagggggcctacaaaatgaatacttcaaattcaaagatgtatgtcagatattaggtgttagagtaggcatggctattcattgattcaagccatacgttttacacattaaatttgttggatacatgctttatgtgatga

SEQ ID NO: 18340 - DNA, 621 bp, Glycine max
  unsure (1)..(621): unsure at all n locations
ctgaacacgttacttattttgcattaaaaggtatcatactgacttagtatttgnctttgacagggtcattttggatgtttcctcactaaaaggggggtgcacctggacggacaagaggcctaaatttccaagccattggctctttctcaaatggcttgaatgggatagatcaacttagctaacattcaatgcacttggccaactaacttggtattgaagaaatgggacacattgataaggcattagattcacttcttaaacatttttttaagcattcggtaagaacttctataagcattctttgattattatggctattgagttgacttgagagatggcaattgctaaattattattccctacataggcaatgagattacttgtgtcttttgtgtgtcaaggaagacaaaatatggtgtacgtttctctattccccccaccccaagatctgttatagtaagggaatataaggggggccgacaacatgaatacttcgaattcaaagatgtctgtcaaataataggtgttatactaggcatggatattcattgattcaagccatatgtttaaccccttccctttgttggatgcctgttttaaaacataacaaagttctttaag

SEQ ID NO: 18341 - DNA, 363 bp, Glycine max
gtaatctttaagaattctcccttttggaacatacacccggtttacagcagcaacgttgtttcgaggtgtcacgattttggctcctcgtgactctccaaatactgatggcattgatccggattcaagttcaaatgtgtgcatagaggattcatacacatctactggagatgatcttgtggctgtgaagagtggatgggatgaatatgggattgcttatggccgtcctagctctgacatcacgatccggcgcataactggatcgtctccatttgctgggattgctattggcagtgaaacctctggtggggtggagaatgtacttgctgagcacatcaacctttacaacatgggaattggtatcca

SEQ ID NO: 18342 - DNA, 426 bp, Glycine max
ctcttcttcattttccaacaacatattttgccagaattgaacatgcacaagatgactggccttgctcttggtggagtggtggcggctattttaatggttctacagtacgcagaggcacagacaagttacgttgttggagatggcacgggttggagagttccacaagatgcttccacataccaaaattgggcttctgacaagaatttcacagttggagatactctatcattcattttccagacagggttgcataacgtaattgaagtgtcggaagagtcatacaattcgtgcagttcagcgaatcctataggtacaacctacaacacgggccctgccaacgttacactgaacagaggtggtgaacattactacatttgtagcttttgtaatcactgcaacaatggcagaaggtaggcatcactgtct

SEQ ID NO: 18343 - DNA, 370 bp, Glycine max
gcttcctcttctgcaacagacattccttccgggccttctctaaacagatggcagaccactagagcatacggcgattacaagaaacgagctgggttgtgcagatgaggaaatagagttgagcactgacaacattaaggagcaaagatttatggctacctcttctgccgtagacattcctgttgagcaactcacaacaagttgtagaaagctagatgatacggagattacaagaaatgatctgtgttgtgcagacagaaattttgctggcaaccaaaagaacaaacttctcatccttgatctgaatggactgcttgctgattttgtcagtatcagtgacactgacacttctttccgaagatatagacgagaa

SEQ ID NO: 18344 - DNA, 359 bp, Glycine max
aaacagatggcagaccactagatcatactgagattacaagaaatgatctgtgttgtgcagatgaggaaatagagttgagcactgacaacattaaggagcaaagatttatggctacctcttctgccgtagacattcctgttgagcaactcgaaacaagttgtagaaagctagataatacggagattacaagacatgatctgtgttgtgcaggtgatgtttctgatttaagcttagacacagtaagagacggtcatttaaagatttcacaattctcactagacagaaattttgccgacaaacaaaagaataagcttctcatccttgatttgaatggactgcttgctgattttgtcagtatc

SEQ ID NO: 18345 - DNA, 464 bp, Glycine max
aagtgaagtttcctaacacggggtttgcttagctgttgtttgtcttttctctcttctaacttctgccccagttggaggctctaatggtttgaggaatctgttatggaggttttgggaaatgggtggagggtggttctggaaattggtggctttgaagaaatgcaaaattaggacatttctatcacctaaagcttcatgatagtcaggttaggactcatagttgctgcttcacttgcagcttttactgttaagcagctgaatgtcaaaagctcaaaaccagaacttaaagatgagggctcagaagaggagcatgtcccccgagtgactgatcgtctccaagagaatgaaggggaggaggaagaagagaaagaggaggttaagttaattagcagcataattaatcgagcgaatgactctgaagatgatattctaccagaatttgaagatcttctgtctggggagat

SEQ ID NO: 18346 - DNA, 360 bp, Glycine max
tgctgaatttggacatttttatcacctaaagcttcatgatagtcaggttaggactcatagttgctgcttcacttgcagcttttactgttaagcagctgaatgtctaaagctcaaaaccagaacttaaagatgagtgcacagaagaggagcatgttcttcaagacaatgaaagggtggtggaagaggagaaagaggaggttaagttaattaccagcataattaatacagcgaatgactttgaggatgatattctaccagaatttgaagatcttctgcctggggagattgagattccattaccacctgataaggatgagaaagacaaagtttatgaaattgagatggcaaacaatgcaagtg

SEQ ID NO: 18347 - DNA, 389 bp, Glycine max
  unsure (1)..(389): unsure at all n locations
cccacgcgtccggctaaacaagggatctattacctgaagaaggtttttggattgagggatattgtcagcgtaagaaagaagtctattggaaggttagattggaaaagttgggcacctgggctcgtaagaacttggtgaatggtgataagtgacctgcatatcttggaaagaaaaatcttcttcccctacagtcacctgctaatcgcaatgtttgttgatcacatagttttcagtcagtgaaatcaacattgtcaggcacacacgttacaacaagctggtatatatccaattttgtatcagttaataatcgtatgtacaggttaatatttgggaaagctataatttgttaaatgatttggccttctcatattctnttctntnnttttttt

SEQ ID NO: 18348 - DNA, 794 bp, Glycine max
ttgttgcgcgcccctcccattgttcgtaggcaacttcaacctcaccaaaggaactaagaatttcattgaggctagagaaagtggtgatcaatatgtcaaagaatccaaaagttttctttgatattctaattggaaagatgaaagctggacgagtagtgatggagttgtttgccgatgcaaccccaaaaacagctgaaaacttcagggctctctgcactggggaaaaggggattggacgatctgggaaacctttacactacaaaggttctgtatttcatcgtattattccagaatttatgtgtcagggaggagatttcacaagagggaatgggaccgggggtgagtcaatctacggttccaaatttgaagatgagaatttcaatttgaggcataccggtcctggtattctctccatggcaaatgctggagctcatactaatggttctcagttcttcatatgtactgcaaagacaccatggcttgatgggaaacatgttgtgtttggaaaagttgttgatggatacagcgttgtggaggagatggagaaagtgggttcaggaagtggcaggacatctgaaccggtagtgatcgaagattgtggccagatagtagagaaatgagttgatacaatgatgtttcgtgacatgttatataggatgttaatattcaatgcaaattactagtattataataagatttgtgttgtattaggagtcaactttttcgtatccagtattattgcaactcccaattcttgcatatggtggtaagcaacgcgttgctttctagtgaaa

SEQ ID NO: 18349 - DNA, 445 bp, Glycine max
agttcttcatatgtactacaaagacaccatggcttgatgggaaacatgttgtgtttggaaaagttgttgatggatacagcgttgtgcaggaaagggagaaagtgggttcaggaagtgccaggacatctgaaccggtagtaatagaagattgtcgccagattgtagagaagtgagtcttgatacaacgatgtttcgagacatgtttgttgctattcaatgcaaatcactagtattataataagtgatttgtgtaactaggagtcaattgtccagtattaatgtaactctcaaatttgtactcctaaatctgcttttacatttgttccaactaaaaatgcgtagctgtctgtagttggtcagagattacgttgatagaattgtggaagcaataggctcgaatatccgtagttgattggtaaattagaatgaataaggatgaagcact

SEQ ID NO: 18350 - DNA, 526 bp, Glycine max
tgcttataattctcagacccaaatcatcaaaagcggggaactggtaaagtggaaagggggaaaacaaagcccataagccatcatcatccattccatttcatttcatttggtagctcccttttctcttttttcgggtctcgtggtgttctctatttcttcacaaattaaagagggtccaaactaaactcattattcctccctgcaactctgtgttcactggttcccttgatggtaaactcttcagctcctcttcaatcatttttaaagctctgagcttaaacaaaacattggatacgacatgggttttcagaggtttctcataatatgaccaatgtttggtaagttttctgcttttgccgtttactagttgttactagtgtccaaagagagacaagggtcattttctgtgtgctggctgatctgtagttcactttgatgaggtcagatatagaacttcttggttattatacttttttctattaaaaaattcttctgcttttctgcatatgttcctgccgttctgctt

SEQ ID NO: 18351 - DNA, 403 bp, Glycine max
aatcactatatttattgagattgaaaacgcgacccatcatgtgtgtttcctgagcacacagcagaaaagaacaaacgcaggttcccaattgaaacggttctgaagaagtgaagaacaatctaggttttcctttctccgattcactcccagagcgaagaagccgccatgggaggcgaggagaagcggcaccagatgatgcagaacctcttcggagaccaatccgaggaggaggaagagctcgacgttgattctgagcacgaatcaaacccgcaactcaattacccctccgacgagggggagggggtgggggagcaggagggcgaggtggagggccagggcgaggtggagatcgagagcgacggagacggtgagcccgaccgagtgagcgagggcgagagggagc

SEQ ID NO: 18352 - DNA, 1077 bp, Glycine max
caggaggatggaaaaggaatatccacccaactttgtgtccaaagcaaagagataaagtaataaaaaagggccaaacataaagcatcaaacctgggtggggtgtggctctactgttttctcttaccataatcatcaatggcttccttatccctctcctctcccccatctctctcttccgcacaccacaacgcctccacgcgccttattctacgcacccctaactcccttaaactgcgcactccaccccactccctccccgccatccgcgccatcaccctcacccaggacgacctcaagagactcgccgccgacaaggccgtggagtccgtcaagagcggcatggtcctcggcctgggcaccggctccactgctgccttcgtcgtcgccaagcttggcgcccttctcgcctccggccaactctccgacatcgtcggtgtccccacctccaaacgcacggaggagcaggcccgctccctcggcatccccctctccgtcctcgacgacaacccccgcctcgatctcgccatcgacggcgccgacgaggtcgaccccgacctcaacctcgtcaaaggccgcggcggcgccctcctccgcgagaagatggtcgaggccgcctccgacaagttcgtcgtggtcgtcgacgacaccaagctcgtggacggcctcggcggaagcgggctggccatgccggtggaggtggtccagttctgctggaagtacaatctggatcggcttcaggagcttttcaaggaagaaggtgtggaagcaaaattgagattggaggagagtgggaaaccctacgtcaccgataattccaattacatcgtggatttgtacttcaagactccaattagggatgcattggccgcaggcgctgaaatttccgctctggaaggcgtcgtcgagcatggcttgttcctcaacatggccacttctgtcatcatcgctggcaaatctggcgttgaagtcaaggccaagtgagactctgaagtaattcgtttcttcttcttcttctcattcttgtctctgtattatttttgttttcacccgaataataataattattgcgttatttgg

SEQ ID NO: 18353 - DNA, 445 bp, Glycine max
cattgatatcccctcctccttaagaggagaagaggaagtagcagaggaagggagaagaacaaacggagcatggtttcgacgagacgcagtggatctgtctctgccaaaagatcttcctcctcggaagataaacctccttcgccgaagcgccaaaaggtcgacaatggcggttcgtcggagaaaccggtgccgacgccggcggaaaattccaaggacttatctactccggagcccgtgcttgatcccggagaatgtggctccggcgaagctcagatcgccggcgcggttgccgactatggagtgagctccggcaagggtgacgctactcctgctgtgcctgtcacggcgccgattgctgatgccgcatgtccgtcgttctcttcgtggattaattatcagaaacaaaatgcgcatatcgaacgtgcgccgcggtgcatgttcttgt

SEQ ID NO: 18354 - DNA, 312 bp, Glycine max
cccacgcgtccgcccacgcgtccgaccattgaaggcatttcagtcaacagcgtgaattcagcttcagagaagatacaggctataattgatgagacagttaatagtcgaaatcttgattattcacacttcatatcccttccattggccattcatcctgagttggttaataaactcatcagttttcagcattcaatattgggaattgggtcttgcatggatgagaatacctatactgaatctgattccaatgaggatgagggtactactactgacaccaaagaagtggaccaactatccaagaaaattccggtg

SEQ ID NO: 18355 - DNA, 866 bp, Glycine max
attcaatgggttgaattttgttggtcagccatgcagcagcaaaaagttagcagaaaaatctgctgctgctgaggctcttctatggttaaaaggggatagccattcgtctgatgatattgaccatgcatcagtgcttttgaaaaagagcaacaagaaaagtaggaaaaattcgtttagcagtgctaaatggagttgagctgcctttaaaagcttaccttggatagattcgttaatagcattgtatactgaggaaaactttccagtcattatttcaacagcaagtgtacagagctattgagagaatatatgacaggtacagaactacagatcagagcccgtgtttttgtaaagagtgattgcatcctgtctatctagatttggggcacaattcaatgagtatttgcacaattgcttttggctaattttgcccggagcagagattggctggctgagcagcttcggactacttgcaaatgaattcttacaatagaggtataagcagcaaagaattgtatccataagctgctgatgctttcgttttgcactgctctcgcggtagatatagttttcaagaggattcacttgcaacaattcattgggggacaacagaaagatcaggcattttatggaagaaataaccgtgtcctttaatttgtattcatagtcagatgtgtggtagttgctcaggaacatgtttaagttaatcaagccagctgacatagaatatatgtatttaggatcaattttaccctcaaaagcctattacgaggcttgttagttgttacacctgtgggtggatttttttttggtactgatgttgtaaactgtgggaggtaatttaatccaataaatttcaatctgagtag

SEQ ID NO: 18356 - DNA, 929 bp, Glycine max
cccacgcgtccgtgatgatttacctgatcaagggagtggtcatttttctgaaacagtgcgagaagctgaaggcactgaagccaaatatgctgatagaagccttagttccagattttcgaggagatgctgactgtgtagagaaggttgccaaatcaggattagatgtctttgcacataacattgagacagtcgaagagcttcagaattttgtacgggaccatcgcgctaattttaagcagtcattagatgttctaatgatggccaaggaatatgcgcctgctggaacacttactaagacttcaataatgttaggttgtggggaaacacctgatcaggttgtgaagacaatggagaaggtgagagcagctggtgttgacgtgatgacatttggtcagtatatgagaccttcaaagcgccatatgccggtatctgaatatgttacaccagaggcctttgataagtatcagaaacttggcatggaaatgggctttcgatatgtggcatctgggcccatggtgaggtcatcatacaaggcaggtgaattctatattaaatccatgattgaatcagatcgggctgcttctccctcaaagctgacctcttcttgatccaccatcttttttgttattcacacacttcattgtgcattatatgtaaggagtgcagacttactacattgctgttgatgctcatgccacgtgtaatatcagtaaaaagctataaacgggcatatgctgctgtctgcaatttttttcactgcctcctccccaacctatgagtgaataggttgatttatttagaaaatgcaaatttcaaaggttgattgtatatgttctcatttacatgaactcatttttctctattaaactggtgctaacttacaccagttgctgtagttgttaaaagtaataagtgtttacctcttattt

SEQ ID NO: 18357 - DNA, 1473 bp, Glycine max
  unsure (1)..(1473): unsure at all n locations
gcttctgaaagnnggcctcttttgggtaggtttgttcacgggtaggcatttttatttgcacgtttctctggtgagggcaagatcacagaattggtgtgagagagatgggttcgtccgtgaagctttcaaggagggccttggaaactgagatgcccgttatggttcagatgcaggaattgcaacgaggagctaagaatgccttgtctttggcccagggggtggtttactggcagcctcccaagcaagcgttggaaaaagtgaaagaacttgtatctgagcctttaattagtcgttatggtaacgatgaaggtattcctgaactcagagcagcattagtcaaaaagttgcgtgatgaaaataatttgcacaaatcttcagtaatggttacatcaggtgccaatcaggcatttgtgaatctagttcttactctctgtgatccgggtgattctgtggttatgtttgctccttactacttcaatgcgtacatgtccttccagatgactggcattaccaatattctagttggtcctggtagctcagacacactccatcctgatgcagattggttggaaagaatattatcagaaaataaaccggctccaaagcttgttactgttgtaaatccaggcaatccatctggaacttacattccagagccccttctaaagaggatttcagatctctgcaagaatgctggctcttggcttgttgttgataatacatacgagtattttatgtatgatggcctgaaacactcttgtgttgagggaaatcatattgttaatgttttctcattctcaaaagcatttggaatgatgggatggcgggttggatatatagcatacccctctgaagtaaaagactttgctgaacaacttctcaaagttcaagacaacattcccatctgtgcttcaatattatcacagtatcttgccctgtattcattggaagtggggcctcaatgggttgtagatcaggtaaaaactcttgaaaagaacagagaaattgttttagaagctctctcccctcttggagagggttctgtgaaaggaggagaaggtgctatatacctgtgggcaaagctcccagacttagacgctcacgatgattttgatgttgttcgctggctagctaacaagcatggggttgcagtaatcccaggaaaagcatgtggttgtcccagcaatcttagaatttcatttggaggcttgacggagaatgactgcagagctgccgcagaaagactgaagaaaggcttagaagaattggttagagacggactgcgggagtaactgaaacttaatcatagaacatccccttcccaagccaagcctgcaaaaaactatagatatcaatagaaagaaatctcacttgccaatgtagcaagtttgcaacttttgcatttgaataaatggaggattttactttctatccggttaaagttgtgggatatcaatagaaagaaatttcact

SEQ ID NO: 18358 - DNA, 353 bp, Glycine max
tttcttttgtccgattgtttcatgataaaaaggcctcatgccttgtctcccttttgatcaagcgtgacaaacttgtttttttttttattattgtaaatcaaaaagttccctttctttttgttatataataatttggaaaaaaaaaaaactaaaaggcatttttatttgcatctttctttctttctctggtgagtggtgagggcaagatcacagaattggtgtgagagagatgggttcgttcgtgaagctttcaaggagggccttggaaactgagatgcccgttatggttcagatgcaggaattgctccgaggagctaagaatgccgtgtctttggcccagggggtggtttatt

SEQ ID NO: 18359 - DNA, 400 bp, Glycine max
cggccggaatcccggtcgagcacgcgtccgcccacgcgttcgcccacgcgtccgaattcacattcatcaaagagagagatggtgaacgtggtggaattgcagaaacagttgcagagtgggaatgtgaatgttgatgccaacggggaactcatgtatgtcaaggtcatgaccgatgaacagttggaaactctgaggaagcaaatagcagtttatggcaccatttgtgagcaacttattgagatgcacagaacactctcagctcaacaggatcttgcaggggttagattgggaaacatatactgtgacccattgatgacatctggtgggcacaaaataacatcaagacataggtggacacctacacctgtgcagcttcaaattcttgaacgtatatttgatc

SEQ ID NO: 18360 - DNA, 258 bp, Glycine max
aacctttgctgacttctgtctttctctttcttatcatcataattcacaatcatcagagacatagagagatggtgaacgtggtggaatccagaaacagttgcagaggtggcagcagagtgggaatgtgaatgtgaatgtgaatgttgatgccaacggagaactcatgtatgtcaaggtcatgactgatgaacagttggaaactctgaggaagcaaatagccgtttatggcaccatttgtgagcaacttattgagatgca

SEQ ID NO: 18361 - DNA, 430 bp, Glycine max
ggaatcaaccttgaagaaggtaatagattccaactttcaagttgatgaaacaaaaatttccaaactgactattctgaagaagttggaggaagcagctgaagaagttctacacagcaaacaagtcttgacagatgctttaaacagagttgaaaccgcaaacagaaagcagcatgctgctaaggaggctctaaggagatggattcctgaggatgatatgaaggagtatagtaacactattaactgcaacaagtttcatcaagctggaatttatcaagattctctgcaggatgtaaccaggtcaacaacatcaaacaatgatccaaagcctgctttaaggaccacaatttcaatgagagatgtacttagcagaaagcaggttcctgaaagatatgctacaagaaaggagatggaagagcacactgaacgacaa

SEQ ID NO: 18362 - DNA, 458 bp, Glycine max
aaagcttcatattttaggaacatgcaagttgtggattgggataacaacttggtaccattgtcaaatcttcgggttctagcggatcacccgaattgctatgacattcaaggagggattaataatgtttgggggaattacttttactatggtggacctgggagaaatgtgagatgtccctaattaaggggttgaattatatagaagtttttttttctcttcttgttttttttgggcatttttgggtttgggtgacattggttttccgtctcaagggcattcaagaagcttgggtcatgggtcatttattcttatatttaatttaaatttgtttgttgatcaagattattttttcttttactaactagtcagtagtcacccgttggttataccattaccacctggactcttatgtacatctgaaaagaaaaatagtaaatatattacggttcttggtattc

SEQ ID NO: 18363 - DNA, 362 bp, Glycine max
  unsure (1)..(362): unsure at all n locations
gtgaatttgtagaggttcttcattttgattatgacaaatacagaggaagtatgtttaaaggtttgcacatcacagattctagaaggagggattggggtacagcgcctagatgggttgcttttgtggatttttttcttgcttctcgcgcaaaatatgccaccatttctggagctcaccggcgtgtcgggactacatatgctcaattagtcgctgcactgtctgcagcttacaatctgggggacaagtctagttcaaggtttacattccttagcagtttccagagtaatttgttgattgatggcctaaagaatcagggtggttggngccatgtgtggaacagatatgcttgtccattgagttgt

SEQ ID NO: 18364 - DNA, 403 bp, Glycine max
aggggatcaaaccataccataacaagaatcaaggaaccaaccaaccaccccatttcagctctctctggatattgtaatggaagcaggtttagaatcaatgggagtatcagaggcttggaaggctcatgtgggcatggctctggtgcagctattctatggtggctaccatgtcctaaccaaagtggcacttaatgttgggatcaaccaactagttttctgcttttaccgcgatttccttgccttcactattgttgctccgctcgctttttttcttgaaagacggactagaccacccattaccaagaagctactgatgtcattcttctttcttggattgactgggatatttggcaaccagctttttgtttcttattggtttaagttatactaatccaacttatgc

SEQ ID NO: 18365 - DNA, 427 bp, Glycine max
ggggtttgatcactaggaacacgaagtcagcagttgatttattccatgaacggtttgggattacattttctccagcattaagcagggaatttcgtccttataaacctgatccaggtccactactgcatatttgttctctttgggaagttcaaccaaatgaagttataatgattggagatagccttaaagatgatgtgccttgtggaaggcaagcaggagcctttacatgcttgcttgatcaaacaggagtatatgattctcccgagtatgctgatgttgaatttaaaccagatttcaaggtgacttcccttgatgaaggtcactcagttctgaaggaaaattttgatttgtcaccatgatgtcaaggattgttaacgtgaaccattattttgtggtttatgcttgagatatggaggaggcatatatg

SEQ ID NO: 18366 - DNA, 439 bp, Glycine max
caaactcttcttccttcattggtatgtgctatggaaacaccataacacagcttcacataataggtgaaagaggagtttgagtctgtgttgcaaaagtctgtgttgttgttccagttgcttaaagaaacaggaaagttcaatagctgctgaattctgagaagagtctgagagtgagaggattgcaattgctctgagcaatggatagaaagtaaaacagtaacaaacacaagaaacactgaggggtggtgtttatatgccattgacaccaactcatgcagtgaatgagagagttttggttatattctcaaaaggattgaaattctctcaaaattgaagcttggggagtacaagcagaagccatttcagaattgagtctccaaatcctagtgaagcctggaaaccattttccaagggggacagcatttttctctgctcaaac

SEQ ID NO: 18367 - DNA, 409 bp, Glycine max
acctcctaaaccaaaattatccaaaaccatgtccagcttcactcatgccaccacactcctccatgcccacatcaaaaccaagcacaaaaaaccctccaccaccaccaccaccaccaccccattaccccataaccattcccccaacagaaggaagctgatttcaacctttctagccacttcaacagcagcactactagtgcatggagtcaccagcaccccacaagcactggcccagagctggggcacgcactccttcatcaaggagcacttcttcgagccggggctctccccggaagacgcggtggcgaggataaagcagactgcggaggggctgcacagcattcgggaggcgctggagaccatgtcttggaggtatatcatgttctacatacgcatcaagcaggcctat

SEQ ID NO: 18368 - DNA, 523 bp, Glycine max
cgcctatcgagagttgtttgggtctctttcgttcccccaatgagtcactgagtgcagtcctgtgtgattggctcatcttttgtcttttctcggctctgataaaaccgagaattcgcaaaactctttgctctggttcagttctgtcgtgttgcaagttgcaactgaaccaatcaacaactttcttgtattccaaattatcttcaccattacaatcctcaaagtcaaaaagtgaagaccttaacataaaacaaaacacaatggtaatgtgggtatttgggtatggttctttgatctcgaaagctgggtttcactatgacgaacgtattgttggtttcatcaaaggctatcgacgagtcttctaccaaggctctactgaccacagaggaacccctgagttccctggaagaacagtgaccctggagcctgctgaaggagaaatatgttggggagctgcttacaagatcgcaaagaaagaagatgcagaaacggcattagtgtacttggaagtaagggagaagcaata

SEQ ID NO: 18369 - DNA, 768 bp, Glycine max
tgaagacagagattctttttatggtggtgagtcaatgtctagcagaggtcaactaagtttgcgaatgcaaaaagaaggtaatttgtggcgtgaattgtgggaaacatctaaatcagttccagctgttaaacagacacctctctatgatgaggatttagcagtggagggcattctagatgcatttgaggacatccagccttcagagctttacagacagctgtttgtttctcttctcggtttaggatttgcaattgctgaaactatgctgtctggcgacattgacacctcaaagttgttcaatgattgcaaggagtacatagttaccacttctcaaagtgacggattccatgagaaagtcaatgaacttgttcagatgtatgaaacggtggagaaagtgttgctgaatccagacgaggcactgaagatgatgaagcacatggaagaatcaactatgactactgatgaatcaaagcgccggttttctactggtgagccaaagcaccggtttaagagacttagccatatctttggtggcaaggataaactgttgacaaggccggtctgtaaaaacgaggtaaacgatgaagaaacgcagattcgacattctttctcgagtttctttgacagcaagtcatctttattttcaaagaagccacctaagcctggaaacctataccctgctgagcaacctctctctctggaaagtgacaggacagttatttagacaagttcagtttcaccccatttaggataagcaacatacttttt

SEQ ID NO: 18370 - DNA, 387 bp, Glycine max
aatcttacatattctctctctctttctctttctctttctctctctcttaagttctgagaggaggattccttacgactagtctttcactccagagattccattcaatcgctgttcttaatcactctttcatctttcagtctcacacccaaaagaaaaaaaatgttttagtttcataagggttggttctgacttgaattaggatctgattcaaagagaggaatggagggtggctcattcaatggtgctcagattgatgccaagatcatgcagacatttaagaagaactttgttcaagtgcaggacatttttgatcagaacaggctactcatcaatgagataaaccagaaccacgagtctaaggtccctgataacctcaccaggaatgtg

SEQ ID NO: 18371 - DNA, 319 bp, Glycine max
gagagaatttgaacccacgacctagccctccttctcagctctcttcatcattagaccaaccttatatctccttctcttgtttgtgcttaatgcaggccattgcagatagcggatatgactacattattattatggataaatatagttacaaatgactatagtgtgctatggtgatacatactttctcaattctcaccctttgttcatgatgcagggttggttctgacttgaattaggatctgattcaaagagaggaatggagggtggctcattcaatggtgctcagattgatgccaagatcatgcagacatttaagaag

SEQ ID NO: 18372 - DNA, 448 bp, Glycine max
aagatgatcatcctgctgtgaacaacttcaggaatgatgatagtgaaagtgaggacgaggcacctaggaggtcaagacatggagaggggaaaaagaaacacaaactataatcattagctagttaatgctttcaccaagcacgacatattgatgatcaactaacctggatgccagtttccaatgctttttatttttgacagatttctttgtatgagttcttttctccccccctctcaagagacccgggggctgggttgcttcagaaaagatttaaaactctgttcatcgatcatataattcttacatattgttcattggacatttaatgttaatgtatcaggatcaaaacggtaatttagtatgctcggtaaatgtacacctatgtatttgtaaagggatcgtaacatttgagttctgaatgaaaaaggtgggatgaatcatcccttgc

SEQ ID NO: 18373 - DNA, 431 bp, Glycine max
cccacgcgtccgcccacgcgtccgcccacgcgtccgcccacgcgtccgcccacgcgtgcgtctgtctctctctgcggcaactaaaaaacttaaccctcatttcaatcgcagaaaccgatccaaacacgaatgcaacacacactctcttcgtgactcagatcctgtgccgattcgatcggagagaaagctagctagatatagcttatagggaatggaattcacaagatgaagttctatgtatctgcaaaggggataaagagagtcgtcgctggaaaaggatccgccaagaccactgctcctgcctacaccgttgccgctcgccggatttccaaccggatggtggtggtgctcggaatccgattgctgctcagctttgtgagagtggcgcggggggtgctggaatcttctgcggtgtgctccacctttgattg

SEQ ID NO: 18374 - DNA, 511 bp, Glycine max
cccacgcgtccgaccacgcgtccggcaaattatgatgttgcaatatcaacagcatgccagagacttgattatattgtggtggaaacaactaatgtagctcaagcatgtgttgagttacttcgtagagagaatcttggtgtcgctactttcatgatattggtatttttttattttttatattaatcaacttgtttttgtctctaaatggctgtttaatattttgaatggcatgaattaaatatgttcacttttacttctggacccttggatttgtataactgtgactgagttcatgctctacgatatatttgctaatttaaggacatgttggtataagagtgttttctgtttcaatttttgtttattttcacctatagtgacaaaaatgtgataacaatttcaccattttttgtttttaaagattttatatgaaaattgtgaaatcactcattaacttccaactaacagcttgagtttttggcatggttggccacttgagtttttgaagggg

SEQ ID NO: 18375 - DNA, 399 bp, Glycine max
agacctcgaaggttaggcaacctcgtgcgttttctcatcaagcttcttcgctcagagtatgtgtgcgtcaaattatgcaagtggactagttgaactgaatggattcttaaagaaagtggaagtcaaggaattttattgtacgactttgtgattgtgagccattatggaatagacaactacacttccattggtgatgctattgctgctgcacccaatcatacatagcctgaagatggatatttccttgtgtatgttatggagggactctatgaggaatatgtagttatttccaatgaatagaagaatatattgctagttggagatggtattaacaagactatcatcacatggaaccatattgtcatagatggttggactacttttaattctttcaccttt

SEQ ID NO: 18376 - DNA, 675 bp, Glycine max
  unsure (1)..(675): unsure at all n locations
acgaggttgcttattcaatagcgatttcagcgctgtacgttgccgataaaatttttgagctgagatattgtcgtgggtccctttaggctcattttgtttcctctatcatttttggagtatttgatttgatgtgcatatatatatatatatgtttttgtatcgatgtttatatatatatatatatggacacagacattgcatgtatatatatatatatatgcgtagattatcataaaacacatgtaagttttgtgttcgatgggttatatatatagttctctctttcattcttggtcttcttcattcatcttttcatcttcttgtctgagagttgtgttgattgattggtgtgacccaaaaaatggctcaattgccaccaaaaattccaaacatgacacccaattggccagacttctcttctcctcaccaaaagatgccttccctcaaaaccatgtcacctaaccaaaacccttcatgggtggatgagtttcttgaattctccgcggcgagacgtggggcccaccggcggtcggtgagcgactccatcattgcaaaggtggcagtgttggtggtggtggcggtagcggcgacaacgagttcgagaggtttgatgatgaacaaatcatgtccatgtttaatgatgaagcttcanggaataattataataataataat

SEQ ID NO: 18377 - DNA, 988 bp, Glycine max
tctatatctggctccaagcagtccaagagtgttgatgatagcctggtgaagggtgaaattacagaagagtcccctatgaagaatgatagtgttgatgatgaaggggatgaagaggaagggtttgatgctatggcagatacggatgatgatctaatgagtgatgattatgattctgatactagtcaaatgagccacgagactcgtaagaagagcacggggtttaaggatttctttgagaacttggatggcctatctatcgaggggatcaatgaaccggaaaggcagtggcactgtacagcttgtcgaggtggtcccggtgctattgattggtacagaggactgcagcctctgattactcatgccaaaacaaaggggtcaaaaagggtgaagatccatagggagtttgctgagcttttggaagaggaactgcgcaaaaggggctctgcagtaattccacctggggaagtatttggtaagtggaaaggttttaaagatgaggggaaagatcatgaaattgtttggctcttcgatggttgtcattcacaattcatggcttgtacaggttgaaaatgataagtggctaggtatgggtaaccaggagcttcttaattattttagcgcatatgatgctgtgaaagctcgacacgcttatggcccccagggtcatcgggggttgagcgttttgatatttgaagcatcagctataggttatcttgaggctgagcgtctacacaagcactttgcagaacaaggaactgaccgagatgcttggtttagtcaccaccgtagattatttctccctggtggccggcgacagctctatggatacatggcaataaaagaagacctggactttttcaacagacattgccaaggtaaatctagactcaaatatgacatgagatcataccaggagatggttgtaaaccaacttcggcaaatgaatgaggacaaccagctgcttatttatttgaaggactagaatgcc

SEQ ID NO: 18378 - DNA, 539 bp, Glycine max
cagatgaccaagtggaattcatcacaggaatacatgacggtgtttcaacagacgataaatctaaatgggaatgtgtgaggaaaggactttgctgtatatgctgcgaaagcaatattgattctttgttgtacagatgtgggcacatgtgcacatgttcaaaatgtgctaatgatttgctccaaagtagaagaaagtgtccaatgtgtcaagcaccagtggtggaagtgatacgagcttattctatacaatagttttgacattaaagggtcacacatatagcagaatacaagatcctaacaagttctatctcctggacgtttccagcgtattgtttgtaggtttcttaatgaagaaatagccgaatttatgtgacaagtgacggctcagttcacgcttgggttatgtactatctagaaaaacatttttttcccataactatttgacatttcggttttggatagaattgacattttttccttatatattggatatttcttacataaaattaataattttattattaaatttttattttatat

SEQ ID NO: 18379 - DNA, 768 bp, Glycine max
ccctctcgtccgcccacgcgtccgatggacacccagatgtatttgaccgaatatttcacataactcgaggaggcattagtaaggcatcacgtgttattaatattagtgaggatatatacgctggtttcaactccacattgcggctgggaaatgtcacacaccatgaatacattcaggttggaaaaggaagggatgttgggttaaaccagattgccctctttgaggggaaagtggcaggtggtaatggagagcaagtgcttagcagggacatttacaggcttggacaactttttgatttcttcagaatgctttctttcttcttcacaactgttggttattatgtctgcaccatgatgacagtccttacagggtatattttcttatatggaagagcatacctggctttttctggtcttgatgaagatgtctcgaagaatgcaaaattgcagggtaacacagcacttgatgcagctttaaatgctcaatttttggtccagattggtgttttcactgcagtaccaatgataatgggttttatacttgaattaggattgctgaaggctgttttcagtttcatcacaatgcaactacaattgtgttctgtcttcttcactttctcattgggaactagaactcattattttgggcgtaccattctccatgggggtgcaaaatatcgtgctactggtagaggctttgttgttcgtcacataaagtttgctgaaaattacagactatattctaggagccacttcgtcaaagcgcttg

SEQ ID NO: 18380 - DNA, 563 bp, Glycine max
cgatttcttcctttccctctttgcaaacacaattctccgattcagttcataatttcgatcgcaaagcaaatgatcccacaacaagaacccgatttcaatctcaatcacctcaaattatattacggaaagctgtttccgtttgctgatttagttagatgggtgtcgtatggcaacgatggaaagcaccctggttgtgatcaatcctacattgggcgaagagagttttccttcactctggagaatgatatatatctgcgtttccaatctttccacaatgcacttgagctcgaaaactccatcaaagaaaagacccctgttaagatagatattggacctgtctacactcgtgatcctgcaaaaaggaatgcctatgcacagagtggcgataataatgtctttgccccacttgagagggagttgatttttgatatagatatgtcagattatgatgatgttagatactgctgttcgggtgccgatgtttgtctggtttgctggccgttgatgactatagcgatcaaagtgattgatactgccttaagagatgactttggtttcaagca

SEQ ID NO: 18381 - DNA, 492 bp, Glycine max
  unsure (1)..(492): unsure at all n locations
aaacattgtttccgtgatcatcctcatcactctcacccatggctgcctcatccaccatcaacaacttcctctctttcttcttacgcacaaaaccaccaccaccaccctctccaccgcagttcaaccccaccacttctcagaaccagaaaccctcctcctcacagcccctaattgcccaatacaaccctcctccttcaccctcttgcgcttcttcttctgagttgtcctctgttatatgcccatccatggcgtactccaacacgctcttcttccggtcgccgtacaacgtgcaggtggtggtggccgaggacgagtccgaggagaagctcctgggcaggttccgcagagaggtgatcaaggccggcatcgttcatgagtgtaggaggagacggtatttcgagaacaaacatgaagagaaaaaacgcaagtcgcgcgaggctgccagatgtaaccgcaaaaggcggcccatgtcaaaaactgtangacagaaga

SEQ ID NO: 18382 - DNA, 592 bp, Glycine max
ctcttccttctgcttctgtatttcttgccatgaatgcacttggaattatagccttttctttcagaggccacaatttggccctagaaattcagtcctcaatgccttcaacttttaagcacccggctcgtgtgccaatgtggaaaggagccaaggttgcttatttcttcattgcaatgtgcctcttccctattgctattggtggcttttgggcgtatggcaaccaaatgcctcctggagggattctcactgctttgtatgcgatttcacagtcatgacatctcaagaggaatactagccttagctttccttcttgttgtgttcaactgcttgagcagtttccagatatactcaatgcctgcttttgacagttttgaagctggctacaccagtaggacaaaccgtccctgctccatatgggtgagatcaggctttagagtcttctatggatttgtctccttctttataggagtggcacttcccttcctctcaagtcttgcaggtttgttaggaggactcactctcccagtcacttttgcatacccttgcttcatgtgggttcttataaaacagccaccaaaatatagcttcaact

SEQ ID NO: 18383 - DNA, 568 bp, Glycine max
ccgccgatgtctaccgaagcggcgtggttttatagcaaagggaatccaataaatggtggcaggctgattgctctcatgtctgcaattgtgctgagggaacatccagcatcaaccatagtgactgatgctcgtactagcatggcactcactagattcataactgatataggtggtcaccattgcctataccgtgtcgcatacagaaatgtcattgacaagggagtgcatcttaacaatgacggaattgaaacgcatcttatgatggaaacatctggtcatggtgctctcaaagaaaatcatttccttgatgacggggcttacatggtggtgaagattataattgaaatggttaggatgaagcttgctggatcaaatgaagggattggtagtcttatagaagatcttgaagaaccgtatgaatcagtggaacttaggataaatatcatctctgaacctcgacttgctaaagccaaaggaatcgaggctattgaaatatttagaaattacattgaggaagggagacttaaagggtgggagttagactcatgtggtgattgttgtgtgagtg

SEQ ID NO: 18384 - DNA, 544 bp, Glycine max
tgagttttttaatgaccaagttctcttttcagtacccggataatcctacaagacaacacaacaaggatgcaaacgaactggtacagatgttacctcgaatatacccttgcagggaatgtcgagatcactttaaagaagttcttagagcaaatcctgtactgactggatcacatgctgaattttctcagtggctatgtcatgtgcataatgttgttaatagaagccttgccaaaccgatattcccctgtgaacgagttgatgcaaggtggggcaaactggactgtgaacagaatgcatgtgacattatcggaagcacatcagtttttgggaggatatggcagaaacctacctaaaaatgattgccacacatactatgcgagatgtgttaaattttgacctttagaaaaatggtttagataggccaagggttatttgatggcattacaccggagtacgtgaatacatattcataactcgaattattttagaaaattaatagttaagcccggtttatattgattttttgagcatcacaatcagagat

SEQ ID NO: 18385 - DNA, 358 bp, Glycine max
ctcatccataacattgatactcttttgctctcagtactgcaccttcgtacccagagaaaaactaatgagttcactgcgaccctataacacatgtcttgaaacaacaaagtttctcttcaacccttcaaagcttggaatctctacacaaacatgcttgatagcaccaaggaagacatcacgtagaatacaagtgacatgcagtggtgcagaaaacaagggtgagagacgaacgtttttgacactggaagaagctggtttggttgagatatcacgtttgagcacacatgaacgctttctatgccgtttaacgatatcgtccctgaacttgctaagagtgatatcagagcaagaaagatgt

SEQ ID NO: 18386 - DNA, 398 bp, Glycine max
gcgtccgcccacttgttgcctctgccgtatgttatttcccaaactgtgtgtgagagagagaaactgcgacacttccaaccatcaagggaactttttacctgctatattcttcctggattttgtggatggtggtgcgttactatagttatttgtaaatatttttgttggaccaaagacagtttcttcacttttcatgtttcatgtttattatcaactttttgccagatttatgtgctggcacaaggaaactccaaatagtggatactgccttgttattttctttaataagtagtgtagcttttgtaagatgttatctattccatattctccttgattaggactatcttcataacacttaattaaaatgatttcgtttttggcaaataaaaaaaaataaa

SEQ ID NO: 18387 - DNA, 431 bp, Glycine max
cagggagatgggtcatctctatgctttggactttgatggagttatctgtgatagctgtggtgagacagctatctctgctcttaaggctgccaaattgagatggcctcccttgtttgatggtgtggattcaaccatagaagattggattgttgaccagatgattacagtacggccagtggtggaaactggatatgaaactcttttacttgtgaggttgttgcttgagactagagttccatccatcaggaagtcttcggtttcggaggggctcaaagttgaggatatactggagaactgcgtcaaattgaagcctatcattattgaagaatggaatgagaatagagaagaactaattgatctttttggaaggtcagaaattactggtttgagtgtgatttcacaggttgtattgagcaaacttactttatcct

SEQ ID NO: 18388 - DNA, 501 bp, Glycine max
cttcctcaaacaccactttcatagtttcatctccctcactctcattcaaacacaacacaacacaaagtgtcacaaacacacacagttccaaactcaaatctcgcctcaaacctctcttgttctcgtttccccactccctcattttccttcctctacccgcatttttctctaaccacccctcacacacttcacttatagagagagagaaagttcagtgcttttgtatagaatcaccaccccattaccctgcatacaccatttaatgcattgattccatctgggtcagtcacaataacagaagaaaaaaagaaaggaaaaaacccctctttgatgatggacaccacttcatcccctgtgtccctccaaacccaaaaaaccaccttccaagaacttgcagaagcttctcccaagccatacaagaagggcatagtagcaaccttaatgggaggaggtttattcaaagaagacaactactttgcgtcccttctgagatcctcagag

SEQ ID NO: 18389 - DNA, 561 bp, Glycine max
aaaaaccgggcggacgcacgcgtccgactcattctacatttctatcttctccttctccattaccaaatttttctgtacgtagtttctacctcctaggtcccaccttcgtttctctgaaaaatctcatctttttggggctcttttcacttgaatctccccagttatgattcctcaacttatggtacaaattgtctgaaaagtttggtactttattaaagtagttttgctcttccctcatacaaattccattgagcagaaagttaccaaatccaaaaaggtttctatttccgttattgatttagcaatggattcagcttgtgcaaccctgaatggccgccatctagccaaagttagtgagggaattggaagaaacagaacaagtggcttctggggtgagagtacgaggggaagtgtgaacacaaaaaggtttttgagtgttcaatcatggaagacttcacgtaccagtaggaatcttagaaactccaagcctggaagtggaattgcacacgctgttctcacatcagacattaacgaagattcgatggcatttcaaggggtacc

SEQ ID NO: 18390 - DNA, 569 bp, Glycine max
gtagtttctaccttccaggccccaccttcgtttttcttctaccaattctccaatttgaaaagtgggttctctgaaaaatctcgtctttttggggcccttttcacttgaatctccccagttatgattcctcaacttatggtgcaaattgtctgaaaagtggggtactttatgaaagtgatttagctcctttcttcacgcatacaaaatactcactagtcccaattccattgagcagaaaggtatcaaatccaaaaaggtttctgattccgctgctgattcaccaatggattcaacttgtgcaatcctgagtggccgcaatctagctaaagtttgtgagggaattggaagaaacagaagaagtggcttctggggtgagagtacgaggcgaagtgtgaacacaaggcttttgagtgttcaatcatggaagacttcacgtaccagtaggaatcttagaaactccaagcctggaagtggaattgcacacgctggtctcacatcagacattaacgaagattcgatggcattttaaggggtacccacttttgaaaaacccgaactggacccaaaaa

SEQ ID NO: 18391 - DNA, 459 bp, Glycine max
  unsure (1)..(459): unsure at all n locations
cccacaccctccccaaaattccatggaagtgaatcaccataagcactctaaatccnaaaccgtcgcttttggccggtacaatggcttcnacnacccctcctacnccnaaacgcactcgcttttcggcgagtccaattattctttctccggcgaaacacaagaaatccttaaggatttggtgacatgtgcgagtgttagtgaaaggaatttgctagcggacactacaaagatcattgagaagaataaaacaacgtgcaaacgcaaagacgattgttgcagaaagatcgttactgaagcgttgttagctctcggatacgacgcttccgtatgcaaatctcgctgggaaaaatcaactttctgtccagctggggaatatgaatacattgatgtgataatgggaaaggagcgggtggtggttgacgttgacttcagatcagaattcgagatagctcgacccac

SEQ ID NO: 18392 - DNA, 473 bp, Glycine max
cccacgcgtccgcccacgcgtccgctttgattgagcagttaattggaaaagagaaaggagatgaagttgcaggtccattggtcatgcattccaatcatgatgatgaacatacttttaaggagttcaacccagtgcagtggacatctgacaatccgcccaagattcttgtaccaattgccaatggttcagaggaaatggaagctgttatcatcattgatattctgcgaagagcaaaggcaaaggttgtggttgcatctgttgaagataaactagagattgtggcatcgcgcaaagttaaactggaggcagacatgctccttgatgaagcaaccaaactttcatatgaccttattgtgttacctggaggacttggtggtgcccaaacttttgcaaactcagaaaccttggtgagtttgctgaaaaagcaaagagaatcagacaaatattacggagcaatttgtgcatccccggct

SEQ ID NO: 18393 - DNA, 344 bp, Glycine max
cgggggggcgcacgcgtccggaaaaccactgaacaagtttaagagtcttcttcgtttaaccaccacatcggagaaactcaaacacacgcgcgcacacacacgtgcgtggtgcagactctccagtctcacacacatgtgtccgttgctgctgtaaccgtcgacgaagaagaagaagaaagagataaaccgtttaaagtaaagcaaaattcgtaaaccaaacaaacccttatgcgtggtgactagtgagtgacgactcagatctgttgcggggttatcgaaattggttattggccgagggagatggatgtgaactccggtggatgaggctgccgtagctgtttaaa

SEQ ID NO: 18394 - DNA, 455 bp, Glycine max
catcatcgcatgacatccttggatatgcctaccatggcctcctctctgcttctcccacgtggttctgcttgtggtagaagtccctcttttactcctcaaagcattttggtggataaacttcgaagattagttgttaaagtcaagtcctcagagacaagggaatgcaccactgctatgtttaatgccaattcacgtagagactttcttgggttggctttaggagtctcgggtggtctctttatgggttcattggatgcaaatggagctggtttgcccccagaggaaaagcctaaactgtgtgatgacacttgtgagaaagagcttgaaaatgtgcctacggtaactactggatcaggtttgcaatacaaggatattaaagttgggcaaggtcctagtccaccaatcggatttcacgtggctgctaattacgttgcaatggttccctctggacaaat

SEQ ID NO: 18395 - DNA, 566 bp, Glycine max
gacgaccataacacaaactaacacctagcaaattaacaactaaacaacccatcttttagtcagaaaccacaccaccaagtttccaacatgcaaaacctcaatttcctctacctaaccatcatttccctcactctcatccacttccactgcatcctagtccaagcacaaacctcaccctcagacattgcagcactcaaagccttcaaggcctcaatcaaaccctcctccatcactccctggtcatgcctcgcctcatggaacttcacaaccgacccatgctcactccctcgccgaacctccttcatctgcggcctcacctgcacccaagactccacaagaatcaaccaaatcactctcgacccagcagggtactcaggcacactcaccccactaatctctcaactcacacaactcaccacacttgacctcgctgataacaacttctttggcccaatcccctcttcaatctctttactctcaaacctccaaaccttaacccttcgatccaattccttctcgggcacaatccctccctccataaccaccctcaaatcactcctatctct

SEQ ID NO: 18396 - DNA, 430 bp, Glycine max
gttatactatcgacgacattatggctgcttcattctcaagcatgctcattattccctcggccaaaataagctacgaccctagcttgggaggattaagcttccacaacttcctaacagcaaaatcaccacctctgaagcgaaaccaaaagtcaataaaagttgttacacgcgataaccactcacccctggtcgacgacctcatgatagaagtacaagaacatgaacatgaacatgcaacgctgcatcagaaagatctctcagaaatgtggcgccaaatccacggtgagaagaactgggaagggcttctagaccccatggaccctcttttgaggtcggaggtgatccgctacggcgagctggcgcatgcctgctacgacgccttcgactacgagccattctctaggttctgcggcacatgcaagttcgagga

SEQ ID NO: 18397 - DNA, 524 bp, Glycine max
cacacaacttccacattccgatggaggagtcatgggaaaattggcatcttcatatggaaaccggttgcgagaacgatttcttaggcaagtgtcacggcactgacgatgacgagttcttcagagacatccttcagcaaccaccacctgcggctttctcttccgaaagcgaaagcgatcactccttcctcgctgtccaaaacacttctagcatccccaacgacggtgccgttttgtctcctaggaattacctcgtcaaaagcagcagctccaactccttggtctctcaaaacgcttccaaacgacctcgtcgtttgtcctctcccaggacttacattctgtccttcgacaactcaaccatggttccggccacacccgaaacccgcccccgctcctccaataattcccctctgcctgccaaacgggccctggaaagcccaggcccagtagcccgaaggcccaaccaaggagctaagaagataagaacctcttctcagaccatcgatcacataatggccgagagacga

SEQ ID NO: 18398 - DNA, 310 bp, Glycine max
  unsure (1)..(310): unsure at all n locations
cccacgcgnncgcccacgcgnncgancgaganaacgagaaacagngngangaaaangaaggggcccggggncnncgnggcnacaannnnggnagcanggcaangccangcgnacganangnncccncnccgaaggaacaccggcnanggngcccgnaccccggaggggaaacgcgcaagnnggaggcccgccgnggaagcacacaacancnnnggccnngagaccanncccgaagagggccgcgaagcaacaaaggaanacanccaaggcgaacaananagaacagaccccaaaacagnnaaccaacaag

SEQ ID NO: 18399 - DNA, 655 bp, Glycine max
cttttatgatgcagccaaaccaatgtatacatcacggagaaacttaccaccatcaaagattgacaatagcaagatggttgattcaattatatcacatggacgcttcttgaataattccttcatagagcacagtgttagttggaatcagatccagaataaactcaaatattcacttaaaggatacagtgatgcttggtgctgattactatgaaaccgatgcagaagtggtagcactcttagctgaaggaagagttccaataggaataggagaaaatacaaaaatcaaggactgtattattgacaaaaatgctagaattggaaagaatgttgtcatagcaaattcagagggcatacaagaggctgacagatcttcagaagggttttacatccgttctggggttaccattgtattgaaaaactcagtaattgaagatggattcatcatataataaattcgcccgtgatttgtttgccccgttttaccatgaatttgaggatgggaatgttttgatctttatgaattatgtctttttttttaaagaaaagcattaaatgacaatgtgttgccgaaatggatattccaaattcagcacaacttctctgagcttgtacttgtatatcataattattaactcaagtacattttttacgcagt

SEQ ID NO: 18400 - DNA, 429 bp, Glycine max
acttcccaaaaaatatacagcactatggaacaccaaaaagaggagcaactagaaccagtgagtcctgtgggacaatacttcaacagctctgtgctatgcatatacatcattggagttttagaattcgaagttccaatagatgacttgcaaacatatgctcttcttaaagatgttttccttcccatcaatccacgcttctcctccatcatggtccccgctcttggcttcccttattatattcgttaatttatttttatatgcttatgatgtctatgaacattagaatattatacatacataatatatatgacaagatgacaatgttagatatggcacttattaatttcacaaggctatttatgttaattaattaatttctatagatagttttgcattataagtttgctttgcgtctttagttgcatattt

SEQ ID NO: 18401 - DNA, 698 bp, Glycine max
cccacgcgtccgcccacgcgtccgcccacgcgtccgctgatgccaaagtcctaaactaatggatccattatgcttcatttacgatccattgttacacattgcgtttcttccgcaggagaggccacggaatcacttggatatgcattcaaaattatgtaatcgaatgggaagatactatgttcccttcaattggacgaattcaatctcacatctgacactgaaacatttggtcttctgatttcttcaaaacagttataattacatctctgtacagagttagcgaactaagagtcgttgaacttcttgatggcctttgcgaaaagatgcaagattatacactcaagatagatacaaatacctatgaatggttcaaagtggatagctgggataacctcacaacaaataagcaagaagctcgggcatattcaaaagatatatcttcttattgtggaaggttacttgaagaaacagaggatgagtttgctgaattgatcaaaaaaggatctgttaaagtgggaggtgtgagcaaagttctttgtcaagatttgagcaagcattgcagtcaaatgagtgtatcatatgccgcagaggttgatgacgatggacatgatggagagctctaaaaccatggatgttagggtggctgaaaatatcagctttttgggcaattaactattgacagaatggatcccaaaatt

SEQ ID NO: 18402 - DNA, 435 bp, Glycine max
gcgatatcaggaactgagggaagacgatgtcgatgtcgatgtcaatgttgtatatgtgtctcttcacactcacactcgtcgtcggaatgttatctatgctatctgatgccgttgatgacaaatgtgccgcctgcaaagccgtcgcggaggagctagagattgggctttccactgagaggccacgaaatcacttggatatgcgccatcgcttagactccaaaggccagcgtgaaggaaagctaatcgattacagagttagcgaactaagagtcgttgaacttcttgatggcctttgcgaaaagatgcaagattatacactcaagatagatacaaatacctatgaatggttcaaagtggatagctgggataacctcacaacaaataagcaagaagctcgggcatattcaaaagatatatcttcttattgtggaaggt

SEQ ID NO: 18403 - DNA, 518 bp, Glycine max
aaaaaagccaaactatctttctctttccatctctctctctttctctctcattgattacagccaccgttttctctttcttccaacttgctttggttcctctcctcaactaaagcctattcccttcttctcacccatgtccatttgtagcatgttttctcttgagcacttcaaagttcaaatctttcacacacactcattcatctccaacctccacacccacttgggtcacttctagaagatctatctgccaacccttttggctgaaaaaagaaaaaagaaagaaagaaaataatgggaagcaaatggaggaaattgaagctggctcttggtttggattcctgtgttcacattcccagagcctttgatgattcctccgccgccgcagcaaggttttccggcggcatctcacccaccgtcgtttcgccggccggtgacacctccggctaccgttcctccactcccacaccatcgtcttccggtctctggttacccaaatcgggaaccaaatcccctaaggg

SEQ ID NO: 18404 - DNA, 528 bp, Glycine max
ccagccatgttctcctcttgtgaactgcacatcaagtggtctaagagtttcaacagccacgggttcaactgctgcaatgcaatcagcacgtggatttccaatgcccattttatctcaggatctccaatacatgttaagagaacctatttcactgggggcaacctcaaactatatgcatgggttgatcaaacgtaaccagacaatagtggccacatggacttgtagaaaaggtgtgatatatattgatggttctcatgtcaattatactttcaaagatggggatatcattgccatatcttccaaagcaccggttctgaaagttctcttgcctcataagtttttatagagatgtcaagtaaatttcacagcatatcgtcattgggagaatatgcaaatttggtgggaggagtagtctgttgtaatgaaaaatataaggccacatgagctgacatggctgtaagcttgcagtgttccattccttctttaaggcttgagctacaaatgcaattcagaatctcatgcattaat

SEQ ID NO: 18405 - DNA, 797 bp, Glycine max
attatctcaagcaccatgtggatcagagggttctttcattttgttcctcccacgcatatttctgaccaaaaccattaacaaatcagtgacagaaaaaaaatggttggtgactaaatagaaaaaaataaaaaaagaacacaatcaaagcattaagagagaggaagaatgcaaatggcaattttgttaagaggaggagcacttggagattctagctttcgtttgtgttcattaacatcaacttcttctttgcatgtctcccaaaatgttgccatacccacctcatcatcatcaccaatactacccttgattgcaagtaaatttaaaacggccagcagaaacagaattacctgctctgccgttcaagaatcatctcctagcacgagcagctactactgctgaaacaaaggaggaggtaaaggaagccccaaaagccgcagcaccagcaaagaaacctcctgctaaagctccagctaagcctctgcctcagatgatggaggaggatgtgatcccttcactgaaagcaatatttgaagcccaagaagatttctcaaatattgagctggtcttcaaggacaataagttggaaggttcgtttttgaagaaaggtaacccctattcattttgggccttctttcccacaggaaaccttattgggccaaaggggttttctctgtcatcgtataactcgagagcaagcaccgttgagccatttctcgttgatgaaaagaagatcactgcaagacacattatcttttgggttgaaaaacgtttggcagcacaggggatcattcctggat

SEQ ID NO: 18406 - DNA, 580 bp, Glycine max
  unsure (1)..(580): unsure at all n locations
cccactcnttctttgactcttggtttgacttttgggccgacccgtgaatcaggggcccgcgctttctcccaagcagcccgaatcttttgaccatngcttatcatcttctcctttgctcacattccttacattcgtagatgaaaaggaagagatagttaagagccgctccaagagaaaaaaaatggagggcatatcttacagaagcacaagtgacgttgcatcatccatcaccttcaacaaagcatattctcaggcatcattaaacagaattgattcacttaatgaaatctaactgttgcatatttatttgctcataattttgtagcctcttgtactacctacttgtgcatcacacctcattcttcattccctattgtaactgctggctttctactacattccctatttgtaagatatatcaacttgtgttggattgtggtgtaagtgtgggcacaaggtggcttcgcaatttttgtcgttacttatggtttgtgtaggatacataatattgaatgaaataatctttgtaatttctgaagtcctggataagcaaatttaatgcattttagttcctcttgat

SEQ ID NO: 18407 - DNA, 600 bp, Glycine max
tgaaatgtctaggtttcttttgaagaacgatggtctcttccttgggagttcttctgcaatgaactgtgttggagcagtaagagtagcgcaagcaattggccctggtcacacaattgtaaccattctctgcgacagtggaatgagacatttgagcaaattctatgatgctgaatacttgtctctgcttggtttgacaccgaaagcaactggtttggagctcttaggcatcaaatgagaaggtttcttcagatttttgaaattttaatgccactgtctagctgctatatacttgagtgcttagtgcctgccttggatgagagtggccacctagaagttagtttagttatattgatatatagaagatattacacttattaatacactgttttggggggtattacagggctcattctttgttagtacttcatggtttattaactaggccaagatcaccagattgctgtaaactaaatatattcaattcagactgtttcagtacggggatgaattaggccagcggtcttcgttttgaaattaatgaagctggaaatagtgcacggcaaaaaaagagatgagcaataaaaaaaaaaagggggggcc

SEQ ID NO: 18408 - DNA, 631 bp, Glycine max
ggtcgacgacgcgtgcgcttcttcaattccatccaaacaattaaaaataaaaataaaaataaaataagcagacatgtccacacgtccctcctcaacctttccaaactccaacctctccctctctacctccttatcctcacaaaaactcccacttttccacacccttttccccaaacccctcccttttcctcatctgcgaattcaaaccccaccaccattccttcccccgcttctctgcaagtcccccgagggcacggaggcggatgaggccgcgccgccgccggaggaagacgagtggctgcagaagctcccggagaagtcgaagccgctctattcccacagcctcccctgcattgaagcctggctccggagcctcggcttctgccagagcaaggaggacagagccctctgggtcgttcacaaacccgattggcacgcgcagtctcccttgatgtcaccgatctctacattaggtatctgaagagtggacctgggaaccttgaaaaggatgtggagagaaggtttagttatgctttgagcagagaagacattgagaatgctgtacttggaggaccatagccatttttctttctatctgtcatatacaaacaatggaataattccttgttga

SEQ ID NO: 18409 - DNA, 586 bp, Glycine max
actgtgtctaagtcttcctttcaggctttgtgaattgaattccgatgtcacagccaaggcggaataagatgatgagtccaaaccttgcaaaacaagttggtgacgcaacctataccaagatttttgttggaggactggcttgggggactaagagagacactctaaaacgctattttgatcagtttggggagatcttagaggccgttgtcatcactgacaaaatcactggaagatcaaaaggatatggctttgtgaccttcagggacccaaattctgcaataagagcttgtcataatccctatcctgtgatcgatgggaggagagctaactgtaatcttgcagctcttggtgcccagaaatttgatccatctataacaacaggaaggcaaaaactcagtagcccttcatggaatatggcaccaattccattgcaaggaacttccactcattacaatcagcacataccacactacccatttccgcatccagtctacaggtatcctggttatcctcacccacaagacttgtatgaaatgaactacaataatgcttatggtggacagctgcttccactctgtgggtttca

SEQ ID NO: 18410 - DNA, 490 bp, Glycine max
gtgtatcatgacttaaactttgagttcgctttggtgagttagatgatacagtgatttgggcatcggcgaatccagccgaaccgcgagcaatgatttgttggtgtgagagagagggagggcgaactaaagattcgattttggggtgaagcgaagcgaagccatgagacgaaaccattcgaactccggcaattatcggaatccatgtttaactatgcaccagccttgggcttctctcctcgtttacgggatcaagcgcgtcgagggcaggtcatggcccgctccaatcacaggtcgtctttggattcattctgccagtaaagtcccggaggagtctacaatcaaagcaatggaatacttctacaaggagatttatgcactcaatggcatcagtgatatccaatttcctcaacactaccctgtctttaggcttttgggctgtgttgaagtggttggctgcttaacacgtgatgaactagcatgctgggagatg

SEQ ID NO: 18411 - DNA, 348 bp, Glycine max
acccaacttgcctcgcctctttctattttttattgctttttcgtattttcggtattagaaaacaaattaaccagagagaggcgcttgccgtaacgctaattgtgaaagaagatgcaaccaacatccaacggctctgattcgcaagcgacggagcagcggacgccgccgccccagtggatgccgatgcagtacccggcagcggcgatggtaatgcagcaccacatgatgccgcctcaacattacgctcctccgccgccgcagccctacatggcctaccaccactaccaacaacagctgccgcacgccctgcacgcgcaccatcagggatccagtgccgagaacaagacc

SEQ ID NO: 18412 - DNA, 477 bp, Glycine max
gtgggtttcccgcaaggtgtcccaaatggcccaaattttccaggaaattatccccagccatggaattcaggaatgggtggtgtgccttttgaacaagcacagggtggtatggttgtggatccaagggagggcaaaggtatattggcaccaccagcccatgccccttcccaccgcccacctccacctccatcccacatgtcatatgggaaacagaactactattctggggagcttgggcatgatggtcagagttatggggcgtggcagcatgatacccgtgatagctttggtagccaaggctagtaaggcttccaatctttactttcttggattaggtttggttactgttcaggatgtttctgcaaccatatttgtctcatgcatcattcaaattgctaaacagcgattagactatttacttttgggcccaatttgtatttggtatattttaatcgaattttgagtttttccattatc

SEQ ID NO: 18413 - DNA, 433 bp, Glycine max
cacaaaacaagacaccaggcagcaaaacacagcaatgtcccaacccagattcatttccatgatctccctctgtctggcccttgttctgttctacacctgcaatggcctaccatttgtggacctcaatttccatgaagtagatgtgatgaccaaaagggtttgcaccaagagcattggggagtgcctgagcttgacagagccggagatggattcggagaccaacagaagagttctggcaatgcagaaaaagtacattagctatgacacactcaagagagacatggttccctgtgatagggctggagcttcttactacaattgtcatgcaatacgagcaaatccttataatagaggttgtgaggtaattactgcttgtgcaagaggtcaagacatcaaaacttgatgcatcagcgtcacaatggatggaggaaag

SEQ ID NO: 18414 - DNA, 1204 bp, Glycine max
caggattgttgcttcaccttatgcgaagaagctcgccaaggagttgaaggtggagttggggaggattgtggggactggaccgatgggaaggattgtggctaaagatgttgaggcatttgcagctgcagggaatgttgcagcagcggtagcaccagcactggggaagagtgcagcacctgccggggtagagttgggatccgtggtgcctttcaccacaatgcagagtgctgtgagtaggaacatggcggagagtttggcggttcccactttcagagttggttacaccatcaccacggatgcactcgatgccttgtacaagaagattaagtcaaagggagtcacaatgacagcgttgcttgctaaggctactgcacttgcacttgttaaacaccctgttatgaactctagttgtagagatggtaatagctttacatataatagcagcatcaatattgcagttgctgtggctatagatggtggactgattacaccagtgcttcagggtgctgataagattgatgtctattcattgtcaagaaagtggaaggagttggttgataaggccagagcgaagcagcttcaacctcatgaatacaacactggtactttcactctgtccaatctgggaatgtttggctgttgatcgctttgatgctattctgccacctggaactggagcaataatggctgttggagcatccgagcccactgttgtggctacaaaggatggtcgcattggcatgaagaaccaaatgcaggttaatgttaccgctgatcatcgagtaatctatggtgctgatttggcttcattcttgcaaaccctgtcccagattattgaggaccccaaagatcttactttctagtctcattttcctaacagtgaaaaagcgtttcttttctggcatgattcctctcatcatggttgtgggattattaattgttgacaaggagaaatcgaggagtcaattgctattcactcgggattttgcaaagaacagaagagttttaaataggaaaagctgagctatagtttcttaaaatgatatcgaatatgccatttacatttttctttaatgctgcctgattttatttttttttgttttttgggatgttcatcactgtctaataatgttaattatttatgtaagcttatttttggattttaaatcttgaaaagtgaaacccaatgaacgttgattctgtt

SEQ ID NO: 18415 - DNA, 287 bp, Glycine max
cagatatatgatatttacccagagaaaatatctccttgttatggttgaatccaattgggccaagttaaggagtctgattctcgatattttccaggccccactgattgctttttattttttataggtactttcactctgtccaatctgggaatgtttggatgttgatcgctttgatgcgattctgccacctggaactggagcaataatggctgttggagcagcggagcccactgttgtggctacaaaggatggtcgcattggaatgaagaagcaaatgcaggtcaatg

SEQ ID NO: 18416 - DNA, 590 bp, Glycine max
ggaggaaaaacaaccctggcactacgattctatctctgcgatgatcgggttcattattgttggcgatgatgactcataaatcacaatcatgatgagtagttgaaatcgaaaagagaaaaaaagttcaaaagaagaagaaggagaagaagcgctataccagcagcagcattttcttttccatttccaacatcaacagcgagagaaaggatcatcgatcatcatgtcgttttcgtttttcaaggctttgaggcctaaaacgccgcaagaggtggccaagtccatcaaggagagtctcatggccctcgataccaaaaccgttgttgaagttaaagcccttgagaaggctttagaggaagttgaaaagaattttgtaacaatgagaaccatgctttctggagacggagagtcagaaccaaatttggaccaggtttcacagttagtggaggaaatctgcaaggaggatgttctcactcttctaattcacaagctgcctatactaggatgggaagcaagaaaggatttattccactgctggtcgatattattgaaacataaagttgagaccaattattactgtgtcgaatacattg

SEQ ID NO: 18417 - DNA, 394 bp, Glycine max
cccacgcgtccgctgagtactggttcgggaacttctcccaagtgtgaggagcatagtgaagaatggcattgcccatggggttttacagttgttgatgatgtggctccaacattcaaaacaattttagaagaaaactacttgtcaacaaaatctccttttgaagatacaacacaaaataggatgttatggtggaagcggagaaagaaccttgatcactgtcttgataaattactgaggaaccttggagagtcgtggtttggttcatggaaatgcttgcttcttggagaatggttgaactgcaaaaaatttgacttggtgcttaagaatcttgggaatgatttaagatctaaatgcaaattggatgtaaatgaaggtcttcttaaaaattattctt

SEQ ID NO: 18418 - DNA, 533 bp, Glycine max
cgacgtcgttgcggtcattgcttccatcgaataccgtctggcaccagaacatagactacccgcggcatacgaggatgccgtggaggcactgcagtggatcaaaaccaacaaagatgattggctgacaaactacgtcgattactccaacgtttttctcatggggagtagtgccggaggaaacatagcctacaacgcgggtctacgagcagccacggttgatggtacttataatcagattcccaagatcaaagggcttattttggttcaaccatttttcagtgggacccaaagaaccggttctgagctgaggctagagaacgaacctcatttggcgctgtgtgttaatgacgcgttgtgggagttatcgttgcccgttggagttgaccgtgatcacgagtattgcaatccaacggcagggaatggtcctaagagattggaaatgatcaaacggcgtggatggtgggtgctggttaccggctgtggcggtgacccacttgttgggggggaaaaattttccccggggggtcaggtgc

SEQ ID NO: 18419 - DNA, 612 bp, Glycine max
ctcacagaaaccataacaacttcttcagaagacaccaatggatcctcttcaccacatgtgctctcacagcaacaacagccaaattctactcctactacaccaagaactcgttttcagtggagtaatcagtctaacacaggagtagctatgactctcaaccctgctcatgaaagagtcttcatgtctccttatggtgctaactcctttggggttaaaattgagggacagaatcttcatgagtcttcttacttgcgacctcagacacagaacatggttttccaaatgcaacagtcctctcaacactagttccatgcattagcacttgttgtagtgaattattaatgggcagaagtagaaccagaatcttctgtccatttcaataagtacggtgcttgagttgagctttttccccaagttcttatgtgaataccctagattgttggttagttattatgaacttgaaggaaggtacatagatttgtttctttaacaaataagaacttcctgaaaggagtggcaggcaaccaagtcccaaacgttggtcttggttggttttgttgtctgggaataatggatttcaagcaaagtgtataaataatggaatttcgactt

SEQ ID NO: 18420 - DNA, 1111 bp, Glycine max
ccacttttcagttcccactccctttctctctccccaacccaaaaatggcatcaaaattgaccctcattgcgttggttgttgcggccctgtgcgccgttgatctaacccagagagcatcatcatcatcatcatcccctcacgcgccagcgccctccgtggactgctccaacctggttctcaccatggccgattgcttgtccttcgtcaccaacggcagcaccgtcacaaagccagagggcacatgctgctctggtttgaagtctgttctcaaaaccgctccggcgtgtctctgcgaggctttcaagagcagcgctcaattcggcgtcgttttgaatgtcaccaaggcaaccactctccctgctgcctgcaaagtctctgctccttctgccaccaactgtggattgtctgagacgcctgctgctgctcctgctggaggcctctctccacaagcttctccatctccccaacaagcagcagatgcttctactaatggtcctgtaaatgaggtatctccagcaccagcaccagctcaagggaacacagcatcagcattattcccaatttctgctgggtccttgcttcttggcatattggtagccacattctcaggcttctgagaggagtttcgttccattttaagagtagagagatgacatgagggattattattattttgatgttttctttgggttttaccattggagagctcttcttcatttcaatgtttgagcttaaaacttaaaaagtagataacattcattctgggagtgactcgaatctattttgaggttgtacccgcattttcattatatataagtctatttatttatataaaaaaaaaaaaaaaaaaaaaaaaaaaaaaaaaaaaaaaaaaaaaaaaaaaaaaaaaaaaaaaaaaaaaaaaaaaaaaaaaaaaaaaaaaaaaaaaaaaaaaaaaaaaaaaaaaaaaaaaaggggcgccctttttaaaggctccaagttaacttacccgtccttccaacctcaaacctttttaatagggcccctaaatttaaattaatggcccgttttttaaaaacttcgatacctggaaaacccttggcttacccaaattaaatcggccttttttttt

SEQ ID NO: 18421 - DNA, 539 bp, Glycine max
cctacgcgtccgcttctaacctcatcactcctcacacaacacacttgcctcttctacctccctccacttctagttcttcccacatggaggatttaatcatatctccttcttcgtcttcctctttggtctctctaccccatgaaaacccaacaccaacaccaacccttctacaaaaactccaattcctcctccaaagccaacccgattggtgggtctacgccattttctggcaagcctcacacgacgacaatggcaacctctacttatccttcggagagggccatttccaaggcaccaaagaaacttccccaaagtcactaaccattcccacaaagaagttcatgagagcccccacaaacgacaccaacaacatcaacgacgccgagtggttctacgtcgtgtcgttgactcgcaccttcgcagtcaacaataatgcttcttgttcttctacttctctcccgggaaagtcttgtgctttaggcctcgttctactgctcaacaacatgcacgagctgcaattctacaactgcgagagatca

SEQ ID NO: 18422 - DNA, 522 bp, Glycine max
ctctttcccaagaaaacccaacaccaacccttcaacaaaaacttcaatttctcctccaaagccaacccgattggtgggtctacgccattttctggcaagcctcacacgacgacaatggcaacctccacttatccttcggagagggccatttccaaggcaccaaagaaacttccccaaaatcactaaccattcccacaaagaataagttcctgatgaaaacacccacaaacgataacatcaacgacgccgagtggttctacgtcatgtcgttgactcgcagcttcgcagtcaacaacaattcttcttcaaactccacttcttgttcttcttcttcttcttcactccctggcaagtcttttgctttaggctcggttctctggcaaaacaacaggcacgagcttcaattctacaactgcgagagatccaacgaggcgcacatgcacgggattgaaacgttaatttgcatcccgacacaaaacggggtcgtcgaaatgggatcctacgacaccatcaaacaaaact

SEQ ID NO: 18423 - DNA, 478 bp, Glycine max
gaaccaaacaaagccctagcatgaaatcatccttcgaagaaaaataattccaatcaatcctagaatccaatccctcccctttgaatttgatgcctcctcgcattcaattccacgctctggtggcatcatcatcatggatcgtggtaataacaacaataacggcgttgttgttgttgtcgtttgggtgcgaacggggacacgctctgaaggtgccgtttagagtaaacgacgtgctccccgtgctgccgcgcgagatctcgtggccggttctgaacaacctgcacagcgccgtcgacctgctcccttatttcgttgggtccctcactcctgccaatgcctccgtcaagtggaaaggggcatgcttcttcgataacaccgccaagattgagttcgcaccctctttggagggtgccactctctatctcaagacagaggctgcacatagctggacctgcatggatttgtatgtttttgcaac

SEQ ID NO: 18424 - DNA, 453 bp, Glycine max
cccacgcgtccgcaactccttactattacaagtctccgccaccacctgaaaagccaccgccacctctggcggttccccggcagcgtaagcagtgggaggtgccgtctccagtgacgccggtggatcaacagatttcgaggccggcgccgtcgctgacgccaccttctaggccttttgggttgcaaaccccaaatacgaaggtttccccagttgagttgccaccggctagttctcagaattttgaggagggttctgaggagacatctaagcctaagttgaagcctttgcattgggacaaagtgagggccagctctgatcgtgagatggtgtgggatcagttgaggtccagttctttcaagttgaatgaggagatgatcgaaactttggttgtagtgaacacgccgaacccggaacccaaggatactactccacgctcagttcttgcgccacaaa

SEQ ID NO: 18425 - DNA, 423 bp, Glycine max
gtaatttcaatttagtctgtgccgtttcgaaccctgggcaactacagcggcgtttgaaactgagaaaataatggggtgggagagcttcgtggtggtgcacaacatagcaaagaggcacaacgtgggaacacttgctcgcagtgccaccgcgttcggcgtatcagaactcatcctcgttggtcgaagagatttcaactgtttcgggagccatgggtcctcctcccacctccgatttcgacacttccactccctccaagacgctcgcaaattcctcaaagacaaagactttgatatttgcggcgttgagatcacaaccgattctctcctcgtaaataaacacccttttactaagagcactgcatattctactcggcaacgcaggcactggtctttcttctaaggaaattgagatatgcgactttt

SEQ ID NO: 18426 - DNA, 502 bp, Glycine max
cccacgcgttcgcagaggtgcggcccgtgacggcggcccatttgggtaaccgaaagaagcttaatgcgttgagcgaagatggagagagcagctaccatgggtcgatggaggataagcaattcgtgcgttcgtttcgcgaggcctggccttacttgtgggcctatcgtggtagcacctttgttgtcattatttccggtgaaattgtttctggccctttcttggatgtcattctcaaggatatagctttccttaatcacctaggaatccgctttgttcttgttccggggacacatgtgcagatagacaagcttctgaatgagagagggtgccagcctatgtatgttggtagatataggataactgatgatgaatctggaagctgccatggaagcagctgggggcataagattgatgatagaagcaaaactttctcctggaccttccatatgcaacattcgccgtcatggtgacaatagtcgatggcacgaagttggtgtcagtg

SEQ ID NO: 18427 - DNA, 398 bp, Glycine max
ctcttttttgttgaaggaagcagaagcacatggcagtgatatgtccgccaagccagggacaaacttggcttccccatggccccaattctaattaccacttcttctcaagaggaggagttggaaggcgcagtcgttcttattgtactttcagctcaccaaagaccaaaacgaatgcgtttacggtcagaggctgcggccaggactcggtggaagaccatcactttgtgaaggctctgagggaatcccaaccttacatttccgttcataggggcagactattcgttctgctcatatctgctcaacttgttgccggtccttacttcaatcccattctcaaggatatagctttccttaatcacctaagaatccgctttgttcttgttccggggacacatgtg

SEQ ID NO: 18428 - DNA, 446 bp, Glycine max
tggtagtttggtacacaacttcacatgttcttacagtttgcgtccgcaaaccaaaaaggctagctagggtttgagatcagatcagggtgtaagaaaaatcagtaatcagcaatcacttattaacctagaaattgttatccgtttgtttcccatgcaagaaatgttacacagcaacacattcatcattcacctcctttcgtgacaaatcgctcttaccgattaacaaaatctcgtgtaccagagtcaccaccgacatgggttcgggttcggtccactggaacgtattcgacggcgtgaagataatcacggcgacgccggaggcgctcatggcggagatcgactccgcgatctcgaatctggaatactcacgtgccaccgctctcctggaggccgacgagggatacgacgcgcacatggccgacgaaacctacaaggcgggctgcgcc

SEQ ID NO: 18429 - DNA, 505 bp, Glycine max
tgccctactactactgggaggaaccacgagtgacctgcgttcttcattggtgaatgaagatttactttgggatgaagatactaaaatccaaaatgcaagcctgggttggaggtgaagttagttgtgtcttcaaccaacacctgaatttacattctaattttcatccacttgtttgttgttttagtccaaccattttcatctgcttaagtagactgacatcccaatgggcctgttgaaaacaaatttgtggatataacaaatgcagttctgggctttttctgcgaccctctggcatccgatttagtcagtcatcatctatccttggattgcaattaatttatgtatttttacagttgtgtatcacatgatctaggccttgtatcttggcaatatatcaggaatgaaactcacgtcatttttattttactgttcagtgacattgctttgtgtttttcttttctttaaaaacactgtgcacatgactgattaatggaatataattctt

SEQ ID NO: 18430 - DNA, 660 bp, Glycine max
cccacgcgtccggtttgaactatgacagtaggggatgggtaaacgacatggacgtggtggatattccagtgggtatggaggttcaagtgatttggcatctggtgatggttatggaagctatggaaattcacagcttggtagcggtggtggtgcttatggagcttatggaaattattctttgggacgaactagtgcctatgggtcttctcagaatggttcttctcggaggagaaaccatgcttactaaaacttgatgggtccctgcagctgagttctatgaagcctgaagcccactgcctaaactggaagaccagatcaaccaggttttgacaaactcatggcccaccttgacacctctacctaggggaccaaacatgtggagactattgatattggccatgtccattttaccttatttcacaagcttgataactaatgctcccccaagaacctataaagctggcttgcctttttggctgcttttcaattcctgttcagttgtctttagatttaaagccccatgtagctacgatcctttggcagttgtatacctattttgttaccatgattgggttttgttttcatgatagttcactgttacctgcagtgtgaactttcgtagttcctttaattaaaagtattttgattcaaggtaatagc

SEQ ID NO: 18431 - DNA, 453 bp, Glycine max
ctcagaatggttcttctcggaggagaaaccatgcttactaaaacttgatgggtccctgcaggtagattacagttttcattatttttgtattttatctggcaacttcctataatataggccattcacattatagtagtatataacagattgatatcttaacctgaccagtgtaccttttagaattctgatgctcttgttttccctttgttgcctttcccttcccatccaaacagctgagttctatgaagcctgaagcccactgcctaaaccggaagaccagatcaaccaggttttgacaaactcatggcccaccttgacacctctacctaggggaccaaacatgtggagactattgatattggccatgtccattttaccttatttcacaagcttgataactaatgctcccccaagaacctataaagctggcttgcctttttggctgcttttcaa

SEQ ID NO: 18432 - DNA, 275 bp, Glycine max
cgaaggactagtgcatatgggtcttctcagaatggttcttctcggaggagaaaccatgcttactaaaacttgatgggtccctgcaggtgtcaacatcttcctctgtcattaacaagttatgggtattcatcatttttgactttgataaatcatatttatggatgtactcacatacttcagatatgatgaattggaggtatggaatctgtttatgtgcttcttggctaaggtaatacatttggaggcatgtaaaacctttcatgattcagaaatag

SEQ ID NO: 18433 - DNA, 403 bp, Glycine max
cgtcattacagttttcacatactatgttatccctaaagagaaaaaaagaagccatagttttaactactagctaacgtctaaagatagtaacataactccatcaacctcagcaagagggagagaaagaagaagaagaatgagcagttttcagtttcacttgagagttttgagtttgctgatttcagtttcatacttgctgacgtgtttggggaacaatgacatacctgtccagttgaatgatgatgttcttggcctaattgtgttcaaatcagaccttgatgacccttcttcttatcttgcttcatggaatgaagatgatgccaatccatgttcatggcagttcgtgcagtgcaatcctgagagtggaagagtttctgaggtctcattggatggcttaggacta

SEQ ID NO: 18434 - DNA, 1107 bp, Glycine max
ggtagccgaatatggatttgatcaaggcttggaggttgagtccttctgtaagtgcaattccctcaccattctgtgctgctcccatttgtgtaagaactttctcttttcagttttcaacttctccctacactcgtccaaagcctctagttcctattccacgtggcaaaagtagagactctgattctgagccgcttctagaatcttccatcgtgcaagaagtttcattcgacgacgacgacgaagaagaattccttgacgaatttgaatacgatgaagccgacggtgacggtgacgaatactatgaggaagaagaggaatacgaagaggaggctggtgtgccttatgtaagtttttgttggaaaattagactcttaaatttgtgattttgcacgttttgaaggcaggtgatggcggcgcaggtggcggaatctccctcaccggaacgtggtgggataaaaaagcactagccattgctaaagaggttactctctccttcgatggcgaattgcaaatttatgcttttagaacactggtcaactgcaccatccaagtgcacattgagaacctttccaaacagtctggttcccccagcatggaagatattgaagccttctctacaacatatagagcaaagttggatgaagcagaaattgccaaagttgttcccgacaatatatgtttggaggtgtcttctcctggtgttgaaaggatagttcggattccagatgacctagatcgattcaaggaccgacctatgtatgtgaaatatgccattaatgatgatcaaaataatccagctgcagaaggtgatggtgtcttcaagcttgaatcctttgacatggaaacaaaatgttgcacctggggtttagcagatgtgaaagtcaacagacagaaagcagggaaaggaagaccactgaataaaaagcaaagtgaatggcgtttaagcaccccctttgattccttacgttttgtacggttgcactctgatatttaaataatttattttcccccaaagtttatgattagatttccatctttcgtctgtttgcgcgtctgtgtatatgtacacgaacatatagacatgcatgaatagataagtagaacaat

SEQ ID NO: 18435 - DNA, 957 bp, Glycine max
atatgatcctgttgtaaaagctcttgcaaatgatcttgatatacgcttgaaccacagggtgaccaaaatatccgatggttacaacatggtaatggtcacagttgaggatggcagaaactttgttgctgatgctgttattgtaactgtccctattggaatccttaaggccaatttaattgaattttcaccaaaactgcctcattggaaggctgaagcaattaaagatattggtatgggaaatgaaaataagattgccctaagatttgatgcagtgttttggcctaatgtagaagttctgggcatagttgcacccacctcttatgcctgtggttattttctcaatctccacaaggcaacaggccatccaattcttgtgtatatggcagctggcaagtttgcctatgaccttgaaaagctgtctgatgaatcagctgcaaattttgcaatgcaacagctcaagaagatgtttcctgatgcttctaagcctgttcaatatcttgtgtcacattggggaacagacccaaactctcttggttgctatgcttgtgatttagttgggatgccagatgatgtgtatgagaggcttcgtgcaccagtaggtaatctattctttggcggggaagctgttagcatggatgaccaccagggatctgtgcatggagcttactcttctggggtgatggctgctgaaaattgtcagagacatcttctacagaaacaaggccacatggaaagtcttcctctagttccttctgttaggcatgaaatatttgaaactactatacctcctcaaatctctagaatttgattatgtacccttccttgttcttgaaaatgagaacaatgctcaaaagaatgagttgctgattagattaattaatgcacattgtagttcaacttaaaccatagtgactaaaatatttagggaagccaccataaaaaatcatattatccaag

SEQ ID NO: 18436 - DNA, 449 bp, Glycine max
atcgagccgatttcagaatcaagagagaggaagaaaggtgagaagaacaagaagaagaagaaaagaaaacccactcacacacactctctgcccctgcacatgcacatgcaccattctcactaatcactagggtttattcatccatccatggagctaaccgttttctctctcttcttcttcttcttcaccttccaccttccctcctgcttctcaggacaatcgagctccatggaatcagtgcctgatcttcagaacactatgtacgcttccatcgacggttatccttgcgtgcgcctgatgaatctctctggcaccatcggttgttcaaatcctggacgagataaggttgtggctccaattttaaagttcgaaaatgttgacaaaatagctgagccttctgctatattggtttcactggatgagtttccaactctctttactagaatatc

SEQ ID NO: 18437 - DNA, 1172 bp, Glycine max
gtcccattggccattgtacatgcgccatttgcagtcttcacttcttgtcctaagcctcaacacaaacacaaactcaaacacacacactctttcttctatcttctcccaatttgagttgagattctgagagtaacaatcaaagtttggaaaaaaaaaaagttttgagggaagaaaagaccacgatgctgggtgtggccactcttactctgggttcatccaccacattggtggctcagaaccatgctcaacaacatgccaccactcttgcctcagccaatggaaacagaagggacagtgtttccaacaggactcaccccttgcctatgagtttggtatcttccaccgaccaaagtttcagctttctctcttccttcaaagaaccaacacatgcacgccccttcaccactgctgttgcatctgttgattctgaccagcttaattcatctgatcctcccaccaagaatgaagcctccaagtattattttcttgttgcaaatgcaaagtttatgttggatgaggaggagcatttccaagagcaattgtttgagcggcttcgtctctttggagagcgtaatcaagaacaggatttctggcttgtcattgagcctaagttcttggataagttccctaacattaccaagagattaaagagacctgctgttgctcttgtgtcaaccaatggtccctggatcacattcatgaagttgagactggaccgagttttatctgacagttttgaagctgagagcctagaagaagcattagctttcaatcctactgatctgaagtttgagaagcctgaaaaatgggtggcaccctatcctaaatatgaatctggatggtggaaacccttcttgccccctgttcagacagaggtgaagccttaagatattatttatccacctgtttcagtgcttggtattcttaaatcttctttttccaatggttcttgttcaagtgcaactggatggtagttaaagttggctaaatttgcatccagttttgtttttttgggagttagtatgattatttaaagttgaggtgttgtccttaggatctaagttgtaggagttgtattttatgtctcacaaatgagttaagtataatagataattgttatgagattgatgttctcggtttctagaaatgtatgtgaactgtgaaggcccccc

SEQ ID NO: 18438 - DNA, 329 bp, Glycine max
atttttcccaaatccccaagagagaaaaaaaaaatcacacaatttctgtgaagctaaagcttgtggtttctttctcattctctcaaccaaaggtgaaagaaagaagagagtgagagaagagaaggtcctgaggtaaagatacaagctttgctcttctgctcactggatcgggttccaggaattcaagggtaggttcaaaaggggttgtgttgatctgcaccaagatgcttaatttgcgttgaaaaatccattcatttgcgagacttagcttcggagatgaaccagttagttgaaagctcaatgaatactcaaagggtctctagagttca

SEQ ID NO: 18439 - DNA, 506 bp, Glycine max
cccacgcgtccgcccacgcgtccgggaagttctctgtttatgtccatgcatccaagacaaagccggttcatgtgagccggtattttgttaatcgggatatacgcagtgacccggtgatttgggggaaaatttctatggttgatgcagagagacgactattggcaaatgcccttcaggatactgacaaccagcaatttgttctactgtctgatagctgtgtgcctctgtatgattttgagtatatctacgagtatctgatgtatacaaatatcagctttgtagactgctttaaggatcccggtcctcacggcaatggcaggtattcagatcgcatgctacctgaagttgaggtgaaggactttagaaagggtgcacagtggtttgctatgaagcggcaacatgcaattatagtcatggctgataacctttattattcaaaattccgtcttactgccagcctggtttggaggggaagaattgcattgctgatgagcattacttgccaa

SEQ ID NO: 18440 - DNA, 661 bp, Glycine max
atttcacctgataatgatgttgctccgagtgtccaatgatccaaagaaatgaagtttgcttcccctcaagagctgctcacgttcaaactcctctcccaaaggaaaggaatgaacagcctgtgaatgttcatagagttgaaactcttgcaatgaatggctcaccatctgtacctcaggtacctggaggagctgtcagttctagtaacttagttgcctctaccagaaacagcgtgccttctgtgacgggccagaccactcatcaactacctagaggtaatgtggtgcctgttctgccccaacctaataattttacaaatggggtgccagtttctaatcaaccatcacaagccaagacccaagtttctctagggagtggagtggttgctgctaaagaaattcctgtagatggaaaccatgcacttgtctctcacactcaaactagccagaatttattgccaaccagcgtgcaaagtgaaggtgttcctccaccacataatcaatcttcatccaatgtggcgaatgaagatcaagctaaatctgtgagaatgcctggcatgccttttgagcaactggttactgaagttgtcaagaggatccaagctccgtcagatgccatggataccaagattgacaacagcaagtcaggtgacattacagtagc

SEQ ID NO: 18441 - DNA, 812 bp, Glycine max
cccacgcgtccgcccacgcgtccgcccactgtccgcccacgcgtccgtttgtagatctactcttgaatcttgtttttgtgttgattttaggttctatcaattttcattcataatattcttgtgctgaacctttagatctaaattttgttccaaaatattgattagaaaaaaaaaacacaaaaatctaagtgtaaatcacttaatccatgttgtcttagagtcatgtttagtcatagtaattgtcacattatgttctaagtttgtgttgaattttattttgttgattgaattctagatacatttgttcatgtattcttgtcattcttagcctatcttttgaattttgagtctaattcatgcatgttatttagttcataacatgttctaaatcaattcctagaagtagtcttgttcttgaacttttttttgttttctaagtttcctacatgatgcctatgatgaaattgagttgtggtgctgagttgtggctggatttgtgaatcaaaataagtcttaagctctcttgaattgtgttattcaagatagttgagcataagcaaacacaaattgtaactatccaagccttaagcaacataaacactactcttgatttctaggttgaaatcgctggtgctggcagcttgaacatacgaacttgtaaaaattactgggaattggtcactacgaattttgagctgaaatttttactgaattttctagacatcttgaccaaaattagaaaaaaaaagaaccgatttggttaaaggaaaaattagaaaatcacacaggttgccaaaaatcatgtccaggaa

SEQ ID NO: 18442 - DNA, 375 bp, Glycine max
gaatttcgcgagaaaccagagagaagaaagaaggaaaacagagagaagagcgcaatggaggagctattcgtagcagttctatcgatgcttcttgtggcagcgttgatcccactctacctatggaaacgccgtcaagattctcaacctccccctccccaccgcgacgaagctcctcaggctccgcggagagaaaccgtggcgcgcgccgccgccactcgtcgcatgcgtcgccgacctgccgcctctggagctagcacttcggcagatccacctgcgacgcaagaagaatctgctggtgagagtgacgatgaagctgctggtggagggtattatgaggctaaagcaccaaagaaaaaggagattaaaaggcaagag

SEQ ID NO: 18443 - DNA, 630 bp, Glycine max
ggtttacacgagcttcctcaaccaattgatgcagagcgcgtgaatttttcacttgttgctgatgttaaggatcctttgataactaaggctgcagagaggctcatttcaagtgaaggggaactcaaaacacagcttgagaattttcgtcgtgaccctgacatatcaagctggcttgaagatgcagcctattttgctgctattgacgacagtttaaacacaatcagctggtacaattggcctgaacctttaagaaatcgccatcttgtagctctagaagatagttaccaacaaaagcgagattttataaatgtatttattgcccaacagttcctgtttcaaaggcagtggcagaaagttcacagctatgcacagagtaagggaatcagcataatgggagacatgccaatatatgttggttatcatagcgcagatgtttgggcaaataagaaacagtttttactgaacaggaagggctttcctcttttagttagtggtgttcctcctgacgcattcagtgaaactggtcagctttggggcaaccccctgtatgatttgaaagccatggagaaagatggatactcatggtgggtacgtcgcatacgacgtgcacaaaatttatttgatgaattt

SEQ ID NO: 18444 - DNA, 372 bp, Glycine max
  unsure (1)..(372): unsure at all n locations
cgctagctaatgtggcttacggcgagggcggcatatcggggcacatgtgatacaatggatcagacgatacactgggatccgcggtttcttgctcgtcgacattatttgctgctgcgccatcattttccctattgtctggtccatcagatctctcagggaaacctccaagaccgatgggaaggccgcgagaaacctcgctcaagttgaccctcttcaggcaattctacattgtcgtcattgggtacttgtacttcacccgcatcgtggtctttgctttgaagaccattgccgcttataagtaccagtgggtgagtnatctagctgatgaggccggcagcctaacgtcttatgtcgtcatgttttatatggtta

SEQ ID NO: 18445 - DNA, 417 bp, Glycine max
ggtcaccggaactccccatggctgggatgtcctcttctacatcttccagttcttccgcgtcgtcctcctcttcaccgtcatcgttctcgtcggcaccggctggtccttcctcaaacccttcctccaggagcgcgaaaagaaggtcctcatgatcgtcatccctctccaggtcctcgccaacgtggcctccgtcgtcatcggcgaaaccgggcccttcatcaaggattgggttacttggaaccaggtcttcctgcttgttgacattatctgctgctgcgccatcattttccctattgtgtggtccatcaggtcgctcagggagacctccaagaccgacgggaaggcagccaggaacctggccaagttgaccctcttcaggcagttctacattgttgtcattgggtacttgtacttcac

SEQ ID NO: 18446 - DNA, 496 bp, Glycine max
atttctctctgcactcaaattcgtggccttactttttccatttacactcactcacgcacgagcttcaaaaccaaaaccaaactctgttctaacctccaaacttttatgccattcatgactcataacatcatagaaaaagaagaactactcacgaaccgcgaccaccaccgacaataaaaggacaacaacgtcagtgtttaaaagcatgaaaatgctgccacctcccaccgccggaggtgcctcccacagcggcgccggtgaccgcaccgtggtggtgggcatgaagatggactctcacagcaccgagttgctcacttgggctctgttcaaagtggctcagcccggtgatgttgtgcttgctcttcatgttcttgggaatgatgaaattgtgaatcgagaagggaaatcctcgctgttttcacttgtcaaagcatttgactctattcttgccgtttatgaaggattctgcaatttgaaacaggtggatcttaagttc

SEQ ID NO: 18447 - DNA, 361 bp, Glycine max
actttcaactttgcagagagctttatgagcttgtagtagcagagtggggaggtaccaaacagagcaattgaagttgagacattattaggtgttctagatcctagggtggcatctggaatcacactcttcaatcaacaatgaaattctgggacctattcttcgtggctctcatgccagtcttggagaccctcttgattactctccttggtttattaattgcaacccaacgatttaatctcctgcgaagcgttgaagcaaggaattatttaaataatgtaagttcttgcttattttttattttctctaaatccatttaggaacttatctggaaaggatcatccaaaattatgttgtgcttacc

SEQ ID NO: 18448 - DNA, 416 bp, Glycine max
ggcttttccttgctattatatgcttggatccacttgatcactgtgaatctctataattaatcatttccagatttttgaggatgggttactattgctataaacgcaattatagtactcatacatcagatgttattgtgatgttggcggtggccttgatgcttcttggcataccttggctctttacgcgtgaacaagtggtggtagttgaagaaaagaagacgaattggtcagctttgatcacaccaatactagtactactcatcctgcttttgctgtcactgattggaactcccaggagggtttatgcaaagccaacgtgctatcggtgtaagcatgtctgctactgttactgctagtgtcagtccaacacctgctagtgttcagtgctctatgattatctcatatctttggtcact

SEQ ID NO: 18449 - DNA, 450 bp, Glycine max
gatgccctggggctatggctaacctctatcatatgtgaaatctggtttgctttttcatggatcctggatcagtttcccaaatggtttcccattgatcgagagacataccttgatcgtctttccatcaggtatgagcgtgaaggtgaaccaaacatgcttgctcctgtagatgtttttgttagtaccgtggatcccatgaaggaacctcctctggttacagcaaacactgttctttcaatcttggccatggattacccggttgataaaatatcatgctacatttctgatgatggagcctcaatgtgtacatttgagtccttatcagaaactgcagagtttgctaggaagtgggtaccgttctgtaagaaattttccatagaacctcgggcacctgagatgtacttcagtgagaagattgactacctaaaggacaaagtgcaccccaccttt

SEQ ID NO: 18450 - DNA, 454 bp, Glycine max
tggagactcatttggttttgttgcttgctttgatcttcactgtagttgccggcgttggagcccaaggcccatccacctctcccgcgcctcccacaccccagtcttcaccacctcccatccagtcttctccgccacctgttccttcctcacctcctccggctcagtctccaccaccagcttccactcccccaccagccccactcagctctcctccccctgcctcccctcctccttcatctccaccacccgcatctcctccccctgcctctcctcctccggcatctccaccacccgcatctcctccccctgcctcccctcctccggcatctcctcccccagccactcctcctcctgcttctcctcctcccttttcaccaccaccagcaactcctccaccagcaacgcctccacccgcattgacccctacacccctttcctctccaccagccacttc

SEQ ID NO: 18451 - DNA, 1222 bp, Glycine max
cggagttctctccacgcgccaacttgagtcctccaggagcataaggaggcaagacatactacgttccatcaacagggctattcacaatgctcgtgagactgttgcacttgatttgggctccgagttcaccaaattcaccaacaatgtcacttgcaggacggccatgagcaccagttgtgcggaaaaatgcgaggatgctgagaggatcaggaagctagtaaaggagtcctttgagctagctgcgaaattgtgctttggtgatgtgttgggccctttcaaggagttgagtttttgggtgtatgggaaaaaggccatagacatgagcacaaggtacgatgagttgttggaagaggtgctcaaggagcatgaacacaaaagattatcgcgtgcaaatggtgatcaaagtgaaagggatttgatggatattctgttagatgtttatcatgatgctcatgcagagttcaagatcacaatggctcatattaaagccttctttatggatctcttcattgcaggcacacacacctcagcagaagcaacacagtgggcaatggccgagctcctcaaccaccctgaagcatttcaaaaggtgagaaaggagatagagttagtcactggcaatgttaggcttgttgatgaatccgatatcacaaacttgccatatttgcaagcagttgtgaaggaaacactaagactcttacccgccggcaccaatcacgacaagagagtgtcgccaacactgcaaaataaacagcttcgatgtgccaccaaagacagcagtggcaatcaatttgtatgccataatgagagaccctgattcttgggacaatcctaatgagttttgccctgaaaggttcttgcaagaacaagatcatgaggatttgagtgatgatggtaagagaatgaagttcaattttgttccatttggaggtgggaggagaggttgtccagggacagcactggcattcagcttgatgaacactgcagttgctgctatggtgcagtgctttgattggaaaattggtaaagatggaaaaggagaaaaggttgatatggaatctgggtctggtatgtctttgagcatggttcacccccttatttgcgttcccgtagtacattttatcccatatgatatataatataattcaatataacgaagactcaccaaggaagaacttatattatgatatgatgggtaattttttatttaacccttattttt

SEQ ID NO: 18452 - DNA, 442 bp, Glycine max
ttctcttcttcctcttcaatgtctatagcaagaccccatttggtatgaattatgaccatggctttaagttcactttttttctccactcgtttcattcccacaccctttgttacttccactagaaacataccttcttctccacgcacttgtgccagttgcattccccacaaaagagactttccactccctgcagtggcttcagtcccttaccaacccatcaactttgactacctgcaagaggaattcagtggacatggagtcacctttgaaggagttgaagacagttgtattgccaagatggagctgaaaaatggaagcattgtgaccatgatgctgccaagtggattgatcacctcatacaaggcccctatgtggcatggtggcaagttggagttgcttcataccaatgtgtcagagggagagtatggtgatgccatcattc

SEQ ID NO: 18453 - DNA, 807 bp, Glycine max
atgaaactagagctaagggtataaggttcatccagagtaatggcaccttggatgaaacctatgaagcatacataaacaaagccaagaattcaagttcaaagggtgatgtcattttggcagcaggtgcattaggtagccctcaacttatgatgctaagtggcatagggccaaaagaacagctgagaaggttcaacatttcaatagtgcatgaaatgaaaggggttgggcaaggaatgcaagacaacccttgcatagcagttttggtggactcaaagccacagaataggctccctgatccaccccaaattgctggcataacagatgacttcaagatcatagttgaagcatcaatacttcccctaacttccaactcatcaagggttaatgttgctgccaagatagcaatgcctacttcaaaagggatgcttgaactgaacaacactgaccctaggttgaacccttctgtgaggttcaactatctagcaagtgatgatgacatggaagaatgtgtcaagatgacaaagctacttgagagaattgcaaggtcgaagtctattgcatttttccttggagaatcaaagcaagaaaaactgacatctactgatattgatctaagaaacttctgcaagaaaaatgtgagaacaatctatcactatcatgggggttgcacggttggatcagtggttgatgagcactacaaggtttatggaataaagggattgagaatattggatggctcaactttttcagagtcaccaggcacaaacccaatggccagccttctgatgctaggaaggtatcaaggac

SEQ ID NO: 18454 - DNA, 441 bp, Glycine max
cccacgcgtccgatttgcgcattattggagagccaaagcttccatcagtgtttcttcaaggcatctgttgggttctgggggaatacggaacagcagatggaaagtattctgcttcttatatcagtgggaagttatgtgacattgcagaggcatattccaatgatgaaaatgttaaggcttatgcaatttcagcactgttgaaaatttatgcatttgaagtagcagctgggaggaaagtggatatcctatctgagtgccaatcgttgattgaagaatcattggcatcacactctacagatttgcagcaacgtgcttatgaattgcaagctcttataggtttggatgtacaagctgttgaaacaataatgccacgagatgcaagttgtgaagacattgaggttgataagaatctttctttcctcaatgggtatgttcagcagt

SEQ ID NO: 18455 - DNA, 519 bp, Glycine max
cacacgcactcttcttcattccttcacacacacacacacatacataggcaaagacacagaaaaaatagtgatggaagaacaagagtgccaagttgtggaaaataaggaaactccaactcctcctgttcgagtctatgctgatgggatttatgatctctttcacttcggccatgcccgttctctcgagcaagccaaaaaactgtttccaaacacttatctccttgttggatgctgcaatgatgagatcacacataagtataaaggcaaaactgtcatgactgagaaggaacgctatgagtctcttcgccactgcaggtgggttgatgaagttattccagatgcgccatgggtaatcactcgggagttccttgacaagcatcaaattgactatgtggcacatgatagtcttccttatgctgatgcaagtggagctggaaaggatgtgtatgaatatgttaagtctcgttggaaaatttaaggaaacaaagcgaactgatggaatctctacatatgatatca

SEQ ID NO: 18456 - DNA, 493 bp, Glycine max
ctggaggagaagtctttggaggtcaaagaacattgattcctcttcatgctatgtttgaaaatgttattgatagaacttctctaagcactccttgggaaatgattaggctctatgggaaagaggtgaaccttgttgatactcctggaccgccacctttcgttgaagaagtaacaaagcgtgcagcttggaaaaatgcaggtccacgtcctcgcccacttcctccacctccagctaggccaaaatcatacaacatagaaggttggtggggttgggtagctgagagtgataatgagcctgatagtacagttatagaactgaggaccaatgcccataaattactatgggaggctattgactatgtgatctgtgttgaggctgatgtattcatccctggatttgaccgtgacgggaaggggcatccaaattttgctagcttggtgatggggcacaggctatatcagtcagctgcatcaaagacatttagacctgacag

SEQ ID NO: 18457 - DNA, 712 bp, Glycine max
gtgatttgaactctcctcaggtcttaggttatcctagcaaacctgtcggcctatttataagacggtcaattatttttcgatctgattccaatggtgaagatctagaaggttatgctggtgcaggtctttatgacagtgtgccaatggatgaagccgagaaggtggtgcttgattattcttcagacaaactgatccttgatggcagttttcgccagtcaatcttgtccagcattgcccgtgcaggaaatgaaattgaagagttgtatggcactcctcaggacattgaaggtgtcatcaaggatggcaaagtctatgttgtccagaccagaccacaaatgtaaacttgcatacccatgtcttctaagccacctacctcaactatgttcatccccgtgcaacacgtcgtttcaaacgtggccgtggcagcttctgtgagttcaagagtaacccccggattaccaaacatggccttatagatttattacatgatatattgaaaattaaggaataagtgtataaaaacggaatattgtaaattaagaaaaatttagacggtcttatatattctttttccctactatatacaatatagtgtatctagttacttcttcctaatcaaaattatatttttacttgaggtgtatgccataaaatcaaatggaagcatgatgaaaatgagcataaaaaaaaaaaaaaaaaaaaaactcgagac

SEQ ID NO: 18458 - DNA, 438 bp, Glycine max
gaatttcctgtatatattcagttgtacttgtatcatatattggggctgtgtttcacaggtgtagagaatatggtaaaaaaaataatcaacatacgttttgggattttttaattttttttgtaattcttaatcttttaatcttagatactaaaccaaatttaatgtagccttatagctgatacttgttgaatagaattagctgatgcatctcagttatgattatttagaggaccttgggagcgtttcatgtgttagaaatgttgacagatatcaacacaactgcagtgatttcagttttaaaagtttaagttctcagttgaaaaatatatttgtttcctttatggcctttttctgttcaacatatcattaatacattattatttggaattcttcctaaatatatttggccatacaattgcaatgtgctttgatctttaa

SEQ ID NO: 18459 - DNA, 227 bp, Glycine max
gcaatttatgtttcttcaactccctgttaaagctagtgcagctgaagggggtggctggcagtggtgtgttttttctgctctcaagtgagccatttcctttttccctccttggcccttgcatatatattatgtataacataagatgacagcctcacttagtacaaaaatagattactgtttggcttggtcaatggcaattgaagtttcctgtgtcctgtgttagtgtt

SEQ ID NO: 18460 - DNA, 412 bp, Glycine max
gcgtccgcccacgcgtccgaatccgggtactatgcaatgcaaacatctctgagcatttcaatcccaagaaggatgcatcatttcctgaaatcaacttggtaaatggggagacaagaggtcttatcggtgggtaccctccatgtaaccgaacaattttggccttctttgcagggcaaatgcatggtagaattaggccagtgcttttccagcattgggagggcaaagacaaggatgtgctagtttatgagaaactcccagacggagttccataccatgagacaatgaagaagagcaagtattgcatttgtccaagtgggtttgaagtggcaagtccaagaattgttgaggcaatctatgcacaatgtgtgcctgtgataatatcacaacaatatgtgcttccttttagtgatgt

SEQ ID NO: 18461 - DNA, 410 bp, Glycine max
gtgattttcatcataggcgtgatattatcatgccatgtaatttgtctcatacattggcagcacgcaccacttattgttgtgtataagtttcatagcctgaatatctggtttcttttgatggatacgtagtagtagcagcagcagctgagagaggggaccatggtttgctaaaagggataagctgatgaagcttgcaggatattccctggccgtttcctttgctcccataagttctaatgtcgttaaaagcaataaaagattcacggtaggtatatctcataggaataggtgcagctataggctgttttctactcatgcccagaaacaccaattacatgagaaacctggggtggttgccagataccaccttcctccttggtttagtgttgctccaatgatggactggacag

SEQ ID NO: 18462 - DNA, 290 bp, Glycine max
cactcgagccgaatcggctcgagcctgtgtggtgcctggtgctttgactctcctcttcagtgtcgcactgcgttggactcgttcggcaccgtcacgcgttccttgttcgaatttgaacttctgtgtggtgcctagtagtagtagcagcagcagctgagagaggggaccatggtttgctaaaagggataagatgatgaagcttgcaggatattccctggccgtttcatttgctcccataagttctaatgtcgttaaaagcaataaaagattcacggtaggtatatctcata

SEQ ID NO: 18463 - DNA, 383 bp, Glycine max
atgagagagtaggtgacttgaatatcaacgtcttgaaagatatttctgttgcaagctgtatgattgatactaaaattgacggagctgaagctacgggagtgaatcaaaaggatctactacagccaaatctactgaaaggaatcactgctgatgaaaatactgctgcccatgatattaccactttaggtgtaattaatgtaagatattgtggttatgtggtcacagtgaaagttgagcgaggagttaatgaaaatgttgactctccatctcaacaaaatattgaattgtttgatcagccagagggtggtgccatcgcgctcaatattaacagtctgagattacttcttcacaactcaacttcaccagataacaataaaccattg

SEQ ID NO: 18464 - DNA, 319 bp, Glycine max
  unsure (1)..(319): unsure at all n locations
ctcccttttgtttttctttctaatataaccaaagattctatgcgtgcgggattgtgagttttctttggattttcgtctttttgagccttctgttgtgttactgttatgctttacaattcaaattaactgtatgtacctgagatatagagggagagtggttatataattcttttccaatgaattggtgggttgtgaatcnnnnnnnnnnnnnnnnnnnnnnnnnnnnnnnnnnnnnnnnnnnnnnnnnnnnnnnnnnnnnnnnnnnnnnnnnnnnnnnnnnnnnnnnnnnnnnnnnnnnnnnnnnnnnnnnnnnnnnnnn

SEQ ID NO: 18465 - DNA, 552 bp, Glycine max
  unsure (1)..(552): unsure at all n locations
tttctgtcaactccctccaaactccaagctctctattttctctgagaaaatttgcaaatgtcgaatttcctgagcaatactaatccgaaccctaataagtccttcgaggtgaatcagcctcccactgattccgtgtccagtcttagcttcagtcccaaagccaacttcctcgtcgccacttcttgggacaatcaggttcgttgttgggaggtagcacggaatggagtaaatgttgccactgttcccaaggcttctataacgcacgatcatccggttttgtgctctacatggaaggatgatggcacgactgtattctctggtggatgtgataagcaagtgaagatgtggcctctgttatctggaggccaaccaatgactgttgccatgcatgatgcacccatcaaagaacttgcttggattcctgaaatgaaccttttagtcacaggaagctgggacaagactatgaaatactgtgatacaaagcagtcaaatccagtgcacacacagcaactcccagagcgctgctatngctatacagtgagacatcctctt

SEQ ID NO: 18466 - DNA, 422 bp, Glycine max
ctttgttgagtgatgagggtaacaaggtgaggaaagaatggggagtgccaggtgatttctttggatcattgcctggaagagagacttatgttcttgacaaaaatggggtggttcagctcgtctacaacaatcagttccaaccagaaaagcatattggtgagaccctgaaaatacttcagagtctttgagacattctgattcttttgttggctatcttagctggcctgattcagagtcagacaagtatgtaactatgaattgtaagtttgtaaccactgtaattatgtagctgattttggagcctttgatcacattcacatgggggtgatgatatgtattctcctatagagagcaaacatttataacctctccggatggaataatgccttcatttgccacaaatacaatcagattatatctgt

SEQ ID NO: 18467 - DNA, 407 bp, Glycine max
aaccaaggaagatattcttagccttccctgcttccagaatcaagaaatgattgcaatcaaggctccaaaagctagttgcatcgaggtccctgatcctgatgaggaattaggttttcggcaaaggcagtacaaaatgattgttcgaagtgccattggaccaataaatttgtatctcttgagcaaggacgacagcaagtttgaggatgatagtgccaaacggatgaaattaatggatccatcatggaatagtgatcccatcagaaagaggggtgtgggattattagaaagccaacatgatgaaaaaaatccttctgagcatttcagtttgcagggttcacaagcatttggaattcaagaaattactcccacggattttgaaatggaagatgactattggtttcaatcag

SEQ ID NO: 18468 - DNA, 433 bp, Glycine max
aatttaagaaagaaataattcatacagagtacataattatactttggtttgcgtttgcggtgaagtcaatggatcctcagttgtggcacaaagttgctgcgatttcaggagtggcagcacttggattgggaacctatggtgcccacgtcttcaagccccaaaaccctgcttacaaagatgtttggcacacagcttcgctttaccatttggttcacactgctgccttagttgccgccccaattacaaaacaccccaatgtttttggaggccttctgaccgctggtatcttggtcttctctgggacgtgttatactgtcgcatttcttgaagacagaaaatattcaaccatggctccatttggcggctttgcatttatagcagcttggggtagcttgtttttctgatgacttcgactctattttggtctgtgctg

SEQ ID NO: 18469 - DNA, 508 bp, Glycine max
gtttaatggttagggtttcgtagggccgtcatcggaatgttccagaaggcccttccgtctctctttgccctttccaattccgttatacgacggcgtttcgtgccaaccatgcgttgaattgttttttttttttctttttccttcagtggcggcagttctggtatggaaatgtatgatgtttctgaaactagaaatgcagatgcttatttgattgaaggcactgatttaaacttacatctgacaagcccaaatattcaacaatttcaagccatgtttaatgatggagcccctgaatttgttgctgatcagaacttgtattaccctgctgccaccaattatgggtattactgtacaggatttgaatcacccggagaatgggaggaccaccataggatttttggtgtagatggtcctgatattcagtacacaggtgcacaaaacgaaagttttccatatatatattatacccctagctatggatttgcacagtctccatacaatccataca

SEQ ID NO: 18470 - DNA, 687 bp, Glycine max
tcaggagctttacagacattgcttgagaagggtgccaagtacctagtagggcagggggggcctctaactgggtgcttgacattgtccatgtacctggctccaccagatgatagggatgacattggatgtgtgaaaagtgtcaacaaccaaagctactaccacaaccttgtgctgcaagacaaattacaagaattcaggaaacagtaccctcaagctgtcatactttatgctgattactatgatgcctaccgcactgtcatgaagaatccaagcaaatacggattcaaagagaccttcaacgtttgctgtggatcaggagaaccaccttataacttcactgtgtttgccacatgtggcacacctaatgccactgtgtgttcaagcccttctcagtacatcaattgggatggtgttcatctcacggaggccatgtacaaagtaatttctagtatgtttttgcaaggaaatttcacccaacctccgtttaattttttgttggaaaaaaaggagagggtggggtgaatggttagtatttgggatttgcttgtccctatgactttaatgcatcagctaatgtaactataagtgagggaatcaggtcttacctgttttgctacaacttgtgtcctctgcacatcatatatgatgagaagttctaaggaatatgttgtatttgtattagtatct

SEQ ID NO: 18471 - DNA, 472 bp, Glycine max
caacgtttgctgtggatcgggagaaccaccttacaacttcactgtgtttgccacatgtggcacacctaatgccactgtgtgctcaagcccttctcagtacatcaattgggatggtgttcacctcactgaggccatgtataaagttatttctagtatgtttttgcaaggaaatttcacccaacctccgtttaattttttgttgggaaaaaaggagagggtggggtgaatggttcacccaagaataatactaatatttgggatttgcttgtccttatgactttaatgcatctgctaatgtaactataagtgagggaatcaggttttacctgttttgctagaacttgtgtcctctgcacatcatgtatgatgagttcaaaggaatatgttgtatttgtatttgtattagtatctgccaaggctgtcttaaactcggtatcagttagtgcttatctagattagttgattttgggtt

SEQ ID NO: 18472 - DNA, 459 bp, Glycine max
aattccgggtcgagcacgcgtgcgacctgactctctctattacagccttggatgcgcacgctctgtcatgaaccgtataacgagaccaggcatacctgaccactttcacagagtcctaaaacccggggcgctcggccgcatacgggactctagcatcagcgcctgatctcaccgcctcaactagcctcctccagccaccagatctctatccagagctctgcctatccgtagccgctgcctgactccaaccaggctgaggccaccggcaccgccgacgataccggctacccgtgtcttactcgctaggatctacggcccgcgctgaccgcagctggagaagctcatgtgacgcaagtgcatactcttcagacgcgtcaatcccggcgacgactcgtacgatctagtaattgacgatcttatcggcgggaatcgaatccggagtctctctcaaagaagaga

SEQ ID NO: 18473 - DNA, 563 bp, Glycine max
gaaaacaagaagattgctccagagctctacccctatggtagcagaggaccggttggagcacattacctttctgcaaagcacaatgtaagatggggagatcttggcgaagactaataaatggcagagctctcttgtgatcaagcacactcattatcagtttcttttccatcacattacaggacagctccgtgcttgcctcgccatcggttggaaggaggaagtttcgtatagaatgatagcatacttttttatgcacgatagcctgtgctttccacactggtggcaagttgatttaaaataatgactattgcatagtatgatagaaactggaccagaattcagaaatggaagaaagacaaaatttcttattgattgagtgtatctctacaaacaaatcccttggatattcaagagatacaggcctctatcccttaaataactaactgacctatcataaaattagtaatgaagaacaactgaagcatcgtcaattggagcaaatgcagctcaacctcaaaatctgtatcttttgtggttgatttaatggaacattctttacagtg

SEQ ID NO: 18474 - DNA, 377 bp, Glycine max
cggctcgagctcgagccgaatcggctcgaggcaaggcttgctgatttcatccaatatgattggtaccgatctaggaggagtagcatgagcattgaggatgatggttcaaactccaatgaatcatcaagttacagattaactgtaattggaacaactggtttcaccatccaaccaggatacgagagtggcggggagagtgtgcagcaagcaagtgtatctgttggtttcccaactgtacaaagtgtgactgatgttattgagatggaaccggtcatgactgagaggagagtgaggtttgctattgaagatgagcctgagagtgatgcaaggtctgagacaggaatgcaaatgcaggaagagttggaagatctttatgc

SEQ ID NO: 18475 - DNA, 437 bp, Glycine max
gcgcagttctgctacaacctccacacaaagatgctgcaattgatatcttaataaagtctggagaaaaggatcttgtgaaccagttgaccggcatacataagaaggggctttgatgataaaatgctttatgaaagaggtcacatctattgtttatccactgcgtttgttcacaagtttgcattgtataacagcaacagttgggattggtttctgttacgcaggctgatacttgcttcatttcttccccttgtaggagacacattattcttgagaacagtatgctaacctctatttgttttgctaaacccattttccttatagattcagcttaatattgataaattgttaaacccattttcctaatacaaattaatgaaacttctgttctttgatataatgagtcgaataaaatggttaaaatatttttccctttttat

SEQ ID NO: 18476 - DNA, 415 bp, Glycine max
gcgcccacgcgtccgcccacgcgtccgcccacgcgtccgagcggatagaggacttgactggttaatcggagtgcttcgtgccgtgcctaaattgcagcatacttgacgcaaattttgctcagctaacgcattgtatatgttttccttatttgcgttgttgttaatgttaactgtcttctggctggtgcaaagttttgtttagttttggtagtggcttaatggtgtgtctgattgagaagtggtactatctaatttctcactttcttgtttttcactttttctcctccttttttccgtctcatgttatttgccttgagtgtgagtaaaagcctgacggcattcattcaacctggattggtaatgaaggtgatcttgatgtatgcttcagttgtcttaatctgatgtattccaatca

SEQ ID NO: 18477 - DNA, 532 bp, Glycine max
aatatatgctggccttggaacgcattatgtgccatctggaaagcccaccaaaccagtctcaaaaaacgacaatctcgaacccgttcaccgttggatcgtcgtgaaatttgagtatcatgttcgcaacacaattacgagcattctcaccgttgggaatttcgatatcatgtctgaactgagagaaacacccttcgcattgtagcctttttctttcccgcagaaacccagagctgtcttggtaaaactacgatctcggtttcgttaaccgttggattgttgtcaaatttggatatgttgttcgaaattcaattgcgcacgcttccaccgttgggatttgcgagataatattcgtggagggagaaaaaggaatcgcatgaagacagtacaagtggaggcttcaatctcttctccgtctctctgacgtttgagaattctatcggagcagtcggaggaataactggagaaatctcaaggaaccgctagagatggcgctatcactgtcagaagacacgtgagtccgctgctgtgagtc

SEQ ID NO: 18478 - DNA, 486 bp, Glycine max
acgagctcattttcgtttttccccttctcctctcaaaaccctttctttttcccgcagcccaccaaaccagtctcagaaaaacgacgatctcgaacccgttcaccgttggatcgtcgtgaaatttgagtatcatgttcgcaacccaattccgagaattctcaccgttgggaattttgatatcacgtctgagctgagaggaacacccttcgcattgtagcctttttctttcccgcagaaacccagagctgtctcggtaaaactacgatcccggtttcgttaaccgttggattttcgtgaaatttggatatgttgttcgaaattcaattccgcacacttacaccgttgggatttgcgagataatattcgtggaaggagaaaaaggaatcgcatgaagacagtacaagcggaggcttcaatctcttctccgtctctctgacgttcgagaattctatcggagcagtcggaggaaaaacttgaggaatctca

SEQ ID NO: 18479 - DNA, 601 bp, Glycine max
gaaaaagctagcagcgaagttaatgtgccttatgttggcttcccttggtattcccaaggaagacattcaaatgggagggccgaaaggagaattcaacggggcttgtgcggctttgcattggaattcttacccgagttgcccggatccggatcgggccatgggtctggccgcgcacacggactccactctcctcacaatcctgcaccaaaacaatgtcaatgggcttgaggttctgaaggaaggggaagggtgggtggcggtgcctccgcttcccggagggctcgtgatcaacgtcggcgatctgctccacattttgtcaaacgggttgtacccgagtgtgctgcatcgagttcgggtgaaccgaacccggcagaggttctcggttgcttatctatatgggcccccaacaaacgtccaaatcagtccacaagtaaaattggtaggcccaacaaggcccgttctttatcgatcagtgacttggaacgagtaccttggcaccaaagcaaagctttttaataaggctctttcagctgttaggctttcttcatctattaacggtttgtttgatgtaaacgaggataagagtaacgactttcaagtg

SEQ ID NO: 18480 - DNA, 394 bp, Glycine max
gttcagatgtgtatgtttgggatactgatagtgggactttggtgaccattgtccatgatgctcatgttggtaatacttatgctttggcacggagccatacaggggacttcctttttactggaggtgaagacggtgcaattcacatgtatgagattgttaatgatggctatgagtctaaagcttggcatgttgctgtttgggttcctcactcggctgctgtgtattctcttgcctttgagtttccatggcttgtttccgcatcaagtgatggcaagctggctctaattgatgtgagaaagctgttgaagattagcaagcgagctctggggaagagagtctcaaaggtaaagcatttgggtggagacatagtagagccttcacagaggatgttgca

SEQ ID NO: 18481 - DNA, 1295 bp, Glycine max
cggtttttcactctcttgatactgtttatcgggcgtgtgtttaacattcacatttacaatgaacaccatctcatcactgacccttgattctcacgcaatatgcaaccctcagcgccccatctccctccgccaagttcgccccaccactcgaaacgtcgtcgtgtgctccgcgaagcccgtcgcgcctccccccaccaagctcgctcgccgccgacacctccggctgccgcatcggcgcgctgagccaggtctccggcgtgctaggttgccagtggggcgacgagggcaaagggaaactcgtcgacatattggcccagcacttcgaaatcgttgctcgctgccagggtggagctaatgctgggcatactatctataatgcagaagggaaaaagtttgccctacatcttgttccttctggtattctgaatgaggatactctctgtgtaattgggaatggggttgtagtgcacctgccggggttgtttaaagagattgacggtcttgaatcaaatggggtctcttgcaagggaaggatattgatatctgatcgcgctcacctgttgtttgattttcatcaagtagtggatgggctaagagaagccgagcttgctaaatctttcattggcaccaccaagagaggcattggaccctgctactccagcaaggttaaccgtaatggcatccgagtgggtgatttgaggcacatggatactttccctcagaagcttgatcttatattgtcagatgcagcattgaggttcaaagattttaactatggcccatatatgctcagggaagaagttgaaaaatacaagaggtatgccgagaggttggagccctttattgctgatactgtgcttgtcatgaatgacgccatagaacaaaagaagaagattttggttgaaggaggacaagctaccatgttggacattgattttggaacttatccctttgttacttcttctagcccatcagctggtgggatatgcactggtcttggtattgctccaagggtacttggtgatttaataggagtggtgaaggcatacactacaagagttggttctggtccttttccaactgaaattttgggttcaggaggtgacctcctcagatttgctgggcaggagtttggcacaactactggccgcctcgacggtgtggctggctcgatttagttgcactgaaatactcttgtcagatcaacggtttctcatcggtgaatcttaccgaggtagatgttctatcacatcttgaagaaatacagataggtgtctattacaaacttgctgatg

SEQ ID NO: 18482 - DNA, 542 bp, Glycine max
attaaagaccacttgtgacgggaaaattgatcaaagtacaccctagtggagtgaagggaagagtcacgttcaaagcggaggctatgagtgtggctattatgtcatgcattggatgtggaacataatcagaggggagttgaagactgattggaccatgtggtttggtgatggcacgccactagacatcgagaccatgacaacattacagaaaaaatgggcagcatgctttttaagagttagaagcatcgaatgtagaaagctttagatgacatgccaacaaccactttggtgtttttcatgcatttgtttaagttttagaaacaatttttactgctgtaatgaccattatttgcagggaaaatagatatttgttcatttcattttggtatgcactcaaacattgagacaatgcattgtatttgcattcggtatttgcgtgggtaggatatgtgtttgttgtgcaaccaagctgcccatttttgcaggtctttgcaaaggtgtggatttcaaaactgctaatgatacaacaactttagaatatt

SEQ ID NO: 18483 - DNA, 452 bp, Glycine max
cggggggacccacgcgtgcggaaagagcacgaggaaagggggacttcagttatagccgtttctttgcaatacgcctcggtcgtcgtcttgagttagcaaatgcaatgcaaccaacaattttggaaaagctctgtgcggttttgaatgtcaacaaaagaagtgtggatcgggacttggatgtgtatcgtaacttgctttccaaattggttcaagctaaagagcttctaaaggaatatgttgacagggagaagaagaaaagagaagaaagggctgaaccacaaaagtctaatgaggccattacacaacaacaacagttttctagcctttagttatggggttcctttggaatgatcaccttgtgaagatttggtcttgacttgcttttttttttctgttggtctttggcatggtaatcagagtggggcacttctatcatcatggttttgcctact

SEQ ID NO: 18484 - DNA, 759 bp, Glycine max
cttgatcatgatgatactgaaaagcagatgttgaggaaattaagtaaacaactgagtggtgaggattggacatggaacaatttgaatacactctgctgggcaattggttctatatcaggttccatgatggaagaacaggaaaacagattcttggttatggtcattcgcgatttattaaacctatgtgaaatcacaaagggaaaagataacaaagctgttattgcaagtaatatcatgtatgttgttgggcagtatccacggtttttaagagctcattggaagttccttaaaactgttgtgaataaattgtttgagtttatgcatgagacacatcctggagttcaggatatggcctgtgacacatttctgaaaatagtccagaagtgcaagcgtaaatttgtaatcacccaggtgggcgaaaacgagccatttgtgtctgagcttctgacaggtcttcccatcactattgcagatcttgaaccccatcagatacattccttctatgaatctgttggtcacatgattcaggcagagtctgatgcacagaagagagatgaatatcttcagcggttgatggagctcccaaatcagaaatggatggaaattattgggcaggcacatcaaaatgttgattttttgaaggatcaggatgtaatccggacagtgcttaatatattgcagacgaatacaagtgttgcaacttctttagggacatatttcttgccccaaatctcattgatctttttggacatgttgaac

SEQ ID NO: 18485 - DNA, 456 bp, Glycine max
actcgagccgaatcggctcgagattactatgaccttcataagggaggatgatgatgatcaagttgatgatgatcatgatcatgatcatgtggatggtggtggatcacaaaacagtgccagcaacatcactgaaattgtgaccaccccagaaggggaaaacttaggagaatggctgagtctaggcctcaaaggagacatcaacatgccagcagaagaacaaaactcatcatcaaggcctctccacagcaacaacaacaaggtattctcatgcaacttctgcatgagaaagttttacagttcacaagccttagggggtcaccagaatgcacacaagagggagagagaagctgctagaagctaccaccaatctcatcatcacagaattgggttttcttacactacttctctggcaactaggtcactgggaattaagcctcactctcttgtgcacaggcc

SEQ ID NO: 18486 - DNA, 502 bp, Glycine max
actcttaggatccccatccgtagcctcttaatattcagcaccatcaacagccatatcaacatcttattcaacgccaacacctgttagatctcgtttatcttcctcagtaacccggctaggcattaaaattttaataccgatctcacaaaggtttttattggtaacagaaataatataacgcgttgccgctgtcacatcgctagcaactgtaatttcgctggctgtatcagtaaacccctgaatataatcctgcgtttgcgtccctggtctgaattctgccttaacattctgaaagtttagtgaaccatcctgattcataaccggaacgtcatcaaaatataaatctttcaatgaaaagtctggatcaacttcaccatcataaacggctaaaagaattctgatcctgttaattgaaattatgttatcttccatttcaacaggtgtatgacgctgtgaagaaccgcccttactgccatttatcatatttttgatcataactttt

SEQ ID NO: 18487 - DNA, 562 bp, Glycine max
ggctcagttcaaaacgatgggtggatccttgaaactattgactacaaagatgcctcggagcctgaggtgttgagaatcaggggttttaaatttaacaaaattgagcagctggaaacgaaatactccgagcctggcaaatttcacttgaaggcttgaacatgcatctgtgtaaaagaagttttagtcctcatgctacattcattattattctttgtctcttttgtaacctgtctttctactctttggctctcatgttctaagcagtgggatcagaagttttgcagagtttctctccgctcccctcccccccttccttttaggtgtttgatggggataagtgctgatgtactattttgttcataagttttgcccccacttcgattagagaaactgtttttgcattcctagctcaatgtgtaaagaatctgagtccatttgtattgctgtgtgcatatggaagacggttgacgtgcatttaataatgtgccaacaagttggactaaaataaagatcatattgattgttttacccatcatatacactggatctcaatctatgttcc

SEQ ID NO: 18488 - DNA, 332 bp, Glycine max
tcttattctttcatgttccaaactaaaatggcatctaactctctccattactccatccaacaccaccaatgttcactcaccaaacgccaccacccctcagacaccccaccccccacatcacttttcctcaaaccccctacaccccccatacaccacaacatcactctctcgcacactccttcaaactcatatatcacctattccatctctcaaaccacaccttcctccaccacctcccaaaccaccccgtccttcgacctcctccgccaccatctctccaccaataactttcagctggccgatgaggagacgcgtcgtcttctcatcgtgct

SEQ ID NO: 18489 - DNA, 953 bp, Glycine max
cccactcgttcgtgctcgcgtgcgttttgctctttcttcaagccaacctcttcccaactctttttgttcctttcttcctctcactctcaccatgattacagtaagcgtaagatggcaaaaggagattttcaaagatgtagaacttgacactacccagtctccttatgtttttaaatgccaattgtatgatttgactggtgtgcctcccgaaagacaaaaaattatggtcaagggtggtcttttgaaggatgatgctgattggtcaacagtaggggtgaaagagggtcaaaagctaatgatgatgggtacagctgatgaagttgtgaagactcctgagaagggaactgtttttgttgaagatcttccagaagaagaacaagtagttgctgttggacatactgctggtcttttcaacttgggaaacacatgttatatgaattcaacattgcaatgcctccattccgtacctgagttaaagtcagctttgactaattattcacattcaggacgaaacaacgatgtcgatcaatcttctcatttgttgaccattgcaacccgtgacttgttcaacgagcttgataaaagtgtgaagcctagggcgccaatgcaattttggatggtattgcggaaaaaatatcctcaatttggccagctgcataatggagttttcatgcaacaggatgctgaagaatgttggacacaacttctatacactctctctcagtccctcagatcccttggaattagtgaaaatcccgatgctgtgaaggcactctttggcatagaacttattagcaggattcattgtcaagagagtaatgaagaaagctcagaaacagagtctgtttattcacttaaatgccacatatcacaggaggtgaaccatttgcgcgaagggataaaacatgggttaaaatccgagttagaaaaggcttcacttgtgttgggccgta

SEQ ID NO: 18490 - DNA, 563 bp, Glycine max
cccacgcgtccggattaatttgaaataactatacatgatttttggcgataagcagagagtaatgcgttttcaaacttgttccggcattcatttccagtgccttgcatgtgcctctattcctcatttctcaatccccaatcccaatgtcttccaccaccattcacgaaaacaaccaccacaacggctcccacatacccaaaaaacccaaactctcttccaccttcataactccgtcggaaatcgaatccgaattcggccaccacgacgctgccgtcgcgcgcatcaacaacggcagcttcgggtgctgcccggcctccatcctcgccgcgcagcgccgctggcagctccagtacctccgccaacccgaccacttctacttcaacgatctccaatccggcatcctccaatcccgaaccctaatcaaggacctcgtcaacgccgaccacgtcaatgagatctccatcgttgacaacgccaccaccgccgccgccatcgtcctccagcacaccgcctggaacttccgcgaaggaaagttccagaagggtgacgtcgtcctcatgctc

SEQ ID NO: 18491 - DNA, 408 bp, Glycine max
agaagggggggggatcaatggagaagagaagagaagagaagaggtggatagggttagccacttgttcttgttcccttatctcttatggtgaaatccctgttcctgatttctcgaatcccaatgtcttccaccaccatccaccacaacggctcccacatacccaaaaaacccaaactctcttccttggaaatcgaatcagaattcggccaccacgactcctccgtcgcccgcatcaacaacggcagcttcgggtgctgcccggcctccatcctctccgctcaacgccgctggcagctccagtacctccgccagcccgaccacttctacttcaacgacctcaaatccgccgtcctccaatcccgaaccttaatcaaggacctcgtcaacgccgaccacgtcgacgagatc

SEQ ID NO: 18492 - DNA, 911 bp, Glycine max
tgagtatgctgatgttcttattcaagcatatactgaacaactaaaaactttgtacaattatggagcaaggaaaatggtgctgtttggaattggccaaataggttgcagcccaaatgaattggcccaaaacagcccagatggtaaaacatgtgtggaaaagatcaactctgcaaaccaaatattcaacaacaaactgaaaggtctcactgaccaattcaacaaccagctgcctgatgcaagagtcatctacgttaactcgtatggcatctttcaagatattataagcaacccttcagcctatggtttcagtgttacaaatgctgggtgctgtggggtaggaaggaacaatggtcaaattacatgtcttccaatgcaaacaccatgccaaaacaggagagagtacttgttttgggatgcttttcatcctactgaagctggcaatgttgttgtggctcagagagcttacagtgctcaatctgcatcagatgcttaccctgttgatatccaacgcttagctcagatatgatctctgaacaatcaacatggtctagagggtagtggctattaagctagtatgccacaaccacatttaatgttcttggaatgtgctactccttttaaggcataagagtcttaattaagttttctctctttctcttacatattcacatatgctaaatgttcatgggttcacaagtacaggtgtaatttgtggtaaagttttggaagattgcttatttaattatagtgaataatagtattctgtagcgtaaccgcaatattattaacaccgcgctacgatatgaaggatccgatgtctcattcttactcatcctacaatctagatcatccatagtgaaacatacgttccactgactacccttcttttatcgcctttcctactgttaaaa

SEQ ID NO: 18493 - DNA, 413 bp, Glycine max
tcatttttggaacgcctcttatacctgacctcttaggtatcattgcaggacatctgtactacttttttacagtgttgcatccactagcaggtggaaagaacattttgaagactccaatgtgggtacataaattggttgcaagatggagaattggagtgcaaccaattagccgtgggccggctgctaatgaccctcagcaagagaggggctcgggagttgctttcaggggaagatcctatcgacttggtggatagatgcaatttcctgatcagctggttcatcttcacttattggttattgacatgacaccactgacaaattgagctaaacatcggctggacagttcattgaaaaacaaactttcttttggggacagccttataattttcaatgaattctctgcggaggtttta

SEQ ID NO: 18494 - DNA, 294 bp, Glycine max
ctcgagccgttatgatcgatgtttatgtgtgcatgtatgttcattttctttcgagggatacgatgtattatgcgtctcttatgctgagttacttgtcgctgtatggagatctgagtgagtgacctttcaccatgaagatgaaaccatcgacgtgggacctgtcaagaaaatcaaatctcgagagatacaggtgttgccagcggaaatagatcgggaagtatcagaggtgatgaagttttgttccgagatggcaaatcacgcccattcgactcaattgttttctgcacacgcttc

SEQ ID NO: 18495 - DNA, 779 bp, Glycine max
  unsure (1)..(779): unsure at all n locations
aatcgtaaatatgttgaggcgcttcacatgggttccattccaatattattcacacagcggcatgggccccataactttctttggtgtgtaagatcaaaaaatactagtagtttggtcgttggaaggaatttaattatcaaccagatcttcaccgatttggtttttctctatttgcgtgcgtgctagtatatatttgtgtgctcagtatggtgggaatcttttcgttgattacagggagaccgggatgtagtggattcggatcttcctcaactgctgaacaggttatcgaaggaattgatgccagcaacctcactgcaatcatcacaggaggagccagtggcatagggttggagacagcacgtgttctggcaattcgaaaggcccatgtcataattgctgccagaaacatggagtctgcaaaggaagcgaaacaactcatacttgaggaagacgagtcagctcgtgtggacataatgaagctcgacctatgctcagtgaagtctgtcggaacctttgtggacaacttcattgctcttggtgttcctcttaacatcttaataaacaacgcgggagtcatgttctgcccttatcagcaaacggaagatgggattgagatgcagtttgcaaccaatcatcttggtcattttctcttgacgaaacttcttcttgacaagatgaaacaaaccgcaaaagacactggaattgagggcaggatcatanatctttcatcaatagctcatgtctacacttacgaagaaggaattcgatttgataacatc

SEQ ID NO: 18496 - DNA, 448 bp, Glycine max
gacggagacggcggaggatggcggcggagagaggacgacgagggcgtggggggtggtggttcaggggaagggcgtcgggtgcggcccggtttgttatcttttaaagaccgttcgggtcgggtcaggacccggttcgggaatggggatttgttcgacccatttttgtttggtgaaagtgaaggacttcagggaaacggtgcagtcgcagctaaaaaattgttggcttttgcagagccagtgccagtggaataactataaatgaatcaatgaaaatattcaatattgtacatttttttctcattgagtaatttttttttggtgccacggttgttgcaattattatagccaatagattttcgactgtgaaaatgtacagagtgaaataccttttaagggaagttcgtcttcttcaaactgtcaaatattattattatttttgcattactat

SEQ ID NO: 18497 - DNA, 419 bp, Glycine max
  unsure (1)..(419): unsure at all n locations
gcgtccntgcaacagtggaggagacataatttaactgttgtctatcagaattatttgcgaatgggggggtggaacattggaagtgtacctttaggctggctgactttctataacaagacagagttgttggatagacagtggcatgttcttggccttggttatagttcgaatgtcgatcgaaatgagattgagcaggctgccgctatacactatgatgggcttaggaagccgtggctggatattgcaatgggcagatataaaagttattggaccaaatttttgaattttgacaacatttttttgcaacagtgcaatctccaggcatagttcaaaattcaaagttccctctacctgacatgaccgggattctgcaattgttaaaaggtctccatatctctgacctccccaaaatttccatg

SEQ ID NO: 18498 - DNA, 278 bp, Glycine max
tgttctcctgttatcagctggcaaaaagaataaggtgctggtgagaatagcttgagagtgtttattggataggatatgctttggagactatcatttgatctggttttgttgtattcttaagaaacttttgattttcttgctacacggaagcttcgaagttacctatggaatttcaccgatttggctttacatccctgatgacatatcatgcatcattaggacaaatagtgcattcttagtgtctccatggattagattctctcgtaatttatgacttc

SEQ ID NO: 18499 - DNA, 238 bp, Glycine max
cttgggttgggagtatctaggtctgtgttcccagaagatcttaaagtgtcaggaaagaagatatttgagcgctcaagacaagtttctgctcttatggaacaaactttttgttatctcatgcattttggccgtctctatagatccactatttttttatctcccagtcattaatgattcatttcattgtcttggcatagaccgaaagttggcaacaatagttacaaccttaaggacattg

SEQ ID NO: 18500 - DNA, 654 bp, Glycine max
gtaaatgtgatgaaattcaacaaacaatgaagccggtggaagggaagtctgatgatcaggcggtaactggcactgttcgtcacagcctaggcgaggcacgttgcgcggccattggccctatgtcaggtcgaataagctactcagggccggtgccttattctggcagcatctctcttcgatcagacagcagcactaccagcacgcgatcctttgcattccccataattcaacctgaatggaatagcaccccggtcacgatggcaaaagccgacaggagtcactaccggaagcaacggtggtggaaggatagctttctttgctgtaaattctgagagattagtttcctttttaataggttaaagatttcatatatatcatttaaattctaccttgagtatcatgcttcttatacatcatctccctagctgttgagtagtgtgcagtaggtttagaatggccagtcaatgctcctaaatgtttgcaggcaaaggtagtcgttttagcatagcttgcatcagcttctctcccttttctctcattgcctatacatggtttcattgatttttttattttatttcaattacaaacaatttagtagtacatattaaattttatgtataactgcaagcttttaaattagaaggtagttagttg

SEQ ID NO: 18501 - DNA, 399 bp, Glycine max
ggaaatccccccgaaagctttgctgattttcaatggaagatatagcttgaaatttgagcgctcctttgggtgaagaggggccttatctccctcaacagccacatgatgacatgaagcgtctcagaattgtgattcacgcttctcttttgaagaaagagatagtggcattagccacatgatgacattaaaagtctcagaattgtaattcacgcatctcttttcaagaaagagatagacattattattgtcctgaaatgatcgtaaatcatctttctcatataatatccttataaacatttttcctttcctaatttcaggttaaagataacaaaaaattgaatcattcgacaaaaaaacaaaacaggcaaattaaaatcaaaaaaaatgattcatggacac

SEQ ID NO: 18502 - DNA, 812 bp, Glycine max
cgaaggtggctttggttgtgtatacaagggccaacaatcagatggtacaatgatagcagtaatgcagctttcttcaaaatctaaacaaggaaatcgttagtttgtgaatgagatgggactgatatctggacttcaacatcccaatcttgttaagctttatggatgttgtgtggagggcaaccagctaatactgatatatgagtacatgggaaacaattgtctatctcgcattctttttggcagggatccaaacaaaacaaaacttgactggccaacaaggaagaaaatttgtcttggtatagctaaagctttggcttatcttcatgaagagtccagaataaaaatcatacatagggatgttaaggcaagtaatgtattgctcgacaaggattttaatgctaaagtctcagattttggtttggcaaaacttattgaagatgagaaaacccacattagcactcgagttgcaggaaccattggttacatggctcctgagtatgcaatgcgtggctatctaactgacaaagcagatgtttatagctttggggtggttgcactggaaactgtcagtggaaagagcaatacaaatttcaggccaaacgaggattttgtttaccttcttgattgggcatatgttttgcaagagagagggagtcttctggagctggttgatccaaatttgggttcagagtattcaactgaggaggccatggtggggctaaatgtggctctcttatgtactaatgcatctcctacacttagaccaacaatgtcccaagttgtgagcatgcttgaaggttggactgatattc

SEQ ID NO: 18503 - DNA, 542 bp, Glycine max
gacccacccgtccgcccacgcgtccggccaagcatgctactactatactagtgttatgcatatccctcggtaatggatcaacggttgagatcgaattccaccccttgatccaacggtggaaaggtaaccgcgttcacgaagccaacccatgaatccatcatcatcttcttagacccttacacaaccctgacctctctcaaaatccagattcaacccttctctctctctcacttacaagcgtaatcaacgaacttgcctctttctgttttttattttttattttttcgtattttcggtattagaaaaggaaataataacgagagagctctagaggcgcttgcgtaacggtaattgcgaaagaagatgcaaccaacatcgaacggctctgactcgaaagcgacggagcagcggacgccgccgcctcagccagtggccgtgccgccgcagtggatgccgatgcaatacccggcggcggcgatggtaatgcagcaccacatgatgccgcctcagcattacgcgtcgccgcagtcctacatggccta

SEQ ID NO: 18504 - DNA, 580 bp, Glycine max
tattgacagttccatttgctacgcttgtagatatcaatggtatggtatctgtcaaaaggtaccccataggcaacgtttcagacacggttaaccatcccaaaggaagataccgtgaattttatcaatgcgactttgatattgccggtactcctgctccatctgaaattatgggtccggactttgaggttgttaggattttgactgaactacttgatgagctggacatcggggaatatgagataaagttgaatcatagaaagttactggatagcatgatgcaaatatgtggtgtacctcctgaaaagtttagaacaatatgttcaagcattgacaagttagacaaacagtcttttcaacagataagaaaagaaatggtggaagaaaaaggattaactgctgagacagctgacagaattgaaacttttgttaaagaaaaaggatctcctttagcattattatctaaatttaaacaagagggtagtgatttctcaaaacacaaaggagcttctgaagcattgaaagagctggaaattttatttatagctctggaaaataaaaccattgataagggtttttgact

SEQ ID NO: 18505 - DNA, 369 bp, Glycine max
gatggccttctctctgttccaaaaccccaccttccttaaacttaaacccccaaccatcgcgacgccgcgctggggctacgttcgggtgcggtgcggtggaccgcgttcccagcgtagcccattgatgaaaggccgaatcctgagcatcgaagcaatccaagccatccaaaccttaaaacgcctctcaccgaaccaaccctccgaacctctcctccctcgtctccaacaccctcacgcgcctcatcaaatccgacctccttgctactctgcgggagcttctacgccagaagcactgcaccatcgcccttcgcgccttcttcacccttcgatccgaatacggcgccgacctcttcctctacgccgagatta

SEQ ID NO: 18506 - DNA, 411 bp, Glycine max
ccccgagaccgcgtcaccggagtttcgcgatttcgtggagtgctgcctcaagaaggagtccggggaaaggtggacgacggctcagctcttgacccacccgtttgtgtgcaatgacccggatacatgttaagtgggttgacccggttgtttttttgttatgacttggatcttggaatcacctttttgagttggtgtatattcccccggattcaaaccttttcagttttaggagaaccatccccttcgcaaaccatgacaaaagggtatctaaaattctgaattatgcatctacggctctattgttttcaattcttaactgagtctaagagaatcattccctttgtacgttaattatgcttgccaatgattaagagaattctaaactctgagttcttgtcaacgtcgctgaaa

SEQ ID NO: 18507 - DNA, 722 bp, Glycine max
agctaatggggccactctttttggagctgggagtcccacctcaggtttcaagtgccacagccacctttgccatgaccttttcctcatctatgtctgttgtagaatactacctgctcaaacgttttccagttccttatgctctgtactttattgcggttgctgctatttcagcaattgtatggtagcatattgtgagaaagctgatcgatgtgcttgggagagcatctctaatcatctttgttctagccttcacaatacttgtcagcgcagtctcactaggtggagttggcattgtagcaatggtcaaaaagattgaaaatcacgagtatatgggatttgatgacctctgcacatatgattcatagcccatttcactaaattattttatgctttgttttgtctcaagttcccaataaaggagccaagagaacctaggtcgccaaaattgacttaaggtatgcttggattcccgtaaaaaacagtggacttgaaagcaatgcatacatgcttctatgtatttatctgggttttttgtgaggaaaaaaatgttagatgttggacactatttcaaacactcacttgtgctctgtgtgtgcctgggctcttgttaagaggtatgatatgtacatttatatttttgttgctgctaagacatgtattgatgacactgttgaagattgagaaactgaaatcatgttattttaatattctttatgtcctaa

SEQ ID NO: 18508 - DNA, 299 bp, Glycine max
gcgaattccaattttcaacattgtcccctacctttcccacaggttaggccttcgtctttattacctgacctgtgctaccacccaatcacctttccttccattatttcattccattccatatctcaccattcaccaacaccaacacaaataataattcaattaactgccacaagatactccaaattagaagcttgtagttgttgataaactttgattggtatctccacattttttgtggtagagttgttgggaaaaaaaattcaccaaaaaaaaagaaagaaaaaagcatagagagaaag

SEQ ID NO: 18509 - DNA, 525 bp, Glycine max
atttaaacctccatacaagccaccgaatagtttgatgcattgtcatttggcattgaatgaagccttttcctgtatgtacatttattgctgttaaaaattcatggtaattgattagtggaggcactgatagctgctaattctgcgacatatactcgaagccaaagcttgaggcatgtcaccctctgctgatggttgcacagctgactataacctgtcgatatctgcttaatgtgtagatctcagtcggttccataactaacctaatatgtggcgcaagatactactgcctatctcatctgatgtcaaaatttcatgatttctgttatggttctttaagtgcggttagacccagtcagtggctccgttcatatttctatctggtgcatatttaggaatcattttcttcaaatgctgtggtgaattatgccgacggatgagtgtcatgtatgtgctaagacatcagatctcagctttgccaaatgatctgatatttatgtactatatgaattgtctagaattcccaat

SEQ ID NO: 18510 - DNA, 220 bp, Glycine max
tttttttgatgtcgtagagtttgtttaatgagggaaaagtcaaaaccataaagctacggattttgttttccagttggctaatccatgtgccaagagagtggcccatccacccgggggtccaaatgttttttgtacttcatttctttcatttttttccctttattttcttgacagtaattgttaaactggtcagttcataaatattgttgtcgttactttt

SEQ ID NO: 18511 - DNA, 144 bp, Glycine max
ttttcgattagttcatctttcatacttacattttatggcaactagaaatggctgctgttcgcaagtcatgttaaatgtgtgtcacaatcaccaaccggtattaactttagaaactatagttaaatttcttaacaggcccttaaa

SEQ ID NO: 18512 - DNA, 579 bp, Glycine max
atcgagccgctcgagccggtttccgcctaagatttcctgtttcacagaaatggctgatagtgttgttgcttctctgctagataacttgtctcggctgcttgaagatgagcacaagttgctttctggcgtggaggacaaaatcaactctctttgcaatgagctcaagtttatacacatcttcctcaagaattctgagggcaagcgcagtcacgagatggtgaaagaagtggtgagccagatcagagatgtcgccctcaaagctcaagatgtggttgacacctacctttccaacatcgccccacaaaaacagaggagcaaactgagcaagttattccacctcaaagaacatgtcatggggcttcaccaagtcaactctgacatagagaagatcaggactcggatcgatgagatctataagaacagggacagatatggcattggagaaggtgatttccgaagcgaacaagctgctgcagaagcacaaccactcctcacaagaaggagggaggtggaggaaggagatgtggtgggcttagtgcatgactcaagccatgtaatccatgaactcatggaaagtga

SEQ ID NO: 18513 - DNA, 639 bp, Glycine max
caaaaaaaaaagcattaaagagtggccgccagaacatgttgtttttcaattcaaactctctctctctctcctttctttctttctcccctgtcgatccgagttagcattccaaggagcgagtaagtgactcggtggtacaggcggcgttttctcgtttcgccgcgcatcattcgatttcgctccgttccgcaccataacgaatcgaatctcccgatcaatcacgagatattcgatctccttctcaacagtttcactccagattcaaactcacacgcacgcacgcacactctttttttttatcatcgcgttgtaagcgagatcttggagagctacgagctcgttcgttcgtttgccttatttatttttcgcggttgatctctctcgttgttccgagagagttctttgttgtggaaacatggttagcggcaacatttttcattgtagaaaaaactcgtgcgcctccgcaggagtatatcagtaaatccactttgcagctgtttgattatgatagttctgctccccctgaacaagcttggagaaggagattaaacagccatgccaatcttcttaaagaatttagagtaacttttacggaagctataaaaatggttcgattaggtatacgcatttggtcatatg

SEQ ID NO: 18514 - DNA, 445 bp, Glycine max
tagctatcagcgtctcctttgctgctactaatatcagaactgaacttcatccaaaaaccaggaatgagacaacatttttttatataaaccaaaataatttcagtttcagctgttgctcatttatcttatggtagttttctgggttccccactcagacttagatgttgagtcgtgcactttcaaccccaacaactcaaagcctcaaggcaacaagaacaaatgcaatgctttatccaactcatagattattgtctcttaagaacccagtatcaaataccagaggattttcatcaaaagagaatatttttatcagaggtcaccaaatcaatataaaacaattttttggccttatctcgggtcgtgcgccacgaaacaaagcaggaagttgtttccccaaggtgtggcctgccactgacaggagaaaatgtggaagaggttttggatg

SEQ ID NO: 18515 - DNA, 548 bp, Glycine max
gattattgtcaattactctgaattgtgttggagcatccatgggtgagaagccatcattgacaaagaagctgccggcaacaactacagttggtaagctgaaatttctctgcgaaagcttttttatgctgaagtccatgaagctaaaattatatcttccagaagagggttctccatttcccatgctgcttgacaatgacacttcatctcttatggaccttggaatcggcaatgattctattatccttgtagatgaagaaagttcataaatataccagaaaacttgtgaaaaagcttctcttgtgttgaagactgtatcttgttctgattagcgcccatcactcttggaagtaggactctaaaaataatatatttgtaagcattttgttgggctccagttccaggtcttatcaggggttttgatgcaccatgttcattggatgatcagttccattccttgccgcaactgttttctgtaaatcactagttattttgattcaattgcaaacagatttgggtcttgtcctctgacagattcgaatagactttgg

SEQ ID NO: 18516 - DNA, 419 bp, Glycine max
acgtaacgattctaatctgttaagagaacaagatccaaatctgtttgcaattgaatcaaaataactagtgatttacagaaaacagttgcagcaagggatggaacggaccatccaatcaaacagtgcatcaaaacccctgaaaagcttctcttgtgttgaagactgtatcctgttctgattagccgcaattactcttgggagtataactctaaaatgaatatatttgtaagtggtacaccagtttaattggtcacaactttttgttaggcttcaatcgaagttcttatcaggggttttgatgcactgtttgattggatggtccgttccatcccttgctgcaactgttttctgtaaatcactagttattttgattcaattgcaaacagatttggaaataaaaaaaataaagaagataaatt

SEQ ID NO: 18517 - DNA, 388 bp, Glycine max
tgatttttgtctcagcgggtttgtgttttccctgatatccatgtaacaacatagaagacacgtcgttttgtatcttcattttggttcctgcaataatggatttgatgttccctctgaaaccccactgtgttattctcaaggcaccactctcttcttctctcttgttcccttttcctctcaggtttcgggctgtcaccgctttcaagcatgccaatattcaatgcgagcttgaaggcagacccaatggtgctctctctggtgacttcgaccctcgcttcattgacaggcaaaaagcactggaagcagcgatgaatgatataaacaacaactttggaaagggcagtgttacaagactgggcagtgctggtggagctttggttgaaacttt

SEQ ID NO: 18518 - DNA, 766 bp, Glycine max
tctccatgcaatccaaagtgcgaaccttcaaataggagggtgtgtcttcccgtgccagttccgccactctaccaaccagtccaatttcctttcctttcctttctctccattggacactgcctcttgtctctctcaattggcttttcttcccttttcctttattggggcagcctctctgcaatccacagataacttagattacttccacatgctcatctcatcattcccagcttttcatctgagtgggagatgagaagaactggccgagctttaaaaaaaaaaatggtcttgttttttctctgaatttgggtgtgatggagttcccttcccctactatgcgagtttggacccttttcttgttcctgctactactgaagagtgatgttgtgcaatcggcttctgattacttgattggtcttggaagctatgacattaccggtcctgcagctgatgttaacatgatggggtatgccaacactgaccaaattgcatctgggattcacttcaggctgcgggctcgggctttcattgttgctcagccaaacggtaaccgggtagtgtttgtgaacctcgacgcttgcatggcttcacagcttgtagtcatcaaattaatcgagaggctgaaagcaagatatggtgacctatatactgaaaagaatgtggctattagtggaattcacactcatgctggtcctgggggttatctccaatatgttgtgtatattgtgacatctcttggatttgttcgccagtcatttgatgtcat

SEQ ID NO: 18519 - DNA, 537 bp, Glycine max
gaatgcttaaactttaattattgataattgataactttacaatggactaacgagagatactttccaacagactgcaagcctataaacaagaatcagaattctggcaatctacatacacaagtggtgaactgatttgacttccaagaagcagagcatttgaaacccttaggcaatccaaaaacaaattgatgctatacaaaaaatctatttcaaccaatcagcagctgcccttccagcaaaacaactaagaatttcaccaaaaagaaaacagagagcttaatggcaaactagtttaatcctacaaagtccaactggaagctggaatcccttgtttctggaaccaatcaggcatgtggaacttttcatagaggaaaggtcttacatcattctgctcagaaagttgcttgagaagtggaagaatgacatctagaagctgggtgtcatgtggttgcccagcagaaaatggaatgcacggaattccattcaccggttgcaatacaaagctgaaaggattattgtctacaataacaatgcgac

SEQ ID NO: 18520 - DNA, 382 bp, Glycine max
gcaaatttgatcatttgattctcatatcagctttgatggaaggacccccattgatgggttttgcgattcaatcagaattccatttagtcatgttccaagtgaagaaggcatgaagcggggctagacaatacattatacgttgcagcgcagaacatcatttgcacattcatgataaatcttggacaagaacagcacattggagtgagttcgcgactacataccacactattttaaaataagggtgaatttgtatatgtacagaggagtgagaggctgcttatttttttatttttaagtattgcgttgtataatgtattcgagttatgttaaaggttctctacactggcatgcactatcgcgcattcatcatttgatagcaaaa

SEQ ID NO: 18521 - DNA, 541 bp, Glycine max
  unsure (1)..(541): unsure at all n locations
tttagttattggttctatgacttactatgtagtgaggtctaagagaagcagatcaatgaggaagaaggagaagcaagctgccaggaggagtggatctaactcatggcatcattctgaattctctaattccgaggttgatcggatttatgcgctttgagtttgaacttgcaaccttcaggggatcataaagaacagattgtggtgaaaaagatgacaggtttttagggttgctaccttctccatgttactactttaagagttcactgtacaggaaattgttctatacggcttagctgctgcttttgtaggatcttagacaaattggaatgaagcatccattatcattgtaactgttaaatggtgcactgcagggcctaagtaagcacctgtatcttaatcccagtttgtgaaacaaattgaacattgctgtattgatgtattatcaaaatgtgcctgccttccctgttcggtactgattttttacttacatatatactggacccttgatttatgannnnnnnnnnnnnnnnnnnnnnnnnnn

SEQ ID NO: 18522 - DNA, 686 bp, Glycine max
gaaacttaagctccagttatttccaattgatgaacctactcgaagagcattggaaatggataagcataatccacacctggagcttacacttagtactcgaaagaagatatcatcaattttagaacatctaaaccgtaaatggggtaattcaagcatagcagctggagaagtaatgctttttccttatggtattcaaagggaaaatttagttaattatccgagatggacccaggaatctactcttagtgcagctgatatatatgcaatgattggaagtccacccatcttccgtttaaggtatgcgttggttctccaatactgagcttgggttattaaatatgcaagtgcctgaagcatctggctccatgctcagacaatacaaaagtagtgtggacaatgctaaggatccgattgtgaattcagtttcatttcctacaccattgactaatactctttccatggagctctctgaagattgcagaacatccatgaacagaaaccatactcttatgactgcttcaactgatttgtctaatgctagaggaaacaatgtttacctgaatacaagcactgtggaatctcgtgatcctacagccaatacaccatggcatggacttgttttctaagcaaaaaaaaaaaaaaaaacaaaaaggaactaaccgtaaactattacaacaagaacaaaa

SEQ ID NO: 18523 - DNA, 572 bp, Glycine max
gcagagtgactcgtaccgggcaaccggatgttacaaccttctttgtgctggctttattcaaaccaatagcagaatagccattggagctgccatttctcctgtctcttcttatgatggcaaccaatatgacatcacaatcctcatttggaaggatccaaaagtggggaattggtggatgagttttggtgacaacacattggtagggtattggcccgcagagctattcacacacttagcagaccacgccacgatggtggagtggggaggagaggttgtgaactcacgaaccaacggccaacacacctttacccaaatgggctctgggcacttcgcagaagatggtttcggaaaagcaagctacttccggaaccttcagaccgtagacacggataacaatctgagttctgtgcagggcatctcaaccttagccgaaaatacaaactgttacgacattaagagctactacagcaacgaatggggcacctacttctactacggtgggcctgggaacaatccacagtgcccatgattataaacgtctataacgtatatatcagatttacttcagtttc

SEQ ID NO: 18524 - DNA, 1482 bp, Glycine max
aagcagctatgaagtgggatgaagatgttcttggacttggatatgacctggatctcttcaatgttgttgctgtcccagattctaacatgggagccatggaaaacaagagcttgaatattttcaattcaaagcttgtattggcctctccagaaactgcaactgatgcagattatgctgcaatattgggagttattggccatgagtatttcacacaactggactggcaacagagtgacatgtcgcgattggttccagcttagcctgaaggaaggtctcactgtttttcgtgatcaggaattttcatctgacatgggaagtcgtactgtaaagcggattgctgatgtttcaaaacttagaaattaccagtttccacaggatgcacgtcccgtggcccatccagtgcgaccacactcttacatcaagatggacaacttctacacagttacggacagggaaaagggggctgaagttgtgagaatgtacaaaaccttgctaggaagtcaagggttccgaaaaggcatggatctttattttaagagacatgatggccaagctgtaacatgtgaagatttttttgccgccatgcgagatgcaaatgatgcagattttgcaaatttcttgctatggtattctcaagctgggacccctgttgtcatagtaaatacttcttataatccagaagcacatactttttctttaaaatttagtcaagatataccaccaaccccagggcaatcagttaaggaacccacattcattcctgttgcagtgggtttgcttgattccatgggaaaggacattcctctttcaactgtttaccataatggtactatgcaatctgtttcaagcaatgatcaatcagtctgcactacagtccttagagtgaccaagaaagaggaagagtttgtattcaccgatatatttgaaaggcctgttccttctttgttaagaggatacagtgctcctattcgtctggaatctgatctcactgatagcgacctgtttttcttactagccaatgattccgatgaattcaaccgttgggaggctggacaagttttggcacggaagttgatgcttaacttagtggatgatttgcaacgtaacaaaccattggttttaaattccaattttgttcaagggttcaaacgtattttatgtgactcaagtctggacaaagagtttgtggcaaaggcaataactctgcctggtgagggagaaataatggatatgatgggggttgcagatcctgatgctgttcatactgttcggactttcatcaggaagcagcttgcaagtgaactgagatcagagttcctcagcacagtggaaaataacaggagctcagaagaatatgtcttcaatcactcaaacttggccaggcgtgctctgaagaatgttgctcttgcttatcttggatgccttgaggaaaaagaattcaccgatcttgtgttgcatgagtataaaactgctacaaatatg

SEQ ID NO: 18525 - DNA, 605 bp, Glycine max
gctaaaatgggtttctattttggtaataggagattcgatcaatataaatatatatatatagatatatatatatatatatatatatatgattatatacgttatgtacataactttcctgaaaattattctcttttttttccttgcaggacactaatgactatcatttattcagtgaatatgacatgaactctgtcgaggaacaattggagggagagaattcagtggatcctggtgaactctcatgggaaaatcactcttattcatatctcactaaagaaagcaccacccttttgagcaattcttcatctttggaagagatcaacactggctttgatatgacaagtctcaaacaagatgcttctccacagaaaccgaagtcttgcattctgtcttttgaggattccactttagtgccaattaatcccaagaaaacatgccaaatatatgatcatggtgaacattcaaaggagacacaagaaaagccacacaatagaaaacccctcaagaggggtagacgcttttctcagacacttgatcacatattggctgaaagaaaaaggagagagaatatcagcagaatgttcatagctctttcagcacttatt

SEQ ID NO: 18526 - DNA, 583 bp, Glycine max
tgacgtgcactccacccgtacgtaagctcgggattcgggcagggctactacttttgctttcatccataccaagaagaggatgatgccacttcacatatgctcaatcttggatcccaccaccaccctgtgactgggatgtttggggagatggtttatgccagggtgtttggcaacccagaaaacttgtatgcataccccaattcttatcagctgatgggaagtgctacccctagactgagaaggcaagagatgcaggcacataaatctttgaacagaatttctatttttctcttttgctgcttccttctttgtcttattgtcttctaagtgagcacttgacattattttctctcattatctattgtatactttgtaaagaaggcaagagatgcaagctttaaaaacttgatagatcattgagtgaaatagtgaattatcacaggctaaagagcttgtgagtctatattgcacaaaactgcatctacacttctattcgttttattaaacctcttttttggtgtgtgtgtatatataagaataagacaataataagatttaaactttgaatctataaacaaattag

SEQ ID NO: 18527 - DNA, 338 bp, Glycine max
cagagatgagtttgctgagattacttttgaagaattgttagcacaggagaagaaagattcattttggcaaagaaatgggaaatcaagactaagctcaagctagtaacactactagcttggctgactgtaacctcctgagttagtttagtatgtacatccaatacctgtagctgtgtattgtcacaggaatgctctttttggttccttgcctgtgccaattttggttgttaatggaatatagatgatacaactttgagtttattttagaaatttataaatggaagccagttaaattgaaaaaaaaaaaatacaccatatataaagaagcaaatcaaatg

SEQ ID NO: 18528 - DNA, 355 bp, Glycine max
caatgcagttcccggttggtttagaattcagaaacttcccttggacttaatatcaacctactacattgtgttctgtccacttgaccaaagcccatgttggagtgttggctctaatttcgaccaatacggaaacaggcgtttgctggtggctcagtttgcgcggcgccaagtcatagagtttcagaaactttcagacgcatcaagatcaactcattcttctgcatgaagaagtaccacttaattgccctcaagaatcatgtactttctcctagtgagtgatcttgtgtaaggctaaataaatgcttcattttgtaataaattattctatggctaaataaattaatcaaagcttatt

SEQ ID NO: 18529 - DNA, 893 bp, Glycine max
ctgttatactggtggtggttgtcacttggaaacattacccgatttaggctccttgccagcagtatctgacatccatttcagaactgtcgttgatgtcttgtcagaacgcacgaataaatcaaaagttttgaatctggacttgcttaatgtcacccaaatgtcaatacgcagaagagacggccatgcatctatttactatatcggaccagacagcacagcctctatgcagcggcaagactgtagccattggtgcctacctggtgttcctgattcatggaacgagattctttatgcacttcttctcaagcgggaggatttttttgaacggagacagaatacaacaaaaatttctcaagttccaccataattggtctatacagtttgcagagaatgttctaagttatacaagtcctttcccaacccttgctgaatgaggtgaagttgcaagttgaatttgacatctttctggtcagtctctagttgatgatccatctaactatttgttagtttgcttaatgtttacagaattttattcttagcaatcaaagaagttaagctgttttaatttcctacaaaatgattgcttgaccatttttgtagtggtctgccattgtaggtgaacatatctagatgggaacttaatttttgaaggtgagtttcagtgatatcttgtacaaaaaagaaaaaaataaccaccgaaattcgaacttgattgatcagaaggcatacatcatcttttgttgtaaatttcatatgatggtcggagtccatgatgcagctgtttgttgtaaattgtatgtaaaaagagattgtttttttgtttttggttaattgtatttttatttatatagacaaataccctggagtaattgatatggatgatacttgttgga

SEQ ID NO: 18530 - DNA, 356 bp, Glycine max
ggggggaacaagagcatgcccggatctctatcatggggggacttttattgaaatttacaaaatgagtcgcaacaaaatgcagagaccttggcaagtaggtgctgttcaacatattcatgatgagggtattgatctcgtgcatggttgatagttgaatactgacctaattttttgccattcaggtggatgattttgatgcctttaaacaaagaatgttaggaacaggggacaagaaaccacccccacatagaagagctttactttttgtggacaatgcaagggctgacacaatttggattttgtttaaaaagaaacaatatttaaggatagaaattattataaccaattaacttaac

SEQ ID NO: 18531 - DNA, 290 bp, Glycine max
ggaacttgatagtatggatgaggaatcaaggttgcttacgctaattgaaggtgttcttgcagcaaatatttttgattggggatctcgtgcatgtgtggatctctatcataaaggaactattatcgaaatttatagaatgagtcgcaataaaatgcgtagaccttggcgggtggatgattttgatgagtttaaagagagaatgaaaatgccctgtcataagagggctttactttttgtagataactcaggtgctgacattgttctagggatgcttccactggctagggagc

SEQ ID NO: 18532 - DNA, 602 bp, Glycine max
ccttctcaaaccacaaagcaatttgtccaatttggatcacacactcagatacagccgtttagaaagaccttcgcatttcacttttctttttttctcctctcacacaagatagataggattttctttcttctgctaccttcaaaacatcacaagaagcaacatccccctatacgagttaggtgagctcagttcaacacatcgtgtgaaaaaaacataaagggagaaaattactattttgtaatttgtatgtgataaagtgcccatcttgatgtatgtacttcttcacttctttgtatgtgtccctagtttgagtgtaatctaaaacattttgaagtgattaaggtgccaagatgtgactatgattgtgttgggtgaaggaacatggtttcatggttgtgttgttgcctttgtgatccgtgagatgaaatgagatgagaggtagaaaacatgtatcctaggttgttgtgttgtgaccagacccattcgaagatggtatgggttaagcatcaaatccagcaaaaagatggttacttgagctactcaccaccccttttggcttcttcttcttcttcttcttcttcttcttcttcttcttcaccccc

SEQ ID NO: 18533 - DNA, 421 bp, Glycine max
ctgtggcactagaagcattattagttgatgttgtccttgacccgtgtctttcagctttggtttcctgaaaatcaaaattaaaaaaattagaatcacatacgtgaaagcgccaaattaatacaatattattagctttaaacaaaactaattaactctctctcgatctctttcttttcctgaataaaatccactaatctaattccttgcaactaaactttgaaaatctaatatttccttggttcatgtaaattttcttaattatatacaagtctaagccattagagagtaaacggatcaagaaaatgaaaattatgaagcatcaagttcccaaacaaaactatgtaaagccttgattagtgactagaactagaaatacatctaaatcaatttgcaaaaccaagccttctaagaaatactccaa

SEQ ID NO: 18534 - DNA, 470 bp, Glycine max
tccgaccacgcgtgcgacgactcctacaagacgacacaaaggacaggcgttaccggaacaattgtaccacaaattagaggctggccttgacgtgaggcactagcttgcactacgtcgggcaaacgtgcctattcatgtcatgccccaaggtcaagtctctgaaattggcgactaccaggggacaggcttcagagccactcttgtccattactgtaagcccacattgctacctctctcttgcttgcctcattctctgtgacgctacaacgctagcttatatatctgtctagtgcctttgttctaccttgtgtccatgtaactacaagtgcagagtcttgcaatacatacaatggaacacattatgaagaacatgaaccaatcttgagaatcacccttttagagtatgcaactatttaaaagcttaaaaatgacacactttgcacatcagaagtaacattatcaggaggaca

SEQ ID NO: 18535 - DNA, 474 bp, Glycine max
ccgctcctgaattcccgggtcgacgccacgcgtccgagacgacagaagggggaaaatgcatcaaatcccccttcaagtggtttactgccgagaattcattgactagctctcaaatttgaaattggtcttggatatggaaacaacacttactagagaatatattaccctccatggtagcctgcccactaacgtttttcatgtctttacatatatgtctataaattcttcttgtaacaagtgcgacaatgacaagaatcaacaaccaatgtgcttcaggactgtgtcttttctcatcaagtgtggcaacacttgaagcttgacctacacattgcgttttatattgcaaaggtaattaattcaagggtatagtaaaatcatgtttgcaactacttgctggacgttctgaaaagctaggaacacaactatctttcaagatagcatttgagacatgttgcatgtgggtagaggtgacaa

SEQ ID NO: 18536 - DNA, 434 bp, Glycine max
ggaagcagtgagtgagggaataatgttgcggattgctcccaaattcttcaccacggttcctcttcggaccatttcacccttcgcatgtcgcttctcagtccgttccatcgctgactcttctcctttcaacaaaatccgcattcaaagggatgatactgttagtcataatcacaacccattcaaagggttgctttgttttgccgcattttgtcgttaattttccgttttcttttgtctgcaaaatagaatttttctaactgtcttttctttagtaatgggtttctgagttgaacttggaacgtattgatgagactctgcagtgacaaagagtaaggttagaacttttcagcatcactttggtgggggctattattgtctggaaacagtgaattggagctacaacttagaactgattgtttcatgatgtgctaata

SEQ ID NO: 18537 - DNA, 482 bp, Glycine max
gaattcccggctcgaccgcacgcgcccgtacagatacgagtgcgggaataatgttgcggattgctcccaaattcttcaccacggttcctcttcggaccatttcacccttcgcatgtcgcttctcagtccgttccatcgctgactcttctcctttcaacaaaatccgcattcaaagggatgatactgcatttgatgcatatgtcgttggaaaaaacgacgctcctggaatcgttgtgcttcaggagtggtggggtgtggactttgaaattaaaaatcatgctgtgatgatttctcaacttggtcgtggatttaaagctcttattccagatctgtacagaggaaaggttggtctagatgttgcagaagcccaacatttgtttgatggtcttgattggcaaggtgctgtaaaagatatcaatgcttcacttaactggcttaaggcaaatgtgttctaaaaaggctggtgttactggattttgtat

SEQ ID NO: 18538 - DNA, 569 bp, Glycine max
agttttgttatacaaaagatttttctcaaattttttaagttaccagagtgattactctctggtaatcgattacctgttatcagtaatcgattaccagttgtcataccctaatttcgtccggggacctttgctcgatgacgtgcgaccattctttggtcctcgtgaggtgcttggcacccatcattgggcaatttgtgaaattccaggacatgccggaaaaaaccaaaaaaatattgatgcacaatccgtaagtttccgtgacacaccggaaatcaaatggaagcatcgttgcataattaagtgaggttccgtaacattccgtaagtcaaaagggggatgattatgtagtccgcaaggttccgtaacattacggaaagaaaacaagtagcgttacgagattcgtaagtttccgtaactttacgaaaaaagaatcaccaaaaaaggtaagggggtgaacttatcaagataggggtgtaaatagaaattcaaatctaggcccttctagaacattttgaaagttgggttgcttaaggaggaagcaactgggcggcaagctcctccacgttttt

SEQ ID NO: 18539 - DNA, 693 bp, Glycine max
gacacaccggaaatcaaatggaaccttcgttgcttaggtaattgaggttccgtaccattccgtaagtcaaaaaggggatgattttgtactaccgcagggttccgtaacattacggaaagaaaacaagtatcgttacgaaattcgtaagtttccgtaactttacgaaaaaagaatcaccaaaaaacagcagaggggggtgtacttagtaaaaatgggggtgcaaatagcacccaggcccacttgggccctccggaatattcctccagaaggcggttgcttctggaggaagcaaccctgctcgcctgggcgagctgggcggcaaccacctcccctattttgctataaataggggaggaagtgaagaaaaaaagggttcagccccttaggcacttctctctctttcgaatttgcttggaaaaattgtttccgtgaagaaaatctaagccgaggcgcttccgaaacgtttccgtaacgttttccgtgaagaatttcgcaatggtttcaaccgttcttcgacgttcttcattcgttcttcatcgttcttcgatcttcaacgggtaagtacctcgaaccaagcttttcgattctattctatgtacccgtagcggtccacattgtgtttcgtgcatttttattctcgttttgtttactctatataccccctgttgacctgcttaaaccattttacttaat

SEQ ID NO: 18540 - DNA, 542 bp, Glycine max
accacgtcctttccagcattgagtaattcatctcacatgcggtaaacttcttgcttagatagtagatggcttgctcctttttcctagaatcatcgtgctgaccccacacgcaccccatagactcgtccaacacggtcatgtacaggaaaagaggtcttcctgttacaggtggcatgagcaccggggggtttgcgagactctgtttgatcttctcgaaggcctcttggcagtcactgttccacaggaccgcctggttcttacgtaatagcttgaaaatgggctcacaggtaggggtgagttgcgagataaatctcgcgatataattcaacctgcccaagaacccccgaacctgcttctccgtgcgtggttccggcatttcaaggatggccttcactttctcgggatctatctctatccctttctgacttactataaatcccagcaacttccccgactttaccccaaaggtacacttggttgggtttagcttcagttggtatttccgcaaccatccgcccaacttacgtagattgacaaggtgt

SEQ ID NO: 18541 - DNA, 1047 bp, Glycine max
gatctcgaaagcgtgagaagaataatatcaggattcgtggagaaagaaaatggcaacgcggttttcaccacggccgagttcaaagagccttgctccgctgcgatgcacgcgtcgtgaaaaccgtcgatgcctacctctctgagatcgccgcatacggcgatctcagcatctcgaagttcaacggcatcgctactcttattcctaaaagcgcgcgtaagatcgacgacgatctttaccgcgccgttgatatctatctcaaggcgcatccacagttggatgagatagagagagagaaggtgtgcagcgtgatggatccgttgaagctttcatacgaggcgcgtgtgcacgcgtcgcagaacaagcgattgccggtgcagattgtgctgcacgcgctttactacgaccagctacggctgaggagcggggcggaggagcgtgaagtggacccggagaagaatcagcttcagatggacgtgaccttggtgagggagaacgaggagttgagaactgaactaatgaagatgaagatgtacatttcggatttgcagcagaataagaacactaataatggcgcgaaccctcaggggcatggaacgacgtcgtctgctgcgaaccctaaccctaagaaggccacgttcttctcttccgtgtcgaaaacgctggggaagttgaacccgtttagaaacgggtcgaaggatacgacccatttggaagatgggaacgtggatttgaccaagccccgaaggagaaggttctctgtgtcttagacgaaatttgaattgaattaaattatgagcatattaattatgcgaggttcatcacggtttctttcttcttcttttttattttttttgtgtttgcaatttgtgtcgtgtatgtgcagaattcttatagttttcaggctacgtgcgtttgttagtgatcatgaatcatgccaatgttcatgatactgggttctgttctgattcttgcgaacttctcatcatagtgtgtaaattaattgtttaataccctgtgtatatgttattaaggaaaaaaacttttgcc

SEQ ID NO: 18542 - DNA, 583 bp, Glycine max
atattagggagttgggcatctttatatttagttcatgactcttatgctttgatcaggttgtacattcatgcttaattatatgataattgggatatggtttgttcactaccatagtaataaggtgtagttatgtatattaattgatagttgttcaaatttatgttataccaagctaatgcattgagtaacactgcactgagtctagtgttgaaactcaggtagacaaatccactatgcctgcaaatacaaaggatgcattatatcaaagcttgcctcctaatataaaattagctctacgttccaaattaccatccctccgtgctgtagaagagataagtgtagcctatatcacatatgagatgcataaaaaattacattggttggttcccatggccattaacacatcgaaagcacataagagatttggttggctaggggagtgggcatactcagggtatgaagtaaaaaagaagactggtgtaatgtggattgagacattctaccatgcagatagagagaaagtgggacattgtattcttgaacttctcttatggcttcatagcttggccatcagaagtaaggc

SEQ ID NO: 18543 - DNA, 386 bp, Glycine max
ggctatcgtctcaacagttaccttggtgctatataaagttatctacttcacctggggggggaacttcaccgaaacaaagcacccccaaaccattcattggacgcatgagcaatcgccaaagattgggccctgcaggccttgctttgcattatgcaaatatagtgcttcaaattgatactcttgtggctagatcctctatacctgcaaatacaaaggatgcattatatcaaagcttgcctcctaatataaaattagctctgcgctccaaattaccatcccttcgtgttgtagaagagctaactatagcagatatcacagatgagatggagaaaacattacattggttgtcccccatggccactaacacatccaaagcacatcatggc

SEQ ID NO: 18544 - DNA, 380 bp, Glycine max
gttaaattatgcatttaaagaaaaaatcactctggtctagaagtttggaggaggttatggagaagcttgtagacattgtccattttttgtatttggagataagcaatgcctttggcaatgcgagatgaccccaaaccattcattggacgcatgagcaatcgccaaagattgggccctgcacgccttgctttgcattatgcaaatatagggcttcaaattgatactcttgtggctagatcctctatacctgcaaatacaaaggatgcattatatcaaagcttgcctcctaatataaaatgagctctgtattccaaattaccatcccttcgtgttggagaagagctaactatagcagatatcacagatgagatggagaaaac

SEQ ID NO: 18545 - DNA, 506 bp, Glycine max
ctgaaagtcccaattttccctccacaatttaaatctccctctaaaccaaatcaaatcaaagccacgcgcctaatctcaaaatccctccataaatattgaatattgtcttcccttttctcataccaaacacgcctttccgcattcaaactatggcctcttcttctccttcgtccctctcattggacacagccaaagacctttcgaactcatctggtgaggttcatgtcatcgtcggtcccatgttcgctggcaagaccactgcccttcttcgtcgcatcgaatccgaactcaacgctgccaagaatgtggcgttgttaaaatcgagcaaggatacaagatatgcaattgactcggttgtgacgcacgatgggattaaatttccttgctgggcgttaccggatctgttgtcgttcagagaaaaatacggagaggatgcttatcaaaagttggatgtgattggcatagacgaagctcagttttttgtagatctatacgagttttgctgc

SEQ ID NO: 18546 - DNA, 447 bp, Glycine max
aagctctggaactggaaccctctccttcttcctcctcgtttttcttcactcaaacatgcttttccatcaacaactactcgcctcgtagctcacaattcagtctcagaaaccgttcccattcataaggaaaaggaacaaaccctaccttctgtcaaacctacttactcccccactcctcccaatcgaggccttcgaacccctcacagcgggtaccattttgatgggactactcgcaaattcttcgagggttggtacttcaaagtctccattcccgaacggaagcagagcttttgctttatgtataccgtcgagagttcccctggtttcgtaaaccattgacgcagctcgaactggcccaatacgggcccaggtttactggtgtcggggcccaaattctcggtgctgatgacaaatatgtttgccaacactctccccaatcacattttt

SEQ ID NO: 18547 - DNA, 433 bp, Glycine max
gagacacaatgatgtgttgagcgccacgagtaagttgagccagataatactactactagtaagtcgcaccggtttctgcttcctacattgccatggaagccaagctctgggaggctcgtcttttctctccaacactccctcttcttcctcctactcctcgtcttccttctctcaatcttcactttccctcatcatcaacttcaacgctccacctagctcgcaattctgtctcagataccgttcccattcaaaatgaggaaaaggaacaaactctgtcttctgtcaaacctacttactcccccactcttcccaatcgagacctacgaacccctcatagcgggtaccatttcgatgggactactcgcaaattcttcgagggttggtacttcaaagtctccattcccgaacggaggcagagcttttgcttcatgta

SEQ ID NO: 18548 - DNA, 271 bp, Glycine max
ctcttttgtctccctcactccctcttcttccttctctcaatctccactttccctcttcaacgcgcctcctagctcgcagtttcttctcagacaccgttcccattgataacaaggaaaaggaacaacttgtaacttctgtcaaacctacttactcccctactcctcccaatcgtcaccttcgaactcctcacagcggctaccatttcgatgggactactcgcaaattcttcgagggttggtacttcaaactttccattccggaacgaggcag

SEQ ID NO: 18549 - DNA, 403 bp, Glycine max
tagcatcatcaagacatcaaaacatcttgctgcgacataggagtcatttgactgaatccatcaactgaaagatccttcaattatttctcgtccttggaaaattcttttttgcaagaatcaactgcttctttcattctcccttgctacaaggttgtgaaaacaagacgacgatggttacctcatagccctacactggggcaatgaggggcatcgtgcatgagcctcaagtgaacctaggggcagattagaagttctcactcaataggttcccagctacaaggtcatgacgaaagacaacgattggtacctcatagccttacactggggcaatgaggggcaccgtgcatgagcctcaagtgaacataggagccgatcaaaagttctcacccatcgatgtttttac

SEQ ID NO: 18550 - DNA, 564 bp, Glycine max
  unsure (1)..(564): unsure at all n locations
aaatctgaaacgttaggtgttttgagacattatgggtgttccacaacgttctgcaataatccacatattantaatactagcttcccgattgattctgtttgttgcagcgaatggttagaggaggcatcaccaaagcaagcttgttgcttctcgggtcatgcaggggagctaagagagcaaaaagtggactcagcaaattctcaggcactgctcaacctgcagggagctctggaggagtttcaaagagtggtgggaagatagaggattcagctttctggatcccacacccacgcacaggaatttacttcccaaaaaggcatgagtgggtgatggatgatgttccagaggatgcagctcgtttaaaccagacttattggttcaaaaatgttgatggtgttgaccaccccagacactaaccataatatatgctccacaacattccaaaaataactacataatcgggaatcatatggtggtgaccaatctttatgtgatgtgttattaactagttttcatacattagaaaatatatgaatactatatatagtttaatagaatcatata

SEQ ID NO: 18551 - DNA, 658 bp, Glycine max
  unsure (1)..(658): unsure at all n locations
catttcgttatacttctatttcatctaaaaggganaggcggatttatctatcagcactatgcaggaagaaaagattggcgaacgaattgttgctcttcagcagcttgtttcaccatatgggaagacagatacatcttctgttctaaaggaggcgatggaatacataggattccttcataaacaagttaagctgcttagtgctccataccttgaaagttcaccagcagccaagatgcagggtgtggagccatgcagcctgaggagtagaggcttatgtcttgttcctgtgtcagttactattggagttgctgagagcaatggtgcagatatctgggcccccattaagactactacttctcctaaatttgagaaggatgtctcccaatttcattgacaaattttctcatctttgcagcctaaaggttgctaaagttgctaaactagcatgaaaattactatgatgatacatctagatggaatcatagtagctatatatatatatatatataatagttacagcattaaaaaaaaaaaactctagtcaaaaagctgtcccacacctcttagattttaaacgggtgatgggggtaagcttccaattagccatatgtgcccccaattaattaattccatgtgctgattataaaatgtatatttg

SEQ ID NO: 18552 - DNA, 392 bp, Glycine max
tcgtgttggaacataaaaggagcccctgctctgttggccaaagcagttatacttctattgcctccaaaaggcaaaaggctgatttatcgatcagcactaaggagaggaaggaaaagattggcaaacgaattgttgctcttcagcagcttgtttcaccatatggaaagacagatacatcttctgttctaaaggaggcaatggaatacataggattccttcataaacaagttaaggtttggccattcttgctacattatgctgaaattatcaccgttaattttcttttaatttggtttcatatgccttgagcacctgtacttggacctaaattatgtatgatctccggtcctgatgtaaattttgtaataacatacttgaataatatattattc

SEQ ID NO: 18553 - DNA, 474 bp, Glycine max
taatgagtgtcatcatcaaaaagggggagaatgtgaatcatgcaggttttgatgatgtcgaaaaaaattcacttgataatgattgtcatcatcaaaaaaggggagaatgtgaatgcatgaatacatgattttgatgatgccaaagaagaatcaaacacggttgcttcaaaggataagcattgcttcaaaattaatgcaaggttgcttcaacaaacaaagccttgcttcaagattaactcaagatcaagccttgtcctcaaaacaaagtgtttccaagacatccaaggctctggtaattgattaccaggcagtgtaatcgattaccagaagacaattttgaaaattagctgttaaaaatgggggttttgaatttgaattttgaaccatgtaatcgattaccaaatgtttgtaattgattaccagcaatgacacttcagaagacactttgaaaagtcatgacccttcaaaatataa

SEQ ID NO: 18554 - DNA, 496 bp, Glycine max
  unsure (1)..(496): unsure at all n locations
agttaacgcagtttatcaaancgaaggagcatggagngngcgacagggcttgtctctttctatacgtgttgagttgagacctttaaactcaactcaacactttcatctctttctctctccttccttcgttgttttctgctaatttctagggttttgcccttccccaatccccacaaaatgggggtctccttcaaggtgtccaaaaccggcactaggtttcgccccaagtccattccccaacttcaagatggcgcatccgacaattccaagccccagagtgatcttgttgaggctggtgaaaacattgctcagattccccggtcatctgtgtcatctgaaactctttcattagcagatagggaggcttctttcacattgaacctgtttccagatggttattctattggaaaaccctccgagaatgaagcagctaatcagtcaaaataccaagattttcccaagttgttacatccatatgataggtcatctgagagtc

SEQ ID NO: 18555 - DNA, 842 bp, Glycine max
cgcgctccgagatcggaacccggtcgaatttcgggtcgtcggtgcgggcagagtcggtggttggcgttggcggtggcggtggcgcgaagcattcgctgcggcgtcgtcggtggcggcggcggagatgaagatggtggtgagacatagggacttgagggaaatcgtggaggctattaaggagaatttcgatgacgcggcttccgctggggatcaggtttctgagatgcttgagatcagtagggcgcagcttgatcggagcttcaagcaattgaggaaaactgtgtatcactcgagtagcatattgagcaacttaagctcgagttggacctcgaaaccgccgctggcggttaagtaccggctcgacaccggttcgctggatgaaccgggcggtccaaagagtctctgctccactttggaacgccttttggcgtgggagaagaagctctacgaggaggttaaggctagagaaggtgtgaagattgaacatgaaaagaaattgtcagcgctgcagactcaggaatacaaaggagaggatgaagctaagatattcaaaaccaaggcttccataaataggctgcagtcactaataagtgttacatctcaggctgtgtctaccacctcaactgccattattggccttagggactctgatcttgtccctcagcttggtgatctcattcatggattcatgtacatgtggagatcaatgcaccactaccatgaaattcaaagcaatatagtgcagcaagtccgtggtcttgtgaacagatcatcaagaggtgactccacttctgaactccacaggcaggcaactcgggaccttgaatcagccgtttcagctt

SEQ ID NO: 18556 - DNA, 413 bp, Glycine max
ggtgttagttcatcctctctcactcctttttttctccttttctaatcctttcacttcactcatcttttttcccccttttccctattttcatcttcttttgcatttttctccgactccgtttcatgcattttcccgctgcttaaggaccatcctccaataccacgccgcttcttcttcctagggtttctctgaaccaattcctatggccatcagaggcgtcgatttcaagtggtacgatggctttttcttgttcatgctcgccaccagtgtgtatcctttctcaattcagcttctgaattttcctaattttgctgccattctacattttcacttgcctcatcattccttccttctctagccactttctaatttaatcttaatctggtctgtgagaaacattgaaaaaataaata

SEQ ID NO: 18557 - DNA, 662 bp, Glycine max
cctcgagcgaatcggctcgagcggctcgagatcttcttttgcacttttctccgactccacttcatgcattttcccgcagcttaaggaccatcctcctatacgacaccgcttcttcttcctagggtttctctgaatcaattcccatggccatcagaggcgtcgatttcaagtggtacgatgggtttttcttgtccatgctcgccaccagtgtagttatagtggcaattaattggaagcggtatcattcttgcacgtatccgttgcatatatggattgtggtcgactacaccactgtgtttgttttccgggtattgatgtttgttgataacgggctttctgcaggaatgggtttgtaaggcctcccatccatgttttaatataaatattttggttttcttcaatttacattggttgtatgcactaattcaattgaaattcgagtatgatggataagggctggtgtttcaccattctttatgtttctcggtatgttgaattgcaggttagccatatctatgaagcacggatacttctccctgttcaaaatgtcaccgtgtgtctgacatgtttcagttcttcattagccatatctgaatgtgcaataacttgcattctgtaactaagaatagctagcattacactctatcaaatacactattatt

SEQ ID NO: 18558 - DNA, 569 bp, Glycine max
tctataagggagtgaagaaaaagcgcatattcggcgtttgcgaaattgcgatttcatgtcatagagaggaaaagaggagaggcggggcggagcagagacgaatggcagatcagagcgagcattcgaaaacggcgttgcctccggaggaccaggaccgtcccgttcgggtatacgcggatggcatctacgatctcttccactttggccacgcccgctcccttgagcaagccaagaaatcgtttccgaatacatacttgcttgttgggtgttgcaacgatcaagtcacccacaaatacaaaggcaaaactgttatgacagaggccgaacgatacgaatccctgcgccactgcaaatgggtggatgaagttattcctgatgccccctgggttatcaatcaagagtttcttgacaagcacaacattgactatgtggctcatgactctcttccttatgctgatgccagtggtgctgccaatgatgtttatgaatttgttacatctgttgcgaggtttaaggcaacataacggactgaaggcatatccacgtcagatgttatgatgaggattgtc

SEQ ID NO: 18559 - DNA, 542 bp, Glycine max
aacatagtatactctgaaacaatcatgtagtactcttcgtcttcgttttaagaaaaagaacattttggaggaaaagcgcatacgacgtttgcgagcgaaattgcgatttatttattaccaaagagaagaaaaaaagagaaaagaagaggcgaatggcagatcagagcgagcattcgaaaacggcgtcgcctccggaggaccaggaccgtcccgttcgagtgtacgcggatggcatctacgatctcttccactttggccacgctcgctccctcgagcaagccaagaaatcgtttccgaatacatacttgcttgttgggtgttgcaacgatgaagtcacccacaaatacaaaggcaaaactgttatgacagaggccgaacgatacgaatccctgcgccactgcaaatgggtggatgaagttattcctgatgccccttgggttatcaatcaagagtttcttgacaagcactacattgactatgtggctcatgactctcttccttatgctgatgccagtggtgctgccaatgatgtttatgaattt

SEQ ID NO: 18560 - DNA, 458 bp, Glycine max
ctcccccccattctcctatcctatccacaacacttctctagctatcattgctcttcagctctcttctttccaatacctcgttcaatagctccaaggttctgagttgcaagctaacatgggtgagatagctttaccaaatggcattagcaatggcaatattaatggagtcaatggacaaagccattctcttaatggttacaggaagagttgttggtatgaagaagagattgaagaggacttaagatggtgctttgctctcaatagtatattgcatacaggagctagccagtaccaagacattgcattgttggacacaaagccctttggaaaggctttggtaattgatggaaagcttcagagtgcagagacagatgaatttatctaccacgagtgtctagttcatccggctctgcttcacaatcctagcccaaagaatgtttttattatgggaggaggag

SEQ ID NO: 18561 - DNA, 818 bp, Glycine max
gagatgccgtggtattgattggactatggtttcgcatcagaaagcaacctcagtgatcgaaacagtgacgtttttttttgctacttccacctaatatcaatcaaacacttcgactttaagatactaagaaggaaggaaggcggggaagtgagaagtgtaatggcttctgagagggaatgttttgacctctctggacccttacatttaacttatgttgactgggataatgcatatcatcgaaagtcggttgctgctagtttggtccaaggtgtttatgttctagagaaggacaggcaagaacggcgtgaaggtcctgatgctcttgcactgccttggtgggcgttcttccactttaagttgttttgttcgcttgtcgatgatgttgattcttccatctttggtgctatttatgagttcaagcctccatcatctatgtgcaatgacaccttacatagaagtccacgttatgtaattgccttccgagggactataaccaaggcagactcagttttcccgtgacatcaagttgggtatccattttgtgcgaaatgggcttcatcaaacttcacgtgctgagatagccatccaagctgttcgaaacatggtggctactgtgggtgcttccaatatctggttagctggccactcgctaggatcagcaatggcaatgctaaccgggaaaaccatggccaagactggcatatttattgagtcttttctcttcaaccctccatatgtatctgctcctattgagagaattaaggacaaaaaattgaaacatgggcttagatttgctggcagtgtagtaacagctggac

SEQ ID NO: 18562 - DNA, 342 bp, Glycine max
ccctcgagccgaatcggctcgacaaattttctttcaaacaaacgcagtttctctctctctctctcgtagttcaattcaattcaattcaatatgatgcagagactctcttctgccactactactactactactcgctctgccttgctgcgctacggtggcggcgcacttcgccgggacgtgcttgctcccatttcctcttctcacttagcagctaagtcacaggcgggtgaaaatgacaccaaagcagctagatggttttctattatgagctctgatagatccacatttgattcctcaaacttgaaaagggatttgttctttggcaaacgatatgaatcaact

SEQ ID NO: 18563 - DNA, 1378 bp, Glycine max
agcatagtcaatccatggacgggtcaaccaccatcaagcctgagttgctggtctcgggttcggaagacatgtcggcggctgattccaaaaaagcaatatcagctgccaagcttgctgagcttgccttgattgaccccaaacgtgcaaaaaggatatgggcaaataggcagtctgctgcgaggtcaaaagagagaaagatgcgatacattgctgagcttgaaaggaaggtgcaaacattgcaaacagaagcaacatctttgtctgcacaattaactctcttgcagagagatacaaatggcttaaattctgagaacagtgaactgaagctgcggttgcaaaccatggagcaacaagttcacttgcaagatgcattaaacgatgcattaaaagaggaaattcagcatttgaaaatattgactgggcaagttatggcacctaatggaggacctatgatgaagcttgcttcttttggaggggggcagcaattctatcccaataatcatgtcatgcacactcttttagctgcacaacagtttcaacagctacaaattcaccctcaaaagcagcagcagcaacaacatcagcatcagtttcagcagtttcagcagcaacatcagcatcagcatcagcagcaccaacaatcaagtgacttgaaaatgagagaaacttcacctactccatgccccaaagacaatacttcgtcagatgtaaatccttctggagccaaggattgttgagagttgagactgctcattgtcttctctatttgcttcgtagattctcctttgtcttgtgtcttagtgtgtttagcctttgttatattttttcattcttaaacagtacaaatggtcctagttagagattgagaataatacatttgcatctttggtattgtgtaatattaaagttgtttaatactctagttaatttctatggatatataggggtaggttcatgtgtgtttagtttgccttaaaagcagggagatataggtgaaggaaatcgtagaggctgcaaaggaaaagggggtttggtctgcccactgtcttcttggatagcaagtcccctaaaatgctatagcagggtggtgggggcaattatcaggataaaaatcatgatgtttttgtgtgggttttgcggttttcagcccaggaattgtgtcttgtgcctggaggttgtagtatagctttgcgtgaaagtgctgggtggctgaggcctccgcggtggctatacaatactcatttcatgtgtaacagtttgagtttgtatgcttccagaaggtatcaggttagagaggtagaacttatgcgcctaagcgtctgggtacaccttgtacacatccaatgcttccttgcaatgataaatatcttttgttgtt

SEQ ID NO: 18564 - DNA, 483 bp, Glycine max
ctgcatgcctgttgcagcctctggtggtctggtttgctaccgcaacactgttgggaaactttgttgtgtgcaatcccgttaccggatcctgtagcgaactccctccattgcattttgccctggaaaaccagtctctcaatgcggttgtgatgagtacaactttcaatgatcaaatgtcctataagattgtgttagtcttcggtgaactccctaaccttttgtttaaagtctacaactctggttctagctgttgggaagatgaggctgcgctgaggaggaatgttgatgacaattccatggattgtgattcaaccgatgatgacaatgttgtgtacttccttagcaagggctgaactgtggtggtgagtaacatgcaaagaaacccgtctaagcagtattcgtcggttattactaacaaagacggtcaggaaatagtgtattttctcagttcttcggggacggtagtagcttgcaatttgacat

SEQ ID NO: 18565 - DNA, 600 bp, Glycine max
cggctcgatattccctgtggtccccttttactcatttccaaactttagcctttaaattctcaagttttcagtttgagttaatcctcatctctttttaagtttgttgtctctagtcgaacccatgccagtctcagctagtccagcgccactgttaggggatcgactgtgtgaaaatggatttgagtgtgttaaaattctccctgccaccaatgatgcacatggaggagtcattgtggacttaaaggagcctttgcactccgaagtttttgctactttgcttagatcttcacttttacattggaagcaacagggaaaagatggtgtttggatcaagtttcctattgagcttgttaatcttgttgaaactgcagttaaggagggtttttggtaccaccatgcagagccaaactatctaatgctagtttactggattcccaaaactgactgcacaatacctccaaatgcttctcattgtgtagcagttggagctattgtcttgaacgataataaagaggtgcttgtggttctggaaaaaaaaggaggatttcatgggattggtgtttggaagatacctactggagttgttgatgcaggtgagga

SEQ ID NO: 18566 - DNA, 399 bp, Glycine max
gggtgcaactcatatatctggggggcagcttcacttaatgtcgattaggtgtaagctgacatctaacatggtattagagcccatagcccatcttggttctcgcctattatagtaggcttgcatgttctgacagacatctgtggaggggggtggtaggaagtttcacattgtctgcctcaattctcagggtgcaacttatatatctattgtgtaactgtacttaataccaactgattctaagttgaaatctaacagaaggaaggggtaggggggcaattaaagaagcaatgccaaggcatgcttgtgccttttgctggacgattagaaagagaaatatacgctgttagataatttatgaatcaaatgcacaaatatagaatatacttagcatattacata

SEQ ID NO: 18567 - DNA, 480 bp, Glycine max
  unsure (1)..(480): unsure at all n locations
ggcaccgcttcatcactatcaccatcccaaaaactgcatgtgcttctgttcgttttccaaatctcctctttgtttctgaatcttcccttcgctgttgcagagatggcttcgcggtgctggccttctgatgctgagctaaatgaattgagagagagagtttcgaaaatagtggatctgaataaagaggaagttcgagttgtggtatctccctatcgaatatgtcctttgggggcacacattgatcatcagggtgggaccgttgcagctatgacaatcaataagggaatacttctggggtttgctccttctggcagtaatcaggttgtaattcgttctggacagtttgagggagaagttaagttcagagttgatgagattcagcagccaaaagataagactttggacaaagattcatcagagctacaggaacaatgtaactgngggcgttatgctagaggagccgtatatgcactacagagt

SEQ ID NO: 18568 - DNA, 633 bp, Glycine max
catgttgatagacatgttgaggaacctcagctttggtagcttgtgaatgtcccttggaaactccccagagaagccatttccctggagtgagacactcacaaggctcaagagtcctgtgatggaaggtgaaagtgaccctgaggcattcaaattagatatgtcaagtgacaccacagagatgttgtcctggtcacactgaatgccataccaagtgctgcaaagggacatgtaatttgacatgtcccagctcctcagagaagagtttgcaactccaaaatcttgcttcatagaaacaaggattgaagcttgccttctcagggaaagaggaagtgaagaaacataagcaggactagtgaggcacacaaggaagaagaacatgcaaaagggtacaaaactgaaagaagaaagggtagccatttgtgagaaaaatggtttagaggagtagcatatgaaaggaaactaatacactatgagagtgaaatagcaatgacaacatttcatagaccttaaaaagttaaactgattatacactaacaggattgataaggtgatttctctaatgaagagtatagaaagctagcataacactaacagcatccaatgttctctttctttctcttcccttaacacttt

SEQ ID NO: 18569 - DNA, 2080 bp, Glycine max
agcgaatagggaatcaactaattctggtgctgctggtgatggtggagatggttcaagtggtggaggagaaaacagtgcagggaaacaagtggtctgaactcagcaccgctcagaggcaagggcttcagatgaagaagtccaagcttgtctccatgctcgaggaggtagaacaaaggtacagacaatatcaccaccaaatgcaaattgtggtatcgtcatttgagcaagcagcgggttatggggcggcaaaatcttacactgcccttgccctaaagactatctcaaagcaattcaggtgcctgaaagatgcaatctctgcacaaatcaaagccacgagcaagacattgggtgaagatgattgcttaggagttaaagtagaagggtcgaggcttaggtttgttgaccaccatctcaggcaacaaagggcacttcagcagctaggaatgattcaacccaatgcatggaggccccaaagaggcttgcctgaacgagctgtttccattcttcgggcttggctttttgagcatttccttcacccttatccaaaggactccgataaagttatgcttgctaaacaaactggacttgctaggagccaggtgtcaaactggtttatcaatgcccgagttcggctttggaagccaatggttgaagaaatgtacttggaagaaatcaaggagcatgaacaaggtaatggctcagaaaacaccaaatcaaaagaatcgagcaaggagttggcttcaacagcaaatgttgcactcgatcatctccaatcaaaacatgaaagcttcaacaaccaaaatacttccccaaccgagatctcaacaagctcttcaatgtctccaatgggagggtcccttcaatcccactctggtttccatcttgcaggatcatctgacatgcaaattaggagtccaaacaaaccaagaagttcggaaatgcaaaactccccaagtagtatcctctcagtgggcatggaaatgaagcataataatagtggtgaccatgcaaataatagagatgccaacaacacaaagtttggcattgaaaggcaccaccagcaaaaagatgggtaccctttgatgactagcaatccaaaccatggtggggggtttggagcattcaccatggaagacattggaagcagatttaatgtcactactgagcaactagcttcaaggttccatggaaacggtgtttctctcacacttggacttccccacaatgagaacctttctatgtcaggaactcaacaacatgggttcctctcacagaatatacacctgggaaggagacttgaaatgggaacaaatggaaatgagttttgtactatcaacactgctccaccttcttctcactcaggaaccacttatgagagcattgatattcaaaacagaaagaggtttgttgctcatcagttattaccagatttcgtggcctaggaagtaagaactgatggctagctagctagctaaaacaatattggataatttatgagagaaatcttagagttctgatgagtgtttctctagacttggctaattaacttcgctagcagcaccaagaaaagaaaaggagagggtttatgttattttcatttacatatatatacacatgcatgcagtcactaattatgaaatattgtaccgtgattctggtatactggaattcctggcatgggaggggatgctagctccctgtaaacattgaatagtagcatatagaactatacttgcagagatttaagttagcttaatattaattataggattcataaagttggggatggggtatatatattgtatatggtattggatgtagccaggtacgtagatggatttgaaagatttcttttgatttgatgttatatatatttgtgcaccagagttattatttgggtatagaagaagaagcattgctttgtaaaattagatattcctgcgctgtgattctcgtctcatgtgcgtttgtcttctgtgcatagctggttcaaggtggaattaattgtgggagacatgcatgagagggaatatacgcatatgcgtacaatttggacgccttctataaaatagagtttgag

SEQ ID NO: 18570 - DNA, 419 bp, Glycine max
cacaacggggtttctagtatgcatagtgttgctttgggttccaagtatttgaaagcaacacaggagcttcttgatgaagttgtgaatgtgggcaagggaatctccaaaggggaggaatctatggaaggggctaagaaggagaagatgaaagggaatattgaatccacttctggggttggcgatggttcgagctgcggaagggagaataatgatcgagccaaacaaggagttgaactcagcacagcacagagacaagagcttcagatgaagaagtccaagcttgtgaccatgctcgatgaggtggagcaaaggtacagacagtatcaccaccaaatgcaagttgtgctaacatcgtttgagcaagcagcgggtgttggtgcggcaaagtcttacacggcccttgccttgaagacaatctc

SEQ ID NO: 18571 - DNA, 529 bp, Glycine max
gggggtggtggaaagaaaggcgctaaaagcagggggcggagaattggtgagtaagatagccgctacagaagagaaacaagaagcaaatggcttctttccatctcagaagattagtaagcagcgttcttaactcgcgggtgcaaacaaatccccttttgaccttcaggtgcttctgttctcctcctgttacacctttcacttcccatgctagttacgaccctaactccatccacttgtccaaccaagaaagcaaaagacgcttgttcaacaggctattatacagaagcaagcagcgagggttcctcgaactcgatttggttctcggaaaatggggtagaggacattattcactccttggatgaatatcgcgttcgagctctcattcttctcctcgacttggagaatccagatttatggaagtggatatctggacaagagcaacccccagaatcaatccacataaacccagtctttgccgcagtgcgacaaggagttatgaagaatcttgagagtcattctgctcctgaaa

SEQ ID NO: 18572 - DNA, 610 bp, Glycine max
ctatgtgtccaaataattttcctggacagttgcgacgtagtggtattatgggaccaaacataccaatgcgaccttttggtcctcacagtggtgttgaatctgttatttctggccctgagtttaatgagattaatgcgctccacaaatttcaggatggtagctccaagagtagcatgggtccaaactggaaaaggccatctcctcctgcaccagggatgctttcttctcctgcaccgggtgctaggcttcctacaagatcaacctcgggtgcatgggatgtgcttgacataaaccatattccaagagattctaaacgttcaaggatagatggacccttgcctgttgatgaaggcccatttcctttgaggaatatagatgatcgggggttagctctagagcagacatatgggattgacccagctattgatggaggtggttctggtccatatgtaaacattcaaggaaagagtcaccttggtccagttagctcaaggattacagctggagtacatggtgtcgcccaacctgatattgatcatatttggcgtggagttattgcaaaagggggaactcctgtttgccgtgctagatgtgtaccaattgggaaagg

SEQ ID NO: 18573 - DNA, 773 bp, Glycine max
gacaacacaacttgctttcacggcatgtgggcgtcctctctcaatgtctaacgtttgcttcttctctctccctctttcgaattctcacaaaaacatggtggctttggtttctcaagataacgttgttgcattggcttctcgtacgggtagggagttgcaacgctatagaaagggtcgtcgccaagtcgtgggatgcataccatacagatataaaattggtgatcaaacttccttggacgcacaagaagaattagaagttttggttatcacttctcagaaaggcaaagggatgctatttcctaagggagggtgggaattggacgaatccaaaaaggaggcagctttgcgagaaaccatagaggaagcaggggtgcgaggcactgttgagggtaaattgggcaagtggagtttcaagagcaagacacatgatacattttatggaggctacatgtcccctctacttgttcaagagcaattggagttgtggcccgaacagaatgttcgtcaaagaatatggatgagcatttctgaagcaagggaagtttgtcaacactggtggatgaaggaagctctagagagactagtaaaccggaaacttggtcgtgtgagacaaatagaaatagtaggttctatacattgcataggagatggcaattctgacttgtaaacagctctaccccttttaattagcttttcttggacggaatgaactcaggaatatataatagtatagtacagtccaaacaagtgattgaattagaaaaagaaaaaag

SEQ ID NO: 18574 - DNA, 416 bp, Glycine max
gggcacagcaacagggagggaggaataacatgagatattcatggttggcatgtataaagcaggatataatgttgccgttgcccttgtagtactataagtatgaccaagtaaaagggggagctagcaggagaaaggatcagatagcacttgtatttgattgatgagttaatggaagaatatctcagtccattagctgttacacatcttcttcaacaaacactcagaagcttatgcatccatcaaaattctcaatgggtctatgtagtcttctggaggatcgtgccaagaaactatccaccacccaaatgggaaagtgaagcggctaatgataaatccagaggaaacagaaggaactggatattggtctgggaagatggtttctgcaactttgctacctcatcagcaccctgaaataa

SEQ ID NO: 18575 - DNA, 475 bp, Glycine max
gattgaatgcatgcacattaggcaactgcggtgccactttcagccctgctttttcattctttcaaggttgcacgcatatcatgctggcatctactctaaaagtaacaagaaagtctcctgatgtttggcaaagcgagcttagtgtttcattatgagttgctagggcccccttcgtttggatatatagcattttgtggtaaaggttactttgttttacatgttgagggagggaggaatgatgataagcaattctagtttctgctttgtaattcataataatattggtggtctaggtctctttttgatgatgctattatgtagctgtcaagtgtgtgtgattgtaagaataattggagtgtgaatggttatggaagtagtgtatgcagtttatagtctatcatgcttcatgcatgtagttcatcttgtcagttgttagctgatgtggttttcatgtttgtacatatcattttctttc

SEQ ID NO: 18576 - DNA, 612 bp, Glycine max
gtcttgtttaatggccatttagatgtaactcggggaataagtaggaaaattttgtacaatattaagtcttgctattttatttgaatgattgccctcaacatttgcagatatgtccaaattggcaatggttaccagcttatcagagacccaaagagacgaactcgaaaattggcaaatgaaaaagttagatggagcctgcacactgccagacagcgattgtcgcgaaagcagaagtattgtcagttttttactagatttgggaaatgtaacaaggatggatggaagtgtccttatattcatgatccctcaaaaatcgctgtctgtactaagttcctgaatggtttatgttctactcccaactgcaaattgacacataaggttattccagagagaatgccagattgttcttatttcttgcaaggcttatgctcaaatagaaattgtccatatagacatgtcaatgtgaaccccaaggcatctatttgtgaaggatttctcaaggggtattgtgctgatgggaatgagtgtcggaagaagcacagctatgtctgtcctacttttgaagcaacaggaacctgtactcaaggaaccggatgcaaacttcatcacccc

SEQ ID NO: 18577 - DNA, 550 bp, Glycine max
aatcaatcaatcaaagaaagagccagcgagaaaatgaaaattcgtggtggaatcatcatagactgaagagaaaaaaaggttgttgtgcactgtcatgaaagaggatgaagagacgcagcagaatcaacaacaaatcactgactcgtccctctccaccgagtcacgcacttccactccttctgatggagcgccacccaactcggaaaccctagttctccgctcctcgcttctgcatgaccttgccactcatatgcagggaagctctaccgcacgtaagggtggaaaagctgagagtaaggtgtctgctcagcctcctgatgaggaaactgttgtaaaagatgcagttgaggcacctaaaaaacagacagaaaatcgacttcagtctgtttgttcaacttcattatctgaactatcaccaacttctgtttcacattctttatcatctgcccttagtcccactgtatcacaacagagaccatctcctgccaaggctaatagtgtacaagtgtcgaaaggagacaaaggaacaccttctgatggtacaacctta

SEQ ID NO: 18578 - DNA, 492 bp, Glycine max
ggtgtctcttagattcaacatagtttattaaatatgctaacaacttaatgctagctgatcatcaatttagacaaaagcttacaactatgacttaacaaacaattaactatttttacatataatcatataactatacaatattaattgtaagaacgttaaatatattttcttgattttcactataaaagaaaatttataataatctaagtttgggtttcagctaattagctgcccagaaaccatgaaaacctagaggaaaatttaagtggcttggaatttcgattctcgcaacaagggcattatctgctcctatcctttttgggtccaagatgacaagggaacatctattcattgaaacagcatactcaacaacaagaagatagccatcatcttcttggtaacctttgggaacaaaaataggttcaccaataaatcttctacttccagcagtccaagtttgtgcaacagattcagtagtctctaggtctaatt

SEQ ID NO: 18579 - DNA, 491 bp, Glycine max
gggattgcagtgaacctggtaacatacatgatctcaatcatgcatctgccaagctcaactgcagccaatactgtgactgactttatgggcacatcatttctcctgtgtttgctgggaggttttctagcagattccttccttggcagatacaagacaattggaatctttgcttcaatacaaacgctgggtactgctacattagcagtctcaacaaaattgccagggctacgtccaccaccttgccatgctaacagtgacagttgcaaacaagccaacggattccaaatgggaatcttgtacttgtcactgtaccttattgcactaggaactggtggcctcaagtccagtgtttcaggatttggttctgaccaattcgatgagaaagatgagaaggagaaatcgcaaatggcctattttttcaacaggtttttcttcttcatcagttttggaactctggcagctgtcacagtacttgtctatctgcaagatga

SEQ ID NO: 18580 - DNA, 444 bp, Glycine max
cccacgcgtgggaacagattgagagcctacagcgtcctattacaatggaagcgggctcgattgttctaatggatttattatggtctgatccaacagaaaatgatagtgtggaagggttgcgaccgaatgctcgaggtcctgggttggttactttcgggcctgatcgtgtcatggagttctgcaataacaatgatcttcagttgatcgttcgagctcatgagtgtgttatggatggctttgagcgctttgctcagggacatttaatcacccttttctcagcaactaattattgtggtaccgctaataatgctggtgcaatcttagttttgggtagagatctagtggtagttccgaaactcattcattctttaccccctgcaatgtcatccccagaagcatcatcggaacgtcttatataggatacatggatgcaggagctgaatg

SEQ ID NO: 18581 - DNA, 860 bp, Glycine max
ggttaaggtcaaagatgaagaagaacttgatgctgatgatgacacagcttgccatttggattctattcttgacatgaatagcgaggcctttaattggaatattgctgagtcagagtcacctgcacaggcacaagaagatgaagtgagtaaagtgagaaccaataagaaggacatatttttgaggctaaactatgaagaagtcattactgcttgggcaagtcaaggttctccatggactactgggaccccacctaagttcttcaactccgatgattgctggctagacttcttggtaacttctcttcaaccctctttgcttatgcatgcagcagtgttatcttcttgcgtgtttggttcgacttatttttatgagaataactttttgatcagtttttcttatagtatcatagccggtctcttatctagctaaaggaggaaggttgtgttacgtcatcagtagccaacgtaaaattcgttgatatacctcaaatccattcatagtggggttgtgttatgccttcggtaaacaataatgtcaaattcgtcgatatacctaaaatcactcatagtctcatatctggctaaaggagaaaggttgtgttacgtcttcagtaaccaatgtaaaattcgtctatatatacctaacatgaatcactcaaaagaaagctattgttttttattttaaaaaaagtctcaacaagaatgcagctactcaattgtattgtataggtgagtgtatatagctccttattacatagttttgtttttgtttttgttgaatttgttgcaaccgaaaatatttagtttttgaaaaatttagaatgaccttttacattcttttgaagctcaaacttgatgat

SEQ ID NO: 18582 - DNA, 1434 bp, Glycine max
aaacacattgaataatgtgcaacaaaataggactgcattccaacttcggtctctgctaatgtttgccttatcagataattcactcgagaatttttctatacgtgcattatgttccactggttataagttactcagggtgttagacttgcaagatgcgcctttggaggtttttcctgctgaaattggcagtctataccttctcaagtatctgagtttgaagaatacaaaggtgaaaagcataccaggttccattaagaagctgcagcagttggagacattagatcttaaacacactcatgtcactgtattgccagttgaaattgtggagctccaacgattacgccatctcttggtgtatcgctatgagattgaatcctatgctaatttacattcaaggcatggcttcaaggtggctgcccctataggacttatgcaatctttgcaaaagctttgttttatagaggcggatcaggctttgatgattgagctaggaaaactcactcaactcaggaggcttggcatcagaaagatgagaaaacaagatggtgctgctttgtgttcatccattgagaagatgatcaatctccgctcattgtccataactgcaattgaagatgatgagataattgatattcacaacatcttcaggcctcctcagtatctccagcagttatacttgggtgggcgtctagacaattttccccaatggataagttctctcaagaatttggtccgagtgtttctaaaatggagccggttagaagaggatcctctggtacatcttcaagatttgccaaatctaagacatcttgagtttcttcaagtttatgttggtgagacattgcatttcaaggcaaaagggtttcctagtctgaaggtgttaggccttgatgatttagatggactgaaatcaatgactgtggaggagggagcaatgcctggtcttaaaaagctcatcatccagcgctgtgattcattgaagcaggtaccattaggcattgaacacctaacaaaactaaaatcaatagagttttttgatatgcctgaagaattgattacagcactgcgtccaaatggaggtgaggattattggagagtgcaacaagttccagcagtttatatctcctattggagggataggggttgggatgtctactcattagagacattaggagagagagagagtgattccagtgggggtactgcaatcagaagtcttgaaatttgtacgctctggaaggtttaacttttattttctttcttttaacatactacatatgtgagtatgcaagtgaatgcagtattttgttctttgcagttacctgagtcttgactgcaaatttcttcaagtttcaaccaaataaatcagggaacataatttgtttcttgaatatgaattccgaggttactgaataaaaatatagttagcttttg

SEQ ID NO: 18583 - DNA, 846 bp, Glycine max
gatcttcataaatcctaacaagtacacaagacccagcatcagtatgtgttggtcaacacacacacagtttgagttagagttggatggacatggaatggtgcctataagaatcagagaaagagaaaggatccacaacattaggttgaagaggaaaaagttggaggacattccggaggaaaccgagcttcctattgatactaatccagcagagcttgaagaagcgagccttcacttggaaacagatttggaaatactgagccgagccatggatatgggactttgggcactctgcctcggtttcggctatatcctttccagagctcactttcgcccactttcttgacaaaaattcgttcaattattatgtacctcgcaaatagcaaatgtttttgcgaaacagtcgtaggccttaattggtggtaccatttgtgatcatcacgaggctaggtttttgtatatacccttcaaacttactgtgaagcaaaaaccacaagttttatttttaaagtattcattgattcgtgtgtgttttacatgttctagttcatggttactataaaacttgtcttgcccaggacaggaagatacattgaatgattatctctgattgatgcccgtacaagggcaactctttttgtatatgaactaaatttaagtactgtttctttagtatttttattgttaatttgagttttatcttagtatctaagacaataaaagtcgacatttgaggtttgtgttagttgaatagatgaatcttcaatttctcaaaaatcatatgtaaattttggcctcaattgataatgcacaaaatatagacattggcaaggaaaaagattaattatt

SEQ ID NO: 18584 - DNA, 447 bp, Glycine max
ttggacgcgtgggcggacgcgtgggccctaacaataacaagtacgtcatcttggaaccaggcccagcatgtgttggtcatcgcactcactgttagagttagagttagagttagagttggatggagtcgttaacgttgtgaagcataagcaacaacacaacatgagattgaagaggaacaagttggaggacattccggaggaaacagaacttcctcctattggtattgatactaatccagcagagcttgaagaagcgggccttcacttggaaacagatttggaaatactgaggcgggccatggatatgggactttgggcactctgcctcggtttcggctatatgctttccagagctcactttcgtccactttcttgacaaaaattattcatttcgtgtcaattatgtaccttgttagaaccaaaagaaatatcacttttgtcaattgt

SEQ ID NO: 18585 - DNA, 542 bp, Glycine max
ggaggattaccgtggcaagaggaggaaggatgaggaatatcttaggagggagcatattgacaaagaagaagttctgcatggctacagggaaaatgctagtcggcgcaggcgagaaagagatgaagtattggatccacgaaagagggatgacctgcaaagagctagagataaccctgatgatcaatatgctactaggcagaaagatgatgcctgggtaccaagggagaggggtgataggcagagagatagggaggagtggcatcggatgaaacagtcccatgaagaacacctacccaagcgtgaaagagaagaaggacgaagttctgtaagaagtggacgaggggctgaacataaactttctgagaaagaataccaatccagagaagcaatgcggcaaaatgaccaattgaagagaagggatagaattcaggatgaaagtccacatcataaggggcgagatgatgcttctgcccgtggaaatcaatatactactgaggaaaggcgatctaggctagaaaggtcaagtagtcgtagtgatcgtg

SEQ ID NO: 18586 - DNA, 593 bp, Glycine max
ctgtttcttccattgttctttggtcttctttcccggtctctctctctctgcatttttgctgctttgagtgtgtgttgttgttctgtgctttttgtggaccgaattgcccctactcaggtaaagagaatgattctcacaaagcagtatcgatgcgtacattcagctagctgtcaatgcaccaagggtcatttaagtgaagatgtgatattcttggtgtttcagcatttgaattggaacccgaagctaattgctgctctgtcatgtgtgtgcaaatggtttgacgatctttcaaagcaagttctatggaaagaattttgtaaaacgagagctccgaagatgatgcttgatctgcaatctagtggaagccacagtgttgatgggaactggagggctctggggaagcttcttatattctgttcaggttgcaggcaaggcagtttgttcaataacgttcaggttcctggccattttgttaacaagactcgattttctagaacatcaggaaagagctttctcatgccacaatgcataaatgatgttttgtatgtgtctgatccttgtgagcatattggccaaagtgaagagggcgattt

SEQ ID NO: 18587 - DNA, 721 bp, Glycine max
cgtcgatctggcatcaccttgacacttcttgtggataaagctcttttttttctgcactctaaaaaaaaaagcgtttctctctcattttctttctgtcgagaaaatttagtgaacccaaaaggagagaactttctttggtttgtgtttcattttgttgtggttttctgtaagattaaatggctgaggttttgaccaaggcgagtttggtttcctcttcttcttcctcatggcatggggttggtcaacggcatcatcgaagggtttcaacggtttccaacacttgtagcttcggttctggcgtgggaaagttctcttctttgaagatgaagtctcaggttctcagatcttggtcctcttcttctgagtttcagggtataaagcttgtctttcatgtaaatagaggattacccaatagggtcaattcgcgcttgagagcttcaactggggctcagatgagctttagactagggaaagttcagaaatggtgggaaaaggggcttcaacccaacatgaaggaggtgacttcggcacaagactttgtggattcactgttaagcgcaggggacaagttggtggtggttgatttcttctctcccggttgtggtggctgcaaagcccttcatcctaagatatgtcaatttgcagagatgaatcctgatgttcagttccttcaggtgatctatgaggagcataagtccatgtgttatagccttgatgtcca

SEQ ID NO: 18588 - DNA, 361 bp, Glycine max
ctcgagccgaatcggctcgaggaaaattctattgaacccaaaaagagagaactttttttcttggtttgtgttttcattttgttgtggttttctaaagcgaagtgaaaaattcaatggcggaggttttaaccaaggcgagtttggtttcatcttcttggcatggggttagtcaacggcatcatcatcgaagggtttcaacggttctttcaaataatacatgtagcttccgttccggcgtgggaaagttctcttctttgaagatgaattctcaggttctcagatcttggtcctcttcttctgagtttcagggtaaaaagcttgtctttcatgtaaatataggattacccaatagggtcaattc

SEQ ID NO: 18589 - DNA, 524 bp, Glycine max
cgcgaaaaagacaaaggggtttgtatgtgaatctgatcatctagagttgagaatggaaggagggaaacgaggcacgattctggtcaccaacgacgacggtatcgatgctcctggcttaagggcattggttcactccctcgtcaacgccaaccttttcaacgttctagtgtgcgctcctgatagcgagaaatcagctgttagccacagcatcacttggctccatccagtagctgttaagcaagtacagatcgagggaaccaccgcatttgctgtttctgggactcccgctgattgtgcttctctagggatttccaaagctctctttcccacagtacctgatctggtggtcagtggcataaacaagggtagcaactgcggttatcacattgtttactctggcactgtagctggagctcgagaggccttcttcaatgatataccttctatctccatttcatatgactggtatgacatatttgcattatgcttctggtatggtatatttctggatttatcttgaatat

SEQ ID NO: 18590 - DNA, 938 bp, Glycine max
ttggggattaatcaaattgatgtagtatcgttgttcacaaacattaaacatgatgggtgaacggcaaaatcttccttggttttagaactcacattaaaatataattctctagaattcattataattgaaaaatgaaatattatagcatagtgactaaaaaaatgttgaactaaaaggacaatggtttagaattttaacatgatacttacagttccaccaacagtgggatctggtgtatgtagaaaacttatgaagttgcaagcaactccacccagtatgtagatcaagaaaaatgtaaatgaaccatagcctttgcaaacttgaggcccaaatgttaaaagggcccaacaactgacagccatgtgaaatattcctgcatgccaattctcaattgtgtaccagaaacattggtgttacaagcctccaccattctccaaccatgatcaaatgatttatctgtgctccatatagtagtggaatagaaaacagctctaaatcagaagtccttataggacttgctatttcaaatagaaacactgcaatgtttacagaagccaatatgccaattaggtagagactggaggtttcaacttgctgctgtgaatctatagcagaccttggatcatgtaaacgttttagccttcttatatccacaaaagcattttgtttcctaaagtttgatctttcaatatctttgctgagagatcgttttggtgctaaattttcttcactatgattctcaacatacgatggcacacaaggttcttggtttgcttcatgatttagttgccaagatactcctcaagagattccagtccagtttttgatctagcttgacgatctatgtgatgcaactgtatcaccttgtgtgatgaatcaaatgtacgcaattttgcattatcttggagttttccaaaataagaatctaatgaccttag

SEQ ID NO: 18591 - DNA, 326 bp, Glycine max
tgaccattcgtcaattggaccaaagtggcttaatatgaaaataagagctgtcataataactgccttctggaacaggttctctgaagcatcacttgcaataacatgcttgttttgaatttgatacatgagccaagcaccaattattgcaaatacaggtccagttccaccaacagtgggatctgatgtatgtagaaaacttgtgaagttgcaagcaaccccacccagtatgtagatcaagaaaaatgtaaatgaaccatagcctttgcaaacttgaggcccaaatgttaaaagggcccaacaactgacagccatgtgagatagtcccg

SEQ ID NO: 18592 - DNA, 689 bp, Glycine max
acgagaaacccttcaccaaaggtccaaattctcaatcatccatcactaatattattatccaaaacaaaccacatcatccacatcataaggctcacacagaaggatcaggatcaggatcaatccccataaagtttgataatggaaactactcagcagtctcaagtactgtagcaaatggtaaacaacatgttcccatgcagcaagggagacaacatgaaggttatcataagtaacaaatggatatcaatgaccatttcaaagatttcattcaaaatacaagggagaagatgatgagaagcgtcacaaacattggttggactcatcagagcaaccatgcggctgcacctgaacatggtgaggctcagaacaagaacgaaagccatttttctgagtttattcagcgtgctaggaagaagctcagaactacaacaactgttagaaagaataataattagtccaagaaagagtaagactcaccacaaattaagaaaggttaattattagtattgacgtttgttggtttggtgttggaaaagtgttgtgcatctaatctaggttattgttcagtggggataaaaataaaggccatatcccttaccagggtatgcagccataatatttcttatatttctacctaatattatatgttgatgtcttaatattgatctatatttcggttttcaaaaaaa

SEQ ID NO: 18593 - DNA, 394 bp, Glycine max
tgagggtttagagagtgtgcgcgttaccggttctcaacttaaactcaactcaactcacatccgaggctttctcattcattctctgtcgtagttctgcgattcaccactcagttatttttatcgtgtgctcgaagtgaagtctctgaaatttgtgctttctctgtgttcttcgattttggatttggcttctgtcgaattgaattaggggttgtatggcgagaagaagcagcagcgagtctgaggatgacgcgaggaagcgcagtggcagcgaatctgaggatgaggagaggtataggtatcggcggcgcggtgctgagaatggtaagaagagttccggtcaccgtgatgacggtcattcgggggaagaacgaagcggagccaagaggaatggtgg

SEQ ID NO: 18594 - DNA, 513 bp, Glycine max
taatagtggagacctcagggttgttcatctctttttctcacttgtttgtttcctcatatttcttggtgttttttaggctttcttgttctgttttgtcctatctaagtgttgatcttaaagggggaaaatgagttacttgggtttgggtgttagtccaggtactgttccagtgtaccatggaacaaaacttaaagtgttggataggagggtgaggataacagagctggtgttaaggtgtgtgagccttggtcttggagttgttgcaattgttcttgtggtgactgattcccaagtcaaagagtttttctcctttcagaagaaagctaaatttacagacatgaaggctttagtgttcttggtagttgcgaacggactaactgttggctactccttaattcaagggttgcgctgtgttgtgagtatggttaggggaaatgtacttttcagcaagcccttagcttggctcattttctctggtgatcaggtgatggcatatttgacggtggctgcagt

SEQ ID NO: 18595 - DNA, 312 bp, Glycine max
ggagctctaaaaaccagatttttcttgccatttagtagtccataaataaatgcagaaccataaatgatagcagattccttaataaatgaccccatctttgtactgttaggatagctgagtttcctttgtcttctcagctttgaccacttggcacgctacgctacgttgcattttcaaccatcactcttttgtgttcaactagtactatataatagtggacacctcggttgttcacttgtttttgtgttctcgtgtatatctcagtgttgatcttaaaggggaaaatgagttacttgggtttgggtgttagtc

SEQ ID NO: 18596 - DNA, 395 bp, Glycine max
gccatattttagctcttcaagaagaaattgaggagcgggagcgtgagaatcgtctccacagccaacaggaggcaatgttaaaggatgagcttcgcagtatggaaagatcaaagaaaagggaaggtgttgatatgacatatttgaaaaatgttatcttaaagctgcttgagactggtgaagttgaggtattgctaccagttattggaatgctgcttcagtttagtccagaagagatacagaagtgtcaacaggcatatcacaactccacagatgttccaccaccaaatcctgcaagcgatacttcaggatctggcctatcgcttttctcaagattcacattttcttaatggcataaatgggagtgctggcgaattttgttgttgctgttagaatgt

SEQ ID NO: 18597 - DNA, 400 bp, Glycine max
ggcatagtggaaaaagaagaagttgctatataaggtggttaaagatctaatgttgggtgatgaagggaaagggattcaccaaagaattggaaagcttaaggatgctgctgctgatgctttgaaagaacatgggtcctctacaagagcactttcccaatttggcactgaattggagaactgaatttcaagatggccattcaagtaaattgattggttttcttaaatataagtagaataaaaagctaggaagcatcatcaaaagaaaaatattggttgaacttgctaagggtaatattttagttatgcacgaataagttggatgaataaaaatacagtatgatggtagaaagaattttaaaagttaactatcaatacacctattgatattcttgctaaaagc

SEQ ID NO: 18598 - DNA, 995 bp, Glycine max
ggaaaagacagaaagagcaacgtcagagagtttgccgtagggttctccttggtttgtggtttccggtattgttttgcactgcttcagatacagagagaagggaatccttcttctctctctctctctttctcttttcctgagtttgaacttggagtaactgagtctatatttttgttcatactagtgtggtcatcactggattttcttggtatatataaaaaaaaaacaaaatattgtctcttgggttggttccaaacaagtagaggaaactatcaattaagtttatagtattttgcttcacagatgtacagaactctctccacttttcattttttttattcccgcagattattttttctttgttggggtttcaaagagtaaatattgttaagtagttaagttgtatatcaattttgcctctttgttctgttcttttctcactagtccagttccagctttttcctttttctgttttaggtgaggattgtcctcagatcccagaagctatccagacttgttacatacgaaaaactcagatctatggctcatgacaattcacaaaactccaaatatgagaaaagatgaagggtttgaatatttgatgttccaaaaaccatgtctaatttgacttctgcatccggtgaagctagtgcatcttcaggcaatagaaccgaaattggcactgattactcacaacaatactttgctccaccgctgagtcaagcacagcctcctccactaaagaaaaagagaaaccttcctggcaacccagacccggaagctgaagttgtcgccttgtctccaaagactctctaggcaactaataggttcatttgtgagatctgcaacaagggatttcaaagagaccagaatctccaacttcacacaagagggcacaatttaccatggaagctgaagcagagatcaagcaacgagattataaggaagaatgtgtatgtgtgcccacaagccagatgcgtgcaccactacccttc

SEQ ID NO: 18599 - DNA, 372 bp, Glycine max
gataccaaaaacacattctctctctctctctctctgtaaatactaaaaaagaaaagaagaaaaacaaataaacagtgatggaaattgaggcaagcaggccggtggtggcaaagaaggtatggaacatggtacgcgtgttgttcttcatgctgagaaagggcatagccaagagcaaaataatggtggagttccatctcatgctcaaacgtggcaaacttgcacttaacaacctcatcctcaaccatcactactacaacatgcagacctccttcttcacatgccgatcccaccaccacagcaccttcatctccccaagcgactacgagttcagctgcagcaacagccctgccatccccaccaaacgcaccaacc

SEQ ID NO: 18600 - DNA, 717 bp, Glycine max
gatagaaagtgcttttgctctcatggtggccttcctcataaacatctgcgttatttctgtaagtggcactgtttgcaattcttcaaatttgaatgctgaagatcaactgagctgtcaggatttggatctgaacaaagcctccttcctactcagaaatgtcttggggaaatggagctcaaaactatttggaattgctttgcttgcatcgggtcaaagttctactattacaggaacctacgcaggacagtatgtcatgcagggatttctggatttacgactggagccatggattcggaatatgttaactcgttgcttagccatagttcctagtttgattgttgcagtcattggtggctctgctggggctgggaagctcataataattgcatctatgatcttatcatttgagcttccttttgctttggttccactcctcaagtttacaagcagcaaaaccaagatggggacacatgtcaactctaccatgatttcggctgttacttggataatcggtaccctcctcatggccattaatatatactacttaataactggcttcatcaagctgctgcttcatagtcacttaaaaattgcggctaaggtgtttcttgggatattaggattttcgggcatggcaatgtatttggctggtataacatatctagtacttcgcaaaaataaagaggctacacaccttttggctctaacagcaacaga

SEQ ID NO: 18601 - DNA, 1029 bp, Glycine max
gaaaaatggaagatgccttctctttgtatgaacatgccattgctattgagaaaggaaaagaacattcacaaacattgccgatgttgtttgctcaatattctcgatttgtatatttggcttctgggaatgcagagaaggcaaggcagattctagttgaggggcttgagaatgttttgttgtcaaagccactacttgaggctttattgcattttgaggctattcaacctttgccaaagcgtgttggtgtcgactttttggagtcatgggttgtcaaattcataatgcctaactcagagagtgctggtgtagcaagtccaacagagcgtgaggaactttctagtatttttctggagtttttaaatctctttggtgatgttcaatctatcaagagagctgaagataggcatgccaaattgtttttgcctcacagaagcatgtcagagttgaaaaaacgtcatgctgaggatttcttagtttcggacaaaacaaaagtgccaagatcgtattctgctcagtcacctgcgcaatctgcgatgggtgcatatccaaatgcgcagaaccagtggactaattatggagttcaacctcaaacttggcctccagttactcaagctcaagggcaacaatggactgctggctacacccaacaggcttcctacggggcttatgctggatatgggggcaactatgcgaattctcaattgcctacatcagttccacaaagtactgcatacggagcctatcctcctgcatatcctgcacagccggcggttcctcaacaaaactatgcacaacctgtggctgcagcccctgcacagcaacctgctgcggttcctcaagcttattacgggagttattattgagctgacaaaatgagatggccactgttttcccttcctgtaatgtttttttttttccttcatattataggtaatttgatgatattagggaatctggagtataggtgtagtgtaaactttcaagttatactactgaagatagaaaatcattttgactaattcgcaaatt

SEQ ID NO: 18602 - DNA, 827 bp, Glycine max
tttggggtatatgtttatcaggcccaagtgggttggcttgtgtttttttgttatatatgttgggttgtcctgtgctgggtctggtctcattctccttattaatttgtgttaagtagcaaaccaaaaccaaaccaattttgtggttgtgtgtgagtgagaaactgagaataattatcaattatgggcctctcaaatttcccaattagtgcatctgaaggggtgctacctgtgcttgtgataaacacggttttctcagtggctttgttgaagagcatgtttagatccatgctccaagtagtgtttggtggcagtgctgctagtagttcttcaaacattgaacatgatgatgaaattagttcatcatcatcatcacgggaaaggagggtgtcaataactcagtacaagtcattgtgccacagtcatgacataggaggaggaacaagtgtggctatggtggagtgctgcgtttgtttgtgtcgttttgaagccaatcaagaggttagtgagttgccttgcaagcattacttccacagaggttgcttagacaaatggtttgagtttgataacaaacacagcacttgccccttgtgtcgttccatcgactagagacatatacaaaggttaattagtttcaaatttacaattagagctagccagctagctatagttgtagttgttgctatatattgttaacttgttatagtgaaaagaatcaatgcctcttttcatttctttacttttagatttgtacacctccttcaacccaactcagtttctctatgttttagcttttatatatggaacataatgagagatgacattgcatt

SEQ ID NO: 18603 - DNA, 378 bp, Glycine max
tgtggttttagtagtatttatcaggcaagtgggggttggtttgtgtttttttgttatatttgtatgttgttctgtgctgggtccttaatttgtggctgagaattaattattattattatcaattatgggtctctcaaatttcccaagtgcatctgaaggggtgctacctgtgcttgtgataaacacggttctctcagtggcagtgttgaagaacatgtttagatccatgctccaagtagtacttggtggcagtgctgctgctaatggttcaaacattgaacatgatgaaagttcatcatcatcatgggaaaggagggtgtcaataactcagtacaagtcattgtgccacaaccacgacttatgaggaacaagtatggc

SEQ ID NO: 18604 - DNA, 673 bp, Glycine max
gactcacttcttctcactcggtaaaattgaattagggtttcattttcttcttcttcaccccactgtcactgcgcaaatccagttctccccttaccctctccctcggtcctgatcttttcccgccatttcccgcgtttcttttacccagattttgaatactagccgttggatctgccatttttttcaatttttttcgaccgttgctctcgccggagtgaacgggaaatgtctgcgtccgaagcggagaagaaggtcgaggaggaagagaagaaggaagaggtcaaagggggagaactcctgttctgtggtgccacttgttgggatatcattggtcgtcgtaaaggccccgtcgacggtaacctcgtctctccctcgcgcctccgtcctctcgtcggcgtcgatattcgctacgtcgcctccggctgcgtgtcttgtcattgcgtggcgttggacgttgaagggcgttgttatacatggggacgtaatgagaaagggcaactgggtcatggagatacgattcagcgtgataggccaactgtggtgtctgaactttcaaatacaaaattgtcaaagctggatcagggaggagccatacagttgttgttacggatgatggaaattccctagcatttggatggaacaaacatggacaactaggttctggttctgtgag

SEQ ID NO: 18605 - DNA, 321 bp, Glycine max
ttggggtcgtagtttattttcatccacaccacagagtaaaactacaacctcaggaggagaatgttcctctgaatccgaagcccgtgctctacccagcgactttgccagaaggggatatctggtgtaactgaaggtgtcccaatctcattttggagaacagtactatttgtgtgccactttctggattgattaaccatcttaggtagcagagtccaccatttcttgatttttggaggttaacagtgttcatattcaacactttgctatttcttaacttcaagtgcaagagaacaaagagcataaaatcctttagagtgtcag

SEQ ID NO: 18606 - DNA, 247 bp, Glycine max
gtaaaactacaacctcaggaggagaatgttcctctgaatccgaagcccgtgctctacccagcgactttgccagaaggggatatctggtgtaactgaaggtgtcccaatctcattttggagaacagtactatttgtgtgccactttctggattgattaaccatcttaggtagcagaggtcctctaatttacttctttcatgtctctggaataacttcttttattggttttccatttttcctttaaaat

SEQ ID NO: 18607 - DNA, 341 bp, Glycine max
ggaattaatatataaaaaaaaaatacttaccgtatttgcaaaacaatgttgaaggaggaaggatagtgttgttcaggttcacatagttcccagttacgatttgggtgccgcattttttcgcccttggaactccgattccaactccatcatcacaacgaattagagttctcttgactcaatcaaaccagcaaaggtcatcatagaaaaggaccgatgtgcttctgatgctacaatgttgtctaagattaatcgtaccaagaagaagaaacataaggaaaatatgcttcatgttctggcaggtgctagtgcacggttaacacaactagaaaccagaacccacc

SEQ ID NO: 18608 - DNA, 400 bp, Glycine max
gatctggtgttgttgtggactcatcattttcgggttccagtactcaaaagagtggatcttctagttcttcattaacatctagtgatgcgtccgaaacaactgaaatctcttcacaacagtctaaggtgtccagtgattcatcagctttgagctcattgccaagtctgtctgctgcatctaccgtgaagcctacatcagcttccttgttacttcctgcatctgctgtgagtgaagagtccgtttcagttctgcctaataatgagggcggaaagaaggaatctcttagtaggtcaaattctttgaaggataaccagaagaaaatacacaagaaaggccaatcacagcatcaggttgctgtgcaatctccttctgtggttaatgtgcctttccaagctgttga

SEQ ID NO: 18609 - DNA, 847 bp, Glycine max
gatgaattaaacctcatctcgaagaaagtgaattcaggtagtgttggtggttgtgatgtccaacatgatgttccagcagtgttcttctctaatgggggctacactggcaatgtttatcacgaattcaatgatggaatcgtacccttgtacattacttctcagcatttcaagaagaaggttgtgtttgtgattcttgagtatcatagttggtggatcatgaagtatggagacatcctttctcgtctatcggattttccaccaattgattttcgaggagacaataggactcattgcttcccagaagccatagttggtctcagaatccatgatgagctaactgtggattctgcattgatgaggggtaacaagagcattgctgattttagaaaccttttggataaagcttattggccaaggatcaaggggctgattcgagacgaagaaaggaaagcacaagagaaattgagagaacaagtctcttcatctgaatcatcagaagcctcacaacaacagtatataactattaggcaacaagtgcaagaaaatccaatgaagaagcctaagttggttattctttctagaagtggttcaagagctataactaatgagaatttgcttgtgaagatggcaaaggaaattgggtttttggtgcaagttttgaagcccgacagaacaacagaaatggcaaagatttataggactctcaatgcaagtgatgtcatgattggtgttcatggagcagctatgacacattttctgttcctgagacctggttctgtgtttattcaagtggttcctcttggtaccacatgggctgcagaaacttattatggggaaccagcaagga

SEQ ID NO: 18610 - DNA, 483 bp, Glycine max
cataggatttagggatgaggcacgtcgtctagttcggacagagaggcttagaaccaaagatataacacagagagtgaaaatgaagaactactggcagggaggagtctgcttggcgtttgctgatgaggtattatgctggctgtatggaacagtcaaagaaggtgaagattatattttgcagtttgctccacctttcaaccgtttagagcttctgcaagcccagtcttgcccagatgtaattactagtcatctggagcttttctgaaaatttggagaccttaacagttattattatttaaacaattcaatatacgaaggggaatcaaccctggatttttcccctccgctttgatcagtccacgaatttttagtataggggcaccctctgtgagtgctgagaaattgcattcgcatctccatagaaatttgtggcaatattatggccctgcttaggtggaatataagtcctttcaactttattgc

SEQ ID NO: 18611 - DNA, 915 bp, Glycine max
gaccattagagaaagtgccatcctgcgctttggggcctctagaaaaccaaattcattattataaccctaactcaaaaggccctttacccatagtttacatttcccgtgcacctaacaacgtaagaaatccatcattactacccccacctcttcctttccattcctctctccagaagtcctagccctacaatctcaaagacaaacccatcattcaaagtcataaccgatacctaaaatcctcattccaatcaaaaccaaccccaccatgcccacaaaattaagtcatcaaattaaagcaccgatgatcctcaatttgatccttgtgcttatttgtgtcactactccaatcaaaggtgagaaatcaaggaagcttgatgaggtcacaaacggtaatgagaagtgcacaccatgtgaaggtggttacaccccatcaccaccaatagagtatttatcaccaccaccaccaatagagtatttttcaccgccaccaccaattgtgtatccatcaccaccacccccttcacccaagaaaccaccaacgaagtattgccctccaccaccatcatcagcatatttgtacatgacgggtccaccggggaacttgtatcccgttgatgagaattttagtggagctagttccaaccgccaccatagtttcgctgttttcttgccacttttagttggcttgttgtgcatgatggccttttggtgatcagcttatcaagaaattaattcaggcctagaagaattcatggattaccaattaaggtctcacataaggtaaagtacgggagaattttgtactcaagtaattttattgtttgaaattaatgttcccttcttcgtttaatttgtgatcccaatctgtactataatagcaataatccttataatggcaataatcttttgctagct

SEQ ID NO: 18612 - DNA, 877 bp, Glycine max
  unsure (1)..(877): unsure at all n locations
cataactatggtggtattccggagacatcttcagcacatcaaattcaaatgattccaccaccggaattgccaaaggaagaaaagccagtggaagaagcacctgtcgtcgagaaggcaaatggaactcgtaagaaaagacaggggcccaaggttcccaaatctcccaaggctaagaagccaaagagggggcctcgtgcgccaaaggatgagaatgctccctcagttcaacgtgcaagggttccgaagaaaactactgaaattgtaataaacggaattgatatggatatttctagtattccggttcctgtttgttcatgcactggagtgcaccaacagtgttataaatggggctctggcggttggcagtctgcatgttgcacgacagggatgtcagtgtatcctttgcctatgagtaccaagcggcgtggtgctaggatagctggaaggaaaatgagtataggagcatttaagaaagtgttagagaaacttgcagctgagggttataacttttctaatccgattgatttgaggacttattgggcaaaacatggcaccaacaagtttgtcaccattaggtaggtctattctattgtcaactggcttcatgttcctttctgcctgtttgtcatgtatatatttatttgtgtatttggcctgagactgaggcttcttagatggtttgtagtacaacaattttcaaagtcacaagacatttcctgttcttctctaactcttcctatgttgtatcttaacttctttggatttagttcttgggaattcaatcatttggttaattggttggttttgatagggaactagctgagggcatcttgttttcccaatatttagaagtaaaattttatcctttcttgnncct

SEQ ID NO: 18613 - DNA, 526 bp, Glycine max
gatatttctcgcattccaattccagtttgttcatgcaccggggcaacgcaacagtgttataaatggggatctggtggttggcagtctgcatgttgcacaacaggcatgtcggtatatcctttgcctatgagtaccaagcggcgtggtgctaggattgctggaaggaaaatgagtataggagcatttaagaaagtgttagagtaactcgccgccgagggttataacttttctaatccgattgatttggggacttattgggcaaaacatggcgccaacaagtttgtcaccatcaggtagatctcctctgtggccatctggcctgttatgtcttttagcctgtttgtgatgtatatacacatgcggatttggccagagacagactctttttagctggtttgtagtacagcaattttcaaagtcattagacatcttgggttctcttgtaactctttagtataaccactccgttggatttagtacatggaaattcatatttaagttggttggttcaaaaaaaaaaaaaaca

SEQ ID NO: 18614 - DNA, 728 bp, Glycine max
ctttcctttttatccttagtataagagagactactagtttaggacgaaatttatggtttacttcggagaataattttaaaatatcatcgaacaagcagttagagttgtgaggcgcttttagccggagttgcttctctcatcgtcagttgtcgttacgttggtcgaccgactgtgtgcagctgattttgcaaagagaagagggaattttgttaggatagttgaatactgataagagaaataacgggaaacaacagacatggatactggtggcaattctttaccatctgcacctgatggggtgaagagaaaggtgtgctatttttatgatccggaggttgggaattactattatggtcaaggtcacccaatgaagccacatcgtatacggatgacacatgctcttctagcccattatggattgctacagcacatgcaggtccacaagccatttcctgctagagacagggacctttgtcgttttcatgctgatgattatgttgcattccttcgaagcataactcctgaaacacagcaggatcatctaaggcaactgaaacgctttaatgttggtgaagattgtcctgtttttgatggcctctactctttctgtcaaacttatgcagggggttcagttgggggtgctgtcaagttaaatcatgaccaatgtgatattgctgtcaactgggctggtgggttgcatcatgccaagaagtgtgaggcttctggat

SEQ ID NO: 18615 - DNA, 534 bp, Glycine max
gttatggtgatgctggatatcccggggctgcctcgcttggggatgcagtttgtgggatggcggctgcttatattacagagaaggattttcttttctggttcaggtcgcacacggccaatgagatcaaatggggtggtgcaaagcatcatcctgaggacaaggatgatgggcagagaatgcatccccgttcttccttcaaggcgtttttagaagtggtgaaaagccgtagcttgccgtgggagaatgcggaaatggatgcaattcactctttgcagcttattctgcgtgactcgtttaaagatgctgagcatagaaattctaaggctgttgtggatccccatgtgtcagaacaagagttgcaaggggtggatgaactaagttctgtggccagagagatggttagattgatagaaacagccactgctccaatatttgctgttgatgtcgatggccacgtaaatgggtggaatgcaaaggtttcagaattaacaggactcccagttgaggaggctatggggaagtcctggttcacga

SEQ ID NO: 18616 - DNA, 954 bp, Glycine max
aagaaagtagaacgatctcatgaggtccacataactgagatcatctacaagggaacgcacgaccatgcaaaacctcctccaaatcgccggtcaagtataggttcggttaaccttcatactgacatgcaagtggacaaccctgaacacgttgaaccacacaatggtggtgatggtgacttgggctgggctaatgtacaaaagggaaatatagctggagctgctaattggaagcatgaggacattgaagccacatcatcagcatctgttggccctgaatactgcaaccagtcccccaatttgcaggctcaaaatggtactcacttagattcaggagaggcggtggatgcctcatctactttttctaatgaagaagacgatcaagtcactcatggtagtgtatcattaggttatgatggggaaggagatgaatctgagtctaagagaaggaaactggaatcatatgcagagttgagtggagctactagagccattcgcgagcctagagttgttgtacagactaccagcgaagtagatatcctcgatgatggttatcggtggcggaaatatggacaaaaagttgtcaaaggaaatcccaacccaaggagttactacaagtgcacgaatgcagggtgcacggtcaggaagcatgtggagagagcatcacatgaccttaaatctgtgatcactacgtacgagggaaagcacaaccatgatgttcctgctgctcgtgccagcagtcacgtcaacgctaatgcttccaatgccgttcctggccaagcttctcttcagactcatgttcatagacccgaaccatctcaagttcacaatggcattggaaggcttgagaggccttccctgggctcattcaacctacccgggaggcagcaactaggaccttcccatggcttctccttcggtatgaaccaatccatgctatcaaatctggtgatgtca

SEQ ID NO: 18617 - DNA, 389 bp, Glycine max
tctcgagccgaatcggctcgagaacgaagtaaaggatcgaaatggaaatagacgggaatagagtggtaatcctaggaggtggcgttgcgggatccgtcgtcgctaaatctcttcaattccatgcccatgtcacactcgttgatccgaaggaatattttgagattacatgggcgagtttgaggtcaatggttgagccatcttttgcagagaggtcagtgatcaatcacagagattactttaccaatggcgacatcgttacgtccaatgccgtcaatgttacagaaacagaagtgttgactgcagatggccatcgaattggctatgactatcttgttattgccactggccatgcagatcctctccccaaaagtatgagggaaagacttaat

SEQ ID NO: 18618 - DNA, 288 bp, Glycine max
agaaaaggaagagcatcactagcgttgtcctgccagccaatccaacgatgcgtatacccaactatgaaggaatattttgagattacatgggcgagtttgaggtcaatggttgagccatcttttgcagagaggtcagtgatcaatcacagagattactttaccaatggcgacatcgttacgtccaatgccgtcaatgttacagaaacagaagtgttgactgcagatggccatcgaattcgccgtgactatcttgttattgccactggccatgcagatcctctccccaaa

SEQ ID NO: 18619 - DNA, 647 bp, Glycine max
gcatgttccaaacaaagctttaacatttcagaattttgatgggttgcttgcttttgtttcagagtttcagcggagattgttgattcagtaggaatcggaaatgttgggggatttcatcattcgatgtcttatactgattctggggtatgcgtatcctggatttgaatgctacaaaagtgtggagcaaaacaggggtgacaatggggaacttcgattctggtggcaatactgggtcattgtagcacttttcacagtactggagaattttaccgatgcagttattggatggtggtttcccttatacggagagttgaagcttgcactctttatctacttgtggtatcccaaaactaaggggacgggatatgtatataatactgtgctgcggccttatgtatcaagccatgaaaatgacattgagaaaaagttccgagagtggcgagctagggcatgggatttggccattttttactggaaaaactgcacagagttggggcaagctacaacttttcagattctcgactattaggctgcacagtctaaaaaattctgcagcaaatcttactctgagaaaaaagacaagctgtgtccaactccaagtgccccaccattatcttcacttcgagaaactctctttgagaacaacc

SEQ ID NO: 18620 - DNA, 461 bp, Glycine max
tggcgtccgtgacaagaaatcccgtttgatcattctttctcctctgatcatttttttatttttgaataacatttctgcgatagttcgttcgtatgtctgcgtttctttcctatatatacattcgcaaggcttattcagttattctccattcagtttttcatagacaaaaatggtcaattcttctagaggaacaaactaaaccccatcaatcgaccaaactttaattataagtctcaagtctcgaacttgttcatttttcctaagcgcttacgggtaccccaattccctgtcttcaacttcgcgtgtctctgactctgtcaaacgcggtactcagaaaccaggcgcaggtttattggattctcgtaaaacgacagagtttcagcggagattgttgattcagtaggaatcggaaatgttgggggatttcatcattcgatgtcttatactgattctggggtatg

SEQ ID NO: 18621 - DNA, 575 bp, Glycine max
tcggtttttcctgtttctacccaaacacctgagctacctgaaaccaaatatgaagagggaggaaagaagaatttagtcaatcagactgataactgttctggtccgttgtatagtaatgctgttggagctggctctctcagactttaaaaaggacagatgttaaatcactgctcagacagagtgtcattgctctttcgtccgaagttgatgaggtggtagaccctgtttttgcggcatatcatttgcaatccaagctaaaaagtaaatcacaatcattgaatgatacagcgactgcatctgacaatgtaatgcaagttccttgtaaaaagctaaagatctcctcatcttcaacttcagccaggtttcttgaacgaactactaatgtcaatccccaatgcagtaggaagactactgatgatgttcagttcctactagagaaggatagtgtggagggtgcagagatggtgacgaaatattccaatgatctatctagaacactagggtatatggaagaacaacttgagttgcttctagatactataatgttgaaatgcaagcccatgacccttgctgag

SEQ ID NO: 18622 - DNA, 2758 bp, Glycine max
  unsure (1)..(2758): unsure at all n locations
cgatttagcaaaagttttcttattttattttattttataataattgattatattcttatgaaattttgctaggaggatcatcaacaataaatacctcactctagctcacaaataccctgcatctacctccgaaaatgaagaaagcagcgattttgaagtctctccaaaccattatggttgtcttcctgctgatagtactctttagcagcaacaccaaagcagaaaaagaaacaatccacgaccatgcaaacaaaaagacctacataatccacatggacgagaccaccatgcccttaaccttcaccgaccacctcagctggttcgacgcctccctcaaatcagcgtccccctccgcggagattctctacacttacaaacacgtggcccatggcttctccgccagactcactcccaaggacgtagacacacttgcaaaacaacccggcatcctctccgtcatccccgaactcaaatacaaactccacaccacaagaactcccaacttccttggacttgacaaagccaccaccttgttacccgcctcggagcaacagagccaggtggtcattggactcctcgacaccggcgtctggcccgagctcaaaagcctcgacgacacgggcctcggcccggtcccttccacctggaaaggccagtgcgaaattggaaacaacatgaactcttccaactgtaacagaaaacttgtcggagcgaggtttttctccaaaggctacgaagccgcacttggacccattgacacaactacagagtcaaagtcagcgcgtgacgatgacgggcatgggagtcatactttaaccaccgcggcaggctcggttgtacccgaagctagcctcttcggcttggcgtcgggtacggcgcgtggaatggccacgcaagcgcgtgtggcggtttacaaagtgtgctggctcggcgggtgttttacttccgacatagccgcgggaatcgacaaggccatagaagacggcgtgaatgttctgtccatgtccattgggggaagcttgatggagtattacagggatataatagcgattggatccttcactgccatgtcacacgggattctggtgtccacatcagcaggaaacggtgggcccagccaaggaagtttgtccaacgtggcaccgtggataacaactgtgggagcgggaactatcgaccgcgatttccctgcttacataaccctcggaacagggaaaacatacaccggagcttctctttatagcggtaaacccttgtcggattcgccgcttcctcttgtttacgctgggaacgcgagtaactcttctgtagggtatctatgtttgcaagattctctgattcctgagaaagtttcagggaaaattgttatatgtgagagaggtgggaatccgagagtggaaaagggtttggtggttaagcttgctggaggtgctggaatgatattggcgaatagtgaagcctacggagaagagttagttgctgactctcatcttcttcctgctgcgtctttgggacaaaaatcaagcgagattttgaagaactatgtttcatcttcacctaatccaacagctaagattgctttcttagggacccatttgcaggttcaaccttctcctgttgtagcggcttttagctccagaggaccaaatgcactcaccccaaagattctcaaaccggatctaatagcaccaggagtcaacattttagccggttggaccggtgcggttggaccaactgggttgactgttgacacccgccatgtcagcttcaacataatttctggaacatccatgtcatgccctcatgtaagtggcttagccgcaattctcaaaggagcacaccctcagtggagccctgccgccatcaggtccgcactcatgacaacagcgtacacgagttataaaaacggtgaaacgattcaagatatttcaacaggacaacctgggacgccgtttgattacggtgccggacacgtcgatcccgtggccgctcttgatcctggtctcgtctacgatgccaacgtggacgattacttagggtttttctgcgcactaaactactcgtcatttcaaatcaagcttgctgcgaggagggactatacgtgtgacccgaagaaggattacagagtggaggattttaattatccttcttttgcggttcctatggatacagcttcggggattgggggaggttccgatactctgaagaccgtgaagtactctagggttttgactaacgtgggagctccgggaacgtacaaagcttcggtgatgtcgttgggggattcgaatgtgaagactgtggtggaaccgaatacgttgagtttcacggaattgtacgagaagaaggactatacggtgtcgtttacatacacttcgatgccgtctgggacgaccagcttcgcacgtttggaatggacggatgggaagcataaggttggtagtccaattgcgttcagctggacatgatgggctgtggaaaatgtatgacccaaataaaagggcccactcaagtgttgtaggctcttcgtggtttgcttttgggcccggcccgatacggcttgtttttattatgtatctcacttattcactttgctgtttttattccgtaggctgaagttcaggagaaaactttatatatggaataataacaataattgtacatagaaaaagataatggtcgcatctgtatgtatgtatcataatggctttgaatctgaattatccatataaaaaaagataaagaaaaaaagggannn

SEQ ID NO: 18623 - DNA, 890 bp, Glycine max
ggcgtttcgctgttgagattcgaaatggagtgagcaatggttgtggtgaagttgaggatgctgtgaaggttttgttggagggtctaggggaagatgtgaacagggaaggtcttagaaagacaccacttcgtgttgccaaggcccttcgtgaaggaaccagaggttacagacaaaaggtgaaggacattgttcaaggtgctttattccccgaagctggtctagataatagagttggtcatgcagggggagcaggtggactcgtgattgttcgagatcttgacttgttttcctattgtgagtcctgcttgcttccattcccggtcaagtgtcatgtgggttatgtcccctctggtgaaagagttgttggtttaagcaagctctctcgtgttgctgatgtatttgcgaaacgacttcaagagcctcagcgtctggcagatgaggtatgctctgctttacatcggggaataaggccggcaggtgttgctatcacacttcaatgttcacatatccactttccagacatagaaccagtctttcttgactcaaaccatcaagggtgggtgaagatacttgtttcctcaggttctggggtttttgagaacaaaaatgcagatgtatgggatgatttctttggtcttcttaaatttagaggcatcaatatggataaaattcatttgagaggatcatctgatccatgctggtgtccttctcagtcttctctatctgccaaagtttcctcgaaaataggaccagtcaatcctgtaatggttactgcagtagcttcaattattgaatctttgggagaagatcctttgaggaaagagcttatagggactccaagtaggtttgtgaaatggttgatgaactttcaaaacagtaactttgatatg

SEQ ID NO: 18624 - DNA, 767 bp, Glycine max
tgactattttagtgcgagctgaattcaactcaaggatcggggctaatactgttcttgtgcagatccctctgccatcatttacatctcgtgttacttttgagttagaacctggagcagttggacacaccactgattttaaggaagcaaataaaagactggaatggggtctgaaaaaggttgttggtggatctgaacatactttacgagcaaagctgacattttcacaggagttacatggaaatatcatgaaagaagcagggcctgtcagcatgactttcaccgtacctatgtacaatgcttcaaggcttcaggtgaagtatttgcaaatagcaaagaaatcaaaagcacataatccttatcgctgggttagatatgtaacccaagcaaactcatacgtagcacggttataattggaatctctgcaagtccaaattccgagttaaatttggggggatggcagcatatcaggtgaaaaaatggcgggctctctgcctctacaagtgaagataattttctctagataatgaatggctaaatggaactagagttcttaaaatttttcattttaaatgaaaatgaagatgtacacgacaaatcttaaaattgtgtaatgtggagggcagacatctaaatcttaaaattattaaagacttgatgtaatatcaaatatcaatagtcttatgatgtgtttagcctcctcagtaatgtgttggactagagatattcgtttgaatgtatatgccattgaacctgagctggctttgacg

SEQ ID NO: 18625 - DNA, 361 bp, Glycine max
gagcgattctattttttacacatttctatgaagcaatcggttcgtccataccattggtagagcttgtaaaaccacgactgatccataaaggaatgaatggaaaaagtagcatgtcgtatcgatgaagaattctaaaaatatttcattctcttataggatccggccagaatttttgtttgtgaattcttggctcggaacaaaaaaattcagttgggtttaattaataaagggatagagcttggtgactccaattataatagggaaacaaaaagcaacgagctttcattttttttatttgaatgattaccccatctaattgtacgttaaaaaagatttaatgcttgatatgggaaaagctttt

SEQ ID NO: 18626 - DNA, 369 bp, Glycine max
aatgattggagatgggatggtgatcttttcactgctcaaccactcaattcagtgccatctgattgtaggggtcgccagttttccccacctcatcctgaaattcctgcaaaaaatgctaatccatctaccaccaatttgtcttattctgttttcatctcaggtgaaggaaagagggaattggagaaaaggaggaggggtgttataggtgaaggtgaaggtgagggactgaattatgaggctggttctcttagtttgaaccttgcgggtcaaggttaccctctcatggtggaagaagaagaaaagagtggaaagaaaacaaaggtaattgggaccactacagctagtactaccacttgctttaatcgtgct

SEQ ID NO: 18627 - DNA, 1321 bp, Glycine max
ctaggaactctaagtctccctcccccctctctctttctctcgctctctctctcgctataccaatattaatttgaacctctctcagttcaattccagatagactttgttggcatttgagttttgtcgaatagaaccaaaaagaaaaaatgggaaggcaaccttgctgtgacaaagtggggttgaagaaggggccatggaccgcagaggaggataagaaactcatcaatttcatcctcactaatggccaatgttgctggagagctgtccctaaactagcagggctgttaaggtgtggcaaaagttgcaggctcaggtggacaaattatctgaggccagacttgaagagaggccttctatcagaatatgaagagaaaatggtcattgatctccatgctcaacttggcaatagatggtctaagattgcttctcatctcccaggaagaactgataatgagatcaagaatcactggaacacccacataaagaaaaagctcaagaaaatgggaattgatcctgttactcacaagccactttccaataaaactgagcaaactcaagcccaaccagatgaacaacaaacccaccaaccattgcaagaacaacaagaagaacctatcccagttgagaaagacaccaaatttgaacctgaaaaagagcaaaacaaggagccagagaagccagagagttcaattgaatcattaaccatcactgaagaagccaaggaggaagaccaaattatgacacccttatttgactcatgggaactaatgaatgagttctgcactgatgaagttcccataatagaatcaaatgagattctagttccttctgctccttcttccacttcaccaaccactactactactacatcatcttcaacatcaacatcagcatcttcaaattcaaattcatccaacttccttgaagaccttctgctcccagattttgagtggtctgatgattacaatgatactaattttgacaataataacaatagcagcatggccttgtgggatgatgactttattagaagttggaatttgcttattaatgatgatgatggtgatggtgacagaaagcaagtgtttgaggctcctatcaatcagtacccaagagtgatcatggattcagattcttgggcctatggcttgttttgatttgaaatttttttttctcctctctccccggctgcttacttgtaattgttcttttaagttgttgcccaagaaaataaaaagaaaatcaggattcttgtttagtgcatttatccactttttttgttccccaacttttcaccttataataaagggaaaagatatct

SEQ ID NO: 18628 - DNA, 457 bp, Glycine max
attcctcttggctcccttaaactctctttctctctttgtgtgtctctttctctatttctgagtctcagtgttaggggggttattcattattcataataacttggctttatagcattttcccttttgatataaaatgggaaggcaaccttgttgtgacaaagttgggttgaagaaggggccatggactgcagaggaggataagaagctcataagcttcatcctcactaatggccaatgttgctggagagctgtccctaagctagcagggcttttaaggtgtgggaagagttgcaggctcaggtggacaaattacttgaggccagacttaaagagaggtcttttatcagaatacgaagaaaaaatggtcattgatcgtcatgctcaacttggcaatagatggtctaagattgcttctcatctccctggaagaacttgataatgagataaaaaatcattg

SEQ ID NO: 18629 - DNA, 698 bp, Glycine max
gaaacattggaggtgtttgtaggagatcatttaattaatttccatctctctcagacagtcacataagctgatcatggccttcaccttgactttggatgggtaaataaagctacatatcatccaaagtgaaagatttgtgttgttctcttcttcttgtgtgaagccaaagccacaacaacaaccattggaacaacccaacaacaacaacatagtgaacaacaacaaccttggtaataataataacaaccatggagagcaccgaagactcatccacgagttcacagcaacaacaaccgaacctgccacccgggtttcggttccaccccacagacgaggagctcgtggttcattacctcaagaagaaagtagattctgttcctctccctgtttcaatcatcgctgatgttgatctctacaagtttgatccatgggaattaccagccggagcattgggtgttgtgccgaatctacaagaagggcaacacacaaaggtcacatgagagggacgattccattgatgacatgattggagaagtacctccttccatcaacgtgggccacatgagtgcgaggtttcacctttcaaggatgtccacgagctacagtggtgcattgttggaaaatgacagaaacacgttagaaggggtggttataggcaatggtagtgtgaatgggatcagcaatactaataatattac

SEQ ID NO: 18630 - DNA, 497 bp, Glycine max
gacaccggttgttgacattggaagaggcattgtgcagtagcttcaatttttgtttcctgggagagcgagaagagtgttcggatttcaccattccaggtgacggcggaagatgcttctggcgtcgatacgcagaggattcactagtcgagtaggtcccatacgaaccctctcttcgcactccgaaatgaaagactttctggattacctcgactccctcaaaaattacgagaaatcaggagttcccaaaggtgccggcaccgattccagcgacggtttcgatcttggtagaatgagacgcctcatggagcgttttggtaaccctcactccaagttcaaggctgttcatattgctggaactaaggggaaggcatcaacagctgcttttgtatctaatattctgaggaatgaaggttattctgttggttgttacactaggctttatttttctcaagcagtccacatatcctgaccatccgggagcgcattttactgggaaa

SEQ ID NO: 18631 - DNA, 275 bp, Glycine max
attggaagaggcattgtgcagtagcttcaatttttgtttcctgggagagcgagaagagtgttcggatttcaccattccaggtggagggaactagctcatgtggtgacggcggaagatgcttctgtcgtcgatacgcagaggattcactagtcgtgtaggtcccatacgaaccctctcttcgcactccgaaatgaaagactttctggattacctcgactccctcaaaaattacgagatatcaggagttcccaaaggtgccggcaccgattccagcg

SEQ ID NO: 18632 - DNA, 275 bp, Glycine max
gtcaaacacaagtgttatgcaacagagaccctagattcaagcctacatgcaatgtgataccatttttcagtgaaaaaccttgtcgggcacctagaagtacacgatgagacatgcctcacaatggctaaggcaggtcactctcactaagtgaaatcttagggagatcagttagggtcactctgttttgcgagaaatgctccaaccatgtaggatcaacacaagctttaaggagcactcatactcagtgtattttcaaaattaattttaactcatcg

SEQ ID NO: 18633 - DNA, 564 bp, Glycine max
cacggggattgtgggagaacaaagcaatggcttcagctaaaaggtggcttccgctcgaagctaatcctgacgtcatgaatcagttcctttgggggcttggacttcgagaggatgaggcagaatgctgtgacgtttatggcttagatgaagagcttctggaaatggttccaaagcccgttcttgccgtgctttttctttatcccataaccacccagagtgaagaagagaggttgcagcaggaaaatgaaaaaaaggaatataacagtagagtctattttatgaagcaaactgtgggtaatgcttgtgggacaattgggctgcttcatgctcttggtaacttgacttctgaagtcaagctcgttgaggggtcgttctttgataacttttttaaatctactgcaagcttggatccattgcagcgtgcaacatttcttgagaatgacaaagaaatggaagtggctcatttggtggcagcaactgctggtgatacagaggcatcagacaatgcaactgcacatttcatatgctttgcttgtgtggatgatgaactctatgagcttgatg

SEQ ID NO: 18634 - DNA, 408 bp, Glycine max
tgggggcattatggtctcatgaaataaggcggccaccgcagccgcccgtacattaaacggcaacacagatctcctctccatctcttctgtatggctgtcttatgttttcccactctgtctcctcgtttccgaaccggaccgcaccgagccggaaacatgggagttccagcgttctaccggtgcctcgcggatcggtacccactctcgatcgccgacgtcgtggaggaggagccatctgtcggctccggcgccgttgatgtgtctaaacctaatccaaatggcgtggagttcgacaacttgtacttggacatgaacggcatcattcacccctgttttcaccctgatggcaagtcagcacctactacctacgaagatgtattcaaatcaatctttgacttatattgacca

SEQ ID NO: 18635 - DNA, 389 bp, Glycine max
gaacgtgttcgtcggttgaagagcaggctggttgccctgaccaggagggttcagaaggttagagatgaaatagagcagcttatggatgatgatggagatatggccgaaatgtatcttaccgagaagaaaaggcgaatggagttgtcattttatggagaccagtctatggttggatataaatcagttgatggtgcatccatttctgctccagtctctcctgtttcatcacctcttgattctcggaagcttgaaaagtgtttcagcattgctaggagtcgacatgagagcatgaggagttctgaaagtactacggaaagtatagaggagcttgagatgttgctggaagcatactttgttgtcattgatagcactctaaataagttgacatc

SEQ ID NO: 18636 - DNA, 925 bp, Glycine max
ccgggctgcaggaattcggcaccagcaccatcacaacaacttcaccaacactaactcaacccgacacacacccacacaaaaaaaaatgtccctcctttcctccggtggcttcttcggccgcagaagaaacgacccgccaccccaccaacccacgtgggaccactaccaggcccaggaccatcaccaccctctgggagtttcccagccccaccacccaccccccttcatgtccttccccagtgactcctcgccggtgctcaacaccgccctcatagagtggaaggagaccccggaggcgcacgtttacaatgcgcacctcccgggctacaagcgcaacgacgtgcgcgtggaggtcgacgacgaccgggtgctctgcatcgtgtgcgggaagagcgtcgagaaggaggagcagaggggaggctggcaccgcgtcgagctctccagtggacagttcgttcagcgcctcactttgcctgagaattccatggtggatcatgttaaggcctatatggataacggggtgctcactatcacggttcctaaacaccacagaggggtcaataaccgtgttagaaacattaacatctcttctcgtccgtgagtgttgttgttgtgtgtctcatgaaatgaaagaattgaaacctagctaaccgctatctttgcataagaaacacggttgtctagataaataaataatagtaacaaaagttatgcgtccaagtctagacttttgcctcctttcaagtttcaactatatatattccatgtattagatcaataattagtttgagggattacccttataacaaacagttcccaatatgaaatttgcagaggcaaactaattaattgacactgctttggtgtattgagggaattaatatacatatatatgtagtattatatataatggaaattctgtctt

SEQ ID NO: 18637 - DNA, 564 bp, Glycine max
gaaacaaaagaacttcatacaagttaaaaattaaaataaatgcagctgcagtgctgcatatacataatagaaagagaaaacaacataacacatctatctatctatgtccaaggagaggggaggggttggtcgaattgaaagacattgtaataaaacagaaaatcatataatcctcctccttgttttacaacatagatcgatcgatgaaattaaagccaagcatcagacttgcctagagtgcacatttcttcaggtttctttcttgctacctcttttcttgtggtattatatttggccatggctccaataaccgcagcgacatccccacaaacaaatacttgatcttgcaccaaactgatgttgttttcaaccttgagagtctcatcacgtttttcttcaaaaacactttgaagacgaagaagaaagttaggaaagaggggattagatttgttgagaatccggagattacaagttgtatttataaagagacatagatttcgaagtgagatataacattttttaaaattattttgcattttattagaataaactaataattaatat

SEQ ID NO: 18638 - DNA, 497 bp, Glycine max
ttttctcttttctttttctgctggatttattgagcttgtttcacccaagtcacatgccagtgttttcgttagagcgataaaaactagtgttttgttgtacgggaagatacaatcttggccttagatttgtaatattttatctggggaactagaccagactgtttttgtttttgtttttgttttgttttttggttatatatatcagtttctttcacctgttgatgctcttttctctcctgcttgggcgagtgaagaggtgaaagcttgagagcagataaaagcttgaggcctgatttctgcgtttctcggagaatttgtcttcaaaaaaagaagggccaccagtggatttatgtcgtctgggtttattctggcagtgattggggctccgttgaagctcttcattgtatatgctttcgtttctttcttcttgactctctttgtttgctactgttgctgtatgctacactgcattctgagccacaatactgtgaacctac

SEQ ID NO: 18639 - DNA, 447 bp, Glycine max
accgtccgaattcccgggtcgaccacgcgtccgggtgtcaaggtcggctatttttttttcttctgtatttattggacttggttcacccgagtcacagcctagtgttttcttcatatcgataaaactagtatttttgttgtactggaggatacaatcttggccatagatttgtaatttttttttaatctgaggaactaaactaggctgctagggtgtttttgttttgttttttggttatatatatcagcatctttcacttgttgatactcttttctctcctgcttgggcgagtgaagaggtgaaagcttgagagcatataaagcttgaggcctgatttctgcgtttctcggagaatttggcttcagaaaagacggccaaccaggggatttaggccgtccggggttattctggcagtgattggggctccgttgaagctcttgcatgtat

SEQ ID NO: 18640 - DNA, 395 bp, Glycine max
gtatttttaaaaatataaaattctcagtctggcgtgtttttatagagatttgcgttcgtttcactctctgtgtcaaggttggcttttttttttttctcttttctttttcttctggatttattgagcttgtttcacccaagtcacatgccagtgttttcgttagagcgataaaaactagtgttttgttgtacgggaagatacaatcttggccttagatttgtaatattttatctggggaactagaccagactgtttttgttttttggttatatatatcagtttctttcacctgttgatgctcttttctctcctgcttgggcgagtgaagaggtgagagaggagagcagatcaaagcttgaggcttgatttctgcgtttcttggagaatttgtcttc

SEQ ID NO: 18641 - DNA, 533 bp, Glycine max
  unsure (1)..(533): unsure at all n locations
gataagcagcatcaactaaacctaaaatcttctgccccaccctgcatttcagcagagtgattctgttcactacaatgccatcatcactatcctctttcctccatatggttcctattctctcccttcttgtactctcatgtgtgatttgttctagtagtgctcagggaccaccttcacctggctactaccccagttccaaaattagtcctgttagtttttatcaagggtttagaaacctatggggacctcagcatcagaggctagaccaaggctcattgacaatctggcttgactctaactcaggaagtggattcaagtcacttcactcttatcgatctggttacttcggtgctgccattaagcttcaacctggttacactgcgggagtcattacatcattatatctttcaaacaaccaagaccaccccgngaaccatgatgaaattgacattgagttccttggcaccacacctgataagccatatgtcttgcanaccaatgtatacatcannagaagtggagatgggaatatt

SEQ ID NO: 18642 - DNA, 450 bp, Glycine max
gttgctaaagtaaaggccctgtacaatgagcttaatcttcagggtgtatttgaggagtacgagagtgggagctatgcgaagcttgtatcctccattgaagctcatcctatcaaagcagttcaagctgtattgaagtcctttttggctaaaatttacaaaaggcagaagtagagtcaacttaaggcgaggaccaaaattgtttaacatgcaatagaaactagagttctgatttctatctagtatctagagcagtatcatgtttcgtggcttggaatcttttaaaaattgattttcttcttgcctttgttttttctaattttgttttttcagtgttaagatcttgttgtattttatcttgtaatattgtttgactattttcttctgaaacttttgggtcattattattagagttctcccatttatataatatattttcagtattttctctct

SEQ ID NO: 18643 - DNA, 1192 bp, Glycine max
ctcgagccgttcagctaacctcttatcaagttttgttcattactgactactgtgttctccaactgggtctgttttgttttcatcaatcaaaattcagaagctcggttctctcacttttctgtacaaaagccatagaaagactatttgggatggactggtactatggatgtgaaagtagtgatcttcttgtatcaaaagatcaagaaaatttgttggaaaggcatccttcaccagaaaattggtcagaatggggaataaatgcacctgaaggctttaattcaccccaggagtatttgatcatggacacagacgaaacagaagtagaattcaatttcattgatgaaagtttcaataatgaaattgagtttgacccttgtcagtatgataaagatcagtctagcagttcaagtgcatgtggaggatttgctgagcaatcgtttcaacaaatggcacttacgtgtgatcaccagcttcaagaccgatcaactttcaaacacacggatgacattttcttgtacaagcgtaacttctgggactaagatacttggttttatgcctggatgctgttcttgtcgattttccatgtgtggaaggcttccccaatctttcttttaccctgaaaaccagtgcagcaacacaactggtggagtgcagaaagatattgcagcttcagggtttgttccatgtaactcagactccaaggattgcctggatatagagttcaatgaagatgacatcatggttgagcagttatctcttgaggaatatacactgcaggcttttgagatgttaattgcacagttcactgagaagactcgtatttctttccgagatgccctgtaccgccttgctagaaatacaaaacaacatgtaatagaggaccttgatggaggtcttaacatgcaccaggaaatgccagactcagtttaccatgaaaccatgaggtctgaggacaataaaccaatggaatcagagagcaacagtgttgacagagcagttgcaaatctcatgttcaacaagatggaaattaacatactagatcttccccttacaacactagtaaacttgaagcaagaagtaattggaagtaaatgtctaccaggaaaaagctcaaaatccttggacgtgacccaataatctcactctccacacccggaaaagttacccacctatgctgaggttccaaggtttg

SEQ ID NO: 18644 - DNA, 858 bp, Glycine max
cgcatgtggaggatttgctgagcaatcgtttcaaccaatggcacttacgtgtgatcaccagcttcaagaccgatcaactttcaaacacacggatgacattttcttgtacaagcgtaacttctgggactcagatacttggttttatgcctgtatgatagtgaaatcatgtagcatctgaaatgctttaaccttgtagcaagtccagtacaaattgaatggctctgtggtgtttttgcataccaaaattcaccatatcttatcataatgattggagccaatagagactaacacaatcctacttatttgttatcggaactctataagcgtgaacctgctattgcatgggattctgtacttgaagattttccatgtgttgaaaacctacacaaatcattctcttaccttgaaaaccaatgcagtaacacaactggtggggttcagaaagatattgcagcttcagggtttgttccatgcaactcggactccaaggattgcctggatatagaggatcatgcagtcaaagtcttggacacttttgagcagtccaatggagatgacaccatgcttgagcagttatctcttgaggaatatacactgcaggcttttgagatgttaattgcacagttcactgagaagactcgtatttctttccgagatgccctgtaccgccttgctagaaatacaaaacaacatgtagtagaggacctggatggagatcttaacatgcatcaggaaatgccagactcagtttacaatgataccatgaggtacatgatttagatatgctgcatgtatgttatgttcttttggcctttagtttctaaatgttatgttgaaacaataatctctttgtggatt

SEQ ID NO: 18645 - DNA, 409 bp, Glycine max
ggaccaacacctgtgcagcaattctctgtcaccaaatttgatctttctttctttctttctttggcgggaatgacagaaacgggggtttctgataatttcaagggcttaatactggcgatgggttctagtgcattcatcggttccagtttcatcttgaagaagaagggtcttaagcgtgctgctgcacgcggtactcgtgcaggagttggtggctatacttatctactagagccgctttggtgggctggcatggtgacaatgattattggggagattgcaaactttgttgcttatatctatgctccggcagttctggttactccccttggtgcacttagtattattgtcagtgctgttttgtctcacttcttgttgaaggaacggcttccgaagatgggggtattggggt

SEQ ID NO: 18646 - DNA, 552 bp, Glycine max
ttaaaagtaaaagcttttgtagattcagaaaccctcacttgttgttggtgtggttgtgtttttgcatgcttcggacatgtcgatggcgatggtccacccttcggttcacccaatcgaagccccacccatgactgagcatgcaattgcaattgcaatgcccagacacactctgaaggatacgcagggcatgcccggcaccctcggtggcttcctcttgcgcttcgcccagttctctttcgccctcgtttccctctccgtcatggctaccacctccgatttcccttctgttactgccttccgctaccttgttgctgctgtcagcctgcaaagcttgtggagcctctctttgggagttgctgatatgtatgccattttagtaaggcgtggctacagaaatgtgagaattgtccgcttattctctatcggtgatgggattacttcaacacttacattttctgcagcctgtgcttctgctggtattacagtcctcattggcaatgatttgaatgattgtgcacagaaccattgcagcaggtttgagacagcaacagc

SEQ ID NO: 18647 - DNA, 597 bp, Glycine max
cgaggacgtgattctgtctgccgggtttcggatatacgaagtaaaatgcagattcatgctctttcacgtcatgataacactgtctgttctgtgtttacgcggccaacggatccccaagttgttacaggttctcatgacactaccatcaagatgtgggaccttagatatggtaaaacaatgtcaactcttacaaaccataaaaaatctgttcgagcaatggcccagcatcccaaagagcaagcttttgcatctgcttcagctgacaatattaaaaagttcacccttccaaaaggagaattttgccacaacatgctctctcaacagaaaactatcatcaatgcaatggctgtcaatgaggagggtgtgatggttactggaggcgacaatggcagcatgtggttctgggattggaagagtggtcacaatttccagcaatcccaaacaattgtccagcctggttcattggacagtgaagctggtatttatgcttgtacctatgatcttactggctcgaggctcataacctgcgaggctgacaagacgataaaaatgtggaaagaagatgagagtgccactccagaaacccatccccttaac

SEQ ID NO: 18648 - DNA, 365 bp, Glycine max
tcggatggggggattctgctgagaagtacaactcggaaggccggtgttgggagcccctcccaagaatgaacaagaagagaaagttttgctcaggttgtttcatggacaacaaattctatgtccttggagggcaagatgagcatggaaaggacctcacttgtggggaattctttgatggaaaggcaaatagttggaacttgattcctgacatgtggaaggatattgtttcacagtctccacctcttcttgctgttgtgaacaatgagttgtacacactggatgcttcttccaatgagctgaaagtgtatgtgaaaggaaccaacacatggaagactttgggaatggttccttgtatagcttattca

SEQ ID NO: 18649 - DNA, 352 bp, Glycine max
gaaaccaaacattaatttccgtcccattgagttttctgatgagcaacatgagcaaccctaagatgcagcaaaggagggagcgacgcatgttctccacctctgatgacagtgccatgaccaagcaagttgaggccactcatgcccctgatggtcgtgaaattgatgtcaaacccattctccaaattgtggatgaaatcttggttcggttcattgctcgcaccgttgagggtcatgaagtaaagcgagatcaagatgcattggagatgactgctgctctgactgaatttgacatgcttgactcgctggcttatatcataaacaaaatttcctgcgagctatcatgcaagtgctc

SEQ ID NO: 18650 - DNA, 359 bp, Glycine max
ctttgtcttccctctcacttttctcattggagggaaaaaatccaaaaaaatttcggacagtgaagaatatatcttcttcttcttcttcttcttccaccagtgaacaaatctagggttttagtctcttccttcagcttatttactgtgagttgattcattctcttcctttatttttttctttgatttgtttttttctcgttaaaggaaaaagccactgcgaatgcattgcttgccgtgagagctcatcgcttttgattttcatatcagatatccatgatttgagctgagcttcttcggttagctcacgctcgtgtcttgtacttgttatgttttagggtctgttgtgttttttaggtttt

SEQ ID NO: 18651 - DNA, 402 bp, Glycine max
ggatgcgaagaaaaactggtgagaggaagagagacaggaagagattactgtttgaatcagacttagactgtggtttgcaatttgcattgtgacatacatactcttatctattttggtttgcaatcactttgtgcgatcaccatggtcatcgatattgaaaccttggaagacaggtatattgattcttgcaggagacatgacgtttttcctaattcttctattttgtcaagccttttcaaggctgaggtaaaaaagtccaaccatgagctgtgcagcctggagattttaattgatgacctaaaggaggctgatattgctccactttttgacttgtgcatgaactttgacgcttctgaaatagaggctgttgatgtacgtaatgaatcatcatgtgatttaaat

SEQ ID NO: 18652 - DNA, 532 bp, Glycine max
gacacacgccagagtgagtgagtgagtgtgtgtgcgtttctttctttctctctcgctcttcttcttcttcttcctcctttgatcaactccccacaccgcacggccccaacaacgatggtgtccaaacctaccgactcggcttccaaacctcgaaaacaacttggagagccagcaaatgatgctattggaagcttgtccctcgagttaaatcagttgaaaaagcaaatccaggcggagagaattgtgtgcattaaagaaaaaattcggagcaatgagaagaagctacagtgtcatatgtcaggagtcctgtcagaaacatcaacaaggggttcttcaccgccagaggaaaataggaaaactccaattctttcttcaagaattgaccatcctttatgtaaattcagtggtttctctccagtctcaggagacaaagaccacagcaatcaagatgcattatctgctacaagtatcaaaattccatatattgaaacattaccgccatatacctcttggatatttctagacagaaatc

SEQ ID NO: 18653 - DNA, 396 bp, Glycine max
tcctgaattcccgggtcgacccgggcgtccgtccacgcgtccgaagacgacagaagggggttgtgcatgagaacgatgaacattacccccacgttggtgccttagagcaggtggcacacggtgcagatgaagaccactttgatcatgagaagaagtctgttctgaataaggtcaaggcaaaggctaagaaaattaaggacacgatttagaagcatggccatcaagtgcttgatcgtggtcatgagtataacaatgaagatcagcatacccttgatgatcatgacttagactaggatgatgaaatggctgtagacccacaagttcataaaacacctattcacgaatgtgaagatgttaaaactgcaacacctacatcttagcaagtcgaaaatttgg

SEQ ID NO: 18654 - DNA, 317 bp, Glycine max
taaatggaggacatattccaaatcagctgtggcagttttaaaaatagctatgaccactgttccagtcttgcagcttccttaatttgctcttccttttgatgacgaaacagatgtgttcaccactgctattggtgtcatcctttctcaactaggtcacccaacttctccggtaagaaactttgcctgcgcatgcaactagcttctacatacgcaaggggaatgccttccattacagatgctgtaagaaaatggcaccattatctaatttgcaacaaatttagaatattcacaaatcaccaaaatttgaacgcccttac

SEQ ID NO: 18655 - DNA, 534 bp, Glycine max
aagatacttagaatcaattgagtggcgaggatggcaaacacaaacagcgacaccaaagaagaaagcaaaaaaatggatgaaagagagacaatacctctcctcacctcatacaagatgggaaattttaatctatcccacaggattgtgttggcaccgttaacacgatcaaggtcttacaacttcgttcctcagccgcatgctgctctgtattattctcaaagaactactaagggtggcttcttgatcggggaagctactggtgtatctgatacggcaaaggatgggtaccctaatacacctggcatttggacaagagaacaggtggaagcttggaaaccaattgtgagcactgttcatgagaagggaggtattttcttttgtcaactttggcatgctgggaaagtctccaactatgatgaattccaaccacatggtgaagccccaatatcaagcacaaacaagcgacctcgtaaggaaatccccaagcatgtcaatgaattcgtacttgcgcgcaaaaatgccatggccgcgggt

SEQ ID NO: 18656 - DNA, 423 bp, Glycine max
gacggctaggaatccccctcccatccctaaactatatagagggaggtggatgattaactttacactgcatttggtaaggatgtgtgaaacgaaatgaaaagtaaggttgtttaactgagatgaaaaatagtgtagaaaatatgaaatacttgaattgaagtgattaagtaagtaagaatctttggtgaaggtgttgttatactgtttatacaatgtccttttctactcggatttggaattggctggaaagcaaaatccttgatcattcttttgatccctcttcttaatatctgctataactagctagtgaagcccgcatctgaaagtgacaggacttggtgtgatcttaaacacttttgggatgatcaaatgaggtttcagaataaattaaagttatatcttttcagcaagtcacaaattaac

SEQ ID NO: 18657 - DNA, 406 bp, Glycine max
gatatcaaggaaggtgccatactcaaccttttgaattgtcctgtggataattataccatcatgtatagcacccagaactgtggcattcatctgtgggatactaggtccaattccaatacctggactcttcaagctactcctaaggagggctatgcttcttctctggcatcaggtccttgtggtaattgggttggatcggggtcatcccggggggttattacactttgggacctgagggttcttatacctgtgaattcttggcagtattctcttgcttgccctatagaaaagatgtgcctctttctgcccccttcaaatgcttctgtctcttcagctgctaggccccttgtttatgtggctgctggttgcaatgaaatttctctttggaatgcagagaatgctagct

SEQ ID NO: 18658 - DNA, 334 bp, Glycine max
gtatgcaagaattgtgtgtacctatgagagttacggtagatatttataagtattaagtaacgtgttttatgaatctctcatcactttgtcacgtctgttcaaaagatcatttatagattatgttaagtgtgctccatgcatgatgttcatgtttgtgatagcggtagttgtatgatttcaggaattgaatgccgaataataattactttaagaaacaacatcttggtagaacaaactcatcatgtgatttgttgcagggtggggttgttcagatttataatacttctagaagattaatgatcaataatgtcatcttttttgtctttagtaaaat

SEQ ID NO: 18659 - DNA, 380 bp, Glycine max
gaagaaccttccttcgttagttcccatcatccttcgcttcaccgctttacttccccaactcatacaacaacaccccactttttttttttctttcgcaactagcttctcttcatttgaccatattaatcttactatatttaatatttctctctctttcttcaatttctgagtctctgttccagcagctgagtcgtaagaagctggagttggaagtttgctcgcgatcatgcaaaactccgtgctcgatccgcaagatcagagggttacttcctgcatggaggattccactgcaatgactattgaattcctgcgggcaaggttgctttctgaaaagtccatcttaagaagtgctaaacagaaagcttattaactggccaaaa

SEQ ID NO: 18660 - DNA, 174 bp, Glycine max
ggaattgttgtgttggagatgataactgggaggagtccaatgattggtgtccaagtcactgaattaggagctgatcaatctcataatgagaggttggcaacatgggtgagggaaaaaaaaaaaaaaaaaaaaaaaaaaaagcggccggtctagagggatcccaggcttacgtac

SEQ ID NO: 18661 - DNA, 387 bp, Glycine max
tatggggaccctggtggcaacgtattttcaagggatacactatcactacctggatggtggtattgaatctagggtctactggtcttttggtttcatggttaatgaaacatgctgataatattgtagaggtctattccacatcaatggcgatgctgctgacgatgatactttcactatttctcttcaacttcaaacctacactgcagcttttcttgggcattattatttgtatgatgtctctacacatgtattttgccccaccaaatatgctcttagatatgccattaacagttaagccagatgaagagaagctcattgaagtttctggtgatcgaagaacactttcatgatgttgtattgacatctgaatacaatgcttgggtagca

SEQ ID NO: 18662 - DNA, 403 bp, Glycine max
caaatgcatgtcacgaaatggagggctaggtatcaggcattgaataatgttggactgtgtatttaaactttgaagtttaatttcctgaactcctatcgaattatttgctaatgaaagtattgaaataagagcaaatataaagctagcaattaataaagtaaagtaaaataagatttttgaagttaaatcttttctttaaatactaaagtgaaaagtttcagtgattttcatgtgcatgtacttatggtattttattaaatgttaatttttttataagagaagaatcattttaaaaataatagtcaaataaaaatgcattgcgtgtggatatgtatcaattttcactcctatcattttgcgtctgctgatgaaacacacccattgagtcacccactaatatgtc

SEQ ID NO: 18663 - DNA, 418 bp, Glycine max
atattacataatttttagaatataggaaaatatctcatcatatcttagcttatcctcttggaatagttttcttatgtctccattatatcttagaattagttaccatgtttccttatcatgatttgcttccctaattagttaggattattatttgtataaacaatggtttgtactctaggtttttgaacttatcaatacattgtaatccatctcagttaatacttaatatcaattcagtattttattctcttttatctctcttcctccttctataccttaaaaccataatttcaacaataatgatatgttttctattgacacactgaaagaatacatgtaattttcatgttcaggccaaggaactcactctcctaatgattgatgtcaatccatactacaatcaactaaggattctttt

SEQ ID NO: 18664 - DNA, 401 bp, Glycine max
taatggtcaggtatatatatgtggattgagaagtgtacttactggctttgttgataatttcctattctaggtgcaaatggaggctaatgactcttctagtcagaaagaagagcagatgaaacctatgcgaaataaggtaatggggttgtgtgaataaagcttcaaataaggagttaaacttcacgtaaataatatcctgccaatgtatactaaggatggaattaatacttcatattagctatttatacttggcattagctcaagcatttcatcaaatgggttgtaggcaagtaggcaagttgaaaacaaaaacactacaggaccacatcacgagatcacatcatgttatcaacacaacatgaactatttatacttcgcttagctcaagcatttcatcaaat

SEQ ID NO: 18665 - DNA, 418 bp, Glycine max
acacggatgtcccattgagtcccatgatatatcgggacgctcgtaattgaaaacagaagcgctgaccaaattcaaacgacaggtaacttttgactcagatatccgattgtgtcccgtaatatatcgagacgctcgaaattcagaacaaagctattagaaaaatcaaacgacgataactttttacacggatgtccgattgagtcccataatatgtcgagacgtttgaaattgaaaactgaagctctgagaaaaatcaaacgacaataacttttaactcggatgtccgattgtgtcccgtaatatatcgagatgctagaaattcagaacagaagctattagataaaatcaaacgacgataacgttttacacggatgtccgattgagtcccataatatgtcgagacgttcgaatttgaaaa

SEQ ID NO: 18666 - DNA, 489 bp, Glycine max
gacatcacaaactgcttatcctgctcttctgccaacttcaacaacacagacactacctcctctcctctcctcgctcttccaatgccgtcttctcagatctagttactttctattctgcgagctttcactactgcttcattcggaaaacgacagcgtttttggtagggttgttgtattccattggacatgcggccgagagtaaattactccttccccgaggaggtgctggagcacgtgttctccttcatcgagtgcgacaaggaccgaggctcgatctccctcgtctgcaagtcctggtacgagatcgagcgctggtgtcgccggagagtcttcgtcggaaactgctacgccgtctctccggccaccgtcgtcaaccgcttccccaaggttagatccatcgccatcaaggggaagccgcacttcgccgacttcaatttggtccccagggttggggcgcttacgtgggcccctggatcaaggccatggccg

SEQ ID NO: 18667 - DNA, 477 bp, Glycine max
gacaacacaaactccttatccttctctctctctctctctctcttctctctctggcaacttcacacatcaacaactagttcacaataacacaatctcttcgctcttccgatggtgtcttctcagatctaactctctaagcgctgctgctttactgcgaggcttcactactgattcatttggaaaacgacggcgttttgggtagggttgtacttgtatttcattgaacatgcggccgagagtagcgtactcgttccctgaggaggtgctggagcacgtgttctccttcattgagtgcgacaaggaccgcggctcgatctccctcgtctgcaagtcctggtacgagatcgagcgctggtgtcgccggagagtcttcgtcggaaactgctacgcggtctctccggccaccgtcgtcaaccgcttccccaaggttagatccatcgccatcaaggggaagccgcacttcgccgacttcaattt

SEQ ID NO: 18668 - DNA, 388 bp, Glycine max
aggtgtggcgttgagttaggcgttaaggctaaattctgggagttttcatttttccacatcttttattaagtgttttctgtcatgaaaaaggaaaaaaaatgcaatccgttttagtaatgtccatattaattgttttggatgctttggtttgcattccttgtcccgtgactgcattgatgtttgtgattattgtctgttttggtgcttggttatgtgaaatgacaaatatattgtttgaagtttttctcaatctacttcactgtattgcaggttggacaattgagagaagtgtccaacaaggttcacaatgcagaactgaaattgtttttggaagtggagctggggatggtaacatttttattagggaaattgaatactaatttaatag

SEQ ID NO: 18669 - DNA, 415 bp, Glycine max
gtctgacaaattgacataaaaatcattgaaaagctggcctttagagtgcgtaagtgggttataacaaaaagttttaggcctcttcttcttacatcctctaaatatcatttttcaccccctttaactttaaaataaaccttaacttccaaaatatccctcactcgttaacatcatccttcctctctttgaacccttcttcttcttcctcctcttccgtcattcaatcattgtttcaatagaaaggatcaacaacagagcctgtaaatcaccacacatgtaattcaaaatgaaaattttacattttggattacttgatccaaaatttatcgcaacaaacaatctaaatattttaccggatgtgttacggattagaaaacttgtaaagtttgcaattctatggaggttttggattata

SEQ ID NO: 18670 - DNA, 693 bp, Glycine max
gaaaagagaaagagaagaagaaatccgtgatctccattttcttccttagcacctaacaaaacaaccaatctaacttgcaagacaccctagccctctctctctctctctttttaatcccactgaacttcttcacaactttgggatttgaattaacgagagccaacaaaactggagaaaggttttggaactttctgatccgggttttgcatctttccatcatcgccaccatttacttccattatatgttactttcactttattttattttatatgcatcttagggtagttagttttaatactagcttccatgccaatcatcaccaaaccaggtaaagccgagatcttcaacgacccattgccgagaagagtctcaaaacccagactctagccagacccagttatcagaatcgcttctttctcttaaacaagccacgcccatattgtatcatatgccccaacaccaaattagagaggactgtagtggctatgggagctgagaggaaatggcttttcactctattcagtgcagcattcctatctctcatgcttcttttgatgtcctctttctctgcctttagcaccccaaaggttttcccttcccttgttcagcatggttctcactaccctccagcttttgcatactttatctctggtggaaaccaggacaaggaccggatcttgcggttgttgctg

SEQ ID NO: 18671 - DNA, 420 bp, Glycine max
  unsure (1)..(420): unsure at all n locations
ccccttcgtacgcttacgcgtccgcccacgcgtncggccacgcgttcggccactcgtccggaagagagaaaagagaaagagaagaagaaatccgtgatctccattttcttccttagcacctaacaaagcaaccattctaaattgcaagaaaccctagccctctctctctatctctcttcaatcccactgaacttcttcacaactttgggatttgaattaacgagagaaccagcaaaactggggaaagattttggaactttctgatccgggttttgcatctttccatcatcatcaccatttacttttatttcatatgcatcttaaggtagctagtttacatactagcttccatgcccatcatcaccaaaccaggaaaagccaagatcttcaacgacccattaccgagaagagtctcaaaac

SEQ ID NO: 18672 - DNA, 341 bp, Glycine max
  unsure (1)..(341): unsure at all n locations
gatcttaacttttaattttataagagaagaaagagaggtaaatgagcatcggtatgccggtttccatcttgtttttgtcgggggttttggcagaattgggttcgactcccatagtcccgcggcattccccctgacctcgagataaaatgaaaaaacggacgataaacagtttgattgttaagggtaccattatttcattagtaagggactttttattggaacgggcttcgattccctttatacgcgatgtggcgaatcagactgatttaacgacgacgagatatgcgattcaaaactcgtcgtctacttttagganatgtttggaacagagaacttacaat

SEQ ID NO: 18673 - DNA, 594 bp, Glycine max
gtgaactggacagttccaataagatttcattcttgaacaaaaatccattttggggtttatttcatctattccatgaccggaacagtgggagatacacgttacaccacgattttgaatcagaagagatatttcaagaaatggcagatctattcactctatcaataaccgagccggatctggtgtatcataagggatttgctttttctattgattcctccggattgggtcaaaaacatttcttgaatgagttattcaactccagggatgaatcgaaaaatcactctttattggttctacctcctcttttttatgaagagaatgaatctttttatcgaaggatcataaaaaaatgggtccagacctcttgcgggaataatttggaagatccaaaacctaaaatagttgtatttactagcaacaacataatggaggcagtcaatcaatatagattgatccgaaatctgattcaaatccaatatagcacccatggttacataagaaatgtattgaatcgattcaattgcaacttcgaatatggaattcaaaggtatcaaataggaaatgatactctgaatcatcgaactataatgaaat

SEQ ID NO: 18674 - DNA, 710 bp, Glycine max
caatccttagtgacaccctgatattcgaatatttgaaacgtgtaatttgctaagatgaaattcaatcgtcacgatatttcatctatgcagtagtttgtggtatgttatgactttggtgatttgatcggtaattacactaaaatgggggaggtttgttggacattttagtgtaattgatctctttattatgttaaaataagagtgcacgcttgttttaatgtaataacgagatgttcggtttaggcaaaagttggaagttacatggaagttactaaaacttccattaacggcaatttttaaaaataaataacttccatcaaccgccaaaaaccacctgttctttgattataaataatcatcctagttcagaaagcataacgatgtgaaaaactcacaagaccaaaacaaaactcttgaattataatcttctgattttatccgattgaacaattttggttgaaccccgaaatttgattcaatctgaaagtgtttatacacgacttcagatttatccaggattatctcgattttcaaaattaaccaacaaaagattgaatcaaatctttcgagatgacgaacgatagttcgaagatgacaagcaagtttgcgaagttggacaagtttgaagggcatgatttcagaagatggcagaagaagatgcactttctcttgacaacattgaatgtggtgtatgtgctgagtacaccgat

SEQ ID NO: 18675 - DNA, 340 bp, Glycine max
tccatctttccaaattggcctaaccgtccagacaagttcagcatgctgttgagaacataagtgtctagtttcagaccagatttacacatttggttaagaatctcctcacatttattcacactgcccattttggaataggcagacagaagaaccatgtgggacttcattggtggtggtattcccactcttttcatatctttaaaaacagcttcagcatctgaatttcattcataaggttgtgaagggaaaaaaacatgtatcagaccagtaaagtagataaagaggcaaaaagcacactaaaaaatataaattgactgaaccaagaattatcttccttcgt

SEQ ID NO: 18676 - DNA, 857 bp, Glycine max
gaatcaaccaaacacaacacttcactctcaagcttcaagcatgactcctttttacttcctcctatttgccttcatccttttcctctccataaacttcttgatccaaacaagaaggttcaaaaaccttcctccgggaccattttctttccctataatcggaaacctccaccaactcaagcaacccctccaccgcacgttccatgccttatcacaaaaatatggccctattttctccctctggttcggctcccgttttgtcgtcgtcgtttcgtcgccgctcgcggtgcaagaatgcttcaccaagaacgacatcgtcttggccaaccgccctcacttcctcaccggcaagtatatagggtacaacaacaccaccgtcgccgtttccccctacggcgaccactggcgcaacctccgccgcatcatggcgctcgaggttctctccacccaccggataaactccttcttggaaaatcggagggacgagatcatgaggctcgtgcaaaagcttgctcgggactcgcgcaatggcttcaccaaagtagaacttaaatccaggttttcggagatgacatttaacactataatgaggatggtgtcagggaagaggtactatggtgaagactgtgatgtgagtgatgtacaggaagcaaggcaatttagagagatcattaaagagttggtgacgttaggaggggctaataaccctggggacttcttggctttgcttaggtggtttgattttgatggtttggagaagagacttaagaggattagtaagagaaccgatgcgtttttacaaggactcattgatcagcatcgtaatggaaagcatcgtgccaatactatgatagatcatc

SEQ ID NO: 18677 - DNA, 485 bp, Glycine max
cccattcgttcgcggacgcgtgggcacaacccaacccacccttcttcttcttcttcttcaaaacctcaacagattgtggaattgcgcgttgaacaacgactcaattattctcccgcaagctctgtcctcacttcaaagcttcgaggttaggttcttcgagagtttctttgtttttactccgtcgcttcccgagaaaccgtcgcttgcgtgagcgaggcttgtagaaccacgcgaggagtgtcgcggatgagagatctctggtgaggtctgtggaaatggcatcatcggaggtgacgatgaagggaaattgcttgaaccacaacgacggcggagccacggagcctcattcgccgtccacggccaaagacgcagaagctgcacttttcagggaactatggcacgcatgtgccggtcctctagtcacggtaccgcgggaaaaagagcgcgtgttttatttccctcaaggacatattgagcaggtggag

SEQ ID NO: 18678 - DNA, 345 bp, Glycine max
gctgcttttaatgcgtttgatgcgagttttggatttgatgatgtatttgtaccgtttctgtgcgcctaccacctgattgcgagttaacactgagctagactttttgataatagaattggcggcggcaagcttgatttggaaaaataattaaatcatgagatggatttcgtcgagaatattggctgtgtaagaggacttgctaaaagccgtagatgttgagatgtttttggctgtagggaataccatggttttaaattaatcccggttgcagttttgtcacgatccttgatattgggggaaattgcagttgatgtggccgcaactgcggtcgcggtgagtaaaaga

SEQ ID NO: 18679 - DNA, 391 bp, Glycine max
aggtgggtatgagaggaacaagaatttggattgtgggagtgacaagtttttgcatgtaaagaacgtgaagttaccgtagacaacctatgtgtttgtgaacaggagcatgaacccaagggagtgtcaggatttttgcctcagggattgttcttgcactgcttatgccaacattcagatcacaaacgaaggaagtggatgcgtgacgtggagtggtgaactcatagatatgaggctgtatagaagcggatgcgtgacgtggaatggtgatttgtagatatgaggttgtattgttacgtcttgcttgctcgggaatttgaagccatagtttgaaaatccaacaccttgaggacaaggtgtttttgatgggctcgggaaccaatgttacgtcttg

SEQ ID NO: 18680 - DNA, 556 bp, Glycine max
tggaatgggtgttatgggtaagaccacgcttgcccaacatgtatataacaacccaaggatacaggaggctaaatttgacatcaaagtctgggtctgtgtttcggatgattttgatgttttgatggtaaccaagacaattcttaacaaaatcactaactcaaaagatgacagtggagacgacctagaaatggttcatggaagattgaaagaaaagttgtcggggaaaaaatatcttctcgttctggatgatgtttggaacgaacatcgagatcaatggaaggctttacaaactcctcttaaatatggggctaagggaagtaaaattcttgtcacgactcgcagtaacaaggttgcttcaatcatgcattcaaacgaagtacgtggactaaagcaattacgagaagatcacagctggcaagttttcgctcagcatgcattccaagatgattatcctaagttgaatgagcagctgaaggagattggtataaagatagttgagaagtgccaagggttgcctctagccttagaaacagttggatgccttccacacaacata

SEQ ID NO: 18681 - DNA, 437 bp, Glycine max
gagttctattaattttaattctgcaatgattagatacttcatctttctaacttcctttttttttccccttacccgtgctctttagatatgcaaggtctaaaatgaggaagcgttaggagaaacgggagctagacagtttccggataatttggttgttcgatacagaggattcgcaacatgtaggaaagattgggaatttggccaattttgcaaaatgttgttgtttggttatgcctagaaggctagaaccatgaattgtgtaggaatttaaaaatattcagaaggttgcaaaatgtttgtccctatcggcagtaaaacttctcggcatatatttttatggtaaatggtaaccacatcagttaatattttaggttttaaagggtaaattactcttagacgcttgattatgttggtctctggctttaaacaattacact

SEQ ID NO: 18682 - DNA, 1068 bp, Glycine max
ggtcttccttctcccctattaccattgttacttgatgctcaaaaacaatggcgtcagggctgagagggctgcacttggtgctattctctttctgttcgcttttctctatgccttttggcgcatgggcattcactttccaatgccatctccagataaaggtttcttcaccatgcctcaactggtgagtcgaattggggttattggtgttactgtcatggctgtgctatctggttttggtgctgtaaacctcccatacagttacttgtcacttttcatcagagagattgaggaaacagaaatcaaggccttggaaagacagctaatgcaatcgattgagacctgtgtttcaaagagaaagaaaattattctttgccaaatggagatggataacaagcaaggatctgaagagaagttaaatgctagatctttaattaaacgaattgttggtacggttgttcgatccgtgcaagaggatcaaaaagagcaagatattaaaggcttggaagcagaagttctggccttagaagagctttcgaagcaattgttcttagagatctatgaacttcgtcaagcaaaggaagctgctgcttattctcgaacttggagaggacacatgcagaatctacttggctatgcttgttctgtatattgtgtgtataaaatgatcaagtcattgcaaagtgttgttttcaaacaggatggttctgttgatcctgtgacaaggacaataagtatatttcttcagttctttgatataggaataaatgccgccttattatcacagtatatttccttgctattcatcggaatgttggttgtgatatcagtgcgtggattcttaaccaacctaatgaaggtattcctgctgctttcaattgctaatttttttcctttggatgttgcttggattagttatattagtagtgttcttgataatattacaatctgctttcatcctcttttgttgggggtgggacagttgagctgttgaggaaagaactgacaatttcattgaaaggaagctaatcttatgtatagaagcaatatatggctctgcaccataaacac

SEQ ID NO: 18683 - DNA, 498 bp, Glycine max
gaagtcgaactagcaaaataaagagttagcaagtactaatggaaactcctaaatttgcattcttgtctttgcttcttctccttactagtgctactataagttcagctcaactaagtagtggcttctacaagaacacatgccccaatgtggagcagttggttcgctctgctgttgcacagaagttccaacagacctttgtgactgctcctgccactcttagactcttcttccatgattgctttgtgaggggttgtgatgcttcgattttgcttgcaaatggtaggccagagaaggatcatcctgatcaaatttctctagctggtgatggttttgacacagtgattaaagccaaggcagctgttgatagagaccctaagtgccgtaacaaagtctcttgtgctgacatactcgctctggctactagggatgtcgtaaatttggctggtggaccattttataatgttgaattgggaaggcgtgacgggagaatatctacta

SEQ ID NO: 18684 - DNA, 705 bp, Glycine max
ctaaggttacaactgatcatgctattcctcagaatcacaagagcttgcctttgcatttagccttctaatcacatttttctctatatcctcgaactcaaaataatgggctggtcctaaaacttgtaatagcctcacattaaccgaccatttttcccatcaaagttacttacaacttctcaaatttttctaattttcttgctccctttcttttctggtgtgtgcacttcgtcactttttgtgccattcaaaggtgcagcataagaagtaagaggaagttgcctagtgtttgagatgtctggtgttcttctttgggtgagttgtggacccaaggagaaccccatctccattgttggtcttgctggaagaggtggcagaagccagaggaggtttggactgtgcaatgggatcagttttgcaagcttttcaccagcagtggcagacccttcaagatcctcagaggagagggtatatgaggtggtgttgaagcaagcagcactggtcaaggagcaggacaagggcaccaagagagcactgaatttggacacaccaacagttgaaggtgatttaacccatggggatctgttgagtgatgcttatgataagtgtggtgaagtctgtgctgaatatgccaagacattttatctaggcacacaattgatgacccaagagcgcagaaaagccatctgggccatatatgtgtcgtgc

SEQ ID NO: 18685 - DNA, 568 bp, Glycine max
gatactattcctcagaatcacaagagattgcctgtgcatttagccttctaatcacatttttctctatatcctcgaactcaaaataatgggctggtcctaaaacttgtaatagcctcacaaaaatcgaccttttttcccatcaatgttacttacaaactactcattttttttcttctaattttctccctctctttccttttctggtgtgcacctctcatcactttttgagccaatattcaaaggtgcctagtagtgtttgagatgtctggtgttcttctttgggtgagttgtggacccaaggagaaccctatctccattgttggtcttggcgggagaggtggcagaagccagaggaggtttggactgtgcaatgggatcagttttgcaagcttttcaccagcagtggcagacccttcaagatcctcagaggagagggtatatgaagtggtgttgaaacaagcagcactggtcaaggagcaggacaagggtacaaagagagcactgaatttggacaaaccaacaattgaaggtgatttaaccaatggggatcttgtgagtgatgcttatg

SEQ ID NO: 18686 - DNA, 706 bp, Glycine max
ggagtatcaaatatatagcaagacatagcaagacaagatatgagggagaaaagaaaagggtggtgaatgtgaaaatagagggagcatgtggaatggttgtggtcactattatatatgttgtctcttacgctttgcatgtgactttctttctttctttatatcctttatatattaagtatatgctgcaatatatttaattaaagagagaagtaacatcaaggtgcagagagaggaattgaagcatgggaagagggaaggtggttctggagagaatacagaacaagatcaatcgccaagtaaccttctcaaagcgcagaaatggtttgctcaagaaagctttcgagctatctgttctatgcgatgctgaaatcgctctcgtcatcttctccagccgtggcaagctttttcagtatagtagcactgacattaacagaatcattgagaagtatcgtcaatgctgcttcaacatgtctcagactggcgatgtagctgaacatcaatcggagcagtgcttataccaggagcttttggtattaagagtcaagcatgagtcactccagcggactcaaaggaatcttctgggagaagaactagagccacttagcatgaaagaattgcatagtttagagaaacaactggatagaacgcttgcacaagctcggaagcacctgacacagaagctggtatcacgaattgacgaattaca

SEQ ID NO: 18687 - DNA, 428 bp, Glycine max
gggggggaaggtaaggcattggggctatgaacaacatcccaactatgttggcaccttgctcacatcccatcctatgccccaaccccacctaaatttatatatccaaaagagatgaaacaaaaaacaacatggggggactataccaatacccatgctactgtaaggcaacccaatactgaggaagccctttaaaattacaggcaaaatgagaggagcaaaatacgggagcatcatcccacaaaaagagttcctgttagatacagcaaagttagctaaagaatctgcacattgatataggctgagattatgttagattattcgttgatttcagctaatacttccttttattatttggataatattgggaattaggctagaatatttctatgattttgtatgattccttttatattttttgggatctttct

SEQ ID NO: 18688 - DNA, 404 bp, Glycine max
  unsure (1)..(404): unsure at all n locations
ngattgggagaaaagtaataatattgggggtttgcttctgctgcattcttctgcgcttcccaaaaacaatgcagtcctgccccttccctgatactaaccccctctctctctctctctctcttagaacattttcttttttgtttttaattttgatttcattgcttagatctccttcaatttcaattatatttgttaattgtttgttctgttactcttttgtttgatgataagtttataaccctaccctaattccgcgctttgtaacctaatcacaggtactcttttgtttgttcctggtcttctgcaattctttcatacgtttctgtcactgttcttcatatgagaagagtaatgttttggaagggaaagtgaaaattttgttactntattatgaatgtgtggaa

SEQ ID NO: 18689 - DNA, 689 bp, Glycine max
gtttcccctgatgtagtagaccaggatcatgtaaataagatactcactgctgttgttcaagggatgaattcaacagaagaaaacaatgatgtcaggcttgctgccataaaagcattgtacaatgcattgggttttgctcaggcgaatttttctaatgacatggagcgggattatatcatgagaattgtgtgtgagacaacacaatctcctgaattgaagattcgacgagcagcttttgagtgcttggtagctatttcttcgacatactatgaaaagttagctccttatatccaagatatcttcaacatcactgccaaggctgtgagggaagatgaggagccggttgcacttcaggcaattgagttttggagttcaatatgtgacgaagaaattgatatactagaagaatatggtggtgattttagtggggattcagaggttccctgcttttattttattaaacaggcactttcatttcttgtccccatgttattggagacactgctgaagcaagaagaagatcaagaccaggatgaaggagcatggaacattgctatggctggaggtacctgcttgggattagttgcacggacagttggtgatgacattgtacctttggttatgccgtttattgaagagaatataaccaaaccagattggaggcaaagggaagctgcaacttatgcctt

SEQ ID NO: 18690 - DNA, 571 bp, Glycine max
ggtaatgagattgagcaagggtatttttgaaattgagacactaaagaggattaaaattgtacgttgggcgaaaaatgagaatcgagggatgatctgtaattttgttgttgggtgagtgtgttgatcggattggaggcaggcaaagtgcaaatcaagcgattatcaatctttggggtacgaaatttgatgtttgttgagcttttatgaatcacaattaaatgcgtggtgtgatctgaaaaggcaaaggagaactaaaaaagtgtggaatcaattgaaatcaggcggtgctgttgaattctgcaatggcatcagcagcgcctaatgtcgatctcttcgatgcctattttcgccgtgcagatttggatcgagacggccgtatcagcggtgccgaagccgtctccttcttccagggctccggtttgcccaaacatgttcttgcgcagatttgggcatttgctaaccaaagccagagtggtttccttgggcgggcagagttttacaatgcccttaagcttgttaccgtggcacagagtaagcgggaactaactcccgaaatggtaaaagcagcatt

SEQ ID NO: 18691 - DNA, 527 bp, Glycine max
caaaagttggtcacttctaatcttctcgagagcatagaaacagattcagagtactttctgatacctgacatccctgacaaaattgagatcaccaaagaacagacgtcaagaccaatgcatgaaaactggagcgagtttgtcgacaaaatggcggcggcggaagcggttacttatggcgtggtcgtgaattcttttgaggagttggagccagcatatgcaggggatttcaagaagatcagaaacgataaagtgtggtgtgttggccctgtttcactcagaaacaggaatcaattggacaaggctcagagagggaacaaggcctcaagtgatgcgcacagttgcatgaagtggcttgatttacaaaagccaaattcagtagtttacgtgtgccttggaagtatatgcaatttaattccgttgcagttgatagagcttggtttggccttagaagcatctgaaaaaccattcatttgggttatcagggagagaaatcaaacagaagagttgaacaagcggattaacgaatc

SEQ ID NO: 18692 - DNA, 715 bp, Glycine max
aatggatcgacattcatttcaaaatgggtgcagggcacataacatgtacaaatcatgctaataataaaaaagaatatattatttcacatataaatcatgctaataaacataacatcattttgcagtgaaaaaaataacatcattttaatctcatattcgattaattaagaaatacattaaaaaatcactatattagcaattttcaaacaatcggttgtaaattaaagggtcacacattagtgtcttgctttatagttcataatgaacatgcattaagaaaactgttttctctgccatggctagtgtgaaagtctatgaattaaggttatgttgttcttctaaaaaaaacgttatgttgtttaattttcaaaaagtgattttatgatacattcttttaggtaaattatgatacattttatacagcttataactcttatattacaattttaatttaaaatacaaaaaagtttattgacactctcatttaattgtaaacaattacacatgataaaattttcaatttttataataattattttaaaaatgatatttactatgattatttattttttagacaatgtatattttttttattgacagtatatattttattaataaataattggttggcaatatatgaaaattttaaactttaaaataattttttaatatacataatcatcatatatctaaaaatatacgaccttttaagtcc

SEQ ID NO: 18693 - DNA, 333 bp, Glycine max
gtcccgtgaacaaagaaattaattggggtaacaaagtctcttcaatcggatatatttaagtacgtataaagtgaaaaaataaagataaatatatataatactacattcttcattcctgtcttttttttgaaagataacactacccttcagggctaggaaaatatacataattttgaagtcacaaaaagtaaagcatgctgactagaagtcaaatatcacacattctatgtatctgctactggtagctcaaatggcgtgggagttgcaagtttgaggtctaaatctgggttcgctctctgaacagtgcaattagttgaagttgaagtggtagcc

SEQ ID NO: 18694 - DNA, 442 bp, Glycine max
gaaatttctcaccatggccagggtaacatgctcgccactcatgattccaagtccaaaagtgagaatgatccgtcatctccaccccataatgatgtcgaggaagatgatagtgatgatgaagaagctaaagcagatgaataccggaagtttggtgcggcagatacatttgaaatcccagatgaggtagaccttgctcatcttagttagatctttcattgtgaaagccattctttagagttatgcagttgccaacattgtctgcttagctgttagtaggatttttataaatatttgttagttgcctttatcaattgtatccccgatttgatctattctagcagcgttatgtctgtgaacatgtgaatagtaattaagaattgagatgcaataattcctttgatataaacgtttgtgctgttccaatacataagaattgagatcc

SEQ ID NO: 18695 - DNA, 482 bp, Glycine max
cccgcgcgcccgaaactttgcttgattaaatttttatggtggcacatggcagggtagttggcggcttgagaatggataaaagcatatctgacaaggatcagggagctcttgtagaaggttttgatttttgtttgccagaggttttgattcatgggtggttcttctgagtttgagacagagttgtactttggacagatatataaaatactgatcttcactccttccttccaaggtcagttaagtcattcctgttaaatttaatgtggtgtatcattgttatgcattacatataaggattcatcacatcaatcaataattgattcttttattggattattgagctaacccagttggcatttctggttgaatattggtttactcattttgtgcaaataggaaatgcaagtgggtttatttaaattctacattatccttttctttaaggagaagattggattttttttacttctgatttagtgttt

SEQ ID NO: 18696 - DNA, 428 bp, Glycine max
  unsure (1)..(428): unsure at all n locations
ctttggttcagggggaaagatcccagttttcagtgacccttctaatctttttatcttctcttctctgtccctcactccttcctttttcctctctcacacatataaatatatagcttctggatcttcttccacctcttaacggatctcagattccaaaatctatctcctttaggctctccaaatttttacttcagttcttaatctcctgaaattctgtttttttttttgtgtgtatgtgtgtgtgttcgaacttcaaaaaaaaaaacatgagtgaaagcatgcaactttgtagtcaaagagtgaacggcacatagcagcaagttttcagctttggaaagttcacttagctaattggtttttccccctttagctgctttatatttntccttttagtctttgacaattggcttttctctgcaagctctttt

SEQ ID NO: 18697 - DNA, 366 bp, Glycine max
  unsure (1)..(366): unsure at all n locations
ggtttgtccatgtcaagattgttaatgttacttgataaattagtaactaacaccttggtgtcatgcatgggaaacattaatggtaaatcgattaagttttcaacttagatgaggccatctctattatttagcagctactatagcagagtcaattcccaacttaatcatctaagtgaaaatgctagtaggacatcaacaaccacaatcatcaacgagttttattgtaagcttgtaacactcaattaccaattagggatatcatatagtccaaagttaataactacaggagacacacaggtaacagggttgatataaactatatgaagttntaccttntataatcaataatttaaattatgaaatgga

SEQ ID NO: 18698 - DNA, 641 bp, Glycine max
gttttgcactcacaacaaaccaaaaaacagagctagctagcaagactaaaatggcagaaactgcagtgtccttggcaggtcagcaggcgcttccaaaaatattggaagctgtcaaaatgttgagagatctcccaaaagaagttagagacattacagatgaacttgaaagctttcaagatttcatcaatgatgctgataaagtggctgaagctgaagaagatgatggaaggcgtcatagaataaaagaaagggtgatgcggctgagagaagcagcttttcgcatggaagatgtcatcgatgaatataacatctcctgtgaggataagcaacctgatgatcctcgatgtgcagctttactatgtgaggctgttgccttcatcaaaactcaaatccttctccttcaaagtgcgtataagattcaggatgttaaatcccttgttcgtgctgaaagagatggtgtccaaacccattttcctttagagcaaacacagaccagttctagaggaaatcaagatatcacatcgcagaaacttagaagggatcctctctttattgaggaagatgaggtgtggggcttgatggccctagaggtatattggaaaattggttgactaagggaagaaaaatacgcactgtcatct

SEQ ID NO: 18699 - DNA, 761 bp, Glycine max
cactcttgtactgttgtttgtcatgaaattttggatgctgaatctgcaaagagttttaaagaaaaaattgatgatgaatatcgagtgaacatgattttggataaccttccagttgctgttcgtagacaaaggagggatggaggtcaatcaacaacatatgaacatggttttcgtgttgggttcaaaggaaactatcaagggagcaaggaggagaagtattttattaataaccacttgagtttcagagtcatgtatcacaaggatcctgaaactggttctgctcgtattgttggatttgaggtcaccccaaacagtataaatcatgaatacaaggagtggaatgacaagaatccacaggtaacaacatgcaataaagataccaagaatttgatgcaaggtagtactgtcccacaagaagttgatacaagcaaggatattgtattcacatatgatgtttccttcacggaaagtgatatcaaatgggcatcacggtgggacacatatcttttaatgaatgatgatcagatccactggttctccatcattaactctctgatgattgttcttttcctgtctggaatggtggcaatgatcatgatgagaactcttttcagagacattgccaattataatcagctagaaacccaagatgaggcccaagaagaaacagggtggaaacttgttcatgggaaatgtttttaggccaacaatcaattcaaatttgctttgtgtttaatgtggtactggtgttcacatctttg

SEQ ID NO: 18700 - DNA, 613 bp, Glycine max
gttctttgtgactttcaagccacctgggaggtattaagctatgcgtcaagctaatgacgttaaacaagcgcttcctgggaggcaacccagtttataattgttgttaactttgtttttcatgcatttaatcatttggaacttgttgtatgatttgtacatacgagtatatcagcctatcttttgctaagcgcaagcctcacgctaagtgtatctttgttcatgtgctatgccgtgagtctcaagtgcttagcgcccaacccttgcatctgagctaatccaacttcaattcgaactgaattcggctaagcgacagtcaaaccgctaagcgataccttatccttggctaagcgtgactcagtgtcgccaagcgcaattccttacggccataactgacgtcaatgaagctaagtgtcagtcatggcagctaagcgagattcattgcggtaatatgaacgctaagcgagtccttctcagctaagcgcatgctcctctgtacttaagatgcatcattttagctaagctggctagagcctggcttagcgagagttgcagcttttctaatatgaggacctcgctaagcaaacttaccctctcgctaagccaagtctctgtt

SEQ ID NO: 18701 - DNA, 446 bp, Glycine max
agaagttaaaagctactctacttcagtttaacttcaaatccaggtgtgacccttcgttattcatctacactgattccaataacactggtttatatgctactgtatgttgatgacatcattgtcactggaaacaacttctccatcaaatcactagttactaaactcaattctgagttttctcttaaggacctaggaagtcttgactatttcttgggaattgaagtcagatctcagcccaatggtgctcttattctaactcagtccaagtacattagggatttgttgagtaaaacaaagatggacgaagctaatctcatctcttctccaatggttagtggttgcaaattgactaagtcagggtatgaatctttccctgatcccacacactacaggtctgttgtgggagccttgcagtattcaactattactagacctgagataagttt

SEQ ID NO: 18702 - DNA, 433 bp, Glycine max
tacataacaatttcccttagagtgtggaagattcagggtattgttaggttaacatttgaacatgtccgcttgtccaaaattcattagaacatcaataatttatacttattgttattcatcaaaatccaagatagatgagaagattggttgtccagacctaacatatgatacaaaaccctatagcaagtgacaaatcgattccccccaaactaatttttcacttgctttatattttctttacgtaattaagaaatgatgaatcaatttcttaactattttttatacacttttagaaatagattccctatggacctgatttctaaacatccttttttttagaagccaattatgaaattagtttccaagaaccgatttcataattggtttcttatttttttcaatgttttttttggtatttctttaaattcttttt

SEQ ID NO: 18703 - DNA, 407 bp, Glycine max
cattagataacttgtaattagatctttaatttgggtccacttgttgtacttagtttctctgaagttttttcaaagaattttgtgggaattaatccttctaaaatatagtttgaatcagcccctgtgtcaaatagggccgttgtatctaaaacaaaatcattaatattaattttaatgtttatgtaaaaattttggattttaatcttgttgattaatcccataaatatatcattttccaaatttttagtttggttttctttactggttttgacactttcagaatcactatcttcctcaagttgagaaaggatgatttggtgaatttcttgttgttgacgaagttctttaacttctctttctagattattaatttctgtttggagatcttggattgttgttggttttgc

SEQ ID NO: 18704 - DNA, 462 bp, Glycine max
tggaccaacccttccgtccggttgcaagacgacagaaggggacatatctccatggagagaattaaaaggttagtgaggggatggggtccccaatcctctagatttggctgcctttaagacttgtggggactgctttaggggtaagcaggcccacatgtctaagaggggcgctcacgggagtccacgcatattagaaataattcatactgatatttgttgtccagatatggatgcacgtggtcagaaatattttatcacctttatagatgattattcacgatatatgaatatttatttgcttcataacaaatacgaagcattggatgccttcaaagttgttaaggctgaagttgagaaccaatgtggaaagcaaataaaaatagtgagattagatagaggtggagaatactatggcaggtatactgagaatggacaagcacctggtccctctgtgaagtttct

SEQ ID NO: 18705 - DNA, 554 bp, Glycine max
gcatacttctcttctctttctacctttgccatgcgcatcacaatgcaggaataatctcttccttctcagattcttcgctttttttccccagtagtcataggtttaaactatccgtgaaccgctgcaccctctgacaacatggctcaagccaaatatactagaatagacaataacaagcgaccgtcaagttactgttcaacagtgactattgtcgtgtttgtagctctttgcttgtttgggatttggatgatgacatcgtcatctgttacacccgtgcaaaatgtagatgtgtctcaggagaataatagtgaggtgaaggaacaggcaactgacccctctaataacaattctcagcagtttgaagataatcggagtgatctgtccgaggatgcaaccaaaggggatggcagtgtcacccctgataaaaactctgacgtgaaagaaaaacaggaagagaaatcggacgaaaagtctcaagaaaaaccttctgaagatacaaaaacagaaaatcaagatacaagtgtgagcgagaagagatctgattctgatgagag

SEQ ID NO: 18706 - DNA, 525 bp, Glycine max
ctcgagcgctttggcatgcccttcacaatgcagagataatctctccctcttccctctacatattcttcgcttttttccgaatagccataggtcaaaataatctgtgaacgacttcacctgacaaaatggctcaagccatatatactagaatagataataataataagcgaccgtggagttactgttcaacagtgactattgtcgtgtttgtagctctttgcttgtttgggatttggatgatgacatcgtcatctgttacgcccgtgcaaaatgtagatgtgtctcaagagaataacaatgaggtgaaggaacagagtgaggcgaatgaacagccaactgacccctctaataacaattctcagcagtttgaagataatcggggtgatctgtctgaggatgcaaccaaaggggatggtagtgtcacccctgctacaaactatgacgtgacagaaaaacaggacgagaaatcagacgaaaagtctcaagaaaaaccttcttgcgattcacccaaaaaaaattttattt

SEQ ID NO: 18707 - DNA, 394 bp, Glycine max
gttgaaattgagagtgagagtgaaagtgaaaattcagagtctgaaagcccttcttctgattctggtagcggaagtagtagtagcagcagcgacagtagtagtgatagcgaggacaccgacgatgatgataaagatgatgatgtggaagttgaagaaggcgagataagtggttccgatgaagagaaaatggttagttggagcatggctgatgaggatgatgatgaagatggtgatgtgggaggaggacccatcaggtcaaagaacgagcttcaggtgttcttttatttatttattttgtttttcaattttagatttatatattaaatttttggtaacttgattgtgtagagtttcattgggaattagcaagtttttttatatatataaaaaagta

SEQ ID NO: 18708 - DNA, 394 bp, Glycine max
agggcaggcgaaatcgggggtcagggtccggcagagagaacgcgtccccatcgcacggctagttttggcattaagatctctttcagcccttcttcaaccaaacccaacctgtcttttattttacgaccccaaatctcaaatcaaatcattcactatttcttctttcccttttttccaaaccctaactttctttcccctttcaaacccaacaacaatcctcccccacgcgcatgtgcaatcctcgcaatttctcgaatcttccgtaattgatttcgttgctatcgtgattttttgtctcatcaataggttcattcaatggccaagggcgccgattccgacgagttcgtggtgctttctagggttcgtacgggtctcaagagagagttcgcattcg

SEQ ID NO: 18709 - DNA, 381 bp, Glycine max
ggaccttgtcacagcctaaaaaccccctcctctttttcagattcggattagttaaaatagcctacgcattaacagggaagtgctaaccatgctaagaccgtttacgctgcaaatttaactgattactagtcataaatcctatgcatcctctcttcatgccaaagcagatttgtccacttcttcgagaataagaacaggagattcttgctaaactggggattaacagttagagctaagactgtagccctgtattgattgcagtctccgaaggtaggtgaatgaggacgcataccacagcacccagaataggtaagttaggaaagttaacatcaaaccaccaggcatagcgtgatgccaatgaagacaagcaaaataatgcag

SEQ ID NO: 18710 - DNA, 866 bp, Glycine max
atctcttcacaaatcatgacaactagcatgaccttacgtgaagatcattgcctgggagtgaaggtagaggagttcgaggctaatgtatgttgaccatcaccagagacaacaacctgcatcacagcttggaatgatccaacacaccgcttggaggccccaaagaggcttgcctgaacgtgctgtctctgtccttcgtgcttggctttttgaacatttcttgcacccctatcctaaggactccgataaggttatgcttgcaaaacaaactgggcttactcggagccaggtgtctaactggtttataaatgcccgagttcggctatggaagccaatggtagaagaaatgtacttggaagaggtaaaacaagagccaaacaatagctcccaggataacaacaacacaaaaggatcaaatgaatcaagcaaggagttatggtcagaagctaatgctactgcacaggaatctggtgcaatgagacttgatcacatcaacattctccaatcaaaggcagaaagcttcaacaacaaccacaccacccaaaccacttccccaacagagatctctaataattcccataattcactccaatcagctggtttccatcttgctgacatgcaaagcccaaacaagccaattagaagcacttctgaaatgcagaactctccaggtagcattctttcagtggacatggaaatgaagcctcgtcatcatggagagacaaataataatactattattactagagaaggcaacaacaacacaacaaagtttggcattgaaagccatggtggtggtggtggtggttttggagcatttcccaatatggaagacagtggaaggttccatcatcatcatcatcatgtca

SEQ ID NO: 18711 - DNA, 539 bp, Glycine max
aaaaaatgaaaggtatgaatggctatggaaggtttaagacgacattgttaattaagttcataatcaggtgtctaactggtttataaatgcccgagttcggctatggaagccaatggtagaagaaatgtacttggaagaggtaaaacaagagccaaacaatagctcccaggataacagcaacacaaaaggatcaaatgaatcaagcaaggagttatggtcagaagctaatgctgctgcacaagaatcaggtgcaatgagatttgatcagattaacattctccaatcaaaggcagaaagcttcaagaacaaccaagccacttccccaacagagatctccaattccaactcactccaatctggtttccatcttgctgacatgcaaagtccaaacaagccaaaaagcacttctgagatgcatcagaattctccaggtagcattctttcagtggacatggaaatgaagcctcatcatcatggagaaacaaattatatcactagagaaggccagaacaacaacacaacaacaaagtttggcattg

SEQ ID NO: 18712 - DNA, 586 bp, Glycine max
  unsure (1)..(586): unsure at all n locations
ccaaacttgagtggagatgtcaggcagagggcggggacggggaggatggggatggggacgaggaggtggatttaatacatttgcctctcaagttccatttgatctttttcctgaggctgttactttgcctgatgttaaccttgatgatattcatgatgataccaaaaagttgcttcgttgggatagtcaccttcaaaattattgggaagcctctccttattttctcgaggacaaaacctccaagaagaggcaaagtatgcacatagctaaattctctgacaggaagaagaacgatttcactcgtgactctctctcacaagttttaatgttcaatgatttccctcacgagttagttcaaggtgcatctaagcgtgcgtcgagaagaaaaaagtttcgatggaacccagagtcaggtttaatcatttcatatgacctttctccttttatgtggtattagctttggttaaatttctattgtgagtacgttttgagtttagcacaaaataagcttaatcttcctaaataactntccctcttttgaaagaaatttatgaaattctcattacttaaaaattgcataatatgc

SEQ ID NO: 18713 - DNA, 615 bp, Glycine max
ggcttcaattggccggttcggcggttcggttccgatccgattggctcgtcttcagtgtgaaattcctcgctcatcgcgttccgaatcttcctctcttgttatccagcaaccggtttggcggcgcggcttttcacacgcgtctcacaattcgtccacgtttttgttttttttgttttttggataacgagaattctagatctcttgaacgcaccgtttttggcggttatagaggatcgggacgcgaggcggatgacggcgaggaggttatcggatgtggtgctggactgcgtgatgccatacatacacgactccaaggaccgcgacgccgtgtcgcaggtgtgcaggcggtggtacgagctcgactcgctcactcgtaaacacgtcactattgcgctgtgttacaccaccacgccggaccggctaaggcggcggttcccgcacctggagtcgctgaagctgaagggaaagccgcgggcggcgatgttcaacctgatacctgaggattggggaggtttcgtcacgccttgggtcagagtgatctctcaatactttgattgcttgaagtcgcttcactttcggcgcatgattgtgagggattccgatcttcaagttcta

SEQ ID NO: 18714 - DNA, 397 bp, Glycine max
gcatctctagttttaattatgcaggggactgtctgctgtgttgtattatctagcttggaataaagtaagtcatcttttgctttaggggaaatataatacgatgagaaaccttggtacaaaatagtcgggaattagaatactgaaaacaacaaagaaaatgctagcttctcatggtgatcgacagaagtcgtggcgaagtaatcacttttataaatagaaaatctcaagattctatctatcagaatgaagattcttgtaagtgtttattttacaatgcaataggtgactgggtcagagtattaggctcatatgagtaactacataaactaagttggctgttatagagactggttataatcaaatttgtatttcttatttagatttttgaatgttccca

SEQ ID NO: 18715 - DNA, 433 bp, Glycine max
tgcacgtttaaagaacattattaaattgattgttgcttcttcttatgcattctgagcctatcatttaaaagggggttaaaagtttgttagtgaaaaattttgtaagacttaattcaccctccccctcttaagttgttgaggtcacttgtccaacagagatctcgatgaactttaaagaattgcactaaggtctgagagaaggatgaatcggcaccactattgtgagctctgccatcactgccgctacgccacctcatcaacgagtagatctgactcccaaacattcaaatctaacttgcaatgaaggagaatgaaatgattatcccacttgaagtttctcattgaggatggcattgtgaagggcaaggaagtcctggaaggagaagtggaagttatgttgtaaagggagggtgaggagaacctggtgggggta

SEQ ID NO: 18716 - DNA, 442 bp, Glycine max
agagatattgagcttttacagcctcagacattcagtaatgatgctatcattgactgtcatatcaagtatttgaaaaagaaactcccaactgatgaacagaacaggtttcactttttcaatagcttcttctttcgtaagcttgctgatttagacaaagatccatcaagtgcttgtgatggtagagcagcatttcaacgtgtacgcaaatggacaagaaaagtgaacctttttgaaaaggattatatcttcattcctgtaaactacagtcttcactggagtttaattgtcatttgtcatccgggtgaagtgtcatgcttcaaagatgaagaaattaaggaatcttccagagtaccttgtatcttgcacatggattccctaaaaggaagtcataaaggtctcaagaatgttttccaaagttacctatgtgaagaatggaaagaga

SEQ ID NO: 18717 - DNA, 638 bp, Glycine max
caacccactgatcaacagttacaatagcctattgatactagctctctaacactgattatctgtcaactaaccaatggttagttgagcttacatctggcacaaaacagtaagatataactacagctgtacaaagaaaaaactcttaaccgttagagtaagtctactctaataataagcatgcaaactaattctagttgagtagcattttccttggtgtgatagctgaatcttttagattgattgatttgttagcaagtaatgtttgtggttgctcactgctcaatattatcacaatgtgtgacaaaattgcaaatggtgccactctgacatgtggactggtactgggagagcacttgtcaaatgcttaatatgcaaaacatggggaggggaacatatttcaagtatcttgaagaattaaatgagtatttcatatagtgaatgtgccatgtgcttagatttccttgtccattgcatttgccttgagcgagaaaaaatatattgaagcagatattttgaattaaacaatgtgaacccaaacctgccatttgcttttcaggagtgttgtagggcatttgttttccttgaaacacaagatgggttatctgtttatgaattcttaacaaaataaagctgaaaaa

SEQ ID NO: 18718 - DNA, 427 bp, Glycine max
cttattatatttattctctttttatccttaaacattacataaatatatccatgaatgtaattttatattttttaattactgtaacaactaattttatcaaacataaccttttatattcacaagtgctatgcgaattaaggatattaaatacattaaaagttgcccgagtaattaagttgtattttctatattgccctttggctgatgtttaagtggattgattctcctaaatacataaggtgaaaatgtgatattagcaacatttgagtaattaagtcaaatttaagatatttagttaagataaaataacctaatataagttgatcaacatgttttatggtatttaaaaattaccttcagttgatcatgcattcacggtacaaattacaatatacccacaaatcaaaatcatttatagaattaaata

SEQ ID NO: 18719 - DNA, 580 bp, Glycine max
ggtgttgtgttggatttgagttttcagttttcactgcagtggaaaacaaaatgactgaatctccaatttccacacgccattggcaacgagtcaattaaaaagtcaagctttcaatgggtttcaatttgcatcccaatccaaccaatgttgcaatttccattcttcctaatccgacctacccactgttgcttccccattcaataattcaattcctgcactgcaccaatggagcttttgaagcctttgcaccctcaccatgcacccattttgcgaattccctttcacgctgtcccctcttcatcttcttctcaatctcagtctcaggttcccctccctatgatttctaaggttcatgtcgctgttgggaaatcgctcgacaaagttgttcctctgcttcgatggactttaaaccactttcggaacgcggaaatcgtcattgttcatgcttatcaaccttctctcaccatccccactctattggggaaattgccagcatcacaggctagtcctgcagtggtgtctgcttttcgaaaagtcgaaagagaacaaatcatgaagctcttagacaagtatttgagca

SEQ ID NO: 18720 - DNA, 817 bp, Glycine max
cggagaacaattcaaggctctgtaattgcgtcttcttgcgtcaatatcttccttgggtttagtaagacgtgcggaaatttgacaaggttgtttagtcccataatcattgtacctttggtatgtgtggcgggtcttggcctgtttgccaggggatttccattggtagcaaactgcgtgcagattggattacctatgctcattctactggttataacacaacagtatttgaagcgccttcatcatgctgctcttcaagtacttgagaggtttgctttacttctctgcattgctgtcatctgggcatttgctgctatccttactgtggctggtgcatacaatactgctaaaccacagacccaagtgagctgtcgcacagatcgctcgtaccttatgtcttctgctccttggattaaagttccgtatccgttccagtggggtacccccatattcagagctagtcacgtctttgggatgatgggggcagcacttgtctcttctgctgagtcaactggtgctttctttgctgcagccaggctttctggtgcaacaccaccgcctgcacatgtgctcagccgaagcatcgggatgcagggcattggtatgctgcttgaaggcatatttggttccgttgttggtaccactgtttctgttgaaaatgttggcctacttggtctgacgcacatagggagccgaagagtagtgcaaatatcatgtggttttatgatcttcttctctatttttgggaaatttggagccttttttgcatcgattcccctaccgatatttgctgccatatactgtgttttatttggtatcg

SEQ ID NO: 18721 - DNA, 349 bp, Glycine max
atcttggttttatatagttagaactttgctaacttccaatagcaaggaatattagcatagattgagattaagaattctgagtaataacctaactaatctttttgataattgcagtgaaaatgttggcctacttggtctgacgcacatagggagccgaagagtagtgcaaatatcatgtggttttatgatcttcttctctatttttggtactctattccacctgaaacacgtgggtagactttccttccagtttttacattcctggtgtaattatttctgtttctttcagggaaatttggagccttttttgcatcgattcccctaccgatatttgctgccatatactgtg

SEQ ID NO: 18722 - DNA, 325 bp, Glycine max
ggggtccgatgaagaaaactatgccttgactagaaaagttcagcgtgacgtatggatacatcagcatcctttgaactgcagcagcccggatgtcaagttccttgttactgactgggagagattacctggatttggaattggggctcagattgctggcatgtgtggacttcttggtattgcaatcaacgaaggaagagtccttgtcactaactattacaacagagctgaccatgggcgttgcaaagggtcttccccgtctacttggagttgctacttctttcctgaaacctccctaaaatgtcggctacgtgcatttgaactcatg

SEQ ID NO: 18723 - DNA, 426 bp, Glycine max
aatcaatggtaaacaatctcccagcaaacctgtgaaacgtgcatcaaaaaataagttgcatcaagaggataccaaagagacttcaaatatatcaaatcctgaagagaccacaacctcggtagcggataaagggggctcaggtggatcagatgaggaatttaatggaggattcaatgaaatcacaacaaaggagaagaaatctaacaaaaacacaaaatcagtttccagaggaaagaggcttaagaaagagaaaaacttttattatataaaagaaacaaatgaagagaagcacgattattttgaaaggctttcttataatagagaaagtgtcccacaatgtagttcttaaaagaaagaagttgatgaatcaagtggagcttttatgcaaaatatttattggagaagaaataatttgatttcttgaag

SEQ ID NO: 18724 - DNA, 391 bp, Glycine max
atcctgcaattgcaattcttggtatctgctgcggcgggcagttatccagagtgaggcccactgtttcggagctctttggtttgaaagacttcggtctattgagcaacttcatggctttggggaacccacttggtgcatttcttttctctgctcttctagcaggacatatatacgacaatgaggcagcaaaacaacacggtgtaggcctcattgcttcaagtgttgcatgcatgggtccaaattgtttcaagctaacctttttgactctggctggtgtctgtgttgcgggaaccatctccagcattatcttgaccgtaagaattaagcccgtttaccaaatgctttatgccgggggtgcttttaagctacctcaaacttcaggccagtaaaa

SEQ ID NO: 18725 - DNA, 545 bp, Glycine max
cttccctttcttcctctaccaaattaacttcatcctcatacgaataataacaaataaataaaaggagggaaaaagaaaaacaaaaaaaatctaatagttattttgcttccgcaccaacagttttgtgcttgaagcctttccagtgtgcagctgcagctggttcaatgattcaaaattgttaagttctttgttttggagcattcatcattgtccaaattgcaattttttcagaagaatagcaacaatttaggaagtttctgaagcaatagggagtagtggacacagtttaggatcattgttattataggagaatttgatggtaatcatacacagtggctaggaaaggatataatggctactgctgcagtaattggactcagtggaggaaagaggctcttgagttcatcataccattactctgatgttatagaaaagctatcttatggcagtgattttggatccacacactatcagattggtcctacaaagtctttaatagctgccaagaagtcatccaactacactccaacttttccagcatcgaa

SEQ ID NO: 18726 - DNA, 370 bp, Glycine max
ttggggggatatatggctaacaaaaagagtgggaccacttacaggagtactgggagtggtaatgtgccaaatataagattttgaatttggtgaaccaattggatgtgatgaaagtgaagatgagtttgaggactcttgcaatgctactgctttggccgcaaagacaaagtgtgagactaaaaaaggaccaatggacaggttttgtaagaatccaaaaaaatgcaatcaattacagaaaaatgaaaatgttgaggcaaaggaacataagagtcaatggataagaatgaagtcttgaaggtgcatcaatatattgctcgtttttgggaccaaactagtttgtcattcaacttcattaaattgaaaaagtttg

SEQ ID NO: 18727 - DNA, 638 bp, Glycine max
gaatcgccaatttctgattgcaaaacagcgttttctcgaggcccccaaacgtgcgcgattcgttcgaaacggatgaacttttagctgaattcaacgctcgtttgctggcttggaattctggattcgctgtagcgcggataaagagaacaagaaatggctacggttgatgttatcaaatcctgcatcggttccattagacagatatcagagcatattcaagacgctattgtttatttagatgctggatctacagaaagtttccaatttattggggcatatccagtacttcttgaacttggggcacgagctatttgcagtttggaaaacatgtgcccacttgatgtggtggttgattggaactcaaattctgatcctgcgaggaaacttgtggttatcacatcaagtctactaagtgatgcacaccggtatattttacgttgcctgagcgcacatcaagttgttcgtcattgcattatatttacatctatctcagaggtgcttatttacagcacactcagcatttcctgattcacctctggggccagatgcatatcatgaatatgaatccttactggttcaagattatgaagaactagttaagaaatcatggacaaaacctggacaggcaaaacataact

SEQ ID NO: 18728 - DNA, 431 bp, Glycine max
gggagagaaaaacgaagagtgagtcaccgttccgtgttcccgccgagtcggtataaacgagtgagcgagtcacaactcaccgcgctgcatggaccctctagaagctttggtcgcccaaatccaagggctttcgagcactcccggcgacctcactcgcctccacagtgttctgaagcaagccgatgactcgctccgatccgagtcaactcgcctcgctccgattctcacccagctcgacccctccattcattccctcgggtttctctacatcctagaagcttcaatgaccgatccggtaaccaaaacgcaggctgagaccgtcgttccgatcgttactaggtttattggcgcttgcagcccggagcagattcgcttagcgcctgataaatttttatctgtctgtaagaggtttaaggatcaagtgatgctgc

SEQ ID NO: 18729 - DNA, 417 bp, Glycine max
gtacgggaataaaaacgaagaagagcgagtcactgttccgtgttcccactgagtcggtatcaacgagtgaccgagtcgaaaagcgagtcaccactccccgcgctgcatggaccctctcgaagctttggtcgcccaaatccaagggctatcgagctctcccggcgacctcactcgcctccacactgttctaaagcaagccgatgactcgcttcgatccgagtcaactcgcctcgctccgattctcacacagctcgacccctccattcactccctcgggtttctctacatcctagaagcttccatgaccggtccggttaccaaaacgcaggctgaggtcgtcgttccgatcgttactaggtttatcggcgcttgcagcacggagcagattcgtctggcgcctgataaatttttatctgt

SEQ ID NO: 18730 - DNA, 422 bp, Glycine max
gctatttttggatcctctaactgtacatgttggtgattaaatgttatgttcaaatgatgcaggataaggtcctacaggaacaaaataacactctcgcaaagaaggtaattaatgtattttgtatttaatcaacaactttagttgactctagttagtttggactttggatactaaatgtatgtttggattcatgttttaacacctttttagataaatgtttatataagcatttatagaagaagaaataaaaaaaatattaaaatttaaaataaacttatagaagctaatatgaaaagatttctataaaataacttacaataaattaatttaaacttataaagaaatttaatttttttcatttgtctttatcttataagctcttatgaaaaaatgtatccaaacagaccttaatctttcagtgt

SEQ ID NO: 18731 - DNA, 377 bp, Glycine max
aatgcatgatattatatgaactgttattcctaaaaaaagttatataagtttttaaagtctttgatcatactttttaaacaatgtaaacagattcgaatttaaaaactgtaatatcatatcccatttcttcaaaaatccaacacatcaaatatagaattataaaccaaatattattctacaagaattaagattgagattaaaagtacgtgtttcaattctcgtgtctaatgaaatttccttttgctgataaaaaaatgtgtttcaattctaagttaacatctgaattgaccttgattatatatttctctctttttgagaaatagaaaaaaattgaagaaaaagcaacataaagaagtgaaacacacacactacactgg

SEQ ID NO: 18732 - DNA, 420 bp, Glycine max
  unsure (1)..(420): unsure at all n locations
gcttcccatttgatgaccacaattgcccttcccatttaggctggaatggcaaggacaggattgatgatttatagtcttctagtattcttaaaggtgaagagtttctaagcattttctaacgtgcctggtatttgcattttctaatgtgcttggtacttgttctgcttggtattcttaaaggtgaagagtttctaagcatttttctaagcatatattttataggtgcatgcttaggggatttcggcttcacagatgcccttactgaattaggtcctctataaccgtctcatatcatagtggtatgcttgccattcttgtactaaaatctctcctactgcttatagtccatgaccattctgttagtagatttataatgtcatgttattgntgttccttttcttgattaagttcttgatattt

SEQ ID NO: 18733 - DNA, 815 bp, Glycine max
ggaatcggctcaactcgagccgatcggctcgaggggcgctggggtgatgtatgtaacatatagggtaacataacaaatagcgagcgcaaccctactctcccagtctcggaagaagaaatgaagcagctgccaacgctgctgatgaagtccctctcactctcagtgtgttctttgccagcagcagcttccacaaccacccttcaacaaattgctctccatcaacccaaaggtgttgcaaaggttgtacttaaaaaggggaagacacaactctttaaggatggcaacccaatggtgtacagtggagctgttgatagaataattgggaggccacctcccaagaccggggatgttgttctggtagcagatgggactgagaaaccaattggatggggcatgtacaactcagtttctatgttctgtgttcggctcatgcagcttgaagatgaagctactagcgattcatcttgtgcattgaatatggagaaactgattgaaacaagaattgatgcagctgttgaaatgcgtagaaggttgggtcttccatcagtccacaccaatgcataccgtctaatcaatagtgagggtgacagactatcaggattgataattgacgtctttggaggtgttgctgtagtagcgtcatctgctgcttgggttgagacatacaaatcagagatagaggcatgcatcaagaaaatcaactatatcaatcatgtaaattggaggccatctgttgatattttaaaggaagatggagttaatgaatatgatttaaacaaaatgcattcatctacatgtcctgaaagaacaaagat

SEQ ID NO: 18734 - DNA, 440 bp, Glycine max
gactctcttgtaagcgagtgaacggaattaccaggtgcacggatagatatctgggcatgatgagaatgagtggacttacatggtcagtgctaaagagtgagctgtgaaatagaggggagagaaagagagagaatggaacaaattccattgtttaatgagaaaatgaaattggctcagaaagcagccatggctaaacgatgggaagacttcaagaaaataatgaaggacgaccaggagaacttgctcaagcagtttgatctgtttgagaacagtgccatccatgttgcaactcgctctaacagcccacgactcctcagagaattgatagagatgttaccaaaagaagaaaggtggcaagctttgtgcaaggaaaatcgcgaagggaacacggttttacacgaggttgtgttttgtaagaagaagaaaatggctgatgttgt

SEQ ID NO: 18735 - DNA, 425 bp, Glycine max
ctctattctttaactactacatttttataatcataagttgtagtgactttttcttatcctcaagtaaaataatacgatgaagtagacggaataatacataaataaaacaaaatccgcaaagtttttgagttttaaaaataaatttgggaataaatatcaataaattataattaaataaacaaatttaaataaagataaaagaagcaactttatgtaaagatgtttgtgccgtcgtatgttagtatataatttaattttaatatacttattagtctaagttttattatcaattaattaaaaaatttcctgaatataatttcaatatattattacaaaaataatattatgaattgccgttgttaactcttaaataacaattcaaagtagatctctaattaatttcaaagctttacttaaggattttt

SEQ ID NO: 18736 - DNA, 1080 bp, Glycine max
gaatcggctcgaggcgaaacgacagccatcctatacgaaacgacggaaacgacggagactaaatctctaaaacgcttgaaaccctaaaactctgtgtcctccgccgttcacatcattgtcgacgttcgttcagttgctcacactctcaacagagaagagaagagagatgagaggaaggagctatagtccatcgcctcctcctccacgttacagcagaagaggaggagggaggagtcccagccctaggggccgctatcctccccgtccccgacaacaagatctccctaccagccttcttgttcgtaaccttcgtcatgactgtaggcctgaggatcttcgcagaccttttggtcaatttggtcctctcaaggacatttaccttcctaaggattactacactggagaaccccgtggctttggttttgtccaatttgtggatcctgcggatgctgctgatgccaaatatcatatggatggtcaagttcttcttggtcgggagctcactgttgtttttgctgaagagaatagaaagaagccaactgagatgaggacaagagagagaaggggtcgattttctgatcgtaggaggtctcctcctcgttactctcgttcacctcgctactctcgttcacctcgctactctcggtctccaccaccacgtcatagatctcgttctcacagtcgtgactattattctcctaaacgaagggagtattcaagatctgtctcccctgagggtagaaggtacagtcgagaaagatcatattcacagcataatagagagaggtcattctcacgttccccaccttataatgggggctcgaggagccgtagtcagagtccagcaaagggcccaggccggagcaggagtccgagtctgaatcgagatgaaagggaaccagcccgaggtaggtcccccagtcagtgagcatgggataagacttgtcttggatatcatatgcaggattttgtcttaatattaggcaaattacttctgtttattgttgtctgaactctgatacaatggaattggattttgatttgttgttttatataccagttatgtttgttgcttgaatt

SEQ ID NO: 18737 - DNA, 860 bp, Glycine max
caataattgattggattgagtaacagtatgcattgaagtttacatgattgcttttgactgtgccggattttgtagtgtttgatatattataatggtatcattctgcctattgaaacttaagttgacaagttactgcctgatggatcatttgacaaaccagttaatttctcccccccaaagctagtgattcttcatatgaatatggcactacatgtgtatgaagatatcatgaggatgactgaaaacctgagtgagaagtatataattggatatggagcatcaagtacagtttataaatgtgttcttaagaattgcaagccggtggctatcaagaggatctattctcactatccccaatgtattaaagaatttgaaactgaacttgagacggttggcagcatcaagcaccggaatctggtcagtctccaaggctactccttgtccccatatggccatctcctgttttatgactacatggaaaatggcagtctatgggatcttcttcatggacctaccaagaagaaaaagcttgactgggagctgcgtctaaaaatagcacttggagcagcacaaggacttgcttatctacaccatgattgctgtcctagaatcatccacagggatgtgaaatcatctaacattatattagatgcagactttgagcctcatctcactgattttggcattgccaaaagtctctgcccctcgaagtcccatacttctacttacataatgggcacaattggctacatagaccctgagtatgctagaacttcgcgtctcactgagaagtctgatgtgtacagttatggtattgttttactcgagttgctaactggaaggaaagctgttgacaatga

SEQ ID NO: 18738 - DNA, 417 bp, Glycine max
gggaggagaagaataagactccagagcgagcatgagaaatcggtgagttgactcagtagagcgaatcgatggaggaggaagaagagagtcagtgcttcgagtgcctccaacttcgaataaagtccgatttctcggagcaagtgttcttcaattatgccatctccacttctgcttttcctttcggatcctcagctatcgttaatatttctggtacagctgatggcgaatcttcgggtgctcaatttatattgcagtacatgccgactcgtgataagaattgttttatcaattatgtaaatgaatatattttggatagtggtgaaatcactactaggagtagtgatcctggtattggaagcagtgaagataataatgctgttaatgttagaattacttcatcagatgattctgagagtg

SEQ ID NO: 18739 - DNA, 431 bp, Glycine max
ggatacactgatacctctgcttttgctttgtttggctcttcttttgtaatggaaattgatctttctccccagttggccaagaaggtgtatgaaagcaatggtgggtcttaccatgcatggtccccttctgagcttcccatgttgcctgaagggaacattggtgctgccaaactagctcttcaaaaaaatggttttgcccttccttgttactctgactcttccaaggttgcatatgttctccaaggaagtggagttgcaggaattgtgctccctgaatcagaagagaaggtggttgcaattaagaagggtgatgctttggcactcccttttggtgtgataacctggtggtacaacaaggaggacactgagttggttgttctgatcttaggtgacacttcaaaagcccacaagactggtgaattcactgattt

SEQ ID NO: 18740 - DNA, 448 bp, Glycine max
gattcaaaatacaaataaacgctcgccctcagaaaatcaggtatgaaagttcacttctccgttcaactccttctttctctgtttctactgtctgcatttcacgttccacatatggttgttggcactgtggagcttagagctctgatggagttgaagtcctctctggatccagagggaaagatccttggctcgtggatcagtgatggtgatccatgcagtggcttcttcgaaggggttgcgtgcaacgagcatcgcaaagtggctaacatctccttgcagggaaagggtctttctggttggatatctccagcactggctgaactcaaatgcttgtcgggtttatacttgcactacaacaacctttctggtgagatacccccacacatttcaaatctcactgaactgcttgatctctatctcgacgttaatagtttatctggagctattc

SEQ ID NO: 18741 - DNA, 446 bp, Glycine max
tcttgctaatcgagtagctacacttttagaatgtgaggttttttaatgcatacataatcaatctcgcaggaaaccaaaaaaactactagacttcgtaagcatttgtagcactgaaatgctctattgacataggtagccagggacaggaacaagtattaaaagacatatcttgagactacctaaatctttcaattttggatccattcttttggtatagaaaaaggatgtgtagtttaaatatgagagagaagtattcactacctgctggttattgaagacatgtcaactgtattctgtttatagttttaaacaatccattttagtaaatctttaaaaactaatgttttctctttattcaacctgagtctgtacatattttcttccatttcctgtacctctattacctgcgctctcagtttgttatcaccagtaactttgatgtgatg

SEQ ID NO: 18742 - DNA, 431 bp, Glycine max
gatcctcaaaaattaagtttagcttaccaatatcagcacatatatctcagctttcttccatagcattttctccttagctttcagcacattcagcttattccttactgtttggaataatattcgagttttgatcatccaatttgaagaaccaaaggtttgttcgtttatttatagcttatatcggtcattgttaatttgtttaagattgtaagaaattacactcagaaaaaaaaacgaagtgcatttccggatccaatttcaactttatgactttatatacaaatattagaaagttaaagaaaacaatgaatatatatcatagtttaagccaccatttgtaagctccttaacacttcttttactgaattcattggccaatatatagaataagtacttgtgcatacttcattatacaagtagcttttcttatc

SEQ ID NO: 18743 - DNA, 607 bp, Glycine max
tatgggggtagtacaccatagccatatcctcgggaattaagtgtagcttaccgatgtcaacacatatatctcagctttcttccatagcattttctccttagctttcagcacattcagtttattccttactgtttggaataatattcgagttttgatcatccaatttgaagaaccaaaggatcacaaacagtcaacacaggaaggatcagttttgtttatatttcctcgttactttcgtgatggtctcagtattctttgcttctttactcggtgttggttttcttcaaactagtagcatgccatccatatccttaaatcatgtttagcatgccaacaaatctcagctttcttccttaattaacattttctcttttctcacattcaggttaatgcttaccatttggaatagtgacaagacaaatcacaactcacagtcatccaattccaataacaaaggtttgttcggttgttcctttctttatagcttattatattatattggctctttttttcatttatttaagatttgaagaaatttcactcatacaaagatggatatatatgaagtgcatgttcagatctttcaactctcatggctaatgttccc

SEQ ID NO: 18744 - DNA, 664 bp, Glycine max
aagtgacagaaaagaaggtttattcaatcttttggaggcctgagtgtcgtccccaatccatagcttggaattccagaaaggcttcagcttcagcttgctgctcccttctcaacttcaacaatttcgatagcacttaatgtcctgttattgtagggacatcagtattgctaatcatgatatggtcaaggctaagtaggagaactcatctcttgccataccttagggctttgcaaacagactcaattgaatccaggtgcctatctatcattcctaaaggatcaagttacaagttcattaatcctaataccagcttccaacacaatttctcttgtaatatacggctatcaaagtttaagcaagaattgagtacaaaaccattccatctgtgttaccgctcttcagctttggcttcacagtatgttggaaagtcatgttccatgcctggtttccgacacttctcttctcatgcatccaaagaacagaaatcacgaaagatgcttttatacttgacaggcttagtttttgctatggttgggtgcacatatgctgcagttcccctttacaggagattttgccaagcaactggctatgggggaactgttacccggcgtgagactgttgaagaaaagattgctcgacatgatagcaataatacagtcaccac

SEQ ID NO: 18745 - DNA, 556 bp, Glycine max
gtttattcaatctgttggaggcctgagtgtcatctccaatccatagcttgcaattcccggcaagcacagtgattggtgttccagataggcttcagcttgctcctcccttctcagcttcaacaatttcgctatagcacttaatgtcctgttgttgtagggacatcagtcttgctaaacatgatatggtcaaggctaagtaggagaactcatcttttgccatcccttaagactttgcaaacaaactctcttgaatccagggaaattgtggtccagttcaatgctgatattgctgatgggatgccatggaagtttgttcccacacagagagaggttacggtcaagcccggtgcaagtgccctcgcattttatactgccgaaaacaaaagttctactccaataacaggtgtttctacgtataatgtcactcctatgaaggctgcagtgtacttcaataaaattcaatgcttctgctttgaggagcagcgacttcttcctggagagcatattgacatgcctgtattcttttatattgacccggaatttgagacggatccta

SEQ ID NO: 18746 - DNA, 452 bp, Glycine max
  unsure (1)..(452): unsure at all n locations
gcttcagaagacaccaagggtatgatcgttgtgaattgttttatgctgtgcagagcttataatttgaatgatcgggttgtgaattgttttgtcttgtgatgtcaatattctgataagttgctctgcagtgtattcatttattgaagcattaacattattccttaattcaagtaatctttgagatatatcagagtagagttttactctgtaatctgattatgtttaatcactttacttttacagttgctggttaggttctgtcagttgtatatagctgtacaagagaatgcctaaagactaagagttagttacagagtacagctgtcacacaacagacagcctaactgacaacattaaaagtacagtggctacacatattacatagtaaaactctattctaataaaggtagataattgatggttaatgatatttntaaatgaataatagtttg

SEQ ID NO: 18747 - DNA, 389 bp, Glycine max
atatgtaaaatgtaacatgaaaaaattaaaataaatacatcaagcaatttaaagagacctaaaattcaatgggggcactgaaaggaagaaattcccaagtgtacccaatatgttatatctttactatggcagccatataggagttcacttgcatcccagatcaaaactaatacctattcatgctctcaagagaccgaacctattaaactcataactgggttaaatagcatgcctatttcctgttgtttgacttctattcagtttgcaatttcccattaagtgctggttgctacaatcttatatctttgcaaggctccttgtgactttggttttcagttgaagtaattcttttgtgcaatatgttgattaaggaaagggagatgatcaag

SEQ ID NO: 18748 - DNA, 1507 bp, Glycine max
ggggggtagattggggcgtggacatgaggggctttatgacgcaatcaataattcaattcattttcaattaggtcttgctctagcctctttaggggttattacttccttggtagctcaacacatgtactctttacccgcttatgcatttatagcgcaagactttactactcaagctgcattatatactcatcatcaatatatagcgggcttcattatgacaggggcttttgctcatggagctatattttttattagagattataatccagaacagaatgaagataatgtcttagcaagaatgttagaccataaagaagctatcatatcccacttaagttgggctagcctctttctggggttccatactctgggactttatgtccataatgatgtcatgcttgcttttggtactccggagaaacaaatcttgattgaacctatatttgcccaatggatacaatctgctcatggtaaaacttcctatgggttcgatatacttttatcttcaacgaacagtccggcgttcaatgcaggacgaagcatatggttgcctggttggttaaacgctgttaatgagaatagtaattctctattcttaacaatagggcctggagacttcttggttcatcatgctattgctcttggtttacatacaactacattgatcttagtaaagggtgctttggatgcgcgtggttctaagttaatgccagataaaaaagattttggttatagttttccttgcgatggcccgggacgaggcggtacttgcgatatttcggcttgggacgcattttatttggcagttttctggatgttaaataccattgggtgggttactttttattggcattggaaacacattacactatggcagggtaatgtttcacagtttaatgaatcttctacctatttgatgggatggttaagagattatctatggttgaactcttcacaacttatcaacggatataacccttttggtatgaatagtttatcagtctgggcatggatgttcttgtttggacatcttgtttgggctactggatttatgttcttaatttcctggcgcggatattggcaggaattgattgaaactttagcatgggctcatgaacgcacacctttggctaatttgattcgatggagagataaaccagtggctctttccattgtgcaagcaagattggttggactagcccacttttccgtaggttatatatttacttatgcagccttcttaattgcctcgacttcgggcaaatttggttaatttcattaattctttattattatatctggcatatcatttccttctatggggaaggaaggccatttatacatctaggatccgacttctatcattgatactaataggaaatgaaccactatggcaaggaaaagtgtgattcagagggagaagaagagacaaaaattggacccccaatatcatttgattcgccgatccttaaaaaaagaaataagcaaagttccgtcgttaagtgat

SEQ ID NO: 18749 - DNA, 709 bp, Glycine max
  unsure (1)..(709): unsure at all n locations
gttttgccaactctggtggatatgtttttgtgagaagagacctcaatatcatcacaactacaaagctggagctataaattcattgctaagagtctcttcaaggattagcaacgcaaaaatcattctaatcatagattgtgacatgtactcaaaccattcacaatcagtgagagatgccctttgttttttcatggatgaagagaaaggccaagaaattgcttttgtgcagtttcctcaaaattttgagaacctcagtaagaatgatttgtatgggaatgctatatcagcaactgtggagaagagacgctttatgtgggaagaagttcaattctcaatacaaaaatgagtggaatgatgagaatgagaaagaggtggttaaagcaaacttgcatgaactagaagtggaatcgaaggcactagcaagctgctcctatgaggaaaatactctatggggaaaagagattggtgcaatatatggatgtcttgtggaggacgtgataacagggttgtggatacattcgcaaggatggaaatcaatatactacaacccaccaaggaaggctttttttggtattgctccaactaacttgcttcacacactagttcaacaaaagaggtggggtgaaggtgacttccaaattttgttcactgagtacagtcctacatggtatggtgaaagaaagatcaatttangcctactaatgggata

SEQ ID NO: 18750 - DNA, 1071 bp, Glycine max
ttaaaatataagagatagaattaactcgactgcaagtgcaacaagaacacaggatagaaaatttgaatggagagtggtgaagactattccctgtttgagactaggaaagacaaaggaaggcacattcgaaggatctatgcaatctctttgtttgtggccatatgcttcatctgggcttacagattgagccacatacccgcatatggcaaatgggcttggcttggtttgtttgctgcagaactctggtccggtttctattggctctttggtcaagccctccgctggaacatgctgttcagaaaaaccttcatcaatagactctctgaaagatatgagaatagcttgccgagagtggacatgtttgtgttcacggcagacccaatcattgagccacccatgatggtgattaatacagtgttatctgtgatggcttatgactatccagcagagaagctcagtgtgtatctctcggatgatgcaggctcagacataactttttatgctcttttagaggcttctacctttgccaagcattgggtgccattctgcaagagatttaaggtggaaccgaggtcacctgctgcttattttaatacccttgtatcaacaaactcacacgaccataaccatgccaaagacttagatgccatcaagaaactatacgtagatatgaaaagacgaatagaagatgcagtcaagttgggtggagtacccagcgaacacagatcaaagcataatgggttttctcaatgggattcgtattattctcgacatgatcacgatacaatccttcagatactacttcatgaaaggaacccacacaattcgaaggatgtagatgggtttgttttgccaactctggtgtatatggctcgtgagaagagacctcaatatcatcacaactacaaagctggagctataaattcattggtggagctccatggtgcggatggttatggtggccctttgtttattggaacttgttgctttcatagaagagacgctttatgtgggaagaagttcaattgtcaatacaaaaatgagtggaatgatgagatgagacagaggtgg

SEQ ID NO: 18751 - DNA, 531 bp, Glycine max
gtaaaaaaatagcaaacaagttacatggtgcttattatttattatttacaaaaggaggttcataaattaaaaaataccactgtatatatgagttgtaagtggttgaatcattcttacgatcttgcgttatagattatagattatttacattgacacgatttgtcagtatgagtaactttttatggatcctttgccaatccatgtggattaaagatatataacattcttttcattgacctaaatgtagctaagtgtctcttcaaggattagcaacgcaaaaatcattctaattatagattgtgacatgtactcaaaccattcacaatcagtgagagatgcccttctgttttctcatggatgaagagaaaggccaagaaattgcttttgtgcagtttcctcaaaattttgagaacctcggtaagaatgatttgtatgggaatgctatatcagcaactgtggaggtggagctccatggtgcggatggttatggtggccctttgtttattggaacttgttgctttcatagaagag

SEQ ID NO: 18752 - DNA, 990 bp, Glycine max
  unsure (1)..(990): unsure at all n locations
gggtggagagtggtgagtagtgaccaaagcaaacgcactcactctattattgaagggaagatgaaagatgaagatggcacaccccaaagtgcaggtaagggacagtacaagttgtgggtgttgggtgctatcattcttcttgctctttggtccatgttcactgcttctctcactctcaaatggtcagctgggaacctcaaccgtgacttcgattctgccactctcaacgatttcgatgtcctggaagtggaggagagggagaaagtggtgaggcgcatgtgggatgtgtatactcaaagcaagagtggcaggggaagtggcttacctcgtttttggagtgatgcttttcatgcggcttacgaccacttggtcagtgatgttcagagcgtccgagaatgctgctgtctcgaaattgcaagatatccctccattctctttctctgaccacctcaatcacattcattgtgcagatatcatgggatcaaaaaaatgaagcngcagagagattgtgacactacantagcagtgatcataacagatnctactttgctgtcacnttggcccattagcatgatgtcacactcgcagactgaatgtcattagacagtccatanacacttctcgccgctgtatacttcaagtataactatttgttagttccatggatttacagaatatgataaattagatcatctgtatcgatacgctgcatgctgatatgtcgaacnaaaaaaaaaaaaaaaaactnaggggccgcccatccctagagtatcgcgtcatgcgtttagggatgaaactgtacatatctggcatccttcatggtacagccactcttcactgactatgagaccttggattnnccggggtgcgcatcaccaccttttttttttttcccgcggtttcagttaggcttcatgccccaaaaagtagccagtcctgcctagagcacacttgcttttagctaaaatcactgggggctanncaaataat

SEQ ID NO: 18753 - DNA, 392 bp, Glycine max
gaatgtgagataaccatcaaacgctctttccagaacttgttccataactgacaacctgatcttcatgaatttgagaagtattgccacacccactgtttcctgtaaagcgggaagcaacaacaatttccttttctggattttggtttgcttcttgctaccaagttttctgggagctcctgaagtatatgctcatttccaattgataaagctcatttggggtgtgatcttttggcaaggcacacccatttgtggtgtcattttctgaagtttccttgtttttatcaaaggaccatggtttccgcccagttctctatcttgaatgaaaatggttcacagaagcctttcctgaatcagttgcttctaccaaatgggccgcctgatcgtttgccttc

SEQ ID NO: 18754 - DNA, 1055 bp, Glycine max
caatacttccgaaaaaatctcttctttcttcggggggggtttttggcgctgatgggagtgcttctacggagaaattgaagggctttcggatttgtttgtgtgggattctccttctttcgttacgcttgatgatttgattacttcttctccttcttctcatagctttcaggccatggaggttcctcctctgcccaagaatcggaaggctgcttgtgggcaacacaaagaagagattcttagtcagcttcgggaattggccaagtctgagccattggaccttgaaccatatgtgtcatcggggaacttgtcctcgggttttgaacgtgaaccagaggctgatatctttccttctcatgagtggcatagagaaagcagcgagcctatgtatcaggttgttcctcctgacccattaatgagaacttatacagaagaaattccatttaaacattctacttctgctgttggggaaactcaaacctacggtgacaatggaggaaaaccatccatttctcttaaatctgaaaccctatcaactactcccaaagctgcagcatgtgagttaacaagccaagaaagagattctgcattattacggtacaagcagaagaagaaaactaggagatttgacaaacacataaggtatgaatcacgaaaagttcgggcagaaagcagggtaagagtcaagggtcgatttgccaagatggaacatgaacattgaaatcatggtaggctgctatgacatcataactataattcccagctcaaatcacatgcactatgtagcatatcccttgtatagtgaacttaacaaaattttccaagtgatgtattctaggattcagagctaggatataaggcagacatattcttgcagtacagtagtgtttttatcatcctttttgcttcataattgactgcacctgaggtagacaaatatgtgcagtattctgtaaatcagaatcaaatttactggggtctttggccttggattgtgtttggagagtatcttgtggacgactgagaattttttcttcttgattatcaaataataataa

SEQ ID NO: 18755 - DNA, 774 bp, Glycine max
gaccctattcttctctctcactcactcacacccaggacaaaagaaaaattcatagctatgagtggtgctgaagcgcgaccttgtgactactgtggcaactccacagcacttctctattgcagagccgattcagcaaaactctgtttctcgtgcgatcgcgaagttcactccaccaaccagctcttctccaagcacacgcgcacgctgctctgcgacgcatgcgatgattcccctgcgaccatactctgttcaaccgacacctctgttctgtgccagaactgcgactgggagaagcacaaccctgcgctctccgattcccttcacgagcgaaggcccctcgaaggcttcactgggtgcccttccgtctccgaactcttgtccatcgtggggttttcggatatcagcaaaaaatctctgcttttttcgcctcagggaagtgtcgctgatgggttcttcggcgccagcgagattgaagggctttcggatatgttcgtgtgggatgcgccttcttttgttacgcttgatgatttgatttcttcctctccttcttctcatagctttcaggccatgaaggttcctcctctgcccaagaatcgaaaggctgcttgtgggcaacacaaagaagagattcttagtcagcttcgggaattggccaagtctgagcctttggaccttgaaccatatgtgcaatcgggtaacttgtccttgggttttgaacgtgacccggaggctgatatctttccttctcatgagtggcatagagaaagcagcgag

SEQ ID NO: 18756 - DNA, 412 bp, Glycine max
gtgcatagtatagatacggatacccgggtagtgtatgggtatgtacgtgattcatcactcttatattgttataagacacttttttaaaaaaagaatctggtatttggtaattggtacgttgaattcaatacatggtacacaggtttattgacaaaggctttgtttggatatatgctacttgagaaaccacgtcggctataactgttgaaaacatgtcccatatatgtaagcaaacacgtctaaaattctttaactatgattttgactgcctctgccagtgacatgattagaggtctgcctatatgagaatttggaccaatgacatgcagaaggaatttatttgattgcgtttttctatagtatgaaatgaaataaatggaatttaattttcagaacacattattgactaatt

SEQ ID NO: 18757 - DNA, 396 bp, Glycine max
aaacggacctcggccgtgaacaagagggctttaagagaagacggcggcggtggtggcggcggcggagcgatgaggtaccgcggcgtgaggcgcatgccgtgggggcgttacgcggcggagataagggaccctcaatcgaaggagcggcgatggctgggaaccttcgacacggcggaggaagccgcttgcgcctacgactgcgctgctagagccatgaggggtctcaaagctcgcaccaacttcgtttacccaacttctccgcaaccttcttccgccaccaccgaacacttgttccctaacttcaacaacaacaacaactttcacaaacactcactcttcaatcaccaccgtaaccgccacataaccggttccaacacttgttttgaccacccttac

SEQ ID NO: 18758 - DNA, 399 bp, Glycine max
aggatataaacatttggagaccatcgcatgacgagagatctaacaagatagagcatagaggagataatcaacattggacgtcggccaagcaagtctcatagggcaccagagcatgtagtaaccacggaggctccaataagtgacatagccacaattagaccttcaactgtgggttcactttgtaattgaaactccctttctatgtacaacatagatcctgcatgcgaactcaggttattggttagatcagccaattttaattcatcgcaaaataaataaaatcaattcaccatacctgcaatagtcgcattatcccatccttgtagtaagttacctatggcatcagcaacagctacaagaacagctacactcatcgtttcagttagtttcctaatcaat

SEQ ID NO: 18759 - DNA, 264 bp, Glycine max
cacagagcatgtagtaaccacgtggctccaataagtgacatagccacagttagaccttcaactgtgggttcacttcgtaattgaaactcccttgttatgtacaagatagatcctgcaatagtcgcattatcccatccttgtagtaagttaccgatggcagcagcaacagcaacaagaacagctccactcatcgtctcagttagttgcgtaatcaatcagcctgacaaggcagatcagctcaaccactgtaataacataggcaag

SEQ ID NO: 18760 - DNA, 733 bp, Glycine max
ggttgccactagtgactactatgaattttataaaggtggcataagacatattcttactaacttcttgggtgccaatgcacagaagcgacaccatatccaccgagaaaccatgatggaaaatattttgagccaatttagtgaacatgtcaagaccttctctgatttggcagttaattttatgaaaatattcgtaactcaactttttggattagcactgaagcaagctctgtgaagttatggatagaccatttatgtgtaggagcttgcgagtacattatcaaaagaggacatatataagattctagaggttgatataatggagggtgcaactgaagtgtattgacgagatttctttccatacttgaagtggattccaaataggaggctggagatgaaaattcagaatctttatgtgcgcagaaaagctgtcatgaaggccttgatgaatgagcagaagaacagaatggcttcaggaaaggacagtaaacttgctattcatgactacctggtatcggaagctaaagcactgactggcgatcaaatttccatgctaatctgggagaccattattgagacatctgatactacattagttactactgaatgggctatgtatgaacttgctaaagaccaaactcgtcacgaccgtcttcatgaggagctccaatatgtatgtggacatgaaaatgttatcgttgaccaattatctaagctaccatacttgggggcagta

SEQ ID NO: 18761 - DNA, 462 bp, Glycine max
ctcaagagagtagtatcctatccacaagacaagcaagtcaaagtacttaaagcaatggacatggtgctccaaaatctagataagcggcttaattgaattgaaacatgagtgagaatagtaaaaccctgcgtttcggcatcttaggctgcgccaacatcgccagaaaagtggctcgagccattgctctcgctccgaacgccactctctgcgccatcgcgagccgttccagagagaaggcggagaagttcgccgccgagaacgggtttccggcgaccgtgagggtttacgggagctacgatcaggtgttggaggatccatgcgtggacgccgtgtacctccccctgcccacgagtctgcacgtgcagtgggcggttatggccgccagtaaaaagaaacacgtgctggtggacaagcccgtggctcttgacgtggcagaacttgatcgaatcttggatgcagttg

SEQ ID NO: 18762 - DNA, 462 bp, Glycine max
gatccaaagaaaaaacaagaaactcaattgtctagttgaagagcttcaaaacaagattcacaagagtaaaaggggaaatgggttgtgcttatctcaacatgccaggcttcatgagggcaatgtttgttgtgttatgtgcgctgatgatattgccggagctaacacatgcaaagcatgcaagagtcactaggcactacaagtttaatatcaaaatgcaaaacttcacaaggctttgccaaacaaagagcattgtaactgtcaatggacgatttcctggtcctagaatcatagcaagagaaggagacagaattgtggttaaagtcgttaaccacgttcaatacaatgtcacccttcattggcatggaattcgccaactaaaaagtgcatgggcagatggacctgcctatatcacacagtggccaattcagacaggtcaaagttttgtgtacaacttcacagtca

SEQ ID NO: 18763 - DNA, 307 bp, Glycine max
atcgtgagccactcagcctgtgtttcgtgggagggattattcagcttccctttttccttccctccacccaaccagagttaccaaccgaaaatggctttcaaactgaaatcactacctctcctttgctctcttcactccccttcccgccaaaaccctaattcaacactctcaaaccatcacttttctcgtcgcttcttcgcaccttccattcctcccaccctgtgcctatccggcgcagctcagcgtccacctttcatcgccatcgcttcttcgtaaccgttctaaaccaagactaataccatatcac

SEQ ID NO: 18764 - DNA, 407 bp, Glycine max
tgttagtggtcatcataataggcctctccgggattgtgctgtcagatgcttacatttactgtatgaaagggattgcagacacccattttgccctcctgctttgtggctttctcctgctagaaaaagccggccaccaattgcagttgctgccagaactcatgaagttttagcaaccaacctgagatctgatgattcatcagcttcactgagtgtaggttctgttgtcaccattgttcctcatgttttcccttttgaggaaagagttgagatgtttcgtgaatttatcaagatggacaaagcatcccgaaaaatggctggtgaaatttctgaacctggttcacgggccattgagatagtaatacgtcggggccatattgttgaagatggatttcggcaattaaattccc

SEQ ID NO: 18765 - DNA, 412 bp, Glycine max
gtggggcaaagtggatattggcaaacacaagcccttggttgcttggtcagtagtttgttctccgaaaaaagaagggggtttaggcctttttaatctcaaggactggaaccttgcgcttctttcccgtatcctgtgggactttcattgtaagaaagattctctatgggttcggtgggttcaccattactatttcagagggagcgatgtgtggaattacaattcttcttcatcagattcagttttgataaagaaaatcattcaaataagggactttattatctctaaagagctaagtacggaagaggccaaaaagaggattcaatcatggagcaccaatgaacaatttcttattgacaaagtctatgaatatattagaggtgtcaagcctactgttaattggtcttctgttata

SEQ ID NO: 18766 - DNA, 690 bp, Glycine max
gtcacgaacgccattcagtgttttctgagaaccgtagcacgatatgtatagatcggaatgaatttacttcagatactgtcttctggcaagaacaaattggtcattactggagactgatgaatattggggagacagaaatacgcaatgtgatggatatgaatgcctattgtggtggatttgctgttgcgctcaataagtttcctgtttggatattgaatgtagttcctgcaagcatgaagaacaccttatctggaatttatgcccggggattgattggaatttatcatgattggtgtgaaccattttcaagttaccctcggacatatgatcttctgcttgcccactaccccttttcccactacaaaagaaaaggggaaggttgtttattggaggacatcatgctggagatggatcgactaatacggccattgggatttattatcattagggacgaggaagatattacctctagaatcctagaggtagccccaaaattcctatgggaagtggaatcacaaatgttagagaacaaagagaagaaaatggaaactgttttaatttgtagaaaaaagttttgggctatcgtctaaagtgacttgacctaaaagctttctccaagaaattggttttagcatacgggtaatttgttatgtttaaggctattatgtaaacaataatttttttttttta

SEQ ID NO: 18767 - DNA, 373 bp, Glycine max
cattcatatcttttcaatcggcgaaaaaaaataatggggtggctatcctacagtggggagttctaagtactggtggatttagtccataatcttcatggtctaaaattcctctgctagctacatttcacatttgcttgcatcgtgattgtaaattttttaattttatatatacatacatatatataggggctatggggcgttcgggttctactacaaaaagacatcattttgaaattccgaccacgtcaatgtgatcggggtttagcgaagttcataaaaataacatcaattttataaaaaaataacttctacaacatcacatttttaatggtttttctaaggaagtgcaaaaacattcctttacgattcccaa

SEQ ID NO: 18768 - DNA, 447 bp, Glycine max
ggttctagtgtgtgattgtttgttgttgtaactcgttcttcttcttttgttgttctgtgtttgtgtttgttttttctctcacctgaaaatgtcttgctgcggtggtaactgtggttgcggaagctcctgcaagtgcggcaacggctgcggagggtaagattttcgttgtaacattgtttttttcttgggaaaatagagtttttccgggaaaattttctttttggatttttaattgttattatggttacccttttggttcaattgcatgaaaaaactatgctttgtttattttcttgcatgggggggagattctgatcacccgaaccttttttttgcttttacagaacatgtcgattttgttttcttttcatgggatggttttctggggtgttatatgcttggctttttgggtaccctttttggtgaattttataagaaaaagataac

SEQ ID NO: 18769 - DNA, 405 bp, Glycine max
caaatgcataaaaagcaagataatgtacgtataatttgatcaacacgtgcaaatgtaaggcatgtatattcccccttggggtttgagctaaaaatccaaatactattgtcaaatgagaacttcaatagttcaagtgttgaacctaccaacatttggggcatctgagaggcgaaggcctggaattccccttggttgttggaacccataacagactgccatgtacattaatgcccttgctacatcccctctaacctgaaggaggtaacatcccaaacgttgttcaaacaaaaaataagttaattgtccaggtgaagaaacatcataaccaattataaatataataaatacatccttttaaactttcaccatctatccaagatcctttaaacttttttttttgttttt

SEQ ID NO: 18770 - DNA, 365 bp, Glycine max
gggcacatgaccactaatcttgttgattcgattaattcgtactctagaaatcaagaaatctgccaatagatgcgctagtaaaatccacatatttaaggtgtaatgcattgctcaacaaaagagggagagaaatcacaataatgcttgcatctagccaagtttgtacggaagtgctaaacagggtcatcaaaggcatacttaaaaaggaaaacactcacaatgtttttgagtttgatcgatgcgacatacggttcttgatccaagagataataaacccgagagaggttcaacctgctagagatttcactgtcagactagacgaaaggtggtgtgactgtgacaaattctagaagttgtacatgtct

SEQ ID NO: 18771 - DNA, 1045 bp, Glycine max
  unsure (1)..(1045): unsure at all n locations
cggctcgagaagaaagtgaagtgaaggaaagggtgggagggagtgctactgatactgaaattgaaatggaggagaagaagctcaaactgtattcctactggataagctcctgttccttccgagtccgatttgctctcaacctcaaaggactaccttacgattacctagcagtcacttcattttctgaccctgagtttcttaagctcaaccccattggatttgttcccgtgcttgtcgatggagattcagtaattgttgactctcttgccattattatgtatttggaagataagtatcctgaccctcctctgcttcctcgtgatattcaccaaagagccatcaatttccaagctgccactattgtttcctcatctatacagccttttcaaaattatactgtagtgaagtacatagaggaaaaagttggcactgatgaaaaactttcttggacccaaagtgtaattggaaaaggctttatggcactcgaaaaattgttgaaagaccatgctaggagatatgcaactggagatgaaattttactggtatgttaagagtccatggagttcaataggatcagattgcttctttccacaggctatgaaatgttactggcagatttgtttttagcacctcagttagatacagcaattaagagattcaacgttgacatgaaggaattccctactctatcaagattacacgagacatataatgaaatggcagcatttcggaaggctttgccagagaaccagccagatgcagtacattagttgaacctataatttgggagtgcaggagcgactggttggccatcattagtaactcttgcaataaggttgctaggtacaccatcatggaccgtggataatagactaatagtgatttggtttgtataactaaaaagctcgtgattctttattttccgtctcatattgctgctattataccttgatgcatgcttcttaatggtcacatgtttctttgatgggcaaaaaaaaaaaaaaaaaaaaaaaaaannncgccggcggttctggaggatccaagc

SEQ ID NO: 18772 - DNA, 435 bp, Glycine max
ccgaacggttccaagaggactacaaagggggacccacacaactcatcaactggaagagtgaggctatctgttcttggtgttttcttgcatgtggcaatgggggtgacagtgttcatgactagtgggagtctcaggggcactaccactttcaggcctgtagatgctgcgtactttacaatggtaactctgggcactattggatatggagatattggtcctgactccacgtttaccaagatctttacatgtggtttcattttggtgggttaatggatttcttggacttttgctcaatggattggtagcatacatttgtgatacacactaggcattcttgttgggcatgatggatgagaatagatattagataattctcaggacttatatggtagatgaatagtatggaagtttgagaatatgaaccaaagtttgtct

SEQ ID NO: 18773 - DNA, 435 bp, Glycine max
gccgaggaatcttcaacgtcgacggagaatcctggagcttccagaagaagatggcgagtcttgaactcagcaagaactcgataagatccttcgccttcgaggtcgtcaaattcgaaatcaaagaccgactcatccctctccttgttctgtccaaacaaaatgactgtgttttggatttacaagacgttttcaagagattctcgttcgacagcatttgtagattctccttcgggttggaccctatgtgtctggagctgtctctgcctatatcggagtttgctatgtcctttgacttggcgttcaaactgtccgcggagagagccatgtcgggtgtcccctctaatatggaagatcaaacggttcctcaacgtgggctccgagaagaagctgagaaaagctattaaaatgattgacatcttagccagagaagtcata

SEQ ID NO: 18774 - DNA, 386 bp, Glycine max
ctaataccttccccatgtgtaaacaactcccgaacccttattttcaaaatccatagacccctttttggtttttctaatgttttcctcaaataaacgttggtggcgactcccgcgcatcttcttcatgagaagatgcactttcctattttgccttgccctcctatcgaagggtaggttgcgacacacacaaaatgcaacaacttctctgttggagtctttgtgagctgagcccaaattaaggctcatcggtaacatgcaaaatgtctcccttattgtgtgcattttaagtttggcggtgtgcaatttttcttaattctatatttttgtagtactcttattgaaaatttgattataaattctaatactagacaaaatagtcttggtca

SEQ ID NO: 18775 - DNA, 440 bp, Glycine max
ctgtcaagcactattttgtgcctgcatcttgttcgcatggggttttctctcttgtaacaaagattcgcagtgatagcggtgacaagggtgatggaggtgcccaaacgttccatcctgaccatgtttgatgatgccaaaggaaaagggtggggacctaatcttagtatttctgattgtacaattgaattttctaattctaaccaaaacaatagtgctgtgataaacagtagtgggagcaataacaatccttcaaaaaccaatcctatgtatgcttgctttttatgtatatgtaacttcacaagagatgaatgagaaaaatgtgattcgaatcaaagattccactgaatgtgatcaatcagattttataattaatggaaattaatcatccgctgaacctgtggataccttgcaccaaactcttatttataataatgttcaat

SEQ ID NO: 18776 - DNA, 632 bp, Glycine max
  unsure (1)..(632): unsure at all n locations
gaagacgacagaaggggagacggccaatagaggaaggtatagcacctttcaatgagttgcttgataaatccctgtattaatttcccaaagaataattaaaatgcagttgagaaacaaaagctagaaacatgttcaaaacatcagaaaggaaaagtgacaaaaaacaagggattaggaattacagtatatttaaatatgaaaggtttccaatatttgatggtatgcctccttggaagtaattacccctcaagtacctttaaatacacaatcagatgagacgagtcagccttcagcatgacataaaagcagtgaactaattaggaaattgctaagtagttcattagtagtgaaccaattcacttacagtgctcttagctcagtacaattggtaagttcattaggaatggttccatgccagctgttctgatgaagtgccntgattcatttaaatgaatgaaaaatgccaaaattaatagaggttcttttaccaaggtaagaaggacaaggttttttacttccaattttggaggttggttaggttacccaaggttggaaaaaatattccttccaagtggaaggaaggaaaattttttaaagaccaaaatccaaccccaaagtgccccctttagttg

SEQ ID NO: 18777 - DNA, 413 bp, Glycine max
ctcgtataatctatcagataactatttataagtagggctatatctttataaacatcttatattactttgtggtccatttctgcaacttcatccattactcctttaaaccattcaaaagatccaggttccctagtgacccagtagaaataagcatttgtagtccttcgtgatctcttatttcctcctggagttacatttgaagatgtaaagctattggagctctcgtctgatctggttgtttgacttgtttctgtgtttgactcctgcacctgaccttatgaaaattgaaaacttaagataaaaagtggaatcaactttctgaaaagggaagcagagtttggatattagtaccactagttcatccattgctctggtgttattgagaagatctctgagaatgctgatgaaaggag

SEQ ID NO: 18778 - DNA, 427 bp, Glycine max
tggtaacttatcctaacctttaatagaagtgtattggaatatatttatcattttacctctcttttcaacaatctacgtttctaaaattaacaacaggtgacaaaggtgtcctcaattggaaacaacggtatgatataattttaggcacagcacgaggactagcatatctacatgaggaatttcatgtgtccattatacatagagatataaagactgctaatatcctcttagatgatgatcttcagcccaaaattgctgattttgggtgggctaggcgctcttccacggggatcgttcccatcttagtacccaatttgcaggaacattgtaagtaaaaaacaatgtcattcacattaatttcttgacctttattgagcaacaagttgtagcagaagagatacattaattactaaaattaatggaacat

SEQ ID NO: 18779 - DNA, 1095 bp, Glycine max
gaacgccaaaacacaactccttcattttattctcgtcttctctccccactcccactttgctcattcttcgcccctcttctctctctctcacttccactccactcttctctctctctcacacacaccatgaactcttcttattatatgctgcaagctggtgcttcttcctcttgaacagtgaaatgggtttgtgttcttctgtccaccgaaacgagcaaacaaacatgaagcatctaacgctctcttttgagtccaaaactgaaagccttgtgattcctccatcacccttcaaagacaaagacaaagccataaacggaaactttgtggtggctgatgatgatgctgcgtttaaggctcagcagtggtcaccctctcggtcaaccacaaccttctcggtcacagactgtggggataacgatggcaaagaggaatcattttttgattcaaaggcctggttagactcagattgtgacgatgatttctatagtgtaaagggtgagtttaccccatctcgtggcagcactccggtgcaccacatttttctcaataaaaccactccttctgagcctggttctgttccggaaccatctccaacaacacaaaagaaaaagctgttggatctttttcgcgaaagtgtcagagaaaaccaaagtgatgatgctgagaacactttcggcaactgaaaagaaagaagtgaaaccaacaacggtacatgatcttattcctaaatctgcacacagtactccttatgtctcaggaggaaactctgcatgtagcagtgaaagaacaatgaatgatgatcatgcccccattagagagaaacctgttaaatctgtgcagtgctgccttccaagcttggcttcgtgtcgtagcttcagcgagaggaagaggaagacaagtcctgcaataacagataatggaaaagcatgactcagatgagcaatgtaccttagacataatcatgatggaagttaaaggtctatgaattgaatatgataatgtacatctttaacgttatcctgctcaatcaattgagctaaacttcctttaagttaaaacattttaatgcgtcaacattctattaaaagagagtat

SEQ ID NO: 18780 - DNA, 439 bp, Glycine max
  unsure (1)..(439): unsure at all n locations
gctcaagcccacttcttcttgagagttctgtattctgttcgtcttttctcagctatgcacccaccaccacctattctaacagtaaaaccctcccaaaacccacactgtgctaaaccccttttagcactctgtttctctgcttaaccatgtcccaatcactgaagctaatcaaggaacacgcctccaaccccaaactctggttggtcattggaataggagttgccggaatcgtggttctggtggagacacggcggagaacacggcggggaaagacacacaaacaagactttggtgcttttgttgagcgttttgagctacttcccttccctcagcctcctcctcctgctgccaagcaatcgctctctgctctaactcttgccataaacgacacatttgatgtgaaagactacgtgacagggnttggaaattctacctggaa

SEQ ID NO: 18781 - DNA, 849 bp, Glycine max
gggtctaaagaacatggtttggagattcctttggcctatttgacaatgttttagcaatttcccatcttttgatactttcaaagactgattcttttggattcaaatcctttcaatttcgttccattgaagaaaaacttaatctggttcgtgcttttcttgcccgagttgacgtttgcaggcaacaagaaaatgagcaaaaactggaaatctagctgctttcgggatcctgggggagttctgttccttcttgtgttgtgtttgttgtttcagaactttagtttgtgctgctctttgaatgaagaaggtaaagctcttttgaagttcaaacagggaatagtaaacgacccttttgatgctttgtccaattgggttaatgatgaagtggaagttaacccgtgtaattggtttggagttgagtgctccgatggaagagtagtggtcttgaatttgaaagacctttgtctcgaaggaaatctggtacctgagcttgcaaaccttgttcacataaagtccataattttgcggaacaattcttttcatggaatcatcccccaaggaattgcacacttgaatgaaatggaggttttggatttgggctacaacaactttagtggaccgctacctacagatcttgggaataatattccgctgacaatccttttgctggacaacaatgatcatctttgtggtttctctcccgaaattaatgaattgaagatggtttctgaatatcaagtagatgaaaaccaactaagtagtgcagaaaaagtgccaataagatccatcaaacgccatgctggccaaaataatggtgttcggaagctactgcaagttcgtactcgtgaaggt

SEQ ID NO: 18782 - DNA, 579 bp, Glycine max
gactcactagattttttcacctccaagtctttctgttcactatgttattactaaagggttcatgacattcgcttgaaaccttggtttgtatcaattgtagcactagtttgattttggtgccaagttcttgagctgcggtggtgctgaccctgaaaagttctccaagtccgacatgagataaggctgctgctgctgctgcttttcaaagatgttggagctggtttcaattagtagacaaatttggttgctgaatttcgtgttcatgtgtcttcaatagatggtatttttaaattgaaagcatagtgacaatttcttgaatgttgtttcttgacttttgaatttatctccaagacttcaaataagttggctctctcctacaatttcttaaatgcttatgttcaatattgagaatcaaacaagacttggtctcaggcacaacacgttttcaattttggacttgttctgatctgaatacttatatagaggcaaaaggggtatcctcttttcattatccactattcatacatatccaaagagaacaacatttcctttcaataacccaattagttgaagcagcat

SEQ ID NO: 18783 - DNA, 401 bp, Glycine max
attgctaaacggttcatgacatgcccttgaaaaaccttggttggtattaattgtagcactagctttgattttggtgccgagttcttgagctgtggtggtgctgaccctgaaaagttctccaagtccatcatgagataaggctgatatattggagctggtttcaattagtagacaaatttggttgctgactttcgtattcgtgtgtcttcaatagatggtatttttaaatagaaagcatagttgacaatttcttgaatgttgttgtttcttgccttttgaattatctccaagacttcaaataagttggctctctcctacaattttttaaatgctattatgttcagtattgagaatcaaacaagacttggtctcaggcacaacaagtttttcaattttggact

SEQ ID NO: 18784 - DNA, 366 bp, Glycine max
gcatcggagtttggaaaatcgccgggctttggcggtgggttcgaggtggaacacgaactttcgccaccaccgggccaaatcctctggggatcgccccaaaacacccaccttctagccttgctgagagctacacaaactcaaaaccctaaccctaaccctagtcccatgtccctcaaggtagaaggaaccctattgggccacatggtgagcactgatcagcccttgggttcaaacactttgctgagctaccgaaccttaggctatgatgctgttgcgcaaggtccttcttcgcttgggctgtctgggagaaacaatccagatcaacaacaacataatggagggttcctagttcgggaacattacaac

SEQ ID NO: 18785 - DNA, 552 bp, Glycine max
gaagtgtggaggtgcgtgcttttgtgggggcaaatagtagatagtagatctgtcgcagagcaaagaatcgtcggcgacggcgaggctgcactataaccgcgattaactatgattagccttcgccggagcgtaaacaagatcccggcgaaatcgaagcgattcaaatgccgattggtgaagttcgaggagctgccggagtacttaaaggacagcgagttcatattggactattaccgctctgaatggcccgtgaaggaagccttgtggagcatcttcgcgtggcacaacgaaaccctaaacatttggacgcatataggaggatttctcatattcgccgtgttggcggcgatgagcaccacctcggaactctggaatttgctcagatcgtccacggcgctcgggttgtctacgaccacggcggcggagatgaacgggtctaacagtgacgccttcccggtaatgtctcattacacttatttttaagttcattgcttcgcataataatagtgagtagtgattattgttgcaaaaaaagaggctatagtagtgcga

SEQ ID NO: 18786 - DNA, 375 bp, Glycine max
ttgtaatgtggtaagagtttaaatataaaaagttagatggagcaaacgatacatattcaatatatttatttgtaaatgacgaagtgcattctatttttgctgaataatgacggagtgcatttgcacccatgttctttttatcggaattgcacccatggttataatgtctttatattttatcaaaattattaaaatttcgaaataagtagaatttgtttgtttgcattttcatcaatgaattgaacttattgactttgtaccgaatatgtaaaattgtaaacacgctgcggtattgccgaatactccctcataggctaacagatactattgtaaattatatacataatttattatatcaatttattaagagtttta

SEQ ID NO: 18787 - DNA, 584 bp, Glycine max
agaacctacagaagggatcatatctaataattttcacatttatgtctaattgtcattttagtttattgtagtaaatttctaaggcatccattgcctaagaaatctcgggcagtaagtagacataaccgtaacgtgaataatcatcaataatggtgataaagtatctttcctttccgaaagaactaacatcagaatgtccacaaatatcagtatgcacaatttcaagaagctgagtgtttcttgtagctcctttctttgtatgttttgcttgttttcccttaatacaacccacacaaatatttagatccgtaaaatctagatcaggaagaatttcattatttattaatttttccatcctttctctagaaatgtgacataaacgtttatgccacaagaaagcagatcgttcattcactaaactacatttagtgccaacattatgatgcagagttaaaacagtcagcatacaaactgtctattttcaatttatataaactatcacaagaatatcagtaccaatgagatgattatgcttaaataaattgaaacatccattatcaaaattaatagagtatccagtaaca

SEQ ID NO: 18788 - DNA, 399 bp, Glycine max
gacctacaaacagtatatgtaggtaaaaccttgtattctaatttaaatcctccatattgcacacactctctcaatctctctcactcatgcttgtctttctttttcagaaccttccacaacctaagccactactcctcctccctccgccaaacaccaccgcttccactgcaacttacgccatctccctccaccgcaacttgccaggcaggactccatcaccactctcatcgacatcactaccacaccaaaaccctatcctccaacctcacctccgttctcaaacaactccaaaggcgactctgcgctagttttctcccccaatgttctccatgtttggatcctctgtttcgttgctccacctttcttcgttccactctcgcgccgttgatcttcttctac

SEQ ID NO: 18789 - DNA, 402 bp, Glycine max
cccactcgtccgcccacgcgtccgtcgagtagaccacagaagggatccctatacagggaagctttgagttaacttgagccttccacattgtcttatcttcctctcttccaaattgtcttctttgttccatggaaaatgttccaagtgaatcatcaactccaagtgcttcaatcaattgatcaacccaaataaagtacccacaatatccaacttcatcctgaaaagccccaaatagaaaccctaaatcaaaacccccaatgtgaaatcaaaaccctaaatcaataaatgtgaaatatacataccttattaattgaacaagtgaaaaacgcccttcctctgctaatatttgttccagcaacacgcctaacagcccttctaccacaaccacaaaaaagaacaact

SEQ ID NO: 18790 - DNA, 700 bp, Glycine max
  unsure (1)..(700): unsure at all n locations
gggcagggctctcctaagcagttgtcacatgttttccctgggaaacttcccatgactttggtttctaaatttgatactaccaatgaacgaatgagaaacctctattctcgtagaagtgaaccaaacactaacaacaatgctgataaaaaacaatatgtacttggcctaggccaagtacattttgcgtggggatgacaaccggacaacgctcatgataaaaaatattcccaataagtatacttcaaagatgcttcttgttgccatagatgagcaatgtcgaggaacttatgattttctgtatttgccaattgatttcaagaacaaatgtaatgttggctatgcattcatcaatatgattgatcctggacaaattattccattccaccaggcttttcatgggaaaaaatgggagaaattcaacagtgaaaaggtagcggtactcgcctatgcccgaattcaaggaaaatctgctcttattgctcattttcagaattcaagcctaatgaatgaagataaacgttgccgccccattctcttccatacagatggcccaaatgctggtgatccggagcctttccccttgggtaacaatattagagtgaggcctggaaaaattcgcatgaatggtaatgaggagaatggcagccaagggaatccttcatctttggcaagtggagaagagtctgngaatgaaacagat

SEQ ID NO: 18791 - DNA, 343 bp, Glycine max
ggtgtgcaactagaaagtctttgctgtggggctctgttgtgaggtgggcctacctgaaacaggagatcctcctatggtgacactgacctaacaggaagttgtgatcgtgttcggtgtgaaaaaaaggttgagaggttgatcttgattgatattggagtctgtgctttgtcttgagttaatggaatgagtgtgagttataacggtgatggtggaggtgcatgggtgtgaggcaagttggaggacgaccacaggtcttggatagtggtgtcttacttggccgacatgcaattctagctgggcgaagatggagggttcttctgggtctgcttttcacaattcttgc

SEQ ID NO: 18792 - DNA, 459 bp, Glycine max
cgacggctggataagagacaacaagggtatctattactgactgttaggtttactcttttgttttgtatgggtggacctattgtataggaatttgatgattgtatacatgtggctaaagccaccactgtgaacacctttgctctggatgacactatgtattttgtaaaactcccatattttggacagctattaaatgatgaatgtacttatgttcaaccttgttatttgaaaagaaagcattagcaaactttatttacaaaagagtttaccgatcgtattttattttattattttcacgtgacgacctaaagtaatggctggtacactcttccttttgaaacagcaaaatagtttagagattacgagtggtaagaaagaaatgactccgaatagagttgtgaactggccattcaggactctatagtgaggattttccttctaaacctagttatggtgaaa

SEQ ID NO: 18793 - DNA, 442 bp, Glycine max
  unsure (1)..(442): unsure at all n locations
aaccgagttaactcactaacaatcacatggcttctgaactcaccaaactgatccttccatggaaagttcgcttactcatttccctcctttccaccctcgccgacacctctcgccgctccaacgccaccatcaaccgccgcctctttaacctcgctgaccgccagtcactgccaaaccccacccccgtcgacggcgtttcctcctccgacgtcaccgtcgatcccgcccgcaacctctggttccgcctcttcgtcccctcctcttcctccgccaccaccctcccggtcttcgtctacttccatggcggcgccttcgctttcttctccgcagcttcaaccccttacgacgccgtttgtcgtctctactgtcgctcccttaacgccgtcgttatctccgtcaactaccgnctcgcccctgaacaccgctaccccttccaatacga

SEQ ID NO: 18794 - DNA, 387 bp, Glycine max
gaatgcacagtagtctctcatcttcggcactgctccacgatcctatctgcgacgccgctaatatcaaagtggggagattcgtatttcgtagcgctatccacctcctctttcggtcattcaatttcatctctgtaagaacttatgccttcaagactgctgggcagacgggctcaaggaaatgctagaggatgagactggttatggatttatatctatcactccattctttgtcaggtgctgattacacttcccttgcacactacccaaaatagtgtctaatctcctacattccctccttggtttcttaatgtgtgctatcatgacaccgctaagttgggagatgagctagtgcagatcatccttggtccaggtctggaacctggaatt

SEQ ID NO: 18795 - DNA, 206 bp, Glycine max
atgggttcacgtgtaattaaattctccttgggggagcgagacctggtttgggggggatgttgttgtcaaggttagatcactccaggtaagatttatttgttaacttagatcttatcttggattgatggattgaggtaaagccacgtagtgtgttgcttaaagctatgatagcacccaaaaaattacaaattctaacctggttacgt

SEQ ID NO: 18796 - DNA, 412 bp, Glycine max
  unsure (1)..(412): unsure at all n locations
aagtttgtgacttgtgcaaatacaggaagaaatacaagcacataggcctacaagcaggaaagagttggactcgcctaatcttacagggtcttgtttatctacatgaacatgatcctccagtaattcatagggacctcaaatgtggtaacatttttgtcaatggccatcttggacaagtgaaaattggtgacctgggtctagcagcaattctccatggttcccaaccagctcacagtgttataggcaccccagagttcatggcaccagaattatatgaagaagaatacaatgaacttgttgatgtgtactcatttggcatgtgtgttctggaaatgcttacatctgattatccatatagtgaatgtgctaaccctgcacagatatacaagaaagtgacatcggngaagctacc

SEQ ID NO: 18797 - DNA, 1016 bp, Glycine max
  unsure (1)..(1016): unsure at all n locations
aggggcactacagatggaggaccgtattggacggagatggcgtattcatctttggatggagatacacgtatggattagaccattgatatttgtctaactgcaatgattgattgatcgatgccattcatgggtctactggaattaccatctccaacaattacatgactcaccatgacaaggtcatgcttttgggccacagtgattcctacactcaggacaagagcatgcacgtcactattgctttcaaccactttggtgaaggccttgttcaaaggatgccaaggtgtaggcttgggtatttccatgtggtgaacaatgattatactcactgggaaatgtatgccattggtggaagtgccaatccaaccatcaactgccaaggcaacagatttgttgcacccgatgacagattcagcaaagaggtgacaaaacgtgaagatgccccagagagtgagtggcaggattggaattggaggtcagaaggggacttgttagtaaacggtgcgtttttcacagcatcgggtgctggagcctcctctagctatgcaagggcttctagcttgagtgcaaggccatcttcactggtggggtccataaccactggtgcgggtgcactcagctgtaggaagggttcccgctgctgattatgacccctccattaattccaaaccaaaattatcaaaagggagggaaggggaaacagaatgaccctattaaattaactatggtcatttctttatagttaggatgtatactttcctatcatttccttcctgcattcttttctttagttttttttttttttttaccattgttttccactatttgtcttcttttttttttctttagcttttttacttttgggtttcttctatggtctacttttgtctgattacaacctccgctgtaaacctcatagaaccaaatttgtgaatctggtctgtgagaaagcaagtgcagaagagttgatatatatatatatatatgatgattttacatgtntctatgttgaatat

SEQ ID NO: 18798 - DNA, 605 bp, Glycine max
tcagcaaagaggtgacaaagcatgaggatgcagcagagagtgaatggaaggggtggaattggaggtcagaaggggacttgttagtaaacggtgcgtttttcacggcatcgggggctggagcctcctctagttatgcaagagcttctagcttgagtgcaaggccatcttcactggtggggtccataaccactggtgcgggtgcactcacctgtaggaagggttcccgctgctgattatgacccctccagcaagcaactgtatctgcaggccgctccattaattccaaaaaaatggaatggaatcaagaatccaggggggagggaaggggaaagagaatgaccttattaaattaactacggtcatttctttaatagttaggatgtatattttcctatgatttccttcctgcattcttttcttttgttttctctagtttttttttttttttttttttacttttgggtttctgatttggtctacttttgtatgattacaatttacaacctccgcctgtaaacctcatagaaccaaatttgtgaatctggtatgtgagaaagcaagtgcagaagagttgatatatatgatgatgattacatgtttttttt

SEQ ID NO: 18799 - DNA, 562 bp, Glycine max
  unsure (1)..(562): unsure at all n locations
atgcaagtcactattgctttcaaccactttggtgaaggccttgttcaaaggatgccaaggtgtaggcttgggtatttccatgtggtgaacaatgattatactcactggaaaatgtatgccattggtggaagtgctaatccaaccatcaactgccaaggcaataggtttgttgcacccgatgacagattcagcaaagaggtgacaaaacgtgaagatgcgccagagagtgagtggcaggattggaattggaggtcagaaggggacttgttagtaaacggtgcgtttttcacatcatcgggtgctggagcctcctctagctatgcaagggcttctagcttaagtgcaagaccatcttcccttgttggttccataacaacaggtgctggtgcactcagttgtaagaaaggttctccttgctgacaaacaatcaagcaacttctcttctggcttattcattctttccaaaaaaaaaaagaaacagaaaagggaaagggctacatatatatagtggatctctagctntgtatttacttttccttggatttccatatttctccactct

SEQ ID NO: 18800 - DNA, 427 bp, Glycine max
gagagcttaaagcttagccgatctcgtggttctttgtacccctcaaagcaacatgggggttgccaattcctctgtcttcctacttattatttctctaagtttcttccagtcgctgagaatttctgaatcaaaattacccaaagaagaagttgatgctcttaaagaaattgtgagcacaatgggtgcgacatattggaagtttgatgctgattcctgcaatattgaaatgggtggagtaacactagaaccaccagatgaatcagagagaagaattggttgtgattgcagtcttgaagacggcactgtctgtcatgttgggaacatgactctcaagcgccttaatctaccggccatactcgcaccttaactggccaagctaaccttttcttcaatttgtacatttagcttacaattgctttaccggcac

SEQ ID NO: 18801 - DNA, 422 bp, Glycine max
tcccggtcgccacgcgtcgccaccgtcgtacgtgcagagacacagaagggaaggggagaagagaaaggcgcatcgcttaggtacagatacagatacagacacaacctggaaaaaattccgaccccagcccttcactcttctctctgcagcggaggttaggggttctttctttttttcgttttctcaatcttcacttcgcttgcgctatttattgctaattttttcgttctttgtgtgtccgacccaatccaccttcaatttctcgcttcgttttgtctttgacttgctttgacttttttcttcttctcacctccgagcatctgaaaccgttgtacatcctctgatttcgggttctttctcttcaataattgctcactttcgctgcaattgctacttttttttaaaaatctttttactatttc

SEQ ID NO: 18802 - DNA, 410 bp, Glycine max
aattcgagtggccgctttttttttttttttttttttttttttttgcaacctcagcctgggggaagcctaaacccccaactcttggaggggccaccaaccgccgcccgaattactggagtgtaggaaaccctccctttactcaatggatagcgcttatcctctttcaatcaaccaaatgaaaaatggagtggaggagaaagaggtctttattgattgaagaggctttgcacctaggacttataaagatccagaagaatgggtcttggctttcgaaaagatgaagatgccaagggttaagagaaaagaaatgtcttttgaacaaccaacctggcataaggattctagctcgcccaattagagcagatggaaattcttggacggggaaaagcggcactcgacatctattttat

SEQ ID NO: 18803 - DNA, 470 bp, Glycine max
ataagatgaaagactttatggtatttgtttggggtgggagtctagtatatgatttcccacaggctgttgtcatcaagtataatgtaattaattttgcatggtttcaggtcaccttaggaatttcaacgcttctttcatatgtacctgtttcactgggcactgcacatcaggctggagccttgacacttctgacatttatgttacttcttaatcacacggttcgaagaccgtctttgtcccttctcaaatctctgcctcaagttggaaaagcacactaattgtttcccgatattatattgcatcaaggcttaggccttttaagttgacaaaatctgtggctattattttttccatgctaaattttgcgttgagctccttgtccaattttccactgttggaatcttctgtatttgttttgtacatttgaagcatgaaaattcatgatgatgcaaccgatctgttgcttatgt

SEQ ID NO: 18804 - DNA, 390 bp, Glycine max
agtggttctttaagtagacatggaagggggcgatgctctcctagaacttaagtgtttgaatctaagaaaaaccatgattttcttgttaactcgaccacgttacaagcttaataaagtccttagtgatccatatcgtgtgtgtgattgcattgaataagatgatgtgcagagttggggattataacttcagtcgacttaaatgaaatacaaataactgaaacacttgtgtgcttgagagaaacactagcctcgtgagagtgaaacatagttgatctttctgtgatacttatcgtacttgctaacctacttcaatctctaagtgcattctttgcatgattccatcatgaaaaccatggcaattgtgaaattgagggttggaagctgaaattg

SEQ ID NO: 18805 - DNA, 854 bp, Glycine max
  unsure (1)..(854): unsure at all n locations
gactcaatcagacatccgagtaaaaagttatgggcgggggaatttgctcagagcttgagtaatccatttcgagcgtctcgatatattacaggtctcaatcagacctccgagtaaaaagtttctgtcgtttgaaggtgctcagtgcttcaacattcaatttcaagcgtttcgatatattacgggactcaatcagacatccgagtaaaaagttactgtagtttgaagttgctcagagcttcaacattcaatatcgagcgtttcgatatattacgggactgaatcggacatcagagtaaaaagttaatgtcgtttgaattatctcagagcttcggtattccatttcgagcgtctcgatatattacgggactcaatcagacatccgagtaaaaagttactgtcgtttgaattttctcagagcttcgataatcaatttcgagtgtcttattatattacgcgattcagtcagacaaccgagtaaaaagttattgtcgtttgaattatctcagagcttcggtattccatttcgagcgtctcgatatactacgggactcaatcagacatccgagttaattgttactgtcgtttgaatttgctcagagcttcgattttcaattacgagcgtctcgatatattacgggactcaatcggacatccgagttaaaaattatttttatttgatttttctcagagatttcgctttcaattacgagcggctcgatatctgatgaggacataaccaagggcaaggaccatgaagcacttgaaggtcccatgaccagaggcagacttaaacaagcccaacacgtcatagagacaaggctggtcatttgtatagctgccattgatgnatgatg

SEQ ID NO: 18806 - DNA, 376 bp, Glycine max
ggctccgcttggcaactttggatccccatactctttctttggaccatccttctctcagattggtctgtacggttttcagcttcaacacagttttgcaccacccaaccttggtgctccacaattttttggcaacatgcagcaaccacactttgctaatggcactactcccactccctggatgccatacttacctagtccacactttcagaacccagcgcctccttttggttatcaacccactatcccacccaatgatggcaccaccctccagtagcaacaaattccacctactgctaacatttcccaggcttagtttccaaattcaggtgcttcacaccatgcaaccaatgatccatataatctccttcagagcagt

SEQ ID NO: 18807 - DNA, 376 bp, Glycine max
gtccgtgcaaaagaaataagaaaatgagttaagcaccgtcaccatgtgtaatcattttatgatctagtttctgctttaagaaaaatgaaggaaacccaactattgtgggatgtaagaagacgatctccactcgccctagacggagaccaaacgaaacacaatgggaactacaaaataggatattgtttcagaggattaagttaaccatggggcttcatgagtggtgagcccgaagttataagctcccattggtgtttgacataagaatgtatacaatacaaaaagcacggatggaagcaaagaatgttggtcatcaagtttggcaagggacaaagtcatgttaaaaatagacgagttgatttcatctacatataac

SEQ ID NO: 18808 - DNA, 399 bp, Glycine max
cgtccggcgtgaggagaggtccgaaagaggacttcgctgcgcgccaaacattgcactgcgcgaaaaggttttctccctctgcttctatcatttccttcatgttgggtatttcattcactttttttccccatcttttttcgaatccctttctctaaaaatttttaaatgatacagtctggcttggtaggtcacacaagtttaaacattacattccgtaagcgccttttctaaaatcttcgattacattctttagttttcttttgagtatttaaagcccttaattcaaccgcgacgaattatgatgcttacgaggcaaatcggtttgtgctaacgtgtttgtatttatagatagcgtctctctttgagtctctgtaatgaatgtaattcagtttgtctatt

SEQ ID NO: 18809 - DNA, 723 bp, Glycine max
gatattgatcaatccatcatttccaattaggtaaagtgaaacagtaaaagagcaatggaggaggaggaggaggcggagaaacagaagaagcacttagcaatgctggaacgcctttccaaacgcacccaaagccgttcgcaaaaccccgattcctcatcatcagaatcctccacttcctccatcctttcacgcttcacccacttaaaatcctcgattgagtcccaactcgcccaatcccaatccatttcctccgacccctccaacctcaaactccacttcaatcaaatctccgaatcaatctccgatttagaaaaattcgtcgccgaaaactcctactccctaccctcctacgacgtccgaacctccctcaaaaccggctccgacttaaagcactccctcgacgacctcacttcccaacttctccccaaaaagaaattctcattcaaaaataaacccaccaccaagaaagaatacaaggataaggattgcgctattccactacccaaacaaccccctcaactctctacgctccttgcgccgcgtgactcgccggggttccgaaacaaaaccggtgagcttttaattgcggacttcagtgattccgaagttggggaattcaccgtttcggatctcgattcctgccaagtgaggataataggttctgtgagggcgcttttcgttcacgggttgaagaattctagggtttacgtgggccccgtgaca

SEQ ID NO: 18810 - DNA, 445 bp, Glycine max
agtctcttgttttgttggaaacaatgtgtttaaggaaaaagctgatcaaccagtgatattctcttaacaaatattctaaggccttatctttttcttgatcttgtttgcttgacctttaatcaatctttaatcaatttctgtttgtttaaccttaaatgtttgttgaaacaatcttatttgattatacttttggcatcatcaaaacctgtattcatacatttacagaaataatcttacctggaaaagagagtacaactctagtgagctgtttataattatttttttttctggaatatagcatatcccaaacatattgtcccccttttcttattatatctttggtcagtataatgtcattactgatttattatcattttttaatcatttgaaattctttgctttgcaggatgagagtgttataactttgcgggacctgaaaggtggt

SEQ ID NO: 18811 - DNA, 340 bp, Glycine max
ttcgaacgttgaaggttattgggtgctcgggggattgggatgagactctggttagggttgggtgttccaacaatgggttggttgaggttcacttggagaagcttcaggttaccgatgtggggcttgttgccgtgtctaaatgttttgggttggacactttgcacgttgtgaagaccgctgagtgctccgatgtggggctttgtgcggttgctgataggtgtaggttgttgaggaaggttcacattgatgggtggaggactaataggattggtgatgatgggttgcatgcgattgccaaacactgtcttaatttgcaagaactcgtgttgattggtgttta

SEQ ID NO: 18812 - DNA, 1009 bp, Glycine max
  unsure (1)..(1009): unsure at all n locations
ctcacgaccctccgccgccgcggttgcaagcagagcacaccatcgaaatgggcgaagcgaaggcgttggttccggaatcggtggtgaagaaggagaagaggaacgaggagtgggctttggagaagaagcaggaactcgatgccgcaaagaaaaagaggttcgaaacgcggaagctgatttttaacagagccaaacagtactcaaaggaatacgacgagcagcaaaaggagttgattaggttgaagcgtgaagccaagcttaagggagggttttatgttgaacccgaagctaagctcttgttcatcatcaggatccgtggtatcaatgccatggatcctaaaacaaggaagattctgcagcttctgcgtttgagacagatttttaatggcgtctttcttaaagtgaacaaagctaccgtgaatatgctgcatagggtagagccttatgttacctatgggtaccctaatttgaagagtgtaaaagaattgatctacaagaggggctatggaaaagttaacaagcagagaattgccttaaatgacaactctattgtggacaagactttggggaagcatgggatcatttgcgttgaagatctgatccatgagatcatgactgttggacctcacttcaaggaggccaacaattttctgtggcctttcaagctcaaagctcccctgggtggtctggagaagaaaagaaatcattatgttgaaggaggtgatgctggcaacagggaggattacataaatgagcttattagaaggatgaattagttttttttccccataccgttagtgttaattttgacgctaaaacactctttttgtttatgcttttattattttgaatgatgtatgtgctgattgagatattaattcgttgcttgccattcaatgaaatgttccttagctcgtgcagatcaactgtgctagtgttannnnnnnnnnnnnnnnnnnnnnnnnnnnnnnnnnnnnnnnnnnnnnnnnnnnnnnnnnnnnnnnnnnnn

SEQ ID NO: 18813 - DNA, 525 bp, Glycine max
tgcaatgaaaatgaaacagagagtgaagagctcaatgatatttggaccgaggatgaaagaaggcaattggaagatgcactaaggttggagtcgacagacttgaacaatgagagtgatgaggtgatcattgggcatcgtcacagctgttatgaagaaagagaaattcctattgaagatggaaattgtaacaaaagtggagaaaataagcaagaaaagaaaggatggtttggtggatggaggaaaaaggattctaaacctgaagcatcaaagaagattgctccaccgagaagttctctctgcgtagaagaaaaggtgagtgatttattgggggattctccttcaagaaatcagagtaagccaggaagacattctgttgagatagctgtgaggggtgatgagtcacggaggagaaaagatgccaaagcttcttctgcatatcctgatagcagaagtcgtcaaaaggatggaaatcgcgaaaatgaatataagaaagggttgagacctattctctggctttccccttac

SEQ ID NO: 18814 - DNA, 1068 bp, Glycine max
ggggtatatcattatcaccaaaaaccctttgtgtttgagcttccgacaagtcttgatctccgctcatggcttctccgcgagctgcagaaaacaccgagaatagcttggagaagatcaagcgccagttcgcttccgcttccggtagaaacctgttgcaaggaccacttctcaagagatctgaaaccctgagaaaatggaacgagcgttgggtcatcttggacccgactacggggagaatggaatacaagataagacgaaatgaaccttctgttaaaggaacaattatatttgacgccaatagcaccatcaccatatctcccgtgaatttccacgggcttccaaagtacgatgggtgctgcttttatattgggacaccacagaaaaaggattacttcctctgtgcagagactcctggtgcagctagagcatgggtgtcaactttacatgcaactcagttggttctaaaagcccataaagaagctgtgaattccttaagtgggaatggctctacaaaattaggaactgttgcaacagttgttgctgcagccaattcaacagccttggaatgttcaaaagaaattgaagcagcaatgcagatttctttgcgaaatgctctgggaatgatgaataataggactactgatggtcctatggatgatttaacaatcatgaaggaaacacttagagtgaaggatgaggagctacagaatttgtctcgagaccttcgggcacgtgattcaactataaaagatatagcagataaactctctgagactgctgaagctgctgaggctgcagcatctgctgcttatactatggatgagcatcggagaattgcttgtgcagaaattgagcgtttgaataaagattctgagaagcagcaagagctgtttacacagaagctgaaggagtctgaagaaaagattgggggcttaagcaaagaatgagagcaattaatcaggcatagagatgctgctattcatgaagcaaatatgtggcgttctgaactggcataagctagagagcatgatgtgatcctagaagcatctgtagttagagcagaagaaa

SEQ ID NO: 18815 - DNA, 677 bp, Glycine max
tggggcctacccacttgtgtctgcctcttctgaaacgccactatttctgctttctctctcattaataataatattattgccttacactttttccacaatggagttgggaagcatactccattttcttcaggacaagaacattttgatcactggagccactggctttcttgccaaagttttgttggagaagatattgagggtccaaccaaatgttaagaagctttaccttcttctaagagctgcagatgccaaatctgccactcatcgcttgaacaatgagatcatagggaaggatttgtttagggtactaaaggagaaattgggtgcaaattttaattcctttgtctcgaaaaagttgactctggtacccggggacatctctcgtgaagacttgggattggaggattccattctaagggaagagatttatgatcaaacagatgtcattattaacttagctgcaacaactaactttgatgaaaggtatgatatatcgttgggcctaaatacctttggtgttaagtatgtcatcaacttcgccaaaaaatgtaccaaactcgaggttcttgtgcatgtatcaacagcctatgtatgtggtgagggaggccgagaagggctcatattagagaaaccatatcatttgggtgattcactgaatggagtgtctggattagaca

SEQ ID NO: 18816 - DNA, 406 bp, Glycine max
gggggcttatcgattggccgattttagtttttaagatcttgagagagaaaaacatagtactgaagacaagtctcatgttagagatgtacaaacgagaggatacaattatacaaataactgtattaaaaaaataacaaataagctgagttagagattttagaaaggtggacacgattttcattattgatgtgtggtccagtccgtcggaagaaacatgttgtcgatgctatgtcctattactctggaccatagatgttggaaagttttggtggacccatttgcattctgggataaaaagaatttaggttaaattcggagggtcttaactctttaagtcttatatatactaatatacttatgaaatgatcgaggattacttattctgaatcctgtcgtatttcgtacg

SEQ ID NO: 18817 - DNA, 764 bp, Glycine max
aaagttacaggctaagattttatatcatgaacttctcagaggtattttgctccatccttagtttgaatgagcaaaatgtgatgaatttatttggtgagtcatgtcaatgaaagtcaagaaatttgtaatgccacatttaccatggtacttgtctgctgctctttctgcatatggatatccatggcctttttcagtgacaacatggagcagcacaggaccagttgttttagtacttttaacttcatttagaatggacacaagatcatctatattatgaccatcaacaggacctatgtagtaaagtccaagctcttcaaatagtgttgatccagaaccgctgatcatgccacgcgcatattcatcaacttttgcagctaactcatgcattgggccaccaatttgtttagtgactccctgcaaaaatctcatttaataactgtgcaagtccttcatagagagacatgagaattgtattgctcaccttagcaacctctctgagttctctaagaggtctgtttgattgtaacttactgagagcactactcaaagcacctacaggtggtatgggaccatcgagattagcagttggtagggagacctgcttgttgtcatttagaataacaatcatgtcggaatcaagatatccagcgttgttcatggcttcataagcttgaccagccgtcatagcaccatcaccgataacagcaactacattattcttgtctcccttcagatccctcccaacagccattcctgtttatccc

SEQ ID NO: 18818 - DNA, 467 bp, Glycine max
  unsure (1)..(467): unsure at all n locations
gcacgcattgccttccatccatcagggaagtacctgggcactgctagctttgacaagacatggagattatgggacatagaaacaggagacgagttgcttcttcaagaaggccatggtagaagtgtatatggtttggctttccacaatgatggatcattggctgcatcttgtggactagactccctggctcgtgtttgggacctccgaactggaagaagtatccttgcactggaaggtcatgtcaaaccggttctcggcatcagtttttcacccaatggatatcatctagccacgggtggtgaagacaacacttgtcggatttgggatttgaggtagaagaaatccttttatactattcctgctcactctaatttaatttcacaagttaaatttgagccacaagaaggttactttttggtaactgcctcgtatgatatgacggctaangtttggtcaagccgtgactt

SEQ ID NO: 18819 - DNA, 488 bp, Glycine max
atgttccggttatagatgggaaaatagttggtatgattgccattgtagatgtggttcgagcagtgatggagcagcagagtggagaattgaagcgactcaatgactacatcagaggacaatactattagcaaaagaattcaagcatggatacggatttgatgacacgaacgaaattcatgtaccaaaacagaatacacctttatatttcataatagattgaatttgattatattttataaattgctagtaacaggtgaataagtttccttttatttttttagaagaaaatcttttccgaaaacgtaaattataaattataaagttgataatctccattcacaccaaaacatgtaacattcgagctgtgacactaagtcagttgaaaaatgatattcaatattctctttccccttttccttcagtcccaagccttagtataaatttgttagtcatccccccacactaaaattgggatttctatctagccc

SEQ ID NO: 18820 - DNA, 355 bp, Glycine max
gtacgtcgagtggtacaattcgcgtggcattagcgcacttaccttcgtcgtcgacgtcaaggagcttcttcgattcgacctcggccacgtgctcgagacccgaatctctctcctcgccgaccacctcgtttcttgggtgtctcgcgaggagcacgatgggagggaacgctgtctggtttttcacactttcagcaacacgggttggtctgtttatggttacattcttgcccgaatgctgggtagcgaggaactcatggagaagattaagggatgcattgctgattcgggaggaggagaacctttcaatcctaacgtatgggctgctgggttttctgcagctatattaaagaagcgc

SEQ ID NO: 18821 - DNA, 535 bp, Glycine max
ttcgttcatcaatcagttagttgttattttaaagttttaaattcgctctatgcacccttaggggtcccttttgttgctttacacatctttatcttcattcttctaccatcaatgatctcatttccttgtgtaaagcgagtttcgaccaatcgtttgtgccgtaatctcattttatcattgtaaaataaagttttgatagatcgttcgtgccataatctcattttatcattgtaaaataaagtttcaaccgatcatctacttcacaagttgtcttttaatgagattgaaagtaaataagtgaaaccaaagttaaaatcaacatgtaatcgagcttttatccacaaaagtcgcttgaatctgtttaaggtctaacgccttatcggtctcttttacttgtattggttaaaatgaacctttcaaaagtttaaaatcaactctacgcataactttcttacttctaaagaactacataggtctgagttcctcatcgcacttgaggatacgtaggagcaaaggtcttgctcttgtcgacccc

SEQ ID NO: 18822 - DNA, 532 bp, Glycine max
cggacgcgtgggttagagcaacgctagcattagcattagcatagattttgcaacgctgtcttcatccgatatcaaccactctcaaacaaaccgaacactcgtcctctttctatctcatttcatttattaaacaaaaccatttttcaacaacataattcggacaccctttatagcaatggagttggacctctgatttctctaactctagctaggattgagaaacaagaacaatatcaacgacaacgagttgaagagagtggttttttcaacttttaataatggcggtggagtatcagtgttgtgaaactcagtttttcttacggttattgataattctgctgcttgtgttgtttgctggattgatgtcagggctcactttaggactcatgtccttgagtcttgttgatcttgaggttctcgctaagtctggcacccctcaggatcgcaaacatgctgcgaagatattacctgttgtcagaaatcaacatttgttgctttgcacccttctaaattgtaatgctgcagccatgga

SEQ ID NO: 18823 - DNA, 378 bp, Glycine max
cagaaaagggtgttgtgaatgttttgtaggtatgggcgtctttgctattgtatcgccaaatattggacgagatagaagctaatgattacaacaatttcactagaagggcttatgtgagcaaagccaagaagttactttctttgccagctgcatatgctagatctatggttcctccatcaaaaaagttatcttctgtaatgaagacataagtcgagcgccttatggcattctgtagaaaaatggataagcaggcccgcagaacagggagaggcgcaatttgtatatgataaaacaaggcatgatattagtcaatattggattttgatattcatatttccccgtatttttttacataaaaaaagtttggactaatatttt

SEQ ID NO: 18824 - DNA, 395 bp, Glycine max
gactgcgaagacgacgtcgtggaaggcaaacaggcaaagagaacttggcttgttggagactgagctgtgtattgtgtgggttcccctggccgatagtacctaaatctcaatcgcgctttagcgacagcagagatccgatctgctctgcacctgtctctcaccacagtgtcgccagagaaaggaggatatcacatcaataacacgatgatgatgatggatccgccgatgacgccgctgaggcaaatgctattggaggagatcactcccgtcgtcatgctcctctcaactccttccgtcgaacaagtttccctcaagaacggtctctccttcctccagacgctaacgccgttctgctccttcaacaacatcgacgttactgttaggaccgccagtga

SEQ ID NO: 18825 - DNA, 280 bp, Glycine max
cagagaacctttccttttagattgaactgtgtattgtgttctgtgcgttcccgttggccattgacggctgcagtgatccgatctgctctgcatctcccgcacaccacagtgtcgccggtgatgatggatccggcgatgacgccgctggtggcatatgctattggcggatatcactcccgtggtcatgctcctctcaactccgtccgtcgttgaagcttccctctagatcggcctctccttcctccagacgctaacgccgttctgctcctacaacaacatc

SEQ ID NO: 18826 - DNA, 579 bp, Glycine max
attggatcgagggtaccagatgagactgcttaacgcaacctcgtgtttcgttcttctctggtgactggtgagtgcggcgacgctggcctgcagtggtgcgacttttcaccgacgacgctcgttgtgcaagcagctaagtaccacgacgctcttgtgcgagcagcttctattcgctggacggatggtggttctacgattaagtactagggttcagacttcatgagttttaaacaccgtgtataattgattttggtggtgattccaattcggaagtgcaaccgcagagagaagaatgaacaactctattatggcttttgttctgctaatattactttcggcgttacgctactcaagcgccgaacaagctttcgatgttcgcaaacatctttccactgtctccagatatggagctgtgaaagacatcgctgacactaacttcgtgccttctaaaatccccgagggatgtgttccgatccatttgaatctcgtggcgaggcatggaactcgatctcctacaaagaaaaggataaaggagttagataatttgtcagagcgtctggacattcttgtaagggatgc

SEQ ID NO: 18827 - DNA, 572 bp, Glycine max
tgcaaaaggccaccgaagggggttaccttggggattgagtgggtggtacctaaaatcttggtcccaatagcatgtctggcatgggcagttctggttcctggcaacgccacacggtcccggctagaaagtgctggtctggacaacataacttcgagtgacattgataaactctcaatttcaaatgtccatagtacatctgaaaggttttgggcacacatactagttgcttatgcatttacattttggacatgctacattttactaaaggagtatgaaaaagttgcctcaatgagattgcaatttcttgcagcagaaaaacgtcgccctgatcaatttacggtgctcgttagaaacattccaccagatcctgatgagtctgtcagtgagcttgtggagcacttttttctggtcaatcatccagataactatctttctcaccaggttgtttataatgcaaacaaacttgcaaagttggttaaaaagaagaagaagttgcagaattggcttgtatattatcaaaacaaagttgaaagaacttcagaaaggcctcaaataaagactggcttccttgg

SEQ ID NO: 18828 - DNA, 581 bp, Glycine max
tgcaaaaggccaccgaagggcctcctctaaaatttggactctggcctcaggtttgggccccacatactaggtgcttaatgcatttacattttgggacatgctacattttactaaaggagtatgaaaaagttgcctcaatgagattgcaatttcttgcagcagaaaaacgtcgccctgatcaatttacggtagagttgatttttctccattttaatgaggagtttttctatgtaatacttctttgttgtatattgcgcctgttttatctaccgcactcattttttatcagtttttggcagctttgagatgaagcgatgaaacttgatgttttgtttcttgtgttagaggtggtacgctacttggtcatttttctaggcagaccttgatcgtatatatcatgattttctgtacttaacaattctgtagattattggtgaggatttgctggtcataggcaagcacattaataagctagctatgtatatcaatatataagcaaaacaatggagtgatgactgttatgtggcttttggatgtatggaaggcacataaaaagttaaaggactttgaagaagttatat

SEQ ID NO: 18829 - DNA, 760 bp, Glycine max
ctttcttcttagttttcctttcggtcgagctccatatttcacagccatgttgccaagaagtagaacccttcctagcagaatccaccaaggaattatagaagagaggcacgatgtcaggccctacgtacaagttgaagtgcgacccaataatacccaaacggagacccaagcgatgaatatccagtctaactattccaagtgcttcgatgatgatggtcgcttgaagagaacaggaacattttggatggcaactgctcatatcatcactgctgtgataggctcaggagtcctttcactagcatgggcggttgctcagcttggttgggttgctggacctattgtcatgtttctctttgccgtcgtcaatctctacacttccaacctattaacacagtgttacaggaccggtgactccgttactggacacagaaattacacctacatggaggcagtcaactccatcttgggaggaaaaaaggtcaagttatgtggcctcatccaatatatcaatctgtttggagttgcaattggatacaccattgctgcctctgtcagtatgatggccataaaaaggtcgaattgttatcacagcagtcatggaaaagatccctgccacatgtcaagcaatgggtatatgataacatttggaatgcaggagtgatatttgcccaaatcccagactttgatcaggtgtggtggctatccatagttgcagctatcatgtccttcacttattcttcagttggattgagtcttggag

SEQ ID NO: 18830 - DNA, 518 bp, Glycine max
ctgaccctttggttgtcccaaaactagtttatttgattgtcacaagccaagcacctggaaattggggatcttttgcccaacaaaacgggagcaataatgtcatgtattggtatctcaagcaagaaaatgtgcttggatgacaagcttgaaaggaaaatagctgaaatgagaagatataaatttggacaaagcaaattgaaatcagttgatagtgtagttatgctgttccctatgttcaaggagagactgaaaacattaagaggaatgtttgaacagtatgatgaggattctaacggatctatagaacccaacgaactaaaaaagttcttagaacatcttgaacttcatcttaaagagcaagagattgagcatctttttcagtactgtgatcttgatggaagcaagggcatacagttcaatgagtttatagttcttctatgcctcatccatctcctagcagaaccttcatcctctgatatttcatccaaagctgagttagcacaggttggagaaatttt

SEQ ID NO: 18831 - DNA, 400 bp, Glycine max
tttgtgcttcaaatatgcgttcattaaaagaaaaatgtactttgcatagctcaatgtgtagctttaagtggcgttaggagtgaggaatctttcattctcaattaagacttcattcgtgcaagggtcaaaatcaattttgaccaaaagctaagaaaaaaaagtgtatctggttaggagcgagtgaggaatctttcattctcaattaaggcttcattcgtgcaagggtcaaaatcaattttgaccaaaagctaagaagaaaattaattattttttgacgcaacaaataataactttagtagcgaattcataatgatactatattcaacatgattttctaacacaaatccaaacatgcttaagaattattgccatttaatgtctttcgtaattatgacactac

SEQ ID NO: 18832 - DNA, 397 bp, Glycine max
gaagtttatctctattaatatttgatatcagactattagattggggacttcatttgtagaactaaagacatagagagtagataaatatttaatggttgtttatgattattaagtagcttattatgcattgtttctgcttaaaatgtctttaacgtgttgaattaccagatgagttgagaacatgggtttcaagtatttgctggctgtgacgcgtgtgtgtgcttggtttggatccttggttgctacaacttcttctggcgatgggttaatgagggttagtctaaaaaggacgagcttagatattagcagccttaattctgcaaagatcgatgaggttgttgatcatttaaaagcaaatggagtgtatctgaagaaatatcttgatgcacaagaattt

SEQ ID NO: 18833 - DNA, 773 bp, Glycine max
aaaaccccaagcccatctacatactcctcttagtgaattttttaatgtggaggttactgctttgtcaagctatgaggacaaggaggacaagttcaaagaggaggttgctcaattacggcagcgtttcttccattctatagcgcctggaggtctggctggtgatcggcgtggtgttgtgcctgcttctgccttttctattagtgcacaacaaatatggaaagtcattcgggaaaacaaggatctcgatcttccagctcataaggtaatggttgcaacagtgcgttgtgaagagattgctaatgaaaaacttaaccgactacgctctgacaagggttggttggaattggaggaagctattgaattgggtcctgtacgaggttttggggaaaagcttagctccattattgatgcctgcctttcacaatatgatgaggaggcaatcttctttgatgaagctgtgagaaatgcaaaacgaaagcaattggaatcaaaggctttggatcttgtgtaccctgcttatacaacattgttagggcatatacgctctaaagctctagatgattttaagactaagctggaacaatcactaaacaatggagaagggtttgcttcatctgttcgcacttggactcagtctattatgcttcagtttgacaaagcatctgctgatgctgctgtaagacaagctaattggggtgcttcaaaagtgcgagacaaacctcaccgtgatattgattcacatacttcatctgtgtgcagtgcaaaactattgg

SEQ ID NO: 18834 - DNA, 385 bp, Glycine max
aggtttggccaagtgatttaaattaaaaaagtgtttctcaatggttttactctctggtaatcgattaccagaggatgtaatcgattaccagtggccaaatacgttttataacagctacaaaaatttgaattcgaaattttagactgtgtaatcgattacacaattttggtaatcgattaccagcagttagtaaacgttttaattcaaattttaaaagctgtaatcgattacacaattactgtaatcgattaccagacaggattttcagaaaaataatttcaagagtcacaacttttcaaagtctttattcatgaccaccaatggtctatatatatgtgacttaaacacgaaattgctctgagattttcagaacaacaagtgttta

SEQ ID NO: 18835 - DNA, 547 bp, Glycine max
ggcaagttgtaagtggtaactctttcaactcagccgtgcaagttttgttggcagcgcacgaaggaaccatcttctcttcgttttccttttcttctcaatcacacccaaatcccttccttccttcttcgctattgccttctctttcaggtgcaccttccagtaaagcaggagtaggataattgttgaacatagatgaaaaggtgattgttatgtctggactgattgaaggacttcctgatgctgttgcaatcaggtgccttgcatgggttcccttctacctccatccaaagttagagcttgtctctcgtgcttggcgagcagttgtccgtggccctgaactatttaaagctcgacaggagcttggttcgtcagaggatttgttatgtgtctgtgcttttgaaccagagaacttatggcagttgtatgaccctctgcgagatctctggattactcttcctgttctaccctcaagaatcaggcacctttcacattttggtgctgtctccactgctggaaagttgattgtaattggtggtggaagtgatgc

SEQ ID NO: 18836 - DNA, 490 bp, Glycine max
ttaggacaacgttaacattggcttctgttgcaagttgtaagtggtaactctttcaactcagccgtgcaagtcttgttggcagcgcacgaaggaaccatcttctcttcgttttcctttttttcgcaatcacacccaaatcccttccttccttcttcgctattgtcttctctttcaggtgagctaaacactagcatagtagcatgcatcattgtcataaacttgttgaaactgaagtcaaaacttgatcttgtgtgcgataaggtgatggacctctttatttacaaggtgcaccttccagtaaagcagcagtaggataattgttgaacatagatgataaggtgattgttatgtctggactgattgaaggacttcctgatgctgttgcaatcaggtgccttgcatgggggtcccttctacctccatccaaagttagagcttgtctctcgtgcttggcgagcagttgtccgtggccctgaactatttaaagctc

SEQ ID NO: 18837 - DNA, 390 bp, Glycine max
atactccaaaaactgcagtattttagaattagtgagaattaggaaaaatcgattttgaatcagtctttttaaaaagtaaattgttttttatttaatctaaaatattttaaatataaataaaaatacataaatattttacataattatcaattattctgttaacggttattaatctttatcttgtgaaccatataattaaattatttatacaaattttataatttttcagaccctaatcttactattttattacttaaaatattatataatattaaaatatataaaattaattcaacatgattcaacacgtattgaatcattaaagcttaaaccagtgtcttcatcaatttactcatcagttcaaatttaaacatattggattatatatta

SEQ ID NO: 18838 - DNA, 407 bp, Glycine max
aggtcatagtataaaccaacattagaattttcagctcaatgaggcaagattaattattttcaaaataaaataattgtctttacatgaaattgatgcaaagtatgttgttatgcctttttatgtgtcctaaacattaataaggccaattatgttgaaagcaactatagaaatattgcatgtatagaaagtaggaaaaaaaacagaatgatggtacacatatccaataggttggtaattcagatatgcttatactttctttctaaaattgcatttctttgaatttcctaaaattgcattttttttctttcccttgaacagtcactattaccaatgggtaaactataaaattaaatgtatagtataattgtatacatttaatgataaatatgtaaaacttattaaatgat

SEQ ID NO: 18839 - DNA, 394 bp, Glycine max
gaagggattgtcttctggaattccggcaattgctgcttttggtctttcaaaataaaaatgctaacagttttatcattcaaaaggaaatatgttcaagcgtcttttaatatgaaatttagaagacgattttacgttattataaaactaacaatttttatccttaaaaaaaactaaattttaatttatttatagttaaaatcactcaaactttaaactcgtttttttttttactccgcttggatgattgaagccacattatttagtcttggttttttttctagaagcaatgagactaaccattaaagtatagaaattatcaagataggttttgtcttttctaacaaaatcttatatataatatataattgtgttggtgagatgattaattaaatgt

SEQ ID NO: 18840 - DNA, 576 bp, Glycine max
gggggccaagactgttgtcacggatgaagccacacacactgagagaaggcttcaccaaatgatgtttgctgatagggattatgaacgagttaatgatgatgatgacttcgctgagaagcaaaggcctaatgtgaatgttgtgaattggtctgataaagattattctgtggttactattcagtgtaaggataggccaaagcttctctttgacacagtttgtactttgacagacatgcagtatgtggtttttcatgcaaacattgatgctgaggggccagaagcatatcaggaatactacatcaagcatatagatgggtcccctgtgaaatcagatgcagaaagacaaagagtgatacaatgtcttgcagctgcaattgagagaagagtttctgagggtttgaagctagaactctgcaccaccgacagagttggacttctatctgatgtcacacgtatcttcagagagaatagcctcacagttacaagggcagaagtggccacaaaaggaggcaaagctgtgaacactttctatgttcgtggtgcttcaggtttccctgttgattccaagaccataga

SEQ ID NO: 18841 - DNA, 167 bp, Glycine max
gagtccttgttccttgtctcaaaaacaaagtttttacatttcatataactctcatcgttaattcataatgacatgcacggtccctagatagtaaaagatgtgctcggtagcgtgccggaaaaattgaattgtcgaaatctttctaatgtattttccctgatgggccc

SEQ ID NO: 18842 - DNA, 390 bp, Glycine max
aattcgagcggccccttttttttttgtttttttttttttttttttttctctattcttcttttgtgttggtcaccttgatcttattttaatggttttgatttgagattgaaaattgttggagtggaattttgatttttccatgcgaagatctgattaaagcagttaagttcatttagtaattaaattaattaaactcacatttcttaagaatttggataaaattgctgaaaggcataactttgcatgcatgtctgcatttctttgtttttattgggcatggttcttctagttttaagtttattatttttctaggcttcacaaaaattgagtatcaaggagttaaagaatttaagacaaaataccaaattaaagtagatcaatttttttcat

SEQ ID NO: 18843 - DNA, 405 bp, Glycine max
catcaagctgctggagtttccatttatgagtaatagcaagagtcaaacgaattttgacagtaacaagtttgattacaggtgtgaaagtctcattgtaatcatacccaagtctttgatgaaagcctttggcaacaagcctggctttatatttgctaactgtaccatctgggttttttttaacccttaaaacccatttgcaaccaatgggagactcttgagagaggtaaatcaacaagtgtccaagtctgattgttaagaagagcatcatattctgctctcattgctgcatgccagatgggacatgcaagagctgactttgttgatttggtcagcatgagtaacgagtgtaggttgaattctgggtttgacaatcccagctttagctcttgtgcacatagagtgaat

SEQ ID NO: 18844 - DNA, 392 bp, Glycine max
ggggttccatgttcgcacggagcaaaaccaaaaacacggtgtggcgctgcggatctctctctcggtcgttgctctccgccgcgagaaccactccaaatcgttcctccatttctctccttcactgtccttcttcgccttccctacgctctcatcttctccaccctcgccgtcccctcattacactccttaggactgtgggaattctcgggtgcacgtagtcgctgattcctctacacagcgctgacgcctccgctcgtctcacttatcacatttccatcgaatcgcgcgcttgctgcaaattctcgcagggtacttgttccttctaaatttctatctctcttgccctaattaggcatgctttctgtcattatgatgtattttcattattatat

SEQ ID NO: 18845 - DNA, 414 bp, Glycine max
gtgctgaatgcacatagtgacatattctctcctttgcttctcaatatattccagagctgctttgcttaaaatgttttctccctatggaaagataatttctgaggacttcttatggcacacgcgtggcccaaaacgtggggagccacgtggttttgcttttatccagtatagcacaaaagaggtaagttgattgcatacattagttacttcactttctagcaatttctgatttccattgttaaagtgagaatgcaggaagcagaattagccaaggagaaaatgcatgggaggttagcttgcagccggccattggtggttcgtcttgccggtgataagtgcatgttggaaacagttgatagctctacaaaagcagctggtgaagggcacaagatgcatctcactggtggtggtggt

SEQ ID NO: 18846 - DNA, 279 bp, Glycine max
aaccctaattcgctgctttcattctatttgctacaatcgaaacccccaatttttatagtacgggtgatgtacattctatgattcagagttttggttgaaggttcacttgtattgtttgccatcatggatccctctgatgataggggtgaaagtagactctatattggtaaccttgatcttagaattacagaagctgctttgcttaaaatgttttctccctatggaaagataatttctgaggacttcttatggcacacgcgtggcccaaaacgtggggag

SEQ ID NO: 18847 - DNA, 655 bp, Glycine max
gtctctatatatataagagacattataactttcagtttcaaaacaaagaaattcattactttgatgattaagtattgttgttggtgctaagggtcgaaggttttaatcttatttatttaacattttgataatttatttgtctattttgcatcacgttacaccagcatcaagtcaatgtcatgcataagaaccaccatgcatttaactcatttttctaaaagtcattttcttaagttgttcatgttctaaacaaattagttatcgtgagtgtaaaataaatacaaagttttttaggcaaatgttggcccaaattttcaaggcaatgaacaaaatttgtgtctatttaataatttaaacaatcattttaaaacaaaagatgatcataatatgtgaagaccaatataaatgaaagaacgtttctattgttttatttttttaactttatttaaattaataaaacagaattttagtcccttattttgttgtttttcaagtttaatcctcgagtttaaaatgttttactttaatttgttaaagtatgagttatactaaattggttattttgtcaaaatttatcacattaatttaactaatttggtgtagcaagacaaaaatttaaagatattatgtcaatcaaaccccacactattaatgc

SEQ ID NO: 18848 - DNA, 410 bp, Glycine max
ttttcccttatcttctatcctctcctctcttgctgataattaataatatctggggtcacggtcttgccttgcttcattaacaacttgtgtgtttagattatacttatctcactcaaatcatggttcagagggggcaaatttgattttattttcaattaccatgtttggcataattttatttgggatatgtgctacgagattttggtgtcgaattatgtttaaactgaggtaagaaatagttatgttttagcaccgcattagctttgtaaaggaaatactaatactaataaacaatatgtttccggtgaaagcatttatagtatgctcatgattgtttttcctttttttatagacgcaacactagaaaccaaaacataaagggaaatcatgtacataccatttgaattaac

SEQ ID NO: 18849 - DNA, 406 bp, Glycine max
aggggtaaggcatggaattgtgatgttggatcttgagatcctcacacatttccttcatcatcttgttatttaggttggtggcattgatcgcgataatcttcctgggcaacccataccagcagattatctctttcttgatgaacttgaccaccatgcttctcgtcacgctagagtatgaagcagcttcaacccacttggtgaagtagtcgatcacaaccaagatgaagtgatgttccttcgaagccttgggcttgatggctccgattacatctgttccccacatagagaagggccatggcgctgccaatacgttcaaaggcatgggcagagcattgacattgtcagcgaaagcttggcacttgtggcatttccttacacggatgcaacattcgcttttcatggtgag

SEQ ID NO: 18850 - DNA, 684 bp, Glycine max
ttctcgagccgattcggctcgagctacacagtcaccatagaaatcctacatctagattccttatctccgtgttgatatcctgatttactactctctcagtttccactctattgtatatctgtatatgtatgtatgtgatgaactgatgatatttgcatttgcttgtatagtttgcttggtcaccaagtaacgacaaagggaaacagtttctagctttttcttggctgattgttaataatctctctcttgtctctattggatcatagcggggtgcaccctcttcctcttagaattccttatactcacacaccaaaattctggtacaccatgatttttccaagattttgtacgaatctaaaaggtatggaattggaaaccctctacaccccttgttatatgccaaactcaaattggtttgtgcaagagagcctcagcacagagtggactagagaagataacaagaagtttgaaagtgcccttgctatatatgacaaggacaccccagatagatggttcaaggtggccgctatgatccctgggaagactgtgtttgatgtgatcaagcaatatagggaactggaagaagatgtgagtgaaatcgaagcagggcatgttccgattcccggctaccttgcatcttctttcacctttgagctggttgacaaccacaactatgatggatgc

SEQ ID NO: 18851 - DNA, 920 bp, Glycine max
gaacacaaccacctctcacctcaaatgacttcccattctctcttttgaaatcactacacaacaccaagaaatccaaatctaattccttatctcgtttgatatcctgatttctactctctcagtttccactctattgtatatctgtatatgtatgcatgtgatgaactgatgatatttgcatttgcttttatagtttgcttggtcaccaagtaacgacaaagggaaacagtttctagctttttcttggctgattgtaaataatctctctcttttctatattggatcatagctttctgcaccctcttcctcttaggttcccatatttttctctcttgtcgtggacctcaactttgtaggctcgccttagaaaaaaccttcttttctttttggtgggggtgagagttgctatcttattcctggtttcatcaacaagacactaacatctttgttgtttttagtttcagaattccttatactcacacaccaaaattctggtacaccatgatttttccaaggttttgtacgaatctaaaaggtatggcttttatagattctcaactttatcttgatcacacaggtaaaagattctgaaaatctgtgcaccttgtgaatcaaagctctataatttcttcctttccgtgtatctcttctgtgttttttgtgagcagccttttctagttcctctccatttccatctctttaggaacttaattcaactaagattttttgtgtgcttgtggcttgaggtatggaattggaaaccctctaccccccttgttttatgccaaattcaaattggtttgtgcaagagagccacagcacagagtggactagagaagataacaagaagtttgaaagtgcccttgctatatatgacaacgacaccccagatagatggttcaaggtggcagctatgatcc

SEQ ID NO: 18852 - DNA, 440 bp, Glycine max
ctgtaacatggattctccaatcgacaacagttgctcttccaagaagaagaattgcagtaacatggattctccaaccgatgttgtggttgagaagtctactgtggaggatttaccacctggatgggtgaaagaattaaagattaggaagaacagcaagggcattcggaaagatccgttttatatagatccagcgagtggatatgtattccgttccaagaaggatgtacttcggtatcttgaatctggtgatatacgttcatgtgcatttaagccaagttgaagacaagtccaagatgaagacaatttaactccaccacctgctgccaagagacagaaactgtagcagtctgcacccgaacaacagctttcttcagccactgaaattcttgataaaagcaacttagaattgctagatgctaacagctcaaggaaagggaaaa

SEQ ID NO: 18853 - DNA, 454 bp, Glycine max
catagcatgtagtattagcagcagcatatgttgttgtttgtggtcatcccttacagcagtgttgatcagaagaagactatataatagcctttgctccaatcacttcctcttgttcatgccataaactaaaccctttctacagttacaaatctatgctactccacaaagactctttttgcatgagacatcctctctcttaaaaaaccccttcttcagtcaaacctccccaatcatacttttaccatttcaccactcacacttttctctccctcttataataacaacaacttcctcatatatacacttactctccttcaataggggaactttttcaatttggttgctacccttttgttctcttttggactatatattgtatattgaagcctaaaaggttttgaagaaaaaaaaaagtgatgagaaactctgaagcaccaacacatggtggcatgat

SEQ ID NO: 18854 - DNA, 834 bp, Glycine max
gagggcagtgaggagtaatgagattgaattgaggttgaagtgtgttgtgttgtggcaaagctcagaaaaagagagagagattgaagaagcgatttttttatatgaaattttgaagagtgaatgaaaaatctcaatcccatggatgagcaattgaatttgagctgaatcggcgtcgtttcgatttctctcagtcacacactactgactcggccagattcaagtaaacgcttcttctcagcaaaccctagtgtttcggtttccgatcgttgacgaagccgaaaatctcttcttcttttcttcgttcccccctttcgtgatggccatatattggagattgatgtgatgacatcttcacctacctatctgcatgcagtgctgaattgatacctctggtttttatctcatgctattttagttgtgtaacatgtaacagtgcctgtttaatttgttacaccttgccgaataataagtaaatcaatatactcaaaagttaaagtttggtgatattaattagcattgattgagagcatttgtcagttacattatgggtggagttgaaaggaacattttggtagggtaaaaaagtatctttgtaaagttggatgcactttctagtttggtttgagaaaaggggatatgctaccaacctggaagtattatagcattgatttcaccacttcagtatgtgatctattttttttcagtggtgcatttaataataaacatattgatgttatgatataagaagaataatggagcatgttttggagaaaagatttcctcttaattcagaagattacaagttatatgaagaagttggtgaaggcgttagtg

SEQ ID NO: 18855 - DNA, 377 bp, Glycine max
ggaggttgaagtgtgttgtgttgtggcaaagctcagaaaaagagagagagattgaagaagcgatttttttatatgaaattttgaagagtgaatgaaaaatctcaatcccatggatgagcaattgaatttgagctgaatcggcgtccgttcgatttctctcagtcacacactactgactcggccagattcaagtaaacgcttcttctcagcaaaccctagatattggagattgctgtgatgacatcttcacctacctatctgcatgcagggctgaattggtacctctgggttttatctcatgctattttagttgtgtaacatgtaacagtgcctgtttaatttgttacaccttgcccgaataataagtaatcaatata

SEQ ID NO: 18856 - DNA, 392 bp, Glycine max
gtggatggttccgtggagcgtgcaagtgaagctgattcagggattcaggagggagatcagaatggttcgatgaagcctaggagatatctgccgaagaaaaaggagataaacatcgaggggaagatgatggtggctgatggaattgatgcgtcgcagggagaggttgatgatagtgctggtgattggatgccagctgtcagtcggagtactcataggagatatctaagaaggaaagctagacgcgagtatcatgagttgttgtcaagtaatcaagatcagcaacagttggaaggaaatgttgatggtagtgttggtgaagatgctagtgctttaaatcagcctgctcatcacaatgaagaacaacatattgaaaatgctgtgacagaggatga

SEQ ID NO: 18857 - DNA, 548 bp, Glycine max
ccagtgtggcatctaacacagtatgataacaataatcataatttcaatagttattaacatatacacgtctagcaccaaaggcttgaaaaacttctctctctaaggccaaagcgaagattaattgatgaggccctacctataacttatgaaataaaataaaaaattccacagtctcatatatgtcacaaaatgaacccaacttagaaaaacttggcatcatcaccacaaccaactaatttctcttggcaaccagcctcatcaagaagccatttctcaagcaaagagaatggcataatttctgcaccaataacatcaggcttgctttcatcttgcaaaacagtggcctcaggagacaatgaccgagagaattcatcagagtttgaagactccaaagactgatcaaaatcaaacaatgattcaaaattgttttcagacaattcagcactgcttggtggtccctttgctccaatactagaagcagtatcagcacctgctgcagcaaagttgttgaaggagttctgagtcacagatgatgagtttgttcttga

SEQ ID NO: 18858 - DNA, 419 bp, Glycine max
ccgaccggttgcaaaaagacaccaaaagggttggacccacgggtcagcaacacattgtaccccttgttaagcatcatgcatggtcaacttccataacagaggatgatcatcatttatcagaacaaacatattttttcttgtgacgtcaacataccttagagcattcattggtagtacctagattagagatggaagtcagtaaagatcttaaggtcaataaagaggacactggttaattatatgaatggagtcctaccaatggacgaggagctgagatcatagcttcagtaagttctatagtccaaacatgtgttattcgagttgctggaggccttccacatgtttgattatctagtggtggcatgaagtgaagattgaatatccaatctctctctgaagcagcataaatgatgatgata

SEQ ID NO: 18859 - DNA, 891 bp, Glycine max
gatagggataagatagatgtgtatcgcggtgttcatttggcagactcattataagtaccccttgattctcttacacaacagggacgagtgttattctcggcctacggaaccattggcgtggtgggaaggggaaacgatcttgggtggtaaggatgcactgggcggtggaacatggttgggttcgacaagagacggtaggatagcgtttcttacaaattttagggaagttgagatgctttcgaatcccaagaccagaggggacttgccccttcgttttcttcagggcaataagagtcccgaggagtttgcggagcaagttgtgaaagaggcagatgagtataatggctttaaccttgtattagctgatatttgcacctccagcatggtttatgtctttaatagaccaaaccaagatcatctttctcttgcacaagttgttgttacccctggaattcacgttttgactaatgcagccctggacgctccatggcaaaggcagaacggctgcgccataatttcaaagaatttattgatcaatatggtgaaagtgattttccaattaaagaaatggttgagaagctaatgacaaacacagtcaaagatgaagagtgtatgttaccagggattcatcctccagaacgggaacaacctttgagttctatatttgttgaagcggaactttcttcttcgggtcattatggaactaggagctcttctgccttgtttgtgaaatctaacaaagaagttaccttctatgagaaatatctggagaagaagcaatggaaagataaaatggtgacctataagatcagtgagagataataaaaggcagggatatgatttatttctgctactatgcttcaaaaatatcaaaattggtgcatcacaggc

SEQ ID NO: 18860 - DNA, 614 bp, Glycine max
  unsure (1)..(614): unsure at all n locations
cgataagacgacacaagggggtggaatttctggttcttctccttccaccatcgcgatgggggctttcggattttcattttatcctcagttcttccaccctcgtcacctgcaattgattctttcttccaatcgataattgaagaacacaacatttcaattcctctctcgatttgttttgcaagttcgataatcgaaagtgcctggtgattcgatgttgtgtttacataggagttgtttgtgaaaatgagaaggcaggggcactatggggatccatctgccaacacttgtgttggtggtagccagatgcatcatatggctggtcaaaggggggaggccaagtcgggtaattttgaaggacggctagaggcctttactccacagagagagaatccgtatgcaaattccaagcaggagggtcagggtcagtggagatgggagatggatgaagcgtagatgtccaattcaatggcatctcgaatgtttaatgaaggtcagggggttgatgcttcaaagccctattttcaagggccgagccggaacaacagtgattccagatctcaggctcatggagaagatatggatgttgggtatgaaggaaatcatntatcacaatc

SEQ ID NO: 18861 - DNA, 379 bp, Glycine max
  unsure (1)..(379): unsure at all n locations
gctccatcgtgattagggttttcggattttcattttatcctcagttcttccaccctcgtcacctgcaattgattctttcttccaatcgataattgaagaacacaacatttcaattcctctctcgatttgttttgcaagttcgataatcgaaagtgcctggtgattcggagttgtttgtgaaaatgagaaggcaggggcactatggggatccatctgccaacacttgtgttggtggtagccagatgcatcatatggctggtcaaaggggggaggccaagtcgggtaattttgaaggacggctagaggcctttactccacagagagagaatccgtatgcaaattccaagcaaganggtcagggtcagtggagatgggaaat

SEQ ID NO: 18862 - DNA, 420 bp, Glycine max
tattaagcacatgttgtcaaaaccgattttacacagtagaattggaaagtgggctttagcattaacagaatattctttaacgtacaagcctttgaaatctgttaagggtcagattgtggctgattttattgtagatcattcattgatcgagatgctgcaagattatgtcgatacagagccttggattttgtatttcgatggatcgaaacacaaacatggaactggaattggagttttaataatatcccccaataaagttccaactaagttcaaatataaaatcaaagggctttgttctaataatgaggctgagtatgaagctctaattacaggccttgaaattttaattagcctgggggcaagaaatgttaatataagaggtgattcagaattagtggtgaggcaattaacacaagaata

SEQ ID NO: 18863 - DNA, 435 bp, Glycine max
acacgacagaaaggtgctcactttacctgtggcagtactgtgagaattcttgaaattaattgcttgggaaaagggattatcgcaggcacaacttggagatgttgtttcagctcaaaagccaccgattgagttatgtcttgaaaatcattctgggttgaatatggatgagaactctgagagctcatctgcattcagaagcaacatccattatgatcgcctgcataattctgttgattttagcgcttacctgttgttcttgattctgctcacatccctcatgtcaatgctgctggtggtgctgcatggttgccatactgtgtttcggtaagattgagatattcatttggtgaaagtcccaatgtatcatttattggcatgaatggtagccatggtggtagggcatgttggttacgtgttgatgattgggaaaaatgc

SEQ ID NO: 18864 - DNA, 702 bp, Glycine max
aagctatatattgatgggcctggcactccatctgttggaaaggcttttaacaatatgcatattccaccacctggatcttctggagttaatccttctcagtctgctcatccaagaggtcacgggaggagtggagcagtaccagtgcagatgaattatcagcctgttacctctcataatcaaccaagtaaaattgatccaacacaactcccggctattcaaagaactgctccagggcgaacttcaccttctttgcaagcccctgctccacaggttggtaatcgacctggtagtgggtctcaagcttcatctccccccaaaacatccagcgcgattagttcattggattctggagaaattgatgcagcttcagattccgataaattgaagggtgcattggttgggaagggaaggggagctccacagggtagtggaaggggctcttttgtttatggtggagctatggggactgctggaaatatcagtggtactcatggagatcataacttcccaaccttcttgcccgttatgcaatttggtgggcagcatccccgtggcataggagttcctgctgttggcatggcatttcctggatatgctggtcagccttaacttggtttgggaaactctgaaatgacctggctaccagttttgactggggcagcgggtgctttaggggcagcgggtgctctaggggctacatat

SEQ ID NO: 18865 - DNA, 614 bp, Glycine max
ggattttctttgggaagacgttgagtctgatcgactcaacctcaaccttctcctggttcctgcattgcgttgctctctctataccttctaattcccaaatttctagggtttggtacagagagaaaaaggaacataagatgtctcagaacgggaagctgatgccaaatctagaccagcatagcaccaagcttctcaatctcactgttcttcaacgaatcgacccttttgtcgaggaaattctcatcaccgctgcgcatgtcaccttctacgagttcaacatcgacctcagccaatggagccgcaaggacgttgaaggatctctcttcgttgtcaagaggaacacgcaaccgcgatttcagtttattgtgatgaaccgtcgcaatactgaaaatttggtggagaatctcttgggcgatttcgagtatgaagttcaggttccatatttgctgtatagaaatgctgctcaagaagtgaatggtatctggttctataatgcacgtgaatgtgaagaggttgccaatctttttagcaggatccttaatgcgtatgctaaggttcctcccaagtcgaaggtttcttccacaaagagtgagtttgaggaactagaagcagta

SEQ ID NO: 18866 - DNA, 368 bp, Glycine max
tgtcattcagcaagcagaaggattttctttgggaagaagctgagtctgatcgactcaacctcaacctgcttcctgcattgctctctccaaatttctagggtttggttcagagagagaggaacctaaaatgtctcaaaacgggaagctgatgccaaatctagaccagcacagcaccaagcttctcaatctcactgttctccaacgaatcgaccccttcgttgaagaaattctcatcaccgccgcacatgtcaccttctacgagttcaacatcgacctcagtcaatgggcgcaagacgttgaaggaatcctcttcttgtcagaggaacacacaacctcgatttcagtttattgtgatgaccgtcgcaata

SEQ ID NO: 18867 - DNA, 443 bp, Glycine max
cgaaagacgacagaagggtcctcacttgctgggatatttgtgacttcatctccaatattattggtgactctttccatttgtcgattgattaactcattggcaaccacagataaaagctccaagtcttgggcttccaattggatcactttgttgttcatctcttatgaaactacgctgcatgaaacaaacattaataattcttatttatgtttttatatcaaaaaaagaaggggttcttaatatacttcatccttttttcaataccccgaatgaccttgcaataacattccttgcacttgcatgacgaagattaaataactccttgtagttttgaggagtgtttccaatccatccattaagatgatatctaggccctcgatcaggagctaaaaattcaggccatttgtataccccacatgcacaagaatatatttacctacgat

SEQ ID NO: 18868 - DNA, 443 bp, Glycine max
ggctcgagttgaattgacctggattcaaactcttctaacagaattacatgtatattttcaaactcctttgatttactgtgataatcaaagtgcagtgtccatagctcacaatccagtgttccatagtagaacaaaacatatagaaattgatgtcttttttgtaagagaacaagggttggccaaacagctctcagttgtgcatcttcctgccttagatcaatgggtagatgtcttaaccaagccactttcctcaacatgatctgaagttctgagggacaaactcaatgcgaagtatttttctttagaaaaaccttgcccttgcgtttccgggggttttagaatgcatgtctaaaaataactgttacaaatagttattgtgggactgtcaggacagctctgttaagctaactacttttttttgactaacagaattctgttagtta

SEQ ID NO: 18869 - DNA, 414 bp, Glycine max
ggaagcagaaccaccgcaatagaagttcgttttggtcctcttccgaaaaacccagaggcagaggcagaggcaagcgaagcagcagctccgatctgaagacgatgatgaagaagaaggtgcaatggttctggacttgggttcttggttccgtcgttttgaggctcattctcctcttcttccccaaaaatctcaacctctcttctcgccccgaagtctccacccccctcaccagcctccgtcgtctggccgagggttactggctgaagcagtcatcgctgtcaccctatgctggatcaatgtaccatggttcccctttgttattgacgcttctcggcccgctcacagttagaagaattgaaggacaacccgatcatcttttatgcagatgtggtcagtgcaatgcttatttgtgct

SEQ ID NO: 18870 - DNA, 610 bp, Glycine max
gcaaggtgagattttgatgcgtgttgaggagcttgggggaagaataatggaggacgtgggtgagttgaacgagttggtggggtatttggggagattggaggagactcgtgaaaagttggtgcttttgtttgtgaataggggaaagaacaatgagttctgggattcggttaagaagaccgaggagaagggtgtggcgaggaagaaggagattgaaaggaagtggctcgcggcggtggtggtggcagggaacgccgccgagtttactcggtccaccaacccgtttcttgacccggggcaactcagtccggtcccacggttaagttttgcaacggtaaggtgacatatggccaacggtcattttccgggacaatttgggaaaaatcaacatacacattgtttttcttttttcattttttttttgttgcttttgaattttttaatttttttttcccgtttattttgagggaatccgcaatctgtgcctttcagtacttttttattattatttttctttgattgtggggctcgatgtctgccttggtgtgcatgattaaagtgtaaaacagatcatatcatgtagtatattaaaataccgagagatttctgtggg

SEQ ID NO: 18871 - DNA, 1843 bp, Glycine max
tcgactgctacaactgcagaagtccccctcgcgctcaagaaagagctctcgggtgtttgtagggcttgcttttctgctgatgctgtaaataagcatgttgattttgtgagggagtacaaacaggattttgaacgtgatcttgatccagaaagcattactactttcccatctaccctgtctcaactgactgagcggttgaaacactggaaaaatgttcttcaaagcaatgttgaggataggtttccagcagtattaaagttggaagaagaaagcaaggtgttgcgggactttcacgttattgatgttgaagttccagggcaatatttcactgaccaggaaattgcaccagatcataccgtgaagttggatagggttgcagctgatattccaattgtgcggaggcatgggagcagtttccggcgcttgactctaattggctctgatggttcccaacgccattttattgtccagacatcttggactcccaatgctagaagtgatgaacgcatactgcagcttttccgtgtgatgaaccaaatgtttgagaagcacaaggaatcaagacgccgtcacatatgcattcacacaccgataattattcctgtttggtcccaggttcgcatggtagaagatgatttgatgtattgcactttcctcgtggtctatgagaatcattgtgcaaggaatgaccgtgaggctgatcttccaataacctatttcaaggagcaattgaaccaagctatatctggccaaatatcaccagaagctgttgtggatcttcgtctgcaagcctataatgaaataactaaaaatctagttaatgacaacatcttttcacagtatatgtacaaaactctacctagtggcaaccatagttgggctttcaagaagcaattcgccatccagttagccctttcgagtttcatgtccttcatgctgcaaattggtgggagatccccgaacaagatcttgtttgcaaagaacactggaaaaatatttcaaactgattttcaccctgcgtatgatgcaaatggattgattgagtttaatgagccagtcccatttaggctgacaaggaacatgcaagccttcttctcccatggagtggaaggccttattgtatcttcaatgtgtgctgctgcacaggctgtggcttcacctaaacaaagtcagcacctatggcatcacctagcaatgtttttccgtgacgagctactgtcttggtcttggagaagaccgcttggtatgcccatggcccctatggctgcaggtggtactatgagtcctgttgacttcaaacagaaagttatcacaaatgtggaacatgttattacaagggttaagggaattgctcctcagaatttttctgaagaggaggaaaatgttatggatccaccacaacctgtgcagaggggtgttactgagttggttgaagctgccttgaacccaaggaacttgtgcatgatggatccaacgtggcatccctggttctaagttttgatggcagtcttttcttgagaagtatgtagcagtaccgtaaatatgtgtgtacatattccagcttttttattatattgaaacccaattgtaaatcattatattgggtttcatttatcttcttctgctataggctagagcgattcaccgtagaatattacctacaagaacatgacccggtacccatatttattattacgtggtgtcattgctttgtagaagtggtccgcgggttatttaacgcggtacgatgcgtgtacatctgtaaatcatgagtagaagacgatttttatatttgtgcagaattaacctgttgcttttattatttaaataattaattagttgc

SEQ ID NO: 18872 - DNA, 417 bp, Glycine max
gcttttcaatatcaatatcttgattttaattcatgtcatgcaagatcaccaattgattcgttcttaaattactggtattgcagcaaagccagcacctatggcatcatctagcaatgtttttccgtgatgagctactgtcttggtcttggagaagaccgcttgggatgcccattgcctctatggctgcaggtggtactatgagccctgttgacttcaaacagaaagttatcacaaatgtggaacatgttattacaagggttaagggaattgctcctcagaatttttctgaagaggtgagcaactaacaaaattgcgtgcccttatcaattttctgaaattatttatcctttgctttaatttatttggaaattctacaatcaggttttcctttctaatagtatttgatagatgaaatgt

SEQ ID NO: 18873 - DNA, 585 bp, Glycine max
cggctcgaggtaatcacacaggagcttcatctgaaagctctggatacatggcttggggtgatagcgctaattcaagttcttctctagttaattggggtccttcctgcaagagaaacgctcttgaaggtagttctaggcaactgtgttctggaggaagctcaagcactcttgtacaatccgcaaatggttgctggcctactgatcctgttgatcttaatgcttccagcgacttaactgattctacacctatagaagatattcctgttactagtcctccattatttcagaatgcaacatatgaagagtgacacgaagctcccaatggatttcctttgatatgtcattgcacaaaatgcggaaaggcctctaagaaacttcgatcgaagaatgagccatctacagcatctggaatctgctcctctcaatttaccatcaacagggagtgctaggcatcgtcgtcagttcttctctgcatcaagcacctggctctgactcaatcaacgattcaccggacttgaagatcacagctggacggacatgatctgctaatgctggcgctactatgaaccatacacctgtcttgcg

SEQ ID NO: 18874 - DNA, 500 bp, Glycine max
ggcgaggagaagttcaagcaggagatccagagcctccttgatggcaacttcggcagccacgcgcgccaccgcaccttcgtctcctggcgccgcttcatccaccacgaccgcggcagcgccggagtcaccgccgccaaactcccggcgactatccggtcgccgctcttctaccgctcctggctcgacttccggaaggtcctccacgactggttccggaagcgacgattccaacccggtatcatgtccgggttgactcggtcaattaagcttccaattgattcacacaacaacaacaacaaactacaaaccaataacaaaaacaaatactcttcctgtgccgtagttggaaacagcggaattttgttgaatagagactatggtagtgaaattgattcccatgagtttgtgataaggttgaacaatgctagagttgatcactttgagaccaacgttgggaaaaaaactagcatttcattcatgaatagtaacatcatgcattt

SEQ ID NO: 18875 - DNA, 413 bp, Glycine max
cccacgcgtccggcgagaagacgacagtatggggacacaccatttgcattattcttctcttctgtttcttttcatatctgatctacatttatctatattctcttctcttctctctcaaccttctcaacagtcttattagcagagagcacaagagaggacagggaaaacagaaaaaaaaaaattcggcttctgcatcttcagataagaagggggaacttctctattttttgcggcatatcgtggtttgtaaagactgtttctaggtggagattcattaattgacactgaggtgcaagagaaaagtgagtctaaagatgggttatatatgtgatttttgtggagaccagagatccatggtgtactgccgctctgacgctgcatgcttatgtttgtcttgtgatcggaattgtcat

SEQ ID NO: 18876 - DNA, 586 bp, Glycine max
ttgtgctgagagagataatttcacattcttttgggaattcctgtcaagctagtccccttaaaaggttggtcgagtcaaatgccgctggcaagagaaatgatgggaagtctatggcactgaaatggaaaggtagctccaatggtaaaccaggaaatggttttatgcctctggttgaagattggcaagagacaggaacctttacatttgctttggaaagagtagaatcgtggatcttttctcggatagtggagtcagtgtggtggcaggctttgacaccctacatgcattcttccagttggggactcttcaaataaacccattgggaagctgatgggacctgctcttggtgatcacaatcaagggaacttttccatcaatctgcggagaaatgctttccaagatgcttttcaacgactctgtcctgttcgagcaggagggcacgaatgtggttgtttgcctgtattggccagaatggtcatggaacaatgcatagctagactagatgttgccatgttcaatgctcttcttcgggagtcggcccttgagatcccgactgatcctatatcagaccctattgtgaattcga

SEQ ID NO: 18877 - DNA, 444 bp, Glycine max
cgtgtaacattaatagtctatacacacaaacatatgcatcttagtaactctatcagtagaaactaccataattcaggacatgcaacagtcatcggatttgacaatttatctcagcaataatatagctaactaatcaacaattcctgaaaataatcctaagctatctttatccagatacactggttaacacgttggcaagtgtaccaaattgtcacaagtagtaaagtaagcgaaagtccaagtgtcgaatccacatgaactttgtttgtacttagattaatgcaaacccaattttgaagccattgacaaagaatttaaaataaagataggaaaatagatgagattaagatttaaagatcaaaatagaagattaagaaaattaaaaaattaaagtaaaagattaaaaaattaaagattaaaaaaagaaaatcagagcgtgataat

SEQ ID NO: 18878 - DNA, 697 bp, Glycine max
caactaggaagggaagacactaaggttgtgccacgcttttggatcgctattgatagcttgcttgcaagtaggaagcaacaaatgatgaagggtggtgatcaaggggtgcaagactttgcaacaagagagataaagaggctgctcttcctcaaacaagaccctaagggatgggtcattcttagcaaagggtacaatgtaaagctccttggtcaaggtgaggccatgtgtcgctcggttagagattttggtatatggtatgggaagttgcatgaagaagtgagctttgatgttgccttcaaagagtactatgaaagcatcaaggttaaggattgtcctaaaaaatgtgaacatagtgaaatttctaactacccaacggatatattggcccacataccgtgcccaaatatggaatgtgggcgttcaatggaggtaacttctgttaattacaggtgttgtcatggtcttgaaccatagacaatgttttgctctgcctgggaagcatatgggactttacctttggcttaaatttgtgcatgtgtgtttgttatatatttatcttttttcagtgtatctcatagtacaaggtatgtagctacttgcttgccaagtactagataataatgattttcatgtagtcttgtttgtatgttttttaatgcattgcgtttgaataaaatatgaattttcgtatttgatc

SEQ ID NO: 18879 - DNA, 480 bp, Glycine max
gacgaatgaattgggaatttggaattgtgtctgtgactgagactaagctctcaacttaaaacccttgctgttgttcactgtcgccgtcgaaacggggttcctctgtggtagttggaaggtcgcaccgtgccactattgcaccaggctgcctcgtcatcggagggggtcacggtgaagtgtattctgcttttgtgtatgttataatttcaataggaattcagatcttataatcctcagtttgatcctatgaaggacagacacttgaagaaaagaatcaaaagattgatagacatggttgagccagataaaaattgcgagactagggttgaagatgttgcttggccttgctccctttcagagtctgagattgcttggctaatgtattccgatcacattgggatggcaaacgtgtgcttattattccaaaatgtctaaaaaatttctgacgataagtattcatatctaatcatggtagttgag

SEQ ID NO: 18880 - DNA, 553 bp, Glycine max
cccagcctccctagacctcgatcttgatctcgacgcaccttgccgtccctcgcagtagctgaacctcacagaagaagcctccttcaccggcaacgccagtggacccccagaaaccgtcgtcggcagcgtttcggacgacgaaaattgcatgcttctggccgcctatccctggacgacggcgacgcatttgggattgaagactgacgccgtcttctcggcctctgaaaacaggttataatttcaataggaattcagatcttataatcctcagtttggtcctatgaaggacagacacttgaagaaaagaatcaaaagattgaaagacatggttgagccagataaaaattgcgagactagggttgaagatgttgcttggctttgctccctttcagagtctgagattgacatgctgattagcttgaacactgttgatcattcagcgtgcaaaaatgatgggttgtcaggagctggctagtaaattcaaccgtaaaatgattcgagccattgctcttgttttgatgggccatctgaaggacgagataaaagattcatc

SEQ ID NO: 18881 - DNA, 421 bp, Glycine max
ggtgaatagagagagtgatgggtgagaggggggacgaagctgtaaccccggcggggaggctgttcctgcaggcagaaatgaaacaagtaatccactgcgtcatagggctgaagaaccccatcgacgcggagctagtgaaatcacaagtccggaactctactatgctacaacacccacgcttcacgagtctgatggtaagaggcgaaggaggagtggagcactggcggcccaccgaaatcgacatcgatcggcacgtgcttataatagaggaagcagtgggcgagagggaggaggaggatgaatcggccatcaacaagtacctggccgaattatccatagacagcgatgggcttagcatggagaagcccctgtgggaaatccatcttcttaaggcccacaagtgcgttattttccgaatcca

SEQ ID NO: 18882 - DNA, 737 bp, Glycine max
  unsure (1)..(737): unsure at all n locations
ggttgttctcatttccgaacacaatatcggttgtttaaggtgaaaaggaaaaaaagaaaaaagttgtgcagtgaggaacgcgaagacgcgagatagggaataggcgacagtgcgtttggctgcccccagcaatcgaactccttgtgctcctcgcacctcattctctctctctctcgtatctgcaacttcaactaactaacttttatgaagccgaaggcgtcagtgaatcgacccccaacaccagatgtggtcgaaaatgtccctgaaagagaacccacgcttcaagagctcatcaacatcaagttgatcgagactggagagaaggagcgcctcatggagctgttgaaggaaaggcttgttgattgcggttggaaggatgaaatggaaactctctgcaggtatttttttacttttattttattttatttttctcattattaatctaggaaggatttgcagaaatttattgaaaactataaaattaagatagtcaattgaataagtgagaccctaaacaaaatgtgatttccaataaatatcagcggaaagtatatgttagagaatgtgttgccaacatttctcttattatcaattcaagagaaatgctaataaactctttctttgcgatgctcttaagtggatcctactaaatatgtgaattttattttccattgggacggtgtcattctgaaactagtagaattttaactaatgagatgattttagagagtgnatag

SEQ ID NO: 18883 - DNA, 382 bp, Glycine max
gtcgtttaaggcgaaaaggaaaaaaagttgccagtgaggaacgcgaagacgcgaaatagggcataggcgacagtgcgtttggctaccctcagcaatcgacctcatcttctctctctctaaccatcgtatctgcaacttcaactaacttttatgaagccgaaggcgtcagtgaatcgaccccccacaccagatgtggccgaaaatgcccctgaaagggaacccacgcttcaacagctcatcaacatcaagttgatcgagaccggagagaaggagcgtctcatggagctgttgagggaaaggcttgttgattgcggttggaaggatgaaatgaaaactctctgcagagccgttgtgaagaagaaagggaggaataatgttactg

SEQ ID NO: 18884 - DNA, 461 bp, Glycine max
ggtcctggatggtgatgagaatggccgtcgtggacccacagctatgcagacagtgaggagtctggttagggaaggtggttggatggcttgttatagaggattgggacctagatgggcttctatgtcaatgtctgcaacaacaatgatcacaacttatgagctcctcaaacggctctccgcgaagaatcaagaggttttgacatgatgaagggacaggtttatgacagcaaaaagaaaaaaataaaggttaaccaaagagaagagaggaggttcttctttcctccctgttttgtctgttctttctgttcttttctccacttgtcaatgttgtttcttcacgtttggcttgccacaatgactgtttgatcaatgtaagtcaccccaggttatttctgaaataaaaatttaaaactccgaaaaaaaaaaaaaaaaaaaattaattcaagcggccgctctagagg

SEQ ID NO: 18885 - DNA, 434 bp, Glycine max
atcggatcctggttttagtttttatgaagtctaggttttaaactttggttgcgtcgatatcaatggaatcatggaaaattagaggccaaagctgctgaggccttcgaaacgttaatgttgttgggtaaaggctgtttccaaggtttgaatctatggcccgagagtgcaaaacagcaaactttctgttgccccaaggctcgctcaccttcaaattgatgatcttagtattgacagatagctaatgctttctgcatgatggactctctgaaattcttcgagctaactaaatttgctaaaagcattcttggatagttgccttaattgcagttacccctagcctgccttaagtgcagtatctttgggctgcctaatttcagtatcgagaggttgtgtttagttccacatcaattagtgatatagtcaatataattctt

SEQ ID NO: 18886 - DNA, 516 bp, Glycine max
gttttgttgttcacctgtaatgtaacaagtaagctccagcactgtcttttattccctttattctctctctctctttccttcctttgatccatggaagcctgtgatctcttgtgatagttggtgtgttgggtagggaagggtttgaaagtgtcgtgtcttctaaggagctttcactgcacgacggtggccgaatcttcttgcttctttctctttccaagatatcctttgattcaactttggatcttcacctctgatttcctttcatttttcggtttatacacacttggggtttcccctcacccaactgtgtgcaacaaccacaaagtacgaaccttttcttttttaatttctatttcttggaaatataaaaggtctttttatttatttctgttttagccctagaggagtaaaatctgttgtaggaaaggaaacgcctgataaattagggtacgacagaaaatagtaagaaggtacaaacaaagatcagggattgggtatgaatcattcctctggact

SEQ ID NO: 18887 - DNA, 646 bp, Glycine max
  unsure (1)..(646): unsure at all n locations
gaatgagttgagagtcttgtgttgttcacctgtaacgtaacaagaaaggctttctaacgtgtcttctaaggtggtttcactgctccacggttgccgaatctagcttcttgcttctttctccttccaagatatcctttgattcaactttggatcttcacctctgatttcctttcatcgttgggtttatacacccttggggtttcccctcctcacccaactgtgtgcaacaaccacaaagtgtataccgtgtgttcttcctagaggggagaaaaaatggccacactttcagatattggggttgcagctggcttgaacattttgagtgcatttattttctttgtggcttttgctattttgagacttcaaccttttaatgatcgggtatacttcccaaaatggtacctgaagggtttaagaacagatcctgtgcacggaggagcgtttgtgcgcaagtttgtcaatttagattggagatcataccttaggtttttgaattggatgccagctgcacttagaatgccggaacttgaactcattgaccatgctggattggactctgttgtttacttgaggatttacttggttgngtatgaactatgaacaatgagtgaaaaataccacatcagctgaagaggatatgatcctg

SEQ ID NO: 18888 - DNA, 443 bp, Glycine max
ttttctttttccacaaaatctcacatcatgaataatagaatgagttgagagtcttgtgttgttcacctgtaacgtaacaagtaagctccagcactgtcttttattctctttcctttgatccatggaagcctgtgatctcatgtgatagttggtgtgctgcataggaaaggctttctaacgtgtcttctaaggtggtttcactgctccacggttgccgaatctagcttcttgcttctttctccttccaagatatcctttgattcaactttggatcttcacctctgatttcctttcatcgttgggtttatacacccttggggtttcccctcctcacccaactgtgtgcaacaaccacagagtgtataccgtgtgttcttcctagaggggagaaaaaatggccacactttcagatattggggttgcagctggcttaaacattttga

SEQ ID NO: 18889 - DNA, 429 bp, Glycine max
gcaacaacaaactggaaggagtatactagtcctgatggaagaaagtattactacaacaagatcacaaatgaatccaagtggtcaattcccgaggagctgaagttggcccgtgagcaagttgaaaaagcaattgtcagtggatctcgtcctgaagcattgctgaattcccatcctcaaccctctccgacaccttctgcaactgaagcaacacccaacacagataattcaactttacccagtcaaggagaaccatcaagtcctgtttcagttgctccagttgttactacatctataagtaatccacaatctgagatgccttctggaccatctctgtctacttctgcaaatgctataactggagcaaaagtggacgaacttgaggcacctgtaaatactgtcacaccatcagatacttgtgtgggaagtgat

SEQ ID NO: 18890 - DNA, 310 bp, Glycine max
gatcaatttgagtctgggacaacactaaacacatggtttcaacgccaagattcaaaggaaaaagcaattgataccaagacagacggtagtcaaagcagtcacaacaaaaacaaaggatggctattgtgaatattcatttaatttacatgttgaaaaaaaatatctatcaataactcaggggtgcccatgtattggtataattcacaaaatagtttatataaagtattatttctactaaacacacacattgttcctaaaataagatattgtactttatgcaacagtaaagaggaaaaattatgtatttctc

SEQ ID NO: 18891 - DNA, 580 bp, Glycine max
gatatcttactatgatatgcgagctgctcgcactgccatgcgtgctttacaaaacaagcccttgagacgaagaaaacttgatattcatttttcaattcctaaggataacccctcggaaaaagatattaatcaaggaacccttggcgtgttcaatttagatccatcagtatccaatgatgaccttcgtcaaatatttggggcttatggggaggccaaagagatcagggaaacaccgcacaagagacaccataaatttattggattgtatgacgatagagcatcagatgcagctcttaaagcattaaatcgaagtgatattgctgggaaacgcataaaacttgaacccactcgccctggtggagctcgtagaaacttgatgcaacaactgagtcaagaactggaacaagatgaagctcgaacttttagacatcaagtagtttcacctgtggccaattctcctcctggtagctgggcacaatttggtagtccagttgaacaaaatccattagcttcttttagcaagtcccctggtttgggccctgccagtcccattaataccaaccatttgtctggattggct

SEQ ID NO: 18892 - DNA, 498 bp, Glycine max
aagacgacagaaggggaggacgttgttttgttctgccttcttctctccctcgattcaattcaattctcatcctattcctcagatcagataaagaagatgcagaagggtagagaagttcgagacaataacatttttgaaccaagacggtttgaagattttggcgactttggatttcatagaagtaggatgccaagtctttttggtggcagggatccatttgatgatccctttttcacagacccgtttgatagcttgtttggtccaagttctgcatcaagagcaatgcagaagacaaacagagaaaaaggaatagttatagaagaattagactctgatgatgagggggctgataacggccctgaaactggagacaaagattttgataagaaaaaatctaaatcgaccatggaaccgtcggttgagcattcagatgatgatgttgatgagaggaagaacagtgatataacttacaagaatgaccattacatggtggaaccc

SEQ ID NO: 18893 - DNA, 450 bp, Glycine max
gtggagcttccttttaggtacggcattttccacttgacgtactacacagcgcttctctcaggggaactgtacagagagcagaaatccagcttaatcttcaaaaaagaagaggacatggagtcctgtctgtacttaagccaaaattcagtggcgtgctcggcgaagccctagatgtggcagctaggtggagtggagatgttatcactattgaaaaaacggttttgcaacaaaactacagttgttatgaacttcaaggtgaatatgtgttgcctggcaccagagatcgtaatcctgttgacaaagaaggtggccttataaaaaggcttatgtctggtcatattggtaatgctatatcctcaatgggcaggtggagaatgaaacttgaagttcgtagagcagaggttgctgagatgcttcccctcgctcggcttctttctcgaagtatggatc

SEQ ID NO: 18894 - DNA, 549 bp, Glycine max
tccacgcgtccgcccacgcgtgcgccgtcatgataaattcatatatcatcagcctcagccatgtcttcttcgctcttgcacctcctcttccttccacaactacgatcttcgatagtgctttctcagattcttccttcgtggtaaccggtcgaatcatggagcccatggacattgttggcaagtcaaaggaagacgcttcgcttcctaaagcaacaatgacaaaaattattaaagagatgttacccccagatgtacgtgttgcaagagatgcccaagatctattgattgagtgttgtgtagagtttataaaccttgtctcgtcagaatccaatgaagtttgtaacagagaggataaacggacaattgcacctgagcatgtattgaaggctctacaggttcttggatttggtgagtacgttgaagaagtttatgcagcatatgaacagcacaaactggagaccatggactctttaagagggggtggtggtggtggtaaatggaacaatggcagctgagatcgactcgaggaagatagcatatagcagacgc

SEQ ID NO: 18895 - DNA, 356 bp, Glycine max
gaatgttgaattatttgactttatttcatgaattttgacttggttgtatgtggttgtgattctttgaatactgagcacattgttttttccttattggctgagatatcaagtcttctttgatatattgctgatttataatttattgacatttgagtttggtttgcattcaatagctattgtaggagatataacaccatctgatggtgtgcccaaggctgaaaagagcagaatggagctggaagctttgaacaaaatgtgtgaacttcttggtggagggatgagagctgaggagatcaaagaactttgggaagagtatgaaaacaattcttctgtagaggcaaatcttgttaaggatt

SEQ ID NO: 18896 - DNA, 346 bp, Glycine max
ctattcctccggttagcttggaagaagtattcattcgtcccattttcaacggcggcgcgtgggataatcaatgttcaaaaataaaatttagaaaagaatattcactggaatggaaattaatacctcaagccaaagaacatttggttgagtgtgtgccttgatgaaataatcggttccccacttgatggcctccagagcgtgagcgtactcgccggcagcagcgatttgttcgccgtattctatagcaccccatgagaggagtgttatggtgaaagccattggcaacccaaatttcacattgtcccctgcatcatagtaccctcccaccaagtccacctacgtgcct

SEQ ID NO: 18897 - DNA, 851 bp, Glycine max
gcaacttcctgctcagtcacagcagcagagccaacagggccatcaaaatgcaagtatgtctagtggatcatccacctctcagaagcagcatgctcaaaaccaacaacaaaagcctaataataatgctactgggtccaatgggggtggaagcttgcaaggctttcctgtcaccaaaaacccaccatcactgccactgcagttgcaacagcaacagccgcagcagaggcagaatcatcacccttctcatccagctcgccaggttgagtctgagatgggtggtgaagacagtccatctactgctgatagtcgcctcgcccgcgccaccatgaatatttatggccaaaatttcgcaatgcctatgcagtcgcctaactttgctctgatgacacctgcctcaattggtgcagcaggctccaacggcggtcacggtgaaaagaagcaaccccagcagcaccctggtccaaaggctggaggtgaaacagctcctgcatttgccatgtcatttgcagccatgaatggagctactggcgcctctggccttgacctctcatctattgcacagaactaccattcaatcatgcagagtaatcataactatcatataatggcagcagcacaagctgccagtgctcagttgaagaagagttatcatgccgctgaggaagggaaaaatgtagttaattcttctaatctagacgaagatagaaaagcaatatctgctggaaaaattccggcaacaatgggacaatccattgcattcggaaggccagaagtgtctgatccctcattagcgtcgttatcaggtggcaacaatgtgattgatacctcggggtcgtaatctaaaccttggg

SEQ ID NO: 18898 - DNA, 418 bp, Glycine max
ggattgattgtctgcttttaaaataagagagaaaatgggcgaccaagaagtttattagagacttgtagaagagccatgttaatttcttgaggatcaatatcaagtgaaaaataatgagtatgtatcctctacgtttcctttaagcaggtatctttgagtaggaaggaaaacgaaactttttcagagggagacaattacattaaaagtacaagatacaataagcaataatcaactcatgaagcttgttgaagagtcctcgtattgaaggaaataatcgtctattggaacattggtaatattaatggtattaggtggtggcgtggtcatgtttttttcctcaatgaatattgtaaaaactttctattttctattaattagggaatcttgaatcttttaagtttcatatcttattattttg

SEQ ID NO: 18899 - DNA, 391 bp, Glycine max
gtcctacaattttgtttaagagtctactttgtgatcatttagtatataccaatacatgtgtaaaaataatcatgtcattaaactttataagaatcaaaattgacttgtttgtatgatataaatatatttttcaatatttaatatgatattcataataatttatttaacacatattttgcaatagaaattctaaataagacataaatttatctgagttaaacttaattataagctttagcctgattctatatatatatatatagatcaacattaacatatacgcttaacatttaaaaagataaatataagattatattattaatattaataataataactatttggttattatttttaaataaaatggagtggttaggcctaaagaattttt

SEQ ID NO: 18900 - DNA, 398 bp, Glycine max
gacccacgcgtacgaccgccagaaaacaacaaaaggggacagatccgaacccaggcacaaaatccacttcactgcggcataaatcgacaaagacaaagaaaggggaaaacactgtcttcactgaccaattatcttcgtctctctctcgattcttccaaacggtgcttcgatcggaaaccctaactttcacttacgtccgtcaatggagcttcgttctcgtcgacgcctctccaatccttcagtatccgggaaggagcaaccacctggggatgatgctgttggggaagatgaaactactactggcaagggcagtaacaataaagatacaggtgttgctgttatatcatcaaattcagatatagtttctggtcctgattcagattctgattacgaagatg

SEQ ID NO: 18901 - DNA, 485 bp, Glycine max
  unsure (1)..(485): unsure at all n locations
tcgccctctcgtccgcccacgcgtccggtcctctataaattggcatcaacgctgtgattgtgttttaagagagagagagcgatgggtgtgaactccaacagagtggaacactttgctagccatgatagcgccatcatccaggacgagacaatgcaaatccatgcagtgcagttgccaccacaccagaccacactccacaaactcaggcacagagtctccgaaatcttcttcccagatgaccctctccaccgtttcaagaaccaaactcgctttaaaaagttcctcctcgcacttcagtatctcttccccattttcgactgggccccaaactacaatcttacccttctccgctctgacctcatctctggcctcaccattgccagcctcgccattcctcaggttcacaacatttagccacccaaattgctttttttcttatatagctngcttgatttgcatgtttaaatgtaattttcatgtttttt

SEQ ID NO: 18902 - DNA, 436 bp, Glycine max
gtgaactctaacagagtggaacactttgctagccatgatagcgccatcgaggagacaatgcaaatccatgcagtgcacatgccaccacaccagaccacacttcacaaactcatgcacagagtcttcgaaatcttcttaccagatgaccatgtccaccggttcaagaaccaaactcgctttaaaaaggttctcctcacacttcagtatctcttccccatttccgactgggccccaaactacaatcttacccttctccgctctgacctcatctctggcctcaccattgccagcctcgccattcctcagggaatcagttatgccaagcttgccaacttgccacctattcttgcattatattcgagttttgttcccccattgatatactcgctgcttggaagttctagacatcttggtgttggacctgtttccattgcgt

SEQ ID NO: 18903 - DNA, 380 bp, Glycine max
tggagccctttgtttcatggaaagcagctggggcgtacttcaaacgctcatgatgctaggaccttttggagtcagattgtgtgggtggtctccaaaaaagcctccacttttggctaaaatggaagcggcattgttgtgcatcgcgatgttatttaggtattacgacctcttaggaagtatcactttgatgatgcttgcgtctactttaccaaagatgttgatagttactccccatattatgtcttctcaagcctcctaccattcaatacgagagcacctacaattaggaaaatatgttagaagaatagatggtagctcatgtgaccaagctccatgaggctcaatagaagaagtttgacaaagatgttgttgttgttgtt

SEQ ID NO: 18904 - DNA, 669 bp, Glycine max
gagacaacaaaattcgacgttatctcatatatgatattgggcttttttctcctttttatttgtggcgtttacgtcaagggtgtgaaagaaaatctaacacttttccaaagggacaaaggaacaacataacgttaacaataacatggtttggttttcttccattcctcacatttgagactttcatgctctctcttggtgtctggatttccttgccaaagtttgaacctttttccttagaatttgacacccagataagattttcttcattaccaaattctgggtctttctctctctttctacaaccctttttgtgataaaaccaaagggaaatttccttcactttcaaatctgagttgggttgtccttgtctcctctctgagttgggatttgtgtcagcagaaacaaatcctgatttggagagaagggtggtggtgcatttgtattgaaagtgttgagattctctgaatccaagccaatttgacaagaggagaacccagttgatttttcagtaattcaactttgaggttttgagcttgttttcttatagcttctaccactgttgtttatcttggttatgttgttcttttatcaatctgagtgttgtatcttttacattatttccttctgttatgttcataggcttgtgtgaagctctttcctactaaattg

SEQ ID NO: 18905 - DNA, 444 bp, Glycine max
tgcattggtctatgtgattccgtgaattttatgtatcttatctccaacattatctgctgttgaatccattgaacttcaaagaaagttgcaagtaccaaagacaatcaccacaaaacaggcacagaagaacgccacgggaatggacaacccgagaaagaagacaattagaaggaagaaacaccaagtggctccaaactccaaatagatgagtgtcccatatcagatcagaatcattggaacttatcaaacaggccaagatcattattagaatgtcacacgtaattggaaaactaccctataatggataagaaatacggaaaccaaacagcaagaaatcaaccaaaagctagacagaactaccactgctggccagtaagctgttaccaactttctgaagtgacatatcatgccagaaacatctcagatggctttgaaaacttaata

SEQ ID NO: 18906 - DNA, 611 bp, Glycine max
gtggtggtggcctcgatgaaaatgttcctgttaggttttacatgaactcatggtttgagtggaataagcctctattaaccgtgttaattttctttcttcatagagttcacaacacattaatagaggttgtgttgatattgtgctgcagtctacattgagtcactttttttttatcagcaaaagtatatatattatatagaccattaaaattagtacaagcggtactgttgtatatacctcctagcatttgcaaggtgcagaactgtggtgacctaatacatgttaaccaacttgaattaggaaaccaaagatcactgtttttttgcttgcaatttttggttcattattaatttgttaatgttgttgttattagttgttatttgattacttcaggaaccctaatgactagtatacatactgtgtgcataggttttgaataattttgatctttttttttcttttactaaaaattgagttctaaaccactttactttaaaaacagaaattaccagtatagttatcatgcatatgctaaagtttgggatagaactatggttaaatggttgaaactgaaactaagctaatcaatccaaaggcagggaatgttttgt

SEQ ID NO: 18907 - DNA, 411 bp, Glycine max
agcgtcttctgagccagaagagttacttggatcatctgaaaccaatgactctgaatactcatctgatagtgattcagacattaatgaagaggttgtggaagattatttggaaggagttggtggtagggacaacatcatggaagcgaaatggttgctaaaacctgttttggatgagtcaaatgatgatagttcttccagcagttgctatgacgaggcattggagaagttgagtggctttgtccttcaagaagcctccagggaatatggcatgaagaaagctcaaccatggaagaaacgctctgtaggttctggacctttagctttggaagacctaatgttggaaaaggatccaagatccatctctgctagaaagaagcatgttcctcgattcgcttaatcttgatcttgaca

SEQ ID NO: 18908 - DNA, 377 bp, Glycine max
agctctggttctaggaaggaggttatcaggtcgaacaagaagaatgttgatgatggttcttctcggtctcgcaccagggaggctgatggttcccgtgggaaaaaggaggtgcctaattttgttaaggttggcaatgttgtttctggtaaattgacctcgaagattgtcaagaagaagaaaattgttaagagagtggtgtagaaaggtactgcaagttccaagtcatctgcgtcaaattcactaccggctaaaacccttcctggaactgtgaaagcggagagtgttgcacgtatttcattgactgcctctggtcctgagaaaattgaagctaatttggatgagaaaagcaacactgtcatccaaagcaacactgttga

SEQ ID NO: 18909 - DNA, 240 bp, Glycine max
atttcattgactgcctctggtcctgagaaaattgaagctaatttggatgagaaaagcaacactgttgatgaggtggctaagcctgactgtttgcaccctttaccaaaggaagggaatgtattgaaagaagaagcagaggtaggcttattgcagccgagtttggtggccacattccgggtcacaagagtgtaagagtgacaaagattctgatattgggaaagtatccaggtttgaaaaaga

SEQ ID NO: 18910 - DNA, 522 bp, Glycine max
cacgagctcaacttaaactcacacttcattccttcctttactctctttggcaccttctccatcaccatcatcaccatcttccttttcttttgttctctctctctcttacttgcaaacaacacagttaacttaactgttgaacaaaaaacaatggagaacataatttccatatgtgatcacatgcctgtaggattcagattccgtcccacagatgaagagcttgtcgactattacctcaaacacaagcttctggctgatgatttccctgtccacatcatccctgaaatcgacctttgcaaggtggaaccttgggacgtaccaggaagatcagtgatcaaatccgatgacccagaatggtttttcttcagtcctgtggattacaagtacttgaagagtaaaaggtttaacaggacaaccaagcgtggcttctggaaagccactgggaatgaccggaaaataaggataccgggcaccagcaatgtcattgggactaagaagactcttgatttgcaccaaagccgt

SEQ ID NO: 18911 - DNA, 764 bp, Glycine max
ctcctgcttctcttctaggcaaaaaaggccatcacatgggtgatttcattcctccagaagaacttgaaaagttcttggctacctgtaatgatgctgcagcgcagaaagctgctatggaggccgcagagagggctaagattcaggctgataatgtaggccacaggctcctgtcaaaaatgggttggaaagaaggtgagggtctgggtggatccaggaagggtattgcggatcctatcatggccggtaatgttaagaagaataacctgggggttggggctcaggaacctggagaggtgagtgctgaggatgacatatacgagcagtacaaaaagcggatgatgcttggctaccgttaccgacccaatcccctgaacaatccccgcaaggcttattactgaacttgacagtgggtgctgtctgcaactcttttcaggaaaaaagtgaacttttcacaatgtgggatgaactggtgtgttgatagtagggtttttattgtgcgctgcactgcttgtaagtctgctgaacctaagatttgggggagaaaagagggggaagggtgtaatgttcacttcagccgcatttttatccgccaaagaataatgggttttttttttttgttacttttacttgtcagagcttttggaacatgttttttgtatcgcaagcatattatgaagtggtacagggatattatggtgtatatggtttgtttaatccgggaaacctagtcttggatattgataataaatggggaacttggcttt

SEQ ID NO: 18912 - DNA, 452 bp, Glycine max
agggattcttgcttttgtgtttgcaattattgccttacaccctcaggtgaatgggagcttgttgcctgcggctgtggtttctctttactgtgcttatgtgtgctacacagggctttctagcgaacctcatgactatgagtgcaatggtctcaacaagtccagagcggtcagcacaggcacactcgttcttggcatgctaacaacagtgctatcggtgctgtattctgctcttcgggctggatcttcaaccacattcttatctccaccatcttcacctagattgggtgggagcaaacctcttcttgaagaagcagaagaaggaaaggcaaagaaggaggaaaaggaagcacgccctgttagctactcgtattcattcttccacctaatatttgccctggctagcatgtattcagccatgcttctttctggatggaccagcacatctgagagct

SEQ ID NO: 18913 - DNA, 416 bp, Glycine max
caattatttaaggcctgatttaaaaagaggaacattcgcacaagaagaagaaaaccttatcattgaacttcatgcagtattagggaacaggtaattgtaattgtaattttaattcagtctctctcatgattgaattaatgaattctctccctttttcttttctactgtggttaacatttatttttctttttcatttgcttgacatgcatattattatcctgtgctgtctcaggtggtctcaaattgcggcacagttgccggggagaacagacaatgaaataaagaatctgtggaactcttgcttgaagaagaaactgaggcataagggaatagaccctgtcacacataaaccactgtctgatgttgagaatggagagaaagcagcagaagtgtctaatgaactgaacctcctgaaa

SEQ ID NO: 18914 - DNA, 433 bp, Glycine max
ggatttgtcgagtgggcttttgagttcatcatcaacaatggggacattgacatcaaagaagattatccctaccaaggtgttgatgttatatgtgatcataaagtcaattttaactcgattatttgatcaattaacaaatgttggtaataatttcgttgtaatgcttatataatttctttttcttctttatataaaaatgctcgaattattacaattgatgattatgatagtcttcatgcctatgatgagttagtcttgtaaaaggcactagcaaatcacttagtgagtgcttgcattgacgcaaactttaagacatatactttaataaatttttaaatcaatttgactttaaaagtaaagttagcatttagcaatgcattagatctaaactaaatctaatgagctgcaagatacattgagaattttgatcaat

SEQ ID NO: 18915 - DNA, 446 bp, Glycine max
acgctattcactccaatatgaactggtacgagatcttaatgaagtttacgaaaatgatcccggaaacttcaacaagattgttgagctcatgcagaaaatgcaagaatgtgggcagccaccaaatgatatcgtccaggagcttgctcccgatttcgatttagccagtcttggccagctatctccagagatgcttgaaactcagccaaattgttccataatgtgaagctatttcttcccttttactatgttgcagctgttggtttacaggtttttaggaatatttaattttcacttgtcagaataaaatagttttatgcgctacaatgttttttcctactttctataaggttatgaggaacccacaagtaaagcctctttttaaggttgtatatgatgagtgcttgtctatcaatattttctctggaagctaatagattacgagttgc

SEQ ID NO: 18916 - DNA, 477 bp, Glycine max
tgtggaagactacagattgtgtgttgtcagattggtgtggcgttgaccgtgaagtgagcaggaagaatatggacaaacgttcacagctgatactccttgagagtcacttccctcttgagggaggtcaattttctcaggaaaatgggaatccttgagagcagaagtacaagtggctctaagcaagcttgtgtatggggattgagatatctgattgcctctctccatggaagaattctttgatttgaaagtaggcatctttgctaagatcctcacgggcttcaagcttaatcttctggttatgactctctggagtttgttaccagcatcacttgcacttttccaattctggtcatcacttccataattagattcataaaactttcttgttgatttttggcccttgacagctgctatacttgattgatcttgaggacttcagttccctctttggttcagtccttccagataactttctgg

SEQ ID NO: 18917 - DNA, 445 bp, Glycine max
tacttttggaaccatgctaaactcattcactattagagtaattgtgatagtacatacatgacagctaatcttactgttttattaatgtcttcagttaatataatgctgatgcttagactaacaagaaatttattggtaatgaattgaatcactgtatatatcttaattactactacaacataacacaatgtgatagaggttagatttttaggtctctatatatatatgaatttttttaatgagtttaatcctttaaataaatagaatacacattctgactaattatgtgtttgagtgttataattgttttttctagaccttttttaattccattagaaaactgataagaagtaattttttttaaaataaactaaatcaaatatgaactagacatattttatagaaaaaggatgaaaggactaaaaatcaaattctggttgtcaat

SEQ ID NO: 18918 - DNA, 789 bp, Glycine max
ggatgtcatgtgtgatgctggtaggtcttgtggtgtgcaatcaatctgggtgtatggtggaacctctaaagggccacaaatctcctcactaaaatctggcattgacattatcattggaactcctggtcgtatccaggatctgattgaaatgggtatctgttgcctaaaagaagtatcgtttgtggtacttgatgaagctgatcggatgcttgacatgggttttgaacaaatagttcgctctatactgggtcagacgtgttctgatcgtcaaatggttatgttcagtgctacatggcctttgccagttcattacttggcacaggagtttatggatcctaatcctgtaaaagttgttgtaggctcagaagacttagctgccaatcatgatgtcatgcagatagttgaggtcttggatgaccgttctcgtgataagcgcctagttgctttactggaaaagtaccacaaatctccagaggaatcgagtattggtttttgttttgtacaaattggaagccaaacgagttgaaaatatgcttcaagaagggggttggaaggttgtatcaatacacggggacaaagcccaacatgatcgcacaaaggcactctcattgttcaagaatgcaagctgtcctttgatgattgctactgatgtggccgcacgaggatggatattccagatgttgaagtagtgataaactatagttttcctctgactacagaagattatgttcatagaattgggcgaactggacgagctggtaaaaaaggtgttgcccatacattctttat

SEQ ID NO: 18919 - DNA, 385 bp, Glycine max
gatcacagcttgaacaagtgaccattcaaatcttctgtcacagatccccttctcttctattcagattgaagatcacggttgatgtcttcaatgggtcctcctgctgatgaaaatcttgaaacaaaagagatcgatctcagaagtatgtcatcttcttcacttggtcaggcaccacaagcccacaaagtagcaattcctccaagacagaacctcttcaaggaattccaatccactataaaagaaacattcttttctgatgatcctctaagacccttcaaagatcaacctagatcaaggaagattaggctcggtattgaggccatattcccaatacttagttgggggagaagttacaaccttaaaaaatttagaggagatataatat

SEQ ID NO: 18920 - DNA, 432 bp, Glycine max
attaaaactcatggcaataagcaatctatgttctttgttgaatttaaattgaggtcaccctcaggatcatcctggtatgcaccaaaatgtagattgtaagtttatgtattttaggtgaataagaatttgtgcaattttaatatgaaggtggtaatatatgattgggatactaatatgaactttttataggaataattcaagcataaatagcactgtatgttgtgttattttgtttctctctcaaggttgtgagaaaatggaattgttcaattgttctgatattttcttggaactattcttgtaacaggtctctcacaattggtcaaatgcaagggaagtttcaaatggtagttgtaaggcgtacagggcatgctattcaggtttgtactagccatgtctctttctgcattcattataaaaatgaagttacta

SEQ ID NO: 18921 - DNA, 357 bp, Glycine max
ggtgcttcagtgaatttctctgtgattggtctcccaaggttttcatctctcgccatcgccgttggagaacgctccaattttctctccaacaattcgttctttcccttctcaatttccggcgagttctccctcttcaatttctcgtaagattcatcgatcacaaacttatattgatttcgtttttctgacactgatcttatttttccaatcggttttcttctccaacatttatcgcttccagaatccagatctggatgcacatgaaccattgtttgcatttggggcaaccttgatttgggtttttaagtgctttatggaaactgtggtctttaaatttttaaacttttgtcgaatgac

SEQ ID NO: 18922 - DNA, 339 bp, Glycine max
attttgctcccaaaaatttcatctctcgccattgccgtaggagagcacttcaattttctctccaataagacaattcgttctttcccttctcaatttccggcgagttctcccaatcttcgattttgttctgcaacatttatcgcttccagaatccagatctggatggacatgaaccatcgtttgcatttggggcaaccttgatttgggttttgaagtgctttatggaaactggggtctctaaatttttaaatttttgtctaatgacgaagtgcgtgcctagatttgagtaactgggtcgctgctacagttgtggaagtttgagaattgggcttcgatttg

SEQ ID NO: 18923 - DNA, 278 bp, Glycine max
atgcttcagtgaatttctctgtgatttttctcccaaaattttcatctctcgccatcgccgttggagaacgctccaattttctctccaacaattcgttctttcccttctcaatttccggcgagttctccctcttcaatttctcaatccagatctggatgcacatgaaccattgtttgcatttggggcaaccttgatttgggtttttaagtgctttatggacactgtggtctttaaattttcaaacttttgtcgaatgacgagtggcgtggcttcaattg

SEQ ID NO: 18924 - DNA, 376 bp, Glycine max
cttcggttcaattctatatactgtgtatgggtatccatgtgtgtgcatgagtatgttaatatgaatgcatttaaccgacatacattactttatttacactgttcattttgcaggctcaagataatattatgaaccttccattagcaaatggatggggtgaaaaacatcgtctttttgtgaaatggaagtatattgaagcaaaggcttgagtttttactcaccactcatttgcatcttgctatttaattattatgtattagtatatcggaatacaattagagtggaatttgctgaatactggctgccctttgactattaaacgcagatgaagtataaaatgaatcaaattaatagatggtccacaagataaaatatg

SEQ ID NO: 18925 - DNA, 756 bp, Glycine max
gacgacagacgggggctggcataaagtgccctttgttgtgcaaagagttcatcatagatgcatggcaactctactatgctcgaactaaaggtgcagatgcagtccttttaattgctgctgttttgcctgatcttgacatcaaatacatgatcaagatatgcaaattactgggattgactgcacttgttgaggttcatgatgagagggaatttgatcgtgttcttgcaattgaggggattgaacttattggcattaacaaccggaatctcgaaacatttgagctggatatcagcatcacaaagaagcttcttgaaggagagcgaggcaaaataatccgtgagagaggcataactatggttggagaatctggtctgttcacccctgatgatattgcctatgttaaggaagctggtgttaaagctatattggttggagagtctattgtaaaacaaaatgatcctgggaagggaatcagcaatctctttggcaaagatatctctttgggttgaagtgagctatctttcttgagatatataggcattggacatgacagattttgataaggttcttgatttgatgctttcaacctttgcttgtaccaaattatcataaccttgtcaacaacagacttgtacctaaataaactttgaatgtttaataaaactttgcaaataaatgatatcattttgggacgattgttggcggcaaaaaaaaaaaaaaaaaaaaaaaaaaaaaaaagcggccgccccagggggt

SEQ ID NO: 18926 - DNA, 458 bp, Glycine max
atcatcataaaaaaaatattttattatgaaacttattcaaacactataaatccttttcatcattaacttgttctgaaaatcaggtccaaaaaggaggggaaacgatcctaaatactgctgcagaaaagaacaatggtggcatggtcacagaaagtatgaaccacaggagtgatgccacaaagaataatgcaacgaacgataacctcaaacgtgtgagaaagctgacaaatatgacagaaaggttaaccaaatctttgcttgatggtgttggaataatgagtggatcagtgatgactcctgtgctgaaatcccaaccaggacaggcattcctaaatatgctccctggagaggtgctgttggcttcccttgatgccgtcagtaagtaacaaccaaagtctaaaatattactactatacggctagcatatatggtcttcatattatgaaaatatcaagaca

SEQ ID NO: 18927 - DNA, 526 bp, Glycine max
cttcagagaagtcccattttccaacttatgcttataagatgatggaagaagggaagctgagagatatttttgactcggagttgaaaattgatgagaatgatgataggtttcaatgtgctataaaagttgcattgtggtgcatacaggaagacatgtcaatgaggccatctatgaccagagttgtccaaatgttggagggtatttgtattgttcctaacccaccaaccagttcttcgttgggttctcgcctttatgccactgtgttcaaatcctccagtgaaggggccacctcttctggtccctcagactgtaccagtgatgcttatctctccgcggttcgcctttcagggcctagataacaatacctgtctcttttgtttattttctgtgtgttgtattgttgagtaaattagtttgtgtaatacagcagagctactctggattgtgtgggctttgcatgcttccagctcttgtacattttgttcaagttcctcaaattttgtaatataaatagctattcataacc

SEQ ID NO: 18928 - DNA, 438 bp, Glycine max
agccttctaaagtaagaatttgtcaagtcattagacaggagaggacaatgcttaaggagttcattcattgcacatcaaagttattcatttgtatttgagcttaagtgtttatccattacattgactaatttgaatctgtgtattcattcaaatattatttgtttgtgaaagtcgggagtgacttagtattagacaatacttgagtatcttggatttagttagggaaagtctaagggtgtgtcagtagtgacctagagaatactattgtatcatgaagtagtaggacaaaatacttgtttgtaatcaagctttgattagtgaaaccctccacgaatttgtgaaagagaacttgagatagctcttataaattttaaaatcatatgtgaagaaaaactggacatggctttgattagtggaaccctcactttttgaaaagca

SEQ ID NO: 18929 - DNA, 504 bp, Glycine max
ctaatcttatttgtcagaaggcagaaaatggtaaacaaattagaagctataggcatatagcaggacttgggtacccaaatttttttacaaccacttcatattattcttaagtagtgaaggtattgcagactacagaaaagggttttcagttcaatcctttcataacttaaaaaaataagattgtttaatgtataaagtggtatttatcttaccctctgtgtttgtctgaattgacaacgactgtgatgctgtttgaaatctgttcaaacgttctgctcctctatgtcccatgcctgttacctctcacttcctatgtataattaaacgcaatatcttggcatacatctaatcccttcctctgcaattcccaattgcgacaccttcatatctttgctatcctctaaatatgttaaaatctctaatagatctctatcaatcacctaagcagtcaagttatctagctgcattaaaactcttccactttcacaagataaacaaaacttc

SEQ ID NO: 18930 - DNA, 394 bp, Glycine max
gggattcataggtcagcaaccttcttgtcttgagtgatggcgaaggacatcaacctcagctctcgaacccctctgctcttgctgttatgtttcaccactctcaccgaggctgtatggttaaccatccccagcaagggaaccaagtgcatgtccgaggaaatccagacacacgttgtcgttttagcagattactatgttgtagccgatgatgtccagggtcaccaacttcaaactatttccgccaaggtgacatccccttatggaaataatcttcaccagaatgaaaatgttacccacggtcagtttgcatttacaactaccgagtctgggaactacgtggcatgcttttgggtgaataacaaacatcaagaaggtggaggagagaccacaatca

SEQ ID NO: 18931 - DNA, 328 bp, Glycine max
cataagttttagagtatctgattttggattcataggtcaacaaccctcttgagtagtaatggccaaggacatcaacctaagctctctgctcttgctgttatgcttcaccactcttaccgaggctctatggttaaccatccccagcaagggaaccaagtgcatgtccgaggaaatccagacacacgtcgtcgttttagcagattactatgttgtagccgatgatgtccagggtcaccaacttcaaactatttctgccaaggtgacatccccttatggaaataatcttcaccagaatgaaaatgttactcacggtcagtttgcatttaca

SEQ ID NO: 18932 - DNA, 417 bp, Glycine max
ctacagaaggacgacagggaagagggaatgctatgaatctctcttatcttactcgcttccccgagcgtctcgttgctcctctttatgccacacttcccactacagctactactagtggaaataggcctgagaattttgcgattgaagggcgtaatttgaaattctcattcacgacgaggcaaacacaggatgtaccggttcttaaggattgttcgattcgcattccttgcggacagtttcggatgctacttggacccaatgggagtagaaaatctaccctcttgaatataatggctaggtctcttgacttcaacttcaggaacagtgtacgcgaatacacctaacagtctcgtattacacaatgcagatcatcaggtggtaatgcctactgtacatcctgatgttgcataaggactt

SEQ ID NO: 18933 - DNA, 490 bp, Glycine max
accgaacttcaatttcggcctagacctacgcacccgtgctacaagacgacacaacatatagcacttttcacatgtatgcagaaaaatgtgaagtaccgcgaacaatcaggaactttttttggtgtacaaactatatagtatgtccacattgaaatttctacgcaattaatatcacataacaagacggcaggggtattatcggcatacatgattacatcattgaacccgaaaaaccagaccaaatatctacagctgatagaatctgacaatttagcatatttaattatagaatagtaagattagtagtcacaattctacacctataactttcattttatttttcttaaaattgaatcacatctacgcgtttacattcttaccgactcatattatgccaggttttataatagtaaatcaaactttatcgacaacattgagttatcaaagtatttatgtagaatatgacatggcatccgattgtcggtatact

SEQ ID NO: 18934 - DNA, 405 bp, Glycine max
aaccattctcatacgcctgataaaaacaatattggtatgcgccccatacatgtgttggtagaactttaatgtgagaggagtggttcatttctataaattatgtttttctcgagggatttttccttcattattatattatttaatttaatacaaaaatataattaatgtatacattttaatgatttactaagtgacgtgttttaattaattaaattcacattaaatgttgtcttgataaaatatataaataaatcaagtatggataataattataattagaaattgaatatagcaaatgagttcgattcatatcattcataagcttgcattgttttggagtgtacatccaccttttaagtatttgacgaatagttatattgccaaatagaaacatacttatacaaa

SEQ ID NO: 18935 - DNA, 410 bp, Glycine max
gtgacttggaataagtggaaacaaaatgtattctgttttttgccctccctgtttttttgccataatgtcaactactttccccacatagtcagtgagatttttaagttctgcatgcttattgttctattgcagtgaatagttcagaatttggcctagacgttgaagattacttaataggtgagtcttctaaacatgtacttgcattaattgtttatgtgtaatgatcattaatggagatgaatatgattctattgcatgttttcttaggctagcttccttcaagaagtgttgactaatttaaatatgattgtcattttgaagaacatgggtgtggcagttagaatcagtagggtttccaaggcaaaggagctcaataaccaaatgcgttatggtatactgttagttatatt

SEQ ID NO: 18936 - DNA, 444 bp, Glycine max
agttcaactatgaaacatgttcatatggttgatcactaatgatactaacaaatatctctccatccctagatgagatattcattagatgctctattcaaaactcatttttcaagcatttttcaatgacaataaaaacaaagaattgaagctaaggtgatcaaaccataaaacaagccatcacaatggaaagaagcaataacataggaaatgacattgcataaatataaacattaattacatgagagtagcttagtacaccaatcccccaacaatagatgaattagtctttcattgtcataaaaggcctcaaaactacaaaatgaaaaggagaaaatgaaagaaaatggaagatggagatagatgagagcttcaatcgtcgcacacaaccctaggtttatgctttcactttcatgtccaagagaatgtcctttatattggacctaa

SEQ ID NO: 18937 - DNA, 466 bp, Glycine max
gtgctagatggtgaaaaccatttgccagcacagattgaatcaggtgttgataatcaccagagatatctttttggtaagcaagatcatgggaagcaacatgctttttcaaagaaatctgaatcagcacacttacaaaattcaagtaagaagagcaggagtgggtcagatctcaacaatccatccttggataggcaggttgagttacaaaaatctactgttccttcgaataactcatatttcaaaggatcgcctacctcccattttagtagaggtggaagtatgccaccccagtaccagcctttagatagtacaaattcatcatttggtaactatggtctgagtggctatgctggaaatccagcattggcatccttgatgactaaccaacttggcactggtaatctgccacccttggttgaaaatgttgctgcagcatcagcaattgcagccccttgaatggactcta

SEQ ID NO: 18938 - DNA, 252 bp, Glycine max
ggggaacagacctgcccgcaatgatgaagtgtttctcggtgtccttagcctctttatgggttctccttgctctcttttctctgagtgtgtcatctcaaaatatatctgagagtgggctacagcacgctagcctaccaccaagaggttggaattcctatgattccttttgctggacaatttctgaagacgaatttttacaaagtgctgaaatggtttctcaacgtctcaaggctcacggatatcagtttgtcg

SEQ ID NO: 18939 - DNA, 381 bp, Glycine max
ctctagaatagatagtcaatctagagtccttagagcgactcactgagacattaaattttattcctttaagcttaatgtttttacaagttaagtatttgggcatggagttgtttgcatgtaaaaagattaatatagtttgtatctcccaatgtatgagaattagtttatgttttatgtaccttggtgatcatgttttgtaaggcacataagtgtcaaaggctttgtataagttttgttcttatgacgtatgtgtaagttttagtttacatgcagttaattatggtattcttctattctaagttttcaaaatttagtaatataagcgtgcaaaaagtaaattctttgggctctaacattgttttgatagccaaatcaatagaa

SEQ ID NO: 18940 - DNA, 325 bp, Glycine max
cggttcatatctgtctgtactctgctagctatcaattctgtggagtgtagacatcgcatagacatttctatttacctaatagtcagtgatctagctacaccctgacaagctctgtgaccaaatctctgatgctgttctctacacttgcctataacatgacccagacagcaactgtgcctgcgaaacatgcaccaaaaccaacttcgtcatgctcttctgacaaatcaccaccaaagtccatgttcgactacgacaagatagtgcgtgacacctgcaataacatcggcattgtctcaaactatatttgactgtattccaacaactg

SEQ ID NO: 18941 - DNA, 431 bp, Glycine max
gaaatcaatcaaaactcttattagaagtaggtattttacaattttgtaagactaattgcagtgcatgatgattgggatgaccaagtctatcatgccaaagagaggtgatcctattacatggatttacaatgggcttgtcaggcttattacatggattaacagagggtttttcagaactagaaatacaaggaaaactagaagaagcagaaactggatgttggagaagctgtagagaccatcaggaccaacattacctttaagttagacttcattggtaacctgcgattttacagcacaataattagagtgaaattcaaagaaaacacctttgtcccttgcaaattgattaacattaataagatttttagtaatgttaggaacatgtaagagatgtttaagagacaaagagattttggtattgaaaggagaaa

SEQ ID NO: 18942 - DNA, 374 bp, Glycine max
tattgtttattaattattttattttttaattaaaatataattaataacgcaatattttattttttaaaaaaatatatgaataattaaaaaaaattatattaacatcggtttttcaagcaaccgatgttaatgcatacacgttaacattggttttcaaaaaccaatgttaacgtgtatgctttaacatcgatttctttggacaatcgatgttaacatatcatacgttaacatcgtgtttttcaaaaatcgatgttaactaatgatgttaacatcggtttttgaaaaaccgatgttaatgtctatgcattaacatcggttttcttgaaaatcgatgttcagaaggatattttatttacaaatataccaccgcattt

SEQ ID NO: 18943 - DNA, 487 bp, Glycine max
aaagaaaagaaaaaaaaccgaagatgatacacagcgaaggaggggccgctaaaagccaaggttgtcggaattggatttgattcttcttcatcttaccgatttctccgatcaaagttcctcactttctctcccttgatcgacacccaccacgcgttagagagagaaaaaaaaccccgagagatcggaaagatgggtacgcttcagtcttggagaagagcctacggtgccatcaaggataccaccaaagtgggtcttgcccatgtcaatagcgattacgcggatttggacgttgccatagtcaaagccacgaaccacgtcgagtgtccccccaaagagaggcacctcagaaagattctgtttgccacgtctgctgtgaggcctagggctgatgttgcttactgtatccatgcactttcgcggcggttggcgaagacgcggaattggacggtggcattgaaaacactgatagtcatccataggttattga

SEQ ID NO: 18944 - DNA, 421 bp, Glycine max
  unsure (1)..(421): unsure at all n locations
cttcgggtgttagaagacgacagaaggggaggagatagacaggggaaatcttgagattcagcaggctgagcgagagtgtgatcttaatcgtgctgctgaattgaagtatggtagtctaaactccttgcaacgccaacttgaaaagtgccgagaaagaattgcatgaatatatgaactctggtaaatctatgttaagagaggaagttactggaaatgacattgctgaaattgtaagcaagtggactggtatccccatttctaaacttcaacaatcagatagagagaagttgttgtatctagaggaagagctccataaacgtgttgtcggtcaagatcctgctgtcaaggcagtagctgaggctatccaacgttcaagagcaagtctttcagatccccatcngccaatcgctagcttcatgtt

SEQ ID NO: 18945 - DNA, 424 bp, Glycine max
caaaggcaggactaccttgtctaaacatatattcaactgcggggcgaggttgctcccatttcccactagcagtcttgaataatatattaatagaaaaatatacacttaaataaaataatgattaggcattgaaaaataattgtattgaaactaactatacttaagaagcaacagtaacgaatattaaatgtcctacagcaaaagcttgaataggcaaatcttttcgaatattaggaagatttgtgggcacttcaatgactggcatctggaacatttttaagaactctttctcctgcaatgatatatatggtcatcaagaactcataatagcacaaattgtaatagtaatgacaactcaaatgaaatgtcaaaactatataaatctttacttctgttttggcagtcccagtcattcctgacaact

SEQ ID NO: 18946 - DNA, 463 bp, Glycine max
gacaccatatgaaggaaagtttcgtgggttttgggtacatgccttctgcggccgcacaaatcccatcttcgttgtttcaattttcctctcgaccacactttcctttttgcaagtaagtagcaccaagaggcaggaactagagagtaacaacaaattcaatgtcaaactcaaacatcacaagttgtgatagttggagcttcactacagagaataataataatggagaagatgcagcagcaactgttaaacagcaattggagatgcttggccagctttatagtccaaattcaaacacttcaaccacaacaaataatagcaatggtggctcaaacgcagattcacaaccacctgctaagaagaaaagaaacctaccaggaaatccaggccccagtgctgttgtcatagcactctcaccaaacaccctggtggccacaaacaggttcatatgtgaaaatgcaacaaa

SEQ ID NO: 18947 - DNA, 614 bp, Glycine max
ggctttttctacatttccctttcctgaattcctcttctactactcacacctctcttttctctcccactctttctccctcctcaattacttctccttttttttctgattttttctttctttctttgaaggtttcgttttgcaggtcgctccaatggggaaatcctcctcttcgctcaagaagaaacgttctaagaaattatcgaaggccaaggcaagcagtaaaagtaagagaagtaggaaaagtaaatccaagaaggttcgtcgccgtaaggtttctccttctagttctgactatgatgattcaaaaagtttggacacattggcttcctctagttctgaagatagctacagaagaaaaagggacagatctcgcacaagaaaagatgtgaaaggtcttaggaggaaggctcgaggacgatcttacagcagtgacagcagcgaggactctcattatgctaggaagagaaaaaaaggcaaagaggaaaaatgagcgtgacgaggtgatgaagaaatcctcccagaagaaaaagattaagagagagcaagtgttgatttgatgagcagcagatcgtggagctgctcaacatgtcaggatgggagtgctagcagtgatg

SEQ ID NO: 18948 - DNA, 426 bp, Glycine max
caagaagacagagagaagagaaacaaagaaagaaagaaagagagagaggtggttgaagaaacgaaccctaagagagagagagagagagagaacagagagtctttgctttgatttcaagctcctttaccattgcatttcgggatctcgaatcttcaatctgcaaagtgtattgttgattctgcttctatggcaaattcaaagggctcatcaggtttcagaaattttatgtatcctggaaagcatcctctacttcctcctaaaagtccgtttcctagtgtttcccaagcatatgctgattatgtcccaaatcctgctgttggtttaaaggctggtaacagacctagagatggaaacacacaccaccaacgtacttcatctgagagcctcgttatagaggagcagccttcatggcttgatgatctcctt

SEQ ID NO: 18949 - DNA, 368 bp, Glycine max
acgcgtccgaagacgagcggccgctttttttttactcttttttttttctttttataaaacaactaaattgaggatgatcggataatgaatatgaacgaaattgatcatgatcgtattatgaatatgaatgcataataataatcgaaatcaaaagaatgtaataaataatgatcaggttctaaatcatataaaagttggctctgataccaaatgttgggaaaactatgccattaattatatattttataaaaatttagaacgccgttaaaagtcttgttgaagtcatcatctaaaagatgggaatggtctatgcatactacaacctgtagaaacccaaaagccaagccttcgcttgcgtgatcacactc

SEQ ID NO: 18950 - DNA, 242 bp, Glycine max
caggttcgaatcctgtccccgcctaatcatctgaggccgtagtcagcctccatctttcagattcggctgtaactcagtgagtgctttcctgttcccatggctttcttgattggtaaacccatccagcgatttacaacaaacaagtctttcgtctccccttggtcgaggtaaagaaagcggatcacaaagactgttcatatatatatgaaatatatctgtgttgggaaggattccaaggatgt

SEQ ID NO: 18951 - DNA, 309 bp, Glycine max
  unsure (1)..(309): unsure at all n locations
cgcgttcggacggctgatagaatacaaccgacaactgcgctgaatgtttaagatcccctacccccctcgcggggctccccttgccctttcttggttggtaaaccaaccagcgatttacaacaaacaagtctttcctctccctatggtcgagatactaccaacctcatttgtcttttttaaggggagcagagctatttctcacagttgcctcatgttgaataacaattaacttttactctttggaaatccaacgtccagtgatgtccaatttatgctatcagatactaggaatatngtctttgatagtct

SEQ ID NO: 18952 - DNA, 751 bp, Glycine max
ctactctggacatgcagtgttcccgaacatttatacatccatggcaaatccaaaccaatttcctggagtgctcttagcatgttttggtatttgtaccttattgtatgctggggctgctgtaatgggatacacaatgtttggagaagctatactgtctcagttcactctcaacatgcctaaagaattggtagccaccaagattgctgtctggactacggtggttaatccatttaccaagtatgcattgactatatccccagtggcaatgagtctggaggagttgataccgtcaaaccatgccaagtcttatctatattccatcttcatcagaacagggctggttctttctaccctatttattggtctctcagttcccttttttggtctggtgatgtcattgattggatcattactcacaatgcttgttactttgatactaccctgtgcttgtttcctaagaatacttgcgcggcaaagtgacacgaacacaggcagcatatgatgatttcatacttaataatacggctcaatataagccataatgtaataaatatcttcctatttttaacttcttaatttgacttccactacttttatctctcattttaagacttagttagagaaaagggtataaatgagaagatagtgattgatgttgtcttgaacttcttaatggacgataagaagaaacaaatttttctttcaaaagtggacatataaaaagagagtattgatgtgaaaaaataaattc

SEQ ID NO: 18953 - DNA, 626 bp, Glycine max
ccatttaccaagtatgcgttgactatatccccagtggcaatgagtctggaggagttgataccatcaaaccatgccaagtcttatctatattccatcttcatcagaacagggttggtactttctaccctggttattggtctctcagttcccttttttggtctggtgatgtcattgattggatcattacccacaatgcttgttactttgatactaccctgtgcttgtttcctaagaatcttgcggcgcaaagtgacacgaacacaggcagcactttgcattacaattatcacagtaggtgttgtatgttctgcttttggatcatactccgccctttgccgagattgtgaagagtttgaggggatgaagttttgagactcaaatcctggaagattagatatgtgatatgtctgccgctatttagtctgtccagatattctatctagtttgattgcacatccacaattttgagtcaattttttgcttgccatgacttttccaatctgtttatttgtggtttttctgatcccctgtttccttaccataaaccgttttgctcatgtttgaactattggtaatcatagagtgtggcagacaaaacacttaagagtttgtaagaagcgatcaaa

SEQ ID NO: 18954 - DNA, 558 bp, Glycine max
tatataaatatttttagaaattaaattatataaaaaaaaataaaataaggttatttagttaaagtaaattataattgttgtgtttaccaaaaagaactgcagcttcaaagttttggtaaaggtactagacaacagtaaaacgcgtgtttcaagtccgatccaccaatatttttagtcggaggattcgaacacaaacttttaaaaattaaaaaaagaagctatggaaaatgggacccgcaagcgaatatttcggaatctctcttgagcatcgctcatggtgaaagcgcgataagctttgagcttctttagttggacacacagaaaatcgttgagccccagttaccattgtaattatcatctttatttatatatttttccgttgacttgtgatactttgtgaaacatttacaaatcatatcgcaaaaagtaaatttgtttttcgttactaatgtgagaattttagaaagaatcttgttattagataagatagcctttaagtatttttttaagcgtttattgaatccgtcccataatataactcacctaaattttgtttag

SEQ ID NO: 18955 - DNA, 415 bp, Glycine max
gacgacagaagggagagttactgaaattaaaaacacaatctttatatgctttaaccacagtgcacagagtcattcttatccaagaaacaatgcttcaatccataaataatttgtagaccctgaactcttgcaaacaaaaactagattccgcttattagttagagtaaattataatagttgtgttaaacaaaaagaactgcagcttcaaagttatggtaaaggtactagacaacagtaaaacgcgtgtttcaagtccgatccaccaaaatttttagtcggaggattcgaacacaaacttttaaaaattaaaaaaagaagctatggaaaatgggacccgcaagcgaatatttcggaatctctcttgagcatcgctcatggtgaaagcgcgataagctttgagcttctttagttggac

SEQ ID NO: 18956 - DNA, 372 bp, Glycine max
ggggttatcaccctcgggggtctggataggaggaactaaatgggttacaggaaaaagcgtagttagacataacaataagtggggagcatttttttttttctaaaaaactttaagaagaatcttaaaatgtaggtttgacctatctcaacctttaaaaatcagtttgtaaggggaggattgctcctcacttggatactctattttgacactatctttaaccaatgtgggacttcaacacacccactttttgcctatggctacctgccaatgtgggacttcagcacacccctttttgcccacaggtacctgccacaactaaggtgggctaaggatgaccacaattaaagtggcttttcaacacttcccacatgc

SEQ ID NO: 18957 - DNA, 392 bp, Glycine max
accgttcttgaattcccgggtcgaccgacgcgtccgcggacgcgtgggtgtcgacagcaggggaggttttgaaggatgaggaaaggcgtcaacggggggatcagcttggtcatgaggcttatgtaaaccatcaaagcactggttttggaggcgagggtggcttcaatccttttgagcagatattccgtgatcatgattttgtcaagagcttcttccatgagaatattggtggagaggatgtcaagacttttattgaactatcttttatggaagcagtacaagggtgcaccaaaactttgacatttcaaacggatgtgctttggaatgctcgtggtggcaatggtgttcctcctggaactatgcctgaaacttgtaagccgtgttaagggttc

SEQ ID NO: 18958 - DNA, 153 bp, Glycine max
gtgtgctgatggaacgataggcttttatacaggctttgggatatctatattgacttatgcgccttccaatgcagtttggtggacttcttattccatggttcatagactcatttggggtgcttttggttcttacatgggaaataacaatggtgg

SEQ ID NO: 18959 - DNA, 262 bp, Glycine max
tccaatgacaaacaccacctttagcacaaaccaaaaacaccaaccaagaagtgaattttgcagcgagaaagcctgtagaattcaccccaattccagtgtcctatgctgatttgctcccatatctacttgataattcaatggtagccataaccctagccaaggttcatcaacctccacttttctgaggatacgactcgaacgcaacgtgtgcttatcgtagaggagccctggggcattccattgagtattgtatgaccccgaa

SEQ ID NO: 18960 - DNA, 596 bp, Glycine max
acgaggagacatagtgtgttgcctgttcctgggcccaaatagtggcccaatgggaagcaacaacacaacaaagggacttgatagtttgattgatgatggtgagtgtaacagtgataataaatttgaggttgagagagtgaaagaggagatgggtgcgataacgagcgcggtgatagcagtggtgggagttcttctaggttggatcacaatagagatcgcatgtaaaccctgtcttcaacaggctcgccaagccatcgatcggagtctcgatccagattacgatcccgacgacgccgccgcccccgccatccgcgccccactcaaccccgcccccacagcagcttcctccgccgccgtcaaagccgtttgagaatcgatgtcccttcttctcatgtttccgcctggtattctattcgatgtctaaatcaaaaggctattttttttttatgtgtgcatttgctcgtttttggtggcgaaattaggatctaaaatgtgtggagacttgttattgtatgaatggagtttgtaatttacctcagtcattggggatcgtaatgttttcttcatcattgtgaatgtataattacttatatttg

SEQ ID NO: 18961 - DNA, 331 bp, Glycine max
gtgataataaatttgaggttgagagagtgaaagaggagatgggtgcgataacgagcgcggtgatagcagttgtaggagttcttctaggttggatcacaatagagatcgcatgtaaaccttgtcttgaaaagggtcgcgaagccatcgatcgaagtctcgatccagattacgatcccgacgacaccgccattcgcgccccactcaaccccaccggccgcctccgccaccgtcaaagccgtttgagaaattgatgtcccatcttctcacgtttccgcctgagtattcaattcggtgtctaaatcaaaaggctatttcctttctttttttgatg

SEQ ID NO: 18962 - DNA, 866 bp, Glycine max
gtaccgcgtccggaattctccgtggtcgactccacgtcgtctcgtaccggtctgtcgagaaagaccgaccagaaggggacctgtcatcatcggacatatctcgctctccatcttgtagagcattcgcacttggtcggatggaaggtgcgaaggggacgccccatttatctagcagccatcttcatcatagttcgtgtgtctcttattatggactcctgtgcattcctgggcatattcccacactcctgtttttacctgcatctatataacacatctctgcatatcttaaaatcacactcacatggaagaatatcagcaccacgttcatcgctcatcaccttagaatcacaaccaggaattgcacatgaagatccttttgcaccagccatctgtggatgatttgcttcagattcaatcaccttatccatgagatgggctcgagtgacactgttgaatccacctgtgaaaagtgaatttgacacatattgttcctcaactttctgtgagattgatggatccataggttggttatcaggggtaggtggtatatgcactgtgtaattcatgaagtcggtactccctagctcactgtcaagatcatctctggagtaactgacatagcgacccgaggaagtcctccggccaaattgtacacttggaggtaaaggtggcttctggtcatcaggtgcatcagatgacgatgatatagatgatcggcttgctctaaacaactttgatgccatatttgacgactaaggctgattataatatcctcttttgtttgtttgtttcagatctgtatttggtgatgttagcagaaaggcatgagaagagatggggtgtttgaatgtgatcggacgcgaaag

SEQ ID NO: 18963 - DNA, 443 bp, Glycine max
gcgagaagacgaccgacgggagctctcggctggtagaagcctatatcacacatgcatgagcgttatgaaaagatgaagcatgatggccctcatccagacatatctacatacaatattttgatctccagctttggcagggctggacgagtagacattgctgttcaaaattctgaagaactagagaatagcgactgtaagcctgacattatttcctatataactctttgatcaatcgccttggaaagaatggggatgttgatgaaactcacatgagatctaaagagatgcacgagataggattaattccggatgtcgtgacttatagtacacttattgagtgttttggcaagacggataaagttgagatggcctgtaagttgtttgatgaaatgcttgctgaagaatgcactcctaacttgatcacatataatatcttgcttgac

SEQ ID NO: 18964 - DNA, 463 bp, Glycine max
gaagacgacagaaggggatctccattccttccaatggcttcaatctctcacttcagaacctcggcgaattccttcctctcccaatacgaacctctctctctgcttctcgctcctctcctctctctcctcttcgctcacgctctccgctccttcttccacctcctctcccagaacggactcaaagccacgctcctagggtttctcattaactccctcaaattagtccctggcgtgaagggatacatagatgccgaaaaacaaaaggttgtggataagttgcaatctgatggtaaatctaaaagagaaggttggaaaactgagttgccaagcacaggattagggacatctgtccttgagaaaatgagagaggagaaaataaatgatgcggtttggcaaggcaaatgctctggtacagtctacattggaggaagtgaatctgatggacatttttctctgataaatg

SEQ ID NO: 18965 - DNA, 660 bp, Glycine max
cattggtgccacaaattgaggaatttggctcctccctcggtatcattggcttacttgacaaatttgaaagtagagtattgtaaaggattaaggaatttaatggcatcctcaacggcaaaaagcttggttcaacttaagtccatgaagataagccaatgtgatgaattagaggaaatagtaaccaataagggaaatgaagaagcagagcaaatagtgtttggcaaattgattactatagaacttgaggggctaagaaagctgaaaagtttttgcagttacaagaagtgtgaattcaaattcccgtcattggaagtattgattgtgagagaatgcccatggatggaaagattcgcggagggtggcgcgagtgcaccaaagttacaaaacatagttagtgctaatgaagaaggaaaagaggaagccaaatggcagtgggaaggagacttgaatgccaccatacaaaaagggttcaacaagcttttggagtctgcaagtactgaatcatctcttagtctcatagatagtccattacaagtgatatggcttgactcagggcggatcccaaagtcgtgcttcagtaacttgaactctttgactgtggacggatgccaatttttaacagatgttgtcatacccttctatttacttcctttcttaact

SEQ ID NO: 18966 - DNA, 405 bp, Glycine max
tggtttcctggtttggtcatagagaaggaggcactatcaaggttccccgacagaaaatcaaatcgtatatggttttgcgaaattccatcatttttcagaccatgtatcgatgggtttcaatattgcaagctcgttgttcaagtcgacaaaacatggttgtacaaaaagtaaaataggatctttcttatggcagttgcacacgatgacaacaactaaaatccttttaatagcctttgttgtgctcgaaggtgaaacaacacaagtgtgactctttcttcctcaaaattttaaaaagacatctcaccccataagatggtctatgtttgatttcaaacaaccatgtgtcaattaaaagtgcctccaaaacgcgtgatagtggatgaatgacacataattctatgcatg

SEQ ID NO: 18967 - DNA, 879 bp, Glycine max
  unsure (1)..(879): unsure at all n locations
gataatgaaagtcaggagggagcagatgttgaaacagatgatgaggatagaacatattttgacacaaatgaatttttgtattctgatgccctaagaagtgcttcctatcgaagtagggaaggtatgggcaatgctagtatattcgatagagattatatttgttatgatggtgtgcatgggtttgacaaggagatcaaagatgtaagttatccatatgtcaaaagaagggataacctaccagagccaaaagaaaaagagaagcctgttggtttgtggtcaattattaaagacaatattgggaaggatctttctggagtttgtctccctgtttattttaacgaacctctgtcttcattgcataagtgttttgaagacctagagtattcatacctggttgatagagcattggagtggggaaagcaggggaatgacttgatgagaattctaaacattgcagcttttgctgtgtctagctatgcgtcaactgaactgtcgacaatgtaaaccttttaatcctttactctggggagacctacgaagctgactatccagataaaggacttaagttcttcttctgaaaaggttagtcatcatccaatgattgttgcttgtcactgtgagggaaggggatggaagttttgggcagattctaatttgaaaggaaaattctgggggcgttctatccagttagatcctgtgggtgtcctcactctacagtttgaggatggtgaaacatttcagtggagcaaggtcaccacttcgatttacaatatcatactaggtacaatttattgtgaccactacggtaccatgcacatcaagggcagtggcaactattcttgcatactganattcaaggagcagtctattatagacaga

SEQ ID NO: 18968 - DNA, 1067 bp, Glycine max
  unsure (1)..(1067): unsure at all n locations
cnctccctaacctaacatttctagacatcagcaccgcaactttcgaggtcaaatggcggaacgcttaggtaatttgcagtacttcaacatgtccggaaactccttcggaacctccttaccggcctctatttggaatgctactgatcttgcgatcttctctgctgcagcaacaatgagtgcaccatgctgctttacgagtacatgcccaatggcaatttggatgattgggtgcatggcaaaaataaaggagataatttggtcgccgattggttcactaggtataagatcgccttgggcgtggctcagggaatctgctatcttcaccacgactgtgatcccgtcatcgtgcatcgcgatctcaaacctagtaacatattattggacgctgagatggaggccagagtcgcagattttggtgtcgccaagttgattcagaccgacgagtccatgtctgtcattgccggttcctatggctacattgctccagaatatgcttacacccttcaagtcgatgaaaagagtgacatttacagctacggagtggtgttgatggagatcctaagtggaaaacgttcggttgatgcagaatttggcgatgggaacagcgttgttgattgggttaggtctaagataaagtctaaagatggcattaatgacatattggacaagaatgcaggggcagggtgcacctcagtgagagaagagatgatacaaatgcttaggattgcattgctttgcaccagtagaaacccagcggataggccttctatgagggatgttgtgttgatgctgcaagaggccaagccaaagaggaaattgcttgatagtgttattgtgggtcgatgtgctggggacaatgtggttggtggtggtgggggtgacattcctttgccacaaaagccaaccgcggatcaatgctaatgtgtttatatgattgacatgttttttcttcttcttcttcttttttatattttggatatttttcttattgtgggggattggtataggagaaagtcatttcctattttacttccaatggaatttcaagtgtaacttgttctagtttt

SEQ ID NO: 18969 - DNA, 397 bp, Glycine max
gtctaaagatggcattgatgacatattggacaagaatgcaggggcagggtgcacctcagtgagagaagagatgatacaaatgcttagaattgcattgctttgcaccagtagaaacccagcggataggccttctatgagggatgttgtgttgatgctgcaagaggccaagccaaagaggaaattgcttgatggtgttctaggtcgatgtgctggggacaatgtggttgttggtggtgacattcctttgccacaaaagccaattgcggatcaatgttaatgtgtttatatgattgaaatgatttttctttttttggatatttttcttattgtgggggattggtataggagaatcattttctattttactttcaatggaatttcaagtgttacttgttct

SEQ ID NO: 18970 - DNA, 368 bp, Glycine max
cttggaattcggctcgaggtgaagctgaatcttccaatgttgcagtggagggtgaagctgaatcttccaatggtgcagttgagagtgtggctgagccttcaaatgatgcagtggagagtggagctgaaccttcacaaggtgcagtggagagtgaagctgaaccttcaaatggtgcagtggagagtgaagctgatccttcaaatggtgtagctgagagtgaaaatgaaccttctgtggatgtgtgtgagacaaaaaacgatgcagtgaatagtgaagctgaaacttcaagcggtggactgcagagtgaaaaagaggcttctgttgtgtctgagatggaaaacaatgcagtggagagtgaagctgaacac

SEQ ID NO: 18971 - DNA, 314 bp, Glycine max
ctctgacttggccagaaaccagagagtagtaagtggtgatgaaaagatgccttcaccccaaaaccagaagcattgaatgaacagaaggcattttcagcatcagcatcaacatgggtggggattctattgtttctcatggtacagacgaaggttcttgtttggaggagaattttcccttgctttcatctcactcctcacctgctctcagggataatttgggcttgcaggatgaagacaacagaatgaaagcggagaatgggttaacttgtagtgaaactgatgaagaaatcatacatccttctagagttgatttt

SEQ ID NO: 18972 - DNA, 913 bp, Glycine max
agttgcacgcagttgcctggaaagtagcaaagtaaagctctcttggttttgggaaccgaaacctaagaaaaacgcagaatctgtttcggaaagcgaaggaggcatggcatttgagtccaacgaagttgcagccacaacgctccaagccatatgctacaagcgcggttccctccagcttctcgatcagagaaagctccctctggagacagtttacttggaaattcgggattcaacggatggctggaatgccatacgggaaatggtggtccggggagcacctgctattgcaattgcagcggcactctctttggctgtggaggtgttcaatttagattttaatgggtcagctactgatgctgtatccttgctgcagaagaaattagaatatcttgtcacaagtcggccaactgcagtgaacctatcagatgctgcgacaaaactcaaagaagtgatatcaaatgctgctgctaccacttcagagggaaggagtgttttccaagtgtatatagatgctgctgaagttatgcttgaggatgatgttgcgtcaaatagagctattggttcttatggagctagtattattcaacaacaaacagagaaacaaaagctttctgttttgactcattgcaacactggaagtctagccacagctggatatggtactgctctgggtgtcatccgtgcacttcatagtgccggagttctaaaaagggcttattgcacagaaacacgcccatttaatcaaggatctagacttactgcctttgagttggtgcatgaaaaaataccaggaactcttattgccgattctgctgcagctgcattaatgaaggcaggacatgtggatgctgttgttgttggggcagatcgggttgcatcaaatggtgacacagccaacaaaattggaacctac

SEQ ID NO: 18973 - DNA, 501 bp, Glycine max
  unsure (1)..(501): unsure at all n locations
agggggttgcacccaaacaaaaaactaaatatggcaacttcgattaaggtcatgaaggggtttttttgtacaccaattcgccacggcaaccccgaaacagcagtcagcagcagaaaccatcaaaataaaatgaaccccaacgatttccccctccgaagagaggcttgtcgaggcctctgctgaatcggtgaagaggtgagcgaaggagtggttgggattttgaagaaagcggagagtgtgtgtaagttgaaaaggttgatctctctgggtcccactcgaggattctcccccaggcgttcgggaagattcgtgccctcgttgtgcttgatttgtctcagaatcagttaggggtatacacggttttctatttatctttgtgtgtttattttaattattagtctcgagttcgagcttttgcagaaatagttgtgttaaatactcagatatatttgactctaataggattgctccctgtgcaatacttaggatcttaancttacc

SEQ ID NO: 18974 - DNA, 411 bp, Glycine max
gattcaatgtaaaaattgaaagtggtgagtgtcgagtccactcgagcgccttagctagtctcagacactgtcgtccctttacctctgttgcttgtgttatccctttagctctattgcttgtgtcatggtggtggtttcatcgtcatcgtggtccgttcatcaccgtagtgttgttagaaaccctcgtgttgctgtccacgtcgatctgtgaaccatactcctccaccactgtgttgagaaatgtgtcaacaacctcagtattgagttcattggagatctcacgtgcctggcccttaccctagaaccccccctgtgccttgcccttacctctcttgctctcccgttccctttacctctggtgtagttgtcgtcatggtgcctttatagtcagcgcttaacaacatggcggac

SEQ ID NO: 18975 - DNA, 351 bp, Glycine max
gatctatctgtcctgcataattttactacctcagcgcgaccagtgcttcttattatacatcacatctattgtatggccactgaaatattatagactgcgtactcattcataacatatcagctgtacgtgtttctgatatatatttgcctcttagtgggtcgatattaattgaagatcatggctgagggaaaaacagcaactcaaaaatctcttcaggattttgatcctcaaaagacacccagaaggaacaagtatgccttcgcctgtgccattttggcttccatgacttccatattacttggctatgatgttggggtgatgagtggagcgattatatacataaagagagac

SEQ ID NO: 18976 - DNA, 809 bp, Glycine max
tctcgagccgaatcggctcgagttcaatttcaatttcaatttctttctctctagacgttactttctctattctcaaagtcacacacagcactttctctctcatcttaactctctcccatgtttcctcagtttcatcgatggagagtgaagccttaactctgcttcttccgtgttccagatctcgttgttgttgcttccgattctttgattcttcgcttttttcttctcacttcacattccgattcgtcgcagattcttttggtttctaaacatgatgatcgtcactgcctccacctgtaatcgctagttgaaggcacgtgaggtggtccagagaaatcaaaatctccttcaacttcgtcttccctttaggtgtaaaagtcacagctaacgataaagaaatgaaatcgctaactgttaacactgaagattctttttccagtttgctggaacttgcttctaacaatgatattgaaggcttcaaggtccttttagagaaagattcttcttcgatcaatgaggttgggctctggtatggccggcaaaacggatcgaagcaatttgttcttgagcacagaacccctttgatggttgctgccacttatggtagcattgatgttatgaagatggtacttttgtgccccgaggcagatgtgaatttcgcgtgtggggcgaacaaaaccactgccctccactgtgctgcttctggtgggtctgccaaggctgttgatgccgtcaagattcttttatcggctggggccgatgtgaatggcgtggatgcaaatgggaatcgccctattgatgtgattgct

SEQ ID NO: 18977 - DNA, 362 bp, Glycine max
ctagacgttactttctctattctcaaggtcacacacagcactttctctctcatcttaactctctcccatgtttcctcagtttcatcgatggagagtgaagccttaactctgcttattccgtgtcccagatctcgttgttgcttccgattctttgattcttcgcttctttcttcttctcacttcacattccgattcgtcgcagattcttttggtttctaaacatcatgatcgtcactgcctccatctgtaatcggtgattttctctcttttctctcagctcatgaatttttcctttttctttattagctgatgaatttacatgatcatcgagtaaatcactttttttccttctatttttatag

SEQ ID NO: 18978 - DNA, 556 bp, Glycine max
ggcaaaatggaaagcagaccatactggacgctgccgtgctatgccacatataaagacttttgctcgttacaaaaatcagagtcttgcttggttcttgttaacctcggcaaatcttagcaaagctgcctggggagctctccagaagaataatactcagttgatgattcgttcatatgagctgggagtactatttttaccatcattattcaaacgacacgaatctgtattttcctgtaccagtaatgttacagtatctgaggataaatgcccagcccgagaatcttctgagatgaagaaaacaaaactagtaaccctgactgggattaaaaaggagagtatgcattcatcatctgaagttattatccctttacctttgccttacgagctccctcccctgccttattcttcccaagatatcccctggtcttgggaccggcaatataacaagaaagatgtctatggtcatgtttggccacggatgtgagcatatcaaatgacatgattgtttctgcaaccaagtttgcctgtgcatgtatatatgtgttttacatgggac

SEQ ID NO: 18979 - DNA, 539 bp, Glycine max
tatccccccccccccccacatccaatcacgtactgacgtaccaaaatgcatctcggagacatggggcaagtgacaaaaagagagtacacaaatatacatatccatcttcccagtgataattactctatcataagttaaacacaaggaagacaaggtcccccagtattctactacagcttaaggttgataagctttgcaagaatgaccatataagtggaaggaaaatacacgtgctgtgataaagtggagggaagatttctgagttagagttacctaacatggccacaggggggatgctaactccctgtacaggcaaaataaaagaatcaaatattcttaatgatgctttgcagcatcgggttctataactcaacgaccagaaacaaataatgaattggatatctggctcccttcagcttggagtcttctcatctttgccttgtctagtcgtgctcttcgaaccggctcttggatttggcggtcgtggtccttcaacatctggtcatggttgcttgatggaactagcagaggaccagaat

SEQ ID NO: 18980 - DNA, 477 bp, Glycine max
gacaaaaagagaagacacaggggtatacataaataaatacatagccatcttcccagggataattactctatcataagttaaacacaaggaagacaagggcccccagtattctactacaacttaagggtgataagctttgcaagaatggccatatactaaaattgccgttgtaaatggaaggaaaatacatgtgatgtgataaagtggaggaaagatttctgagctataaagttacctaacatggcccggggggatactaactccctgtacagacaaaattgaaaaaaaggggcaaaattgaagaatcaaatattcttaatgatgctttgacagcatcgggttctacaactcaacgaccagaaacaaataatgaattggttatctggttcccctcagtttggagtcttctcatctttgccttgtccaaccgcgctcttcgaaccacctcttggatttggcggtcatggtccttcaaca

SEQ ID NO: 18981 - DNA, 344 bp, Glycine max
ataggccctgtctctgtctcgattgataatagggctgcataattgtttatcattcgcaagcacattttggtccaatatgtaactgctacgtttcatgagggactctgaaatgatccctgtcgttcatggaacatatctactttttaagggtgatattatatatatgggaaacacgcttcacaatgatctaattaatggcttgtatttttttttatttttttttggaaatctttgtatacttgtcgtgggggaagtttttttgtcaaattttcgtaagtgtaagatgtagtatagccttggattattttactcaacttatgtatagctagagttgcgtttcactg

SEQ ID NO: 18982 - DNA, 442 bp, Glycine max
ttccggttccgatttcggggtcgaccccgcctccgcgagatgacgacagagaggtgtatgccacatggagattattcagatcaatcttgatatgacaccttattaactctttttttagcttttaaaaaatcttgtaaattaaaaaatatgattatttatcacatggagattgattggatcatatggtttgaggaatcatgtaataatttctcatcaaattgggtataatctgctgattttaatgcaacatatgattgtttacagggcacttgaccaccaaaagttatgtctatagcttcggggtagtcctgctagaactgcttacaggaaggagagcaacagacaaaacaagaccaaagactgagcagaaccttgtggattggtcaaaaccttacttgagtagcactaggaggttgaggtacattatggatccaaggcttgc

SEQ ID NO: 18983 - DNA, 473 bp, Glycine max
actactactactactacttctttttcactttctctgtctctcacactatctaacaaccataaacgaggagatcactgcatctgtggcagagtttcatccatggcctttggagcggagtgataacagctagaagtgatacagattgataaattgaggtatcaagatgtcttatcgaagggggtcggatcagccaccgctaaggcgtggatactgcggactcagactgctgggaatttaggagccaattaaagagtatgaaaggatacattatacttggagaacatggaggaaagggaaactgggggcacacctccaataatccagacagtgagagcatgggacctggtattagttgtccaggtgaagtccacaccaaaggaaaagcagaagaagcaagagagagatgatggtatgaataatggatttgaacaagttcttttggtattagtggtgcaagctacttcactggaact

SEQ ID NO: 18984 - DNA, 459 bp, Glycine max
  unsure (1)..(459): unsure at all n locations
cggacgcgtgggatatttccacattcataaaagcttgaggtgtccattccttcctgaaagtgcattttatatttcctaatcatggtttctatggcaccgcaagagctcatccactcaactattagatgttctatccattggtcacatccttcaattttgagacaattctggtaacttagaacatgcaaaacccacaaaaatcacggatgaaataagaatttagggctctaaatgcgatcacattcacataggcaggtagtacttctcgtcaattgctgacagaaaacaagaaataggcttgcgccagttagttatactcgcataggaatcacaaggattgaacaggctctttgcctcttgtgccttctttttggtgctttttcctttggtggttgaaagaaccccttaacggcagtatcaaagacgtcttttacatttggttatcacagtnacacatgc

SEQ ID NO: 18985 - DNA, 444 bp, Glycine max
attgtttatcgagtccgaggcggaatgtgattgggaaacaaaaaaggcgatcgcagaagttcaatcagagactaagttgaagacttgaagccatgagatgaatcacttatctcttgacactgaagattctcttgcaagcttgctgctggagcttgcagccaacaacgatgtttcgggtttcaaaagattaatcgagtgtgaaccttcctccatagacgaggttgggttgtggtatggccgccacaaagagtcaaagaagatggtcaacgagcaaagaactcctttgatggttgctgccacctacggtagcattgatgtcatgacgttgattctttctctatcagaagctgatgtgaaccgatcatctggccttgacaaaagcactgcacttcactgtgcagcttcaggtgggtctgaaaacgccgtcgatgctgtgaaactgct

SEQ ID NO: 18986 - DNA, 419 bp, Glycine max
atattgggacatttcatttatttattgtagactgtaattaacttataacaatgatgatttaattgagaaattaaatcaactttatataatttatcttgataatgattgttgttgataaaatgtgttatcaatagatttacaactttattgtgtatatcatgatatgacagtcaaatggaagctaccaaaaccaaacttctgttttaatttaatcatttttaaaatgcttcatttctcgcctctgactctgcctcaaagaattaagcttccttcaaataaaagactaattgaacaataatttagccttgtctaagaattgaagggtgaggaagtataggggttgggactacggcttcattgagtttcagtgttctgttattagaatgataaggttaattagctactcttttatgtgacac

SEQ ID NO: 18987 - DNA, 422 bp, Glycine max
  unsure (1)..(422): unsure at all n locations
gacttgacttttagatttctgcaagttgcattgtgtacatgcaattctcatcttttttttttatcatgtcttgaacaaataagtattatattgatattctaaactcataaattcattcttgataattttatttatcttacacattactactttaatttttgccaagataaattagagtcttttctcttcacaaattactcccagagtgttggaaaaggcaaaatgagtttggacacgataaagaaactcatcaaatccatacaaatatttactcattagatgaattttatctgctgatgagcgttgatctcttcatacttaactgtcctgtaaaaagatagttggacaaggaaaggtgtcagactactcaccatttnccataaggaaacaatttctttatttttctaataatattttttaat

SEQ ID NO: 18988 - DNA, 391 bp, Glycine max
  unsure (1)..(391): unsure at all n locations
tcatggatggttaagtattgaaatgttgttttgcttctgctcttgatggttaagcctcgttggttctgccaagtggttaaactttgaggtatagtttctacttggtggttaagctttgataatttcatggattaatagtttgattgagcttctgccaaatggttttgttgttgatttcgcttgatgattaagctttgatgcttgctttggactcttggaagaagattgagaaagtcaaagttagttgaagatttttagaagtttttgtttctgaccgatgtattttcagcatgtttaactatatttcaagttttcaaaattttttcatttcctttaatgttgatatattgntttctctaagttagaagtgttttcaacaccttccagctta

SEQ ID NO: 18989 - DNA, 391 bp, Glycine max
  unsure (1)..(391): unsure at all n locations
aattcgagcgggcgttttttttnnnnnttttttttttnnttttgggcccagaaataattatatggctttgtagattatttaagtgatctcatgaattattttttaaaaatattatattgaacgggagtatttttatgattgcttaaatttggtacttaaaattatttaaaaagtaaaatggaaattaaaattatgttgctcctattagtatttaagttgataacttgtaaagaaaataaaaaatatgatactaatttttatgataaaaaattaagattcattttcaaattaattagaaatagacaatttacacaacaaatattttcaaataatgataatatataaactgaaaagcttatgcattaagaatgcaaatcttcataaagtagat

SEQ ID NO: 18990 - DNA, 367 bp, Glycine max
ggattgaaaaagattaactgcaagtagtactctcgacgcattgatcaaacattgatgataagttctgtcaaacaaagattgtttttgaacacttcattgctcacatgaaaaacttatatgatgattacttcagtcaaataatgattgttttttaacatttcattattcacatgaaaatcaatctgatgataattcctatcaaataatgattgtctttcgacgtttcattattcacatggaaaatcacattatttataatcaccatatgtttaccatcgcaaacatgtaattattctgccaaattgtgtcttcctttaggccgagcacaattcgcatgaataatttcatgcgacatttacgtaaattc

SEQ ID NO: 18991 - DNA, 598 bp, Glycine max
cttcactccaacaccaacaccaacacctctttctcgtcacagcaccattctctaaaactcctcagttgcttgtgcttcgtgcttgttcttcttttgtctgcatttgtacctcttgatttgagccacagcacaccctttttcataaatattaatattaaaataccaacaaaaaagagggtggtgggagaagaaaactagaaaaagtagcagcaggggcttacactgtaccattaccatagccactttttgtctcttgaatttcttttcctttttcctttttctttttgttttttcattgacttgttgttgagtgagggggtcttctttatctagccgaagaaacaaataatggttgctgctgtctagttctgtgaaatccaaccccatcatggatcttgagtctgtgatccacaggaacacaattaaggaagaatcatggaagacggtgttgactttggcctatcaaagcttgggggttgtgtatggagacttgagcacttccccactttacgtttacaaaagcgcttttgctgaggatattcagcattcagacaccaatgaagaaatctatggagtgttgtcttttgtgttctggaca

SEQ ID NO: 18992 - DNA, 383 bp, Glycine max
tgaaacagaaaattcaaatatagttccagaggcagtgataaacccaattagttctaaacactggaaaaccccatctaaattataccaacgtccaactgcccctgaccttctactagaagaaagaggagaaaataatttcaagagtttttctacaaataacatctatgaatggaatatagatgcttaaacagaatacaatatcatgaatacactccaacatatgacaatggtagccacgacttaccaaacctcccatgaatgttcggaagaaaccattataaacattttagtggcaggattttccggacaactaaaaagttggtgggataattatcttaccaatgaaaaaaagtaaaaaatttacagcgcaatcaagactgatc

SEQ ID NO: 18993 - DNA, 656 bp, Glycine max
gcttcatgctgtgatttacaagttaaaaagttttattgaagatgttgatatcagatatgtgactgcccaaaaaactatccaacagaagggtcagctgctcgagtcaaggtctcttctatcaaagcaattggaaagtgccaaagctcaacaggaccaaattaatttgaaagtctcagaaggtaagacacaatttgaaaagatcaattctgagattgatgaactagagcacaagttatgtgctttggttgtgactagagacaagctaaagagggccttggactcttgtgatgctgaaaataacaagctaaagactcaggttgcaaaatgggtgccagaatgcaagagtatcatcacagctttgaaggagtctgagacttcttacaaagtggccctaaccgataagaggaaaaccgaagatgaatgggctgatctgaagaagacctttgtagctaataagatttgaatcatctcaatttatgcatatcttgacattaggtcttagccatatgctcttgtttcaccattttcattattttgtcacctttctaggctgacaatgaaaatttggtttctctgatgttgcattgcaattttccttgctatctgtcaatctgtttaagttcacatcaaattatttattttgccaattcactttc

SEQ ID NO: 18994 - DNA, 348 bp, Glycine max
atactaagaacacaatcatctggaacgcactctgcataaactcagtcacttatgctcgcattctactggtgctggtgctggtgctggtgctggcattagcgttatcgtcagtactaatgtgggtcgtgatgctggtgctcattctagtgctaatggtagtactggcgctggtacttcacatagcgttcacattcttatcttgattaaaccaatccttttgaacttgttatcacgttaaatgactcattgcccgaagccccaatctgtaacctgttattgattagttgttgttcagtgttcacttctcaacttttgttaactgatttgttgtgatttgcgatctttcgc

SEQ ID NO: 18995 - DNA, 394 bp, Glycine max
gatggacaatctttggatgtgccgccatcaacactgctttcatcatacttcactttgtaacgtgacgctccacatgtagggcagctgcgcatttcagcaaattgatgtctatacaaaatacaatcattagggcaagcatgtattttgtggtattccatacccacagggcataatatcttttttgcctcataatggttcttgggtaatgtgttatctacaggaagcatattcttcaataacaaaagtaattcgttgaagcttttgtcactccacccaaatcttgctttcaaattcaccaaacctaagaccgctgataaccgtgtgtactttgtgcatcccatatacaatggagtcgtagaatcaatatctaagctttcatagtaaggtgaatgtg

SEQ ID NO: 18996 - DNA, 710 bp, Glycine max
tacctggagaaaatccaatgaaaataaatcccacttttcaggtgagcataatttgggagaaatgggtgaagagtccttaagtgatgaagagtgtgttaagaaaacgaattcactccttcgtgaagtacatgaagcaattttcaatgaacaggtgtttgatctggtgaatcgagaagcatttaacacagttgcaggtgtcagtgtgactggaatacgggaaaattatttacaattaagcttaggtcaagaaacctctgtgtacttaacactagtgtccaatagtcaagatcattctacagttgaaggtgaactcaccgataacgcagaaaatgcaattttacctctggaatcatctgatggaatgaagcgtgaagccaaacagaacacctctaacaaagggcagttttctaattccatctgctatgagatttatattcaacagatttttcatgaatatatatttggaaaaggtggtgataaaccaagttcctctggaaatcgtttgtctggcatacaggcaaaggatggatccagtcttcttggtcatttttttaaatctttagctcacaggatatgttcaactaaagttcctgcagagctggaaaacgtggtatgcaaggtcccgtatatacagctaatttctaatcccacatggcattctcgggcttcgtcatggacactctacatggaggttcctcaatctattcttc

SEQ ID NO: 18997 - DNA, 388 bp, Glycine max
tacgtagtaaataattaagtatcattactacttggaaatggtacttgtacttatgcacctctactctacacttaacacttcccttttggagttctatttattaggtaaaccaagtctttataattagctggtcaattgattactataaaaaagcttcgtccatttctctctccttatgtgtgatgtgataatcccatgctagatgctacacaagtcaaatgaaccaaaacaaatcaaagactattgcttttttcggtgattccgaaagctactacccaatcttattctgcctgctattaagtagtacgtagatacccttgtgaaaatcaaggatgcttccatgtttgatttattatttctagatgaaaactctacagcctttacagat

SEQ ID NO: 18998 - DNA, 383 bp, Glycine max
acatcccaacaagtaatagaaggagtaatagcctggattggcattaatatgaattttgaaaccgccatcaactaagcacaagtgtatcacaaagacaactctggtgtgtgcttgctacatttcactttacatgagttgctgaaattagttgctaagatacaagattattgttttagtaatcattggtattagtggaattgtatagggaaggtagctttactctatgctttctagatctcaatttccttcagcaatatgttttgcagtctcgagagtgtcaacctatcatttcttaaagacaaaagttagtagcttctattaataggtactgttgcaatatagacccatccaattcaaaagattttcgtctgcacatgtgtact

SEQ ID NO: 18999 - DNA, 477 bp, Glycine max
ggattgggaacgttatatacatgaactgctgaggatccagataccccagaactacaagatcaaagaaagcatcttcagcacctgtcagattctgtttcaactgattgtgatggtatgaatgaaaatacttctcaccgaattgctagattttcctgctctggttcaaatttggaaggtaaatttgatttagcagatttcaagtctcttgatcgacttctcactgaaaaggttggctggcaggatcaagccatatgtgctatcagtcaaactttgtccctttgtaaatctggtgcaggaaagcgtagaggctcaaatggtagagcagacatatggttggctttccttggacccgatagacttggaaaaaggaaaattgcttcagttcttgcagagactatatttggaaaccctgaaagcctaatctctgtggatcttggcttccaggacagcttttacccattgaactcggtttttgaa

SEQ ID NO: 19000 - DNA, 411 bp, Glycine max
gggattcagtaagtaaagttggggatctgatctggcttgctttgatctttgatgaatcaatccctcttacttatttcttagtattagcgatgctcgtgtgtgtttctgtagttaattgatatcacgtcacgatgaataaagtagggtggagtttcaagagcttcaaaaccttattggttgtggcttctataaccttccctattttactcacacttactctcgtccaccaaaacaacaactcttgttctgatctcttccaaggatttcacgtattgtctggaagaaccctcaatactaatgctactgctattctctcgaaagatcatgatattattagagagtcaactctaggtccaaagaaccattcatttgaaagatggaagaatgctctggtcctatctactactacca

SEQ ID NO: 19001 - DNA, 386 bp, Glycine max
atgccaagaaccaccttattaaggcccacgaaatgagccaccgcccaaccctgaaatcttgccaattttccatcaaggtttaatcctagacaatcctaagtcaacctttgtgcaatgaatgttcatatcatgaatggtaagttgagcttagcgcagaaactaaaaggtgcttttaagaatgacgtagttctaagaggttcaagttgttcacaactttgtgggcatcaacactctcatgtattacagcctaaccattgttcagtttgctggaattgcctccaactccacaggtcttgcactctctcttattacatctggtctaaatgcgcttggcactatcttgagtatggttttcattgatagatatggaaggagaagactcatac

SEQ ID NO: 19002 - DNA, 349 bp, Glycine max
aacccattgagcttagatgctttactagtgcttctggcatggtttttccatttttcccttaaataaattctggaagctatacattaacaacttcttgcagataccagaatgcagactggagactacctccacttcctgatgagatgataaggtatgattaacttttaactagtcagatttgacacttgattcatcatttttttcaccctttgtcttctttttgcactattggattttaaatgtgtttggtttcctaaaatatactggagctaattaatgagtattctagttttgcgtgattgtttagcatactaggaatctatagaatctggtaatccttgttttgatt

SEQ ID NO: 19003 - DNA, 388 bp, Glycine max
ttgggaactataaagaaactaaggtaagaatgccctactagcaactgacttccttcaggtatgattcgttcgtgacctataagtgagcaagtcttcgcccgttgccattcaatagcaaaagctgtagttactacactcttctttctctgattatctatcgtgctgccaagaagcaaggttacgcagtcctctacctatacgtacctctaagaaggaagctatttcaatcctctccttgaagtcaagcaattgaagactttcgtctgctctcataagtctgttcataagcttcagacaaagtcaccaaaaaggaaaacattttcattgaaaggctggcttgcgaaaggaaaaaggaagcagaagcagagcgggaggagaaaacactaac

SEQ ID NO: 19004 - DNA, 442 bp, Glycine max
agccaatatcataaaaagtcttcactttctacgagtattttataaaaaaaccgtcttagaaaaaattatccttctaagacggttcttaactaaaaattatcttagaaagatacctttttaaaacgattcttagttaaaaaccatcttaaaatggtagattttttaaaatggtttttcagagaaccgtcttagaatatatattttaaaaaaatatatatttggaaattctaagacggttttttccaaaaaaaattgtcttaaaatatgtacattctaagaatgtttttatgtatttttttttaaaaaaataaaatatattttaggattctaagagggttttgggatcctaagatatttcaagatcctaaaatatattttaggattctaagaaaacctacattttaagacgattttttaagaaaccatcttagaaatgattttt

SEQ ID NO: 19005 - DNA, 874 bp, Glycine max
tgcacgtactcggtctcggaatttcgacgcgatcgcgtcacgtacgtgcttgtcgagaagatcgacatgaagagggacattttgggttatagtaatgacgtgagagtttgaagagtggaaagctcattagagccagagttgtgtagagatgctaaaagtttcggggtatacatgtaaccagatccacgtgatgaccttggtggaatggacgtcgctagaaaggctttaatacttgctcgaatacttggccatcaaattaatctggatagcattcagattgagagcttgtatcccaaagaaatggggcctggcgtaatgactgttgaagacttcttgaaccgtggactcttgttgcttgataaagatattcaagatagagttgagaaggcagcttcaaatggaaatgtgttgcgctatgtctgtgtgatcatgggttcaaggtgtgaagttggtattcaggagcttccaaagaattctcccttgggaagactaagaggaagtgataatgtgttggaaatatatactcgatgctatagtaaacaaccactggttattcaaggtgctggagctggaaatgacactactgctgctggggttcttgctgatatcgtagatattcaagacttatttccttgaagggaaatttttgtgagccatcctaattaaagaatgtagaaggtacagctgctaaaggtcttgccctggattgtagctgatgcgcgtttctctttggttgtgcattgtgaaagattggatacacattgttctgaagcaagaataaataagtagcttttatgttttttgggatatttgacatgaaatttgtgtaaacgtccatgcagaaccagacacactggaataaaatgaattctgc

SEQ ID NO: 19006 - DNA, 627 bp, Glycine max
gggaacaggggcctgttgaatttgtaagactgaaaacctgcgtcaaacctactgagtaattactaagttttcattggatggttcatctgctcccaaaaagcatatgtatgtgcttggtgagaaagaagtccttttaggttatagggaaggggatagtgtcaggttcctctctattgccaagaagttaaaaagacaaaattccaccagaaggtatatcctgaagatatgatcaatcagtccaatgggcacctgaaggccaggtaaatagccggtataacttccttcactctctggtagcgagaaagcttctgtaaatcagagggtagaaggtgaagcggtggtggtgatctagtcttcaaaagaaaatctcgaagaactagacaatactttacttaccagccttactaggcaagacagaaaccaatcctagaactacaagatgatacgacttctcctaacgacaagtaaaggcatacccgaacataaaggagagcggctttccctctattagaaaacaagaatggaagtccatataaattagggggaaaggagaaagctcaagcgcgtggcacaaaacagtgggttcctgatcttgtcttccttcaggctaaagcttcaagtctcaat

SEQ ID NO: 19007 - DNA, 312 bp, Glycine max
taccatgcaaactgtttagttccaattcaggtacttttgaaactttgagttacagcatgtatgcagcaatcttcaatgtgggctgggccgctactcaggtttcacacatgtccatggtgagttgcatcacgctgaactctacaagcagagtggcactggctagctgtcgcaatgcttttaccatggttgccaacctgagcctgtatgcagttgcattgatagtattcagtgtcatcaatggaaaaacacatgatgatgttgaaaatcagtaccgctggattgcatatctgtcaatttttattggatgttgct

SEQ ID NO: 19008 - DNA, 378 bp, Glycine max
tgcaaacgcacccatacatgaaatagaatctcaattcaattcctcttcctcttcctcctcctctgtccctatcaatctcttttgcaaacttctctttggactcttccttttgcatcaggctttctcccgatactcctcccttctctgcacccaacgaaaagcacaattctttttctccttttcgataaccccatcacacattctgcgtctaaaatgccaaaataataccccccttgtcttttccttcttggtgggcttgctctatggttatccttttcctctccctctcgagctcttttctccacaattggacaaaaccccttttgttcacatcaatcgcacaagacaattccctgttcaaaatcctgactatgtctc

SEQ ID NO: 19009 - DNA, 761 bp, Glycine max
atccttttgttgaattacttctaacaagactttcactcgagataactggtctaatttatagacagaatataaaaaatttcataaaaaaattagctctggtaaaatataaaacaaaggatacattttatagaaaaatgaaattaaaattgttagttattcatcaattattaagattgtgacatataaatgtatgcccttgtttttctttttttctttttaaaaacgcacctgtgttacttcagagcaatcaaatccaacaaaaattatccaaattttaaatcaagttcacaccttttttatcatttagaattttccatccttaacgttatcccattgagagtactttattaatatgaatcaggtataataggagtgaggcatgatgcttgctatcttgtcatcgtccacatcacgatcaaattagtccttgccctcaaagatcaacattagggcctataagaggaagctattaagtatcttttggcaatactctgacaaaaacatagtcaataagtcgcatcttatgtgcatgtatgtctctttacattggtcggcttgaacatatatattctcaataagttaaggacaaacaagcccacttaatcctcaattgtgttatgtcacactcaaaagttttctcactaatcggtaaatatctcaatcatacatcgtgctaatgctaatgctaataccaatacaatgttgatagattaggccttgcaatgcccccatggttgaaatttgaagattaagtgcccagt

SEQ ID NO: 19010 - DNA, 722 bp, Glycine max
gaagaaaacagaagatgggtgagggcatagttgagagatcgctgaacagcttaggaaagggcttcgacttggcctcagatttcaggctcaagttctgcaaaggcgaagagcgtttggttcttctcaacgaaacagagaaacgagagctcatggtgccaggtttcagacccatcagagatgtctccgttgacatcaaatgcgacaagggcgatcgcacccgctaccaatccgacatcctcaccttcacccaaatgtcagagctcttcaaccagaaaagttcaatccctgggagaattccatctgggtatttcaacaccgtgtttggatttgacgagggttcatgggcaactgatgcagctaacacaaagtgtttgggtattgatggctactttatcaaactcttcaatgctcatattgatcggtaccctcttgttctgtctcaacaagtccttgaagccgttccttcttcctgggatcctcctgcacttgcaagattcatcgagaacttcgggacacacatccttgtggggcttagcattggtggcaaagacttagtgttggtcaagcaagacgtgtcttccaacttggagccatcagagctcaagaagcacttggatgagcttggaaatcaattattcaatgggacatgcaatttccttccaaaatccaaagaacaaaaatataaagcaccgcaagcttttgatgtcttcggtccacaaatt

SEQ ID NO: 19011 - DNA, 435 bp, Glycine max
  unsure (1)..(435): unsure at all n locations
gaaaacaaaaaccaatattttacttatcagagttgtttccaggagaaatagtagttacgtgtccctttaagcgaaaaaaaatccaaatctgttttgacccaattgatgttcatgtcggctgtgtcctttaacttcgtggaataacaaaaattcggttgcaacaattcatgaattcattaccccaatttgctttctcgcaaaaggaagcgaccctgattggttttgttgcatgtaatggagattttggattatgggcaccccgcataaaccaaaaaggtcttacttttcttttgagagaattgtcagagaaggtctcttgtgctaatagagcattaaaatcatttccaggaagtgttgaagcatangaagctctagattcctcagcccctatcttgttattccttttggcaacagatgagatgtaatatatgagtc

SEQ ID NO: 19012 - DNA, 692 bp, Glycine max
  unsure (1)..(692): unsure at all n locations
gcgcaaggcggttttcgactccctccgccaccctctttttgccaccttcgccccgtccaggcccacgcgccgccaccacgttgccacctccaccatcccggagtgcgacgagtccgacgcctccaccgtggactccgcctcgggccgctgggttagtttccaggttcagacgacgatggtggctgcggcggcggctgctcctccttcgcctacctttaacctcatgaagcccgcgatgcagcagatcgctgcccaggaaggcatgcagtggggttctgttgccgagagaggcagaggaggctccgattttgacttcgagaatggcagagtgaaaccctgggagggtgagagaatacacgaggttggaatggatgatttggagcttactctaggagttggaaaggcttgatttgatgatgctattgaaatcatcccttgcttggatctgctactaccctcagggcaattggttcttgttatgcttaatttctctatatttttccttttatgtgtacagtttttcatttatatagcagttgttaggtgttacattacttggaatttgacttcattgtaatgccttgttaattgttggaaaggttgcatttgaaacaatctttgtgcaagtgttttgagactcttcaataagacttactaagaccaggggaaacgaggtcatatttttagaaana

SEQ ID NO: 19013 - DNA, 379 bp, Glycine max
gctcctccttcgcccacctttggcctcatgaaacccgccatgcagcagatcgctgcccaggaaggcatgctgtggggttctgttgcggagcgagtcagaggaggctccgattttgacttcgagaatggcagagtcaaaccctgggagggtgagagaatacacgaggttggaatggatgatttggagcttactctaggagttggaaaggcttgatttgttgcaatcccttgcttggatctgctactctactactaccctcagggcaattggttgttatgcttaatttctctatatttttcccttttatgtgtacagtttccttttcatatagcagtggttaggtgttacatttcattacttggaatttgacttcattgta

SEQ ID NO: 19014 - DNA, 364 bp, Glycine max
cactacaagagctaactaagggtgtgagatcttggcacgcattccacgaacacacatgggcatcaatcatgttaagacattaccaggtacacatagaggtcacgataggtactaaggtattcctcgaagcatccacaaactttttccagattaagggaaagaggactaacatttatctcgcttataatacaactatcatcactaatcctttaggtcacctatcttacacaagaacactcactcttgaacccttccatgcttagcaattaacgccttactaactaccttacactattcttaaggtgtaacactaaaccttttagctattcttcacaacttttccaactactctatattcttaaac

SEQ ID NO: 19015 - DNA, 507 bp, Glycine max
catggtcttctctctgttctccataaggtcgcagatttctctatctctctttgtgcttcacaacaacaacaacaacaacaagcgcattgtctatctttttctttagttcttggccttgtggtcagatggtagcatgcccctgtaggtgaatagttaattaaaatgagaggaacaatgtcaatgggaacttctcctcttgccgttgaagctagacaccgtttgcctgcatccattgaagatttatacaaacgaagacttccaagaaacaaagcaaacgatgcagagaagcctttccacttatctgtccaagataggagctcaagatgcaaattgtctttcttaaaacttatcctattgataaccatatgcggcatttttgtaaccctcctatactctccggaagtttacaataccaaccatttatcaagctctggcactcggtggatatggggtgggtcaaatccctcgtcatgtccaatgtagccactgactgggatgacatactgg

SEQ ID NO: 19016 - DNA, 831 bp, Glycine max
agttatcaaaatttatgatttttaggaacaacaggtgactagaaatgtcaatgtcaaggactatgttgatgtattactctcaaggaaagctactactgttattttcagtgcagctaaagaatttgatttcaacatctctattgagctattttgcagatgaactatttatgaatgatgatgcgagctctcaaagctcaatgaactccttcaagtgtttcaatttcaattgctgtgaccctggcaatgaagatgagcatgatccaactctagtactaggagcagaacacctttactacaccccaaaaggaaacgaaaagtgcataagattttgtcctagagaagaagtgatggatgctgatttcaccaaacagttatgcaacatgagaatggattctcacaggtgtcatggaatgcacaggctaaccaggatccgttccttcgtggacctgaggagacaacaactgtaacgatcactgatggaggagattcacaagaggagaatgttcaagacggttggtgccgttgagaacattgggtttcagaatccagaaggaggcggatgtttttcttattgaaactccaatctccataggttccaatgctctttttcttttttaacttgttatgctttggggtatttattaattattgtaatgccttatgaattaagatgtccgtgaatatttgtatcctatacggactcatccgaatattgcaaaataaaacttgtaatatagtttaatttatgcttttgttaggagatgtttgcttgtttgtaagacttctgttgtgatatttctctttttgtatgttgaaatatggaatttcttg

SEQ ID NO: 19017 - DNA, 1601 bp, Glycine max
acgaggaatctcataccgtatgaatatatcattagtcgtcaaggaaatgaaatgtttgatgcagttttgggtctagcttcctcccctaagaagaaaagcatgttagttgtgtctgaattcattggctgttccccatctttaagtggggcaatcagagtgaacccttggaatattgatgctgtagcagatgcaatggactctgcgctggaaatggctgattcggagaaagagcttagacatgaaaagcattatagatatgttagtactcatgatgttgggtactgggctcgaagcttcttgcaagatttggaaaggacttgtagtgatcatgtgcgacgaaggtggtgggggattggttttggattaagctttagagttgttgcacttgatccaaacttcaagaagctctcaatggagcacatagtttcagcttacaagcggacggcaactagagcaatccttcttgactatgatggtacactaatgcctcaatcatccaccattgataagagtccaagcagtaaatccattgaaattcttagtagtttgtgtagagataagaacaacatggttttccttgttagtgctagaagccgaaagatgctttccgaatggttttctccttgtgagaatctgggagttgcagctgagcatggttactttctaagaatgaaacgagatgaagagtgggaaacacatgttgcagcaacagacactagttggaaacaaattgcagaacctgtaatgaaactttacactgaaacaactgatggatccaccattgaagacaaggagactgcacttgtttggtgctatgaggatgcagatccagactttggatcgtgccaagctaaggaactccttgatcatcttgagagtgtgcttgcaaatgaaccagtaacagtcaagagtgaccagaacaatgtagaggttaaaccacagggtgtgagcaagggactagtggccacacgcctactttctgccatgcaagaaaaggggatgtgccctgattttgttttgtgtataggagatgacaggtctgatgaagacatgtttgaggtaattaccagttcaatgggcggtctgatcgctccaaaggccgaggtatttgcatgcacggtttgtcgaaaacccagtaaggctaagtactacctggatgatacaactgaaatagtgagattgcttcagggcttagcctgtgtttcagaacagatagacaaatagtttcattttcttcagaacaagaaatagtttgttaagcttgggaaaagtggtggtggtggtgagaggtattataattatattgtgcttggctttactttgtcattgaggatgtaggctcagttgtgctgctcttaaaatcttaatacacaattaaaattattggtttccttgatattccttgtatattatcctagttgttactgagagaagttctgtatcggattctgctccttaaaatgcttgatttccatcaggaaaacttgtacaaaaaaaaaaaaaaaaagggcggccgcccttttttttttttttttgagaaaaacattggtgcaatcacttgtaaagttacagcaaactacaataatgcgaaaacttgagtt

SEQ ID NO: 19018 - DNA, 562 bp, Glycine max
ggttgcccacatatgtacacaacacggaccacgcgagcactgtgtttctgatcaccacgaacccgagcgagcgacacggtccttagttggagtcttgaaccacaacccagagttgaagttgtgagtggcaaggggtgttcgaggctgttttcatcttcacttccttcattcagaggtttgcaaccattggagccaatgtctcctgcttcctcccctttgcaagtgccatcatcaactgctccttttgctggtcttgtcatctgcgttactggtttatctaaagaagcaaggaatcaggtcatggaggctacagagagattaggcggacagtatagccccaatttgcatcctcgatgtacccatttggtggttcagagttttgggggacgcaagtttgagcatgcgctgaagcatggagcaaataatgggctctctgttgtcacactgagttggtttgtggatagagacaggaaaagtgtcaggttgagtgaatcacattatagagtgatatagttatggagataacaacacgcatttggaggattttagactgcttcctgag

SEQ ID NO: 19019 - DNA, 418 bp, Glycine max
ggtacgtcacaattgtgaagcacagaagaatgaggaattctgagagaagcagtgtaagaaagtacaacaaatctgaacttccacgcctgcggtggacacctgaacttcatcaacactttgttgaagctattcaaagtctaggtggatcacacaaggcaactccaaagcgaattttgcagcagatgcgtgtgaaaggactgaggatcgctcacatcaaaagccatcttcagatgtacagaaacatgaaaggacatgccattgttgcaccagtggatcagttgctggaaggaaaggcaaaagatttcaaaatatgctccaatatttgtccaaccgaaaggaatctcaagcgggaacttcatttgttagactacaaagatgggctttcacaaaccagtgaggaaactgattatgatctaaa

SEQ ID NO: 19020 - DNA, 517 bp, Glycine max
ctccggcccatgggctgaagcccgaatgagtgaccgcatagcccggcccgggctcaagcccgaaccttacatacccgagtttctgttccccgtccattgtctccgtttgaaacagtttcagtttctgcctgtctcttcggctgctacgttctctgaacttccatcgacgcgccggcaaacgccttctgcacgcttcgtgtaacagcagaacccaagagaaaatgacaaatgagaatacagcaggcattgagatagattatgaatatgaagattgcaataattctaagcgcccaaaaatgacttctaaagtatgggaagaaatgcagcgtattcataccactgaaggtagtaaagttctgtgcagacactgcggaaaactgttgcaagataactgtggaacttctcatttaaagcgtcatttgatcatatgccctaagcgtcctaaaccaatggatattattactcaagattcaatgcctacggtgtgttttagaggtcctagcagtgtcaaagattc

SEQ ID NO: 19021 - DNA, 663 bp, Glycine max
gaaagtcaataaaatcggcaaaccctagtattggtttcttctctatagatccacagagatcaaagagagagaaagagattcctttttatccctttctcgctccttcctagttgtttcgtcgacgttgcagagcttgcttgaccccaaacccttcttcctttgttttctttccttttttccacaaccaatcaggtccatgctacttctttgtctgtatcttggaagtgagagtaaggctaggattatttttacttcgaaaggagaagcgttttagaagatagttatgcctaccgatggttaattcagtgccagatttttttagcctacttcaatatattttgttgaggatttgctattgaatcgtaataactgaagtttaaaagaagggttttgacttgtgagctttttagcggactgactactttggaatcatgcctgtttcaggacatgaaaagaccggggtaaagtcctatgctgggaaatttagtggtttaattgcaggtgtgcctatcaagaaaaggaggtttcctacgattcagccttcttctgcacctgtgtctgaggaaccatattctctcactgaagaaaccgagttacaacgtaaagaaaattcaagcacttctcaaggcccaactttaccaaatgttgcaggtgccccaatcc

SEQ ID NO: 19022 - DNA, 415 bp, Glycine max
gaagttggaggatagtaaagaagagaagggtctggaaaggaatccccacacaacgaaaccaacgcttcccacactccaatttccttttctcaatctctgtgatttcactccaaatttcaccctcagcttgaagataacgtgtgagatggatttggtgaaaatgatgatcatatagtgccccatgccagtgacaaacataataatcagtttgtaatacaagaagatagctgtaagaaatcacgtcatgaattacatggtatcagaaatagtgattatgtgaatagctatggtactcagggtaaagaggaattgtacttagaaaatatgacccaaaaagaaagaatgcaggaaaaggattcatggcctcacacacctgaagatgtgttttcttcatgtggtagtgactcaagcaaag

SEQ ID NO: 19023 - DNA, 307 bp, Glycine max
taaagaagggtctggaaaggaatccccacgcgtgaggtgaacaaacaacgaaaccaaaccaacgcttcccactccaatttctctgaattttctttcgcttcttattcccaaactctgtgatttagcacgaaatttcatcttcagcttgaagattagataacgtgtgggatggatttggtgaaaatgatgatcatagagtgccccatgctagtgacaaacataataatcaatttgtaatacaaggagatagctgtaagaaaacacgtcttgaattacatggtatcagaaatagtgattatgtgaatag

SEQ ID NO: 19024 - DNA, 631 bp, Glycine max
caggcttctgcaagtggttcaaccattcctccccctggtggaagattgcctgaaagaactggtagtttacatttaaggactgcttcacagtctgctaatgatgatgttgcaaatatacttgccatggctgagactgttcgggaggttctacctcatattccagatgacatgatattccaggacttgcaaaggacaaattcagtcacggttactgtgaataatctcctccaaatgtgatgaatcaaggtattattttactcctcaaggaatatgaagaaggacatagagttactactacaattgtccttggaaaggcataggctttcattttatgtatatagagtcagcacattcaatctgttgtactcaagaaagatagcagaaaatataggcattttctttctttctttgtcttctccttgaatctgtagtaaaataaatgtggggtgtgttcccaagttgggtaagttcctatctgtcatggttccatttcaattgtaattttgaatttgctgctacctccaaaatatgatgtaattttctttccactcccccctccattttgtggggttggcagagagagtgaggggaatatcaattatcttcaagtgactcaatctgagtcatgcaa

SEQ ID NO: 19025 - DNA, 417 bp, Glycine max
tggtccacatttaattcactcactctcatgtaaagtatctttatctcatatgatatgtaatcatatatattatcattaatttcttaattcttatctttatgacaccaataaatatttcaccttaaaattatattttttgtctcaccttttattttaaataatgaagattcattaaagaaaagatgttatgactcataatcttaaatgctcttaaagaaacctactagtattaattattaaagaaaaaatggatattaaatgaagcttgactatgtttggttataaattaataaaatttggtcctttatgtaacactactttcgttttataaattaaaaaaacaaacaccagtttatcaaaactaataaaaaaaagtagttacagttagtttattttaataatattataaatttaatt

SEQ ID NO: 19026 - DNA, 625 bp, Glycine max
cgcacgacgacaaaggcgaacaatcagtacgctaaagctataacgtttcaactttcactttcacacgtcaaagaaacctagccattattaagattttaagcgattctcgttcggctcgggatggctggccgctgaaccggaccggttcggcttggagagatcttgttgggctcggaaacacgcatttgcggcggtgatgagagggagctgctgctgctggaaccgtcggacagagcagcggttccgcctcctcgcgatctccaccgttaaatcactcaagatcaagcttctcctcttttgctgcgtcgccttcacgcttctcgccttttccaccagcgcttcttccttcgtcctatggatcaacaaccaaacgccgccgcctccgccacctcgcttccccgattccgggaaagggtattctatagtaatgaacacatggaagagatatgatcttctaaagcagtccatcaagcattattcatcatgtcctcgacttgaatcagtacatatcgtgtggagtgaacctgacacctccgtcggatattcttttaaaatttctgcaccacgttgtaaagtccaagtctaaagatggaagatatgtgaaattgaggtttgatatcaacaa

SEQ ID NO: 19027 - DNA, 248 bp, Glycine max
cgcatctgcgactgagacagacgcacgcacgacaaagcctaactttcactttcacacgtcaaagaaacaaagccattatcattaagattctcgttcggctcgggatggctgcccgctgaaccctcggaaacacgcattgcggcggtcatgagagggagctgctggtggaaccgtcggacagagcagcgcttccgcctactcgcgatctccaccgttaaatcactcaagatcaagcttctcctctgttg

SEQ ID NO: 19028 - DNA, 373 bp, Glycine max
gatggaattttgctacgagaagttcagaatgatattttggtgaggcgctattctgtcttaattcttgatgaggctcatgagaggagcttgaacacagacattctgattgggatgctctcacgtgtaattaaaacccgccaaatgatttattatgaacagaagaagatgatactttctggggaaagagtaagtcctgaaaaaatgatttttccattaaaacttgtgcttatgagtgccaccttgcgagtacaagacttcacttctggaaagttattccatactactccaccagtgatagaagttcctacaaggcaatttccagtaacagcgtattttgcaaagaaaacagagaaaacagattacattggagaag

SEQ ID NO: 19029 - DNA, 815 bp, Glycine max
cggacgcgtgggtggaaatccttcgggttatattcctacacatacaagccaaaattcaacaaccagtggattactttctggaaatgtttggaggaacctatcatcatttatgcctcaaagggaagtgtctgctcagtcaactgaggacagtaggttccctgggaggggaaggacccttggtgctgttcaaggtcaaactgcttctcatctccattcagattcaaaccttcaagctagacttttggaggatagcagtcccaatagtcctttagattcatccactcctagtaatcctcaacggttgtctgaaggaaggcattcagttgacaatgtagctacagcagctgctggtgttccacagaatcagggtgcagctgtttcggaagaagggattagaaaacttgtatcaatgggctttgataggacgcaggtggaagtggcactggcagctgctgatggtgatctcaatgtggcagtggaaatactcatgagccagcagggttgaaaaagaaagcttctcttggattctcaacgcgacctcactgacactgttaattgagtatgtcatggcgctttgttcaatcactgtatctgtttaatctttggactaccactaacaattcgcacacacctgatagccatgctaacgccaattagcagaattgaacatatgtaaatgatacaagcaatggttaggaatatgttgttaattaaagaaatagtaaacattttgtttagcttgattttttcccacttgaacttgtttatacatacatatatagagaatgcctctaatgccatacaatttttagaat

SEQ ID NO: 19030 - DNA, 521 bp, Glycine max
caattcgagggaggatgtattgagagggctgatgaggcgatgtgcgtatttgaaatatgttgagggaagattgggtgatcgtgtcctttatgcagatgagattttgaaagatggattttgcttgaacatgattgacacccctctttgccctctcaaggttgtcacaaacctgcaggatgctgtgtcggtcgcagatattgtgattaatggcttgccatcaacggaaacccgtgaggtatttgaagaaattcgcatgtactggaaagagagaatcacagtgcctgccatcatttccttagctcagggtgtggaggcagaattggggcctgaaccacggataataactcccacgctaatgatcaatcaagcaactggagtccccattgagaacatcctttaccttggaggtcctaacattgcctcagaaatttacaacaaggaatatgctaacgctaggatatgtggggcagaacagtggaggaaacactggcaagtgtttgaggcagcccactttatagtgt

SEQ ID NO: 19031 - DNA, 592 bp, Glycine max
  unsure (1)..(592): unsure at all n locations
tcgcgttttttgtttctttgagactaatctcagaaaccttaacagtgttttttccagcgaccgtggcattaacgcttacacactctggcggtcaacgattcgcgcgtggagacaattggtacggacagtaacaagtaacaaagtagttcctatgtagctgattatggcggagatttcaagttcagggtacaaggaatatgcggctggcttgttcgctggtgttgccgctgtagccactggccacccctttgacaccgtcaaggtgatgctgcaaaagcacaatgcagaagcacataagattcagtataaaaatggatggcattgcactgctaggatattgaagactgaaggaatcaaagggctttatagaggagcaacaccatcttttgttgggatggcagttgaaggatcactcttttttggcatttattcccagacaaaagtgtaccttcaggggggagttcaaagtggggaaccacggcctcaagtgataataccatctgcagcttttagtggtgccatcatcagttntgtgttaagtccaacagatctgataaagtgtaggatgcagatacaaggcactgactctttg

SEQ ID NO: 19032 - DNA, 464 bp, Glycine max
cggaattcccggctcgaccgacgcatacatacctgtgagaaaacaccacagagggcgcttgattcttttgcgaccactcatctcactggcgggctatacaaaaccggggagggcctcttcatttcttctctcgaatcttgaactcatcttttcttgaatcttgaaatcaaacttctctcgattcttgaatcttcttgatttcttctcatgaagcttgaaattaaactcgatcttgaacttgttgactcaatcttaaaattattctttggagctttttgtcatcatctttgtcatcattaaaactacttgaatcaacttgattcatcatcatgaagcttgcttctacattttcaactaggaaacataccatatcaatttcatgcacaagctcctcaaaaatgataatggacacaagaaatgataaaggaagtaacctcaattaattgtatgattcatgcaatctg

SEQ ID NO: 19033 - DNA, 598 bp, Glycine max
tccactggtgggaatttagtaagttcaaggatcatgtccatcttggcggcgagaccacttacaacagatttgagttgcaccaatttagcattcattttttacgtacccatacctacatgtaatttctctttccattattattcacaccaaatttcccattgaaatagttattctcatttattttcttggatacacatttattatggttttgacgcttcatataaccaaccaattcccatgaactgactcattaatactatcaataaatgtagcatcattgttaagcaatgatgtcaccaaattgttagttgcaagtgttacatcactaatgagtctaggttgatcttgaatgaaattaaggcttgttgttgtttattgagaagtaaatctatggtgacagctcggtttggaaatgttttgcgaaatgattgtagcaaccacaagaaaaaatatggcaaagtccctcatattcaatatgataccaaaagaaccacaccttaccaaccatcagtttattgagattgacctcaacacacacctaagcaaatataactcgacaaacatccaacgtattactatccattttaacaggttatcc

SEQ ID NO: 19034 - DNA, 711 bp, Glycine max
ttgcttgaggtcgcgtgcccttcatcagtgttactgcgcatccctccgtttctcctaccgactccggggaaggaaggaaggagtgaacaacaaacccaaccaatacccattctttgtttgctgatgcaaggatgagttctttctccatcacacggaaaaagacgccgttccagaagcatagagaagaggaggaggcaaagaagaagagagcagaagatgagactgctcgcctgtatgccgagtttgtagagtcatttcaaggagatactactcctgggtcaaagacttttgttcgaggaggaacaattaatcccaatgataaatttaaagacgattctgagggtgaaaagtccaaagatggggtatctggtccaaagaagggaagtaggtatgtaccatcttttattccacctccaatggcaaccaaagggaaagaatctgaaaggaaaaaagaggaggaaaagccaaaggagaaagagaaagggaagtcaagaaacattgatcattttatggaggagctaaagcatgagcaagagatgagggagaggcgaaatcaagaacgtgaacattggcgtgacgggcgtcatacagaacattctatttccagtcgctttgacgagctgcctgatgactttgacccaagtggaaaacttccaggatcatttgatgatggtgatcctcaaactacaaatctttatgttggaaatctct

SEQ ID NO: 19035 - DNA, 241 bp, Glycine max
cagtgttactgcgcatccttccgtttctaccaccgactccggggaaggaaagaaggaaggaaggtgtgaacaacaatcccagcccaacacccatgagaaacgagttgttcgtcgttggattcatgttttagctgctcctcactctctcactcgctttttggtctttgtctgctgatgcaaggatgagttcgttctccatcacgcggaaaaagacgccgttccagaagcatagagaagagga

SEQ ID NO: 19036 - DNA, 420 bp, Glycine max
accactttttcggacacactcttttattggaggtgagtcatgtaaggccgtctaaatatgcgagtttcattccacatttggtgggtttcatgtaagttcttttattggatgtaattctagtgtagggagacacatgtttttcaatcaacaaggagaaaaatatgttggaaggaaagtgttacattgagtgttactagcactcctatgtgattcatttatgcaatcttcataatcataatcagaatgatgtgctgttctaattagttaaatttgttttgtcgttgtcccctttgatcaatgggggtgctagaagattcccaagaaagtttgtactttttattttcattaaattatcaaaggatgatgaagtcctaatgaattatgataatgacttatcagcaaatgatatacattattctt

SEQ ID NO: 19037 - DNA, 455 bp, Glycine max
agaaggggataggtagctactcactagcattttagttcccacgattcgtatcccttcctgggatgaagactctccctcaaacaccagggaaaaccatcccagatgcttgcgactacaaaggtcacccagcagagaggtccaaaaccggtggttggactgctgcggccatgattttaggagtggaagcatgtgagaggttaacgacaatgggtgttgccgtgaatttggtgacatatttgacgggtacgatgcatttcggcagtgctaattctgccaacacggtcaccaacttcatgggaacctctttcatgctctgtttgttcggtggttttgtagctgacacttttatcggcagatacctcactattgccatcttcgcgactgttcaagccactggtgtgacaatattaacaatatcaaccataatcccaagcctgcaccctccaaaatgcata

SEQ ID NO: 19038 - DNA, 402 bp, Glycine max
tatcttaaagattttattgacagtaacaacactttaatatttataaataaaaaattaaatatcatactcattatatatttataaataaaaaattaaatatcatactcattataaaaaaaagtatacacatatctcaagtcaaatctcttggtgatataacaataaatgtcaaccaaatactcctgttttagtttttttttttatatttggatttctctctattttgttacaccacatcatcacttatattggttactgatctgatctctcatatagtcatattttagtatctgagttgtatcataaccaatatttactccaaaacaaaatatctttccgttcatatatgcgtcaagtcaaaagctttatatatgtccgtttagtgaagagcaaactggatta

SEQ ID NO: 19039 - DNA, 475 bp, Glycine max
  unsure (1)..(475): unsure at all n locations
aatacgagcggccgcatnanataaaaatgcatttttgtttttttggccggtacagggaaatccgcggcgaaggagcttccaagacagtatatagagcatttgatgagtaccaagggattgaagttgcttggaatcaggttaaattgtatgattttctgcagagccctgaagatctcgagaggctttactgtgaagttcatctcctcaagacgttgaagcacagaagcataatgaaattttacacttcttgggttgatacagcgaacagaaatatcaactttgtgactgaaatgttcacttctggtacccttagacagtgagttccctccattttcaaccttttgccactcctctatattatatttgtatgatcattatcctttttgtgcttttgagaagatttgttattttttcttcttttatttattttaattatcacaatagatataggcaaaagcacaagagagttaacatt

SEQ ID NO: 19040 - DNA, 414 bp, Glycine max
acaccgatttacaaagtatcgtagcctattttatattagaaatgattgacgaaatcgtttctgacaagaatatccaaataccaaatccgacctatatataacctctgcaaagtaaaagaagttcttggaaaaatcaaagaaaaagtctcttcttcttctgtaaagaattcttccaataatttttctgaccctaatcttttcaaaaaagtgcgcgcagtacttttgtgcttacgagccaaagtttttatacaagaaagccgaagtatatatcttatttgatacaaactcttttttttgcggatccattgtaataatgagaaaaatttcggcatatccgcaaaaaccggtcaataatatcaaaatcagataaattggcccaaaccggcttactaatgggatggccaaatacattac

SEQ ID NO: 19041 - DNA, 575 bp, Glycine max
caggtttcgtggttcttccttacataggctcctcactggggcatgagtcgtgaactttggataagttttttgtgtgaagaatttgtataataatggcaggcatggcaagaggaagagcagatgtgaaatctagaaaaaatttggtcactacaactgtgttggttttggtgactgttggtggttttttctacttctattctcagaatagtgattcatcatcttctgttgagtatggtgctaaatctttgagccacactggtttgggaggggacaaagatgatggtgtatcttcctccacacttgttggaggagagggcattgctgtaccaaagagcattccagtctgtgatgatcgattatccgagctgattccttgtctggacagaaacctcatataccacacaagattgaagcttgatttatctttgatggagcactatgagagacactgcccaacacctgataggagattcaactgtttaattcctactcctccagggtacaaggttccagtcaagtggcccataagcagagaccaggtgtggaacgcaaatatacctgatacccatcttgct

SEQ ID NO: 19042 - DNA, 869 bp, Glycine max
tcattatttctccctcatccatgttgctttctaatagccagagtaacaccatatgacttttgccagcatggagatgaggtttaaatttgtgtagtttgatatggcaacacatttcatgctttctaatattgaatgtagattgttgcaattaaacaacttgaccgaaatgggctacaagggaatagagaattccttgttgaagtgctgatgttaagtcttcttcaccaccctaaccttgtcaacctgattggttattgtgctgatggggatcaaaggcttctagtttatgaatttatgtctttaggatccttggaagaccacttacatgatatttctcctggcaagaaacgacttgactggaacacgcggatgaaaatagctgctggggctgcaagaggattggaatatttgcatgacaaagctaatcctcctgtcatataccgagatttaaagtgctccaacattttgctcggtgaaggatatcatccaaagttatctgattttggtctggccaaacttggtccagtgggggaaaacacccatgtatcaacaagggttatgggcacctatggatattgtgctccagagtatgcaatgacaggtcaactgactctgaaatcagatgtttatagctttggtgttgttcttctggaaataattactggaaggaaagcaattgacaattcaaaagctgcaggagagcagaatcttgttgcatgggtaagaaactcatactgttatctcatctcatgggtctgactgatgatttataagctggaaagctgaataatggatcgtcaaatataacattctggataccttcatttgcatattaataatcaaaatatagtcttgtgttgattaaataa

SEQ ID NO: 19043 - DNA, 951 bp, Glycine max
gagcgagaagtttgtttcgggcttgatccagcggggcgcatatcagccaatgatagtggttttccgaccaaaaagaaaccaatgacgaaattcctcctcttcgaaaatactacgaaaatcgaaaatcaatcgtagaccacttctcaaacacaagagacaccaccgatgatgatgatgatgatattaaagcaacatcaccaggagtaagagagagcaaaggtggctccttttcatgtgagttttgagtgattcattgattcttctgctaccatcttcttttctactcgaaaaaggaagaggggaaaagaaattgaaacatgggttggattccctgttccggaagttcaaacactaagaagaagttaaagaagaaattggagaagatggaagggcagagcagcctcgttgatccgatcaaagccaccccagggaaattaaagaggaatccatccatgaattccaaaaattcctccaaaaatgggaaccctgagcacattgctgcacagacattctcattccgtgagttggcaactgcaactagaaacttcacagccgaatgtcttttgggtgagggaggctttggcagagtatacaaggggcgtttggaaaatattaatcagattgtcgcaattaaacaacttgaccgaaatggactacaagggaataaaaaaattccttgttgaagtgttgatgttaagtcttcttcaccaccctaaccttgtcaacctgattggttattgtgctgatggggatcaaaggcttctagtttatgaatttatgtctttaggatccttggaagaccacttacatgatatttctcctggcaagaaagaacttgactggaacacaaggatgaaaatagctgctggggctgcaagaggattggaatatttgcatgacaaagctaatcctcctgtcatataccgagatttaaagtgctccaacattttg

SEQ ID NO: 19044 - DNA, 298 bp, Glycine max
ctcgagccgaggaagttttatccagtgtggcgcatctcagccaatgatggtgtttttccgaccaaaaataagccaatgacgaatttcctcttcgaaaatactacgaaaatcgaaaaccaatcgtagactaccgatgatgttcatgatgatattaaagagcaaaggtggcctcttttcatgtgaattttgagtgatccattgattcttcagctaccatcttatctgcgccaaaaaggaagagggaaaaagaaattgaaacatgggttggattccctgttctggaagttcatacagtaag

SEQ ID NO: 19045 - DNA, 409 bp, Glycine max
aattcgagcggccgctttatttttactacttttcttttcatatctaatagaaatatcccccccccctccttttttgctgagtttgtagagctttattctatttgctttaaacatgcataggactgatatttcaagatgaatcttaggtattatcagttttgtaaaagagagattgattatttgttgaatgctatttttgattgcttagctatggtaagaccctctactcaacattacggctaagatattgtaattgttcaatcaaaagatggtaaagttgttcttttaatgtgtgtgtggggtatgtgccatattccttttagtatgaaattttggaaatatgtaaggcaagatcaatctcatctgggtttgtttcgttaaatgtattagatgctggagaaaacaactg

SEQ ID NO: 19046 - DNA, 884 bp, Glycine max
ctgaaaacaaaataagggaagaggagaaaaaacaaaaccaaacaaacctcaaaagttagggtttcctttttggttcgttgctgtggaatcgattcctttgccttatattaaacgtgcgtcgttgtgaagtagaagcaagactcgcagcattgctctgctagttttgacatttaagcgtcacctaaccttcttcggttgctttttaaataattctgcattttctcgcttctttgatcactgcttcgcaaattgatcttcgtcgacgaattgtgcattcctgtgctgtgctggtgatgggtatggtttggatttcaaatgtctttcttctcgggtaatgagatgcatcaagttttgaagcacagtgagcagggatggatattgctgctcttttaacttctgctggaattaatattgctgtgtgtgtggttctcttttcattttattctgtattaagaaaacaacccagtaatgttaatgtgtactttgggaggagactagcctctcagcattcaagacgcattgatctctgcttggaaagatttgttccctcccctagctggatattgaaagcatgggaaacatctgaggatgagatattggctattggtggctcggatgctgtgggttttgtgaggatacttgttttcagtattcgagtgttttccattgctgctgtcatatgcactattctggtgctttctgtaaattaccatggaatggacagaatgtataagaatatacctttggagttgctggaagtatttaccattgagaatgtcaaagaaggatcaaagtggctttgggctcattgtcttgcactatacatcataacattatcggcttgtgctcttctttactttgaatataagagtattactaatttg

SEQ ID NO: 19047 - DNA, 255 bp, Glycine max
ctcgcggcattgctctgcgagttttgacttttaagcgtggtttgcttttcaattcagcattttgtcgcttcttctattaattctaccaagcttcgctgattgatccatcttcgtcgacgaattgtgcattcctgtgctgtgctggtgatgggtatggtttggatttcaaatgtctttcttctcgggtaatgagatgcatcaagttttgaagtacagtgagcagggatggacattgctgctcttttaacttctgct

SEQ ID NO: 19048 - DNA, 747 bp, Glycine max
gatgatcttaatgactatgatcaggagatgctcctttcctttgctactgaatgtgcaaattctgttattcctgcttatttacctatcatagagaaaaggaaggatttgcccttcaatgatcatcagaaagcatggcaacaattgcgaaggggacgatatgttgaattcaatttggtatatgataggggtacaacatttggactgaaaactggagggagaatagagagtatacttgtttctctcccactgactgctcggtgggaatacgatcataaaccggaagaaggaagcgaagaatggaaactcttggacgcatgcatcaaccccaaggaatggatctaattcatcagttgaccccccaatttgtcagctttttaatttaataataagggagcttgtttcttttttcggtgtatatcaagtgcttgttatgatgagtcagaatgttagcttgttgtactaggtggattgtaaatcacgtattttgctagagtcatccgcgtaaagcgtgaaaatgcagaaaattacaaatgtctaggctgcgtctgtagtatacctactgccaaccattgttctttctacaagtaactcctcaatcccatgtaagaaaacaaaaggcagcttctttaatgccagtattgcacaacacctcagactagtaaattggtaattctgttgaaggtgatataaaacttttgactgaaaaatccttgagccattgctatatgtaagatcctatagtttgcc

SEQ ID NO: 19049 - DNA, 354 bp, Glycine max
actctctggtaatcgattaccaatggcaagttttgtgttcgaaaagctttcaactgaatttacaacattccaatgaatttcaaaatggtgtgtaatcgattacaatgatttggtaatcgattaccagtgtgtttgaacgttgaaattcaaattcaattgtgaagagtcacatcctttcacaaaaaagttttgtgtaatcgattacaatgatttggtaatcgattaccagtgataagttctgaacaaaaatcaaaagatgtaactcttccaatgattttcaagtttttctaaaagttataacttttccaatggttttcaagtttttctaaaggttataactcttctaattggttt

SEQ ID NO: 19050 - DNA, 403 bp, Glycine max
cgcctccggccggtttgtagagaacacatacatacattttcattttcagaggaatgatcatggaagaatcctcggtacacgagatcaaaacccctctcctgtcatctaacaaggaggaagatgaagttggaagcagtactagccataggcagcaaaatgaagagaactcgcccataaaacaagtggccctaacggtgccaaccaccgatgacccatctcttccagttctgacgttccgaatgtgggtgttgggaactctatcatgcgtgctgctgtcgttcctgaaccagttcttctggtaccgcatccagcctctcaccatcaccgcgatctccgcccagatcgcggtggtgccgctcggccaactcatggccgcaacgatcactaagcgcgtgttcttcag

SEQ ID NO: 19051 - DNA, 479 bp, Glycine max
ccaggtttgaattcaaaggatggtagcaaagaagagaatgatttgagcggtttaagcagcaaggtgtcctcttcagctatgcttctaacacctcagagtgaggatgagatattgcaggccagcaatttgaagaacttcacattcaatgagctaagaactgctacaaggaactttcgtccggatagtatggtgggcgaaggtgggtttggttgtgtgtttaaggggtggatcgatgagcatacacttgcccctactaaaccagggacaggaatggtcattgctgtgaagaggcttaaccaagaaagcaaccaggggcacattgaatggttgacagaaatcaactacctggggcagctcagtcatcctaatcttgtgaaactaattggttactccttagaagatgatcaccggattttggtgtatgaatttgtggccaatgttagtttggataatcacttgttcaagaggggttcttactt

SEQ ID NO: 19052 - DNA, 820 bp, Glycine max
  unsure (1)..(820): unsure at all n locations
tcgcccacaccttcggtgtgagagaacacacacaaagggctcgtgcttattctacattttctactcctatgtactgggtggtagtttttaacataaacaattttgagggctagtggatttcatcttttggtataccaaacatgggtggtaataacaatcatgcattatattttcacccctccaaggtggttttttgtaactaacatgtccccttcttaattatggattcatttagggtctttggaacatggccaaccgcattgttagctgcacacaggaagaaagtgaaaatcgaaggacctgtatgtgattcatcacaagtcattggttggcatcttatggatatgaacaatgaaactgatacaatcactcccccaattcatatttcaagttttgcttttaatagctccatcctttgggaccctgagagatggggtcgcacttcctctgttcaagacacttctcagaattcaatcaagttcgtgaagcaagtagttctagaagatgaggctaaattaaagggaattccaccagaagattgctccaaaatcttgctatggcgtttcaattttcgtgcccgaaccatcacaaatcactaatttctagattctggcagtacaaaaactactttcctactactatatagaatttattcatttttttttctcttttgcaaatttatcctatgtttatagttttattgattcttcctgttttcaaatttttgttagcttatgtaagtgagagggtcttctgctaagaagcaaaaacatttaaagcataaatgaatctttttctgaaaaaaaaaaaanaaagggcg

SEQ ID NO: 19053 - DNA, 1378 bp, Glycine max
actcgagccgattcggctcgaggtgccccccaacttgtcattcaattccaccctgaagattgtgcttcaggtggttcaaagaagatgggttcactagaaagatcaaagaagaaagttcttctatggaagaaggccatgctccatttttccctatgttttttgatgggggttttcacaggcttagctccaacaggtaaatcttctctcttttccaccaaagttgctgtctcaaataggacagaatttgcaccacaacctagtgaaatgtcaaacctcacaacaaatgtcaatagaatttggatagctccaatgccagataccatgcccgtgaagcctagaatccttgaaaatgaaaagaaaaaaacatcacagttgcatgcaaaaaaacagccccagttgaagcctagaagactcataatcattgtgacaccaacaagcacaaaactaccccaccaagcagtgtttttgagaaggttggcaaatactattaagctggttcctcaaccattgctgtggattgttgtggaagctaaaaccaattccacagaactgccagagatattaaggaaaactggcatcatgtatacgcatgtggttttcaaggaaaatttcacggaattagaagctgaactgaatcaccagaggaatcttgcacttaagcacattgagcaccacaggctcaacggcattgtacactttgctggcctttccaatgtttatgatctccaattcttccatcagcttagagatattgaggtctttggaacatggccaaccgctttgttagctgcacacaggaagaaagtgagaatcgaaggacctgtatgtgattcatcacaagtcattggttggcatcttaggaatatgaacaatgaaactgatactatcactcccccaattcatatttcaagttttgcttttaatagctccatcctttgcgcctctgagagatggggtcgcacttcctctgttcaagacacttctcagaattcgatcaagttcgtgaaacaagtagttctagaggatgaggctaaattaaaggggaattccaacagaggattgctccaaaatcttgctctggcgtttcaattttcgtgccagaactcattaatttctagattttagtccaaggcaaaggggaaagacataaaataacgagtgatgaagcaatatagaaattggcagtacagaaattactttcctacctactatatagaattttttcatttttttttctctttttcaaatttatcttatgtttaattgtttatagttttattggttcttcctgttttcaaatttttgttagcttatgtaagtgagagggtcttctgctaagaagcaaaaacatttaaagcatatatgaacttttcccccc

SEQ ID NO: 19054 - DNA, 442 bp, Glycine max
gcaaagagagatgggaaccgttagtaacattggcttcccttcactattcagagttcatctagattcacaagtactatcaaagcatatgaagaataaatcatcgtgcgattttatggttccttctaatcataactactctgttaggctgagtccaatatgttgtaagctatcagaaagtgggattgaggagaaccccacgagcacgagcacgggcgagaggccctctaagatcaaggacaggatggaggagtacaatatagctatgaagaaaatgatgaggaacccttatgagtatcaccatgatctgggtcagtttcatctctatcctattattgtttattggtaccccctacaacatttgacatttgctacctagtacttttgtttgatctatttctatgaaatgctacatatgtttgatatgattatgatattgagaaat

SEQ ID NO: 19055 - DNA, 718 bp, Glycine max
gataaaagaagaaggtgtgggggagggaagaaatttgaagaaacagcaaagcaagtttccattttgatgcttattttttaccatatggcaatgtgagtccatgtcacttgcctaggccatcacctaccactgataattccatgccttgttattaacccaaccacaccaattccctcttctcacaatttcatgtgcctcttgtgttctccaattccctccaacaactgcacaactacacacaagggtcggtgaaagccttgcctttaccttctccttttctttttgtgaagtttgtgtgaggaggaggagggggaatggtgctgctctgaaaaaggtccatttttgagattggcaacacagacccattggcacagttgaggaatccctgaaaccagaatcatatttggacaatggggtttagatgggcatgtgccaatgtgttcttatccaagaggattttgagtgcataagagatctagtgtttaagttgattcagggtctgaaaataggctgcagaaaaatctgtcaaggattttggattgtgaacagtgtttttctctttaaatctctgcgaagttgctggaaggtcacagatatatattggcagtggcaaatggcatccgatctaaattcggggttgtcccaggaaacgtctgtttttgggttgaaagcatgggaattgatggggataatagttgggttggtcattataattatt

SEQ ID NO: 19056 - DNA, 1034 bp, Glycine max
gccagtgatgataattaccttattgcccagcatccgacgaggtcaaaactgatgggatcgacaattttagaaagcattggaaaactggtgagcccattattgttaagcaagtatttgatgggtcatccatttcaagctgggatccaatggtcatatggagagggattctagagacaatagatgagaaagcgaaagatgaaaaccggatggttaaggccatagattgcttagatgggtctgagattgatattgagcttgctcagttcatgaaaggatactttgaagggcttattcttgaaaatggttggccacagttattgaaattgaaagattggccttcacctagcgcttctgaagaatttctactgtaccaaagacccgagtttatcagcaaactacctttacttcagtatattcactccaagtggggccttctcaatgttgcagctaaattgcctcattactccttgcagaatgatgtaggacccaagatatatatatcttatgggattagtgatgaacttggtagaggtgattcagtgacaaatctccacttcaatatgcgtgacatggtgtaccttttggttcatacaaatgaagtaaagctgaaggactggcagagaactaaaattgaaatgatgcaaaaagctaaagctaataaggaatttgaggcaaaagaatcacatggggatcctcaaatatcttcaagggggagttcacctgattcctcacttggtacaaaaagtagtggactggaaatagactcaaaccagaataagtcaattatggatcaagggtttgaaatttattctagtgctgaaggtaatacggccaattgtaaacttccattcaatcaaaatggagacgtctctgagaaaacacatcctggagttctttgggatgtttttcgtcggcaggatgttccaatattgactaaatatttgaaaatacattggaaggaatttgggaagtcagatgatcttggaaatgaatttgttgaatggcccctttatgatggagctatttttcttgac

SEQ ID NO: 19057 - DNA, 749 bp, Glycine max
gtttgcttatgtatttatcatgttctttccatattaatatatgcaggttgatatttgtacctcattaccaattgtcaataataagtgctatgcatattcaaatgtcagatgtttacccaaactctgctacatactgtgcatttgtgtttaatattttaaagttctctctctcttccctgttatcttgtctagagtgaaataatggaattttgatttatttgaagaaaaggaaagaaagggggctatgagtaagtaacaaatagttaatttaccgagtttcaacaggtgtaccttttggttcatacaaatgaagtaaagctgaaggactggcagagaactaaaattgaaatgatgcaaaaagctaaagctaataaggaatttgaggcaaaagaatcacatggggatcctcaaatatcttcaagggggagttcacctgattcctcacttggtacaaaaagtagtggactggaaatagactcaaaccagaataagtcaatcatggatcaagggtttgaaatttattctagtgctgaaggtaatacggccaattgtaaacttccgttcacacaaaatggagatgtctttgagaaaacacatcctggagttctttgggatgtttttcgccggcaggatgttccaatattgactaaatatttgaaaaaggtccatttttgagattggaaacacagacccattggcacagttgaggaatccctgaaaccagaatcatatttggacaatggggttta

SEQ ID NO: 19058 - DNA, 705 bp, Glycine max
gtagctgaatgctttgataagattcgtgtaaaccctggaaattttgctgatagacgggctcaatttgaaacattagagtacacagaagaagactatcagaaagaacttgagcatattgaaaaggttttcacaccattggttgagaaatgtaagaaatatgggagagcaatgcgcattgggacaaaccatggaagtctttctgatcgtataatgagctactatggagactcgcctaggggaatggtagaatctgcttttgaatttgcaaggatatgccgaaagttagactatcacaattttgttttttctatgaaagcaagcaacccagttatcatggttcaggcataccgcttacttgtggctgaaatgtatgtccaaggctgggattatccattacacttgggtgttactgaagctggagaaggtgaggatgggaggatgaagtctgcaataggcattggaactcttcttcaggatggattgggtgatacaattagggtttctctcacagaaccaccagaggaggagatagacccttgcagaaggttggcaaatcttggaatgatagcttctgaactccagaagggggtggaaccttttgaagaaaagcacagacattattttcgactttcagcgccgatctggtcaattgccagtgcaaaaagagggtgaggaggtggattacagaggtgtactgcaccgtga

SEQ ID NO: 19059 - DNA, 456 bp, Glycine max
cccacgcgtccgaattcgagcgggccgcttttttttttttttttttttttttttttttactggaatttgaagcttttattcttttatcgtttattttaatcagccaaaaaaaacataatattatataatgaggtacgacctcccttttacaactgtatccatcaaatttcctttccagaaaaaaaaaccccaccaaaatatagagtacagatgttctttttaagaggattacagatgttataaattatttaatattttaccctatgatttggttaattaacattaaaggcggttaaacaagagcttaattgtttaatttttacttttaaaattttaaattataataattattatacacactattgattatcaacttatcgatgatttgaagtaacattagatgtatatctcttaagccagattccattggaatgagtaattagctaattttttgac

SEQ ID NO: 19060 - DNA, 456 bp, Glycine max
attggattgcattttggacatgtactgatacacttacaggatcatccttccaggttgaagcactggcttctcctaggcttagctctccttacttcaggacttattcttcacttcactcatgccattcctttgaataaacaattgtacacgctgagctatgtttgtgtaacatctggagcagcagcattacttttttcagccttctatattatggttgatatttggggtttaacattcttgttcttgcctttgaaatggattggcatgaatgccatgcttgtttatgtcatggcagctgagggaatcttcgcaggattcattaatgggtggtattatggtgaccctcataacacgctggtctattggatccagaaacatgtcttcattaaggttgcgcatccaacgagagtaggcatctgttgtatgtgatctggcggagatctattctgggctgtg

SEQ ID NO: 19061 - DNA, 568 bp, Glycine max
  unsure (1)..(568): unsure at all n locations
attattattattattattattctgttcaccggcttcatcactcaaggtctcatcagaacttganatctccaaacaagtagacgtcagttccccacactnngcatggttgacattttcggattcagttggttggctactgatatcttgaaaagtttgcgcaagctctgctgcagaaacgttggggttagaaacctcagagcgcacttcatcattggaaacttctttcgcttgtttcttattaggagacaggtgaggttcagtatcagcaacgcattggtcgtagtcacgcttcagttccgtccttgactcctcattgttctcctgctttccttcttctaatgcatgcacacaaaccacttctttctcccatcaaaatcaaagaacagagcccctgggaatccaaacgtggtaactaccagataaacaccactgccgcacagcattcacgaagaaactcgaactgacttgaacttccacacaagattcgtgtcaaatcaaagcctcaaaaccacagcagcgttttgtaattagggaaagaaggtagctgtaatattataagtatttgtgc

SEQ ID NO: 19062 - DNA, 455 bp, Glycine max
cctcactctgccaactaaagagagtagaacactttgagcgaatggctacgtttgcaattgggacacacacttgcccatgttccagcatttgcataattctagacttccacttcttggcctctgcaccgttgaatcttcacccttctttggctcctcttcttgcagaaccagattcgcaggtgccatccccacgttgctccgtcacaatgtattggcacgtgccgaagataaggccagagaccctacaccttcttcctttcagcctcaacaaagttctcagcaacagtttcagaacttaacaccagaatctgggagttgtgatcccctatgttcactcgatgaaacaagctcacaagagtttgaagacagctaccagcccaagactgatttcctcaaagctgttgcaatattagcaacagctgcaactggggcactgacaattaaccattcatggg

SEQ ID NO: 19063 - DNA, 434 bp, Glycine max
tatcactggttttatgctgttttatcatcatttggggttgggtaaaaaataaaaaacatcagggtacaataaaaaagttctacagcagtattttaattatttaatttaatgtgatatagtaatgggctgatactaacccaatagtttcactgggccgggttgggttgcaatgcaccaattgtttaccttctccaaactaaaaccctcattctaccctatgtaccactttcttttgtgtgagtcggggtctgcaacaaaaccttcgctcgcgtttttcagggtgagtctctccgtcgcatgcattgcaatagcttgttaatttctcaggattgggcttcggatcccaactttatgtggctccatgtatttaatttatcttgtgttttatttatgattcattccaaattcgcaatacctaatcatggcgtatttaa

SEQ ID NO: 19064 - DNA, 385 bp, Glycine max
atatatcgggctcaatcctgtggctccctccttgggaagggaggggggatccatgcgacttggttatgaaacccaaccctaaacaacttggtctcaaacaagttgattttgattaagtgaattgggtctgaacatctaaatttgttttaaactttttaaaactgaggttttaaataaacacacaatacaaattatgaaaaatcaccttgaagctagtcacttagctggcgtatcatgaaagtgttatggcgatattgcttaacaattaagtactcaatctcaataagtcaacaatgacattcgaagaaattgaaatacgttatggaggggatgtcccatagtcaatgtgtggagggcaatcgaaagaaatggaaaccttaaactg

SEQ ID NO: 19065 - DNA, 410 bp, Glycine max
gagggagtgaaggtgaagatccctacttttaaagggatttatgatccagaagtgtgtcttgagtggaaaatgaaggtcgagtatgtctttgcttgctacaactacaatgaagagaaaaagatcaaattggcctccctggagtttgagggatatgccttagtgtggtggaatcaagtgaggagtgatgttgagagaatgaaaaggttgttaattgatacttggcaatacatgaaaagagttttgagagagagatttgtgttgtcttattatgggagagaccttcacaacaagctccaaagactaattcgaggaaataggagtgtggttgagtattacaaagagatggagatttccttgattaaggctcaaattgataagtctcaagaggccaccatggcaaagtttttgca

SEQ ID NO: 19066 - DNA, 351 bp, Glycine max
ttggcatatacagcctcttatcacattgaaaatggatgtggacattcatctagatgtgcaaattcagtaaccagtgttaagaaaatgtcctggcatacaggagttaaatggaacttaacccttgtacaagaaacgtgatttctgatataaagttagaaagccaattttaaaacatatctagcatcaagcaggtaataactcatcagaaacagcatctaagacggagttaatgtttacatttccaggatataaatgaacataaaaaaatgacccctttcattagtacttgacaatggagaattattgttgaaaggcaggcaagtgagaaatgtcacctttgcatggcaaatc

SEQ ID NO: 19067 - DNA, 595 bp, Glycine max
atatatatatattgcaataggctccttatttagtgtccgaaaatctctcaagaaatcataccaaaaaagcaactagcacttcaaattcgctgtctcagtccctcgtatccaactattttgcttaggattttccttcttcatcacaacctcgtaataaattcgttaagttcctccttgtttggtcccaaacaatctgagaaccctctttcaattcctcttcctcaactccatcgttcatcgccgtccactattattagcaattggtatttagtaattaattaattactaacattagttaataataatggaccctgcagagctgaagcgcgttttccaattgttcgaccgcaacggtgacgggagaatctcattgaaggagctgagcgattcgttggagaatctaggcatcttgatcccggacaaggaccttgctcagatgatcgagagaatcgacatgaacggagacggttgcatagacgtggacgagtttggggacttgtatgagtccatcatggaggagcctgatgaggaggacgccctgagggaggcctttaacgtctttgaccagaaccgcgacggtttcatcaccgtcgag

SEQ ID NO: 19068 - DNA, 354 bp, Glycine max
attgcaataggctccttatttagtgtccgaaaatctctcccttagtcataccaacaaagcaacaagcactacaaattcgctgtctcagtcccttcgttgccaactattttgcgtaggattttccttcttcacaacctcgtaataaattcgttaagttcctccttgtttggtcccaaaaatctgagaaccctctttcaatttctcttcctcaactccatcattcatcactgtccattattattgttattattaacaatggatcctatggagcttaagcgtgttttccaaatgttcgaccgaaacggtgacgggagaatctcattgaaggagttgagtgattcattggagaatctg

SEQ ID NO: 19069 - DNA, 394 bp, Glycine max
aaggggagcatcacttttcaacatttacaaacagataactctcttttaatacttgataatctgatcctgctccatactacgatgattccacgcacatttaatacttgatattcaggcactgtttctttgttccgctgcctcgcatggcatcaactactctcttcagcttcagactctctttgaacccactgcaccatcaacagacaacgaggccaaaatctctgctctcctctcctcgcaccaatccacgcctcgcttctttcattaacaatcatttggccctcacacatgtcacatacccgcttctccaatctcactctgctcctaagcgcaaattccatgtgtattctgatggggaaagctcctagtcgcttgtttctgactctacatacca

SEQ ID NO: 19070 - DNA, 506 bp, Glycine max
gtttattttatgtaaagaaaaagagagcaaataagaaaaaagaagaaggcaagtaaggaaaaaggtggagaataagaacgcaaggagcggagaaggacaaaggaacgggagaaaaagcttagaaggaaggaatgactaaaaggaaaagaaaaagaaaagaagtgttcggaatcaaatgatgctcttggttctcctgaaatctcaaaggaagaattgtctgcagttgctgatatggagcaaaatactcctattagctgcaggagtttagttattgaagcagatgaaactaatctattgggggatgattctcctaacatcgaagatgaagaattctctagtgagtgtaatactttgaaaccacatgacctctctcatgatgattgcggggaagaaatttcaaatacaaaagatgagatgggtcagtctacaattgaacaatcaatgctctctcatcgaagactaagatgtaagaaagaatttcaacttgatatgcctatgaagtggtc

SEQ ID NO: 19071 - DNA, 466 bp, Glycine max
  unsure (1)..(466): unsure at all n locations
ggttcctctctctctctttctctctctcctgcttttgtttgccagtggcgcattgcaggaaacgagggggagagtttcattgggaaggtaaacccagcctttgtttgcaccattccctcaaaccatttacatcagcatccaccactctctcctccctcctttctgctttcttctttctatttcaacaacccaagttatagattatttatgcgtgcgtgcatcttcttttttcctctcactagtgaatgctctagtgggtggtagtaagttttaagagactaaacacccgtttttccaaggaaatttgtgcagactttgtcagggaagttacagtgggaaaaaaaaccctcttccactccatgtaacagacacacaactacagcactagatcactgttttggattttttatgtaaaaaaggcctgcaacttgtagcataaaatccggnggtgccctgaagtaactca

SEQ ID NO: 19072 - DNA, 738 bp, Glycine max
ccggatatgaccggtttgttgaggtcgaaaaaaatcgccacgtggagcgagctcttgcgagggtctcccagtaaccgctgttgggttctgcgttggcgtctctctcggtgttggccactgataagaaacagggctgggctatcgactctttctatttatacaaggaattcaggtatagtttgtcagtgaatgttattgggtttgtgcattccgcgttgcagatatgtgatcttgggcggtactttgcaacgggaaagcacttggtggagcaccagctaaggggttatttcactttcgcgctggatcagatcttgacataccttctaatgtcagcatcatcatcagctgccactagagcttatgattgggtttccaattggggtgaggacaagttcccctacatggcaaatgcatctgtggctttgtccttggttgcttttgtggcctttgccttagcctctcttgtctctggttctattgttgtaaggttcacataatttatacaagtactatgtgtgaggtgtgcaaactctttatctgagatactggattaagctttatcctttctcgattgaaaatcgtcccatattttcagaaggcagactgactcactttgtacagaagggaaactcactttatttctctgtcaactttaatttgtatagatgcaggtggatttacagcttgctgaactggcttgtatatgaacttttgcattattgagatggtattaagctt

SEQ ID NO: 19073 - DNA, 410 bp, Glycine max
cagatttgaaagctcatttagagcacaaaatttcgtgctcttctctccctctcccctcattcatctccttcttcctccaagctcttatccatggcctcctatggtggtgagcttcttctagactcatcttctccttgaagtagcgtctcctctctctcttcctttccccattccgctgccattcatcttccaagaagcaaaggaatccattgatgaagaagatcctaggcctacaagctccaatggagcttacatcatgtggtatcagagcatcttcatctaggtgatgttcttttgcttcctctatctttttgtttggtgaattctctttaattccttgttcttcatcttattctccatgtatatactccattgtcttgtggtttggtgcttgctaaagtagattaatt

SEQ ID NO: 19074 - DNA, 404 bp, Glycine max
tgtgtgaatttggaagttgcaggcatagggacacgcgcgacattcaggggaggaggactggtggggaagatccctttgtagctaagttcatagggttttggttatgttctttctctatcaatcagaatggtatatggaaccaaaaccccaacaagttatgcattctccactgctgctagctgcaatctgctatgtatctgccattctttttcatttgcaccaatgcccaattacgtagccacttgatggcattgaacatcaaatgcaccgtgtggccccatccattttcaaaggatggagatagttaatgcttttgtgcactttgttttaaatgattttaggtttatataattaatcttaattaaaattactgattaaaagtgtattaaaaacatatcaaaatc

SEQ ID NO: 19075 - DNA, 1374 bp, Glycine max
ccctcgcgtccgtaaataagtcctcaaaggcaaacaaacgaatcatctgagtctggcccagtccatcgccacaggttccttagtgtatctgctattgtagcaatatctgcatcctttgtcattgttttaggagtgattgctgttagcctacttaatgtttctgtaaggagaaggctaacatttgtggataatgctttggaaagcatgtgctcgagctcctcaagatcgggaagtccagccacaggaaagcttatcctgttcgattcccagtcctcacctgattggatcagcaatcctgagtccttgctcaacaaggcatctgagattggagaaggagtctttggaacactctacaaggttccattgggatcacaaggtagaatggtagcaatcaagaagcttatatcctcaaacataatccaatatccagaagactttgatagggaagttagaatcctcgggaaaagcaaggcacccaaatctaatagcattgaaaggatactattggactcctcaattacagcttttagtgaccgagtttgccccaaatggtagcttgcaagccaagctacatgaaaggcttccttcaagtcctcctctttcttgggctataaggttcaaaatcttgcttggaacagcaaaggggcttgctcatttgcaccactctttccgtccgccgatcatccactacaacataaagccaagtaacattttgcttgacgaaaattacaatgccaagatctcggatttcgggttggctcggcttctgacaaagctggacaggcatgtgatgagcaacaggtttcagagtgcattaggatatgtggcaccagaattagcatgccagagcttaagggtcaatgagaaatgtgatgtctacggttttggagtgatgatccttgagctggtgacaggtaggaggccagtggagtatggagaagacaatgtgctgatactgaatgaccatgtgagggtgttgcttgagcatggtaatgtgttggagtgtgtggatcaaagcatgagtgagtatccagaagatgaggtgttgcctgttctgaagctagcaatggtatgcacctctcaaattccttctagcaggcctactatggctgaagtggtgcaaatactgcaggtcattaaaaccccggttcctcaaaggatggaagtgttttgatgagatatgcttctctgttgaactagcttgacatatagaaaatctgtgactattgagatttttttttcttctttttcctttatgttctgtatcctttttaatttccttggccatttggtttgtgtggactgttcttttatgtacaagcagattttcctcgtacaaatggaaatcactatcatataaatccgtatttcgcc

SEQ ID NO: 19076 - DNA, 836 bp, Glycine max
aaaaaaacaacaaaaagggcctcaattcacaattccttccaagttttatcaaactgttcccaatcttttcgtgttcgaatcttcttcatctttttttgtcccttcgaaaagctaaggaattggtgaattggtgtatgacatgaagccttctgcaaggagttcatagattttctcttcttagaataatcaattagaaccaccttgaagttgagacaagagtaattgcagccttattttaattagacaatatcaggacaaatcactattcaagagatattatgatcactatggatgtaaaaggtataagatgggttggaaatatgtaccagaaatttgagaatatgttcctggaggcagaagacgtgatgtacgaggatacagttaaatacatagagaatcagatgcaggctgctggggaaagtgttaaaaagttatattcagaaattgtgggagatttacttcccccagaaaaggtaggcattgaattgcctatagataagcgtgcggatgctgggctctgtaggaagccattccatgtatataaggaaagacatgcaaaagctgataccaagcaaagaactgaagattcaaggattgttcatggtgttgataatgttgcaacacttgctgctttatatgatggaacctccaaggctgatgcttcatccatgttatctttgagaaattctgtcatagaaggaaaatttagttcaccttcaagacagtatgttcgaagaatggatgttaaatcaaacgttcgtattgatgaaaatccagtaaataagaaaatggatgcgaccaagataatcaacaaaaccaatttggcagaaacagat

SEQ ID NO: 19077 - DNA, 411 bp, Glycine max
cccacgcgtccgcgcaattcctcccaagtttatcaaactgttcccaagcttttcgtgttcgaatcttcttcttccttttttgtccctttgaaaagctaaggaattgctgaattggggtattacatgaaaccttctgcaagtggttcataagtttcctcttctctgttcttcttagaacaaataatcaaatagaaccaccttgaagttgagacaagagtaatggcagccctatagtaattagacaatatcaggacaaattactattcaagagatattatgatcactatggatgtgaaaggtataaaatgggttggaaatatgtaccagaaatttgagaatatgttcctggaggtggaagacgtgatgatacagttaaatacatagagaatcagatgcaagctgttggggaaa

SEQ ID NO: 19078 - DNA, 358 bp, Glycine max
gacaccaggggcttctatttcattcattcatctctcatctgaaacacaacaagagaaacaatggaactcttgcaaaatggccacaaaaatttggtcagcatcaaaccctccgagttacccctcttgaatggggccgcgttaactctcctcaactcgctctccgaaactcatgagtactatggcaacatagatccttccagagtttttgtcaccaaagtgaagcgtatcattgtaaaggtactgcttttaatttatcattgctttatattatttattttattcatagaaatcaaactcaaactctaagacaagtttatatcaatttatatatcagtactatttctcctttttttaatcg

SEQ ID NO: 19079 - DNA, 425 bp, Glycine max
ccaatttttacatgaatcagaactcgtagtataaattcgatgggtggcattagccccaatttcttcatctctgcatatgaataacatcgatttcaatctttgcagtatcgaacatctctgcacacttcattcccaaatcccactcgtttctctgttgtttctgcactgttttgaggaggttgaaggggaaaagtgggtatcaaagttggcatagcagaagtgcaatcagctctagtttcttctcttccaagcaacaggaacatggatgcacaagccaagaaaaaagcattgtttcgtgctaaattgaatgcccagaagaaggaaaaacgcatagaatctccccttgtaaggtataatgaatttgatcaacctgtttgccgggtttgtgatgttggtctaaagtctgagtctttatgggatgcaca

SEQ ID NO: 19080 - DNA, 366 bp, Glycine max
attaaccccagtttcttcatctctgcatatgaataatcgtattgatttcaatctttgctgtatcgaacatctctgtacacttcattcccaaagccactcttttctctgctgtttcggcactgttttgagtaggtagatgaggaaaaaggattaaccaaatttgagtgggcatcaaagttggcatagcagaagtggaatcagctcttgtttcaagcaacaggaacatggatgcacaagccaagaaaaaagcattgtttcgtgctaaattgaatgcccaaaagaagaaaaagcgcatagaatctccccttgtaaggtataatgaatttgatctacctgtttgccgggtttgtgatgttgttctaaagt

SEQ ID NO: 19081 - DNA, 657 bp, Glycine max
tgaatgagtaggtgagactgagggctcacgggaacaaaccacccaacaagtccaagtccgaggcgaagaagacaacctggattttgtcatccccaccgtgccgttgatccctacagtttcggaagtttgtggggttaaacaaatggatcacataaaatcactttttatttttatattttaaattttctggcaccactcaaagattcagatagcggaaaatctttcggatttgaggaccatgtagggataagtcgatggggttgtaacagagccacgaaaggagaggagtttttggtttccaaaacctcgtttcttctcaatacaaaaaaaaaaaatgctgcagaagctgtgtttgattggcttctcatggatgccctcccggactttctttgcagcaagagctggccatggttggctgcaccattaccaagggttgtaaaccattattgccttctcctgtattgaaactagaaattatcagatatgggtcctccctaaatccattcgaggagtctagcaagtcccagaaagagtggttcaattctaatcagattgtcaacatgaacttgtcgactcaaaggcctatgcctcattgatggccatgaaacctatccaagcccagtagattttggctttggcatcgttgaacaatgcagt

SEQ ID NO: 19082 - DNA, 503 bp, Glycine max
gggagaaggaaacggcggaaaacggcggatacgacggtgatgacgatgccgcgccggagtgtgattcgccggacagtgaaattaccgattcaggatctcaggaaatgcaacccagtgtgatgaacaacaacatatgttctaatcatgaagaatgcgaaggacgttcttcacagataaagctgacaaaaggtttcacagcaaaggagtccgtgaaggggcatatggtgaatgttgtgaaaggattaaagttgtatgaggatgttttctctgaatcagaaatctgcaagctgactgattttgtgaaggagattcatgctgctgcccagaacggggagctctcaggtgaaacttttatactgttcaacaaacagatgaagggaaacaagagagtgctgattcagttgggtgttccgatatttggacagataaaggacgataccaaaaacaacatagagccgattccagcacttcttcatgatgtcattgatcaccttattcaatgg

SEQ ID NO: 19083 - DNA, 465 bp, Glycine max
acaggcatccaaatccttagtttggccttatgggagtttaaatccccacaaaattgcatcaaattgagccatagatcctcaaagacaattagttattagttaacaaaattttaacccaaagtttttacctgaatagctttgtgttctctgtgacaagcaagacaggctgaacaaagggctccattcatacaatccgagcaatacgtgttgcattcacttttgtggaaatctgtgtggactttgcattgaacaaaaaaggcttgtttggagaaatggcctaagccatggtggccacttgttttcttcttcattctttccaaattccaattgttgaatatgctgtaaatttctagaatcatcacaatagaattttctacaagaaaatactacgctagacaatactctcagaaatagattaatctagaaagttcatgtatgaaagtcttaaaaactgagatcttgaac

SEQ ID NO: 19084 - DNA, 489 bp, Glycine max
gataattgcattgaagaaagaggaagctgtggtctctagctattaatattagtattaatattaggcacggtttgactacaaataaaaggaaccatcgattcgtgtcagcccgtgaggcagccaagtttcagatggagacgagccagctttttaatgttcttgccatttttcttctctcggacccttttgctgttgtgaatgcaaactctgaaggtgatgctctgttcgcgttcagaagagctgtgaaagacccaaataacgttctagagagctgggatccaactttggtggatccttgtacatggttccatattacctgtgatgatgataagcgagttacccgactagacctcggacacgcaaaactgtctggccatttggttccagagctagggaggctccagcgccttcagttcctagaactgtacaagaactgatttgatgggtccaataccaaaggaacttgggagaactcaagaacctgcttag

SEQ ID NO: 19085 - DNA, 516 bp, Glycine max
atcaccaatcctatgcgttgacaaaagtgtgtgtgtgtgtgtgtacgatgttgtgtggtctgaattaatttagttttgctttcacaagcctttgacatattcatatctcatctccttcagcaaccacaacaaaccacttcaaaggtcctatattgctgatccttgtttctaaattcctctgcatggccaacaatggtgcaaaggatcccttgctgtcaggatcacttgatgcgactcaaaagactaaacagcagttattaaacaagagaaggctcctccgttctagaagtgctcctcacgcagagcttgttcctacagagccaaattgcaatgaatcaattcctcgtactgcatccatatttcagaatttgcatccaagttttaaaagaatggctatctaccttgcagtctatttaggtgtaagtgctttaatcttctaccttgtcagaaaccagattaaggggcagaaaacagatggaattcttgatgctttatacttcacaattgtgacaatga

SEQ ID NO: 19086 - DNA, 469 bp, Glycine max
gccagatgacgacagacgggaagttgagtcgtattcagcatttgttatcttgaaaatgcgatgaatagattgagtaattcatcgtgtaaattcacttagacgaaaatgtaggtaattaagaaaagtgggggtgtaaattgtgattcaattaatatggggatgactaatgcacacatgtgtttttcaataacatacatatttaaatgaaaaatcaataaacttctatgtgtcagtaaatcaatcttgagatagtattatcggcaaagagcaaacacgctccgtgccattggttctcattcattgttttggtaaatagcactagcttatagccttgctagtgacgcttggtttctttagaggaatacgtaaccttcttaatactatgtggacactctgtcttctctctaataaacatctgattatcaagtagtttctatctagtcatagacattaaattaatgtatatatt

SEQ ID NO: 19087 - DNA, 706 bp, Glycine max
cgacaatttaagataaagaaaacaagattgtttagtgtttgggttgtttcagactaggaccaaattattggatacaattttcattgttgatatttgttcttcttgtaattcaggagctacaagagtggatttgtgtggcatgatctgtgtgaagatgatataattctaccagctcatggaaatgagtatgttctcaagggttctgatctctttgacgaatcaaattcagatcgtttcagtcccattagcaatgttaaaacacaaagtgtgaagctgttgccggggccagcttcttctcggagcctggatgagggctcatcctcttctagcatgaatgggaaggagacaagaatctcccaagatgacgagctttcccaagatccacacactggttcctctgatgtttctccagagtctagagctgaaaagagtgatgctctaagcttggcattgacagagtacaaaatttataaaactgatggattggccgatgcttcaactcagacagaagaaaaggccagcagatccagagctcagaaaacttgcacaaggggtgtatcaacggaggatggctcgttagaatccgaatgtcatgaaattcgtcaagctgaagctccccgagtgaaagatactccacgaatctgtagggatgccgtttctcctccgccctcaacgtcaagttcctcatcttttgtggggaaggctg

SEQ ID NO: 19088 - DNA, 687 bp, Glycine max
gttcaatgcagagatcacgtgaagctcttctacaaagaagaagagctaaaactcaactctctctctcgttgctttttgttttatggcctctaatcttcctcttcagtcgcgctcatggttacactcctacaccctcaggtaaataaatagaaattatggtcttgcttttcaataatcaaaacaatattcttattagtctcactttatcatctatggatctgaagttcgattgtcaaattggaaggaagataagcaccgacagtgtaaaacctctaattctgctagtaaatggtgtgctcatagaaactcatgattacattctcccaaattataaggaagattgtgatactcccactgtagtggatgctcaaatgtctgatcacttaccttgggctgtgcctctcggtcttgatgaattcaagagcagggcaattagttctaaaattaagtctggcacttctggttcctctggaagtgttatgcatagagtggagcctggtggtgcagaatacaattatgcttcagcctccatgggagcaaaattattaggttctaacaaagaagccaaaggcgcctctaatatcttaagcagagacaaagataagtatcttcgcaatccatgttccgccgaatacaaattcgtcatcatagaactttctgaagaaaccttgtgagatacaatataaa

SEQ ID NO: 19089 - DNA, 550 bp, Glycine max
  unsure (1)..(550): unsure at all n locations
tgntactacttctattgagtctctctgtcgtggctattcctcagaatttgcttcatacttccattggtgccggtcatggaggtttgatgataaaccagattatgcttatttgaaaagacttctacgtgaccttttcattcgtgaaggattccagtttgattatgtctttgattggaccattttgaaatatcagcaatcttcaagtgccactgcccctgcccgtgctattggtccggccgctggaccaagttcaggtgtgccaccactggttgcaaatggtgatggacagttaggtggagaggatggtagacctaataattggtcttcatcagatcctactcgtaggagaaactctggacctattgttactgacggaatcttatctagacaaaaaggcccagttacatatgactcaaatggatctaaagatgcgatggtggtgtatttatttgtgaattgattatctgttctatgaagtcagcatatttcttgcagaaagttctgtttattaggaaatttgttttcatgttatttacgaatctctgcatgg

SEQ ID NO: 19090 - DNA, 503 bp, Glycine max
tgaaaaggcttttccgtgaccttttcattcgtgaaggattccagtttgattatgtctttgattggaccattttgaaatatcagcaatctcaaattgccacacctgttcgtgttattgttcctgctgctggacaaagttctgggctgccaccagctgttgtaaatgctgatagacagacaggtggggtgaacagtaggcatactggttggtcttcatctgatcctgctcgaagaagaaactctggacctattgcaaatgatggaatgttgtcaagacaaaaagccccagttccatgtgactcaactggatctaaagatgctatgttgtcaagttctaatttcttctggtcaagtggaactgcaaagcgaggtgctgtctcaggcaaccgtgatgtagttggcagtgagaccgaggcctctcgttctctgatcctggattcaagtcagggagcacttcgtaaaatccctgcacctggtgctcatagaagttcagctatcatgtca

SEQ ID NO: 19091 - DNA, 633 bp, Glycine max
  unsure (1)..(633): unsure at all n locations
agggcagcgagagaggtgaaagcgccaaggctgcaacacccactccctcccctcccttcaatccctaattccgccactcacttccgctctcagctcagggtattacgtagtacgtggagaatgggaagtactgaaaagatcccaatcagcgctgaaagttcagaaaccaccatcgagataaaaattaaaacattggattctcaaacttacaccctcagagtggataaacagatgccagtccctgctctgaaagaacagattgcttctgtaactggagtgttatctgaacgacaacgcttaatttgccaaggaaaagttctaaaggatgatcagctcctgtctgcctatcatgttgaagatggtcacaccttgcatctggttgtgaggcaacctgatctaccaccaccaggaagtgtgtccaatcattcactgactgaactgaattcaagcacaggccttggtcacgcaagtcaagttgcccctggtgtttttattgaaactttcaatgtgcctgttcagggtgatggagttgctcctgaaatcaataggattgtttctgctattctaggatctattggacttccaaattntgcgagtggcagtgaaggagggattgatgtcagggagcatgat

SEQ ID NO: 19092 - DNA, 483 bp, Glycine max
tttgatgcgtgggctttatttgcttctgatcgccaaagggcattggaaaaggtgctgaaaatcgaaagctgattctgttgaagaaatgggttgtgcgaattcggagttgaatttgcaaattttcatcttgtcaatgttgattttcactgcaagtttctgtgttggggacactgacccacttgatgttgcggcaatcaatagtttgtacgtggctcttggctcaccaccccttgaggggtggaaagccacaggaggagatccttgtttggatcaatgggaaggtgtgagttgtgtcttctccaacattactgcattacggctgggaggcatggatttaagcggacagctggggactaatttggatttcccatccatcatagacatggatcttagcaacaaccagattggagggaccattccatccactttgccccctactttgaggaacttgtcactgtcagctaatcatttaaatggaagcat

SEQ ID NO: 19093 - DNA, 474 bp, Glycine max
gtagtaactcggaataggtcgagatcgagtgctcagtttcctaagcattaatgactagttctaacaaaaggcttgaggttcaaacagaagatcaaactccacataaatggtgtgtttcactgggggaagaggctttcaagagatttttcagccagattaatccaacagtgcataaggtttttggtgatggatcacttttcagtccactgttgtttgggaagttctttgatccttctgatgccttccctctatgggagtttgagtcagatgtgttgttatctcatttaaggagttccagccaaaacactgtggattggtgtcagacaggtgaaggctatgtattaaaagcagaaataccaggtaagacaaccagtttttcattttactcttacttgtaagctgaatctatggtaagcaaattatgatacaatgaaactgccccatcatattgaagacctgaaaaaaaaaaggatc

SEQ ID NO: 19094 - DNA, 338 bp, Glycine max
tttccctcgcctcgcctcgcctcccttctcaagagtggagctctcgtcctgtgtatctcactggagctctgtggcccctctcacggtcttcgctatccaaatctctgaacgattcaacgacgccgtctttgagaatcgcgatttgacgctttattacgtgattctccctcctttctgccattaacttcattatcgggtttcttcaaagcgcaagttctttcagctaaacgattgaaggccgttagccattaaaaaagaccgaatcgttgtgagttttattgttaacgtttctttgtttgttacatcaaaatcttaattgcgcagtggtatttaatttt

SEQ ID NO: 19095 - DNA, 460 bp, Glycine max
gatcggtcagacgtgcgagagacgacaaaggggattgggttgtgaatagaatactcctctctcttactgagaggctaaacctaaaacccttacctttccttcccgctctcataatgagggacagaaactgagagtgaaatgcagaaactgctacgcccttcttcttctccggtcgccatcctctctatctccgtcaccgtggctactccctttctctcgttgccccccaaagtttcaaacttggtaccaatgtcagcagcgttcacttcttcttccctcaatccccaactttcttattctcgctatttgactctctctaccaacacttgctctgtctgcaagtgtctcagtctaacccactcccacaccaggaacaacaacaagacccttcttcttcttaaccactctagatacctcgtcttacattcggcttcagaaggctccttcatcacccaacatg

SEQ ID NO: 19096 - DNA, 437 bp, Glycine max
gaagagaaaaggtggtggaagataccttttgttttagactttctaaagataaagggttttgattctgcattcagaaaggttattggttctgatatagtacaggccggccaatttgtggaatatgcatttgggcagttaaagtcttttaacaattcatatcttccgaagggccagcagtctgatattaataatgataagtatgacactgaaggtacacgggaactgagtgaatctgtttctatcttcaatatgccttctaatgaagctggtagtcaagaagcctccagagaagattgcgttgaacagaggaactcaaatgaatttcacaaacaggacaatgatactgaaaatggacatgcttctgaatcatcatcaaaagttagtgaggaagggctgtcaaatcaaattttttggaggaattgtgctaatgttagtaa

SEQ ID NO: 19097 - DNA, 387 bp, Glycine max
gaacttgttgagaaaccacataactaccccgttataggaacaaaatgggtatttagaaataaactagatgaaaatggtatagtaattagaaataaagctagactagttgcaaaagggtacaaccaagaagaagggatagactatgaagaaacctttgcacccgtaactagattagaagccatttggatgtttttagcttatgattctattatgaactttaaactatatgaaatggatgtcaagagtgccttcctaaatggtctaatccaagaggaggtatatgttgaacaacctctcgggtttgaagactcacaaaaattagatcatgtctatagattaaagaaagcacttatgggttaaaacaagcacctatggcttggtatgaaa

SEQ ID NO: 19098 - DNA, 765 bp, Glycine max
cctcgagccgaatcggctcgagtcaccctctattcacttctctctctcaaaacaagttatggtagtatttgtcattcatttcacaaaaccggttcacctttggacccatggcttctaaaacccctaccttattccactctcgtttcttcctcttcggcttctattgctgggactgggaatttctcaccgctctcctcctctttagttcttcttcctaattaattaaattacatacaccttttcttttttttttttttacctaaatttctcattactacaacatcaacaaaagaggcataggtttttcttttcttttcttcttttattaaaataataatagtttctgtgaggtaggtggagggtagatcgggaagaaaaaaaatgtcacagcagcagcgttcgacgccggcgccgttcttgacgaagacgtatctgctggtggatgaccccgccaccgacgacgtcgtttcgtggagcgaaggtggcaataccttcgtcgtttggaaacacgccgatttcgctaaggacttgctccccaagtacttcaagcacaacaacttctccagcttcgttcgccaactcaacacctatggattccgaaaaactgttcccgacaaatgggaattcgccaacgagtatttcaagcgaggacaaaaggatcttctcgccgagatcaagcggcggaagacggtgtcttcggtgtccggaaaatccggcagtggcggtaacatttcggcgtcccactccggcggcgatgacatgggg

SEQ ID NO: 19099 - DNA, 433 bp, Glycine max
gacaacaccctctattaacctttctctctcctctctttcctctctcttggaacaaacgacaagttatggtagtatttgtcattcatttcacaaaactggttcacctttggacccatggcttctaaaaactccacgttgttccagtctcgcttcttcctcttcggcttctattgctgggactgggagtttctcaccgctcttctcctctttagttcttcttcctaatcaaataaccttctccaccatacataaacctttttttttttgtcttttgtacttaaatttctcattactacatcaacaaaagaggcatagattttttcttcttttattaaaataatagtttgtgaggtaggtggagggtagatcgggaagaaaaatgtcgcagcagcagcgttcgatgccggcgccgttttttgacgaaatcgtatct

SEQ ID NO: 19100 - DNA, 410 bp, Glycine max
  unsure (1)..(410): unsure at all n locations
gaatgtttataagagaagggggaataattgttatgtgttgtcaatagcagttagttttaataggacaacaattactattattaggagcagtttatcaggaatagttagcagttagttttaataggacagcagttactattattaggagcagtttattaggaacagttattttaattaggcagttatgggtatgtgtagaataagaagggaaaacagaatcatattctggttatcctgaagatgtgtggtttagaccttgggagggagagaaccaagctctcgaaatcttggcttgtttgagtgaatattatgattctatgttctaattctatctctgntttggaaagaataattcctgcagagtgtttctataaaattcagtcattattatccaatttctatcacaatac

SEQ ID NO: 19101 - DNA, 671 bp, Glycine max
ggtttgctgtgtcatggatatttgatcagaattaaaatggagcccaattctgcgagaaacataccttgatcgtttatctctaagatatgaaaaagaaggaaagccatctctgttagctgatatagacgtgttcgttagtacagtggaccctatgaaggaacctccactcattactgcaaacacagttctgtctatccttgctgtggattatccagtggacaaggttgcatgctatgtttcagatgatggagctgccatgcttacatttgaagcactttccgagacttctgagtttgcaaggaaatgggttccattctgcaagaagttctgcattgaaccacgggctcctgaatggtattttgctcagaaggttgactacttgaaggataaagtggatgcaacatttataagagaacgtcgtgccattaagagggagtatgaagagttcaaagtgaggattaatgcattggtggctttggcacaaaaggttcctgaggatggttggacaatgcaggatggtactccatggcctgggaacaatgtcagagatcatcccggaatgatacaagttttccttggtcaaaatggtgttcgtgacatcgaaagaaatgaattacctcgtctggtctatgtgtctcgtgagataagacctggatatgatcaccacaaaa

SEQ ID NO: 19102 - DNA, 398 bp, Glycine max
  unsure (1)..(398): unsure at all n locations
ggattgggtttggttctcagtgtacccaaaaacagaggcagaaggaggaagaagtagaagaagattagagagagtgagtgagtgagcgagggataattggcgagttagggtttcgaattgactcactgagtctttgcattgtgtcgccggttttttttttcgccggagaaaactcgtgctccgatctcctctgcttttgttttcgatagcatagctgtttgaaaggttcggttttcccggcgaggatagtgggattttccggggattccttggtgaattgagtttgggggaattcttgattttgacctaaagcaaaggtctttactcaaaagttttactggattttgtgtttntatttttattttctatnnntttttttttgcgttgagtaaaccgag

SEQ ID NO: 19103 - DNA, 349 bp, Glycine max
aagttaccaaagtttgtggggcattagctaaacggaaacaatggtaatattcgcatattatatatagataggagggataagttattttaagagtaactctaaaagagttatttcttattttcatcatttaagtttttaaaatataatgattaagattaattaattaattagtataatcattaaatctaaaaaaatagatgatggaaataaataataactctaaaaaaaattactcttcagataattatatatagagagagagagggagagagatagagagtgagaaatagtgttgtgtggattgatgtgaaggaaggccactcatacctcactctcctttgaccatgac

SEQ ID NO: 19104 - DNA, 434 bp, Glycine max
ctcacatctaataacttcagaaacagcacaagcatctggcaacacggctgaagcagtttcctgcttagcataccttgttttcaaatttgattctccatccaaattcattgtctgaatataggcaatcccacttggatcactcgtccccaacaagaccatgtcagcaggaatcatctcttcagcagagattttaatgacatcaccagcctgtatatttttccatttcttggggcagaactgagccgattgaagaaccagacactctcgattgttttcattgcgatcggacctgtgcctgcgccaatcctcataggcatccttgatagctgtgacgcaaagcacaaacaagagggggaaaagggagacagttcgcccaaaaacagcgagcggaagaagctgattgagagcggcaatggcaaggaaataaacataag

SEQ ID NO: 19105 - DNA, 393 bp, Glycine max
agcctgttgatcgatatacaagaccagactttacagagggtgggccgttggcaattgattctggtagacacccaatcctggagagcatacacaatgacttcgttgccaataatatatttctgactgaagcctccaatatggcgattgtgatgggccccaatatgagtggaaagagtacttaccttcaacaagtgtgtctcatagttattcttgctcaagttgggtgttatgttcctgctcgtttctcaactgtgagggtagttgatcgtatgtttacaaggatgggtgcagctgataatcttgaatccaactctagcacgttcatgacggagatgaaagaaacagcttttatcatgcataatgtttcacaaaggaatctgattgttatggatg

SEQ ID NO: 19106 - DNA, 606 bp, Glycine max
gtgtttgaaaaggctgcatatgctaagaagcttgagcattttactcctgatgagatagaggacctcatgcttaatgttgggcctttgtgtgttgtcaaaatcatttatgaccattggcagcagaggaggcagaagaagggaatggctttaattcggcactttcagccccctctgtgggaaagatatcagaaacaagtgagagagtgggaactagccatgaccaagaacaatgccccttctaatggatgcctggacaaggttacaactttggagaagccggccatgtttgctttctgtttgaaacctaggggtctggaatcactgaacaagggattgaaacatcgatcccaaaagaagatttcagtctctgggcatgcaaacagtaatctagatcaggatggcttccacactttcagaagaagacagaatgctttaccttttggtgatgaaaagttcctataccaaggccacaattacgattcttttgatgattcatcattggctctgacctcaccaagggtattcttacctcgtgatgctggcagcttgaaatactatcctactagtaatggagcgggatatagaaatcatatcccaaaatttcac

SEQ ID NO: 19107 - DNA, 429 bp, Glycine max
gtcaaatgtaaagcgaatcccttgttgcttctctaagccaacacaagaaaaataaagaaaccctcactttagtttacttccattgcatccacattcacattcttcagctcgccggtgacacctccatcgttttccgccatgtcctcctattccgagcaaccttagattgtcgtcaacctctctcacctttttcccttatttcaacagaaaaagagagagagtgattttgttttatttttttttatagaaaaaaacgatacgatatgtacgttgtgcctccaccccagcgtctggatccgggttcgggatccggtgatttgcgggtctaccaagcgtggaaggggagcaataaattttttcttcagggcaggttcatatttggaccagatgcatgatcatttgccctgacaatctttctttatgcttgct

SEQ ID NO: 19108 - DNA, 393 bp, Glycine max
catgttcgaaacgtaaaattgcttgttcgaacacatgattatatctcaagtagcataataatgtaatttaggttatactgaaagaaaatcctgtaatttagaaacgaattttatacaaatgcactttaattgtgtctgtttatctcgtagtatgagcctctcttgttgctagtaaaaggagaaaattcagatccatttaggtatacttatgagtccatgattgtagtttattcaaggggaactaaaccttcttgttttgtagcttccctttctcgtaatctcatctatatttttttggtgatattttgtgtagagcccaaacaaaacttgggaggtattatacaatactttcgatgagtactgccggatggtcagatgaggaatgctctgtca

SEQ ID NO: 19109 - DNA, 636 bp, Glycine max
  unsure (1)..(636): unsure at all n locations
ccccttccttaagctcggaattcggttcgggcttttttttactacccaaggttttgatttatttcgaaatcgagaaatttcaagtggagcgggtggctatccgagaacaattggtcgatctggatttgagaattcttatggattcttcgntgatagaatggaaagaattaggggaagagggatccccggacaatgaaaacgaatgggaagatcgaaaagttggaagaagaaagaattttttggttcgacgcatagaattagctaagcattttctccgaacaaatatagaaccagaatggatggttttatgtcttttaccagttcttcctcccgaattgagaccgattattcaaatcgatgggggtaaactaatgagctctgatattaatgaactatatagaagagttatctatcggaataatactcttatcgatttattaacaacaagtagatctacttccaggttaattagtaatgtgtcatgataaattggtttcatagtatccttgtatacacttctttgtttatggaatcctctgacaacctattatgtactgacattttaattgtttacaaatcattttttgatataaatttaatcaaaaaatgtaatatttctcgatactttactttttt

SEQ ID NO: 19110 - DNA, 814 bp, Glycine max
tttttgttcatccattgcccaaactctagagctgcttgaagaagtgagaataattgactgctatgaattgaagcagataatagaagaagtggaagaagggagtgttgattatgttagcagtcaaagtcatacctctttgatgctcccaaaattaaggatacttattattcgtcgatgtcaggggttggaatatatattccccgtttgttttgctcaagggctagcaagtttggaagaactggaaattgaatactgtaatgagttgaagtatgtatttggcagtgaaaaggaacatgatcttagagtgtaccagcaccagagtcatcctcagactaatattcacatcaatttccttaatttggaaactctatggttgtttcggttgccgaatttggttgagatttggcctaaatattttgatccacatttaccaaatttggaaagtgccacactgcattgattgtccaagactgcctgactcttgggtgcgtagggggatgattattgattcagatctgcaacaagactcaactacaacggagaaggaattactatgctcggttaccaccacattcaaccaattatccgatctagtgctttcctctaaacttagagaacttggattgtctggtgttggagtaaaaggtcttttccaattccaaatcagagaacatgggagcaacacagaacttgctcctttaaacttggatctaactcatgctgacttgtgggatctacctgagctcgagttcatatggaagggccccacaaattttctaagcctccagatgcttgacgtgattaatgtgaatag

SEQ ID NO: 19111 - DNA, 387 bp, Glycine max
tgtgcggcgacaacatgaagttggggaaatattgagaacaaaaataagttgtctcatgatgtatgtaagatgcacaaatgcatccttcaacgttggccttatttttcactactcatttagaatcacccatgaatctacaaattttaatcaaaaccaagtcatcattgattagcattaaacaaatgaattttatagtgaaccatccaccaattgagcatcttccttatctgcatgctccatcatagaaagataaggaaagacaatacaagcgtgttatagatatttttaaacaactgcagattaacattcctttttctgaggcattagagcaaatgccaacatatgctaaattcatgaaggattttcttatgaagatgaaaaaaatta

SEQ ID NO: 19112 - DNA, 423 bp, Glycine max
ccgcccaggcgttctcccacgcgtccttactgctttaagactacagaaggggtattagttatctgtaattgtaaacaactgatcccttcaaaattccctctatgcaaatccattggatagtgatattttttatgtacttgacggtagaacttatcttaatcgttaaaagatctattagtatattatactcctttctccgtatttattaatttatacatttttttgttgtatttatgaaaaacaatgttacttctacgtttaattttttatttctagaagtaaactgtttttttttatatattttcttttcactttttcttcaacctaataaagaaagttttttttatattttttactttcactcgctttcatatcttccaaacgtaccataagataaatcttttaagttagcaatattacatg

SEQ ID NO: 19113 - DNA, 440 bp, Glycine max
aaagcaaaaatgatgaagcaaagttagcatgtgaaacatagattgaaaaagttatgatggacgaagaaggtgacccattgataaagagggagacagcctacgaaaatacagtgaagaatgtgagctgcgaagacaattttcttgataacccaataacggagttgatcaagaaggaagttgaaggtggagatgcaaccaagcctcattgtcttcaagattcagattttcataaaaagatcggtatgatgaaacagaaatcattgctggacccagatatgatcatgaaggtggttggaaaatcaatggtgctggaatcttggaatttcaacttgctaagtgagcctcttgcattaaactttgttgcatctatggctgacagctcaacaatggagcttaggcagaaggaatgtactgaggcagcatggtgattaaaagtatat

SEQ ID NO: 19114 - DNA, 679 bp, Glycine max
ttctgtatgaagaaaagacatgcattaaatgcacccaacgacctcctttctttattagacgaaagataaaagcaacacctactcgtcatgagacaacatatctctaaagtcgaaggcttatataaaccataagtttttgaagattgatagagtttatcttctacgcataattttctcttactcttcttcttcaacaagtctttctgaatattttcttataaaattataaaactctcaaaacaccttgaacatcttgagagaaaaaggttatatgcttagataatttatgtgtttgtaagacaattgagtgttagtctttgagtcatctttcatcataaatttcgtctaatggcttgatagaagaaagaatactggatgttgatcaaacttgggataaagtttgatttgtaagagccaaaagtggttatgacataatacttgtaacttgtgaaaaaattagtagaacttggtagtttactaaaaactaaattaatctccgtggtagagatgaatcaatataaaatctttgtgtctatctattatttctccctttctatttgattaactgaagttgaatttgaattgcgtttcaaaaggtataagataatctgcatttctaaaaattcatttttcctcatcatttgaagttttcttgtgataaaaaaattgtctttcttac

SEQ ID NO: 19115 - DNA, 995 bp, Glycine max
ctcgagccgaatcggctcgagcgcccgtcatcttgcttgccaataaccattgatgttggcacaaacaatgagaagttgctgaatgatgagttctacattgggcttaaacaaaagcgggcaactgggcaggaatatgcggagcttctagaggagttcatgcgcgcagttaagcagaactatggggagaaagttctcgtacagtttgaggatttcgccaatcataatgcatttgatctgctggaaaaatacagctcatctcatcttgtttttaatgatgatatacagggtacagcatctgtggtattagcaggattgcttgcatccctgaaattagttggtggaaccttagttgaccataccttcttattcctgggtgctggagaggctggaactggtatagctgagctgatagctcttgagatttcaaagcagactaaagctccagtggaagagacccgcaagaagatctggctcgtggactcaaagggacttattgttagctctcgtttggaatcacttcagcagttcaaaaagccttgggcccatgagcatgaacctgttaagagtcttctggatgctgtcaaggcaatcaagccaaccgttttgattggatcatctggagcagggaagacatttactaaggaggtggttgaaaccatggcatccttgaatgagaaaccacttattcttgctctctccaacccaacttcacaatctgagtgcacagctgaagaagcttatacatggagcaagggtaaagcaatctttgctagtggaagcccatttgatcctgttgaatatgaaggaaaactttttgttcctggacaggctaacaatgcttacatatttcctggttttggcttgggtttgatcatctctggtgcaattcgtgtgcgtgatgagatgctcttggcagcctctgaagctttggctgcacaagtatcacaggagaactatgataaggggctgatttaccctccattctcaaacatcag

SEQ ID NO: 19116 - DNA, 790 bp, Glycine max
tagctgagggagtgtcatctatggtcctcataaagatgcgggagattgcagaggcatatttggaaacacccgtagagaatgcagtggttactgtgcctgcttatttcaatgactctcaacgtaaagccaccatagatgctggtgctattgcaggcctcaatgttatgcggataatcaatgaacccactgctgcagctattgcatatggccttgacaagagaactgattgtgttgaggagcgaaacattttcatctttgaccttggtggtggtacttttgatgtatctctcctcacaattaaggataaggtctttcaagttaaggctactgcaggaaacactcaccttggaggggaggactttgacacccgaatggtgaactactttgtacaggaattcaagaggaagaacaaagttgacattagtgggaacccaagagccctaaggaggttgagaagtgcatgcgagagggcaaaaaggatactctcatatgcagtgactaccaacattgaggtagatgctttatttcagggtgttgatttttgctcctcaatcactcgtgcaaagtttgaggaaatcaatatggagctctttgaagagtgtatggaaacagttgataggtgtctttctgatgctaacatggacaagagcagtgtacatgatgttgtccttgttggtggttcttctaggattcccaaagtgcaggagctattgcagggcttcttcgatgggaaggttctgtgcaagagcatcaaccctgacgaggctgttgcttatggtgcagctgtgca

SEQ ID NO: 19117 - DNA, 404 bp, Glycine max
gcagccacacttgcaatgatcaaagccaaaagcacaacaaaacaaattattctataaataaggagccatgaaggatcaattcctttaagacaggtgttccatgcttcatcctcatatagcaatccagcttcttcctccccctgattttctccactattcgatcttgatttgttgaatccttcatatttgaatattaaaaaagatgctagagccatggaggctaaaatccatagtgcacagaagaagaacctccaattcaaccaataacttagggtagtagagtctgaagttatggttggttgccatgtatggctagaggactctgtgaagaaactcatgagttatgtgtgctagctttagaattttatgtttcttcttgatgtgtttcttgaaacactatgcac

SEQ ID NO: 19118 - DNA, 913 bp, Glycine max
ggctcgagccgaatcggctcgagcgtgctcgaggaacagactaattagtctttgaagattgggagcatgcagaacttcagaaaataatagaggaagatcaacttgctgagccaaatgaggaaccccaggtcgacttagaagtgccgactttagctgaaactttggagaatcctcaagaggaactggattccaatgcatccgaaatatcagctgttgaagatacccaaattcatgcagaggagaaaccacttgctgaaccagtcatgcaacaaaacactgatactatttcttcctctatcgaaaagccaatggctattgttgcagaaaatataagttcttcggaagatctcatcaacagtacaagccaaaaaagtaataaaaagaatataatacttcaaccaaaagaagaatctgcagatagtccaggaaacgatgatataatacatgatcttggacacaatggaaatgctgcgtcactcgaaaatcaggaaaagacaattgtggaaagcagcttatttgatcttgaaggaggtcctgttcttgtacctggcttaccaatagaaccaactgagccaactgatcaagcgggtcaaagtgaagttcaagagatgactaacacggccacttcagttggagcttttgaaactcaggatcagaacatacccgaggtaaacgcttgatgatgagtgtggccttccctttctcctctccttctaacctttttcccttctttacttgtccacaactacctttggcagagaattgcttgatttcttttgaggaacaagttgtttggagcttaggggttgaactttgaaatcctgtgtgaggatatgtgattaaataatacacagaagtatcctgttctgcttgtatcatcatccgtgttttatcaatgaagggaattttgtcc

SEQ ID NO: 19119 - DNA, 370 bp, Glycine max
tactcaattgtcgatattgagagaaaagcaaagcttcgagcctgtgcctagtatcgtcctatctatgtgcgattgcaaactccataacaattcctaaaatatatattctaaactttaagggcttaaagaggctcaagttcaacacacaaggactcacctaccttatacgatataaaatcggcttaattgttagggtgagagatttaagaattaaaagtcaagaaagggaattagaggtagtagatctaaatttttactaacattctaataaaaattaatacttattaacttttaaaataattattttagaattatttaaatagcgattttgtaattaaatcacaattataattggtttacaatgtgaata

SEQ ID NO: 19120 - DNA, 574 bp, Glycine max
tcagtcagaagctatgtctaggaatactagacaatccacactgccaaggaggttgactttacgaatcttggatcagccaagaccaactataaacatcgatgtcgcaactggctgaggattgggcccatacagagaaattccccaactatctaggggtcgtagttagagaaaaaattccaattctacataatagttggaaagatgtaccggactcgctaaaggacctagtatgggataacattttggcaaaatttgatatccctgaagcggcgaatgcaaagataaaggtgatgtccaccgtggccactagatcggaggcaatttaaatcacccatgacccctaaatttgtctatgctgactctgagaggcaagataaacatgatcattcggtaaaacatggcctagatgcagaaacttgggaggaatttgccgcaagctgcaaaacccttaactggcaggttagatgttcatgtgtttgatttttagtgtgtatttctcattataaaggcaatttgatttgtttgattcgaataatatatgctacatgataaggaatcaagaaaaagatgtagg

SEQ ID NO: 19121 - DNA, 766 bp, Glycine max
ggtaagtttccaaatcgagcttttcaattcattctatgtacccgtggtggtccccatttgtttttacgtgcttttcattttatttactttctgtacccccttttggcgtgctttagtcattttctcatctaatcaaaaaatgaaataaatttcgaccgatcatttgaattgtaatatccgttagtttctgttaaaatgaaatccgaccgttcggtcacgccgtaactacgttggaagccaaaaaaaagggtaaaataataatataataatcaaaaatatcttttaataaaataaatcaaaaataatcaatcgaacactttcctttgggatttctctttcttaatcgaatcgattaataaccaaagtgaacttaatgcaaaaatcaattcataaaccaaacttttgacgttgcctaaaaaagccattttcaaaggtccaaagccttgaaatggtcttttccgcttttatcgattaagtgtaaatttcaaaaaagctaaaatcaacatatagctatattacctctttcaaaaataaagagaacattaaatggtccaatgccttaatgtcttctctcttttcaaaagaatcgaaagtttgtttaacggtccaacgccttaaataacctttcattcaacaaaaacatatcttgcaaaaaggataaaaacaacttaaccaaacattttgttctcaaagaactacgtaggtctgatttccttatcgcaattaaggaatacgtaggagcaagggaaacaccctcgtcgactgc

SEQ ID NO: 19122 - DNA, 352 bp, Glycine max
atggtacactgtcactggaaaattgggttaaatcatagaagagggattggtcaatgaccatctttatcccacagacctcaaaaatcaaggtactttcttgaatttcaaggttagaataaaagacttgtaccaattcaaaatacacgggcagttttgaagacataaagggaatgagatttgagttatgaaatgcttgaatgcatttgaaactctcatcagaaaagaaatccatatctatgaacttagggtcaatgatagaacatgacgagaagaggtttgtgtaccatgtatgttgttctttcgatgagaacaatgaggaagaaatggaggaaggaattggagtatcctgagt

SEQ ID NO: 19123 - DNA, 420 bp, Glycine max
gggggtatccattaaccaagcaatgtgtatgttcggtttttttacaatgttataaatgcgaagtatttattgactttgtgaatcaatgactatctaaaatttattatattacctttaagggaatctttctttacaattacgtttttttcttatctacaaaacttgaatgtgagattttatcggagtccaattccacttacactaaggtaatgttgctaaggaatgctttatgttctaaatactaattattcactctctcccttgtacaatacttaaccaactaacaccactacagcaccaaacgactcctttgttgctctggcctttcccttaaagaaacagaaagccaatgcaataatgtcaggtaaaagagcacactaaattggtgctgaggactggcttataaaggttatatccctc

SEQ ID NO: 19124 - DNA, 245 bp, Glycine max
  unsure (1)..(245): unsure at all n locations
aaaacttgtggtctttaaaggaacttcaactgatgatgaaggagttaaattttctatataattgttttgtgaattaatctattgaatctttggggattttacatgtcatcaacaggggaatcttttgctatctatttaattagttgatgtgcaagatgtgtaagaacaagctgtagtaaattgctatcaattttcatttcgggagctttgctgggcnnnnnnnnnnnnnnnnnnnnnnnnnnnnn

SEQ ID NO: 19125 - DNA, 435 bp, Glycine max
gacatacacctcaaacaaataccaaagtgccttttcttagaatggagctcttgtggaaagatcacatgagggtacaagtaattagattggtttgtgctgtccttttggtgacactgctgagctcagaggtagctgagagcagaaaagtcaaaactgttggtacttcctttaagtacgaagctataaattgcaggactcatagtgcttcattgactgattttggtggtgttggagatggaaagacatcaaacacaaaggcatttcagtctgcaatcagtcatctgagtcagtatgcttcaaaaggaggggctcaactttatgttcctgctgggaagtggcttacagggagttttagtctaatcagccacttcactttatatctaaacaaagatgctgttcttcttgcatctcaggatattagtgagtggcctgcga

SEQ ID NO: 19126 - DNA, 850 bp, Glycine max
cacaataggtcctgggaacacattcctgagaggaaataaaccggaaacaaccggcttctagaccgaaggaaaagcttcatcaccactccttgcaagagtccaaggcgatgagaaaacttcgcatcatttgcgacgatcctgatgctactgattcatccgaagatgagactgagaaggttcagagcccgagaagagttaaaagaaacgtgtctgagatctctcttccccctcttcctccaccattcaccaccactcctgaaaccagctcctgtgaggtgaatagcggcaaaaatgcaacatggaagggtttcattgaaggtcaaccccagagtaagaagagggttttgactcaccccccatcaacaaggaggaacacttctgggaaattcagaggtgttaggcagagaaaatggggtaaatgggctgcagagattcgtgacccctttcagagtactcgtatatggctcggcactttcaacactgcagaagaggcttcccaagcctacgaggccagaaggcttgagtttgaggctatggcagaggctcaagcttacaaaactagttctgtttctgaacctttggctacaatttctgataataagagtaactgctgtaactcttctgccgctgctatctccgccgctgccgtctccgccgctgatgtgtctgtatctgagaagttttctactacttttgatgacttagaagagagtgtgttgtctcacaattcaccatcctctgtgctagagttggatacattggcttccaaatcccttgagaagggcaatgtttcaaccgaggaagctattgaggctaatgatttggtggtgaacttgcagggttagaggta

SEQ ID NO: 19127 - DNA, 443 bp, Glycine max
cccacccgtccgacggttgcaaaaaaccaccaaaggggccttttttaaaccctaattcttgggggttctggttcatgcctctgaatggttttggtcaatttattaccccaatgggtaaaatcctttaacctcaataaattggatggtggtagatttcactggtctatagatagggcttagattatatatcaaacaacaaatttactggttttgccgaagaaacttaatctaatgagaaaagattttgtgcaaacctcagcaattatctcagcagacactattccagtttcttctcgaagttccctaacggcagcagatttgggcctcttcaccatcttcaattcccccctgagaaccccaaaagaacagtcaattttatcagaacaatttaataccataaagagatagaaaataatttacttattacaggcaacaaaaggggg

SEQ ID NO: 19128 - DNA, 391 bp, Glycine max
acaatggtaaaactactttgaactcaattaattgaatgttgtaagatatcactgatcgatagatagagctaagattatgagcaaacctcagcaattatctcagcagatgctattccagtttcttctcgaagttccctaacggcagcagatttgggctcttcaccatcttcaattcccccctgaggcatttgccatgctcctgggacattcaacctagaagccacaaaaatctgatcatcggagttgatgagacagacaccaacgttgggacggtaaccttggggaagtccctccatggtttgttgaagaagttcaaacttttttttattttttatattttttttaatttttttctttctgagtatgtgagtgttggagatgtggagagaac

SEQ ID NO: 19129 - DNA, 359 bp, Glycine max
caattcccccatgaggcatttgccatgctcctgggacattcaacctagaagccacaaaaatctgatcatcggagttgatgagacagacaccaacgttgggacggtaaccttggggaagaccctccatggcgtggttgaagaagaataactaacctttttttttaacttttgttttttttttctatttctatttttttgtttcagagtgcgtgtgtgagagagagagttggagatgcggagagaagagagaaagtgcgcgttgaggaattggaagagaataatgatatgataaggaagtgaaagaaaggtagagtgagtgacgcaggcgaaggtgggagtggagtcagagacagacagac

SEQ ID NO: 19130 - DNA, 680 bp, Glycine max
cgacagaagggaggattgtcatggaggtgtgtctgacaagtttgatggtactgtgaatcaggccttgaatgttatgggctctgaaaccgtggctagtgctggtgaatctaatgatatggaaattgatggatctcttgagcataaagcaactgtcaatgaaggaagttcaccaagcactagtgttcctgtgttggaggagcccctgaattttgatgcctttaattcagctgccgaacttgaggttcttggcttggaaaggttgaagtctgaactgcagtcacgtgggttaaaatgtggaggtactttgatggagcgtgctgccaggctttttctcttaaaatcaactcccctggatgaacttccaaagaagctgattgcgaagaagtaaggagatttttgagaaggcagttatttctctgtacagtatttcttaactgtttgcaccttgtacttgggtgtcagttgtatcctctgatgacttgtggaactctgactgatgcatgccttttctgttcgttttagtgttcatattgggctgtattttgatgtaataaataccgttaccagcagccaaaggaagctgacccctgtataacccaagaattatgcattataaacaattccaacttttctttttgccattgtattatgagataatgacgagtatcatcaatggccgg

SEQ ID NO: 19131 - DNA, 414 bp, Glycine max
cgccggaaggccaattccagtggtaaacttcatgactttttcttttaattggtatatattggattgatatctgttcttgaatttcagtttctgattgctctcttggtctgcatgttctgattgaatttatatataggctttgaggtttgtgatatgagtgaataggaaaatacccaaaacaaccaattagtattttttcaatggatatggttgtgtggtatgcttaggaaccattttcttagagcttgatttgatctactacttataagaatgactttattaccgaaaacatttttttcctctaaagaaaagatttttccttgttttgctttggtggaatgagcatgcgtgaggaagtcttatttctgttgaaagtttaaatcttgcttgggtgatatgagatgaatgttgagt

SEQ ID NO: 19132 - DNA, 392 bp, Glycine max
agaaggggattcatagcaacacattcttacaatcttacatgtcaaaactaaacaaaagtgagagaaacatcggaacatggcaacccaattaaacaatgtgttcagaacttcaattctgaagcacaagatccaatcagagacccctttgaaaaccacaataagaaccacaagatttcaagtgatcaatgctaccagcagtgcaaggcagctcatagagtctggcacagtgaggccaatattgccaaaagatgcttccacagccataaactcagagggatttgttctccttgatgttagaccaacttgggagagagaaaaggcccgtgtggcagggtctttgcacgtgccaatgtttgtggaggacacggataacagtcccataactctgctta

SEQ ID NO: 19133 - DNA, 552 bp, Glycine max
gaacaattaattttcaaacacaagatctctctccatcttccccgtcctcttctacctacttctccttttgtgcaacttgccttgtacaacaacacttccatatcctttgtgttgtgttgcccactctaaaaaagtgagagagagagagagagagagagagagaggacaacatcccaccatttgtggctgccctctattttagtccctagccttaatcatgccatcaggtgctaagaagaggaaagctgccaagaaaaagaaggaaaaggaaactgaaattaacaccaaccacccttcaaccaccaaccctcaaggcaatgatgaggtgaagtctcaagatgagaaagggagtgatggtggttcaccaacacatggtgaacatgatcttgcattcaatgaagaggaggaggagagggacccttcagctgctcaaccatctcatgctgctgctgcttccaaggactttgaagaagtccctggtgatgctaataggattgatgaaacagaaggaggtaaagaaggtcatgttgtgatagagtgggatatgaaatc

SEQ ID NO: 19134 - DNA, 980 bp, Glycine max
atagcctccttttcttctctagcctgatctcgattaaattgaacatttattattgtttatatgataagatttgaaatgatatgaaatccaatccattacccactctattctatagataattgcttgagctgtgcaacattgattttttgtacagaacgtttacttgaagctgcatcaattgaggagggattcttcatctttggattcgcttttggtgcctcggagtcagagctgcaaggaaagtggagatgctgggatgaaagctgaattttgtgggaaatggctactttagttgaaccccccaacagaattaagcctaagggcaagcattattatacaatatggcaaacattgtttgagattgatacgaagtatgttccaattaaacctataggccgaggagcgtatggcgtggtgtgctcttcgatcaacagggagaccaatgagaaagttgcaattaagaagattggtaatatatttgagaattctattgatgcattgagaactttaagggagctgaagctgcttagacatattcggcatgagaatgtcattgctttgaaagatgttatgatgccaatccacaaaacaagttttaaggatgtctacctggtctacgaactcatggatacagatcttcatcaaattattaagtcctctcagccactttccaatgatcattgcaaatatttcttgtttcaggtactaaccagtttgttttggcattttccattcctttagctcttctttctaatttctaagcctttgtggtagtgaatttttttggatttgcagaaatgtataaaaataatcatttgaaggagattttgttggggtttgaagtatgattgcaatgcattcttgcagcgtttaaatgacattggcatgcttcgaagtgaattcccattttctattattaacatacaacttaaaagtgaattaactattaaatatcctctttcatgcattcttatacacaa

SEQ ID NO: 19135 - DNA, 853 bp, Glycine max
cagctcgagcggctcgagcaaattcttaaataaaagtgcccccattttcccaaaatcaccatctagagttttctcttttccactgaaaatcaaattagggtttggatttcggaattgccacagaatcatggccactctgaaagagcttcttcctcctgcaaaatcctcctccaccgcctactacgaccacaccaacgatccatggttcaagcagcgtttctcctcagaagaggaggagaaatccgccgccgccgccgccgccaagcagaagcccgttcccccctacctgaagcgcgccggcttcgttcctcggaaaatcgaggacttcggagacggcggcgccttccctgagatccacgttgcacagtatcctctcgacatgggaagagaaaagtccggcgccaaacctggatccaaaatcctccctgtcaccgtcgacgctaacggcaacgttgcctacgatgccatcgtgaggcaaaacgagaacgcaagaaaaattgtctacacgcagcagaaggatcttatccctaagtttctcaagaacgacgaagatgacgacgacgtcgtttccgacgacgaagcacagaaacagatcgaggaaacgatgcaggagaccaaggccgctttggagaaaattgtgaacgttaggttaagcgctgcgcaaccgaagaacgttccgaagcagaacaccgatgcgaagtatataaaatacaaaccctcgcagcaatccgcggcgttcaattcgggtgctaaggagagggttattaggatggttgagatggcggtggatcctcttgagcctccgaagttcaagcacaagcgtgttcccaaggcgtcggggtctccgccggtg

SEQ ID NO: 19136 - DNA, 336 bp, Glycine max
aaaaaactaatgttcccatcctcccaagatcaccgtctagggtttttctttttccctctgaaatcaaattaggttatccttctatggttttcgatttctgaatttccacagaatcaccatgacaactctcaaagagcttcttcctcctgcgaaatcctcctccactgcctactacgaccacaccaacgatccatggttcaagcagcgtttctccgcggaggaggaggagaaatccgccgccaccgccgccgccaagcagaagcccgttccgccctacctgaagcgcgccggtttcgtcccccggagaattgaagacttcggcgacggcggcgcgtt

SEQ ID NO: 19137 - DNA, 405 bp, Glycine max
ggttcccctcatttctttaattactacttccccggtcgagttcacccactcacccaaacacgccactttccagttatcatcatcatgctttcgttttccactctcagaagatcctcacccttcctcgcccgacgcttctcaacccaacggtcccagatccgccacgcgtcaacctcctcctcctcctcctcctcactccacaacaccgcgaacccggttcgaacctggttcggtcgaaacgcactctcgaccgtcctcgccggcgcgagcgtcatcagggcttcttctctacggctactcttcttcgcacaattccgagttcgactcgtctctgctgaagagctcaatttcttctctcgttgaccggtcaacgccgatttccgaggaccaagaacggcgtcgttc

SEQ ID NO: 19138 - DNA, 632 bp, Glycine max
caacaattgaagagctacatgtaatgggaaacagtataagcagaatactgccagggtcatcctctatggttcagggatttgattatttgcggctgttgaatttggaagataattgtatagatgaatggaaggaaatcatgaagctttctcagctaagatgtttggagaagctttacttaaacaggaattgcttgaggtctctcttttatcctgataacggtgggcggtatgaatcagaagttacgtgctataaaccctttcaaaacttacgccgccttctattggctaataacaacatcggtgatctggcctctgttgactcattaaacttgtttcctaatttggtggtaaggctttctgacaacccaattactgattctggaagaggtggagttccaagatttgttttgattgcccgtttagcaaaagttcagatattaaatggaagtgaggttactcctcgtgaaaggaaggactctgagattaggtatgctcggcttgtggtctcaaagttgcatgctagtcctgaagaaatcaaatagcatcccaggtttttagagcttaagaaaattcatggaattgaggatgaaagaccttcaattggagctactgtcccacaaacaatcagctca

SEQ ID NO: 19139 - DNA, 402 bp, Glycine max
gggttttcaattcacacggatacgttcacacaattgctcgtttttctccctatgagagcagttagcatgatggtgaaatgtggttaaaagtcacagatggtaccggtatcactggaactgattgtatcttagaactggccataagtattcagtttctttcttgtttctgttttgccttccctagaacagtgcctctgcttttggttaatttgttggtgagcctgtcaatttgatttatttgtatttggtatattttgttttcagtttggagaagctttacttaaacaggaattgtttgagttctctcctttatcctgataacggtgggcggtatgaatcagaagttacgtgctataaacccttttaaaacttacactgccttctattggctaataacaacat

SEQ ID NO: 19140 - DNA, 442 bp, Glycine max
gatgccatcgattgtggaagatctagaacgccgtacctttgtgtacaatcttatcacgccaatcataaatcagtacgtttctgatcttgacgagggcaaggcaatgtatctgtactttgtaaaagcagaaatgtgcactccatgtggcctaccagccagaacagtgttaacaagctactacaagagcaagcacttcaagtgccgcacacacgatccttggaacgactacacaagccctgaccaaaccattctatgcaatgacagcaaccaaagcatgcattgccagcttctctcaggtttggtccaccgccgccacgtcctacgcctcggtgccgtcttcgcctccgcacttctgagagccatttccttcctggaacgaaactggaggcacctttgtgaggacattcgaactggccaactcagttccttcataacagaccct

SEQ ID NO: 19141 - DNA, 757 bp, Glycine max
tttattactgatacattgaactttaagaaagttatgggaaccatatttgacaagtaacttgtgatttcaaattttcaatacattttttaattaaaaaaaagggggaaatcatcaatgcatttgtgaactgtgatcccccaagctgttatgcacattttttgtattaaaataaataattgaaacaaggcacaatcactgcaatgtcataacattaacaggtattaccaccaatcagcttagtagttattgttgtgctataatctgaatttttattattaatgggtctcgggtggatgttcggaaggaactcatacgaaattctgcaagcctgattgatcttcatcagctagatatttgatggtgcagctggatgtggagaaatggaattccttccatgttaaccatatacactacaatacagtcaagcacaaaaaaatttccttatgctggggaatgtggagaggtcttgaatgaaagcaaggctcctgtttttccattggtcccatttggtgatttagaggaagggttttactggcacaaaatggagttgcacttttagttgctgggaaatatatctgggaggcttgttggaggttctaattttatttttaaaaatttgtcaagtgcatatgtttttttgcccccacctatgtatggtcccaaatttggtaactgcacgtgtaatcatattcaagtacttcagatgttacccttcacaggttaccattaaaatgcaaggttaaagtgtactgtgatc

SEQ ID NO: 19142 - DNA, 418 bp, Glycine max
ccagcacgaaggtaatgtataaaccccagatgctgaacttgctcagagtgtcaccaataatgccctctaaaaagcagcaaggagattggtattagtgaaggtattgataaaatctctggggaaataatcttctgatcgacttctgcctctaaaaagcagcaaggagattggtattagtgaaggtattgataaaatctctggggaaataatcttctgatcgacttctgcctctaaaaagcagcaataagtgtgtgttggacaaaagtttgcaaaattgattttgagttgaagtaatttatgtttaaatgtttttattctgaaaagtaacttaccagtaaaactgactgcaaaaatttatcgaacacaaaatttacttatagttagtttaacttaatcaattttagattcaaaatcaatt

SEQ ID NO: 19143 - DNA, 497 bp, Glycine max
  unsure (1)..(497): unsure at all n locations
ggcgcgtgttgcgttttgcataatatttgtgagatgaggaatgaagagatggatgatgagtggaggtttcagattttcgatgatgagatgctgccggaaaatggaatacgatcttctgcttcccttcaggccagggatcatattgcgcactatttgttgcaccatgggagggctgggactggctttttctagtcttctaggttcttcttttcgggttttcttgctttttttagaactttactactatctcattctttttcgctatgtcacgttgaataactagagattaactggattgcatagattgaaatatggtcatttgtatacaacaactattgattgtatagagaatttttgtctgatgagaaatggaattaaatcaattatgttccnnnnnnnnnnnnnnnnnnnnnnnnnnnnnnnnnnnnnnnnnnnnnnnnnnnnnnnnnnnnnnnnnnnnnnnnnnnnnnnnnnnnnnnnnnnnnnnnnnnnnnnnn

SEQ ID NO: 19144 - DNA, 446 bp, Glycine max
  unsure (1)..(446): unsure at all n locations
gatgccaaacaaaatggagtgaggagcaaatgcgaagtatccaaagttgactctggaaacattcaaaagagtttcttctcctttcttccatcgtgccacggcgaagatgaagatagcgtggcttctgctgctcctcctggtatcagtgtccgttcaagtttgggccctgaaatcgccgtttcacccgcgagacgtacttcctctgcttcccaaacagttgtcgtggcccatcctcaatcgcctccacagcgcggtggatctcctccccgtcttcgtcggcgccgcctcttctccggacgacaatctcaagtggaaaggtgcatgcttctacgagaacaaagcctggatggtgtttcacaacaagagcggcactcaatttggcggtggaacccttcacctaaaggttagcaatgctcacagttggacatgcatggatncttatattt

SEQ ID NO: 19145 - DNA, 426 bp, Glycine max
agaagggaatcagaaaaaatatgttgaaagagatgaaagaaaatagtgaaagattgattgaaagagatgattggaatgaatgaatatgtttcatgccaaggtcacatatttataatttcttgatgactcaagtcaaaacttgtaactcttggcagttcctttaaaactaattacttaaaaagttatgacttttgaaagaacctttagaaacaagtcacttgaagaattgtggcttttggaaatgaatatgggtaatcgattacatgtttatggtaatcgattacagctttgtaaatcagtttgaaatacaatgctggctactggtaatcgactaccagagagtaaaactctttggtaaaagattttgtgaaaatttcatgtgctacccaatgttttgaaaaacctttttaatacttatcttgattg

SEQ ID NO: 19146 - DNA, 385 bp, Glycine max
ggagagagaggggacatttaatattttctttctgaaaaacaaaatgggtcatatcagcaaatttgcgagaagatgatggtcactgtgatattgttccactcttgatgcttcttttgggtgttcaggttagtgaggcagaaacaacctgttatagaaaaagaacaaattttcccatctcattcacagctcctctcagtgggtttgatttggtgtgattattaccccatgctcctcttcctcctcctcttgttatgttatctcttcaacttcaacctacacggatatccacaaaaaaacgaactttttggttggaccactccagttcaagcataatggagctcctttcttgagatatatcaactgggttttgtgcaacttttctctt

SEQ ID NO: 19147 - DNA, 473 bp, Glycine max
agtaatgagctcgcccaggcgagctagttgttcgccatgaagtcatttcatggccaacattcttttcaaactgatttacaaagttgtaatcgattaccatgagcatgtgttcgattaccaatgttttaaaatgttagatttcaaatttcatgagtcacaactagtgataaaacattttcaaatcattttaaacttgtgtaatcgattacacaatacttgtaatcaattatcagagtttctaaacgttttgattttcaaattttaacatgaagagtcacatttgttgatgtgtaattgcttacaccttgatggtaatcgattatcagtaactgatttcaaaaaataaattatcaaaagtcacaattcttaaagtgacttattttctgaagagtttttcaaaagtcataacttttaaagtaactagttttcaaaaagagtcacaacttttaaaaggtgactagttttaaagaaat

SEQ ID NO: 19148 - DNA, 488 bp, Glycine max
gggctctctctaaaaatctctaaacatgcaaaagcttcgagaattgcccaaactccccctccatttctgatttcagacttaaataggtggccttgttggtgcttgtccgcttagcgtgaatctggaccgctaagcgtgcattagtgaattttgacttagcgcgcgtcttctcgctcagtagatggactcaagtggtgcgcttagtgggatgacacctcgctcagtgaacatgcacaactcatccttcttccagattcttcctcgtgctcagccgcaacagtgttgcgctcatttgaaatcgtttcaaggtccaatgccttaacgatcctttttttttttacttttatcggttaaaacgacaccgtttaaaaatctaaaatcaacaccccgcataactttcttgcttttcaaagaactacgtaggtttgagttcctcatcgcaattgaggatacgtaggagcaaaagcccccacttttgtcgccccccc

SEQ ID NO: 19149 - DNA, 492 bp, Glycine max
aatggatggatccggatttttaaaaaaatccaaattttgcacagcccttgccctaaactgtggaatggaaaaagggtgacagtgatactgtgtcatcacacacacatgatgaacgagtttaggtattcatgcaagagcgctcaccaaactcttcaatggatcaacgaaattatacacttcctcacgccttactcttccttaatcaatgctcacgtcgttaatttcttcaaggataggctatgggagaatgttgacgccgaatggatcgaatgcctgcgccgagaatctgttcaaaatcttcttctcataccttctggtgcagtacaggatcaatggccaacttctttgaaggagttcatcctaaaaataaggtctatggtattttgtcaagaacaagcagatataaatatggcattacctggcctgcagacaatttcacttaacactgttcttgcccagggcatgaatgtaaagaaaaaacatgaagttgaa

SEQ ID NO: 19150 - DNA, 380 bp, Glycine max
gaatcatcacaattttccgttgttttttctttggtcttttcgatccacgcacgatttttttttatttggatgcgtgcgtgcgtgcaggtttgggttcgcgaagggttttgatttttcggcggcggaaaatcttggtaaaaattcgtcttcttaaccaaataaaaaagaaaggttttcttctttaaagttggagggttgggtctgatgagaattgttaggggaatgcagagatcgctttgcgaggaatactactgctgctgcaacaaagatttgttcttcccaggggttggcatcactgcgcccaaagccagaacccgcgacaaacttatcatccaaaccctcttgaaattcattcaaaattagggttggtgatgcattac

SEQ ID NO: 19151 - DNA, 291 bp, Glycine max
gtttccacacttttctcctttctctattcttctcttctcttcgcttccaaaaccctaatcaatccttcttttcaggtttcggttcgcgaagggttttgatttttcggcggcggaaaatcttggtaaaattcgtcttcttaaccaaaaaaaagaaaggttttcttctttaaagttggagggttgggtctgatgagaattgttaggggaatgcagagatcgctttgcgaggaatactactgctgctgcaacaagattcgttcttcccaggggttggcatcactgcgcccaaag

SEQ ID NO: 19152 - DNA, 385 bp, Glycine max
gtgataaattattttgctctgttcttgaaaacactcctaactctctctcgatatagaaaatattataggagatatcctttcatgaaaatttaatctcttatctttcgatttatcattctcgttttattttattaaagaaaattctaatattaaaatgaaaattagtcaatattattaataaaattagtaagaaacaagaatctacttaaatatagcttaatgtaacaacatcccagtgaagtttgttaggatgatggctcatgctattgcaagaacatccattgatcatatcttatgtcttctccttttgggttttttggtggtggtggttttaagtttactttattgtattggtgatttgattatgaatgaagtaatctaagtc

SEQ ID NO: 19153 - DNA, 759 bp, Glycine max
gggggaaaagcgtagtcatcagtttgccgatagaagtagaaaatggaatcttgatcgtattatctttgttgctcatccattactccttctgcagtagaataatatataaagagagaagagtgcaatctagaaccacatagttattttactgtgtgagtgtgagagagaaaattaaacatgggaagaggaagggttgttctggaaagaatagagaacaagatcaaccgtcaagtaacattctcaaaacgcagaagtgggttgctgaagaaggcctttgagctttctgtgctatgtgatgctgaagttggccttatcatcttttctagccgtggcaagctttttcagtacagcagcactgatattaccaaaatcattgagaggtatcgccaatgtcgttacagcaagtcacacactggtgattcattggaacacgattcacagagcgcataccatgaattcttgaaattaagagcgaaatatgaatctcttgagcggacacaaaggcattttcaaggagaagaccttgagccacttagctttaaagatttgcagagcctggagaagcaactagacataacgctcgcactaactcgacagcaccaaacgaagaaactcatggcacgagcggatgaattacgcgaaaaggtaagttgttaaatgctaattaacttgtttgattttactccgtgtgaagtttttctgtgaatttctctctaatgttatgttttttcttgtttacaactcggggctgcagaagtt

SEQ ID NO: 19154 - DNA, 624 bp, Glycine max
gaagatgagagagtacacactacacggcttcacagagtattgatgaaggaaccctcgagctaacccgctgtcactctcggcgcaccccaccatcactcttcgacggaaaatgcagcgtcgcaacggcgcgcgcttcagtgatcagcgcctcagctgcagcagtgcgccttgccaccgtgacctgggttgcaacgccgcgctcgtcagttcgcctctccgcaccaacctgagtccgtgataactgttgccgtcaagggttcgttaggggaaaactataacagcaaggctcttttcatctttgctttgtttgatgttagtatgacaatcctattgatgttggtttgaatttcattttgttatgtgcttcgtttggataagatgagggttcagaggtttgagtgtcctgtgttcggtggataaattttgggggttctgaggttcataggtttgaagggtcaaagcaaagggacatgatcctttcttgtgttcggtgtgggtgagttcaaatagaggggagcattggtatctaggttcgtagggtgagtgattatggctgtaatagcttagtctactaaaatcaaagagggaccagcctcatcgtggtaattatcggacatctctgat

SEQ ID NO: 19155 - DNA, 811 bp, Glycine max
cgattctagtttctctcctcatcctacaaccacaacaagcctcccccctcttttcccccaacaattttgtctcactcccatgatttttaccgaggatctctggccactgctccagcaactcgttggaaaaactcctctcttctcatcttcatcatcagcttcgtcgtccttcttccagaaccttcgggaatcgatgacgaactcaagttgcggaggcgcggagttggagctatgccgagatgaatcagccgcattggttctcaagttcgtcgccatcgcttccattctcctctccggcatggccgggatcgccatcccgctcatcggaaaacaccgccgcttcctccgcaccgacggcaacctcttcgtcgctgccaaggccttcgccgccggcgtcattctcgccaccggattcgtgcacatgctctccgacgccaccaaggcacttcgccacccgtgcctgccagcgttcccgtggtccaagtttcccttcaccggtttcttcgccatgttggccgcgctcctcacgctcctcctagatttcgtgggaacgcaatactacgagcgcaagcaggggatgaaccgcgccccctccgaagaaccagtacgggtcggctcatccgaacccggtgggaatgggaaggtgtttggggaagaagaaagcggcggaatgcacatcgtggggatgcatgcacatgctgcacatcatagacataaccatcctcatggcaatgatgcatgtcatggcattggcaacatcaaggaacaggtccacgcccactcccactcccactcccactcccaggacact

SEQ ID NO: 19156 - DNA, 530 bp, Glycine max
gaaaccaccaaagcctacggctactacattacattcttttttttctttcccaaatgggttccatcttttcacccttaaccactatcttcctcctactcctactcgtactttggggtggcgaggcacgtgacccttttgcttgtgaccctaagaacaccgccacaaaaaacttaccattttgcaaggcttcgttggcaacaggggcaagggtgaaggacctcattggaaggttgacactgcaagaaaaagttaacttgctagtgaacaatgccgcggcagtgccacggcttggtatcaaagggtatgagtggtggtcggaggcactacatggggtctcaaatgtgggccccggaaccaagttcggtggccagttccctgccgccactagcttccctcaagtcatcaccaccgctgcttctttcaatgcttctctgtgggaagcaatcgggcgggttgcctcggacgaagcaagagcaatgtacaatggtggaacggctgggctgacatactggagcccaaacgtgaacatc

SEQ ID NO: 19157 - DNA, 410 bp, Glycine max
gctgcaaaaggacaacaaagggtgctgtgagtcaaggaacgcgtggtcggtaacaattcgcccaacgggcctctcttccttttcctcctcatgtgagatagagataaaaaaccctaacacatcgacataagagaaagaagaaatattaacatcgatttttataaaaaaaatcaatattaacatataaatacaacatcagttttcaaacaataccagttattatgaaaattgatgttaatatcgacacacaacattagttttcaaaagaatcgatatcaacgaactcaacttatttataattatgtcaccgtattttgtaacattgatttttattaaatggatgttaaaatatcgacattaaatgtatattttttagtattatataaagggttgtatcaagctagatcgag

SEQ ID NO: 19158 - DNA, 516 bp, Glycine max
ctcgagccgctatttttttataaaaaaaactattaattaaatattcatttattatttacttgtacagcaagttctttttcatttgttaaaactttatgaaattagatatttcattttctgtgaaaaaatcaattcattaaatactgttgaaaaacatggtcagaatttgagcttttggcaactatggacagagatatgaactttccatatttggaggagaagcaatcccttttgggtttcgctgtttccattttcagcttttttcttgtgtttgagcatttgaatctggacaaaggtttcacctttgggtgagtgattcaacaccagctatagctgggggagtgaaggtaaggttgtgagcattaatttgcttgaaggagggtttgtgaattgaattggtaaaaagggtctctgttttatgggaattattaattggtgtttactgggattaatgaaacctagatagaaaggaaaagggggaagaacaagggagtctattttttatataaatatgta

SEQ ID NO: 19159 - DNA, 581 bp, Glycine max
ctcgagccgattcggctcgaggttttccaattccaaacacagtttcaaaccgtggaagcaaaggcaaaaaatcaccgagatatttgcatcatcatcccttttgcttcactcacactgatactgatcctgatccaatccaatccaatcttgtagttgttgctctataaactataaagggagctcacacaattgcagattcagaccacacacaccccgttttaactacttacttcccactttacccttctcaactctcttactgttactattactgttactccacctaaatcaaaattcaaacatacctgtgagtttcttttagctctcaaacttgcaaatcagagaccctttatatttaaatgattgccttttttattatgttatggataagaactgtttcatatttcgggtcttattattattattattattatgtaacatggtttgggtgcaactacctgcaataatttactgttcatttcttcgaatttttggactttattttagttcgcaatatgtgtcataattcataataataatagttgcattcaaatgcattccaaaacctcaaaatcgagctc

SEQ ID NO: 19160 - DNA, 414 bp, Glycine max
ttcacgcgtccgcccacgcgtccgcccacgcgtccgtttttaactacttacttcccactttacccttctcaactctcttactgttactattactgttactccacctaaatcaaaattcaaacatacctattgcatttgcagatagattgaatgttgtgaacaaacaatgggttcatccaaggccttatgcagtgtttctctgctccatttgttcatagtggtttgccttgtcttccaatgctttgctactaaaaaccatgctgacctgaccacaactctaactgtgaatgcttctgatgcatctggaaagccaataccagagacactttttggcatattctttgaggagattaatcatgctggagctgggggattgtgggctgagcttgtgagcaacagaggatttgaagctgg

SEQ ID NO: 19161 - DNA, 385 bp, Glycine max
gaacctcatccaaatttgttaaggaggaccacaattggaaatggtctactttgtttccctacagcttgggggcttgcaattactcctacagtctatatttaaacctttcctttcttgagatgcaggtcctccggaatcagtttttgactggacacgggaaatagactcagatttgtcaaatcagaatatcaataatcaagcattctcaagaaagcattggcgtcttttacaatgtcaagatggtttgctacatttatttacatgatagagcacattcctattttgattacataaaagaaaagttattctagtgatatattctagatttctagtgtttacatgatttgatatgtaaaaagtgtataaactgagatgattttatttc

SEQ ID NO: 19162 - DNA, 401 bp, Glycine max
ctacactttcttttcctttttctcttctttcactgtctttggggtgaagatgggtgatccttatgggctaccggaggatctccggcggcttataccagccagaagtacccatttgaacccttcagacacacacctaattgaaccactttgtgttcaccatggtctcagtagtgctgttgctgctgctactgctagtgctactccacccatcacctatgacgccaacatggttggggacgttttcttccctcgtggtttcactcatcactttgctcatcaccatgactattcttcttcctctggcgtaaaccccgttgctactactgctactgctactactactactactgtctcggatcatgcattctgcagcatggaaagtgcagaaaaagggtggtttg

SEQ ID NO: 19163 - DNA, 364 bp, Glycine max
ccgccatcccaaatatccccaaaacaccgcgcaccattctcaccatcttccacaccccaacattgcccaccaaactccccatcaagcaaaagaacccgctgaaccacattgtcgccaccgtcaacggcttccgtccgaaccggtccagaagcaccgccgttatcgtaaaggccggcatctccgccaccgagttcagcatcacgttcaagtagaggctggtttcgaggttcatgacgtctagactaagcccatagtcgaccacagaacctagaaaatctagagccaccgcaatgaacaacctcatacgagtgatgggggaacgcaccacgtctatgatggagccaacgagggcatccttgttttc

SEQ ID NO: 19164 - DNA, 369 bp, Glycine max
gaagtaagtgaatcgatcaagtacccaaactctaaagaaagatcattatttatggtccaagaccatacatattgataaaaagaactattattgatttgatgaatagacaaatcaagcgaaaacatcataactatagttaacaataaaatactaggaaaagcccacatacggcgaagatatttggttgctgtcggaaaaagtagaagtcccactcctattaacataggaactggaaatggaataaaaggtatgatccatgaatattgatgtgtatattccatacaataaacaaaaaaattatgattctaatgaattttgtttcttattcgtcggtttttattttatcttttttgtaaagaaggggttcgg

SEQ ID NO: 19165 - DNA, 409 bp, Glycine max
gaattcgtgatttttatatggagataagttttcattttgagagctctgttattccttttattgggcgtatagctccttcagatacttatcggatttggaagcgtgggtctaatcttcgtgctgatatgacccttgctggttttgatggcttacgcatccagcgatcggaccaaacatttttgttccttggagagggctatgttgcagaggaaggtaatttaactctgccacctggttctttgattgctctttctcataaggagaaggaaatcacaaatgctttggaaggagctggtacacaaccaacagagtctgaagttgcttatgaagtttccttgatgtctcagacaaatatgtatagaccaggtattgatgttactcaggctgagcttgttccccatttaaattg

SEQ ID NO: 19166 - DNA, 793 bp, Glycine max
ttgcactagcgggtaagtacataataacgttagttttgaattgtaccctaaggtgtaataaattatgggtagagaggtataactgttggcttggtttgaactttgaagggttagtgccttgcatttgcttgctgattggtttgtgctttatccctgagtcccccagatggctggtatgcattattaagctagaatcattatctaaggaccaaatgctcctttattttattatatataaatataacaggaatagcaatgaaaattaacatgtatgtatgtattttttgtaggctaaagttggccgtgaaaaagaatttcaactagctttaaggagacttcggggtaaagatgttgatatttctgatgaagctgctgaaattctggactctattgaaactcttcgaagccttcctaagactaagctgttggatttgttccaaagcaaacatgtgccctctgtagttattggggtcggcttgatggcatgccaacaatctgttggaattaatggcataggattctacacagccgagacttctgtagcagctggactttcttcaggaaaagctggtaccatagcatatgcttgtttgcaggttccatttactgtattgggagccattttgatggataagtctggaaggagacctcttatgatggtttccgcaactgggacattcttaggttgctttattgccgctattgctttctttctcaaggaccaaagcttaatgcttgagtgcgcaccgatatttgcagttgctggtgtgttgatctacatagcagcatattc

SEQ ID NO: 19167 - DNA, 410 bp, Glycine max
atgactatggcttttgacaatatcattgagagatggatcaataattactacttcagcataatatactgaaaaattatggtagttatgactgtgtcattgaggtattgatagacaattgctactttaatatgatctcattaaattagaacatgattacgaaagtgctcaatctttctttttctggttaacctgactagtatttaatcccaaatcaagcagtcctataagggacttggtgacatgtagtcaggggttgaacccaaattagtttctgcttagaggattataagttatataggagccacacagagctaactttcctacaaatcagaaaacagcatgtggagatttatgaatgcttgttgcttcaaactaaaatcagatattcaatgtctatcaattagaaagat

SEQ ID NO: 19168 - DNA, 648 bp, Glycine max
ggaagttctgagcacttctttgtccctctttcagaaactggcttttctaatttagatgcagacaaaaggggagcttcattaaggagcaaaagattatttgtatcccaaatggatgattctttgcttgagagtcatgcatctggtgggcatggggagagcaagtttgatgaatttccagatatgttgaatgatttggaaaggctttctgtctctgattacaacaatgttaatggttttctatcatatactggttcaaattcaacatctgatgctcagcggtcattttttgactttgaggattcccaggatcaagtcttctcaccacctttgctaatggactcatcacttttcacagatccatttgaagacttgctggcccctctctccgagactgaaacggccttgatagaccattgaaaattttctgggcaacctgcaagacttcattgaagaatcagcattactgatgtggtggattgctattcttttgttgagatatatactccattcaccttatatataacacgatgcctgtatgatttattcttggttggtatattttcaccatctatgactctgttgatgccctactgctactgggaggaaccatgatgagtgacccgtgttcttcattggtgaatgatgatt

SEQ ID NO: 19169 - DNA, 456 bp, Glycine max
agacgacagaagggcaccaaaataacattgctggtttgattgagatgaattaaggaagacttaactcatgatatagtgagtctcagcttcttttaacaagtcacctaagcaattaagattacaatggattgactcttctatccttttgaggattgttgttggtcatgaaccttatcccaataccccgaattgtacgctcgtatttttccagggtgaataagtaatttaatatgttatcattctatttttattttatttctcacctaattttttcaatcaagaaatccaacatttaattttatttctactatatttctcttttttaaaaattatctctctttcatttttatatactttatttctttcctctctaccaaagcatttaggcttaaggcactcgtgtacaagtttaagttctttagcttattttgatttaagtttcttgacttatttaaa

SEQ ID NO: 19170 - DNA, 597 bp, Glycine max
gggaggaaatcaccctgttcgtaaccttcgaagtggccatgttgaaattagtgcccagaaccacaactatgctgttgaccctgccacactgccggaaggagtggaggttactcatatcaatctaaatgatggaagttgtgctggtcttgctttccccgctcaacaacttatgtctcttcaataccaccctgaagcatcccctggacctcatgattctgactacatttttagggagtttatagagctaatgaagcaagggaaaaacagaacaaagggaaggctacaccaactatcaacagcacatgctttggatgcataagtagttgaaggaagctgctcgcgttcggggcaaaaagaataatgcatctgctgaaaaattacgaagttatgagtccattactatgattttgtagatgagtttattaaggtttcctagggatccataaagattatgattttctcatgctcgcgttcgggccatgattgtcataaacctcaatgaggtttaatgtacttattacttatcgctatcaacactaaattttggttgctggtatcaccaattgtaagagcaattaataatgattgtttcctgtt

SEQ ID NO: 19171 - DNA, 423 bp, Glycine max
cgatgtcaaggagtcgccgaatgtgtgcgacagcgagctcttccgtgtagtcctctgataaaagaaacaccaaaatcagtgagtgagtgagtgagcagtgatcgtctacagaaggttcaggtttagcggtgttcgttaccttggacgatggtcagatggcagggtttcaaggatacgatttccaccgtgtctttcagcctcgtgcctcgcacctgttcaagtcattctgttagccgcttttccgttatttttttttttttgtttaaatgctcattttggtccatcatattttaataagcgacaatttagttcctaaacaaccagcaattctgactcagcctctagatacgtataattatgttttgcccccaaaaactttgggatttaatctggtattaagttataattttacatatttttgaa

SEQ ID NO: 19172 - DNA, 443 bp, Glycine max
gtgacattcctctctcgcccaaacctctcacactcccaaacctcttgaggcttagcctctcgtcactgttggcactgtcatcatgtcgaaactactctcaagccctcgcctctcatcatcgttgatgttgagtttccttcagcttggatctctgacaatccacctaaaatggcgatgtatagcgggatctgcaagcatggagggcgagaacgcgagcaaggtgaccgagttggtgaacgagatagccaacatctccgagtacatgcctccaatgaagaagcagcattgcaacttggcgtagaggctgaagcttctgatcccaatgttcaaggagattagggatatgaacaaggatgcacttcctgaggacacttccaactcagtcctcgccttcaaagaagctctccaatctgcgagggaactcctcagattaaaagcgatta

SEQ ID NO: 19173 - DNA, 502 bp, Glycine max
atagaaatttataatttatattttatcttattatgtatatattattctatcaaatatccaatttttattttataagaaaaatgattgattgatatttcaaatttgaaattttatttcaaaaattttattttatattaatcgaactaaaatagaattaatatagaaaaatagaatattaattctagttataaaataattaatttaataaaggatataattaatttaataaaggatcccccttttttgacacgaaatggatatatccataccatatatcttggatttatttttatgaaataattaaatatggcaaaacctatatctaaaaagggttcgcgtaaaaatgtacgtattggttcgcgtaagcatactcgtaaaataccaaagggagttattcatgttcaagctagtttcaacaatactattgtaactgttacagatgtacgaggtcgggtgatttcttggtcctccgccggtacttgcggattcaaaggtacacgaa

SEQ ID NO: 19174 - DNA, 484 bp, Glycine max
aaatattgattcaatggttgtctaattgaatatccattaatttgtgtgtataatgcagagtatatgtttcagatagtgacatcttgttttgggaggaaaatgatgtccatccaaaacttactatagatggtgtccgtgacatattgcgtgtattcatcaatggccagcttataggtaatgttgttggtcattggatcaaggtggtccagactcttcaatttctcccaggatacaatgatttaacactgttaactcaaacagtgggtttacagaattatggcgcttttcttgagaaggatggagcagggattagaggtaaaataaagatcactggatttgaaaatggagatatagatctttcaaaatcattatggacctatcaggttgggcttcacgggtgagtttttaaaattttacagtgaagagattgaaaattcagaagggtagagttgaccctgatgccatcccatccaatttacagggt

SEQ ID NO: 19175 - DNA, 429 bp, Glycine max
ggaaagcatttaggggagattgtttttctgttccatttctacgaactcagacccttcaatcccaaccgagaaaaaaatcatgaagctgaagacatatgcgggtcttagtatcattgcaactctggctattatatatcatgcatttaacagtaggggccagttttatccggcaatggtgtatctgtcaacttccaagatcagtttggtgcttcttctcaacatgggtttggtctttatgtgtattctatggcaattaaccaagaagttgttcttgggttccctccgagaggcggaggttgagaggcttaacgagcaatcgtggagggaggtcatggaaatcctctttgcaataaccatttttaggcaggacttctcagtcacattccttgcaatggtcgcagcattgttgttgattaacgctttgcattg

SEQ ID NO: 19176 - DNA, 465 bp, Glycine max
gatactgattcagaggatgagtaccctaattctagggttctcatagctcccaatgggagcgtttactcacttggtgttcctcttcttgctggttttaagggtacaagcaaccccgttttagaagcaagcacatcagacgtgataagcccggtatccactgatcccctggtgtttgatgctgagcagagccttgagagtgagttatcttttattcacaaggctaaagaatctggtgttgtgtatcttctgggtcatggggatataagagcaaggaaggactcgtggtttatcaagaagttagttataaactatttttatgcctttttgagaaagaactgcagaagggggatcacaactttaagtgtaccacactcacatctgatgcaagttagcatgacatacatggtttgaaaatcaatcaattttgcagcccaaataaaacgagtggcaattctcttgaaagct

SEQ ID NO: 19177 - DNA, 434 bp, Glycine max
aatctgcaaaatgatattgaagagctcataaagtaataaaaaatatcagaagaatttgaaatggcatagtacgtgaaacaaaataagttttaaaaaaataacaattgaagctgacaagtatattattaataccaacagtatggaaatgttctccctgctcaagtatattattaatttcaaagtatattatgttaatcttgatatttaattgtacattaatagagtactgcacaaatcgggattaatggaaaattttatagacatggtatctgtgacaagacttttctatccaacggtggattttgtgataaaatgatccagtaaaaagctacttaatggtataatagtggttttcacttacatcgtgtgtgtgtgtgtgtaaagaataagttgagacatgccttaaccactcctctggatattttacaatgacc

SEQ ID NO: 19178 - DNA, 393 bp, Glycine max
agggaccattgtttgatgacatgcaacctttgtttgaccacttcgaggtacttggcaccctttgttgcacaatatgtgaagtttcgagacatgccagaaatcaaaaggaagcattgttacgccatctgtgaaattccgtaacatgccggaaatcaaaaggaagtattgttacgcaatccgtgagtttccgtaacattccgaaagctaaaaaaggagtaattacatgacccgtaaggttccgtgaccttatggaaagaaaacaagtatcgttacgaaattcgtaaagtttcgtaacgatacggaaaaagaatcacctaaaaaagcaaagggggtgtatttagtaaaaaaaaaggtgcaaatagcaaccaggcccacttgggccttccaggatgt

SEQ ID NO: 19179 - DNA, 407 bp, Glycine max
acgacagaagggttatatatagctcggcatccttcaggccaaaacatgcatcatagtcatactctccaatctattctccaacattgaatattatatttccatctgcatcatttttatttaattgcaagggaatcaatcactagtcacgaccgaattttggtgcaaaactaactacttgtttcgaattttcaatctgagaacatgcaaaacaatgacagagcctctgaatcacatgcggcacacactggtgaatatgcagcatcaacttcaactaattggtacaatttcagctccaatattccctacttgcttatacagagcaagggcaaccaatataattcttctcataattgcacgccatatccaaccacaaagaagcgtttaattctaagcaaaagggtttattc

SEQ ID NO: 19180 - DNA, 476 bp, Glycine max
ggcaaataatgaaataacttttgtgtttggacgttgacgctctgatgacgtttgacgaaagcaatcttagaaatattaatagccaaccatcttgcaatcgagaactacaagagtttcaatcaatggcaatggcgtctacactacctgctggggacgaagaaacgccacttgtgcccgatgataattcggccatcgaagctcgcaagagccaccactccacggatattcacatcctgagcttggcctttctcttggtctttctcgccttcggtgccgctcagaatttgcagagcactctcaacactgaggatgacttgggtaccaccacactcgggatcttgtatttgtctttcacattcttctccgtggttgcttctttggtggtgcgagttctcggctccaagaacgctttgctcactctgactactggacatgtgctttatgaccctcacgacttgaaaccaaattggtataca

SEQ ID NO: 19181 - DNA, 344 bp, Glycine max
caaacggcgagtcttaggaatcgaggatattaaacttttagatgtgtcttgtagcgtgcaacattggggccggcaaataatgaaatgctgtaacgtttttgtgtttgaacgttaatgcttgatgacgtctgagggaagcaaatttggaaatattaatagccaaccatcttgccatcgagaactacaatcaatggcgtctgcactacctggcgacgaagaaacgccacttgtgggcgatatttcgggccttgaagggctcaagagccaccacaccagggatgttcatattctgagcttggcctttctcttggtctttctcgccttcggcgccgctcagaatttgc

SEQ ID NO: 19182 - DNA, 410 bp, Glycine max
gttccatgtcagcagattctcgggttgaaaacagtgggagtgaagattcaactgatgatgataatatagatgtgaaagaaaatggttgccatgatgcagagaatgaagttgatcaggagacagatgatgatgctgatcgtgttcagagtggaaaattgagtgagagtagtggttatgctggcagtgatctttatgattacaaggcatttggaggtgatgattctgatgttggatcctccagtagtaaccatgctaagactgaaaatgctaatctgaatgctgttccagataccccagggtctgaggatcaaaacaagcaaagaaaggccagtgaaaacccagttgatgaaaatgatgcttttaatttgttgccttagtctgaatcttatcgatccatgggtgagatttta

SEQ ID NO: 19183 - DNA, 418 bp, Glycine max
ggctcaagtccaagacataagcataacccggaccttgaaaccggcaacttgagttgaatcacagcgcagtatcacgtctccaccgatcatcatcttcttcgttcttctttcgaggagcgaccggttctgatcaaggagtttcaggttatcgtcgaaaatgttgtttcagattcctcgcctcaccaactctctcagagatcccttcgacgtggaccagtactatcttcatcgcaaaaccattctccacaaccaaaaacctagcaattccgcaaggtcactcgatgaatcggaactgggcgcggaagattgtgcacgggtgggaaaaagcttcgtcggacgtgcggcaggcctacaagcagtttataagagcgggggtggacttggttgacggagaaacgcgctccgaggagttccacga

SEQ ID NO: 19184 - DNA, 641 bp, Glycine max
caatatttggcagtaggtgaaaacgcgattctcctggttcagaacgcgcatttccatatctcaattctcaagcaaacaaagtcggtgatgttgatcagagcggaaaacgtcgtcgtttgagagaaactgaacttcgaaggtgacaccctgccacattttcgaccaatcctagattaaaaattgtctctctctctttttttttttttttctctctttctgtctgtgacggaaacagcaatgaggcagcacaagcaagtgtcctccattaaccggcgacccaccgttctttatctggtgtgcgtcgcagcattgttttccctcctcctcttctacacccaatcctctttcttctcaggcgccgtgtcttcagattcttcaaggatagatgccgtctcttcagatcgcgattccgagacaatccgcgttttgtctaacgttcagtccagtgtgaagcaatgtgtggataacagggggcttggactcactgcacatgttattgaccattgcaaattaatccttaaataccctgaaggtaccaacagcacttggtacaatgcacagtttaagaaatttgagcctttggagtacaattatgatttgtgtgagacaatcctattgtgggaacagtatcggaacatgac

SEQ ID NO: 19185 - DNA, 563 bp, Glycine max
accaaacacagccttagaatttgcgctcttacaattttttttatacagaattagggtttatcaaatttaacccttttgcttctgccattgttgagttttcttctgcaatacgattgaatttcaatatagggttggtgtagaaggttgttctgtgttctcgtgcgtggttaaattttggagatgagtgatgcaaaagagaatgatgaagcagggcagaatgtacccttgactgtggaggaaactcaggagttagttgaagcacaggttcaactagaagatttggctgctcctgtgtccaaaggggatacttcaaatcatgttgaaaacgggaaagtagaggtagaggcacgcgtggaggataaaattgtgaaaccagaagcggattcagagtgcattccactacaagatgtcctaaatagtataaatactcttcactcagtccccgtaatggacgatgctcaagttttaaataaaacagaaggtgaatatgcttcagatgtgaagagcaaagctgaagaaactccacagtgtgataagagaatcgagaatgatgctaatgtttg

SEQ ID NO: 19186 - DNA, 274 bp, Glycine max
tcagacagtatctctcaacagcgtgggatcgttcggtcttaatctaaaaggcaaagcgtgactcgattgtggctctctgagtaatacacttttgcacactgatgttaacgtttcttatcatttttagctattggtattaattgtcacccaccagttcaatgaatttgaacgatcgacccattgaaagagtcttccttacctaattttttaagaactcttccggactctccttgttccactaattgattgggccaatggatttgcatcataatac

SEQ ID NO: 19187 - DNA, 365 bp, Glycine max
gaatccaagaaagacacgattttgagagcagtaggagacacccgataagaatctgattcttggagcattgccattttatcttgtacattcgcttaatttgtaactacaatggctgaaattgtagtggtttttgacttcgacaagaccatcgtcgactgtgacagtgataactgggttgttgacgagttgggtttcaatgaattgttcaatcggctccttcccacaatgccttggaacactctcatggataagatggtgatggagcttcattcccatggaaaaaccattgaggacattgtgcaagttcttcagaggattcctatacaccccagaataatccacgccattaaagcagcacatgcttt

SEQ ID NO: 19188 - DNA, 718 bp, Glycine max
gattcaactcatgcattgacacatcacaccttatcacgatatcgatcaccttcatcacaaatggagctacaatccttcctcttcctctcccttctcttcttcctctatctctacatccagttcctcgctagaaaaaaaccccgcaacaacaaagccttcaaagactaccctctcatcggaaccctaccggagttcctcaaaaaccgccaccgtttcctcgagtggaccacccaagtcctccgcgactcccccaccaacaccggcgtcttctctcgcccctacaaactccacggcatcttaacggccaaccctgacaacgtggaacacgtgctcaaaaccaaattcgacaactaccccaagggagaacgcttcatccacctcctccaagattttttgggtaacggaatcttcaactccgacggcgacctctggaaggtgcagcgtaaaacagccagctacgagttcagcaccaaatcgctccgaaacttcgtcgtcgacgccgtcaccttcgaactccaaacgaggcttcttccaattctctccaaagcctctgaaacaaacaaggttctcgatttgcaggacttgttggagcgcttcgccttcgataacgtgtgcaagctagcgttcaatgtggaccccgcttgtctcggcggcgacggcacagctggcggcgagttcatgcgcgccttcgaggacgccgcggatctgagctcaggga

SEQ ID NO: 19189 - DNA, 465 bp, Glycine max
aaggaattatcagattttgattctgggtttttgttggggtggtagagaacaaggatttgaaaaacaggatttttgttttttggagtgcctatgactgattgacggtaattgcgaccgcactcggtcacatttgtctgcaattttccttaatatcaaggaataggataaaaaccgcgatcgcaatttaaaaccttggtggagaaagtgggggaaatgagcatgagtgtggcagaagatgaatctagtgaagaggttcatgttccaggtgagattgattggcaaatgcttgataaatccaagtttttcttccttggtgctgctctgttctctggggtttctgcagctctttaccctgttgttgtgttgaagactaggcagcaagtggctcagtccatagtttcttgcatcaacactgcattttcattgattaggggtgagggttttagagcattgtaccgcgggttt

SEQ ID NO: 19190 - DNA, 396 bp, Glycine max
agaaggggggggatttagctgccagtaaaacacacgcggaactcatggtggagaatctaatacttgaagttcttttaggtaatctacttgtttgcaaatcagagcgggttactgaaattagcataggaattattgggaaccttgcctgtcatgaagttccaatgaagcatataatctcgacagaaggactgattgagataattctggacaaattgtttatggatgatcctcaatgcctatgtgaaacatgccgtttgttgaccgtgggtcttcaaagtggtgaatctattgcatgggctgaggcattgcagtctgaacatatactatgtcaaatattatggattgcagaaaatacattgaaccttcagcttttagagaagatcattgggcttattt

SEQ ID NO: 19191 - DNA, 745 bp, Glycine max
caacaacaatcgcaacattaatagtgctaaaagcattggtggcaacaacaaccgaaacagtgatagcaccaaaagcagttacaatggtagcaacaaccccaacaatgatggtgcttatagcaatgccaacaacagccacgacactagtagcactaaaatcattggaaatggcaacaacaacaacaacaacattgatgatgcttctggcaatggcaagaaaaacaacaacattgatggtgcttctggcaatggcaagaaaaacaacaacattgatggtgcttctggcaatggcaacaacaatcgcaacattaatagtgctaaaagcattggtggcaataaccgcaacagtgatagcactaaaagcggcgacaatagcagcaacaaccgcaacagtgataacactaaaagcggtgacaatggaaacaaccaccacaacattgatgttgcttatggcaatggcagcaccaaccgcaacaatgatagttctaaaatcggtgacaatggagacaacaaccgcatcaatgatagttttaaaagcaatagcaatgccaatggccataacaacagcagcgacaagagtggtggtgctaaaagtaatggcaatagcaataacaacagcaacggtggtggtgctaaaagcaatgacattggcaatggaaatagcaattataaccgcaacagtgatggtcctaaaagcaatgtcattggaaattacaaccaaaatagtggtggtaaaagcagtgga

SEQ ID NO: 19192 - DNA, 361 bp, Glycine max
caagtaattgccaaaatttcaaggcttatttttaataaaagaataatatagttgaataaactagttaaattggttaaagatttacaactgcaaaaaacaaaaatatttaatttataggattttgaacatttttaaagtttttattattttgtaattcaagtttgtacttaaaattattgaatttgcatatttaatttctcttgtttcaaattctttagccatccacggaccacggtttctactcatttaaattttctcgtaacacataattctgtcgtagttttggtattagaaaaaagtacaagaatgctgagaaaaggacaagggaaaaaattgttaagtttatatttctagtatatac

SEQ ID NO: 19193 - DNA, 437 bp, Glycine max
cacctttgtcagctgaattttacaccgggtggcttacacactgaggagagaaaggtgctcagactgatgctgattttacagcagctgctcttgaaaaaattttgcaaaaaaatggttctgcagttctatatatggcccatggtcgcccaaactttggattttataatggagcaaatactggtgtagatgaggctgactacaaacctgatctcacttcatacgattatgatgcaccaattagggaatctggtgacgttgacaattcaaaattcaatgctattccaagggttatagccagatatagctcagtacctcttccatctattccctctaataatgaaaaggcaagatacggaccaattcacttacaaagagaggctttcgtatttgacatgtttgatttcaccaattccaccaatgtgtttaaatctgaaacc

SEQ ID NO: 19194 - DNA, 482 bp, Glycine max
aattcgagcggcgcttgttttttttttctttttgtttttgtgtggccttaaatgcacattaatgcacttaactacctacataatttattaaatgtacattaaggccaaagaagaaaaaaaacaaagttaaattataattttgtccctaatttttaaatctatgattttagtctttttgatttttaattgaaatatttgggtcctcaattttataaactaacgattttagtacctgatagattattaacaaataattttgattaataaattattaaggtaattataaattaattaaaaactattaattattaaaaaattattctaattctctacaaattgtgttttttttttccataaatatctcttaaatattgcaaattttttgaaaaaagaaatcatttaaagattcacctcacaaaaattaaatatttaaaagatcgcaattaaaaaaacattttaaaatatattaattattatatcac

SEQ ID NO: 19195 - DNA, 492 bp, Glycine max
atacccaggccgagccacgcgtgcgaccacgcgtccgcaagaagacgaccgaaggcgatcccatctgattttagcgaccagactactctgtatttccaagctcccaggtctcttaaaccgtgattcgattcttgtcctctttaaagagttaatgagatttcataagatgggaatgtaaaatactgggatgttgcatcacattcatcatgttcttaattatcttgatttgtgtgccttaatttaaaattactctgaaaaccgaagtttctattaatgtgcatgttttggtctttgtaacgaccatttgtgcctataggaagttacttctatgacaaagtctgcacattgcttcttctttctaggacaagtctaatgtttaggtttcaacaagtccattagttaagtgtctatttacaaaccaatctgtaagtttcacccatctacttgttcaagctgacctcagaccattacataactaaacactaaaatatc

SEQ ID NO: 19196 - DNA, 466 bp, Glycine max
agaagacgacagaaggggtactactcaatctagaagaacttaatatcattttgatagtatagtatattttttttgattcttatgatcgatgattattatgttgttttaattctattaagaaattgtgacaggatatttgaaagatttattttaatttatctggacatttatattatgataactactagtataaaatatttatgattgctttggttttaataaaatcatctttggaattcatatataatgattgttttcataaattaaaaataatagaaataagcttttaaagtaattaaacatttattttaaccaatgacttcgttctttaatatttttaactatattaaccttaatttaattatttaagaaatgaatttttcataaatatttttaaaatatctatttaaataagtttgggtctctgggatgacctatttctaacacttctactgacaactgaaat

SEQ ID NO: 19197 - DNA, 449 bp, Glycine max
ttagtcgagctatgtataaccattggagttctactcgtttaatttgtgtaattaaataaacaaattcttgacatttgattatttaaatgagtcctaagtttttcaagctcaacattttaccatacaagaaccaaaataaaaaacatgttcattttataggaaaaattaaggaaaaaaaagacaaaaatactctactataacactactagagatgtaatacaatttggtagcgcatttgttttggctacaaaatgtcacgggttcaaattttgtcaatttctccatttgtggcatttttgtaattcttttatcaaattaaattaatattttttatttgtttatttaattaaaaatatcatttttcaataattcttaaataccttcaattacataatgcatatacttgaaaaatgtccaataaataatcttctataaatttcactaaaatt

SEQ ID NO: 19198 - DNA, 447 bp, Glycine max
atatgattttagtatatttatattgttcatagttctgatagttctggtattctccttttcatttatcttacccaactttttctaaaggattttctttcccaaattattctctaaagattttatccaaagaaatttatttgttttacgtgtgtgtataaatatatccatgcaaaatgaatgtctaattctacgcaacaattatctatttattttacctggtaaatttacatatttcatacattgatatttatttgtaaatcaatttattaatataaatttatatataatatattaacaaatttaaaggagtttctttaaaatttggagttaatcaaagtcaaactgatgtactcttttgcaatttctctaaagttgttaaatttttaaaatttatttgtcagattttgtagaatgtaacagaacaaatgatcctacagtattatatgt

SEQ ID NO: 19199 - DNA, 438 bp, Glycine max
acatggagatacaaaaatatatagctaaagttttctcgcccaaacaatacatcgaagttaatcattggaagatgtatcacaggtctgtcactgactgggaatagacaaaataatgagcagctaagaagagcagcaatcaactcctgaaaggccagaatctgataatgttaactataaccatctttagcatgcatcatacaataaaaatggtagtagaagcagcatcaacagttgtgatagcagtagcagtcaagttttactataattgtgtaatttatttagtagttttgatgccgttggagtaaatgcacataaagaagaaagtaacctgggtaaggaagactatccctggttgctgtgaatccaacaagcgaagagcagtagtgagcatagctccggcctctccatctatagccatattatcagtgttttgatagt

SEQ ID NO: 19200 - DNA, 437 bp, Glycine max
tggtacatgacactcgatgtgggtggcatgtactggagacggaatggcatattcttgtgtacgtgcctcttacaaagtggcacgcactggaaacatagtggtgtgaatcagtaggactcaccaagggcggaccttaggttttacgagccctttggaggatcaactagggaactgtcggacctgggttttaggcatcgtgctcttgcatacatggcacttgtcgtgggtgacatgtactagagatgtaatacctgtgaggataaccaagcacggagcttgggtttttaaaaaagattatggaactcaataaatcaagatgggggtgaattggttttcaaacaaaaaggtactttttaaaaaatgagttacgaaaaaaacttttctaaacgaatctatcacaaaacgaatttgaatttgaatggtaacaattcttaaac

SEQ ID NO: 19201 - DNA, 407 bp, Glycine max
attccgcaatgtttaaagatgttctcctgtatcaaggcagggttggccacttaatggagaaaaggagcatattgattaattttagttttaaaaactccaaatctccaatgttaaacacgagtaatacttgatactaatcaagtacctataacgtgtttggtttaggatataatttgaggggaaaagttgtattatattgaatcaataattacatgattaatgaatcgttaattcatgtgatattgaatttaatttttaaaataagatctttaagttttaattttataaataaaaaatgtgaataaaaagaaaatatattatcaaatatcatcggtggaaatttttttataaaaattaatcaataataaaatcgggttgtactctgaattaataatatatatatttat

SEQ ID NO: 19202 - DNA, 636 bp, Glycine max
aattaatgactccggcgataaaagagccactttggcaaagaattcagaatttagaggcagtggtaactgagatggctaataaacctaatacaattcctcctgaaaaagaggatattcttcaagagtcattgagtcgcataaaatgtatagaatatgacttgcaaaaaacaaagaaggccctgctagccactgcttcaaagcaagttgagcttgccgagtcattggaaagcttaaaggagagtaaatttgacggaagaaattcatgttggcctaaaaatagaagttatgccccaggaagatgagcccgtttttcagcatcagtttgcagtccattgtttttgatactttacagctgaatcactaccagagctaaacttctattggcttatataaaagaattactctcattatcatataggcttgaggaatgtgggctatggggagtgcatagccccaatgtatagaacgcaacaagaattttttatgaagattctggactccaaatactccttttaaatgtataactgagtgtgttaaccacatttattttcttattggcttttctgtacagaggacatatacacaaagtatgccactcaaattcagatgtattttaaaaccagatgcatatatacc

SEQ ID NO: 19203 - DNA, 420 bp, Glycine max
ccatggatgactaattaattatttaatataaaaaatgggttcaagccatttaaactgtatttaactattaatgtactagtttaaaaataaaaatattaaatgtgtaaatggtgcatttattactttactaaaattagtatattaaatgaatatatcaattactatttggcaactaatttcccgcatgaccctaattagcacatataccttaaatttgtttttcttattacattttaaaattatcaaaatagataataatttggtaaatatacatgttatcattatctttttgacattttaattttcccacccaattgaaggttagttttatcaatttacttgagaatttctaaagcccattaatgcctaatgcaaatggttttttcctgcaacaatttatgagatttttattctataatt

SEQ ID NO: 19204 - DNA, 404 bp, Glycine max
tttattacgattaaatttccatttttgttcacatgactgtcggcactatttacttgccctgacgttacaaaactctcaattcactccctgaatttgtaaaatttctattttggtccccatgactgtaagcactatttacttactctgactttataaaactcttaattaagtccttgaatttgttaaatgtttcaaaatttgtttctcttttgtcctttttcgctggcattagggattgaaatgaatgaaattttacagcattttatggagtcagggaccagagggaaagtttcgtaaagtgagggactaaagtgaataacacttacaatcttaacaaaaaagtgacaggtctactcaattggatatcaccatcatgttgtgatcatattcaatgtattcaaact

SEQ ID NO: 19205 - DNA, 383 bp, Glycine max
tatgtgttgcttaattacataatgaatgccttatgttaaatttcacttagtaatttaatttagggttggattaagtggttgaactgataaaggataaattctcgtaacctaggataagagacttgcttgtgaatcaagggggaaacaacgtgttttaattctgatattttctaattcaaatttgctcgctgtttaatttacaaaaacaaacaacccccccccccccaattcgttactgttttattactatttgttatgaacgtttggttgaccattgctcgttgggagacgacctaggatcacttcctagatactgcatttttaatattcatttgattcgggtacgacctcaatcaaatttggcgccgttgccggggagcaat

SEQ ID NO: 19206 - DNA, 1079 bp, Glycine max
cccacgcgtccgctttccttagaggaacataaatccagactgaaggaaaaactaggatgtgaaccctctgatgatcaaatggcaacttctttgaagatttctcgcactgaactacgagcaagaatgatagagtgctctctggcaagagaaaagttggctatgagcaatgtacgcttagttatgtctattgcccaaaagtatgataacctgggtgcagaaatgggtgaccttgttcagggtggcttgattggattactgcgtggtattgaaaagttcgattcttcaaaagggtttaagatttcaacttatgtttattggtggatacgtcagggtgtttcaagagctttagttgagaattcaagaacattaagattgcctgctcatttgcatgagagattatctctaatccgcaatgcaaagtttagactagaagagagaggcattactccaactattgataggattgcaaaataccttaacatgtctcaaaagaaagtcagaaatgctactgaggcaatcagcaaaattatctcgcttgatagagaagcattcccctctctgaatggtctacaaggagaaactcatcatagttatattgcagataatcgagtggagaacatcccatggaatggagtagacgagtgggcactaaaggatgaagtgaacagactcattaatgtgacccttgtggaacgagagagagaaattattcgactttattatggactggataaagaaggtcttacatgggaagacattagtaaacggataggtttgtcaagagaaagagtaaggcaagttggacttgttgcattggagaaactaaaacatgctgcgaggaagagacaaatggaagccatgctattgaaacattaaatttggactcatcatagaaatatgttacaatgtatatatacacagaggaagtatgtacctagaaatttgacttcctgattcaaaaagaggacaattatataagggaacattggagatttgtaaatccctttaaatatggttttagtaccaataaatatgggtaatttttgttttaatactccaaaaataaaaaaattactttt

SEQ ID NO: 19207 - DNA, 776 bp, Glycine max
gggggtctcattcaagttatggaagctgggcaaatgccttttggttctgggattgatctccgtgacaatccggtgggagattttctgtcgtccagggatgagccccagatgatttctggttcatcactttttggtaatggtcacaagagagacaaccttggcctggataatcatcattctctgaatggcagtaacaagcggctgagaggtgatagcccgtggaactccaagccaatggactttgaagcgtgcatcgaacagatggagcattggatggggaaagctagaatgatgtttgcaacaaaagatcaggcttgcgaagaatctacaatgaatcagcaactcttgattaatgagctccagaagcgagataacatgattgagcatttgcataaggcaaagttagaagagactcagaaaagacagattgaggtatatcggttcgagaaggaactttatatgatgcaaagccttgttgatggctacagaaaagccttgaaagaaacacggaaggcttttgctgactatagagcaagttgtcctcaaggtgatgatgaaccactttacaaggatcttcctgggtctgggggccttgttttgactgctgtggaggtggaaagggaacagctgaagaaggaagctgaagaaagggcaaagatgagagattttatgatagattatgaaaagaagactacagattttgaatccacttggtttggtaaatttgaagctcatatgagtacaagtgaatccctaagtcataggttgcaggtttt

SEQ ID NO: 19208 - DNA, 515 bp, Glycine max
gaagatggtgtttcatcagtagccacaaactgagagcgtctaaatttacactcaggtgatcaggggactgaacaagaagaggaaaattcttctgtagtaattccaaatcatttacaactccattctgctgaatgcttaaatctgagctttggaagttttggatctgcaaacgatgcttccctttctggatctggcccatatgcatctaggcccttgaaaagtaacttggaagatacatctggagctaacgatgtttcaacaattgggtcctcagatgttagaaaccctgactattatggcgatgagcatcttactactacctctgatgggaatgtagctcacataactggtgtggatgctgggacttatgagcattcctccatttcgcaatcagaggctttaaaatctgaaccccctgaaactgctcaggaaaatcaatattcatttcgctcttcacacgagtttacttacgaaaatggccaacagccagatgttacatacgctcattcacagac

SEQ ID NO: 19209 - DNA, 709 bp, Glycine max
aaggtgtggctgatccaagggtatctgtccggagccatcctgttaggccaccccctgttctacatgtaccagaaagtatagacctcaacttgatttcgtcaccccgtgctgcttttaatcaaggttttgggcatcttccatcttctagatttagtggcagaagtgctgaaggagcctctcctgtatctggaggggcaccaactttatcagagagacgctggatacaccgtcagattcaacaactactttcaatagataggatggcctctacacctggcagaaccaatggtatttctgctaccagttcaactagtaacttatatagctctctctttgatcaaagtaggggaaccaccactctgcatgcaaggacacaggatgtgggaacatcataccacacattttttgatgagagattatgcaacaattcctccccattaatgcagaatggggcattatggtctggacttatggggacacccccagtaccagattgtgaactagctcatcagttcagtagatcaaacattgttcctgatgggggcttatcccctgcttgcagagaagagaggtactttcactttgcaaaggagcacttgcagtcaatggttaaaagccacttgaagaacttgtctcaaaatattgatttagatgttgttgttgcctccctttgtgtacatcgatcaggtgaaaaactcaattacagata

SEQ ID NO: 19210 - DNA, 436 bp, Glycine max
gtatagccctaatattcctacagatactaataatatttacatttacgatcgaatagatctcattactaatactatactattactaaattaagaatagaatagaaagaatttgtaaatttctatcggaacatattaatattcgatagaataatactaatagtagtatattcagatactagtctaaaaaaatttatactttattatttaaactttagactaataattaatactaatccggtatattttccacattcagaggagtacgtttatgttttttctttacgaatatgatattttttgggcatttctaataatatcaagttatattcctattttggcatttctaattcctggaattgtagccccggatagcaggggaccagataaactttctagttttgaatagggaatagaaccaataggtgatgcttggtta

SEQ ID NO: 19211 - DNA, 633 bp, Glycine max
aggactggtgtaatgtgatgtaatcttttggttgttgatgaattctttggtagggtataatagatagggtttactatgcattcgaaccaatagttgacacatgaaaatgataatgaatggacaaatgtgttgtgttaatggtgcccatctaagaattagtcttgttttccaacttttatggggattgaaaaattctttacttccacatttggttccgaatgatatgtcaactattaatatttcagttggaagcacagttggtccattaatgtaaaggaagataaaatatagttttcatgagaaagctaatataaactgttgttattggacctgtttgtagagagctgatgggtgcatgcatgtcttgaatcaatgtaagatgcagttccctaaaacagcatactttcaaaatttatatttttctttaatctgacagacttcttctggctaagtgtgtcgatgaattcagaaaatgtaaattttgtaatgtcttgttttacctgtaatgcttattttgaaaattttggctacctttcatgtctagaaagattaaatgttgttagaggaaatatataatggatgaatataattacacagggtaagaagtaaaataaattcaggcactccgttccc

SEQ ID NO: 19212 - DNA, 430 bp, Glycine max
gactgtgattattatttgataagtagtattgcttattctcttgtggttttcgtgcggaatggtagcattttcagtagggtcttcaatgattaggatcattgatgagaaatttgaaagcaggtatatacttacacaatgggtttgaagtaacttaaaggcaaactttatcatgattcacaaaaggttgggatcattgttggtatgggatgtcgttatacaatatcctccgaagcatgataaagtatgtctttcggttactttgaacccatattctacaataactatatatctgcttttaaattttcatcaatcactgaagacctcttgaagatgttgtctttctgtgcttaaaccacacgagaataattagtactacatatcaactaatgcaacactcatgatattgaattactaatctatctataatata

SEQ ID NO: 19213 - DNA, 582 bp, Glycine max
tgaatggggagtggttgttaatcggggcacgcaaagggaaaggaaaattaatcccctcattattatatgacatacacttacacgagttattattattatttatttttattttgattcttaaaataccaaatcagaactataacctaatctatctatctagttttgtttcacatatctgaaaaagaaaagaaaaccttaggggaggggaagtaacgcaaaaccgaaacgctcaacattcacattgtaaaactcttcatcatagcaattcccttccttttctccctccctctctctcttggcaatccctttcttcttcgctgtcaggtgcaccttctataataacagtaagtcagtggtggaaagttatcagaaatagatgaaacagcagttataaatttataatgtctggactgatcgaaagacttcctgatgctgttgcaattaggtgccttgcacgtgttcccttctactttcacccagtgttagagcttgtctctcgttcttggcaagcagctattcgtagccctgaactatttaaagctcggcaggaggttgagtcaactgaagatctgttatgtgtct

SEQ ID NO: 19214 - DNA, 398 bp, Glycine max
ggaggatttggatctgttcacagagggcttctgccagatggacaagtcattgctgtcaagcaacataaattggctagttctcagggtgatctagaattctgctcagaggtagaagtcctgagctgtgctcagcaccgaaatgttgttatgttgattgggttctgtatagaggataaaagaaagctattggtatatgagtacatatgtaatggatcattggattctcatttatatgggagacagccagaaccattagaatggtctgcccggcaaaaaatctgctgttggagctgctcgagggttgcgatatcttcatgaagagtgcagagtgggttgcattatccatcgtgacatgcggcctaacaacattcttatcactcatgattttgaaccactgg

SEQ ID NO: 19215 - DNA, 2200 bp, Glycine max
tgctttagcaaagtatgttaaagctgtatatcatactcgagtttcagttggtatgcgcttcaggatgctgtttgaaacagaggaatctagtgtgcgtcgatacatgggcacaataactggcattagtgacttggattctattcggtggccaaattcccattggcgctcagtcaaggttggctgggatgaatccacagcaggagagaggcaacctcgagtgtctttatgggaaattgagccattaacaacatttccaatgtatccatctccatttccccttaggcttaagagaccgtggcctccaggactgccttcgttccatgcaggcttgaaggatgatgattttggaataaattcttcactaatgtggcttcgagacacagacagaggtcttccatctcttaattttcaggggattggtgttagtccttggatgcagccaaggcttgatccctcaatggtgaattatcaatcagatatgtaccaagctatggctgccgctgcacttcaggatatgtggacttcaaatccttccaaacagcatcctacttcctcaattcagtttcagcaaccgcagaacttccccaaccagacttctcccttaatgcaaactcaattgttgcagcagtctccatctcagcaggcttttccaaatagtcaagaaaatccacatccgtctccatctcaatctcaggctcaaactcaaacacactttcagcagcatctacagcatcagcactcattcaataatcagaatcagcatcatcttctgccgcagcagcagcaacaaccacaacaaccgcagttgcaacagcaacaagtggtagatcatcaacagatttcaagtgttgtctctacaatgtctcagtttgtttcagcagctcagtctcaatcaccacccatgcaagctatctcttcacttggccatcagcaaagcttttctgattcaaatggaaaccccacgactactgctattgtttctcccctgcatagtatattggattcatttcctcaggatgacacatctcaccttctcagccttcctagatccacttcttgggttcctgttcaacattcgactgcatggccaccctccaagcgtgttgtggtggatcctctcctttcttctggagcatctcaatgtgttctgcctcaagtggagcagttagggcagccacatagtaccatggctcaaaatggcattgcattgccagcctttcctggtagggagtgtacaatagaaggaagcaatgatccacaaaatcatcttttgtttggtgtcaatatagagccctcgtcacttctaatgcataatgggatgtcaagtcttaagggagttagcagcaacagtgactcacccacaataccttttcaatcttctaattacctgaacaccacaggacctgattcttcattgaatcctggaatgacacacaatattggtgaatcgggcttcctgcaaactccggaagatgcaggacaaggaaacccactgaacaaaacctttgtgaaggtttacaagtcagggtcctttggaaggtccttggacatcactaaattcaccagctaccctgagctgcgcggtgagctcgctcgtatgtttggccttgaaggcgagttggaggaccctgtgagatcaggctggcagcttgtatttgtagaccgagagaatgatgttcttctccttggtgatggcccctggccggaattcgtaaatagtgtatggtgcataaagatactttctcctcaggaagtgcagcaaatgggcaacaatggccttgagctgttgaactcggttccaaatcaaaggctctctaatggcatctgtgatgactatgtgagccgtcaagacccaagaaatttaagcactgggataacaaccgtggggtctttagactactaaatagtctgcacttcttctatcatgtttaatattattacccttgcttctcaacccttagtgtacggttggaagcacctttgccaaagtgtagtttatatagcctactctttagcctttggattttgttttcctgctttttcctgctaggacaattcataaactaatactgtaactatatggcatctagtcattgtgccagctacaatatatacgatacttaatccgttaggaaatcaatgcgtgagatagcttctcttaacttgtacggaactttactttctagtctggttttggctt

SEQ ID NO: 19216 - DNA, 660 bp, Glycine max
  unsure (1)..(660): unsure at all n locations
ggtttacaagtcagggtcctttggaagatccttggacatcactaaattcaccagctaccctgagctacgcagcgagcttgctcgtatgtttggccttgaaggtgagttggaggacccctgtgagatcaggctggcagcttgtattcgttgaccaagagaatgacgttctgctccttggtgatggcccgtggccggaatttgtaaatagtgtagggtatatcaagatactttcccctcaggaagtgcagcagatgggcaacaatgaacttgagcttcttaactcggtccccattcagaggctctctaacggtgtctgtgaggacccaagaaatttaagcactgggataacaactgtggggtctttaaactactgaatgatatgacaatcaaatactatgaatctcttctctcttgtattattgctcctacttctccaccctttgtcaaatggtgggaagtactgcctagttgtagtttataggctacttattaagcctttttttttttgtcttcctgttcttgctgcctaggaccattcttaagataaacaatgtaaacatatggcatcttggcaatgtgctatctacaatatattaattatttagtgtgtgtttggctagaaggttacnnnnnnnnnnnnnnnnnnnnnnnnnnnnnnnn

SEQ ID NO: 19217 - DNA, 642 bp, Glycine max
cgggctagaatacatcctacgctctccaacccggggagccttatacacagttgcccaatttagtgcatcatcatcttcaaataccaaatcatttccagcatcattatcattatcttcatccatctctcccacgagccattcattgcacacatcaatatcattaagagaaattgaatcaatttcatctcttgcattatatctttgcttcagttggtggttgtatttgacaaacaccaaatcctgcaacttcttgtgctcaagcctatttctttttttgggatgaatctacaacataacaaataaatcttgatctcaatcccaaatacactccaaatataacttgaccatcaaaattaaataaaattaaaaagcatagttagagttttgtcacaatttcttgctcaaacacactccaatttctttcacatcctgaagcactgcaagtcaaactcaaaatcttaatagccagcttctgcaaatttggagtttgtgacccaaacattcgccaccaatatgctgcaataccaattaccaaccaagagcataacttagaattctgaattctaacactaatacataaaaaaaatagtatgataaaagtttcttactaagagaatgggttttcctttgagccattgcaaa

SEQ ID NO: 19218 - DNA, 408 bp, Glycine max
agaatccagaatccatattaatctatctgtgttggaacatagaggactagtatataagggtaattgggtaaatgaagccattgttgattcttgatgcctttatttttacacactgcacaatcatttatttgagcactctgttttgtcattaatccaacatttgagtagctgaaagtctcatagtaaagttatatgatatgatgtattgttaactttgtgttttgaccttgattgtgaagtttcaggatgcagtttgtgttctaacctctgtttcttaaccaggtaaagttggaagaagaggaaaccaatcatttcaaagatagtcttcttcctactgtaattggattgcttagaactgtaagtaattagttattgtgaaagtttgagtattattttttattgggaaag

SEQ ID NO: 19219 - DNA, 534 bp, Glycine max
taaacaaagcattgaatctttgaacaacaaagcaaaagaagccagcaatggccaagtccaagaacaatgccaagaagttgtcctacatctcagttccttctcagatcatcaactccatctcatcttcttctcttcaatctctgcttgaatctcccaagaagtgtgcaagacactccaaattcttcacctttgtcaagtgcataaggccaagactcttccttttcactctctttttccttgctttctttgccatgctcaagtttggtctcaatctttacaccccttttcctccattcccatgtgcaacctcagtagacccctcaaaatccaatcttggacagcaaggtggtgatgttggtgtttcagaggctctgattagcagtgtgcagttacatggtacagaggttccaagtggggtgggtgaaaagagtgagttttgggagcagccagatgggtcagggtacaagccatgtttgaatttcagtaaggagtataggagggagactgaaggggttgtgaagaaccagaggaggt

SEQ ID NO: 19220 - DNA, 439 bp, Glycine max
tctcgagccgattcggctcgagcgtgtttgtgtgttgcgtttgagttggcgattccgaaatggaggacgacggttccaactcgatccgccgcatgtcaagccgaacgcgaaaagttgcgtccaaaatggccgccgcgcttgccagcgctgacaaccgcactcaggcggcacttgcacgcttggatgcattggagaatgacaatgcgggttttgaaatcgcagatgccaataatgatgacgatgacgcttctctagacgaggaggatcaattttatatgcagaaaaagcagtctaaaggcaccaaaaggaaaactaggcaggcaaaagcacttgaagctagaatggccccaagaacattccttgagctcttacatgaagctaacttagaatcattgcctcctcatgtgccctcctattggaaagccgcagttggaccccc

SEQ ID NO: 19221 - DNA, 415 bp, Glycine max
gagttttcatgacattaatctggtttgcaaaattaatactttgttgtaggaaaaggagaggtggttacctgctcagggaaccgaaatgctgaccttttttatggcgttcttggagggcttggtcaatttggcatcattacaagggctagaatttctcttgaaccagcacctatgatggtgagtgtacattcaaaactctaatattaagacaaaaaaaaacagttcctaataatatttattgattatgacatgatatgtgcctttttgacaggttaaatggattagggtgctctactcagaattttctacatttactatggatcaagagtatttgatatcacttaacaacacatttgattatattgaagggtttgtgatcataaacagaactggcattcttaacaactggagatca

SEQ ID NO: 19222 - DNA, 417 bp, Glycine max
gacgtcaacaacattcatcaatgtgttgtgtacacactgcacaccaccccatcccatgtgactctctgccccttccttcatcaatcatagtttctctgtgttttgttccgctaaatctccaaagcaatcaagcagagttctttaattagatgcaacctcagcacgagggttaacagattccgaccgtctcaatgaatgttgtgatttgtggtactgttgactccttctttttggttggacttagagtccaaaatggcggtgctggggtgagttgagttgaagtgaggcacctactttgcagtctgagtttgtgttgtctagtcttttttttttctttttcaaacatacaataatgaaggccttttccttcagtggggtttggattttattggttctgagctcggtttcagctttttc

SEQ ID NO: 19223 - DNA, 636 bp, Glycine max
gaataacataaaggttgaagggttatagattcctgcacccacctaccaccgaagaacggatattacaagagagatagatgttttgcttcctctaatctggcgaatcattcgttctagcaaattttgccgaaaactccaaaacccccccttttagaaaactcgattaacaacaatctcaatcttctacagcttatcctctctctctctcttcttcgcttcccccaacagcaatttcattcaaaactctctctcaggtgattaagagaatcagagtttgcttatccatataacagatcatttgaacagaagagggagggtactggtttgcggaggcaattggacttctgcgagcttagaatcctctctcctttatttattaatgaaatcatagtcattagtcttggctagtgctgttggggactctttttcacaaagcgtgcttgtagcagcatccatgttttggtgatctttgagttgagaagagagaaaaatttaagttgaaagagagagggatattgaagctaaaacaatgggtgcagtttgttgctgtttcaatgttgatgattttgaagattatatgaatccaaatagttctgtatataggaactgtatgtgtctcagttgcttcgtacagaa

SEQ ID NO: 19224 - DNA, 538 bp, Glycine max
gacacatgctttttcttttagagaaattacatatgcttatttataaccaataatgttgggaaaggaacatacacaatttggagaaaagaagaagataagctagctaaggcagcaatgggtaatccttctaagcttttcccatttttctttgcattcattgtgtttctgatgcccttagtttccttatcccacaatgacttctctacctttgccataaaaaccgtttcatacctagtttcctttagtgaaaatccaaaccataatggccacatcaccacaagctccaatgaaagagacaaatcacgtctttggaggaaagccttcattggcttaaaaaatactcacgagccatcttcgaatatttctcgagcaatatcccttaatgcaagagagtgttttcctgtggagttaccttctgatgcaataacttctacccgttgttgtccacctaggccatctccttctaatatcatagatttcaaagattttgcttctccaaacgccacgcttcgagtaagaaaacctgctcacatggtag

SEQ ID NO: 19225 - DNA, 498 bp, Glycine max
  unsure (1)..(498): unsure at all n locations
aaggaagacgcactataagctaaagcagcaatgagtactccttctaagcttttatctttattctttgtactcattgtcttgctgatgcccttagtttccttactcaacaatgatttctctatcttcaccattaaaaccatttcatacctagtttcctttagtgaaaagccaaaccattactctaatttcagcattattccatacaaagcccaaaatagtaaacaaaatggccacatcaccacaaactccaatggaagagacaaaccacgtctttggaggaaagccttcattggcttcaaaaatactcacgagccatcttcgaatatttctcgagcaatatcccttaatgtaagcaagtgttttcccgttgagttaccttctttcgcaataaccaattcccattgttgtccacctagaccacctncttctaagatcatagatttcaaagattttgcttctccaaacgccacgcttcgagtaagaaaaccggctcacatg

SEQ ID NO: 19226 - DNA, 749 bp, Glycine max
tcttccttctacactttgctctctaccctctttctttctctttctttttcccttccctcaagtactatcatacacaaacacaaggtacttcacatacccacatacacacacataagcaaaaactcttacttccctttttcaagttcttaaactcatcactacttaactcaggagtgtgcatattttcgttgtatggatggatccttctagtggacaacaccagcaaatgtctagccagtcattggagaacatgttggcatgttcaaaagcccaccaagagagaaaaccaacgcctcagccagaacaagctctaaagtgccccagatgtgactccaccaacaccaaattctgctactacaacaattacagcctttcccagccaaggtacttctgcaagtcctgcaggagatattggaccaaaggaggtacacttaggaatgtccctgtgggaggagggtgcaggaagaacaaaaggtcatcatcatcatcatcttcaacatcaaagagagttcaagaccaagcattcacaccaaatcctaactctctcattggccttccttcattgtcctatgactcaagtgacctcactcttgcattggcaaggcttcaaaagcagtcatgtgggcaattggggtatgatgagcatgatctttcaatgttggggaaccaccacccaagcaccccatgtgataatatccttggcatgcatcatcactcatcatcatccacaaacccagggttcttggatg

SEQ ID NO: 19227 - DNA, 279 bp, Glycine max
cttctttgcatgacttcctaaactctctctatactcttctctcttctacacttcgctcgacactctttcccttccctcaagtactatcatacacatcacacacacaagctaacactcttgctttccttttcaagttcttaaactcatcacttaccgcaaggagtgtgcatattttctttgtatggatggatccttccagtggacaacaccagcaaatgtctagccagtcattggagaacatgttggcatgttcaaaagcacagcaagagaggaagccaa

SEQ ID NO: 19228 - DNA, 888 bp, Glycine max
aattcgagcggccgctttttttttatgactactttttgtttctaaacgggacctaaatgcggtgtattcaacattttcaaaccatttcctttcctaaaaaccaaaaccaatgtttatgccctttcattctagcttcttctatcacatttttcatgagtgccaagccaggggtaatactctgcaccaaaagctggaaaaaagcattgttgctaaacttaggctattgactgtttctaaaaaccaatttatcttggttaaactgatgcaacaataatgagatatatagaacccatcaattgatttctccttcttctacatcatttgtttctcttgtagtactctgaggcatttcttcttcttcttcctcctcatcagccttcatgtacaagcctagttgttctaacggattacaacttccctgtagtttgaaactacccagcccattttcaagatgatcaggacttctttcctctgtgaaatttggtaaatgttcatctagtaaaccactcagcatctctagatcttccaaaaattgactactctcactgataccaattgtcttctccatcttttgcaaagcctgacgagctgcttctctttccagttccctctttcttttggcttcagttgctgcttcggcttcagctttcctccgaacctcttctgcagcctttgcctctgcctgcaaccgagctttctcctccttctgccgcctttctagctcttttcgttccatcctaagtttttcaggatcccacttgtcacccttttcaagtgtcttttcctgagctttaagtatggtgtcagcaaatcggcttcttaataaagctgcacggtagagcttatcgggggatacttgcttcttagatggagcattctcccctaaaa

SEQ ID NO: 19229 - DNA, 420 bp, Glycine max
gtcataacgaaactcgtttttgcaattgccagatctcttcactcaattgcacagcagaagaagcataagcttctagagacacagagaaaaaaaaaaaaaagggaattgaagatggattgcagaaacagggactcaatcacagagaatcacacttcatcatcatcatcatcatcatcttcttcttcgtcttcttcttcttcttcgtgtgactcactcagcgaagccttgcttttcaccaccatgtgcatcgttggccaccccggtcgatgttcacgttaaggatggctctgtctattccggaatcttccacactgcttctgttcacgccgattacgggtcattgcctcttttttctctcgttgatttcttcacactttttttttctgggaaattcggttcttttgtgtagattcccttgta

SEQ ID NO: 19230 - DNA, 267 bp, Glycine max
acgaaactcgtttttgcaattgccagatgtcttcattcaattacaacagcagaagaaaccgaagcttctagagagaaagaaatagggaattgaagatgggttgcagaaacccggactcaatcacagagaatcacacttcgtcatcatcatcttcttctgattcactcagtgaagccttgcttttcaccaccatgtgcatcgttggccaccccgtcgatgttcacgttaaggatggctctgtctattctggaatcttccacactgctt

SEQ ID NO: 19231 - DNA, 412 bp, Glycine max
  unsure (1)..(412): unsure at all n locations
agggttatagatcaagaggtgaggatttataattcagcttattcaaagatttaataatgatatgatactttacaaaaaaaacattcttctaacttaggtacctataaatggttctactagtaaaaaccatcggagtacaaacgatctcaactaagggtgagttgaaatctaataattaatatattgacaatatcatttttgttagcatatgatatagcttgtagtgtatccgtactattaatgtatgtagtaagttgacatttaatgattaatatgttgacaactagaggtgattatttataatatcattgattcttcttattaatccaattcacaaactcatagcttttatgtttatccttttatatgacagaagtncaatctagtgtttatagcccaatctagtcaaatg

SEQ ID NO: 19232 - DNA, 383 bp, Glycine max
ggggactgaatttggtaattcaccttacaaccctaatcccctttttctcaatagactaaatcattccatcattcggcgcaagagggactgacaatagaggcacgcggcaccagattatttccaaattgaagcgtccaagagtccaaattcctcatgttagaatctcttttgtgctctgcaaacgccagttgctccttaaccttctcaaattctggcgtttctttaattctctgcttcttttttctaaatgggcattcgagttttccttctggtgcagattcttttttcttttttgtgttttttcttgatggcttgggtagattcagggattttcctttcttttggttgttgcccatcaccctttttgcatgttcttcacatgt

SEQ ID NO: 19233 - DNA, 453 bp, Glycine max
ggtaaaataaaaagccttgagattgaatttgtaaattcaccttagaaccctaatcccctttttctcaatagactaaatcattccatcattcggtgcaagacggactgacaatagaggcacgcggcaccagattatttccaaattgaagcgtccaagagtccaaattcctcattctctatgagctgaaggtagtttgcagcaaaaaagattgaagcaagcactgcgagaggcagataaagtgagggtgaagagaagagaggaatggtagagaaagatttcattgaagagggtaagagtatgagtcgaaaggagaagaggaaggcaatgaagaaaatgaagcggaagcaggcaaggaaggaggaggctgagagggagcggcgggaggaagaggagcgcctgaacaacccccgggagcagaggcggatgcagttgctggagcagcaagaggctgag

SEQ ID NO: 19234 - DNA, 837 bp, Glycine max
gggtgtgagttcatttgatgcaaacagcattacaagtctgtcgcaatatgtgaagccacttaccgacttccttgaaaaacttccggaaggcgaaaaggtgatcttggttgggcatgattttggaggggcatgtatatcatatgcaatggagatgtttcctcttaagatttccaaggctgtctttgttgctgcagcaatgctgactaatggtcaaagcactcttgatattatttctcaacaggcaggttcaaatgatcttatgcgacaagcccagacttttgtatatgctaatgggaatgatcaccctcccacttcttttgatctggacaagtcattgtcgagggatttgttattcaaccaaagtcccaccaaagatattgcactggcatgtgtctcaatgaggtctgtaccatttgcaccagttttagagaaggtttccctttcagacctgaaatatggatctgtaaggcggttttatatagaaactcttgaagacaatgccatacccatttcactccaggagaacatgataaatgcaaaccccccagaaaaggttttccgtctgaagggagctgatcattctcctttcttctctaagcctcaagcgctgcataagttattggtagaaatctcaaagatcctctaagaacattcattggctaaattgtttgtgcagcctacccacgataaagcttcagtaacatgaaataagaatgtgcacttgccttattatttaagtcttttattatgtgcaagttaaaattttgaaatctagcttgtataccctgtaatttgtaactggtattacttgcaacataaaactcacgttagatattg

SEQ ID NO: 19235 - DNA, 645 bp, Glycine max
cacgtccattaccattactcagcagttttctacttttcttctacacccactccatactttactcaactcatcctttctggttctggttcaacacagcacaccatttctaatgctgtaaaatttgtaccatgcagcaaggggctctgcttctgcttttgtgcgtggtctctctgttccccctcactcactatgcctgactttcttgccacaaacccccttaccatttcagctgcagaatctccaagattccccttcctccattcatgcccaactcttacaccaagaccccaactcaacccgaatttccgtatccccttttctcccaaaccatctaaaaacaagagcgtctctttggcactgagctccaggtcgaatgaagggtcatcaaggggttatggcttttacaacgagcttgagtttgaggacagaaaggacaagacttttgggttggagatgaaccctgttgttggtgaagattcccagagtgaaactgggtcaatcccctttgatggggtggagggtggtgatgataagggagaggatgatttggttcgggctcagggggatgcagatggggatggggatggtttgaagaaaggttatgatgatgaagaacgtgagaatgagaaatttggaggtaaactt

SEQ ID NO: 19236 - DNA, 463 bp, Glycine max
ccgaaccgaaattcccggatcggcccgcgcgtaacacacaaacttcaccgccataacgataccttcctgaatctctcctccttctctcttaagaaagcgggccatcattaccattttccgctactttgtagagaccaagcgcatatcctcgggtttctcgtatctcaaaaggttatcatctacccctgtagatggagatgcttactacaaattctggtgcgatgctacctcttctacccccagtgggtcagcattggggaagaatgaacgccaacaacttacctcttagatggtatagttcgcagcatcaaactcctaatactacgagactatcaatggttgctaaagcaggaccagtatttctcaaaccaattccatctactcggacgaagggaggcgttctatgttcaagtagaaagaacaatgctttcatttgttttgctgctttgaatgctcgatgtgc

SEQ ID NO: 19237 - DNA, 412 bp, Glycine max
ggtatcctaagagtgcatctattagcttagttgggtattccgattcaaattatgcaggttgtaaagttcataggaagagttctagtggtacttgtcatttgcttgggagtgctttggtttctggccactcttagaaacaaccaaccgaccaactagctggcatcattccatttgagatcatgcgcttaaaggtgatcgcgtattacagttgctagatataaccaaccaactagctgacacctttacaaaacccttgcatagggatagattctacaccactagatatgaggtacacattttagatgatgattatctagtataacatgcacatgcatttgtgttgtcataccctaatttcgtccggagattattacttgatgacatgcaacctttggttagccgctttgagata

SEQ ID NO: 19238 - DNA, 384 bp, Glycine max
ggatagcactaagttaaacattacacacaaacttcgtcgtgttactgttagctaacactttctgcaataatggcacgtactagcatccaaacaagctcttcatcacgggcaaaaaaaatttgatgtgttttcatcgttgtcttctcaaaggactatgcatcatccacatggtgcatgaaagagctgacaaagatcgttgattgggttcaagaaacaggtccaagtgtgctccctgttttctatgatgtcactccttcggaggttcgaaaacagagtggacagtttggagaggcttttactgaacacgaagaaaggtacacaaatggagggaagctctgaaagcaatcaccaatcgttgtgggtgagatgtactgaataagcctc

SEQ ID NO: 19239 - DNA, 481 bp, Glycine max
cccacgcgtccgcaaacaaccacaagtgttcttcctctgtaaacacacaaactctgttcctatttcagagtactgtccctttacctcgtacacatcaaacaatggaaggagatgggtattgtgggagtttctttcagaggtgcaagccttacatagccatgatttctctgcaattcgggtttgcgggtatgaacataatcaccaaggtttccctcaaccgtgggatgagccactatgtgcttgtggtttatagacacgcctttgctactgcagctattgctccttttgctattgttctagagaggaaagtgaggcccaagattacatttctcatgttcatgcaaatattcgtgttgggtctccttgggcctgtgattgatcagaacttatattatgcggggttgaaatttacttcccctacctactcatgtgcgataagcaacatgctccctgctatgacatttgtgatggctgctatttt

SEQ ID NO: 19240 - DNA, 639 bp, Glycine max
tggaaatggcttagcatctgtgacccctcaacttgaggaacttcttgatcaagttctggaacttggacccattgctaaatcaaataaaaaatatggaattgagaagtctcaaattgatttagacactgaacaatatcttgaacaaagcaaaactgcagtaagggataaaccttatatatcaaaagctgagagacgaaagcttaaaaaagaacagaaacatggagaagaagatttgaatgttgaacatggaaagtatgaatcaaagctaaaagatatttctgctaatctacaagcgaaagaagatcaaaatttgaaaaaaggtggtggtcaaaaaatcagccgtggacagaagggaaagcttaagaagataaaggagaagtatgctgaccaggacgaggaagaaaggagcatccgaatggcattgttagcttcttctggaaaatcaatcaagaaggaagagacatcatctgaaaatgatacattggaccaagggaaaaaacctggcagtggtccttctgacgctccaaaagtaccttctgatgctccaaaaatatgttacaagtgtaagaaggcaggtcactttatctcgggattgtaaggagcaaccagatggtcttttgcataagaatgcaattggtg

SEQ ID NO: 19241 - DNA, 516 bp, Glycine max
cccatgcgtccgcacaatccacacacaacacaacagcattcttagattttttttgggggttttctattaaaccaaaccatttggtctctttctctcttcttcttcggtcgcgacactgagaaaaaaaaggaaacaaaatatgactgagttatctttctcaaacacttccaacaagaagaatgagttatctagtaacctcttctctatcttcttccacttctgttctctccattttttctcaccctttatacttctcctacttcatcttcttctccccttacctccttaggatcctctctttcctctcccctttgctcatcaccacaacccttcttttagttgcccttctcactttcactcccaacaatcttgctcaggagaagtgtggttctgagccttctgagtccaagtggggcattgcgctttctgctatgaaatcttttctagcatggctgcattccaaagctgatgagatagatgaagaaatggggctcctaggtgaggttgaagcatatc

SEQ ID NO: 19242 - DNA, 401 bp, Glycine max
ggggtcacaagaaaaaaaaaaaacatgactgagtcatctttctcaaacaagaagaatgagttatctagtaacctcttctctatcttcttccacttctgtttctccattttttctcaccctttatacttctcctacttcatcttcttctccccttacctcctcaggatcctgtctttcctctcccctttgttcatcaccacaactcttctccttgtggcccttctcactttcactcccaacaatcttgatcaggaaaagggtggttctgagctttctgagtccaaatggggcattctgctttctgttttgcaatcttttctagcatggcttcattccaaagctgatgagatagatgaggaaatggcgctcctaggtgaggttgaggcatatcttgtcatgtt

SEQ ID NO: 19243 - DNA, 441 bp, Glycine max
caccacttcttccacctgatatatgaaaggcggtttatgtagctgtaatgcaacgggcgagcaaatctaacagatcgggttatgaatcccttttgaaagtatataaggaagctgacctaagtcaggagaaaacgcgtatcctgggctctctggcatcttcacgtgatccagatctaatgcttgaagctctaaacttcatgtggtcatctgaggttcgtaggcaggatgctggtgttggacttgctgttacccgggaaggacgagatgttgcttgggcatggcttaaggaaaattgggaacacctcataaaaacatatggttcaggatttttgataactcggtttgtcggtgcagttgtctcaccgtttgcttcctttgagaaggccaaggaggtagaagaattctttgctacccacgctatgccatccattgctagaacgt

SEQ ID NO: 19244 - DNA, 372 bp, Glycine max
caaaagggagttttgggatttctggagtctcaggaaaatggtcctttcacaagacatggcattgttcctgatattgtcataaatccgcatgcatttccctcacgacaaactcctgggcaactcctagaggctgctttaggaaaggggattgcttgtggtggcatactgagacaagctacgcctttctccactccttctggtgatgccattactgaacagcttcacagagctgggttttcaagatggggaaatgagaaggtatacaatggaaggactggtgagatggttcgatcactcatttttatgggaccaacattttaccaacgtctgcaccatatgtctgaagacaaaatgaaattccggaacactggt

SEQ ID NO: 19245 - DNA, 468 bp, Glycine max
attcttttcctttcattgcataacttcttctatatacttctctctttctctctctcatcccactgttaccatttccattggttgtttgttctcagctcaagaaggattcttgcctaagtcctcgtttttttatcggaatggtagatttgaggtgaaaaggttccatatttgttaggtaattctcagatctagcttcactctagctcgttaacatcaatttcacgcattgattcatggaccaagcaatattttgtgcctgctagttcttgcttgtagcagatcttatagattgacagattctagggtttgaaaactgaaacacttcttccaaatttaggtgacttcatcaaattagaacatttgaaccaaatagagaaaatgaaacttagtccatttagttcaggaaaatgtgtttttttaaatttttttattcataattacaaaagttctattttgctttcccttttg

SEQ ID NO: 19246 - DNA, 492 bp, Glycine max
ggttttcatattcttttcctttcattcgcgataacttctatctatataccttctactctttctctctcctcatcccactcgttacccatttccatttggtttgtttgttctcacgctcaagaagcgattctttgcctaagtcctcgatttttttatcggaatggtagatttgaggtgaaaaggttccatatttgttacgccttggatcttcttcatcaatggagtattttgcatcttgaagatcatggaagcggaatggagaaggaagaaagattattggagatgtcacttcaagaagaagatgtgtcaaaaagaagttcactaccataggaagccatggataagagcttgaactttgtatcaatggagattcttgagaaccgaaggtggatgtatcagaggttggatgctaataaacgttggccaaatgagtttagagaaggagtatttgagttcgtacaatttgttactagtcagggcatgtttcaaatg

SEQ ID NO: 19247 - DNA, 537 bp, Glycine max
cttagctcaagattgattcttgcctaagtcctcgtttttttatcggaatggtagatttgaggtgaaaaggttccatatttgttagtaacggtaaaactagaaaaaggaaagatacgagttagaggcgagcgaggcttggctgtttgagacttgcagagatttgtctccatcaaattttgccttggatcttcttcatcaatggagtattttgcatcttgaagatcatggaagcggaatggagaaggaagaaagattattggagatgtcacttcaagaagaagatgagtcaaaaagaagttcactaccataggaagccatggataagagcttgaaggtaagagaagaggagtcgaaggagagggagagaaagagcatgaaattttgtgtctcaaatgaggtctgaactttgaagtgtaattctcaaatgattaaagttgaaaaaatgcatacatatgacctctatttataacctaagtgtcacacaaaattggagagaaatttgaatttctattcaaatttcatttgaatttgtggagc

SEQ ID NO: 19248 - DNA, 390 bp, Glycine max
ggtcaatttcaaagctctctacataacggaaggggacaggggagtggggtttgattgcttttgtttgtgtgaggcaattacagagtgagaatcgatgggggagaaagggtgtgtgagcttagaaggaaagaaggtgatattggtcccttacatggaggcccacgtgcccaaatatcacgaatggatgaaggacccttctctccttcaagccactggctcagagcctctcaccctccaacaggagtacaccatgcaactctcctggtcccaagaccctaacaaagagacctttattgtattggacaaggacttggttgttggcgatttctctcacggggaaccccaccctgaagccatggtggagatgtaatatttcataatgattggatg

SEQ ID NO: 19249 - DNA, 501 bp, Glycine max
cttacgcgttcgattttagcggcagatatttgtctctgcggcgcagggtaagaagcagaacacagaacagagcataagctacttccattgctcccaacaccatcatcttcatcattattttctttctcttcactcatgtcactgtgattatggctcttgtacccactcgcccattcttcgattcatttcattcttctcccaacttccactctctccgcttctgcaactccctcttccgccactccctcacaccctctcccaattccactttcctccgtcgcaaaccactcttcatctttcgttgcaaccctgccaagagtttctccaccgacaaacactggttgaagcgttggaacgaccccacaaacaaccacgcccgtccgaagccgccatgtgctgttttggactattctgaaaatgggcacgcgtcaaaatccggtcttgcgagctctgacgaggagggtggtgatggaaataccggtggaaagcaccatgatagga

SEQ ID NO: 19250 - DNA, 458 bp, Glycine max
cccacgcgtccgcgacagaagggggaggcattttcgtctttgtaattgttgatattgatatttgattgatgcgcatgcggtggttcctccgaagcccaatcatcaaaacctcgctgctgaatctgagcccttcaatctcattaagacctcactgggcgaggagaaccttcacttcttcttcgagatcgtcaatggcggccatccacaaccacagcaatagcaacagcaacagcgaaaccggactggcgagacgcttttggatcaagttcacgcgcgaatccatcttcgccatgtacactcccttcgtcatcgccttggcctccggtaacttgcacattgatcctttcaccgttacatcgcccaagacgttcatttcctacgtgcctttgctcaagcgtatgaagtggctgaagagtgtgctgatgacgacgatgcgaaactttgaatctgtgaattga

SEQ ID NO: 19251 - DNA, 771 bp, Glycine max
tcggttacgcgttcgggcacttctccaatctcaacaactttcgtgtagtgcactgttttgctatagtaacccattaattaaaccgacctacgtagtagccatgaagagaggcagagaagagagtaagttagacatggctaattgcttgatgctattgacgaaagttggagagagtgaaaccaattacccaatatcaaagggtagtgatattggtgatttcaagtgcaagacttgcaatagaaggttctcttcttttcaagcccttggtggccatagagcaagccacaaaaaaccaaagctcatggtcacagatctttcgtgccatcacgagttaccgaataacccaaccatgaaacaacaacctaggatgcacccgtgtccgatttgtgggcttgagtttgctattggacaagctttgggagggcacatgagaaagcatagaactgctattaatgatggcttgttgtgtggtaaaccttcttcttcgttgtccatcttgaaggaatcatcgaaagatggtgatcaaaagttgaatttgcgcttggacttgaacttgacgccattggaggaggatgatcttaagctcaacctaaggacgcccgtgctcaattgtttcatttgattggaaattaattttgtactaaaccagattctttttttcgtattaatatagttaatgtgtatttgtcgtaatttattattatacgtacgacctataggtagctcattttgtagtcatattgtgttcataatacgaaacttcttagttct

SEQ ID NO: 19252 - DNA, 487 bp, Glycine max
ggtggctgacttctctctcgactcagctcacgtttggtttggcagtgctcttacctccaacttttgtattcttcttttccttttctattctttctctctccattcttcctccttccactctttgcgtactagtaatcccccttcaataccatccatcagcattcatattttcacaatttttctttcaattcccaaaagcataaacaaaaaaaaaattgaaaatcaaagcaataagaacacgcattctttacttccaattcccaattcttcttctgccctagattttaccccctttattattgcactccaccaccactgtgcatcgatcgatcgttggttcttgaatttcccttgtggttaggtttcctcgatggagtcggaggatgatatgcccgacgccaacgacatcgagtccctcgacgacgatttctacagtggcgagaccgaggacgctcccttggactactacagcgactacgacgccgac

SEQ ID NO: 19253 - DNA, 373 bp, Glycine max
gcaagagccagttctggaacaagtggagctcgtagcagcagcactgagagtgggggaccaaaactagtgatgttcaacaccaaaattacacttgctgagaccattgaagcaacaagacaattcgacgaagagaacgtgctgagcagaacaaggcatggattagtgttcaaggcctgctacaacgatggaatggtcctttccattcgcaggctgcaagatggatcattggatgagaacatgtttagaaaagaagccgagtcacttggcaaagtcaagaaccgaaatttagcagttctcagaggttactatgcagggccacctgacatgagactcctagtctacgattacatgcccaatggaaaccttgcaaccc

SEQ ID NO: 19254 - DNA, 1031 bp, Glycine max
caaaactccaattggttgttccaggaaagcaaggtagcaagatggactgcagaagagaacaaactgtttgaaaatgccttggcttactatgataaggacaccccagatagatggatgagggtggcagccatgattccagggaaaactgttggtgatgtgatcaaacagtacagagagcttgaggaagatgtgagtgtcattgaagcaggtttgatcccagttacctggctatactactgccagttctttcacattggagtgggttaacgatcaaggctatgatgagttcaagcagttctgtaatgttggtgcgaaaaggggtgcatccacgaggccaactgagcaggaaaggaagaaaggagtgccatggactgaagaggagcacaggcaatttctgctgggtctcaagaagtatggtaaaggggattggagaaacatctctaggaactttgtgaccacaaggacaccaactcaggttgcaagtcatgctcagaagtacttcatcaggcagcttacaggagggaaggataagagaagatccagtatccatgacatcacaatggttaatctccaagaaacaaaatctccttcatcagacactaccaaaccctcttctccacttcagaatcaggcattgtctagcatggttaaggaggaatatgagtggaaattgccatgtgagggcatgcccattgttttcaattccacaagtggaaacatgttcatgtcagcaccactgcatggcatttcttcatatgaatctagaccacaggagcaaaatttacttagacaatctccatggatgccagttttcaccttgtgatgctattttgcaaatgcaattgatgcgacatcggtgatctatacaagtggtgcagggattagagttttgaagttagatggaaggtttgtgtgagctagcatccgatgttcatcttcctatataggcagccaggagttatctgcagatcgccctgaggaagaggagctatctcttgcctttttaaaagatgcttcaaataaatatattc

SEQ ID NO: 19255 - DNA, 760 bp, Glycine max
  unsure (1)..(760): unsure at all n locations
cagaaggtgaaattttttcagcagaggatgctgacagtgcagagactgaaggagctgcaggatgaaaggaaggagccttttacatatggacaggcaaagaggttgcagacttacttggagcgcatgctgctcttttcgaggagcactattacatcaagcaatcgggtaactgtaacctatctggaatgagtgatcctcacgatgaattcaagggaaagaatgtcctgattgagagaaaggaaccttcagaactggcatcaaaatatggcatgtcagttgagacatatcaagaaattcttggagagtgcaggcataagttgtttgaagtaaggtcaaggcgtccaaagccacatttggatgataaggttattgtatcatggaatggactggcaatctcatcttttgctagggcttctaagattctcaagggtgaagttgaagggaccaaattctactttcctgtcgttggcactgaagcaaaggggtacttgagaattgcagaaaaagcagcattctttatttggaaacagctttacaatgtggaaactcacaggctacaccatagtttcagacattctccgtctaaagctcctgctttcttggatgattatgcttttctgatttctggattgctggatctctatgaatttggtggtggaattaactggcttctatgggccattgaattgcaggaaacccangatgccttgtttcttgataggacaagaggtggatatttcaataatacaagagaagattc

SEQ ID NO: 19256 - DNA, 901 bp, Glycine max
cggaggggaagaaagaagagttgctatggaagagatcaacaagaacccatcagggacttctcttttggtaccatcagtgctagagttggctaaagagaatttgactactgttccacaaagatacattgtcactcaacatcaagacatggtgctcatctctgaagaagatcatagtacccttgagattccagttattgacatgcacagattgctttctgtagaaccctgggagttcagaattggataagcttcacctggcgtgcaaagaatggggattcttccagctggttaaccatggtgttagctcttccttggtggagaaagtaaagttggagattcaggatttcttcaagcttccaatgtcagagaagaaaaagttttggcagagtccacaacatatggagggttttggacaagcatttgttgtgagtgaagaccaaaaacttgattgggcagacctttactatatgaccacccttccaaaacactctagaatgccccacttatttccacaactccctcttcctttcagagacactctagaggcttactcacaggaaataaaagatctagccatagttattataggccttatgggaaaagctttgaagattcaagaaagggaaataagagaattatttgaagatggaatacaactaatgaggatgaactattaccctccatgccctgaaccagagaaggttattggcctcactcctcattcagacggaattggactcgctattcttctacaactcaatgaagttgaaggtcttcagataaggaaagatggcttgtgggttccggttaaacccttgattaatgctttcattgtcaatgttggtgacatattacagattataactaatgggatataccgaagcattgagcatcgggcaac

SEQ ID NO: 19257 - DNA, 392 bp, Glycine max
ttgttgaagactacagttatggggttttaaagaaaaaaaaagatataattgagatgggggtgagtaggagaagacttggagttagatgcagtgtggttgcagggtcagtgtgggagagcagaatgaagagtgatgaagttggtggtggagttaaggtcttcactggagaacaaagtgctgaagaaggaggcaatggtggcacctgcagattgaagagaagccaaattgggagtgtggttgccactggaaagagaaaaacttggaaatcagaagggttagaaaacaaccatattcaaatagccataggaaaatcagaaccccataagaatggtggtaatagtagtagtagtcagcaatgcaagggatctaacatatcttctgattcaatcaag

SEQ ID NO: 19258 - DNA, 452 bp, Glycine max
atcactacaaaacgttacttttcacaccttggtattatcgtcggaagcggtatccatcaatgtttctttctgataaacttgcaccacacttcaattccacactctttactcatctccacacccaccaggtaccgtcacttcaaattttcagccacatttcacaatcttctctgcattttccttccaaatttatgatctgtttcgttttctgctatctgggtatgtctcaagtttgagttagagtgcttccctcgcttctccaagaaaagggttggtacccttttcatgccatggtatttccctgaactgaagagcaatacccgtttgtgcctcactttccgtggaaagaaggctttgttcaagtttcagcaatgatagtgttaggaatccatccttattggtattactaattctttatgttgaattgattttattgtgtaaattgtttcatg

SEQ ID NO: 19259 - DNA, 538 bp, Glycine max
gtatctttcggaacactacaatggaatatgccctggtccattttcaagagtattgaaactcgtataagaattctccatttgcgtactagtggcgcatttacaacaccttttcaggtcaaatcctattttttcccgtgaaagttcatgttcaaataaataggccttgctgaaagaggggttttatgattatttttttcttcattaattttgatcctaaacattagaaaaaccatccaaattgagcaaatttttacccgaactctctcaaaattgtgacacaggtagcacaaaccatccaatctctactccctgtgccagaacccaagatgcacgaatcagtaagaaaagaactcgaagaattggagaaagagaaagcaacaattgacaacaaagcaaacacaatggttcgacgtgagctttgggccgggttgggcttcctagtggtgcaaacagcagcattcatgaggctaacattttgggaactttcttgggacgtgatggaaccaatttgcttctacgtgacctcaatgtacttcat

SEQ ID NO: 19260 - DNA, 370 bp, Glycine max
gctattactagatgtggctttagattttaaacaacttgcttggtgagggtccattctttgatcagttttctgtggcaatatatgttactttatatgtcccatcttggggtcagctaggtaaaggtggttggagccttgcctctatcactggtgaatttagataatgctgatgagaatgattttacagtttggttgaaagtcgtgatgctaacagattggaagggggaacagggagtgtttgtgattgacttgcaagataacttgggcttgaaagaatcatagtaggcatgctgcatgcatggcactatctgacctaatgtgtctgaaactttgtgcttaagatacataattataatgaaatatttattcc

SEQ ID NO: 19261 - DNA, 394 bp, Glycine max
acttttgcagcttgttcgagagacagctattcaatgtcttgttgccttgtctgagttgccccacgcccgtatctatcctatgaggacacaggttctacgagcaatatcaaagtgtcttgacgattcaaagagagctgttcgccatgaagctgtcaaatgtcggcaaacatgggcatcaatgtaatctaggagtctccatttctgaagttcaaaaccaacttcccaaggtactgggaaagcttttgacctttgttttctaattaacagtgattctttcaccgaaaggaaaatctgaatttttgaaatgtaaaataacttgtaaatattaaagtctatcaatcttattgtctactcttatagctgcattaatgagaatttgattttgaattcgccc

SEQ ID NO: 19262 - DNA, 506 bp, Glycine max
ggcagcaaaccccttcaacatttttcaccctcagaattcatatcatgagttttcatgatacatcaaacacggggcttggacttggtcttggtcttggacttgttagcttccatgatcaatcagagaattgcatgaagagtactaatgatcccttgagagaaatccataagataaaagaggtggagaatccatcaaaatgtggcagcacatgcccttctctgtcattaggaccaccagatgatgatgatgatgatgatgatgaagtgaataatcaaccaccaagttcaaaaactgagtcctatgaatattttcgtccccatgtttcttctcctagtgcggtgtcttcattttccaactcttctagcatcaagagggaaagagatcaggtcttgggaggagaagaatttgaggtagtggtagagaaagttccaacaagggttgttggtgatgttgatgaggatggtaaccccagaaagaaacttagactcacaaaagaacaagcagca

SEQ ID NO: 19263 - DNA, 590 bp, Glycine max
ttgggggtctccccccaaaatttcttaagggtcccatgctcttcatcattgcttttttgttgggtgcggctttcttttctaaaaggagaaaggctcaaatttgtaagccaatcatatgtattttatcgagttgagaagggtcaaactaaggcatatgaggaagggttaatcaagtaattatacagcagctttagggagagagaagagaatagtaatggcagaggtggacagagaaagaatccatacacattgatgatcccggtggatctagtagtggatcagcaatatcagtggccgcaaatttggtggcagggtcccttggtagtgagactgatgggtccattttatgcccttcaggttctaactcagtagtgggcattaaaccaacagttggcctcactagtatagcaggggtagttccaatcaccccattacaggacacagttggaccaatttgcaggactgtatcagatgctgctcttgttcttgaaaccattgcaggcatcgacgtcaatgatgaggcaacaatcaaagcatcaaagtatgttccaagagatggctatgctcaatttctaaagatagatggactg

SEQ ID NO: 19264 - DNA, 1191 bp, Glycine max
agaatgcattaacagctgttaaaaacatgtcatctgaaactcaagaaagtggatcaattggtcatgttgctgaaatgctgaaagctaatgctagtgaaatgtcaaacataacttctgcttcagctgttatcttgaaaggagggtcaattggaacttcaaggctttctgatgttaccactctagctattggatatgtttttatattgactctaattttctgctactttggaattgttgctttaattcgttacacaaagggtgagcctttgaccatgggaaggttatatggctttgcttctatagcagagacaattccatctctcttcaggcagtttttggctgcgatgaggcatttgatgaccatggttaaggttgctttccttttagtcattgaactgggggtatttcctttgatgtgtggatggtggctcgatgtttgtaccattcagatgtttgggaagacaatggttcacagagttcagttcttctctgcatcccctttagcaagctcattggttcattgggttgttggtattgtgtacatgctactaattagcatatttgtcagccttcttagaggggttttacgtaatggagttttatactttcttcgggaccctgctgatccaaactacaatccgttccgtgatctgatagatgatcctgtgcacaaacatgctcgcagggttctgttatctgttgcagtttatgggagtctgattgtgatgctggtattcttgcctgtcaaacatgccatgcggatggcaccttcgattttcccgcttgacatatcggtatctgatccattcactgaaattccagctgacatgcttctctttcagatttgtatcccatttgcaattgagcattttaaattgagaacaactattaaatccctacttcgctattggtttactgctgttggttgggcacttggtttgactgatttcttactgcctagacccgatgagagtggtaatcaagaaaatggaaatggggagccagctaggcaggaaaggctacaagtagtacaagctggagtgcaagatcagggtatggtgccatttgcaggcgatgatttgaacagggccattaacacagtgggagaaatgaatgctggagaggattatgataatgatgagcagtctgactcggacagttatgccttcgggcttcgcattgtgcttttac

SEQ ID NO: 19265 - DNA, 955 bp, Glycine max
  unsure (1)..(955): unsure at all n locations
gagcttgacggngatgccccccgccgtaagctcggatttcggctcgagacaaaagaagtgcagttcccaaatggcaataatctttctttcaagctccgcaattcttcttccaagtcttgctttctttctcacattatttaaccttgcaagttccgaatcattcatcggcgtgaactacggacaagtcgctgacaacctgccgccgccgtcggcgacggcgaagctgctccagtcgacggccatcggaaaggtgcgtttgtacggaaccgacccggccataataaaagctctggcgaacacggggatcggaatcgtgatcggagcggcgaacggggacattccggggctagcctcggaccctaacttcgcgaaaacgtgggtgaacaccaacgtcgtaccgtactaccctgccagcaacatcatcctcataaccgtcggcaacgaagtgataacctcgaacgaccaaaacctcgtgaaccagatgctgccggcgatccagaacgtgcagggcgcgctcgacgccgcctctctcggcggcggcatgatcaaggtctccaccgtgcacgccatgtcggttctcagggactctgagccaccctccgccggaaggtttcatcccgaatacgacaccgttttgcaggggctgttgtcgtttaacaatgccacgggctcgccctttaccattaacccttacccttactttgcctacagaagcgaccctggcagagctgataaccttgctttttgccttttccagcctaacgctggcagagttgactccaacaccaacctcaagtacatgaacatgtttgatgctcaggtggacgcggttcgatctgcgttggatgctatggggtttaagaatgttgagattgtggctgcggagacagggtggccctacaaaggagacagcaatgaggctggtccaagtcttgagaatgctaaggcttataac

SEQ ID NO: 19266 - DNA, 480 bp, Glycine max
aagagctacaaaatataataataatatatatatatatatatatatatatatatatatatatgtttttttttccttctcttcctgcttaggactttaagtaattatatatataattatatttttatatatattatatatactctaaagttggaagctttttattcttatgtatgatggttgtgttgtgtgagttctcaagggaagcaaagtcctatctttcacacctttcagtctcaaccgtgggaagaagaatctagggtttaacagcaccaccccaagtccatcaaggtctgtgctttggtgcttctttttttttttttgtttggtttggtttttcctttctcactgggaaattgggtcgattttttttttttgtcggaaggaggatatgctgcaacttgtgaggtaccctcagtttgttctgattccaaggttgttccttgttgccaaaaaacattgctttttttcttcatgagttgg

SEQ ID NO: 19267 - DNA, 344 bp, Glycine max
ctctcgcaagagctacaaacaaaatataataatagtattttggttcttctcttcctgcttaggactttaattaattatataatatgtatatagtctaaagttggaagctttgtattcttgtgtatgatggttgtgttgtgtgagttctcaagggaagcaaagtcctctctttcacacctttcagtctcaaaaccgtgggaagaagaatctagggtttaacagcaccaccccgagtccatcaaggtctgtgctttgatgcttttttcttcttctttttcactgggaaattcggtcgttttttttttctgaaagaggttttgctgcaacttgtgaggcaccctcag

SEQ ID NO: 19268 - DNA, 418 bp, Glycine max
  unsure (1)..(418): unsure at all n locations
ccacgcgttcggccagcgttcggccatgccgtcggcctttttctcttttagccgtccgaccggttggggagaacgccaaagggggttttccgaacccgttgatgttaggattaaggaagtagactagattctcggaaccaagctcaacgcggcatgttccggtattgccaatacagtcttgtccagtaacccgctagaacgattaagccagtgtcctgatgaatcccgtggaacctagtataggatctcgtctgaggatcctcggcattctgagtggatgtatgattcgccctaatccattaatcacaaaagaagcgcatcagtacaagcggatattgatcctgcaagtggagtggctctccatactacctacagaggtagcttgngagcacatgcctatctgtgtactgttctttcc

SEQ ID NO: 19269 - DNA, 480 bp, Glycine max
ggggttttaaaagaatcactaataaaataccaaatgtacaagcccattgacttcacacatttagacaaagatggaatagcgaccctcgggtcgtgggtagaaacgggtgatctttaagcgggtcaatcaacacctcaaatggcaaaagaatcctcgtattcccccggagatggattattacgagcgatacttggcattcagggatccacctcaaaggaaacttgtctaaaactacctacaggcggtaggggtagagttattgatgtgagatggatccaaaaaaaggggggttccagttataatccagaaacgattcgtatatatattttacagaaacgtgaaattaaagtaggagataaagtggctgggagacatggaaataaaggtatcgtttcaaaaattttgtctagacaggatatgcctgatttgcaagatggaagaccgttgatatggtcttcaatccactaggtgtactttcac

SEQ ID NO: 19270 - DNA, 416 bp, Glycine max
gaattttacagcaggggtatacaatttgaacaacagaagcccccatgggcgatccgcaagaagagcctggtccccagaaaccattagtcttgaatccaattcatatcaaagcaccaaagtgttcactgatgactgggagctcaattccccattttctgtcgtctcttcgctttatcaagaacctgacgcaaaattttctgtgcatgatcgtgtgctttcagaccaaattatagaagatgatgatgacgacgacgacgacgatattatgagctcctatgtcattgaactcaactccaacctcagaagggaagagtgtggagaatcagccattgatgaagcaattgcatgggccaaagagaagtttcaatcgcaaagctctgatgaagaatcaagcataagaaacgatggcaaagagc

SEQ ID NO: 19271 - DNA, 451 bp, Glycine max
gttttgaattcccgctgagaggacgcgtccgacagttcctcccaccatttacttcaatgttcttcgaacatccagccgcgcacgcctacaggctacaacaagcgcttgcggcgagcgtcttacaacaaccaattgcccaattacaacaacaatccttggcacatctaaccatacaaaccatcgcaacgcaacagcaacaacagtttctgccagcactgagccacctagccgtggtgaaccctgtcgcctacttgcaacagcagctgcttgcatccaacccacttgctctggcaaacgtagctgcataccaacaacaacaacgtctgcaacagtttatgccagcgctcattcaactagccatggtgaaccctgtcacctacctacaacagcaacaattgctttcatctaacccgctcgctgtggacaatgcacctacttacctacaacaaca

SEQ ID NO: 19272 - DNA, 413 bp, Glycine max
gcacggtacgaaaggacatccgaaccatctaatgacaaaaatattaactatttcaaaaccatctcatctaatgattcaaatttacttttgtactatctaagaaatctttcactttttgtaaaatttattttgttttactatataatcttgcatacttgaaaaaatcactttctggaagattttattttgtttaggatttttattcacatagacatgtttggtgggtatttaaataatggcgtaaaaatttaaattttttttattaaaaaatttaaaaaaggtcaaaaaaaaattttgctgaattttgtaaaaataggtagctattgtagaaaataacttgtattctcatgagaatattatatactcatccttattcatgagtagagcttgtttgaaacatgaagatataacat

SEQ ID NO: 19273 - DNA, 556 bp, Glycine max
gcaaaaatcacttctattcatcgtctgtccagttttaacaaatatcaaacgcacgccaggagaggaaaacaacacaaaataacagtgtttggactttggtagctcatgtctctgctgaatttctgactagtcattatctgaattcaaataattttgtactcatactgcgcaaacgcttgagcacatttcatatattttccaccaaaaaatacgaggaaaagtgcaccgtggaacacacatgttctctatttggtatccttgttatccctagcaatagacacgttgaaacatgtcaagtattccatactttcattaagaaacaaaatgccatcaaattactaatttccaatcagatacactagaaaaataacaatcaaccgcagggaactctccccccccccccccacaaaaacggggacaccatcttcatcgttccctgccctgctgaatacatactgaacatcagaagataattaatgcgcctgcatttacaaaagtcaaacgaatctggaacctagactgcatatacctgaaaacacggctgaatataggagca

SEQ ID NO: 19274 - DNA, 554 bp, Glycine max
taaggaagaagaaaaagaggccggaaagataagctgccatggatgctcctttaacaacaaccaagagagaaggttttggattcctactcctgcacagatccttgttggacctatgcagttcgcttgctccatatgtagcaagaccttcaatacgtatgacgacaggcgcgtgcatatgtgggggcatggatcagaatttaggaaaggaccagactcactcaaaggaacacaaccagctgcaatgttaaggttaccatgctattgctgtgctcaaggatgcaagaacaacatcaatcatccaagggccaagccattgaaggacttcagaaccctccaaacccattacaaaagaaaacatgggacaaagccattcatgtgcagaaaatgtgggaaaacatttgcagtcaaaggggattggaggactcatgagaagaactgtggcaagttgtggtattgcacttgtggctcagacttcaagcacaagagatccctataggatcatattaagtcttttggaaagggacataaccctcatccttcctttgaaacttttg

SEQ ID NO: 19275 - DNA, 526 bp, Glycine max
caacagaacggcattgcaaattacaaacatttccccaaccttctatacgaatgccagttcgtcacacctccaccaaagcataacaatgctcaattcctctttcctctccctttctgaacacaccttttcccacacaccccatcatttcccaacaaggtctgcttctcaaaaccccaaccttcatccaaagtttcaatctttagcctttggaaaccgtggagggagtgaatttccatctgggtcttgctccaatacccccagaagaaaaggggtgttggttgtgcggtcaaagtcaacgcttggagtagaagaagtggtggtaaagggaggaggagtggagggtaaggctgaagaggttgatgcaattgtgatagggtctgggattggagggctggttgcagggacacagctggcagcgaagggtgcccgagttctggttttggagaagtatgtgatttctggcggaagctctgggttctaccagagagatggctatacttttgatgcggggtcttatgacatgttt

SEQ ID NO: 19276 - DNA, 288 bp, Glycine max
ccgtgggcgatttcgcaaaggttttccaccgttcttcatcgctcttcgttcgttcttcgtcgttctccggtcttcaaccggtaagttccttgaaataaaacttttcaattcattctatgtacccttagaggtccccatttttttcgcatgcttttatttttatttcatttattttccggacccccttttgatgtgctttagtcatttatttaaagtcgttttctcgtctaatcaaaaataaaataaatttgcaccgttcatttgaattggaacatcttttaatttttg

SEQ ID NO: 19277 - DNA, 431 bp, Glycine max
ggcgaagacgacagaagggggagtgatactgctttgcattgattagggtttaggaagcggttctttgagtgaaacacgaaggaggaatggcgtctctgagaagtggagcttcttcgttgttgactcggctatccaaatcgcttcttcttcattccaaaaaccctaatcctcattctcagttattactcccttctctctcacggctccccggtgcgatttctccccaaaacgacgccgaattcccccacaaacaaggctttctctacccctgtggcctcccctctctccgcttcttcttacctcaaggggacgctccttcatcagatgatcctatgcttttattccccaaaagaacgtatcaaccaagcgttattcgacggaagaggaaccatggattttttgctcggaaagcaacaagggtggcagaagag

SEQ ID NO: 19278 - DNA, 442 bp, Glycine max
atatgatggaagcagaaaaaaattgtgttgggggagaatttgctttgctatattcatttattgcattggaaaaactcctggtatgccctatttctcttttcaaaggagcatgggagcggtggtgggcatatatccttctcaccttgcaccccaccgttgcattgatctctttgtgcacatgatggaacttaggctgcacaacagtgtacatgtcaaatacaagatattcctttccgctatggaatatttgccattttcttctatggatgattccaagggaaattttgaagacattattcagagaattttgttgagatcccgagagatcaaggttggcaaatacgataacctgtcagatgttgcagaacaacacagactgcagagtcttcaaaaagctaaagtcatccagtggctttgctttacaccaccatcaacaattact

SEQ ID NO: 19279 - DNA, 583 bp, Glycine max
acgaggaaagcttcggatttttgcagctgtttgaaggctaactcttgggattgcaccacctgtttgagaagacgagtggttgatgggctctgccgaacaggattcagtaccaacctttgcatttcaaaatgggaaaccacaaaaaagtttccaggaggtgcggtgcacacacatttatttatattaacaattagataacagtatgattttaccatgtaattttacagataaaatttaaactcatttaataatgttgtagtatgagaaagtctaatttcatagtatattatatcttccgcttgctgcttttgtattttaggctgtcacgagtatattgaggtgattgcaaacacatcaacaatgaagaagattcattttctggtggaattggaattgaaggagcagtttcagattgcaaaagcaagtgaaaattaccagaatctagagtcctgtttgccagaattttatattggaaaaccggaatacttaactgccattgttcgagttatgtgcaatgctgcaaagaaatcaatgaaggaaaagaaaatgcacgtgggtccgtggaggaagagcagcttcatgc

SEQ ID NO: 19280 - DNA, 448 bp, Glycine max
gacagagaggcaaatataaagaagaagagaaatgggaaaatagagtactttggtgaagaacaggagatttcctcattcttagtttgtctcacaacaaagcagcttcaaaacgagggaagtattcataaaggagaatacagagaggcaaatataaagaagaaaagaaatgggaaaatagagtacttgctgaagaacaggtgctttcctcattcttagtttggcccacaacaaagtgatgtaattgtacctagtgcaatgaaaatcaaggtcaaagcatggacgctgtgtcatccgcactactagagccagtaactaattctgtgttggatctggcttaaaaagctactggattacatccgttacaggcgaaactttgatgaactacgcgagtgtgtaaagcagcttaaacttgtaaaggagaaagtagatcatcaatgtgaggaagctt

SEQ ID NO: 19281 - DNA, 385 bp, Glycine max
gaaggggggagtttggagtttcgagatcgagagagagagagagaaagcgccatggattcttcttcacacatggcttcgcttccggaagatatcatcaccgacgagcatttacaacagcaaactcaacccgcctcagcctctgctttcgcttccgttcctcagcgcccgccaactaagagctcttcagaaaaatatgcacctttagattggtccgtgtattttgacaaagaagacgatgttgcaattcccgaatcgaacgatgtttttcatgtttacacggcaagaactgagggtcccgttgtattctgtttacacggtggtggttattctgggctttcttttgctgtctcagcaagtaaattaaagagaaagctatggtagttgc

SEQ ID NO: 19282 - DNA, 268 bp, Glycine max
gggtcaaaatctcggatttatcgcttctagctccctgtgtggcaatttcggtcgctttgctctgattctgattttatgtgttccaatgtctctctggcttgcatacgccattcttattttcagatcagcatagcctagccggttagatatggcagtcactatggcactaatgaccaggcagcatctgctgacctacatctaccttctagtttacatttcactttcatcaggggtcattctgtccaacaagtgggtcctctccacattg

SEQ ID NO: 19283 - DNA, 658 bp, Glycine max
gcaacatgttgagcctagggtaaggagggtggcattatatcgtggtgctgagtacttggaacggtacttccgtcttattgcttttgcagcatatcttggaagtgaagcatttgatgggttttgtggacaagcagaatacaaaatggcatttaagaattggatgcatgaaaggccagaggtgcaggctatgaaatggagcatcagattgagaccagggcgattttttactgtccctgaagagttgagagcaccacaagaatctcagcatggagatgcagtaatggaggctttcgtcgaagcccggagtggttctgttcttgggaaaggctacatactgaaaacgtatttctttcctggtcagagaacttctagccacatacaaatacatggtgcaccacacgtttacaaggttgatgaattccctgtgtatagcatggcaactccaaccatctctggtgcgaaggagatactatcctatttgggtgctaagcctaaagcaaatgtctcatctgctcaaaaagtgatattgactgatctgagagaggaagcagttgtctatatcaaaggcactccctttgtcctaagggagttgaacaaacctgttgatacactcaagcatgttggaatcacttgtcctgcagtggaacacatggaagca

SEQ ID NO: 19284 - DNA, 396 bp, Glycine max
ggtggttgttggcaagacaaatattttaacattactgggtgcaaggacactaaacgaggaagagtatatgaatgccaaatagttcaaaatgtgaaatttgttggagatggatatacccacggcgcagcggcaggatccctgagttgtcaattcaacgatggtggttgttggaagggagcccaaggtggcagggcttactcggcttgtcttgatgactatagaaaaggttgtacatgtccacctgggttcagaggtgatggagtccagtcatgtgaagatatcgatgagtgcaacgagaaaacagtctgtcaatgcccaggttgcaaatgcaaaaacacctggggaagttactagtgcaaatgcaaaagtggtttgttctactcgcgagaaaatgac

SEQ ID NO: 19285 - DNA, 359 bp, Glycine max
gtcttcagggagggagtgtgtgtgtacgcccgagcgctttcaaacacaacaccctaccctctgcttcgttcccatgtcgtagtcgccgtgcaagtgaaaatgttgcactgcctttgggtggtggacttctgaataggccggggttgtttccctgtctatgtattgtcacgagattgagagatctgctgtgattaggttttgatttcaactcactgatggagtgcaacaaggatgaggctataagggcttggcagattgctgaaaataagatgcaagctggtgactttgaaggggggctgaaatttgctacgaaagcccaaaggctgtttcctgagaatcagaacattcttcaaatcctt

SEQ ID NO: 19286 - DNA, 1074 bp, Glycine max
gctccatccacctttttcaccaacccgcatcacaaccatccaacggcgcaaaaaccttagaaggtgactgcacccttgcactctaccgcaccagaaaactttccatctcccttatcctgtgctcatcgctacggccgccactgtaaccacaatgacggaagagcctgaaaccaatccaccgccgccggaaccttcaatcccatccgcaccggccgccgtggaagaaacggcagctccggttacggcaacaacgtcgcaaccaagcgctgaaatcgtcgtccctcttgcgttagctccgaagcggcagcgccgtccaagcgttcgtctaggggagatcggcgaccaacgtgcctcctcgcacacggccacgaattgcacatgcgacgcccgagcatgccgccatggagctggcgtactccgaaggaatcttcaagaacctcaaaagcgcgctccgtgacgaacctcacgaacggcggcgaagagttcggaaacagcaacagccgaagagggaaagcaaaacgaggaccagcgacaaagagattgagaacaaattgggctccgacagcaacaatcgacgaaaacggtgacgaagaaggtttcagggattttgaacacgaacacgaacagagtccggtgcactcggtggaggacaacggagtggattattggcacgtggatcggaacgaggatcttagggttagggtttcggaaaacgacggcgttgaatcggagtcgcgggaacggaggaagagcgatggagtgaggtcttggctttacgagttagggttgagtcggtatgcgcctatgtttgagatccatgacgtcgatgatgagctgcttccgatgttgacttcggaggatctcatcgatatggggatcaatgctgctggttcaagcaggaatatgtacactgcaatccagaagctgaggaaatgcttgctgtgaccacatgatcaaatcaagatgaatgtatgtatatgtatatgtatgtgtagtttttctttgttctggctttcaaatgtggatagaaaaacgcatgtatgtaatgtatgcatgtacaagagtttttggggt

SEQ ID NO: 19287 - DNA, 454 bp, Glycine max
agaagcttggatagggatatagtggagagtagacttacttttgcaggttttgtggtatttaattgtcccataagatcagattcagccactgttttagctgaattgaaagaatcctcgcatgacttagtgatgattactggtgaccaagcgttgacagcttgccatgttgctagccaagttcatattatatcaaaacctacattaatccttggcccggcacaaaatggtgagggatataattggatgtcccctgatgagactgaaaacattcgctacagtgagaaagaggtcgagtctttatcagggactcatgatctctgtattgggggtgattgcattgagatgttgcaacagacatcagctcatcttcgagtcattccttatgttaaggtttttgctagagttgctcctgagcaaaaagaacttatcatgaccactttcaaaacggtgggac

SEQ ID NO: 19288 - DNA, 846 bp, Glycine max
gttccggcaggctgccacgagataccagagggagacgtgggtgaaggtgttgtattatttgagggacgaggggttgcatgccagtggggggttttcatccggggtgtccaagagtgctctcagggataggtttaagactttcaattccatgtttgaggaggttcacaggacgcaggcggtttggttgataccggattcacagctcagggaggagctgaggatatctatatcggagaagctcattcccgcgtataggtcgtttcttgggaggttcaggagctacattgagagtgggaggcatccggagaattacatcaagtactctgtggaggacctggagtattgctgttttggacttcttcgaagggattcctgtttcccagcacttgagaaggagatctgaatgatggattcaatgggactagtggagtcaagtcaaatggagttttgcaactttagaagctaggacatattcttttaattttttcactggagcgttcgggtaattgagattgctcaagctctagggtgggtgctccaacaatgatccaggattctcaggagaagaaagattaagatttcccttatctggtgttgaagattggtgtggcttatgaaaagccaaagtagctacctcaccctgaatgctgctctgcctgtaagcactttatttgatttctcaacacattctagatttttgtttcatttgtttatattggaatttgttgtgtgtgtgtgttttttttaattcattttctcttacggtcgaaaaagggctgcttcttttgtagcttcaaatgactcttatacaatgtgatagttttggcactaaatagatgcattgtc

SEQ ID NO: 19289 - DNA, 407 bp, Glycine max
ctcaaccctgtcttttggtaattgattacgctttctggtgatcgattaccagagtcttgcgtgtcttgaaagcacattgttttaaggcagggcttggtctttagtgaatcttgaaacaaggctttgtttgttgaagcaatcttgaattattcttgaagcaaatgcttatcatttgaagcagccttgttagattcttctttgaccttcatcaatatcatgtatacatacattcacatctcctacctgaaagcacatttgtagagattgagagatgtttgacactttgaaaaccaatagagaattcggtcatttcatgttacggaatggtggtaaaatgaaggttgaaggcatatggagtgtgaggatgaagctttacgatggtgtcatgcgaactttctcatatgtga

SEQ ID NO: 19290 - DNA, 447 bp, Glycine max
ggattcacaacagctactccagctcttttgcatcgctcggagcagaagctgctgctgcagcttattaaagaatgaaagcctccatcacacgatcgttcagatggatggcgttggcacgcaagtatcttcaacaaacacttaacgtctccatcgacatgcatcaacacggaatctctaagtgtttcgacgacgatggtcgcccgaaaagaaccgggacggtgtggacttcaagtgcacacataataactgcagtgattgggtctggggtgctatctctggcttgggctatagctcagcttggatggattgctggtcctattgtcatggttatcttttctgccatcacttactacacttccactcttctcgctgattgttaccgcaccggtgatcctgtaactggcaagagaaactacacttacatggacgctattcagtctaactttg

SEQ ID NO: 19291 - DNA, 727 bp, Glycine max
  unsure (1)..(727): unsure at all n locations
ggcatttacacctcccctgactgcttatttgcttcaaggacttcattctaaatcatgtgcaaataaaaaatggtgtttcacctgcgaatttgaaagattgatattgaagtcaaaggacacaaaatctgcggtgtctcctatgggcataatctcccatctacagaatattgggagtcagcttgctaatggaagagaagaagatgcacatgaatttcttaggcttgctgttgacacaatgcaatctgtttgccttatggaagctggggttaacgcgtcgggctcattggaagaggacactaatttaatgggcctaacatttggaggttacctccaatcaaagataaaatgcatgaaatgtggagggaaatctgagcgtcaagaaaggatgatggatctgactgttgagatagaaggcgagataacaaccctggtggaggcccttcgacggtttacaagcactgagactttagatggggaaaacaagtaccactgtgtcaggtgtaaatcttacgagaaggccgagaagaagctgacagtttcggaggcaccgaatgttcttactattgcattaaagagatttcaagcgggaaagtttgggaagctcaataaacctattcggtttccaaaaatactggacttggcacctttcatgaatgggactagtgatttgcctatatacaggctatatggngtagttgttcacctggatatcatgaatgctgctttt

SEQ ID NO: 19292 - DNA, 573 bp, Glycine max
gcctcacattgcagaacagtttgtacactctcttggattaagttttaatccttacgttgctcagattgaaactcatgactacatggcaaagctttttcattcgctcatccagttcaataatatattaatcgattttgatagagatgtgtggggctatatatctttgggttactttaagcagaccactaaggctggggagattgggtcatcaactatgcctcacaaagtgaatcctattgattttgagaacagcgaaggtaatctaggtgtagctaatggaggtctgtctcatctaagcatgaagttgccgatttcacgttggcagagggacttgactgattcaactgtcttaaggaacatgggtataggtataggtcattctcttcttgcctacaaaagcacacttcaaggaatagggaagcttcaggttaatgaagctcgcttgagtgaagacttgaaccagtgctgggaggtgcttgctgaaccaattcagactggtatgcgaagatatggtgttcctgagccttatgagaagttaaaagaactacccagaggaagagcagttaccaaaga

SEQ ID NO: 19293 - DNA, 271 bp, Glycine max
gtggtgaacaggctcccgaggcagagtatgaggaagtcaagaaatgacatttaggcgtggttttgtagcatttgtttcttattaatcatcacataattgcaagaatacaaggttacttcttttgtatctaatgttgaaaaccattttttgctggaaggctctttaatttgtagcacttttggagtccaaagttccgaccacacggctggcggaagatataaaaaaaaagggggggcgccccactaggggccccactcgccgcgaatttttt

SEQ ID NO: 19294 - DNA, 664 bp, Glycine max
tctcgagccgatccagaatagaaggagcatgtccatcaccaccttccttctcctcctcctcctctcgccggcgatcaccgccaccccgacggcgtacgagatgctggagagctttcactttccggcgggtattctccccaagggagtgaccggttacgagctggatccgtccagcggcaaattcagcgccgatctgaacggttcgtgcagtttctccctcgaaggttcgtaccagttgagctaccagaaaaccatcaccggctacgtatccgaaggcaggctcaccgaactccgcgggattagcgtgaagatcctcttcttctggctcaacattctcgacgtcgttcgcgtcggcgaagacctcgatttctccgtcggcgtcgcctccgcttcctttcccctcgataacttcttcgtctccccgcagtgtggttgcggcttggattgcgatgattttcgaattaggaaactcgatttgggaaaccgaaaaccctccctttcctctgtgtagaaatcaagttccaattaaactctcctttatttaattatgattattatctgtggacgcttgtgctctatgatatctcttgttagatgtcgattttattagtactaatatatattattatagtatgacatattaaaaaaaaaaaaaccccccccc

SEQ ID NO: 19295 - DNA, 619 bp, Glycine max
  unsure (1)..(619): unsure at all n locations
gtgctggtaaactttttgtgataaaaacacccctgaagttgttgaaacttcattagcagtagatgatgacaatgtacaagacacaaacctggtgcaggtctcgacagtaaagactgtggagttctcagatcatagagctgttaggtttgaactaccaaaagatgttgttgatgacaatgctgctgcaactgagactctgaatcgtgtggaggaaaatggtacaccagaatatcaagatgaagatggaagcacaatccatgaagttgaaaatgatgatgatgatgaggaggaggaggaagaggaggaacatccgggtgaggtgtccattggaaagaagatcttcagattttttacaacgtgatggaagtagttatatcacaaatagatatacatatgtcatcattccttatttaggagattaggcatgtaatattacttcggagtaacttccatgtttgttttggcatttattactggcagatgagaagcattgttctgctgcctgtgttctcaataactgttctcttgcgaaaagatttgctgcttaagaaaggatggtgcttgcttcttcccaaaattgnnnnnnnnnnnnnnnnnnnnnnnnnnnnnnnnnnnnnnc

SEQ ID NO: 19296 - DNA, 1229 bp, Glycine max
ttcgtacatgctaattttcaataattggaattacaaacagaataatgaacttttttaaaaagaaaaaagaaaatcaaaatttcatcattgctattctatttacaagttctaacaggtaaaatcaaattaagagctccgtaaagtcccctacacttcgaaaatgtggcgacccgattcaactgaacaattccacaaccttgcaatttgcattgagcacggaaaatgagacactattattcgagaagcgaggagcaaagcacatccaaccaaaaaaaacaactgaccctcgagaataaagtcaataaaccctgatccatctattaacatgcagggtaaggttggttagtttcagaaactcatgataaatcaaaggatccctggccctcactgattgcatagagcaacttcttgtacataatttccttggtagagtaaggaggaagtttcaggtaatttgcacacgtcatcacacttggcaagtcatcatccgctgattctgaaggtccgttcccattagatgaagcattagctgcacttgatgaaagcttcctcacaatcgttaattttggatttagaactgccagtccaccaggaggcaacctaggtgcaccagtaacaaattgacagaaggcacgctgttgctctggtgtgaattctcccataattccgagtaaattaactatggcagggctcttggcagtataaccatggtcaaattttatatgatcggctagtgtctcagtcttccacaattctctccggccacaaagcaagtaatccagttcttggggagaaaaaatttgtaaagatgagatgtcaaaaacctgattgaaccctgctctaaatgcttccatttgacgcatgattccagtcttaacagttgcctcaaccaccatggatatgtactcctctagattattgatgtcaacaatttcatctccaggtttcaagatgtactctggataaccaggaagtgtgaagtccaagcagagatcttctattggggccccgcgaaaatgcaaattagcaaaggtatcggtgtagctaccaccagtagattctatataacgtttccggcaaacaagggcatttacctcttgcaaagttttcccaagctcagcatcaatgaaaagaatgtcatgcaaatcaagctcttgaccaagaacaagcttataaaatgccactgacattggtaaatccaataggagtccatcttgaagagccttagc

SEQ ID NO: 19297 - DNA, 276 bp, Glycine max
atgatattaaacataagctggatggaagagttatggcatggatatagcttgatatgcaataggagatggtacagagtgaattggattctgagaatgttgagttcacagtgattgatgatctgggtagtgaaagcctaggtcctggcattcgtagagaactttcattttcacgttggtgtgatgatgatggaaggatccatttggatcagcaattaggtaatgaagatgctggtgtataaaatgactccgattttgagttaccgttttcctgaaaag

SEQ ID NO: 19298 - DNA, 564 bp, Glycine max
aggaattataaaaggctctggttatctttgtgggtgtcagtcatgtaactatacaaaggttctgaatgcttacgagtttgagagacatgctggctgcaaaacaaaacatccaaacaatcacatttattttgagaatgggaagactatttatcaaatagtacaggaattgaggagtaccccagaaagtttgttgtttgatacaattcaaacagtttttggtgcaccaattaatcagaaagcatttcgcaactggaaagaatcatttcaagcagcaacacgggagcttcaacgcatttatggaaaggaagaacttaacctataagtcccaaccctttgtgaaaacgtaacttaggatagattctagtgtgcatagtaagatatgtcagtttttaccatttttcctgtgtctttatacggctccgcaacctttagtaatgtgcacctttggatgccttgcttaaaatattcgaagctttataagttagcttatgtacaaatcagtgcaaggtgctttggtggacagaattatctattacattatcgataaagcttatgttcttgtgt

SEQ ID NO: 19299 - DNA, 338 bp, Glycine max
ctcggcgtcacaagcttgaagactcaacaaatttcagtaccaaaatccaaccaagtctattctactatccatcattgtctgccacatcttcccttagtactagaaatgaggctgccacaactaaacttgttcttagtgtcatttttgttgctctgtgttgccagagcaaacggttctctgctcccattcatagatcctcccaccactctcttggctgatctctggtccgatcgcttcccggacccgtttcgagtgctggaacagattccatttggggttgacaaagatgaagcatccatggccatgtcacctgctcgagtggactgcaaggagacccc

SEQ ID NO: 19300 - DNA, 460 bp, Glycine max
gaaagttgattgggataaatgggttgatgaagatgaggagcaagataataaacctgcagcatctgatatggactttggtgacattgatttttctaagttgggcatgggagggggtgaaggattggattctgatgctgcaggcaatgacgatgctgatgagagtgacacagaagaggagtttgtagctgaagcatctgctagtaaagaacaagatacgaaagatgctgtaagcagcgatgcaaaggatgcacctgatactaaagcataaaaaaattcgagaatggtgaacggtaacatagctttgactatgtaagggcaagacaagcatttctgaaaggttgcttaccataaatctttgcagggttaactgatggttcagtgaccctggatttttaacaagctagacatatgtgttggccatacataatacaatttgagaatggaagtgttattatgtctt

SEQ ID NO: 19301 - DNA, 996 bp, Glycine max
attcatctcaaggacaaatgagaaacattctgaggctgctgcagcttacattgagacccagcaaacaaaagctagagagcaacaacttcaaatgcagcaattgcaacttatgcagcaacgcagtgcacagttacagcgaagagatcctaatcatccatcccttggtggttccataaatgccatgaactctgaaggaatgttggggcagccacctgcaagtgtgttggcaatgaaaatgtatgaagagcgaatgaaacaccctcattcaatggattcagaggcatctccaactcttattgatcccaatagaatggccttactcaaatctgcagctagtcatcaaggccaattggttcatggaaattcagggaatatgtccactgcattgcagcaagggcgggctcctttaaccactgacatcaaaggagaagttaatttaggcgccactccaaagagtttgcctatggatacatcggtttatcgacaagcaattttacattcaaaatctggacttggcagtgcaggattaaatcaaggagttacaggtcttccgttgaagggttggcctctagcatctggaattgatcaactaagacctaatttgggtgtccaaattccgaagcccaatttgacagcccagaatcaatttgttttggcatcacaacagcaacaggtcttggcacaggctcaggcacaaaataaccttgggaattctaattatggtgacatggatcctcgtagactttctggtcttcctcgaggtagcttaagtgcaaaggctggtcagtctcccagaaatgatggatctatttgctcccaaatgcagtcagattcacctacgatgaagatggctcagtcacaacattcattatctcattctccacagcaggagcaactacagcagcagagtaacaccaaaagaaaatctggagctgccaatagcactggtactggtaacactgctgctcctttccctacttcatcaccatcaacaca

SEQ ID NO: 19302 - DNA, 798 bp, Glycine max
agtatctgttgcagctgatgagagttgcagaagcatagttgatgtttacaaaattgtggaagggaatgttttagatgtcattaacataaagcttgccaaagttggggttatgggtgcccttgaaattattgagaaggcaaaagcagcaggtttagatttgatgattggtggtatggttgagactagacttgctatgggttttgctggccaacttgctgctggccttggctgttttaagttcattgacttagacacaccacttctgttgtcagatgatccagttcttgaaggctatgaagtttctggtgccacttataagttcacaaacgctaggggacatggtggattccttcactgggacaaccttgcttaatgtaaaagataattatgccaacacaagaatctggaaaagcataaatggacaagttggttaaaaattgcctaattaaggtgtgaaactgtggttacagtacaaccatacgtgaagatttcttgtccggaatgagtagccaatacttatccacaattgctatgtttttatttttatttttataagcaccccaattgctatgtatttaacttattcgattcctcacccttttctgtaaaagaaactgccttcgaggtcttgcaccaaatagtaactagttcctactttttctttttttttttgattggggaataactagttcctacttgctaaaagctaggaaccgcatatgatatatatgagatatggatgtaatatgatatgaacatggaaatacagcaaatttttaaaaataggtttaattattg

SEQ ID NO: 19303 - DNA, 310 bp, Glycine max
caacaacaacaacaacaacttctttttttccctctcagactctctctctccttaccactgtttcatgcaaaaccatttctagggttttcggttttctcgccattcttcaattctcgcgctccggcaccgcttcgccatggcatttccgaccaagaagctcatcgacgaccccaatgctgttgtgactgaattcattgaaggtcttgtggagacatatcccggactacaggatttagatggctttcctctggtgaaggttggcctacgtgcagatgtttcagctgcaacatatgataaagttgcaatcata

SEQ ID NO: 19304 - DNA, 367 bp, Glycine max
acgacagaagggcaattttccaatttctgcaggaaatatctcatgcctgtgggttggccagaaatgctgataaaggtggtagtcccacaaatgatttgctcaatatcagtcaaggtcccgagattaaagacaagattgtacttgatggagatgcatcatgcctcctactggatgagtatttactgcaaacacaagtcactgctggtacagttcagggggctatcttggatgatgtgaccaccccaagctctcctgatggaatttcatgctataacgatgctttgctatcctggatattttcatgttcacctatttggggatcagttgacatcatggctgcggaccagagaagataacctaaataagg

SEQ ID NO: 19305 - DNA, 414 bp, Glycine max
cccacgcgttcgcccacgcgtccgcccacacgttcgtccacacgttcgtaccggtgtgagaggacacacacaaagggaatatgtgtttactctaaagacctcaatccaattatgcctcactagtttctacattttgacttaaaataaaaatattttaaggagcgattggataatgaatcaactaaataattatccataagtaattgatccaaatgaaattaaggaaccattgtaacaattattttatgataaatatagtgatacacttaaatttgttataagtaggataagagaatgtagctaagattagtcttttgtttataaataaaatacgaattcaccgcgtttattattagtattcttatctcttacaagggtgaaatcttgttttggactatgttaagaatatcatat

SEQ ID NO: 19306 - DNA, 345 bp, Glycine max
gaacaacaaacatcgaccacgggtgcttgtcgggggttctcaaatccaaaacctcgcttcactcgattgggcgtgtgccttgtcgtcgtcgtcgtcatggcgacgctgctaagaaaactgtgcgaatcggcgacgatgaagcgatccggctctcactctcaccctcaccctctcccgtcctcggaacaagcacgcccatcctcccctcttggcgccttcgaccctctccctgccgacatcctcatgcaaatcgtccgcctcttaggccccaaacacgctgccagactctgcctcgtttccaagtcttggcggtcactcgtctccgacaacaccctgtgggcccac

SEQ ID NO: 19307 - DNA, 429 bp, Glycine max
gctgatatagttacagggactcgttatgttaaaggtggtggtgtgcatggatggaatcttatgcgtaaactaactagcaggggggcaaatgttcttgcacaaacacttttatggcctggtgtctcagatttgacaggatcttttagactttataggaaatcagtgcttgaagatatcattagttgctgtgttagtaaaggatatgtctttcaaatggaaatgatagtacgggcatccagaaaagggtaccatattgaagaggtcccaatcacatttgttgatagagtatttggaagttcaaagcttggtggatcagagattgttgaatacctaaagggcctagcttatctcttggtgacaacataaaaggataaatcataacaactcgatataccttacattttgggggaaaaaaaagggatataaatt

SEQ ID NO: 19308 - DNA, 783 bp, Glycine max
agccggcacagtgggaatgttgcaattggggtccacaactggtggtttcagaggagcttctgggttaatgcctctgggcttgaatttggaacaagctgccttcctaagacaccaagttaacgttgacgacgacgttgttcatgttaatgttgatgatgccaccatccaccaacatcacctcactctccataacaacaacacctcctcatcaccctcttccacggcaccaatcaccgatagggattctatgcatatgaggggctgattttccgcgtttggacaactgcatactcctatccgccccacgctgccattgcctccaccacctcgtcagccacaactccacctccaccatcataaccaacagtttcagggccaggcagctgcagctccagcgtcaatggctgctatgccacaaccacctgggatccgccctcgtgtgagagcaagaagagggcaagctacagatcctcacagtattgctgagcggttgcgtcgtgaaagaatcgctgaaagaatgaaggcattgcaggaattagttcccagcatcaataagacggacagagcggcgatgcttgatgaaattgttgactatgtgaagttcctaaggctccaggttaaggtcctgagcatgagtagactgggaggagctggtgcagttgctcagcttgttgctgatgttcccctttctgcagtggagggggatcaggacatagaaggtgtatccaatgagcaagcctgggacaagtggtccaatgatggcacagaacaacaggtggctaa

SEQ ID NO: 19309 - DNA, 540 bp, Glycine max
actgagggtgaaggggagcaacaagccatagcaagttgaaagactttgagaatgcattcttccgtcactggaatgctatcatctctgctgttcctgagaagaatggcaggatggtataaatcagcaattctgtgtccaaggactgcatttctcatgaaatttggcagatagaaatcctcatcaggagtcggatgctcgttgataggttcctttcctgaaagcaattccagcaagatcacaccgaggctatatatatcagtcacttcactagcatccttcattttgatgagctcaggtgccttgtaaccctgagctgctgaattttcaagcatttcttggccagcagtaggattcagcagaagatgtagcccggaatccgagatgtatggctggtaggagcggtccaaaaggatgtttttagacttgaggtttccatggataataggcttctcctgtgatgtgtgaagatgctctaatcctttggctataccaatggatattctacatatgttagaccatttgtagcactctccatttccg

SEQ ID NO: 19310 - DNA, 467 bp, Glycine max
cccacgcgtccgcccacgcgtccgcggacgcgtggggtgggatctctcaagcaaagcttgaggcaactagaaactctaggagctcaaagggctggtcttgaagatatgcttaaagagatgaaaagaaaggatgatatattacccaagttgatgacatccaccggttcttatgatgatctcttcaagaaggagatagcaaaatatgaccatatttgtgaagaaatagctcaaaatatcgaggcacaagagcaattgttgctgcagatccaggctcaaaatgatgagttttctgttatctttaatctcgaagattacaaagcttcacgtgaaaaagcctacaagcagattgaagctgccatagcaaaatttagagaaataaaggacaacatcaatgaagggttaaaattctatgttacgctgcaggatgcaatcacaaatgtaaagcagcagagcaacgactttgtgat

SEQ ID NO: 19311 - DNA, 476 bp, Glycine max
tttgtatacccgtaacccatctaaagcaaactaatgctaatgcatataagaaaagaaatattcccctctatcttctagattcttgattaccactgctaactaattcccaagtaactagcaaatacaagctacctttttaatatttcatgcttcttgagagggtggaccttgcctgtgaaaccaaaaaaattcaggttatctgccattatggttgaatacttccctttgttgggggttggtatttgcttctgatagatggtggaggaagtgataaattttaatgatgtgattctgataattgtttgccgttgttcacaggctcgaaatgatgagttttctgttatctttaatctcgaagattacaaagcttcacgtgaaaaagcctacaaacagattgaagctgccatagcaaaatttagagaaataaaggacaacatcaatgaagggttaaaattctatgttacgctgcaggatgc

SEQ ID NO: 19312 - DNA, 575 bp, Glycine max
catactgaaggcgacttcgatgtaatgaataggggtcaacatgaatctaatacacatattgtaaatgaatttgacagacacaatcacacttttattataacagagactcactccccacttgaaacacccagaccacctggaaggtttagagtaaatgttacaatcccaaaagtgtgattgtggtgaatttcaggctaaacatttaccgtgttctcacgtcatggctgcctgtaaatctgtcaatgttgatcccatgacctatgtgccgatgatattcactttacaacacattcttgcacatctacgacaactcctttggtttattgccacacgaatcaatgtggcaagaatatgaaggagatcagtgcggtcctgatccaaggagaaacaggactgcaaagggtcgtcctgtttcaactcgcattctgagatggtcgaagccaaaaatgaacgagcaagtagaaaaaaatgtggactttgccggcaacatggtcatagcagaaataattatcctaatgtatcctcgtcttagtttttccttagacaaatgtcattgtttaaatattttattgatg

SEQ ID NO: 19313 - DNA, 645 bp, Glycine max
tctcgagccgattcggctcgagaagatccccgaggtctttaaccgtacgatgcaatcaaacacaatgcagttcactagtatttacgaaacatcaagcaaggatggcctcactattatttgctcaaaaagaggaggagatatgttcaagcacagtcactcaatttggcttcagacagtgccgtctaaccctgaagcaatcctcttcaagtttgttccaatttcctctcttctgacaggaattcctggaagtggatatcttagtcatgcaatcaatctgtatctacgctataagccttctcctggagatttacagtactttctggagtttcaaattccaaggcaatgggcacccatgttttgcgagctgcctctcaggcatcagaatagaaagactgcttctccttccctgcaatttagtttcatgggtccaaagcttcatataatctctacacaggtggtaagtgaacaaaaacctgtggttggcatgcgcatgtacttggagggcaggaaatgtgacagacttgctttacatataaatcatctttcaagcctcccaaataaaatgatcctctcttcaggaacctcaaccttgagtacaccatcgatgtggcgaggatctgatgataatgaatccagtgatcaatt

SEQ ID NO: 19314 - DNA, 561 bp, Glycine max
ctcgagccgcgacaacacaacatccactgtctctctctctctctctctctctctgtttcaacgtttcacaaatcacacgcaagcggcgatctgagtggatgagatgtgaaacttcgcagctgatcaccatcgccttcttcctccccttgtttctaaccaatcttcaaattccatgtttttttaggtatgaaactttatttccttcctttttatttttcgttttaactttttataatctttcaattatccttttttttccctctctcgagattatatgcaatgtttgccttgctatggattctccaatatttcagaaatctaactatctaactgtaaaatatgcttttgcatcccttttttccgtctttgggtttattaggcttcgattattttcatgtgaattaacttcataagaactatttcgtccataaaagaagagaaagttgtaagagcaaacaagttcactggagaacccaaaggcgtcgattttgggttagcgtatgcaaattttactttggctgcagaaagaaatggttttgcttaaaagtctatttgtagtaa

SEQ ID NO: 19315 - DNA, 411 bp, Glycine max
gatattgatggtacccctgcttatgaagtcactgaatgagggttcttaccaaatgacagatgcttttctttactaccctacaagtctacctttccattccgacctacatctggttggagcacgaatctctcatcttgtaacacactacatctaacattaatcaaacctatggcccttggcaatatgcggtggagtattgactgatgctggcgggcaaaatatcaaagagctttcttctctagtgtgcttaaatttatctcaaaacagcttcctcactgacaaaaccctggagttaatttctggtacttctgctgacctttgtttttctgttcttctttttttttgagaagcaagtggtctcattttgtttgctttgttttaactcctcttgaccaagttgaaaacctaaat

SEQ ID NO: 19316 - DNA, 404 bp, Glycine max
tcacgcgtccgctcacttggtctttctctctctaaaatctcaggactcagattgtgccctttttgacaaacctctgctctttgattccagttggcttctcagaagtgtgttagtgaagtatttattgaccagagaatggctgggactgtgagtgaggagtctggagtgggaaagtccgtggagggtatttcaaatgggcagcgttgtcaatctggggaagcattggcagagtggcggtcttctgagcaggtggagaatggtatcgcgtccacttcccccccttactgggacactgatgatgaagatgatggaccaaaacctttggcattatatggaagatatacgtggaagatagaaaagttttctcaaattaccaaaagggaacttcgcagtcgtgcatttga

SEQ ID NO: 19317 - DNA, 394 bp, Glycine max
agggtgtcatcactgtcaaacacaagaaaagagaatttcaattttcgacatacctattctattatatagaaatagacatatatgaagaaattaataatttaaacatgcacaagaattgatgcttgcttgatgggaccaaactaagtaaaggcacgcgcagcacaactcaaagcaatggagtgagttgcttatgagcatattgagaaaaaaaggcagaggcagaagcagaagcaaaaccccactttttcatggccaaaatcattggcaagagcagaagaagaagaccaacgacgactcaacaactatgccacagaatggttcaccatgtcaacgtccactgcaacctgttccatagggtgtcctttcttggtcggttcatttgggacaggatgct

SEQ ID NO: 19318 - DNA, 466 bp, Glycine max
ccccctctcactcactcccactcccacacttcactccattccactcccaatcaaaaacaacaactcatcttcccaaattcaaatcacacacacttttctctctctgtctctcagattagggttggggtttgggtttggttcgatcatggcttcgtcttcctccgatccgggaaagtccgcggagacgtcggaggcggcggtggtggtggcgaacgaccagctcttgctctacagaggattgaagaaggccaagaaggagagaggttgcacggccaaagagcgcatcagcaaaatgcctccgtgcgccgccggcaaacgcagctccatataccgcggcgtcacgaggcacaggtggactggtcgttatgaagcgcatctttgggataagagtacgtgggaccaaaatcagattaagaagggaaagcaagtttatttgggggcgtatgatgacgaggaagcggcggcc

SEQ ID NO: 19319 - DNA, 507 bp, Glycine max
gggtgtagtttagtgacatttgcagtagtagccagcaggacgaggaaaatgggtagtgtggccccaaggttccgcttcctcctggccactcccttccctcttctccgccgccggcaccaccaccaccaccgcaacctcttcctcctctccacccattccctccccttatcttccttctctttctctctcaaactcaaagcctcccaatcccaagcttccgcccctaacacctctccctgccctgagtggtcctcattcctctcccacatctcctccgccggctacctcccctccctccccgaccaagccttcaccgccgccgccgaacgtctctcctactccttcctccgcgacgccaccgcctgcctcgccttcgcacgtgaccgtcctaaccttctcaggttgctttctacgagagacattgcggcgctggttgagcacggctccccctttctcttccgcgacgccgacgactccgtcaggaagatgaagacctttctctccaac

SEQ ID NO: 19320 - DNA, 566 bp, Glycine max
ggaccaaagaggagacggatcaactatttgacggaggtgagagatttgatctccgatttattgtaatagctgataggtttccatcctctcggactgtagaggaattaaaggatagatattatagtgtttcccgggctatattgattgctagggctccatcttctggggatgtcgcggcacatcctattgttaaggaaccgtataatgttgcacaagaaatggagcgaaaacgagcactgtccatggtcctctctcaaacaaggcaacaagaacgaagagatgaagaggttcttgttgaagcaaaaaaaatagcggaaaaacgcctacctcccaaggttgctgaacagtctcagttggttgcttctaatgctggtgcagaagctacagagagggctgtccctggtgaaaccatatctccatcaaatgtgcaaattccaatggctgttccagataatgcatctactctagcttctcttcgtatgcttcgtgtatatttgagaacatatgcccttgagcaaatggtgcaagctgcgaacgcatctgctggacttcggactatcaaacgg

SEQ ID NO: 19321 - DNA, 1001 bp, Glycine max
gcgacacgagtgctggaacactgcaaagaccctacaacacaacagaaagttatggatgaaattttaggagcagttagcatgttagctcaggatcagtatggcaactacgttgttcagcatgtgctggaacatgggaagcctcatgagcgttcttctataataaaggaattagcagacaagatagttcaaatgagtcaacagaagtttgcctccaatgttgtggagaaatgtttgacctttggaggtccttctgagcgccaattactagtgagtgagatgcttggcaccacagatgaaaatgagcctcttcaggcgatgatgaaagatcaatttgcaaattacgttgtacaaaaggtgctggaaacttgtgatgatcaacaacgcgagctgattctttcccgaattaaggttcatttgaatgcattgaaaaagtacacctatggaaagcacattgtcacgcgtgtagaaaaacttgttgctgctggagaaaggagaattgctgctcaggctcctcctcaacccgcttaggtgcttagaaaaataatcttgtacagctaactgaggctagtgtaagctgctgctgcttcctccgcccctcccaaatccaagaggtcatgtttgcctatctctcaagatgggttgtgtagccaattggaaataaagttgtcggttttactgcagaaactgtacattttgtagcttttaagtttatacaaagaatttaagcgagagatgaggcctcagatgttttaatgcgcctgatgccccctgctgcagaggagagagagataaaattaaatgaaatattatgactatacaagcccatttacggtgtaaagattgtaaaatggtgagttagtttataagttgacgcgactgtacaaaatgatgatgctcttgtttaggcgagggcagtttttttcttcattttcatttaatcatgtatggttgttgactttgtttcccctttcaagagtgtattttttgttgctagtttactt

SEQ ID NO: 19322 - DNA, 418 bp, Glycine max
tagaaaaataatcttgtacagctaactgaggctagtgtgagcttctttctttgtctcccagatcaagaggttatgtttgcctatctctcaagatgggttgtagccaattggaaataaagttgtcggttgtattgcagaactgtacattttgtagcttttaagtttatacaaagagtttaagctaagcgagatgaggctctcatcagttgttttaatgcacctgatgccccctgctgcagaggagataaagtactatacaagcctttttatggtgtaaagattataaaatggtgaggtagtctataagttgacgacatgactgtacaaaatgatgatgttcttgtttagacgaggccagttttttcttcttttcttttaatcatctatggttattgactttgtttcccctttcaagagt

SEQ ID NO: 19323 - DNA, 476 bp, Glycine max
atgatatcatgaaacctttcaacatccaaggttggttctctctcacatgggatacagccttctgctccctactcgctacttccctaatattcctttactacctaaatgtgatattgtttgctatatttcctatacgtgtgggttgatctcttgctcttgatttcttctctccttgataacagcatgtgctggaacatgggaagcctcatgaacgttcttctatcataaaggaattagcaggcaagatagttcaaatgagtcaacggaagtttgcctccaatgttgtggagaaatgtttgacctttggtggtccttctgagcgccaattactagtgtgtgagatgcttggcaccacagatgaaattgatctttcatcatcgcctgcacaagctacttttcatctgtggtgccaagcatctgacacactagtaattggcaccacagatgaaaatgagcctcttcaggcgatgatgaag

SEQ ID NO: 19324 - DNA, 423 bp, Glycine max
gacatgagaaatttccattatagcttttccttcataatttctgcttaggattagaattgtagttgctaccatacactgtgtaatagttttgcttggtgaagttcataaggggaccgtgcgtttaatggcgttacctgataattgcagggagcgtgtaacatgaatgcgttacgtaataattgaaggggcgtctaacatggatcggtccaaaatggtaacatcacatgggtctgagaatcagttttgttttataggttataattatatgatatttgtgtgaaatatcttttagctttttttatcttcttttaattatatttgtttgtccatcaaatttaaatatgaagctttgtttaagaagatgaaatctaatttttgtcacactaaatacatatttctggcctggaccaatttatagattta

SEQ ID NO: 19325 - DNA, 386 bp, Glycine max
gagagtgtgtcagagaaagtgccgctattacctactggggtgacaagtagtgttcatgagttggctttgatgatgaataataatgataataataagaataagtcaattgggatagtgaacaggaatccaaagtggtcggataagttcaatgagatgaccaacttcgatgatgttaatgtggcagcacaatcatcactgcctccaaggccaagggtggcaaggttgattccatcagcacctgctgcagcttctttcaatttcaatgcttatgagtactattggaggaccaagtctgcatcaccaaaaggtacaagtagtgttaaccttaaccaacttgaccaagagaaactgaagagcaggttgttgtgtctggggcatgaatacaa

SEQ ID NO: 19326 - DNA, 1201 bp, Glycine max
  unsure (1)..(1201): unsure at all n locations
cgncccgatactttctcctccctctgtccccttttttctttccccgtcctcaacccacccccaccctttccttcttcctccacccacctccacccccctccgcccgccgctcccctctccgtgcgccccttccctccgcgcgccgctcctcggagccttattgcagcaaatagggagacgaaatgggccttagaggaaataggaacaaatatgaaacacaactggctcaaagaaatttcaaaagcaatgatactcagaatcacatacaggaacaaaacaccatggaaatttgctggaactttattcacgagcaagggagcaagaagaggagatcctctccctccgtgaacagattggcattgcctgtatgaaggaactgcagctgttgaatgagaaatgcaaactagagaggcaattctctgaactaagaatggcagttgatgagaagcaaaatgaagccatctcatccgcttctaatgatttggctcaaagaaaaggttatcttgaagaaaatttaaaacttgctcatgatttgaaagctgtagatgatgagagatacatcttcatgtcatctatgctggggttgctcgctgaatatggcctttggcctcgtgttatgaatgcctcttcaatatccagctgtgtaaagcatttacatgatcaattacaatggaggattcgaagttcacatgatagaatgggagagttaacttctgttctagaaagccgtgctgataatggtaatcacgttgttgaaagtccaggttctggaaatttgacaagtcacactcataatgatttcatgtttcagcataacttcccccagcaaaatcttattgggaatgaacaaagccatcaaccaatgagcaatgttgcaggatatatgcacccagctcttcattctgatgtaaactggggattaaaaacattcaactatcagcagacttctaacgctgatagggggatatcttctttcccacacgcatcaattgataaaattggagtgcaggacaaaaacatggaaagaaattttggcaatggcaacttttatcaacatccacctgatttggatgagactgcttcctctgtttctgaggacggccctggcattgagaattttcaagtttctggtgatgctattcctggagaaaagcttcttggatgtggatatccagtccgtggaacttctctttgtatgttt

SEQ ID NO: 19327 - DNA, 487 bp, Glycine max
gctcgtctcgtggaagtgtaagcaagcaaaaccctggcggcgcctgctttctttgttcgtgttttgcatcaggtgcgaactcaccctattgatttctatccacagctgatccttcttctctaattaatttattattatttttcatgtattgttctcgcttcactgcttcttatttggctccgtcatttgaaattgttttcttttaattcgagtttcaaattttcaatatctgttactgtgtttatgatttcaatttcatggtggaattattattgctttctacgtgacgttgaatttgtactgtatgtgttgatcttttgttcttaatttgggtcgcatagtgtttgtggcttgtttggtgaagtaacgtagacccgagtgttctaacaaatgatatgttggattctttcattagcatgctttttggaatttttgacctttggaagtcgtatactgttcagcatcactaaatttagtcctccctcaa

SEQ ID NO: 19328 - DNA, 424 bp, Glycine max
ggctcggcttctcagctgtcactatactctacgagtctcttgctcacgcctcacaatgaaaccctaaatccttttgtgtcagtttccttcctaatcgctgctcagccatcaccgtcgcgactcgcgaggagacacgttccatcttctggcaccccctcttccgattccggcgttccctcttctagttctggagtttactcgacgtccttcatcaaagtttccggggtctgttcgaggtgcgtttctgtttatgcgttcagactccatagcttacttttctgctttcatgggttttttagtttcacgaaagaacatagcagatttatttttgcttttatttcatgctctggtggttcttctcttatttattttttattttatgatttactgctttccttttaattggtgcccgtgacatactctg

SEQ ID NO: 19329 - DNA, 499 bp, Glycine max
aacacacttaattagcatcggtgaccttagagaaataacacagataagatcaaaatgccaatattcatccctgccatgactgagcacaaggccctacctccgaataacacatataagcatgtgtttatcccgcccgtgcctgggtacaggcacctacctccgaatataatcgtcaccgaaaatcaaataagggaaatattgagaaaagcagatagtaatggagacggtcgtttgagcaaagaagaacttaagaaagctttcatagaatttggatccaagatgcccggatggagagcatgtcgtcttctaaggaaagctgacaccaaccacgacggagtactcaccatggaagaacttgacaccattgttgattttgctcttgctaggtacacattcaagaagtaaatatatatgcatgatatgatatcatcgcgcccatatgccttaatcccaaagcatctaaatgaagcgcatgtacgtctataactaattatttatg

SEQ ID NO: 19330 - DNA, 482 bp, Glycine max
atcaataaaaagctttaccaaagtaagtaacgtgcattttaatttaatttaatttctcttgggttaacctcttttcacacgtagcttgtgattaaagtgagcagtggtgatatatattttgaggttattttattttaaacatttcatcgataacttttatttatttttacttttttctttcaatcaaatcatatcctttatcatacttatatttctttctcattagacatatatactagcatttgggtgtcaaaatatatatatattttttcctgatggagaataactcgaacttacttgcagagaggaattatctcgtcctcaatgtcacgagtccatagggaccactccatttgaacagcagtgatgggatgaacagcatgtgctctccttattgtatctggactagcttcagataatccgatatacctcacttttccatcttccatcagtttcttcagttgcacatctatataacatat

SEQ ID NO: 19331 - DNA, 638 bp, Glycine max
atgacctcggtttcttccttgatgcggacgccgatggccttgcggaaggcctgggtgagggcttcggttttcgacatctcaagggagaagatttcgctggcggcgatcatggcgaagggggtttcgaggccgagggacttggccatgcccatggcgatggcggtcttgccggtgccgggctggccggccaggaggactgcacggccggcgattttgccgtcttttatcatctggaggatcacgccggcggccttgcgggcggcggtttgcccaaccatgccgtccgagacggcgcgcggctccagggaggagtcaaggccaaggccgcgaatgtgggagtgcgcgcccacgcgctctatgcgggtcagatcgcggctctcagagagtttcagctccgccatgatagaaacggcgaagatggtgcgagggagaaagaggctttcggggtttgtttagggttttgatgaaggcttggacttcggagtgcgcttgtgcgacacttaagttactgcttcagcatgtaactatatcaatgccgggatcgctagactgcaaaattagatgtatagtaattatgtatgtttaattataatcttacaaaacttagtctaagaaaactaaaattaatataacatata

SEQ ID NO: 19332 - DNA, 474 bp, Glycine max
atttaataaagattctctggagaaagttagtaatgtttctaaaactggagttctggatgacaaagagaaaatgaaggagggaaggaaaggacaagaacagtttactatgaggaatgaacttttagaaaatgagctccgttaagagttcatctgatgatggttctataaagaaagggaaattcaatagtactactcttctgctaaacaagaaaacacatgaacatccaatgagtattttgatgaatgataaaacagaggatgtgacaaatgtgaagtctcctccacaatcttctgagaactatgggatgttcatcagcaatcagaactttgaaagatctttacagtctcaagtgactcaagaggatagcatgactcaagaagatggcacaagagatcggagatttaataatgattctctggagaaagttagctgtgtttctaaaactggagttctggatgacaaaaaaaaaataa

SEQ ID NO: 19333 - DNA, 364 bp, Glycine max
acctgatgtacttgattaccttctctccaatctccacaccgcggtgcataaggagcttaaagggttgttatgggatgatgggtctgcaccggaaaattcaatgataaaggaggacaggttgtgagattttactgtagatgttacggtcactgatgaagatgatgcttgttcttactgtcaaaccagctcctccgtcgtgccaagctttcaagccaccgcgaaagactttgtagtcgctgcgtttgtgaacgacgagcgagcgtttagatctaggttttttcaagtgggcgttcttgatgttttttttccttcctttagatcttatctaattattgttcattattgtattttcccctttcggtct

SEQ ID NO: 19334 - DNA, 584 bp, Glycine max
tttgggttacctcagcagatttttggaaatactcaagagaatcaacattccccacaatctcaggctcatcttcagcaacatctacaacatcaacactcgttcaatagtcagcatcatcatcaccaccagcaacaacaacagcgacagcaacatcaagtggtagataatcaacagatttctagtgcagtctctacaatgtctcagtttgtttcagctcctcaacctcaatcaccacctatgcaagttatctcttccatgtgccaacagcaaaacttttctgattcaaacggcaacactgtgactactattgtttctcccctgcacagtatcttgggttcttttccccaggatgaaacatctcacctcctgaaccttcctagaacaagctcttggattcctgttcaaaattcaagtgggtggccctcgaagcgtgttgcagtggatcctctcctttcttccggagcctcccattgtgttctacctcaggtggatcagctagggcaaccacatagtaccatgtctctaaatgctattacattaccaccttttcctggtagggagagctcaatagaccaagaagggag

SEQ ID NO: 19335 - DNA, 419 bp, Glycine max
ttagggtaagtctaagataaaaaaaaggtgcagtgaagtggcggctgtggacattccctagggattttgattggggatggcttcgagcatccaacaagtggaaggggacgagtcagttgtgctgcgcgtgactcattccaatctcaaaaccttcgcctccgacatccgcttctcgcttcacctcaccgtcgaagccgtcaaagacaagctctggaaaaaatgcggcacctctgtcaactcaatgcacctccaactctacgacgacgctcgcaacaaaattgccgatctctctgatcattccaaaccccttgccttctattcccctcttgatgggtttcgtttgcatgttgtggatctggatccatcttccgtcacatctggtgggtggctcgaagatacttcgctggtcgaaaaataca

SEQ ID NO: 19336 - DNA, 361 bp, Glycine max
ttatggtgttgcgaatgatgaccgagaacccagagaaatatcaacacatgcttcagaatcttgttgttaaggctcagcagagtaacaatgaaaaactgttagagaacccgtatcttcaaatgtgtggcatacttcaactggcaaatcatctggggattgacctgtgatcttcaaggcgtgactttctgggaggctatgttattcggggtaggacatctgcatcggtttgaggatttgtggctattgattctcagggaaaacttccattattcgattggctcagattgaaacgcctatccaggacatactcttagttgaaatgttcattcctgcaacagaattgcgattgattgtcaacatt

SEQ ID NO: 19337 - DNA, 636 bp, Glycine max
tgactaacataatatcaacgtacaaacttagcttttccctcttttaaataacaatcatgaaaacatttctcaaagactcatagttagtagtaccaacagttccatataccctctctctagcttccttcactcacttaattgtgacaatcccaattcaaatcccatcagaatgatgaaatttcaagcatgttcaaaccccatctcaaacttgttctatgcgtgttgtgtccttcttttaccaccaaccatggccttaggagattgcacctgtgacacaaaagaggccacaaagagtgactcaattgaagtcctccactacaaaattggctcaattgcttctgtgcttgttgctggggcacttggggtgagcctcccattgttaagcaagagaatcccaacacttaaccccaagaatgacatattctttatggttaaggcctttgctgcaggggtgattcttgcaactgggtttgtgcacatacttcctgaggcatatgagagcctaacttcaccttgccttaaggaaaatccttggggcaagtttcccttcactggatttgttgccatgttgtcctccatagggaccttaatggtggactcatttgccacagggttttatcataggcaacattttaa

SEQ ID NO: 19338 - DNA, 904 bp, Glycine max
ggttgagttgacgattgaagaaggaaggagagagagtgtgtgtgtgtgtgattcacattctgatcttgaattgaattcatctccaactccatggctccggcgatgaggatcgttttcggtcttctcacttttgtcaccgtcggaatgattataggcgctctctctcaattggccatcatacgaagattggaagactctcacggcaccgattctttgccatttagtagattgcgtggactcgacactgatcgtcaccttcaactgccaagaggtgttcctttttggaataatgacaaggaagcagaagtcttacgccttggatatgtcaaacctgaagtgcttaactggtctccacgaattattgtactccacaacttcctgagcatggaggaatgcgattatctcagggctattgctctccctcgcctgcatatttcaactgttgtggatacaaaaactggaaagggaatcaagagtgatgccaggactagctctggtatgtttttgaatccttaagagagaaaatatcctatggtacaagcaattgaaaaaagaatttctgtctattcccaaataccaattgaaaatggagagcttatgcaggtcctgaggtacgagaagaatcaatattacaaaccccatcatgactatttttctgatactttcaacttgaagcgtggtgggcagcgaatagccacaatgcttatgtatttaagtgacaatattgaaggaggagaaacatattttccattggctggttcaggtgaatgcagctgtggtgggaaacttgtcaaagggctatctgtgaagccgattaaaggaaatgcagtgcttttctggagtatgggactggatggacagtcagatccgaatagtgtgcatgcgagatgtgaggtaatctcta

SEQ ID NO: 19339 - DNA, 401 bp, Glycine max
cccacgcgtccggctatgaagtttacagttggggatagtagagtaaggaaaatgggagggtctcgactatccaagccaaagtctggctccgcttccggcagcacaaactgtttcatgctgtatgcgagagcactctcaattacctggggagacactccagaatattggatatgggtacaacagaaagaaacaagtggcacgatagtagagttggctaagttgaaaagggtttgctggctagaagtgcatggaaaatttgacacaagaaagctttcactaggaattctatatcaagtgtcatttctaattatgttggaagaatcatctcaagggtgggaagttccaataaatgttagatttgtccttcctggaggtgagagacaacaacacaaagtaaattt

SEQ ID NO: 19340 - DNA, 409 bp, Glycine max
gtaacagcaactgagctcacatggggagaagatcctgacccagaactcattgaccccaaacccgattttgtgataggatctgatgtagtgtacagtgagggggcagttgtggatctgctagaaacacttatgcagctctctggacctaatacaacaatatttttggctggagaactccgaaatgatgccattcttgagtacttcttagaagctgcaatggataatttcactattggccgcgtggaacaaacgctctggcaccctgattattgcagcaatcgggttgttatttatgttctagtgaagaaatgattgttgagaatatgatgtttaggtgtcttcaacgctaggaacatgatgtccatattgtgaatcaagaatttccccatattttctttgttagcccccc

SEQ ID NO: 19341 - DNA, 631 bp, Glycine max
ggaggtgtcctgaatgatggagttggtgctgattatgtgcaaaaagagaaggttcttccaaacagctttggttctaaagacaccgggataaggtgtgttagtttggatggagatgctgatcggcttgtttattttattgtgccacctgaaagcagtggtaggattgaccttgttgatggggacaagatactatccctgtttgccttatttattagggagcaactaagctttcttaatgagaaagaagacatgaaaaattgccaccaagcccatcttggtgtcgtacagactgcttatgcaaatggggcatctactaattaccttaaactgttgggacttgaagtcaattttactccaactggagtgaaatatctgcatgaaaaagccaccgaatttgatattggtatctactttgaggcaaatggccatggaactgtcttattttcagaatctttcatagagtcgttggaggctagaactaatgagatttctttaggatccaaagtttcaggttcagaaggggaaaaagctgctctgagattattggctgtcagtaagttgatcaatcaagcttgtggagatgctttgagtggattgctcttggtggaagtcatattacagcatatgggat

SEQ ID NO: 19342 - DNA, 374 bp, Glycine max
gtcttacagttacaaacttacagttacccttgtgtgctctaaaacgaactctctgaacttcaccaacgtgattcgcatggcgatttccaattcaatggactttcttcaactcttcattgctgtcttcatcgcgttctcaatcgcattcagagctcaccgaaaaaaatccctcagcacttctggcgcaatcgctgggttcttcgttatggcccttcacatttttgtgggttacaggtttggggcgatgctgcttgcgttcttttactcttcgtccactctcacaaaggtaggagaggatataaagcgaatagttgatcctgaattcaaagaaggtggacaaagaaactggatacaagttctggccaatagtggca

SEQ ID NO: 19343 - DNA, 615 bp, Glycine max
gaggatgagtttgataactccaatgatacggtgagtttttcccaaccgttaattccaaatcaatggtgcatatttatttccattggagaaaaatgttattgaagcaggtgggtgttatttccgtggtctaaagcaaagtgaattagacttagattctgattctgggattggatggagctaggcctcatggataagaatccaacgaagctggaacactttgatgacatgtggaggctcgaatccactgccacactattatctcacttgaagggggatgatggtcgacatgtcttgacattggatcgtacaatattctatccgcaaggtggtggtcaacctgcggatactggctttgtactcattcatggctttgataacaacaaatttctggtttctgatgttcggtccaaagatggaattgtttttcactatggtttctttgagaacctgggcggggaatttgagcctacactcgagaaagggaaggaggtttcactctttgttgatcagcccaggcgaaaactcaactccagattgcattcagcaggacatttgcttgatatttgtttgccaagaataggattgggaaatttagagcctagcaaagcctaccat

SEQ ID NO: 19344 - DNA, 1951 bp, Glycine max
aagattgcctcaataaagatgttaccagtcaacatatgatgaaaatgaatgttaagcatgaagaagcctatgctcaacttccatctggtgatgacctcttcgatgttttaggtatggatttgaaaaggagactactcaatgggagctggaatatgttgcttgccacagattcagatgacaacacagaacatctagataaaaaggcaacatgcatgaatttgcaaggtgtaggtcctgataatagttattcagttaatgaagcaatatcagaaagtggcatcttctctggaacaggcacagaccaccttttagatgccgtggtctcaaaagccaaatctattgtgaaacaggattctgatgacatgtcttgcaggacaacattgacaaggaatagtactgcctctgttccttctcctgcctgcaggccggtaatgtcgggtcatttccaggggggattgtttgattttcctaagaattggggtaaaacaggtgccacagaaactagttttcttaggtctggatgtaacaaggatgatgctggaaactgctctcaaactacttccatatatgggtctaagcttagttcatgggttgagaatagtagtaattttaaacgtgaaagcagtgtttcaactggatactccaagcgaccagatgaagtttgcaaatcaaatcgtaaaagacttaaaccaggagagaaccctaggcctcggcctaaagatcgccaaatgattcaagatcgtgtgaaagagttgcgggaaattgtgccaaatggagcaaaatgtagcatagatgcacttctggaaaagaccatcaagcatatgcttttcctgcaaagtgtaacaaagcatgctgacaagctgaaacagacaggggagtctaagattgttagtaaagaaggtggattgctattaaaagataactttgagggaggggctacatgggcatatgaggttggtgcacaatcaatggtttgtccaatcattgttgaggatctcaatcctcctcgtcagatgctagtagagatgctttgtgaggaatgcggtttctttctggaaatagctgacttaatcagaggattaggtttaaccatcttgaagggagtcatggaagctcgcaatgacaagatctgggcacgctttgctgttgaggcaaacagggatgtaaccaggatggaaatatttatgtcactggttcgtcttttggatcaaacgatgaagggtggtgcatcttcgtcgaatgcaattgataacaacatgatgctgtatcattctttcccacaagctacccagataccagcaactggcaggcctagtagtttgcaatgaactacctacttatagtttcttggtctggatgctcttgggagaaagaaatcctctcttaagatgaatttaactttgtctaactactgtttcatctcagttgggagggggatgagtttagttagtgaagaacttctcaagattaatatgcttttgtataatgtatatgcatgtttcttcctgttcctgccaaggtgacttatcctgtggttggcccatttggcagtgtctgctgatgctttaggcattctttagataacttgcatccattttttttttccctgagtaatgccattggtcaccaagttggataaggcttttgttgatgttgctgagtaatgccattggtgttcatggtgtgattcagatgtatagatattgtaggatttgctaaggggggaggtcatgtgtttgaccatcaagctttatgaccttttttctccacgtttcttggagtggtgatattggctgttataatataccaattttattaatgtaagctttgcgtggtttgtgttagtctatgctgaatgatgtactagattaatactaccttttagaataagtgtcatttcagagtgttgtataaggattaaggaaatcttaaaactgcaagagcgattggg

SEQ ID NO: 19345 - DNA, 464 bp, Glycine max
ttttccgcttaaagtggcatcttctctggaacggacacagaccaccttttagatgctgtggttttaaaagctcaatctgctgcaaaacagaattctgatgaaatgtcatgcaggacaacattgacaaggattagtaccgcctcaattccttctcctgtctgcaagcaagttatgcctgatcatgttgccccgaggggattgtttgattttcctaagaccggagttaaaacagcttctgcagaaacaagttctcttaggtctgggtgtagcaaggatgatgctggaaactgctctcaaactacttccatatatgggtctaagcttagttcatgggttgagaatagtagtaattttaaacgtgaaagcagtgtttcaactggatactccaagcgaccagatgaagtttgcaaatcaaatcgttaaagacttaaaccaggagagaaccctaagcctaggcctaaaga

SEQ ID NO: 19346 - DNA, 518 bp, Glycine max
cacacgcataagcagagggaaaatttcagtttaggctacacagcctcaacatcattgacatttgataatggcaatgcctctgcttgcttctgtatgattcttctcagcacataatcgatcgcgctctgttgattcgattgaaatcgaagaagaaggaggcaagcttcaaccctagcgtttccacaatcgattctgatgatatatttgcgttggtgtttgcctgaggatttggggcgtttccgggtgatacataacttgacttgattgtggttgatactaactggacaggaataatgcatcgcaattcacttaaaagatcaaatgatagtacccggattatcatcacagctattatgggaattgcctttggattttttgttggtatttcaatttcatctgtgcatttgactaagattagctgactttcatcacctgtagggaattcttttgatgtacctgtagctgagttctgaaatagacagattttcggatgaagtaaagagatcttctgctgttat

SEQ ID NO: 19347 - DNA, 469 bp, Glycine max
cattcaccaaacttcttcactggtgcaattctctgtttgatgagaactgaggttcatccgcaatgccacttttaaggagaaaacctttttccttggccgagcctcctgaggatttgaagccagatgagcctgtttaccaaattcgatttacaaaagaaatctttcaagattatcatgattatttgaagcgattgaatctataccgccagagggtttggatgtgtaaagtcactggaaaaactggcttgacatatgaagaggctttggtgtctgaacaacttgctaccgagaaagttcaacagtttcctaaagaattaatgactattgctttaaggattattcaatacagtatgctccctttgaaggatcttgctgattctattggtgagaaattgcaggaacagttgtttgtgggtgctgaactacattggaaaaaggatgatggagttcattcatgccaaatattaaa

SEQ ID NO: 19348 - DNA, 454 bp, Glycine max
cccacgcgtccgaagacgacagaaggggacacaatattattccttttccctctctcgttccccacttccaaatcgcaattcctcttttctttctccgagtctcagcaatatccatcatccttctctctccgccgcacgcggcggcgactgttgataccctgcttcttatacagatccgccgctccttcttcctgccaacgccgcctcctggttccctctcttccccaacccctaaccacatcttttcacccaattttttctttaattattattattaatttgttaccgttttcactttcattatctaatatttttatttttttaattgcatgctgcaaccctttagttgcggacccggtttatgatgattccttggcaaacaacaaacggatactgaagaaatttgtggtttcgcaattttaccccctcaaaatcaaaagtagctagagtctac

SEQ ID NO: 19349 - DNA, 427 bp, Glycine max
actcaacatcaaaattagtttgattatgattcacttgaagaggtgaagagacaatgtttatggtaaagggattaatacaattgatatcacattttgtgagattgtgagagtcagaatgaaaagataaaaatagtatatgataggatcataataatgatatcctttctaaccatcaccataaccaagaaacacacatattgttgaatgagaggacaaccatataatttttgaaatgaagacaaacctgaagtaacagaagatggaattttgttaataacatggacaacagtgaggacttcttccccaaaactcactaggaacataggtccacaataaaagagaataagtagttttagcaatgtggcaatgtttcctttcaacaactccattttgttcaggagtgtcaatataagaagtttgatgaaag

SEQ ID NO: 19350 - DNA, 396 bp, Glycine max
accggagggggaggtcctctaaccaaattgtagtcttttcccttatttgtatgtaattaattgggtaaattactctcctctaaaagatgctttgattacactactccctcccccatgttacactttagtgtatattaggttgaatgagcctccttggaatgttctctctctttaagatagaagggtaaaaaagggtattttctcggaagaagatgatagtgaaaatagctaagaattgttatagtaattagttaattagtaagatggttaagttcgatacataaacatgatgatgtgaggggaaagacaacattcaagttagctttttgtgaaatggaaataatctctgtcgaataggaaaatatagggagacaaattccttaatcatagggaatt

SEQ ID NO: 19351 - DNA, 818 bp, Glycine max
tgtaattgcaatggcagttaagcaattaaatgaaaggtttaaatctaagcatgtagagaacatgcaagcaagcaagcatgttactcaagcagatcaagcaaggccagataccccggttaccgagattgaagttctgccaaaagacatcatgcttgatcaaatatctgaatgttcatcatatgggataagtaggaggagagaaattcttgaggctgatgatcagatgcttgagttgtgggagacagcagataaggatgccacgattggcaagcaagctgaaaagacacagaagatggctgctggcaatcatcaaagaggaacaaccaaggaacccaaaaataggtatccttcaacagattccttggtggaaaaagagttgagtgtggacaagttagaggtctcaagaagattgacactaccacgcgaagaaggggaaccaaagcaagattttagaaagacttgattctgatgcacagaagttgacaaacctccaaatcaccatacaagatttgatgaagaaagtagagataaatgagaagagcacaaaaggaaaaagtgttgagtttggtgaggtgaaagggcagcttgaagcagctcaggagaacatcacaaagttgtttgacgccaaccgcaagttgatgaagaatgtggaagaaggtaccgtgtcttctgttgggaaggatgcagcagagttaggtgaaattggaagtgtcagcagaaggagagtttcagaacaggcacggagagaatcagaaaaaataggacaattgcatttggaggtgcaaggactgcagttttactgcttaactaggtgaggg

SEQ ID NO: 19352 - DNA, 403 bp, Glycine max
ggggcaattatgatatttgattgccattagctttcacacaaggctgatcatcctacagacatttaaattatttttcccgtcgagtagtagtgatgttttacaacaaactagcccaccaaacaatactaaaataaaacaaaatgatttaagaaattattgaagcagttttagggatgttaccagacctgcattcacaagtacactgacttcttgatccttccactacacgttgggatcttctggggggaagcttgatgttcaccaccttgccagccctctgtggcaccataacatccagaaaacaataaccatgacatccaaaaagaggtcaaggaaacatcacaaaatataagatgcctactgaaccatcttcaaaatagttaagaaatgtcaagagaataaa

SEQ ID NO: 19353 - DNA, 449 bp, Glycine max
gactgtgagtgagattataaatttccggttcacaagctttcttctccaccgttttcaatcctgcaaaaacccctcaacagtttctcctcactcgttgcttatcggcacttctccttcttcggaattcaccccttatcgaaataatttgttcttgtttccttccaaaaaaaaccctagctagcttccatggcgtccaagaagaagcactcagagggcatcgccttgttgtccatgtacaacgacgaggaagacgacgaaatggaggacgcagaagacgaagacgacgaagaagaaggtgatgcagggatgcggatggaagaagatgccgccggagatgcgagatttgcagcggaggaagattccgccaatagaacagccatcgttgattcccgcaacgagggcggcgctgatgaggggttcattccggcggagaagagtagggttgggac

SEQ ID NO: 19354 - DNA, 514 bp, Glycine max
gaatacccgggcggacccacgcgtccgcccacgcgtccgatgacagaagactacagatcgggcaccaagagggcgtttcaatgcagggtactttggcaggggaagtggccaagatggcggtgatagggattataacaaatcgaaaggaaatggtttctatcgaccaagtccccaccaagagaggggacattcagggcatcatcaactaccgacaaatgggcacaatcttgctgagtcctgagtcaacaaaaaacataagccagagaatccaattttgggtccagatatttcaactctaaatagtcaacttcagtagattagaccaaatattgatatttttcatgtcctaaatttaagttgttcagggaatatggatgcgatgttttcgttcttgataaattttattcaacgggcctcttgtttcatttgtttctccatgaatttaatgtttagccggaaatgtgtttaaaacccttgacatttataaaaaaaatttataagggcggcgctcgct

SEQ ID NO: 19355 - DNA, 418 bp, Glycine max
agaagacgacagaaggggaaaccaaatcgaatcacttgttagttcaacatggctggcagtggcacctttgcagagatcatagatggtgatgtgttcaagtactatgcacaaggccattggaacaagtcctcttctggaaaattcgttcccatcatcaatccaaccactaggaagacccacttcaaggtccaagcttgtacacagaaagaggttaatagggtcatggaatcagcaaaaacagctcaaaaatcatgggccaagactccactgtggaaaagagcagagttgcttcacaaggctgcagcaatactgaaggagcacaaagcacctattgctgagtgtcttgtaaaggagattgcaaagccagctaaggatgctgtcactgaggtgatcagatcaggggatttggtgtcatatt

SEQ ID NO: 19356 - DNA, 779 bp, Glycine max
  unsure (1)..(779): unsure at all n locations
ctgatacattgatactaacatttcaccacactctcaccatcttcatcactacttattttttcccttcaacctaatgaatcacctccctcatttttattttgactgaaagttctgaagaagaaagatatgagtctttttcagtcttctcttttacttccttctacatggttgaagcatagccattccccatttcatcaatagctataaaaatataaccccttgtttcagcaacctgcaaacttgtcaaagttgaagtcttcaagcacttagtttcttaaagttaactcctttaaggtccattcataatcttctcagatagaaagagagtgatctattcattctaatcatttggggtgtcagaaacattcacattcacatctgggtctaaagttgtgaattcattaaccttcacctggtgccactaacaaaagtgaccctttggataagaattcaaaagggtatctgaggatctcacaaatttgttgaatttccctgattctatgttgtatagggtgtgcaagaggtacagaatcatggtgagtggaaatggcttgttttaccccgttgtggggtttgcatcgatcgtgctgttcatttacatgtcttttggggacgtgaggtttggttttgaggaagaagctgaattggcttttgtggagagaaatgggactcagtttatggtggatggaaaggctttctacattaatggatggaactcttattggttaatggttcaatctgtggatgagtattccaggctanagtacgtgacatgctta

SEQ ID NO: 19357 - DNA, 384 bp, Glycine max
gaagttaggtaaggcacgcgaactaatgcaacaggagtagagagtaaagtcaaagtggtgcttttcccaaacttgaagagtccaaattttgttaatagtaagcgatgatgggaaagctaaaggtgtatgcggatcgaatgtcccagccttctcgagcagttctcatattctgcaggtttaacggaattgactttgaggagattaaagtagacatttccaaacgccaccacctttctcctgaatttagagaagtaaaccctctgcagaaagttccggctatagttcatggaagcttcaatctctccgagagccacgcaatccttgtctatcttgcttctgctttccctggaattgctgaccattggtatccaagtgatctttaca

SEQ ID NO: 19358 - DNA, 369 bp, Glycine max
ggctacaacaaatgcctcagcaacctatgctatggtgtgaggtgtttgatgtctggggtatagatttcatgggtccttttcctatctcttttggttatgtttacattctccttgcagttgactatgtttcaaaacgggtggaagccaagcccactagaactaatgatgctaaagttgtcgcagactttgtcaggtctaatctgttttgcaggtttggagtacctaaagcaagtgctagtgatcaaggaacccattttttgcacaagacaatgcatttccttgttaaaaagtacggggtggttcacaaggtattcacaccataccacccccataccaatgggtaagcaaaaatttctaaccgagaaatca

SEQ ID NO: 19359 - DNA, 408 bp, Glycine max
cttcatgcaacctttggacaatgctatttttaaattgttttatgctccctccactactgagtctgttgttaaattgtgccaaaaaaacaaatcaaacagtggtctcaatatctctttgtgctctgatgcatttcattgaagttggttgacaccaattcaatgaaagttactgttacacacttcttaaaaacataatagatgcttcgtatactacacaacctctagaactgcttaatgtgttaagttttgaaaacctgaggaaccatcgaagcattattagtgattctgaaggcaacgcaggtgacagtgggaccacaaggtctattgacaatgaggtaattggtgaccgtcaacttgatgtcaaatagtaatgggaaattgtctccactggcatcctcaaatacaatg

SEQ ID NO: 19360 - DNA, 548 bp, Glycine max
gaacacaaccaagagcttgtttttgagaagtctggtactattacacaattaagaatgaagggctccctctttcacctcctgttcgtgattctttttggactctcccattttgcatgcctcaaagcagtcccagttacaagaactgaaagccttatgcaagatcccaaagttattcatcatgcactggataatatccacaaccacaagattatcactgagataaaggggcagcaggaggagccaatttttgctgagaggatggacttggaactccatgactacccaccgtatggggctaatggtcatcacactccaaaaccaccatatccataatatgtgtacaaatgcttcgtgtttattgttattaccctatgaaacataatataatcttataatgtggacgcagttataagtaattaacatattgtctaagtatatataactgcttatgtacacatgataagtggagtccagaagcaattatatgtatcgtgtgaaagagaaaagaccaagtaaactgaattcaagtattcagtgtgattaatgtg

SEQ ID NO: 19361 - DNA, 844 bp, Glycine max
ctgctcgagctcgagccgattcggctcgagactgaactcatctcactacattaatattcccttgggtttcattaattgtgacatttagctttttttattgaaccgtgtcaatggccgctactatgaaggctttagcttttgttgctttgcttgttaccattaatgcaatagtgtgtgaaagtagagtggcgagaaaggaccttggattggaccttggtggggtgggaattggggtgggtgctggggttggactaggccttggtggtgggggtggtgctggttctggtgcaggtgcaggctctggctctggctctggctcttcgtcatattcaagttctggctcctcttcttcttcatcagggtcaggctctggagcaggttctgaagctggttcctatgcaggatctcatgctggctcaggctcctctagagcgggttctgaagcaggttcatacgcagggtctcatgcaggatcaggatcatacggtggtaatggaaagtaattaattaaatgcatgccagttaaaccatatcaattatatgcatgctgtcctgtggagaaaagaacaagtcggtgtctttgttagttcactagaattatactttagtaagtaagcaaaaataagttgatgcatgtgttgtgtccatcctgttctttttcttttgtacaagtaggaatcgtgcttctccctgtgtccaatatgcaatagtttccttgaaaggtggttgaataataattaaatcatgtatacgtgtctgttactttgttattggtttatccagtgacaattctataatatatcaactatggcttttacaataaaaaattttaaatgaaatattg

SEQ ID NO: 19362 - DNA, 415 bp, Glycine max
cgaagtagagtgaaacaagatctatttcaagcaaagagggaggctcctctggtggtagctaaattcttactcggattcgttctcacaatccagtttgtaccatcaaaatccgattttcaagtgcttatctataccaagataacatcgaaatggagtgtgcaataaaacaagatgttactgaactaattggaaacactccaatggtgtatctgaacaaagttgtggaaggttgtgtggcccgcattgctgccaagttggaatcaatggaaccctgctcaagtgtcaaagacaggttagcattaagtatgatcaaggatgctgaggacaagggactgattacaccaggaaagactgtgcttgttgagactactagtggaaacactggcattggattggcattcattgcagcacttaa

SEQ ID NO: 19363 - DNA, 565 bp, Glycine max
agcaaagataagggaagcattgcaaagcgggaaaatttaactgcggagaggctagttaaattacacagaaggagtgggacgacactttctggaacccttctcaactatttcacaccatcaaggtatggagatggcaaagatgctcaaatttattggaatgcaagtggaggttagcaagcacacggaggggtccaaggagaagacgctacgtccaaatggattgcccgaatccttgattcgatatgatgcacggcagacagagaaggctacaagttcagtaactgagttgctgcaggccatgaagcgcccccgagcattaagtgaatccgcaagccgtccctccatcagaaaatcaggatctagatcttcagacgaagaaaaattagaacaagaacaagaagatgacaaagagaaagcacaaaaaacattaagaagaatatctgagagtggaagttcatttggacgcaagtccgaaggatcaggaaatagaatttcaatggaaagaatcagtgaactgcccgaaaataaataacaataaataccccatgaaagaacgtcgttgaga

SEQ ID NO: 19364 - DNA, 503 bp, Glycine max
ttctgttgaacctgtagctggagaggatgttatgttggaagctggtgatgcattttctagtcctcgaatccctcttgttcatcagcaggtttcagttgaatctagtggaaattacatagtttcctgtcctttagatgttgagctgcgttgcaagtccaacacaacggtggatggtgatgttgtttcagaagataatgccattacaaacaaggaggaacctcgtctctctatggattctatcacagaaaattcaatccaggagcagttgaaggtagatgtgcacaacactaaaatgatgaaggaaaacgtgacctctgacgatctaaataataagagtcttggggagctgaagaggatgctgaggcagttaacgctaaatgaaaaaccaaaatccaagacaatgatgtcaaggatgtggagaagaaaaggaattcatagcaggtattgccacagaatcagattgatggctgaatgaatagttatggaataaacttggaaatttg

SEQ ID NO: 19365 - DNA, 478 bp, Glycine max
cactgtttgggagaattctcctgcagaagttcaaagcgagttgaaagggcggcatacgtataaagtgtctaaaaacatggtccaagacgccatgaggagatatgatggcattcaacctgctactgaatcactgaggaaccagaatatcaggtcatccgtgtagtgagacacagcatttctcaatggctattttattgcagcaagcatcacagagtcacggatcactaatttgcagggataaatttgcgaaagtcaatctttttgctcgttggttcagcttgcagcgcaggagagttgtttactttaaagcattagcaaaattattatttagagaagaaggctattttctacaaaattgtccatattgaggctgagtcatcagcgtgtggattcggatgcaatatataggttaaagagttttactgaggcgtggcttataggaagaaatatgatgcaggcttagagttctcttgatgtg

SEQ ID NO: 19366 - DNA, 490 bp, Glycine max
tcagaaccggcctgcagagttgattgccaagtttttggatgagaaacttcgtgcaggtaacaaaggcacttcagaagaagagttggagggtacacttgataaagtcctggttttattcaggttcattcagggcaaggatgtgtttgaggcattttataagaaagatcttgcaaaaagactactgttaggaaagagtgcttctattgatgcagagaaatctatgatctccaagttgaagaccgagtgcggcagccagttcacaaacaaactagaagggatgtttaaggacattgaattatcaaaagaaataaacgagtccttcaagcagtcatcccaggctaggacaaaactcccatccgggattgaaatgagtgttcatgtcttgacaactgggtactggccgacgtatccacccatggatgttagacttcctcatgaattgaatgtttaccaggatattttcaaagagttctatctaagtaaatatagt

SEQ ID NO: 19367 - DNA, 699 bp, Glycine max
cgatagggaagcctttgatatataccgagcatggttgagaatcacaagaatatggtgcaactcaaggtcgtagcctcaacctctgtggtgttgtggtcatggtggagctttgatggtgcagttggagaccctcaactctttttactcaaatgggagtgcagcgtagtcgcagtacacgacttgctcaacttcaaccaaaatctaaacgcaagtttggtcgaccttagagcacaagtgagcaaccaaagaaaacactttgccacggctcaatcaaccagcggagcagacccagtccatgccatgttccaatgcaggaactacctctccatcactgactgcaccacctgctttgccaccgctgccaccagaattcacaactgctccactggaaacggtgcccatgtcgagtatgacggctgcatcctcagtctcagttctaccctccacacactgtgcggaaatgagacagcagatgaaagcactgcttttggtacagttggacggcaagctctgatggatctacaaatagcaacaccaaaaattcatggctactttgcagctaccaagacacaagtggctgtggtacgatctatgcctttgctcaatgtgttgaaactctcacgcaagaaacctgttcggactgtttgtcaattgcacagagtggcatacacgattgtcttccaaagacaaatggtcggg

SEQ ID NO: 19368 - DNA, 490 bp, Glycine max
cggctcgagaagagagcagaaactggagaagagaagccataaaaaaatcacagatctaaccaaactccgatttcgattccgattccgggaatagactaccaacaagagcaaacctaaggagaaggaatgtgcagctagatgactaccattgtccattttgttcgtgtcatgaggaggaagcgtcccacatattttttggttgccaaagaataatgcctttatggtgggagagccttgcatggacagaggttgtaactgtgttccttgcatcacctaaggaacactttctacaacattcatactgtaattcatctggaattgtccaaaacagatgatggatttggtgggctgccctcacatggtgcgtttggaattgtagaaacagaattgtattctcaaatgaggattttaatggacagaaattgatggaggatacaattttcttctgctggaccgtgctagatatttagaataagattttgagctgctg

SEQ ID NO: 19369 - DNA, 983 bp, Glycine max
tgtacgaaaagcaatggaagggctactagaacctgttgaggaacaagtaacaattggttcagcagtagtacgagccgtattcagcagtggtagtggtcgtgttgctggatgcatggttacagaggggaaaatactaaatgactgtggtattcgagtcaagcggaaggggaaagtagttcatgttggtattcttgattctttgagacgggtgaaggagattgttaaagaggtaaatgccggtctcgagtgtggacttgggttagaagactttgatgattgggaagagggtgacattcttgaagtcttcaacacagttcagaagaggaggacccttgaagaggcctcagcatcaatggcagctgctgtggagggagtaggagttgcattgtagaatgaaccatgatgtattccactatgagattggttcctatcttgtgtttgagcacagtgcaaatgcattccaggttccagttgaaaaaacaatgtattctctccaattgatgttatgaaagtggaaaggtaacaattccctcatcattatattgatattgagggtaccactgctgaagatctgagttcaaaatgatttgttccttgttggctgtaaaagtgtatataacaaagtatatcagtttcagctccttgtagagagggaaaaagtttcaatgccttgacccaaaaatacttgtaacaaccacatataagacaagggaagaattgcatttttttttcttcattttttgtatgatgctctataatggatgcatcatcttatttttgataaaaaggaggtaaaaaataggtgcatcatcttacactggggtctggaaatttgtatttctattgtgttttgctcctagatgaaatatagttagatgatccaaggttatggaccgatgtaaatactttggttaaaaaatatttgcagtttgatttgtctcctaatgattagattaaatgaaattgagaaagcatattggttg

SEQ ID NO: 19370 - DNA, 593 bp, Glycine max
gttgcattgtaaaatgaacaatgatttgttccactatgagattgattcctatcttgtgtttgaacacagtgcaaatgcattccaagttccagatgaaaaaaacatagtatttctctccagttggtattatcacattggagagaggtaccaattccctcatcatttatattgacattgacggtgccactgctgaggatctgagttcaaaatgatttgttccattcggggctgcaaaagtggatataacaaagtatagagagggaaaaagtttcaatgccttgacccaaaaatacttgtaacacccacacataagacaagggaagaattgcattttttttcattgcttgtatgatgctctataatggatgcatcatcttatttttgataaaaaaaaaagagaaaaaaatggatgcatcatcttacactcaggcctggaaatttgtattttttactgtgttttgctcctagatgcaatagttagatgatcaaaggttatccaccgatgtaaatactttggttaaaaaatatttgcagtttgttttatcctctaatgattgcattaaataaaatcatgagaaagcatattggttgat

SEQ ID NO: 19371 - DNA, 548 bp, Glycine max
ggaataactttcacgtgcatgtgcctaaagtaattggttatgtctcagtgaattgaaacattcagagtagtacagatattttccttatgtatacttatatggctatttgcttccactgggatgttttgcagctttcttattttttcttggatctccttgatttggatgaggaggctggcatgatccagaagtcaactaaccaaactgatcaaaatgagaatgtatttacttattatttctttggcttttttgggattcagatttgagaagaaaacagtctattccaaaatccctaaatcaaatggcggaagaagaatctggactaccaatagtcaatttgcatgcatctcattgtgcagtcatgaacttagggctccaatttttttttatatttagtagttttggaaggattgaaaaataaaattaaggattttctttccccatatgactacaggtgatccaccccaacagaagacaagtcaggaaatgagaaaaagaaagaagatgagaatattactcaaggcgatccacctcaataggagagaagt

SEQ ID NO: 19372 - DNA, 462 bp, Glycine max
  unsure (1)..(462): unsure at all n locations
ggcccccaccatgttatgacgcttattatggaaggcctgtttatgatagttacggtgggagcaggccttgttacgtgagccgttgcgatgaatatttctgtgaagaaaacacctctgcttgcacaattatgtgatcgatcgcattattacttacttacttcattcatcgaatctctctctcttgtgccgcccatgcatgcaagttgttgcaacggcgcgttcttccatcttattgttggagcgatcatcaccctcatcaatccaaggaataatgatctttgtttttttgtgtttgggagtacaaaatgtttcgtacgtgaaacaaatatagataatatgatatgataccagaggctagctagctaaagaataaatgtttttactgtaatgtatgtaactgatactatatactgtgatatcttacattttcacaagttaataaagtttcttaatttgtgtncg

SEQ ID NO: 19373 - DNA, 564 bp, Glycine max
cagatatgtggtgcctctcctcattcagattatggcatgatcactctcctaatgactgatggtggttcctggactgcagatctgcaaggataaagtcaaccaacctcaagtctgggaggatgtgcctcatgtagaaggggccttaatagtgaacattggagacatgatggagaggtggacaaattgtttatacaggtcaacacttcacagggttatgccaacaggaaaagaacgttattccgtggcattcttctttgacccggcctcagactgtgtggtggagtgctttgaaagttgctgcagtgaatcatctcctcccagattctctccaatacgtagtggggactacttgaatgaacggttcagactcacctatggttctgaaaaggatctaaaatgtgatttatccagttgaaggactaaatgccgtacttattatggctggctgctaccacaaatatgaaaatatatgcagtccagagactaatcagaaagcttttaaattaatttgcgaaaagtggtctatgattgtttgtgactgtgtttacatggttcttgtcatat

SEQ ID NO: 19374 - DNA, 1920 bp, Glycine max
ctgaactttgcttctctctctcttctacgtctccttcctctcaaacggaaaacgaccgcaacagcagatttgaagggagtacgcaattgatggatggatattctggtaaaagagccattgatggggtggtagtccctagaaaggggatgggccttgcatttagagatactgctaatgctagagatcgaaatggtcaggtgtgcagccgcattacttgcagcagcagagtcaatactcctaaaggcactcaaattggttcttgtgaaaaaggtaaatctttgaaaccttcaatccaatcttcttcagctggcaaggaagcaattggaagctcctctagaacatgttccaagactagtagccctggaaaaccacctgtaaagcctcggaaatcaccatcatctcagttagagacagattcatctgaaactagtagtgtacaggatgattcagaagcttcaaaactcacctctccccctcaaaaaagtcagacagggggtcaagctgaattggaaaatacagtgtctggtaatgtaatgatggaggtaggaagctctagtatagtatccaatacaagatctcggaggaattttcatccaaattctggattacgtggccaagaaattaaaagctctggttcagtgactcgtgctggtaccagtaggtatggattgaggaacctcaaatgcaatactatttctgatgtcatccctgctggttgttcaccttcagattcaacccttaacagaaggaaggatgtcataaaaaagagaaattgtgaaggggaaggtagttccactactagagggaagaaaatgagcgggtcttcattagaagcacggaattctggccccagaaatggcatatctatctctgatacaagaatatctaggaatactcaaagggacaggtcagacagcaacatggcaccagttagaactcgaaaattgattagtggtcataccaggggaaggctttctagccaaggaaatgctaatcctgtgccacctaatgagtcccttgtcatgataccttctttgcctcgttctggtggtcttaatattcctggtgtatcacgtcatacttctgtagatagtcccttaagttgtcctagctctcatagcagaccaggtactggcaatgaggagttatacggtgttatgcctgtgtctccttcagaatttggcctcactcattctctaatgaatctggatagctttcgacgacgttacaacattgatagtattgcagaggtattggtggcacttgagaggattgaacaagatgttgagctaacacatgagcaaattcgtttactggaatccaacttgttccttactggactgaacttgtatgatccacatagagacatgcgattggacattgataacatgtcgtatgagcaactgctggctttggaagagaggatgggtactgtgagcacagctctaacagaggaaacactatcagaatgcctaaagaaaagtgtctaccagtccccaccctctgacaatgaagctgagagttgcaatgaacctaaggatgatacaaaatgcagcatttgccaggaggaatatgtggctgcagaagaagtggggagtttgcaatgcgagcacatgtatcatgtggcttgcatacagcagtggctacagctaaagaactggtgccctatttgcaaagcatcagtggcacagtcaaattcatcaccatcctaatgatcccatcaattgcaatgttaggccagacgagggagactgatttctttgtacccctcttgctgttcatttttttcttcatcacttttgtacaaaatacagttgctcctcacttatttttattggtcatttgtacatagccaatattttcattcccattatacaataatccaagccattggcctgatatagactggaacttcttgat

SEQ ID NO: 19375 - DNA, 374 bp, Glycine max
aacacctctagcttgcctctccgtcatcttgtcctcaaaaatcctgcactttgtcaccagctgattaaaatccgtgatctgcatataactaaccgcttgttggatctccaaccgaagcccattctcaaactgagcacataaatcttcctcattccgagcatcttggtattgaggccaacactgcagaagctcattgaacttagccgtgtactccccaacagacatgtttccttgcttcaaatccagaaattccctcgccttcctcttcctgagatctcgtggaaagtaattctccaggaatttgtccttgaaagcattccaaggaatcacgcctccacgtgcgacaaatgaagcttcacaaactccaccaattc

SEQ ID NO: 19376 - DNA, 1145 bp, Glycine max
cctgataatgctgaagcttctggacggacttgacacccttgcaaatctagctatcctgggagagggtgaggcactcccagcatccgcgcaggccacaactaagcatccacgccacagacctggctgctcttgcatcgtttgcattcagcctcccagtggaaagggccccaagcataagcagacatgcacatgtaatgtatgcttaacagtgaagcgacgattccgtacccttatgttacggcgtgagaagaaacaatcagaaaaagaagcagagacaactcgtaaaaagcaacagcaacaacatcctctaccattaccttcatctgaaattttgcttgatgaagattccttgccctgtagtaacacaggtgatagtagcccaaaccagaacaaagagggtaatgatggttctgatgatgatcctagccgaataaaatcatctgcttcgccgttcaaaggcaaaattgacctcaatatccaaccagagcgagaagaagaattatcacctggttcggattctggcggcatgatgaagttgctccatgatgctactgagcgatatctcaaacagcagactgtgaactctggtactggagattcatcaggcagtcagtcacagctggtaggagatgcaatgagggaagataaacttagcaatggtgttgcccatggcagtagtagtcataatactgataaggaacatgcccaatctttgcctatgaatgtgtgaaaatcatattggcgctagccataattgatacgttcttgcaaagctatattgaagtggggaaagattttgctgtacattttatccacttcggcttcttgctttttcttgtttgtacataaagaggggtaggaaaaaatggtgagaaaccaatatattccggtaatataagtgggcatcatagtggtttgtgtaggaaaactatcaaatgcagctgaatggggtagtaggttgaagctgtttagtttcttttgagagctcaccgtgccacctgatttcaacaacgttggaaatgtaactatgcctaatttgttctcccaatttattcttagcctgtaagatgtgtttatactttctagtaactgctagttctgttcgctgtttcccttgattggaaatttggaggcacaattttact

SEQ ID NO: 19377 - DNA, 367 bp, Glycine max
gaagacatgtttatgtcatgtgcttagttccaatctaactgctcataacaaaaggaaccatatagacaccttcgtacttgtcatggcccttaagatcaacactttccttctagttcttctcttgatcctcattcccttatcttcaggcttggctgaaggcttcggggaaaacatgcatccaactcatggcttactttataaggatggtatcaagatgaactcgaggaagcttttggttcatgattttgtgttggattatgatgaggcaggacccaacccaaggcacacaaagaaacctggcaagggcccttgaatacccttaccaccaaataatgaaataaattattcttttactttcatttttttt

SEQ ID NO: 19378 - DNA, 450 bp, Glycine max
aacaatctcatctacaagtttcggtccatcaacagcaacagcaacagcaacagtctccaaggatgccaggacctgcaggccaaaagtcacttagtctaacaggatcacagccagatgtgactgcatctggcgcaactacaccaggtggtagttctagccaaggaactgaagctacaaaccaagtccttgggaagagaaagatacaagatttagttgcacaggtggatccacaaggtaggctggaccccgaagttatagatcttcttttagagcttgctgatgactttcattgattctgcaactacacatggttgcattttggcgaaacatagaaaatcgtcaactttggagtccaaggatttattgctacacctagagaaattggggatttaacaattcccggatactcaagtgaagagaaggagaatcagagcaacctcaattaaatga

SEQ ID NO: 19379 - DNA, 429 bp, Glycine max
ggttagggagcccgtggagcaattacctatggaagaggatgaaatattatccccacgggaggaggaagaatcaattgatgaggttgttcgcacaaagtacggtgacatgccaccattgactgtggctgaagcaattgagcagcttgaaaatgttgatcatgccttctatggttttcgaaatgaagaaactggggaaattaatattgtgtacaaacgaaaagaaggaggactatggactcattgtacctaagggtgatggcgaagcatataaattggagcctgtagtgcttgaaccagctatagaatccttcctgaaagaatgatatgcttctacaatatactctttttgtaagaacattaaaccttgtacatgaattagcggatactaatggcgggttttttggagccagaaattgcatacacaaattt

SEQ ID NO: 19380 - DNA, 524 bp, Glycine max
  unsure (1)..(524): unsure at all n locations
ggtgccttcactctgacaatggatccagcgtgacccattgtggcgctgtcgcttctcttgggtgccatcatcgccttcctcatcttcaacacctacttctgcaagcgccaatccgaaatccgatccatcgccgatccaaatccaaattcaaattcgaatcccaaactcgtgtcttccaaaccccctcccaagaagcctctctccaaaccccattcctccgacaaggatcaaaacaagcgtcaccatccgttggatttgaataccttgaagggtcatggtgatgcagtgacaggggtatgcttctcccgcgatggacgaaatttggcaactgcttgcgctgatggagttgtgagagtattcaagttggatgatgcttgcagtaaagtttaagttctaaggataatttgctgccggcgcaccaacggcagtgctttccgagatcatcctccattgtgtgcgcttatactcggcccgtgtcattataatgtatggagagagaacctanacattgagacaacccaagc

SEQ ID NO: 19381 - DNA, 761 bp, Glycine max
cctttccattccccaattcctaatggtttaaacctaattctcatttcttcatcgttcgattcttctcctcctaaaggtacgtctctggtttcctctctctcttgttcattcttttcgtaatagcaaccttattagccttcgtttattgatttttctcctaattacacttcaattttttcgatttgtgtttgttacgtcaatctgtatatcttttttgttgtcgtcgaatccgaaacttttcattcgcctttctgattccgtaaatcgtttgttaagtgcaacatctttccctgttcttaggtatctgattgatttctctctttctttttttttttatcagttttgaggaattagggttcgtgatctgatttgtttctttaaaatttccccggttcttaattaggctctgcgatttaatttcttttatcatatttgaagaatcatggttctttcttggtttgatttattgcgcactcagtttctgatatgcaaaatctttccctgttttaattaaggtttagggtttgcgagttgtcattttggaaaatagggtttgtggtttattgattgtgtaatccgtttggttgtaagcagaaacttctctgttttaaatcattgcttgtgatttagctctattttttatggttctgtttgtgattgaacagatgcagatcttcgtgaaaactttgaccggtaagaccatcacccttgaggtggagtcctccgacaccatcgataacgtgaaagctaagattcaagac

SEQ ID NO: 19382 - DNA, 923 bp, Glycine max
tcatgttttccatcttcattctcatcatcttcaatattccagagaaaagtagtatatgctgcaagaacattgctgtcttgaggagcagcttgaactgcacgttcaaaatagaccattgctctatccttgtcatgatggttctcccacaccagcttcgcatactgcatcaagatttcaccttcattaggatctgccacggtagcccgaagaaagtactcctcagcccctcgaaggtctccattagattgtaaaagctgagcatactttttgagaaccaaagggtggcaggggtactcatcaaccatccgcttgtaatacccttcaagatcctcactttcttccaaactgggattaaatacatcatcgctgataaatttatcaaatcctacatcagcatcaaccccaagccctgctgccagatacatggggggactagctggctgaacatcttcctcctcaatactcaaattccgaatcccagttgaccaatcattattctcattctcattctctccttcctcaatcaaatccatcttgttactcccaaagctgaagtcaccactgcctgtagcttccaaactctgtccaaccaaaacagttctcttcaaaacttcttcaggggtgatgtcatcatctccatgaagattgttgtatattgcaaatgatggggctgaatgcaaggttgttgactcaacttcatcctccatcactgaattggaagaactatccatggacatagctagcaacaagatctgccaatatctccaatttgctattagagttatcaaaattgagaaatgctaggaatgaaaaacagtgctaaaaaagaaaaggtcggcgttagatattgctagcgatgatatggtaaagagactatgttcatgagaaatagcgaaaacgagtatttctatactctaagtgat

SEQ ID NO: 19383 - DNA, 457 bp, Glycine max
gactcacaacatgggcagtgaaactgaaaaggggaagaagagagtgaaatgggggagctttacgcgttggacttcgatggagtcatatgtgatagctgcggagaaagctctctctctgctctcaaggctgccaaagtgagatggcctggtttgtttgatggggtggattcaaccacagaaaattggattattgaccagatgcacacagtgcgaccagtagtggaaactggatatgaaaacgttttacttgtgagattgttgcttgagagcagaacaccaaccatccggaagtcttcggttgcagaggggctaacagttgagggtatattggagaactggtcaaagttgaagcctattatcatggaagaatgggatgagaagagggatgatctgatagatctttttggaaaggtcagagatgaatggttggagcaggattttgctacttggattggtg

SEQ ID NO: 19384 - DNA, 227 bp, Glycine max
tatgtccaagacttattctaagagtgtgttatttaggtttttatcttgtgtaatatggatatcgttttactttacaagttcatgttagcctttatggtttctttttttgaactattgaagtaacaacgcgttggacttcgatggagtcatatgtgatagctgcggagaaagctctctctctgctctcaaggctgccaaagtgagatggcctggtttgtttgatgggg

SEQ ID NO: 19385 - DNA, 473 bp, Glycine max
gcgagacacattatatctctttgttaccttccacgaacgagagaagagaagcaaacgatggctacttttctttccaaccaatctctgttgggttcttgtccttgttctactcccttctcttcaaagccctttcaaaccctaaaaccccaaatcttatcttttccatctcgcgggtttccgcgccccctaatttcctcagtcaatcgaagaacccaattgaagtcttcccaagatttccctccaactacaaatgatgaaacagaggagacccagaatgatgtaagagggacaaatgatgatgaagataaaaaacaagtacctagtttaatgatcctccttgaagcatacaaggaagccttttttaatggcgaccaaaataccgtagctcagattgaagaggggatatattcaatagcaaataggaaaaataaattgattcagaaattatcaagtttatcggcagacaaagctgc

SEQ ID NO: 19386 - DNA, 405 bp, Glycine max
gggcactcgtccttgcactcatacgtacgttcgccagtgaccaccgaaggggcaggagcggaagtatgaagccttcaacaggctgagaatattccaagttgtaagtgtcgcttttctaggtggactattgtggtggcatactccagagtcacacattgatgatcgggttgccttgctctttttcttttctgttttctggggattctaccctctctacaatgcagttttcacattccctcaagagaggagaatgctgatcaaggaacggtcttcgggaatgtaccgcctttcttcctactttctggctagaacaataggagacttgcctctggagcttgcactaccaactgcatttggcttcataatctattggatgggagggcttaaacctgatcctatgacttt

SEQ ID NO: 19387 - DNA, 463 bp, Glycine max
ggcacaggcggaatatgtttggtgcaccttggtctgatccagacgatgtggattgtgctaatgatacacctaaacttgttaattctgacccacttgattttagctcattggagcattgtgatgtttactatggaactcatcgcttatggccaaggaagcgcaggatgtctgaaagagatgcagcttttgggttgaatacttctgtgggcttgggaggttatcttggtataatgggttctcgaagagatgttgttactgcaacgtggaaaactggccttgaaggggtctggtacaagtgcgtaagatgtcagcggcagacttcagcatttacttcaccagatgctactgcttctcctagtcagaatgaccgggaaatgtggtggatcagccgctgggtacatagctgcccaatgtgtggtggaacatgggctcgggttgtataaataggtgcattatgttatta

SEQ ID NO: 19388 - DNA, 388 bp, Glycine max
catattgaattgacctgttagtggattgccatgttgctggtctaagccatgtagaaagtctatacatttttggcatttttgtagaaaaaatgaagatgaattatttcaagttgtttttgttgaactgaaatctttttgattcattgagtgcattacaaggttgcaggcactgttttttttttcccttacatttttcacttcagtgtattaggatatttcaggaaatcaggaaactgtatgtaagtaaccggagaattgtagaagatattgtaattatgtaattagctgtaattatccaaatcagcataaattaggtagctataatcttggatatatttgtgcctttgataatcaatacacacacaagtttttccaattgtgaatacta

SEQ ID NO: 19389 - DNA, 1253 bp, Glycine max
cggccagtggcaccaacagctggtttcaggccaccagttcacggaagttccgcccaggctgatcgcactccaacagcccaatcagcaaaagtcaggaccacctgtgttggacgattccttcttgaatcgtgcagacaatggtgagcagaatatattgaattcaaaccctcaagaggcaacaactgcggagaaaaagtttgaagaaacgcagaatgtgattttggattcaaaacagaagcttgagttataccgcaacaaaatgcaggaactggttctatataaaagcagatgcgataatcgactaaatgagattacggaaagggcatctgcggataagcgtgaggcagaatcattgggcaagaaatatgaagagaaatacaaacaagtagcaaatagtatcaaaattgtccgttgaagaagctaaatttcgtgatatacaggataggaaggtggagttgcagcaagcacttgtcaaaatggtacaaggaggcagtgcagatggtatccttcaggtccgtgctgaacgcatacagtcggatctcgaggagttatttaaggctctggccgaacggtgcaagaaacatgggatagatgtgaagtcaattacaatggttcagcttcctgctggttggcaacctggaattccagagggagcagctctttgggatgaagagtgggataaatttgaggatgaaggatttgctaatgatctcacttttgcatcttcaaaaccgaatcctgcatttattgatggagaacaaaatttatctgatgataattctgttcatggttcacctgtgaatgcaaatgggaagcaagaaaattctgctaatggtgattatacagttgaggatgaatcctatgcacacagtgaagatgacctggcaagaagcccccatagtctagctgggaggagtacggtggggagtccttctcaagacttttcaaattctcattttggaaaaagttttgaagcagatgcagaaacacacagaagttttgatgaatcaacctggggtgcatttgacaacaacgatgatgtggactcagtgtggggttttaacaccaagaccaaggactctgacttcgagcagagagatttctttaaatctgatgattttggtataaacccagttagaacaggatctacacatacagatggcacgttccagtcaaaaagcccatttgcttttgatgattcagtgcctgcaactccagtttccaaatttgcttttgatgattcagtgcctgca

SEQ ID NO: 19390 - DNA, 433 bp, Glycine max
gacacacagatcgggaaagcgcctctctactctggtctctgctttggtagagctctctcacaggcacacagatcttggctgggcctgcgcctacggggatagagggaactggagcctttggtacatgccccgggggccatagcagcattattactcctaaatttttcatgcttatcttgtgctacacactctctctctctctgctagagcgcgcgctaaaactggaataagtttaagaagagcaggcaaaagtgaatgtatctatctatctgaaacagcattattatttgttcgctctgtgcaactgcaactgcaactgcaaccaaccgcgctttaccgaatgccaacaaattaagcctgtgggtagtgaagatctgggaataatcttagagtaagagacctaattagatctctcgacgtctcaaatcgagag

SEQ ID NO: 19391 - DNA, 338 bp, Glycine max
gaatgaaaggagtgatatattgtctttggaatttgactgtgttgtcttcttctttgtgactcactctctcttcagctcttgaatttgatccacctgtgttgcttttcccaccaaaccaaacaaaataacctgatattaacgtaatagtagttcttttatcgaacattgtgccatgacattcgacgaggtttccatggaacacggcaagagcttcatcttcgccttgcaggaacttaagaacctgaggcctcaactctattctgctgcagactactgtgagaaatcttatctcaatagtgataaaaaaccaatggtacttgacaacatgaaagattatg

SEQ ID NO: 19392 - DNA, 354 bp, Glycine max
gagagtgagtttgataattatggttttcccatgttgtcttgtgacatctcttgggtaggtgtccatcgttgcccaataatatatttttgttattatttgagctacatctggactccacaacgcaaaacctcagccctttgcctttgttccttcaacaaaatttttctttattacttgtgctattaaaatttagaattcctattatcgtggtagaatacctgttatttttcttaccagacatagtcaggtgtctgctttgtttggagtttggtagagaccgttacatgtctgggacataaaataccaagagtgagtctgataaatatgggtttcccatgttttatgataaaatct

SEQ ID NO: 19393 - DNA, 396 bp, Glycine max
ggagaaagacggaagggcgaagggttggggaagcgcggtgagggaactgactcaggcgattctgaaattcggtgaggcttatgaacaagcagagagttcgaagctgcagcaggtggtggagatggagaagcagaggatgaagttcgcgaaggatttggagttgcagagaatgcagtttttcttgaagacgcagctggagatttcgcagctcaagcttggaaggaaaggtggtaaccctagcaacaatctcaatggcaccaccaacaataacaacaacaatcataacaataatagtgacagtgaatgaatgtgtgagagtcaggaagggataactaggttgaggtaaagtttagattggaattgcatcagcctaatagccttgtggtgtatgtgttt

SEQ ID NO: 19394 - DNA, 302 bp, Glycine max
ctactcaagatagacttcttatctttacatgttttcttgttgacccttgagttggataaggcaagtcggaacttctatcatcttgattttgcaggatttgaatcatctaaatgtgcagagtacatttcaaaggataaaatgtaataacaattgttatcaatgattgagattttaataaaaatatgtgtaaaataaattgaaatttattacaatctcaatcgttgattaatcagcaattactattctctactttattctatgtagtgtacaatttagagtaaccaaatccttgtacttgctgc

SEQ ID NO: 19395 - DNA, 373 bp, Glycine max
gagggcgtcagagggagagaggctcttgggctagatctggatgaacagctactagttgtgagatggggctttaatgctaagcctgatgaaggatgttcagcttgcggttgctcattcatgcgaaggcgtataacgagtggatccctggtactgacactgtggactgatgtggaaggtgaggacatgaactacacgcaacagattgtcgtaggtgctagaccaaggagatggcgagccagggactacgagcccgtatagatgggggctaagaatatagtgaactccgacactaaggaacgtgagagcgttacgattgagctccgatacctcacggtactgcggatggaagacagttgatacatgatgacagacg

SEQ ID NO: 19396 - DNA, 580 bp, Glycine max
tattgatacggcaccttctgagcatgctacggatgcttcaaaaggcgtttccttcattgaacttggttctatacgcataagcaacagcagagttgtttgctggcatttctcttcagatgggacattattagctagtgctggacatgacaagaaggttgttctgtggaatatggagacattgcaaacagaaagtactccggaggaacacagtcttattattactgatgttcgcttcagaccaaattcaactcagctggcaacatcttcgtttgatacaactgtgcggctgtgggatgctgcagatccaaccttccctttacatacatatagtggtcatacttcacatgtggtgtcccttgatttccacccaaagaaaactgagcttttctgttcttgtgacaataacaatgagattcgcttctggagtattagtcaatattcttccacacgtatttttaagggaggatctacacaggtgaggttttagccaaggcttggtcaccttctggctgcagcaagtggcagtgttgtgtctctctttgatgttgagactgacaggcagatacacacattacaggga

SEQ ID NO: 19397 - DNA, 435 bp, Glycine max
ccaacatgttttttaatgcaagaactccttggtgacggcattcctgggcgtgcattgtgtcaaacctgttggaggtcaaaagatccacaagaggtttgacctcaaaggctcttctcatggtcgatctacagataagccaagggaacatattgatgagactaccactctcaaagaccttgatcttaactttgtctttcgccttgaacagtcttggtttcaagagcttatatggcaacttggtagagattgtgagttcctggaagcagagggaatcatggattacagtcttctaattggcctgcatttccgtgatgattagctcagttgatgaaatgaaaagttcacctcgcagttctcattcaggcaacagagacatgtctgataatgagatgctcacatgttggggacctctaatccagctggatcatggaacat

SEQ ID NO: 19398 - DNA, 451 bp, Glycine max
ctccacgcgttctacatgcgagatgacgaccgagggggaggctgcattgtgtcaaacctgggggaggtaaaaagacccagtttattgtaatgggcaatgtgttttgctcggagtaccagatccacaagaggtttgacctcaaaggctcttctcatggtcaatctacagataagccaagggaacaaattgatgagactaccactctcaaagaccttgatcttaactttgtctttcgccttgaatagtcttggtttcaagagcttatatggcaacttggtagagattgtgagttcctggaagcaaagggaatcatggattacagtcttctaattggcctgcatttcgtgcatgattagcttcagtgatgaaatgaaaagttcacctcgcagttctcattcatgcaagagagacatgcttgataatgagatgctcacatgctggtaagttcttt

SEQ ID NO: 19399 - DNA, 415 bp, Glycine max
ggtggaaaaactgaagattatgatcatgaagataaacaaagtggtgtcactttcttcagctgcagctcttaaatctgtgtgttccaaaactttttgaggtaaagtctcaaaactttctctcttttctcattaatcacattcttgcttaattagctcttcttttacaaattcttcttcattatattcagctgcagctcttaaatctgtgtgctccaaaactttttgaggtgaagtctcaaaactttctctcttttctcattaatcacattcttgcttaattagctcttcttttacaaattctccttcattatattcagctgcagctcttaaatctgtgtgttccaaaactttttgaggtaaagtctcaaaactttctctcttttctcattaatcacattcttgcttaattagctct

SEQ ID NO: 19400 - DNA, 481 bp, Glycine max
gtgaaaagtgggggtgctccagttttggataaacccaaacggagaacaccagcatctgatgggggaaggtcgagtagtgtgccagataaatcctcccagcgttcctctcgcagcatgtctgtcagtcctgatcgtgttcgtgtgagggggcggtctccagcctttaatgctctagcagctaattttgagaaccctaattctaggaacctttcaaccccacctccagtaattagaaagctgtatcctaaatctgtgacaacagattctgcaatactggcgccaaaatcttctgccatagctgcacttagttcttcttttgaacaaccaccttcagcacgagaaaccatgatacctcgctcacttaaagtgagtccagtaatgcccaaatcaaaccctgagaaaaatgacaaggagaattctgtgagcaccagagtggaatctcttaccatacaggaagatgtgaaagaggatgaagttgaga

SEQ ID NO: 19401 - DNA, 437 bp, Glycine max
ggaatccagaaagtttgataaatgagtgattgtgtgactccaaaagtttatgcactttggaaaggaattttctgtctcataaactctgttcaaaggattttaataatttgtttctggcttagaccattccatgattgctctcctttcttgggggtccatttttttttctcagtttataattataataattgaagcttttgaaccctctcatgtttcattaaattctgtgccctcaaaggggtactgttgaaccattttttttaatctatttacttggctgcggattgtccactcagaatctttacaaagctttatctccaatggatttgattaccactttgattgtcttcctttatgatgctttagcttctttccatgctaatccgagttaacaagaccaaattttaaaattaaaaaaatggaaaaccagtgacatt

SEQ ID NO: 19402 - DNA, 1026 bp, Glycine max
attcaacaatcttccggattcggagagctcacttgcttcatttcctagtaaacctcaccaagcacttaaaggatgctctgatatgtgtgaggatgatctcaacaacagcagtccaagaaatttggatcatgatggaagaattgacaatgaaagttctgggacaagtacttcattacaacaaaatgctaccagtcatcaaaaaaagtttccaagtggttctttactacctgataattttctttttcccaaaaagattgttactgatggggacagggattatctacaaacaaagtattcttcagacaggaatcacagtggtccgttgcaatatcggcagaagagagacaccaacaaccttccattggttgatgacacatcggatggagcatttgtccagtttagggggcggtttaaggtcacgccggcagatctcagtccaatgggtccttcaaacagcacatctggcccacttgttagtcctaccagtccaccaaatccaaatttcctgtctgtagctattcttccatcactgcagtgcatcttgcaacagaacggtttgcagagggaagagattattaaattaataaaatatgcagagcaatcttctggcaagaatacagaatcaatggaggcagggatagttgatattttgcaggcaccacctgcaacaactagggagcgagagctgcattttcaggtgattcaactccagcagagcaatggaatcctttttgaggaattgcaaaaacaaaagatgaaaaatgttcagttggaaaaacagttgagcagtatgattaacaaagtggaaaagtgaacaagacatgaatgttgtcatgatttgactgatattgaacaacacccgacagatgttcagatacaacacccgacagatgttcagtggtaatattcaatgatggtttgagacatacttgagggatgggaacggctcattgcgacgtacactaatctttgatatgctattccttgagttacatgtcaaatgtaatttattgagataatgagatc

SEQ ID NO: 19403 - DNA, 430 bp, Glycine max
ggaaaagaaggtagagaaggtgttgtgaaaggttaagatcgagaaattagggtgaagtgaaggagaagctcttgagaaggtatagttcttgttcttgctcatgctcccttgtgttttgtgtgactcgttgttcttgttcttgctacatttttatctttaatttacgtgcttctaatcatgttaacattagtgttttgtttcaccttctacacatttacacatttatcgtctcaaatctcaaatacaaagcacctatactttctttctcccaaaataattgatcgtctcaaatctcaatttaataaatgtattataaagtcttttaacataagattcttttttaaaaaagacaaaacaaaacattaatataaaccaaaagatcgttatcacttatgttaattaataagtgataacgatttatatttcttaa

SEQ ID NO: 19404 - DNA, 481 bp, Glycine max
ctctttagcagcagaagcatgtgtgaattgaatgaattaaggtttaagactaaggaaacaagggggaagaattagaggaagaggaggagtaacaaaacaagtatgtcagaatcaaacgcaattgcaaatggtttggctggtgcaggtggtggaattattgctcaaatcataacttatcctcttcaaacggtaaacacgcgccagcaaactgagagaacactcaagaggaacaagcaaagtttgccctccaactcaaccactgctcctggcactcttcttcagatctttcaggtcattggaactgagggttggggtggactctatagtggcctcaagccttctcttcttggaactgctgcttctcagggaatttactactatttctatcaagtttttaagaacaaggcagttgccattgcagctgcacggatggtgaaagggcgtggagatggtactggtgggatgtttggttggcttgttg

SEQ ID NO: 19405 - DNA, 484 bp, Glycine max
gaagaaggaacggatgggatgcaagattccccaccgcacgaattaacgatggcgtcttcaatcgaaaagctcctagaaagtggtcgtcccttccttcgcggtgatctggagtccatcgacaagaacttacctcggctggttggcgtcctgcagagtgtgggtgccggggagtgctggcacaaacacggcagcttccttcaccacctcgtcgacatatttcgcattctcaagctctggaaagcccctcactctgtctgcctctgtggcctcttccactcagcctactccaattcttacgttaacctcgccatcttcgacccttcaaccggtcgagaagtggttcgtgcactcgttggcgaggaagctgagagtctgattcacttgttctgcatagttcccaggcagcctctcatccacgacgatctgctcttccactactctgatgaggagcttgtccaacaccttgctcagtccgagatatctc

SEQ ID NO: 19406 - DNA, 524 bp, Glycine max
ccgggcgacccacgcgtacgaattcgagcgtccggtttttataagactctttatggtaatgtagattgatcctaaaacaaatccaacagaagatcagcgacttgcttttatagcaactttttttgctgggattactcaagcaacacttggtgttcttaggttaggattcttgattgacttcctatcacatgctgctattgttggttttatggggggagctgctatcacaattgccctccaacagcttaagggtttccttggcattaaaactgcacacttcacaacggacactgatattgtccatgtgatgcgttcagtattctcagaagcccatcatggatggaactggcaaactatactcatcggagctagctttttgggttttcttctggttgccaaatatattggaaagaaaaacaagaaattcttctgggtgccagcaattgctccattgatatccggttattttatcccctttttttgtattcataacccgtgcagataagcagggagtagacattggt

SEQ ID NO: 19407 - DNA, 429 bp, Glycine max
cccacgcgtccgcaatcatgagagagaaataccacaacaacatctccattttctctctaaccatcgttgcctaaaataattcatcctcctttttatattctttatttatttattttgttccatcggagctgcattttccttttccttttttttttttttgtgttttttgaatccgatcgatatgaacgcagcttcttcttggtttgttgaaattttggcattaaatggtcggaattcggcgttgggattagcttagggtttcaaaaaaataattctcttttttttttttctaattttgttttttttaatggaacctcgtattgggaataagtttcggcttggccgtaagatcggtagcggatcgtttggagagatctatttaggtactaataatcaaaccaatgaagaggttgcaattaagcttgaaaa

SEQ ID NO: 19408 - DNA, 391 bp, Glycine max
ttcccgggcctacaatgcacttttcggggggccctttttaatactatttttattttttttttttctaaaagaaatagaaattttactaatgttaaaattacataaatatggcaaaagaaaaggattgtttttgtatcactgcataatctcgatggctagacttctaaacaaacaccgcctattataaactacattccttatggtacatagtacaacccatgattccagaacaaatgatgagataaaaaagcccagaaacaaggagcagtctggtatccacatcaaccccccattcacctttgttcctcatcatggggtcagaacaaacaatttggatctctgatggctctcaaccacctgcagttgccaattgattagcactggtagcaat

SEQ ID NO: 19409 - DNA, 493 bp, Glycine max
cttgccgtttgttgttgacccttgtaagttgcgaacaacacatatgacatgatttgtgttcttctttcttaaaagttgagatagttagtatttgatcatgggtagtagtactgaaatgggaatcccagaagaagaaaaagaagaagagcttctgaagaagatagaacggctagaagctggtcacgctcacctcaagcaagaaatgtccaacttcaagctcttccaaaacaacaagtctcgttccaggttcggtgctgccacgtgtaacaaaccctcttcttctctgcatcaaaatggaaacaagtatctcaatatcttgcagtcaatgggccacgctgttcatgtgttggatcttcaatgtcgtatcatgtactggaaccctagtgcggagagtatgtatggttatgccgctgaagaagttctagggcaggatgggattgagatgcttgtggatcccagtgatttggcttagccaatgatgtgttcaaccatg

SEQ ID NO: 19410 - DNA, 506 bp, Glycine max
cggatgagaacagagtgtgataatagtaagacagagcacctactcactcgtaaatggcgaggaagaagatcagagagtaccactccaagaggcttctcaaggagcatctcaaacgtctcgcctctatcgacctccaaatcctctcagctcaggtgacagaatctacggatttcactgagctgacagaccagcatccatggctttcgtcaaccagattggtcgtcaagccagacatgctgttcgggaagcgcggcaagagtggcttagttgctctcaatttagacatagctcaagtcgccgagttcgtcaaagcacgcctcggcgttgaggttgagatgggaggttgcaaggcgcctataaccacttttattgtcgaaccgtttgttcctcacgaccaagagttttatctgtctattggttctgaaaggcttggctccactatcagcttctccgaatgtggcggcattgaaattgaagagaattgggataaggtcaaaactatattc

SEQ ID NO: 19411 - DNA, 586 bp, Glycine max
gaggaaaggagaggagaggaagaggggtcagttgttcattttcatcatttcattgtttcttttcttttccagacatcaaaccaaacactagctacgcttctctctctttccttcccagcgcttctctctctttccttcccagagcttcctgtggctgtggaatcatcgtatcttcttacgtccgaagcaagcctttgtcttgtgtgtgttcttcccccttccgtcagacttctaggaaaatcagatgcatcgtggtaaattttcccttacacccaagaatgaagtcaaggacttgacaggttcaagtttaaccagttacaaacatagcagtcttctggaccccatagatgtttcttcatcttcagatgatgaaaatgaccttcctaatgatgatgtgtctaatcaattagtcctttatgatcctgtggcgaatggaaacaatgcaattgaacttgcacctgatcctctccagtgtgaacatccattgcttccaagaagcaaaccttcacattcagttcctagagttttgccttacagttggtgctttcactgttcaatgtgcatcctgcttcaaatggaggttgat

SEQ ID NO: 19412 - DNA, 503 bp, Glycine max
tacaagacactatctacgcttctctctctttccttcccaggcactcttcctaatcctccatggctctatgtcttttttcttcttcttcttcttgaaatactagaagacaaacattagaaatctatctggatcctgttttgcgtttcagatcacagatttgataatgcatattattaaatttaactgaacgcatcttatcacttgaatttccttcgcagagcttcctgtggctgtggaatcatcgtatcttcttacgtccgaagcaagcctttgtcttgtgtgtgttcttcccccttccgtcagacttctaggaaaatcagatgcatcgtggtaaattttcccttacacccaagaatgaagtcaaggacttgacaggttcaagtttaaccagttacaaacatagcagtcttctggaccccatagatgtttcttcatcttcagatgatgagaatgaccttcctaatgatgatgtgtctaatcaattagtcctttatgatcctgtg

SEQ ID NO: 19413 - DNA, 442 bp, Glycine max
  unsure (1)..(442): unsure at all n locations
gttagaagtggcttcagagttagagcagcttaggttgagtaggtggactacattgggagacaacaattgtgcaacctcgacggaattgtcctcctgctcttcctcctcaagtgaatgtgagaaaccactaagcaccgcaacgaggaatgctggaggggcaaagggtaaaggccacctcaagctccaaactgggcctgttcatttaatgtcattacaaaggcccaatagtaactcaccggtctcggtgcaagaccaagacctgtggttgagtgagcagagctctccttcgtcgagtagttttccaagcaagtcatttgattgatcagccaagacagctctcttttttatggaatagtttgtttgtaaatcatttgaattacctcgaaggaggcaaacaaacaaacangcaaacatgaattaatttctcactaaggtgttcggg

SEQ ID NO: 19414 - DNA, 377 bp, Glycine max
cctgctgagagcgctttacagagacatggccgggtattatcagctggaaacccgagatgtggcccaagaagaaacagggcggtaacttgttcatggagatatcttcaggccaccagtccattcatatctgctttgcgtttatgtccgtactggtgttcagatctttgcaacgacacttgtgacattgatatttgctctgctagggcttttgtctccatctaatcgtggaggtctcatgactgctaccgctctagctgggggtctttatgggcttatttgctggctactcctcagcacggttgtacacgatgttcaagggcacatattggtaaaggaacaccttgataactgcatttatgttttcaagcattcttttt

SEQ ID NO: 19415 - DNA, 433 bp, Glycine max
aaaaggacaacaaatgggggggaaaaaaaaaaaaaatacagcgggggtcaagaaaatcctaatcctcttgggctctttgtgtctgaagcttcactcgaaagtggaaacactgctctcatcgactcgaaagcggtttgcggtttccgtcatcggcgagacgccgccgccgtctggaattggaagaccgtcgcagtagtcgcaccatcgcagcacgcattggaaacggaaatgggttcttgtgctacatcatctgttctgactaatcaatttattccgtggtctacaaccaatactgaatctcccttggactccaaattgggcgtcatattttataaaatgtacagaaatacaaacaaaagacaactcagtctctcttttgcttgggatagttataaaatcaggagtattggtgcgattaaatcatacaaagatg

SEQ ID NO: 19416 - DNA, 239 bp, Glycine max
acccgtccgaacacgtccgagaggactacaaaaggggaaccacacgctccggagtggggtttctaatagggaccgctgataactctaaatactacacttagaccacatcaatccccttcttctaacctttagacttgtcatcctgatctttctatatcgctggcataccataatttgtgtccactttcttgaacctttacataaaacttctcaactatgatgcgtcatattcaaatcta

SEQ ID NO: 19417 - DNA, 375 bp, Glycine max
ccggaggggcattccaattggggaacaaccatttatctcacggatgagagactcctctccctgggggtacgagattaacaatacctcgcgatgcacctagtggcttaacatacctgcactaggaaatggatttccagataattttcagagatttcaaatcttcaaatatcctattgcatgaacagcggaatgctaagctatcagactttgggttagcaaggttgggaccatcagatggactgactcatgtcttaacagcggttgtaggaacaatgagatatgcagctcctgaatatgtgcaaactggacgtctaacatcaaagaatgatgtatggagctaccgtgtcttcctttatgaactcataactggcaggc

SEQ ID NO: 19418 - DNA, 407 bp, Glycine max
tcccgggtcgacccacgcgaccggtcacgcgtccgcggacgcgacgacggacgcgtgaaggaagagagtggtgtacgacactgctgctgtcgcactcgatccgttacccctgcccgaacatagcagaaccaaacgacgcccaggtttcggaattgtgttctaggtttttgagtttcgattccgatcgaccgacgatgctggccaatcatttccaaaacggcatcgaaacggcgaggctcgtttggtcgcggattcctaattcggaagaatcgcagctcctcgacgacgccgttggcatccttaagaagaacgacggaggcggtgtcgagagccttgactatgaagtcattgagaattttgcttatcgtgaggaacaggcgcagagagggaagctgtatgtgagctat

SEQ ID NO: 19419 - DNA, 460 bp, Glycine max
agagcaccatactatgcaaatatgtaccataccacacatcccatgaaaggtgtggccaaatcatggacaatgatgatgccatcacctatgcagcatataccattaccatcttctctaatgaataatatttccactcacaattcaatcttgtgttgtgactttaactatgtgaatttgagcaaccaaagaggtacaaggcttttgtgttcagcaaggaggcaaattagataccaagatgatggggatgataaagatagtgatgaagagtatgggcacaatgaggagattgccaagttggagtcttatagtcaatcagcaaaaggagaagtactccttgtgcatgcacttgtggaccaggaggaagttgatgtgcttatcttcaaggggttctcttcatgcttgagctacagtacctcccctgacccaacaagaagcattcttccagctagggcagtgatag

SEQ ID NO: 19420 - DNA, 673 bp, Glycine max
gtgaaacaagctccaaatattctcacaattgccttgaaaagatttcaggtctgagtaatttgatctggatgatcttgccaagttgttgagagatgttttaagtaatataaatatcagttcttatgatttgttctaattttgccttcttgaaatgtgcctcgagtgtaaattgtatgggtgttagtttaccatgactatgcaccatactgtacgattacattatttctttttcctgctagtacttataaaggattgaatactacttgaatgttttttgaatttgtcaacttttctcatgatttttctggggcattgtgaacatgcagagtgggaggtttggaaagcttaacaagagagtaactttccctgagactttagatcttagtccttacatgagtgaagttggagatggatctgatatttataagctatatgctgtcgtagtacatattgatatgctaaatgcttcattttttggtcattacatctgttacatcaaggatttccagggaaactggtatatgattgatgactggaaggttatgactgtggaggtggaagaggtactttctcagggagcatacatgctcttgtatagcaggtgtagtgcccggacatcaagctttcaaattcaaactagcgaatcttcagggatagcagaagttcagacaga

SEQ ID NO: 19421 - DNA, 428 bp, Glycine max
cgatgctgcttccttggaggaatgtctagaccaatttactgccaaggagtggcttcatggggataatatgtataaatgtgatgggtgcaagggttatgtgaaggcatggaaacgtctcacagtgaaacgagctccaaatattctcacaattgcgttgaaaagatttcagagtgggaggtttggaaaacttaacaagagagtaactttccctgagactttagatcttagcccttacatgagtgaagctggagatggatctgatatttataagctatatgctgttgtagtacatattgatatgctgaatgcttcattttttggccattacatatgcttcatcaaagatttatgtggaaactggtatagaattgatgattggaaggtctcgagtgtggaattagaagaggtgctttccagggtgcatacat

SEQ ID NO: 19422 - DNA, 466 bp, Glycine max
  unsure (1)..(466): unsure at all n locations
tgggtaccctctaatttacaatattaaaacagctggacgagactagttcatgataccggtgcaccacatttattgagtgtatggtggaaattaggaagagaaataaatcaataaactaatatatgtaataaagagaggaataagaagaaaaattgggtgtatgtttagcatttttctttgttgaggttacgtgcttcgttttatttattttcaaaaaaactaataattccttgttatcttttagagagagctggtaaaaaaaaaagatctttttttttccaactaaacaaacatgtcatgttttgtgtaaactcagttttttcatggagaatagcacgtaagaacttatgagagaaggtcaaaactcaaaaggggtagaaagaaggggaaaaccggaaaagtgtgactttatttataaagtangtaatggcccatccgtccccacactagcctcaatattttttta

SEQ ID NO: 19423 - DNA, 676 bp, Glycine max
agcctctgaaagtgattaaattccgttgtctgtcttgattcctccatcttagtcccctgtcatttgcagactcatctctctggatcgctgatattcattcatctactttgaaagggatttggtagtgaagacatcattagagtgatttgttattcgctttttaaccctaccatttataacctgcgggaagcaagggaaaaaagcagcagaatgagtagtacacaggtgccaaagaaaagagtggcatttgtgctgattgatgggttggctgatgtgtcactgccaaggcttggatacaagactcctcttcaggctgcaaaactgcccaacttggatgccatagcatctgctggagttaatggactaatggaccctgttgaggttggcttagcttgtggaagtgacactgctcatctttccttgttgggttatgatcctagggtttattatcgcggccgaggagcatttgaatccatgggggctggattggccatgtcacctggtgataatgcttttaagtcaaactttgtgctgccctagatggattgaagctgccatctttccctcaatatgaagtcagagtcaggtatgcaacagaacatagatgtggagtagttgttaaaggaccaaatctgagtggaaatatatcaggaacagacccattgaaggacaaccg

SEQ ID NO: 19424 - DNA, 350 bp, Glycine max
ttttgcttttcaagaagagaatatgatggttggggacttaagcgagcctctgagagtgattaaattccgctgtctgtcttgattcctccatctcagtcccctgtcatttgcagactcatctctctggatcgctcatattcattgatcaactttgaaagggatttggtggttaagacatcactgatactgatctgatctttgcttcttaaccgttctatctatgacttgaggtaaacacatgaatgaaggaccagattgaatagctacacaggtgccaaagaaaagagtcggcatctgtgctgatagacggattggccgatgtgtcactgccaaagcttggatacaagact

SEQ ID NO: 19425 - DNA, 431 bp, Glycine max
  unsure (1)..(431): unsure at all n locations
gtacgaagtgatgtgaagagtcgaacccaagagcttcgtcggatctcaaaagctggatggaaatcaaaaccatcatgattgggccactaaaagactagttgaggatgaactgaagagacttttatttggtttggagcacaattacacaagttttggaagccatttaaacagccaatggtgcttttaaacgtactcagttcaacagtgttatcttcatgttagaattgaagatgagcttattggttagtgaacatttgaatgctcagcagtgcagttaaacgtcccatgctacgttgataagatttagctactgactgtgtgcatttaaatgtcgtccaacgggacatttaaacgtactcagtttacttaggttgatgcaaaaaatgttcctaactntgtagacttttgataggtggaaaacactatgtaac

SEQ ID NO: 19426 - DNA, 734 bp, Glycine max
ctcaaacccttcaccttcaacacccacaaaaccacccttcccaacccccccttcttcctcttccataacccctcttcttcaagacctctttttgaaccaaaaccactcttctacaccccatctacacctctctccctccacccaccgtacaccccgctctccccaccgcctctcccctcaagcccaccgaattctccaaaccctaatccacccttccttcgattccaaccgcttccacgaaatcctccccctcctcttcgaccaaccctcttcctcttccctctcctgggacattctcggcattatcaagggtttggggtttaacaacaaattcgaccgcgctttgtccctcttcgacttcatccgtacccgaaacgaccgcgtttcgctcctgaacggttccgtgatcgccgtgatcgtctccattctcgggaaaacgggtagggtttcccgcgcggcgtcgctgctgcacaatctagaagccgatgggtttgaggtagatgtgtatggctacacctctctcataactgcttatgctaataataaaaaatacagagatgcactcaaggtgtttgggaaaatgaaagaagtggggtgtgaacctactttgattacttacaatgcaattttgaatgtttatggtaagatgggcatgccctgggctaagatcattgctcttgttcaggacatgaagtgccatggccttgcccctgatttgtgcacttataatactc

SEQ ID NO: 19427 - DNA, 416 bp, Glycine max
cgttctgagcagaaaccaatttagtggccacatgcctcaaaatattggaaacatttcaaagcttaggcagcttgatttgtcactgaataatcttagtggagaaattccagtcgcctttgataatctgcgtagtcttagtttcttcaacgtttctcataacaacctctctggtccagttcccaccctacttgcccaaaaatttaactcgagctcatttgtggggaatattcaactatgtggctatagcccttcaaccacatgtccctccctagctccttctggttcacctcctgaaatatcagaacaccgtcatcataagaaattaggcaccaaagacataattctcatagtagcaggagtgctccttgtagtcctggtaacaatttgctgcattctgctattctgcttgataaaaa

SEQ ID NO: 19428 - DNA, 417 bp, Glycine max
gcattacctacatccattcactgtgaaccaattggacagtttaaggtaccaagctatgaacattgtggtggttaggcttgggagagcagaaccaccccttaggaaagaggttgtggagtacatgcttgatgtggactctcacatatggagcatgagaagaagcaaagccaatttcttcagaattgtgtcactcttttctggtgcaatatctatgagcaagtggcttggtgaggtacaacagtggaagaatccagtgaccacaatcctagtgcatgtcctctttttcatcttgatatgttaccctgaactgatcctccccacaatgttcctctacatgtttctcattggaatatggaactttaggtttaggccaaagcacccttcacacatggacaccaaactttcttgggcagaagc

SEQ ID NO: 19429 - DNA, 414 bp, Glycine max
caagaacaaaaaaaagtaaagaatttgctttgcgaggaagtaagtaggagatgctctgaactttcaaatttgtacaacccctaggaagagaagaagaaggttcaaaatccaatccatttttcatttcgaaagatcgtgatcgcaatgtccctctccaccgtgaggcagcggcgctcggagccgtctgatccgtcgccatcagaaccgtacacgaagctggacaagcccgagaaagcggaggagaaagacgaagggttggggtgggttttcccgttcgtggctcttgggttattgaggtacatgagtgccacctccaacatcatccacgattgcgacgaggtcttcaattactgggagcctcttcatttccttctctacaaatctggattccagacatgggaatacagttcacag

SEQ ID NO: 19430 - DNA, 715 bp, Glycine max
atttgcaacacctttcatcacttccaaaaatcttccagcttgaagatgatccaaatgaaaatgttcggcggaagtcttatgataggagattttatgagaaggttcaatggaagaatttctctcatgtgtgcactgctccggtggaatctgaggaggatctttcaatagtaaccggagcacaattgcaagttgagaattatggcataaaaaatatactcttcttaagacttcgattctcaactgtgttgggagctaaagcagtgaagcatcctgagtgggacgggtcgctcaagttgggagcgaagtcaggactcatatccactttaatcagccaacacttcacgtcaacatttcagaagccacctccgcgaccagcagatgttaatataaattctgctgtctatccgggcggccctcctgttcctgtgcaagctcctaagcttctcaaatttgttgacacaactgagatgaccagaggagccacaagagtctcctggctattgggttatctctggagcaaagcttgttgttgataagggcaagatttctctccgggttaagtattctttgttgaccatggtattaccagatgaagaagagatgttggatgatcagtagctgattccttgcctccagcaaacaagtgctcatttttaaagtgtggtaggtcgggaaataagaaagaaggtagagggtactactagttatcacttgg

SEQ ID NO: 19431 - DNA, 447 bp, Glycine max
gttgttatgtaaggaaggaagaagcagagcgaagcggtgacagacagaagaaaatgggaagcagaggtccacctcaatcccatccaaattccgctgccatttccaagggttacaacttcgcttccacttgggaacagaatgctcctctgacagagcagcaacaattcgcgattgtatcgctttctcacgccgtttctgagcgaccgttgcctctcaagttggctcaagagaatgcgtcggtacaagacaatgccttgtctgttaaaacgaaggatagttccgttgatgactctggtactattgagactgttatggtcaataccaatcagttctacaaatggtttacggatcttgaatctgccatgaaatcagagacagaagagaagtatcaacattacgtgaacactctaacagatcgcatacagacatgtgatgaaattctccaac

SEQ ID NO: 19432 - DNA, 525 bp, Glycine max
acccgcgatctactcttgttgatcgctaaatgtgtagtctcatttccaagtcacactgtcacctgcgacaacaactccctctgcaacccactcgcactggcaatggaattgcgagggtgaggatgagtgggagaatggaggtggtgtgtcggggaatgttgaaacccagaaagttcatgcagaggaggaggaaattcgaggttttcaaggattctgcagatgaagctgaccagaagaattggaggagaatcatgactgaaatcgaagaatccggttctgctgtctctgtgctctctgctgagaagattaataaccaaaatattcctaaagacctcgttgttggtaccttgattaggtttaaacaactcaaaaagtggaaccttgttgttgagattctcgaatggcttcggactcagaactggtgggattttggtaagatggatttcttcatgcttatcacggcttatgggaagctaggagacttcaatggtgccgagaaggtcttaggcttgatgaataagaatg

SEQ ID NO: 19433 - DNA, 1085 bp, Glycine max
ctttcccttcagtttgtgttgagaggaaaagtgtgagaacgaaaatggagcattgtaactgctacatgttcacgctgagccttcttcttcttcttcttcttactccgccttctctctccgacgatctcggattcgattttccggcgaagaagctgataagagaccttaacctttttccttctgaagatgtcaacatcgttcctcgccactccaattctcacgccaacaaaatcgtcgagaaaccgcttaggttcccaaacttagtgccttcagactccggcatttccctcgacgacttggctcaccgcgctggctattatcttattcctcattctcatgctgccaagatgttctactttttctttgaatcaaggaacagcaagaaggatcctgttgtgatttggttgactgggggaccaggttgcagcagtgaatcggctgtgttttatgagaatggccctttcaagattgctaacaacatgtccctagtgtggaatgaatatggctgggacaaggtttctaaccttctgtatgttgaccaaccaactggaactggctttagttacagtactgataagcgtgacattcgtcatgatgaagaaggtgtgagcaatgacctctatgactttctacaggccttctttgctgaacatcctgagtatgtaaagaatgacttttttattacgggtgaatcatatgctggacattatattccagcttttgcagctcgtgtccataggggaaacaaagctaaagaaggaattcatataaacctaaagggatttgccattggtaatgggcttactgatcctgggatccagtataaagcttatacagattatgcactggacatgggcataattcagaaggctgactatgaacgcatcaacaaagtgatggttccagcctgcgaaatggcaataaaactatgtggcactgatggaaaaatcgcatgcacggcatcatattttgtttgtaatacaatattcaattccatcatgtcacatgctggtgatatcaatgattatggacatcagaaagatgtgtgtggggagccattgctcatgatttttcgaacttggaga

SEQ ID NO: 19434 - DNA, 429 bp, Glycine max
gacgttagatcatgtgtttatcgcaagaaaacacggcgtgggtcatcaacattcatggaaaaacagataccttttactggaatattaagcaataatgttgaagataatccagattttttcaactggaacagagtgaaaattcgttattgtgacggtgcctcttttgctggggatggtgaagataaggctgcgcaactgcaatttggaggacagcgtatttggtcggcagcaatcgaagatttgatgtcaaagggaatgcgatttgccaggcaggctcttctttctggatgctcggctggtggtttggctactattatacaactgtgatgaattcagaaggttttttcccacagactacgaaagtgaagtgtcttagtgatgcaagattatttcttgatgcgattgatgtctccaggggacataccatca

SEQ ID NO: 19435 - DNA, 992 bp, Glycine max
ttggtgctccccatgtaaagatccagttgctctcaagggggataaaatgaaagttgatcctatgcctcttgaagaaggtgaagttgctgaagaggcaatggatgcgagaaggtccataaaacggttctcccaagtgtttgactctgaaagctcgaccagtaagcagcagcatgggaccgagagggctcttcttgagttaattcttccttgcatagatcaaagctctgatgaatctcgtaattcctttgcaagcgatttgatcaaacaattaaattatattgagcaacaaataactttagttactcgaggaccaagtaagccaacagcaagtactcctgtgactgaaggtcagacaaataaagtaaatagccgcaggagaaactggagaagaatctggtggcagccctgggttagccagacgaccaacacctgcaccagattcttctccactttctcctgctgctttgcgagcatcaatatctttacgtgtgcagttactcatgagatttcttcctattctttgctcagacggggagtcttctgcaaggagcatgagatacatgcttgcctctgtacttcttcgtctccttggcagccgggttgtgcatgaggatgcaacggtgaatcccatgcactatactccattgagaagggaggcagagtcacatgctgaagcttcttttgtagattcttctgctgagggcctgtttgatcatctgctgttgattttgcatggattgttgagtagttctcctccaagttggctcaggtcaaaacctgtttcaaagacaactaatgaacctacaagggagttttctggatttgaacgcgagccattggaggcattgcagaatcatcttgataatatgcaactgccagacactatccggtggcgtatccaagctgccagcctgtgctccctccctctatacggtgctctttctcatgccagctgccaactgttccagcttctgctcttgcatctcttcaac

SEQ ID NO: 19436 - DNA, 315 bp, Glycine max
tggggtgcgtgagggagtaaagagacggacgaacgaactgctgctgcatcgagtgcccttgcaggctatagcgccgtggtcagatgttactgggttttctcaaaacgatagccttaaccgtgtcattgcgatcccgtacacggtaaacttgtctctcttgatggattactttaacgctggttagctcaacgatctacgctcgattagtgccgtcactctcaccgacggaactgtccaattcaactactgcatcttcactggatgtccagttgggattatatgctttcgattgcatttattcacgcagatttcgac

SEQ ID NO: 19437 - DNA, 567 bp, Glycine max
ggaagaaaggcagagttattgccattgcctctgcctcttgcaacaccaaactgatacacacttaataatattatagtaaaaattagccaccaaagtacactaaccccttttttcatacaactcaatagctggattggagcaaggtgaaagtaaaatcatttgcaaccaatgccgttgaacatatttcaggacaaagatggattgccacggattatattgactgagccaaagggttcatcagctgaggttcttctttatggagggcagattatttcttggaagaatcatcgaaaggaagaacttctttttatgagcagtaaggctaacaagaaacagcataaagcaatcagaggaggaatatcagcttgcctagcacggtttggtgatctcagttcacttgaacaacatggatttgcaagaaacaggatgtggtcattggatagggacccttcacctcttcctcccttagacaatcagtcatctgtggatctaatattgaagtcaacagaagttgacttaaagacaccctgtacatttgagttacggcttcgcatctctctcaatgct

SEQ ID NO: 19438 - DNA, 386 bp, Glycine max
  unsure (1)..(386): unsure at all n locations
tcgttttttcgtccgcccacgcgnccgcccacgcggccggagttattgccattgcctctgcctcttgcaacaccaaactgatacacacttaataatattatagtaaaaattagccaccaaagtacactaaccccttttttcatacaactcaatagctggattggagcaaggtgaaagtaaaatcatttgcaaccaatgccgttgaacatatttcaggacaaagatggattgccacggattatattgactgagccaaagggttcatcagctgaggattttgagaaagtttttcatattctggacttcattaataatctatggccatctgaagcagtgagtgctaacatcttattagatcttctgagtacagaatctatgcttaggca

SEQ ID NO: 19439 - DNA, 487 bp, Glycine max
ggacgaagttggcggcaagtttcgaagagagagagagaagaagcagtgggtggtcgaggtatcactttcttctccgcccccgccacgccctagaccgccgcgggcgttgccagcacgtcgctggaaggcggtggcttgttggcggcggagcttcgcgagattaggttcggatcgctcggtctcgctaggtcaccgctgacgagaatttgaacttctcgtcactactaagccgctatttagctaaagcttgtgttgggagaaagcaaagagcatctagtttgttaacaatggaagatgatctgttggacacagaagacaggaacaacaatggcagttccaccccaaagaaatcgaagcagcggcgaaagaggaaggagtacatggtggacgaggatgggcaggttggggcacgagagaagctggcaaaaagaatcttggtatctctgacgaaggccttcctatgctttgggaattgggtcccaaacct

SEQ ID NO: 19440 - DNA, 863 bp, Glycine max
tccgatcttattgtactgccaatgaagcatatcagtttgcgcgtcatcaagcgtttgtggttctaggttctacttgttcaatatatatcctctcatgtgaaaaaagttgatcaagtgatcattcacaccatgggtggcgtcttctaccatgaagaaaagccaccaaaccataccaagagatgcaaattcattgcagggactttgaaagaagtgttttcccactgtcaaacttttagttgtctgaggctttcaactgcaagccttgaggaggagtgccccatcattgatgatgttgatgaggtgattgtttcagaggttagaagccaagttatggagaaacaaaagcacaagccaagcccattgagagaaggtctttccttggcatactctcctgcaacaagggaactgtatgtcactcacagtcacacaatggcaccacaaccaagggtggtagtaggtgatgaagaacacgacgaaagagaagagtttttttcggttaaaagttgtctctcgtgcttttttcgagtgctgtgagtgaccaagcattttattctgtgaagacaaacctgtctagatgttcaagcatgaatgaggttgaagtctcagaatattggagacgttcaataattcaagagttttgccactgcgagggatggccttttgggccgacccgtaaagctgtgttacttccaccactgcctaagtcaccgtctgagtcatggttgtcgcgcaaaatacaacgaagtaccaaagttacctgaatttatttggcttttacatgttctgttttttcctgtcttcatatatagactatatgaactcttgcacaattacgtaccacttgattgatcaataatctttcc

SEQ ID NO: 19441 - DNA, 842 bp, Glycine max
cgcgtgtcgcgaagagagttcagagaattttagggttttgctacccgtggttacatgctagtgctgagggcttgcaatttgcttaccagctcttatacctgttggatgctactggatactactcgctagcactgcacgcacttgggattcatgtttgccgagctacaggccaggagctgatagatggatacctcttctaggatttcaaagatgcgtaaccgtgaacgtgagaggcttcgtgggcctcaatggttgaagacattgcaaggagcattgctcagctgtacgtacactgtacttgactatgcacaaaccggtttgattgcagcagtgttcttctttaaaatgatggaatggtggtaccaatctgctgaggagagaatgtcagctcctacagtatatcctcctccccctccttcgtcttcaccaaaggtagccaaagaagggataccactaccaccagacagaacaatttgccccttatgctcgcaaaagcgtgcaaatccatctgtagttactgtttcagggtttgtcttctgctatgcttgcatatttaagtatattactcagtataagcgctgcccaattacgttaatgccttcaacggttgaccagataaggagactctttcatgatgtctaggccagttggagcggaattggtagaaattacagttatcttgagtacataggcaaaagactcccaattattgttgtactactactactactactaatataaagtatatctttttcttttagtaagtggcttaataagaggtatcatttttgttattttcctcttattcattcgtttatgaatactatatacgtcgtcgtcgc

SEQ ID NO: 19442 - DNA, 300 bp, Glycine max
gggccacagactatggttgttcagaaaaggaggaagaatttcattggctgatcaagtactcaccattgcataacgtccggagaccttgggaacagcatcccgatcagtcaattcagtacccatcaacaatgctattgactgctgatcatgatgatcgtgttgtgccattgcattcgttaaagctgttggcgaccctgcagtatgtcctcgttaccagccttgataaaagtccgcatacaaactccaataattggtcgcattgaatgcaggctgggcatggagctgggcgtccacacagaa

SEQ ID NO: 19443 - DNA, 870 bp, Glycine max
tacaagttaacgagttatgggagctccccggacctcagttttaaaggggcttgagggcgttaaaaagaaagcgcagagaaaggtgttgttctcagatccatccatcagtggtgggcgatgttgttgttctcagatccagactgagggggtgaaggaaaatgaagtcgtcgaggcgtctgttgaggatcgggcttgtgtcggcgtggtactcgtcgaacattggggtgctgctcctgaacaagtacctccttagcaactatggcttcaagtaccctatcttcctcaccatgtgtcacatgaccgcttgctccctcttcagctacgtcgccatcgcctggctcaagatggtccccatgcagaccatccgctcccgcctccagttcctcaagatcgccgccctcagcctcatcttctgcttctccgtcgtcttcggcaacgtctctctccgctacctccccgtctcttttaaccaggccgtcggcgccaccactcccttcttcaccgccgttttcgcttacgtcatgaccttcaagcgcgaggcctggctcacctatctcaccctcgtccccgtcgtcaccggcgtcgtcattgccagcgggggtgagccgagcttccatttatttgggttcatagtatgcattgcagctactgccgcacgtgccttaaaatccgtgttacaaggaattttgctttcttctgaaggagagaagttgaattctatgaaccttcttctttacatggctccaattgctgttgttttccttcttcctgctacacttataatggaagaaaatgtggtaggtattacattggctcttgccagagatgatgtgaagatcatttggtatctgctatttaattcagcacttg

SEQ ID NO: 19444 - DNA, 538 bp, Glycine max
aaagaataaaagaaacgagcggcagtgaggtaggtccctgttcctgttggaatacacacgcgcttttacctttctcatcaattcattcatcaaaatcactccctacgcttttaaatacaatcgaagagagagtattgttcttaatttcttaatcctccgtcgtgggtggcgatgttgttcttctccggagcggattctcagatccatggagcaggctcatattattaagccaaagcctctcagatccgcggtggcggcgtgacggaaatgaagtcctcaagccgtctcttcacgatcggactggtgtcggcgtggtactcctccaacattggggtactgctcctcaacaagtaccttctcagcaactatggcttcaagtatcctatcttcctcaccatgtgccacatgaccgcctgctccctctttagctacgttgccatcgcctggctcaagatggtccccatgcagaccatccgctcccgcctccagttcctcaagatcgccgccctcagcctcgtcttctgcgtctccgtcgtct

SEQ ID NO: 19445 - DNA, 539 bp, Glycine max
tcggctcgagggcaagcatatgagttgaccatcacattcatagaatctggaagtggctatctgaaccaaacaaaccactctcaaggttaatcaaatcttggttcttttcatttcaccagcttctacttttcttgttctgaagcaggggaaaatgacaatggttttttggtagtggtaatttgtgaaacattgatttggtaaagatggcgtggagaaaagggtgtgaggaagtggctaattcgaagcctctgttcctcacgatctacactgttgtcatcattggaatcgtggtttcctccttcttcgtcttctctgctatatactcaaccaaccctccttctgctcaatcttctgcatggctctcttccatttcgagtgatgaaactcgtgttacagatcagacactaaaggtttctcggtcagcagcggtgcttattgtgcccactccttccccaggatcacaaaatgaatggccaacgtctatatgggatgatccaccacccaataaaaagatgccacctttggaggatttcaggctg

SEQ ID NO: 19446 - DNA, 539 bp, Glycine max
  unsure (1)..(539): unsure at all n locations
tgtatgctccatattagcagcagttatgttacgttatggaaggtaccagaaaaaggcagcaaggttgatccaagaagtcactgcttctgcaaatgatgtagcccaagagacattctctctggttagaactgtacgagtttatggaacagaagaaaagaacatggaaggtataagtggtggctggagaaattagctgacataagcttgcgacaaagtgctgcatatggagtttggaattttagctttaacattctttatcattcaactcaggttattgctgtgctatttggaggaatgtctattctagcaggtcatatcacagccgagaaacttaccaagtttatattatacagtgaatggttaatttattctacctggtgggtgggagacaatatatccaatttgatgcaatcangttgggctagtgaaaaagtattccacttaatggatctcttaccgagcagccaattcatagaaagaggggtaacattgcanaggttaacagggcgtattgaggttctaaatgtatcttttcacta

SEQ ID NO: 19447 - DNA, 389 bp, Glycine max
ggtgatagcacgtagattagagccatggtaaaggaattcaacacccaaaccgaggttagtgtgagattggaagccctctgggcagttctgtccaaggatttcgtcaccgtagctccaaaggtactccccaatattgtgaaggatgtgcaagtgattgaaggtgatggaggggttggtacaatcctcatctttaattttttgtctgatgtgtccccaagttaccaaagggagaagatcacagagtttgatgaaatttcacatgaaattgggctgcaagtgattgaaggaggttatctgagtcaaggattgtcatactacaagacaacttttcagttatctgcaataggataggatcagaccttggactacgtggaaattttttatgacca

SEQ ID NO: 19448 - DNA, 459 bp, Glycine max
gacgaaaaaaatagacacaaatcaaatgtaatcaggtgagatcacgatcccggcgtttgttgcagtccaaacgcatctgtcgtgtctggcgcgcactctctgtttattattagggttttgttttaaatctcttttttattttaccacccaaaattcccatctctctccccagtccaggcttagaaatggcacgctctctctgttctgcaagtggaatctctaatttttagggtttcgtttcgggaatttctcatttccttcaataatgaccgaattgcactctcatgacaatgccgcggttgctactgattccaagccggaggtttcttcgacggaagaatttagggttagtgtttgctccgacgctaacacatcatcatccaccgtcgataccgataagtttcacggtttcgatagcaaatcgctgttaccggaatttgacgagtacgtggctgctga

SEQ ID NO: 19449 - DNA, 514 bp, Glycine max
gaaaatagaggaggtgccaaaattgtgcattgtagctgaatgagcaagtagtggaaaagctaaaaagcacattctgagaaagaaagataatgggtgcttactgcaacggcaacgtttcgttgccaccatcctacgacgtcgcttcagcccaagatcccaggttctgcaagcacgttcgcgacaacgtccatggcaacatttatctcgattccctcagtttgaagttcattgacactgagcagtttcagaggcttcgcgagttgaaacaactaggttttacaaacatggtttatccaggtgctgtgcattccagatttgagcattctcttggcgtgtattggcttgccagtcaatgtgtggaaaagcttaaaacttatcaaggcttggagcttggtattgatagatttgatattcaaacagtgaaacttgcaggacttctgcatgatgtgggacatggcccgttcagtcacttgtttgaacgcgagtttcttccccaagttattagtggttctga

SEQ ID NO: 19450 - DNA, 737 bp, Glycine max
gcggcagcaggggaaaaggctttagatatagggaaactttttaattatttttggtatggtgagaagtgcaagaagaggaagaagttgagttgagttgaggttggagctgaaagaaaattgagtgagaattcaatgacacagaatctgaagcataccgtggatttggaatgcagtgataatagcaggccgtcaaagatatcaaaaatcgagtatccgagtgacagtgacattgacgaagaagaagaaggaatgagccaaaaccctaggaatgggattcagcgctatttggttgcaatcgagtatattgggactctcttctccggttctcagaagcagctcaatgtccgtaccgtcgtcggtgctcttgaggaagctttttccaaatttgttggccaaccggtctctgtgtcttgttcaagtcgaactgatgctggagtgcatgctttgtcaaatgtttgtcatgttgatattcaacgcatcagcaaaaggaggcctggtgaagtgttaccacctcatgaacctgctgtcgttggaagagctgtaaaccatttcttacagaagcacgacagtgacttaatggttattgatgttcgatgtgttccatctgattttcatgcaagatttaaagcgcaagagcgcacatacttctatcggttgctttctgggccagagcctttgtcaaccttcgagaaagatcgagcatggcatgtacctgaggagcttagtcttccagctat

SEQ ID NO: 19451 - DNA, 398 bp, Glycine max
ggaactaatgggctcctaacgtgttgcatacgccgtagcagcatttttgggcctggtgataggctgttggtgccttccctagttgatgctgccagaaaagggaagtctaagttcattattggtgatggcaataatgtttatgatttcacatatgttgaaaatgtggctcatgcccatatatgtgctgatcgagctctagtttcagaaggaccaatttcagaaaaagctgcacgagaggcatatttcataacaaatatggagtctatgaaattttgggagttcgtgtcactggtagtggaacgtcttgggtatgaagggccacgaataaagatccctaccttcgttatcatgccaattgcacatgtggtggagtggatatataggctactaagcccata

SEQ ID NO: 19452 - DNA, 1985 bp, Glycine max
tactcactaatcatcatcactaacaccagtgaggagaaaaatggagatagagaagagcactaagggcagtgcggaaataggagagaaagaagagaagaagaagaagcagcatcgacgaggaggcatcagaacattacctttcattcttgcaaatgaagtgtgtgacagatttgcaagtgctggttttcatggtaacttgataagttacttgacccaagagctgaacatgccattggtagctgcctcaaacacactgacaaactttggaggaacatctagcttcacccctctcattggggctattatagcagattcctttgctggacgtttttggaccattaccgttgcttctctcatttatgaactgggattgattagcatcactgtatcagctatactgccacaatttcgtcccccaccatgcccaacacaagctaattgccaagaagccacatcctcacaactgtggatactctacatctccctcctcctcacatctgttggatcaggtggcattagaccatgtgttgtgcccttttcagcagaccaaattgacatgaccaaaagtggtgtggcatcaagaaagtggaacatcttcaattggtactttttcagcatgggcttcgcttctcttagtgctttgaccattgtggtttacatccaagacaacatgggctggggttggggccttggaattccatgcattgccatgttgatatccatcgttgcctttgtgttgggctcaccactttataagaccgtaaaaccagaagggagccctttggttcgtttggcccaagtaaccgtggcagctataaagaaaaggaaggaggctttgccagaagatcccaagcttttgtaccataattgggaacttgatgcttcaatttctttagaagggaggcttctacactctgatcaatataaatggttggacaaagctgcaattgtcacagaggaggaggccaaagatccaactacaacaccaaaattatggaaattagccactgtccacagagttgaggagctaaaatccatcatcagaatgcttccaatttgggcatcaggaatcctgctcataacttcttcatcacatctgcacagttttgtgattcaacaagctcgcacgatggaccgtcacctctctccctcgttccaaatttccccagccagcatgtccattttcagcgtgctaaccatgatgtcaggagttgttctatatgaacgcctctttgttccctttgcgcgcagattcacagggaacccttctggaatcacatgtttgcaaagaatgggaataggcttcataatcaatatcatagccactgtgattgctggcctaatggaaatgaaaaggaaatctgttgctgctaagtaccacttattggatgatccaaaagccactattcctataagtgtgttctggttggtacctcagtattgccttcatggggtggctgaaattttcatgtctgttgggcatttggaatttctctttgagcaatcacctggaagcatgagaagcagtgctacagcactgtactgcataaccacagccattgggaactacatgggtacattgctggtgtcattggtgcataagtacactggcaaggagaataattgccttccggataggaacctcaataggggtggattggactactattattttcttgttagtgggattcaagttgtgaatctcgtttattattgtatatgtgcttggttgtacacttacaagtccgtggaagaaattagtgaaaagaacaaggaagaggatttggaacaagccaacgaacatgtctcatctgatgacaagttaaatgatggtaaggaggaagaaaagagaggattaacgaaagatgaatgaattgatggggttgatattagtttttagcattgttgattgttgaactttaaggaatgttcttttcctcatcaaatggcatatgtaagcacatggtagatcgtgtatactgttt

SEQ ID NO: 19453 - DNA, 652 bp, Glycine max
ggttgggagggaagcatgaaggaaatttagtaaagggaagtatactcctgcattgtttaaattcacttcttaagcattcagctgtgctggtgcagcccctaagtaggtttgaccttgatgaatctggaaaggtgattacaatggatatccctttgcccttaaagaattctgatggatcaaatacctatgttggaaaagacttaggattatgtgaaggggaaagttcaaaactgaattctctcctgactgatttggcaaacaagatggaactgtggacggttgggtatattcgcctactgaaattatataatggacgagaatcaaaccagttctcacctgaagaagagaagtatgaatgggttccgttgagtgttgaatttgggatgccactattcagtccaaagttgtgtaatgatatatgtcaaagggttgtttcatctgaattacttcaatctggctcatttgaaaaacaccatcatgcaatgcaaagtttaaggaaaaacttgcgtgacatttgtgctgagtaccaagcaacaggtcctgctgcaaagattctttaccagaaggagaaagctaaggaatcctctcgacaacttatgagttatgcaagtggaaggtggaatccgctcatggatccttcttctccaatttc

SEQ ID NO: 19454 - DNA, 777 bp, Glycine max
taatgtccctcatcgcaatcccgaagataaaacctaataggtgggttagtttaggtcaaaagggtgtgaagaaagattggaacttgttcctcaacacgcctttctggaacttgaatttctgggacaacgtgagtactctagcaggggaagttgatgaaccgcagaagacttttcctttggctctctttgttgctgtgattttcacttgcgtgtcttacttgataccattatttgctgtcactggagcggtctcggttgatcaaaccgaatgggaaaccggtttccacgcgcaggctgcggtgatcatcgcggggaaatggttgaaaatatggattgaatttggcgcggttttgtccgcaattggacttttcgaggcacagttgagcagcagcgcataccagattctcggcatggcggagatcggaatattacctaagtttttcggagttcggtctaagtggttcgatacgccgtggctggggattttgatttcgaccatcataacgattggtgtgtcgtacatggacttcaccgacatcatttcctcggcgaatttcttgtacagtttggggatgttgttggagttcgcctcgtttctttggctgaggtggaaatctccctccattaagaggccttatcgtgttccgttgaagcttccacttttggtggtaatgtgtttggttccgtctgggtttctggttttgattatggttattgctacgaaaactgtttatttggtgagtggggttatgaccgtggctggggatggtttttttg

SEQ ID NO: 19455 - DNA, 359 bp, Glycine max
ggggcacttgtcttggaaagaatggacagctccatttttcgccttatagtttcgtcgtgtcttctttttactttcctgctggaagctgttcatggcagcaaaaagtgttacattgtatacttgggagctcattctcatggtcctagccctacctctcttgacctcgaaatcgctacccattctcattatgatttactagcttcagtcttgggaagtgaggagaaagcgaaagaagcaattatttactcatataataaacacatcaatggcttggctgcgctacttgaggaggaagaagcagcagatgttgcaaaaaacccagatgtggagaatgtggtcttgatcaaaaaacataaact

SEQ ID NO: 19456 - DNA, 400 bp, Glycine max
ggagtagaagaaggatatagtcatagagtcacagaagaggcggcgagtgttgggttgagaatcctatcttgttcgtctttctcgtcttctttcttttcttttgtttttcttgtggatgtgaaacagaatctatgacgagtcaatcggcgaagaacctattggttttgttggggctgggtttagctggaatagttctaatcaccagaaagctcaagaagtctgtcagaaaggatttgggggctttcattgagaagcttcagctgcttcctcctccccagcctgctcctcccaaggctccccatcccctcaccgcactcaccttcgcactttccgacctatttgacatcgaaggacacgtgtcgactttcgggcatccggagtgggctcggactcacgaacc

SEQ ID NO: 19457 - DNA, 476 bp, Glycine max
ggatcgcagtgggtatagtagatgaagggaaagggacagcagccagcttcgggactcacggaaccttctaggctatatataaaaaaaaaaatattgcacgctcctccgggctcctggcatttcaaattcaaggcctctttccaatcttcaaagcagctactgcggcagctccattttccaattgaagttagcagagcagccatctgtgtgtgaaggggacatgatggatgattcccaaaagcatagaatcctgatggtctcagattttttctatcccaactttggaggtgtggagaatcacatatattatctctcacagtgtttgctcaagttaggccacaaggtggtggttgcaactcatgcttatggaaatcgatctggggtccgatatatgaccggtggtctgaaagtctactatattccatggagtccatttgttatgcagaatacattaccgaccttctatggcgtactac

SEQ ID NO: 19458 - DNA, 425 bp, Glycine max
ggccctaattcaggacattaaaccatagctagcgtgtccttgcgaaagatgaccataagcttacagtttaagggctttgtgaggatatgatctatggcacttgtgtcacagcttccaagtcactgattttcagagcgttagtgttgcagaagccattacattttcaagtaaaattctcctccaagtgtcttcctacgaagataagaatggaaagtaatcttaatcatagcatagagggcgacaataaagcgtctaggggtgccttcgttgtcctagaaggcttggatcgttctgggaagtcttctcagtgtagcagactagtgtccttcttggagggacaagggatctctgctgaattatggagatttcccgacagaactacaaatgttgggcaaatgatatctgcctatctaactaacacatct

SEQ ID NO: 19459 - DNA, 294 bp, Glycine max
ctcgagccgcgcggatcgtaagggctgaggatttttggtccgcacgctcctgctcctgactcaccgctgttcgctctcgccgaggaacaagtcggtcaggaagcccgcgcgcaacagccatggcttttaaggataccggaaaaacacccgtggagccggaggtggcaattcaccgaattcgaatcaccctaacaagccgcaacgtaaaatccttggaaaaggtgtgtgctgacttgataagaggcgcaaaagaaaagaatctcaaagtgaaaggaccagttcgaatgcctacca

SEQ ID NO: 19460 - DNA, 797 bp, Glycine max
ggtgggcaaatttagttaaagacttcattcccaatggtgttgatggtatatggaatgatatgaacgaaccagctatctttaaggttctaacaaaaacaatgcctgagagcaatgttcatagaggagatactgaacttggaggttgtcagaatcattttttctatcataatgtctatggtctactgatggcaagatcaacttatgaaggcatgaaactagctaatgaaaagaagcgtccttctgttcttacgagagctaggattttctggcagccaaaggtatgctgcaacatggactggagataatctttctacatgggagcatcttcacatgagtatctccatggtacttcagctgggacttagtggtcagccactttcaggtcctgatattggtggatttgctggaaatgcaacacctagactttttggaaggtggatgggtgtaggttccttgtttcctttttgccgagggcattctgaagctggcaccactgaccatgaaccctggtcttttttattttgctcatacaaggggcactccagtttcaacccctactttctttgctgatccaaaagatcccagtctgaggaaacttgaaaattcttttttgcttggtccagtcttagtgtttgcaagcgccttacgtagacaggggttggataagttggagattactttgcctaaggggatatggccgaattttgatttcaacgatgcacatccggatttgccagctttatacttaaaaggtggctcgattattcctgtgggcctccctcatgaacatgttgaag

SEQ ID NO: 19461 - DNA, 519 bp, Glycine max
gaaggatcaaaatgtgatggctacagaattcaacaagcagcttaaggatcgagtcatcaaattgaggacagagctcccagaggctgcaattacttatgtagatgtatatgctgcaaagtatgcactaattagtaatccaaaaaagaaggatttgtggatccaatgaagatttgttgtgggtatcatgtgaatgacacacacatttggtgtgggaatttagggactgataacgggaaggacgtgtttggttctgcttgtgagaacccttcacagtatataagttgggacagtgttcattatgctgaggctgcaaaccattgggttgcaaatcgtatactcaatggctcttacactgacccaccgacacccatcacccaagcatgttacaggcattaagcatcatagtcagaaaatcatttctgattggacattaattcctaaaggaacttatatatcagaaattgtaatattgcttgagacttttatttattcctgtgctagatgagaaccactagtttg

SEQ ID NO: 19462 - DNA, 288 bp, Glycine max
cggctcgaggaagaatcctaatttgcgctacctaattcgctgcgaccgtgaaacaaacgaggtttgatttcatgtctggttgttccaatgaggaggaggagatttcgttctcagaatccgatcgtcacggttacgaaggaggcagtgacgatgacgattccgaaatcggaaagaatgaacatcgcagcagcagaagaagaagaatgggtagtggttttggaaaggtggtggtgcaccaattcacgaaagcgaagaagcaagtgcgcaggatcagtagcagaaagagtc

SEQ ID NO: 19463 - DNA, 952 bp, Glycine max
gacagctgatggtggcgtcaccaaatacctgcatggtatgtcactttggaggatgatgttcttcgggaatttggtgcttataatgatcattgggtagtggcaaaaaatgaagaggaagctcagaaagaggctagccagaggtataatggaaagcagtttcatttaagccaggatcctgacgttcttgatacatggttttcttctggtctgttcccattatctgtgctgggatggcctgatgacacagaggacctgaagacattctatccaacttctgttctggaaactggccatgatatcctctttttctgggttgcccgaatggtgatgcaaggattgaagttgggtggtgatgtgccttttacgaagatttatttgcatcctatggttcgtgatgcacatggacgcaagatgtccaaagtccttagggaatgttattgatcccattgaagtgataaatgggatatcacttgaaggtctacataagaggttagaggctggtaacctggaccccagagaactagccactgctttagagggtcagaagaaggactttccaaatggtattgatgaatgtggtgccgatgctctccgttttgcactggtctcgtacacagctcagtctgacaaaattaacctagatattcaaagggtggttgggtatcgccaatggtgtaataaactgtggaatgcagtacgatttgctatgagcaagcttggggatgattatatccctcctgctaatttgattccagaggttctcccatttagctgccagtggatactctcagtgttaaataaaaccatatccaagacagtgaattcacttgaatcatttgatttctcacaagctaccactgctgtgtattcttggtggcagtatcaattgtgtgatgtagttatcgaagtgattaagccttctttactggtaatgatcctaagtttgcttcca

SEQ ID NO: 19464 - DNA, 370 bp, Glycine max
ggtaggaaaacatggtaagttcgcagatgttaagaatgtgcgagtgacatgcacacacacatgttctttgtttgattgaggcttctgaacagtttctgacaccgaaattcagccacaaagttgaccatcttgggatggatgagaatatcatcatgttccaccatttccccacattgatacaacaaggagattccaacaattgaaaactccttatcatctttctcttgcaacatcgtttcgcggttcctttgccgtgatttcaattgttgcataagaaaacatcactcactacttctttcctctcctttttcattcaatttctctgattgacacaattgccgcccagatcagtgattgacccaattgagaa

SEQ ID NO: 19465 - DNA, 439 bp, Glycine max
cctcgagccgattcggctcgagataaaatgtgcaatgagacctagacagagagagagagagacagaaagttttgagtgacacatcttttctcctcctcacacagcaggaacacaatggattcttcttcatcagcaagtgttagtcagcatgccaaggttgttccaaaacaatttgacatcttcttccatgcaggaaggtacccttcatctcgcaggactcattcctcttcctcctcttcctcctttgaatcattctatttcccagaggatcctcttcttagtcctgcatcccctcttagattctctggtgttccattttcttgggaacacttgcctggaattcccaagaaacaaaattctaaaaagaagctgcaagagtcttccttgaaactactaccatttgccccttcaactaccacacactgttcttctaaaaagc

SEQ ID NO: 19466 - DNA, 270 bp, Glycine max
attttctcctcacacagcaggaacacaatggattcttcttcatcagcaagtgtttgtcagcatgccaaggttgttccaaaacaatatgacatcttccatgcaggaaggtacccttcatctcgcaggactcattcctcttcctcctcttgttcatcactttcaccctcctcttcctcctttgaatcattctttttccctgaggatccacttcttagtcctgtatcccctcttagattcacaggtgtaccattttcttgggaatacctgcct

SEQ ID NO: 19467 - DNA, 386 bp, Glycine max
gtagtgaaaggcaccaaaatccaaccacatcaatagccatgaaaaccacactctcactctctcctttacttctcttcctactcttctccctagtccaaggactcacccccaaatgtgacacccaagaccatggctcaacccttgaagttttccatgtgttcagcccatgttccccatttaggccatcaaagccactctcatgggcagagagtgtcctccagctgcaggccaaggaccaagccaggctacagttcctggctagcatggtggctgggaggtcaattgtgcccattgcctcaggaaggcaaattattcaaagcccaacttacattgtgagggccaaaataggcccttcaccccaaaccttgctcttggctatggacact

SEQ ID NO: 19468 - DNA, 436 bp, Glycine max
tgatgtgaaggaggagggagaggaggaggaggatgaagaagaggaggaggggttgaaggaagaggtggatgcaaatggggacgtgaagatgggtgagattgatgaggggcaggttcaggagttggaggagcaccgcattgagttgagtctcgggcaagataataatgttgagagggttgaagttgagaaggagcagggtggagaggagcagatgatggatgtgggttttgagcagtctaaggaggaggatatgcctggaatgtggcttttggatcagaagaactgtgtgggggagccatttttgcggccttgtcatggtggtgatgtgaagggtgtggagtttgaacaagtgagagaggacgatggagaagatgtgcaggaacaagaggaggtggaggaggaagaagaagaagaagatggtgaagaggatgggcat

SEQ ID NO: 19469 - DNA, 431 bp, Glycine max
ggtggtggaatagtccaattcggacattgaaaccatcaccagtcaccacctttctcgcatcgcttgttggatttcaaactctgccatttcgattccttcgttcactcgttattttgcatgactattgtagaggctgcagcctggatgattggtggactttaagcttgtgaaagaataattgccgaatggaacttgcaagacctgcctcaagtagaagaaaattgaaagatttattgcttcagagtgataatcgtctttgtgctgattgtaatgctccagatcctaaatgggcgtctgccaacattgggagtttttatatgcttaaaatgttgcggtgtgcacagaagccttggtactcatatatcaaaggtgttgtctgtgacattggatgattggtcagaggatgaaatagatgcaatgatcgaagttgg

SEQ ID NO: 19470 - DNA, 417 bp, Glycine max
  unsure (1)..(417): unsure at all n locations
ggaaggaaaagagggaatggcgagagtacgagacagagagcgaaagtgacggtgtgattagcaagtaaagacatggatggtgttaggaactgataaagctaccactctggcttagttagctaagtttggttttggttttggatgagaagaaaagtggaggaatcgacacgagtgagtgagaacaagacagtgcacttgtcatcagtcaacatacacgcatgcattcattcagttatgaggactgaataaaagattcaattttctatgacgtcgatcaaatcattgagatggctgatgagaaaaaagagtggattgtctgatggnggtaaatcaagtttcaagatgaaacagctgccttttcttgcagttttgtgcacattattgttattcattgtgtatagaactacaaagtatcag

SEQ ID NO: 19471 - DNA, 491 bp, Glycine max
ctcttttcttttgttgtcttctgtgcgcgctctctctctatgcattgatactgtttcttttattttcatctggggttcgccgcttcagctgccaccgttctcggtatctcatgtgatcttcaaagtttgttgctttcagccttttcaagctgtccatttaagtttttgagagcaagcagttttttatgaggaccgaataaaagattcaaatttctatgacgtctatcaaatcattgagatggctgatgagaaaaaagagtggattgtctgatgggggtaaatcaagtttcaagatgaaacatctgccttttctggcagttttgtgcacgataatgttattcattgtgtatagaaccacaaagtatcagtatcgccacgatcagattgacaaaaaatggagtctctggggacaaccaaaggtgtatccttcaacttctgggaagctgaaaggcttgccacgaggtataatacatgataattcagatttggag

SEQ ID NO: 19472 - DNA, 417 bp, Glycine max
ctcgagccgtttggttttggatgagaagatgaggatttgacacgagtgagtgagtgagaacaagacattgcacttgtcatcatcatcaagctctacatttctttatcatcagtcaacagacacgcatgcattcatttgttcagctgccaccgttctcggtatctcatgtgatcttcaaagtttgttgctttcagccttttcaagctgtccatttaagtttttgagagcaagcagttttttatgaggaccgaataaaagattcaaatttctatgacgtctatcaaatcattgagatggctgatgagaaaaaagagtggattgtctgatgggggtaaatcaagtttcaagatgaaacatctgccttttctggcagttttgtgcacgataatgttattcattgtgtatagaaccacaaag

SEQ ID NO: 19473 - DNA, 436 bp, Glycine max
cccacgcgtccgggtagaaggagaggaattaaaaaagaaagaagaagaaggaaaagagggaatggcgagagtacgagacagagagcgaaagtgacggtgtgattagcaagtaaagacatggatggtgttaggaactgataaagctaccactctggcttagttagctaagtttggttttggttttggatgagaagaaaagtggaggaatcgacacgagtgagtgagaacaagacagtgcacttgtcatcagtcaacatacacgcatgcattcattcagctgccaccgttctcgttgtgtttccgtgttccttggtgcttatattttatcaaattgcacaagcataatatctccttttgcacaaaatatagtaagtgttctggcggtctggttttacacattaatgaagttatgaggactgaataaaagattcaattt

SEQ ID NO: 19474 - DNA, 457 bp, Glycine max
gagggaaaaaaggagatatatgaagaaagaagagaaaaactttatagcaactgaataaaaacaccattatgaggctttacatggcacaatggcattgcctctcatcatctctttaatactatctctctcccgctggttttagaaccccaagaacaagattttgaactaagattcgcggttgtttgtgtgttggttaggttgttgggatctgtgttgttcctttctctttctccctctccctctccctctctctattttctcagacacacactcacttagatacacaaaggccattatacgtgcagtagacacaaaattttcggtatctctctatatttggggtcacacgtacatacataggtaatggcacagttacctcctaaaataccaaccataccccagaattggccatctttccctcaccaaagggtaccctcaatggccaacttcaacccca

SEQ ID NO: 19475 - DNA, 436 bp, Glycine max
gccggatctcgttcaaagaacaatgtgaatgagtcatatgttgctaatcacggtggcctacctgatgttgattacctggagagaaaaactccaaaggatgaaactcctagagtaaagcccttctacaataatgcgaatccacctgcttatacaagagaggaacaatttgaaggtggtttcaatcagcatgatagttgggggaatgccagacgtgtaaaagaaagccaggacactgccaccgctaggaagtctcctggtcatgcaggatctcgttcaaagaacaatgtgaacgagccatttgctgctaatcatggtggcctacctgacgttgataactctgagagaagaactcaaaaggatgaaactcctagggcaaagcccttctacaataatgccatgatcccaccttcttatgtaaaacccaattctaaactga

SEQ ID NO: 19476 - DNA, 786 bp, Glycine max
tggtgtggtatgggtgagttatcattagctgacagggccactatggccaacatgtctcctgaatatggtgcaaccatgggcttcttccctgtagaccacgttacattgcaatacctcaaattaactggacgaagtgatgagactgtggcaatgatagaggcctatctcagggcaaacaaattgtttatcgactataatgagcctcaaccagacagagtttattcatcctatctcgaattgaaccttgacgatgttgaaccatgcatttcaggaccaaagagaccacatgatcgggtacctttgaaagaaatgaaggccgactggcatgcttgtcttgataacaaagttgggtttaagggatttgctataccaaaagaggcacaaggaaaagttgcaaaatttgatttccatgggcagccagcagagctcaagcatggcagtgttgtgattgctgcaatcacaagctgtacaaatacatcaaacccaagtgttatgcttggggctggtcttgttgcaaagaaggctcatgagcttggtttgcaggttaagccatgggttaaaacaagtcttgctcctggctctggagttgttacaaaatatctactcaagagtggcctgcaaaagtatctaaatgaacagggtttcaatattgttggatttggctgtaccacatgtattggcaattcaggggagctggaccagtccgttgcttctgccatctcagaaaatgacgttgtagcagctgctgtgttgtctgggaaccgtaaatttgagggtcgagtacat

SEQ ID NO: 19477 - DNA, 410 bp, Glycine max
ggcggcatgaaagtggcaaggcagctatgcatgcaggaccatctgtacaaaagccagaaaaagtatcagttgggaaagagattcgagaaaaattctctggtgctgttgaagctttctcccggaggaacccaacaagtcctagtcctcgtggtgatcactccaaacgtaggagttttgaggaagtagcagtacacaaagatgtgtatcatgatcaagagaagggacgcaattcgtcccgatatggcagcagttcaagaagacccataatctcatcgtcaaccatgccaagttcctctggtgatcatactgacagtcgtactggccggctaacctcaagtggaagccgacaatctgccacacatagagatattcaacctatgcacgagacaaaacaaccaacttacacacgc

SEQ ID NO: 19478 - DNA, 465 bp, Glycine max
gacggtgacggcgctcgacggcgacggcactctgtttcagcgttctaacttactgcacacatcccaatcccctctgttttcgtttggattgattaagggtgtcacagcaatcaagtaagcactacacaaccacactcacttttcctgctaaactaaacaaaaatgttatcctccggtagaaattgctgcttcaaatatcctggcacctacttcacgagggggaatgcctcacatcatactaatactatactctgcacaaactcattttgccccaaatttgctgaccccaattacccttttggaaaaaatccacggagtactcatttctttcaccatgcccacaaacttgacctctttttattccaaatcaacactagttacactcaatttcccatcccatttgcaccctttaattctcactattcaacgaaggctccttcaagatcttaccaaagacgagctcga

SEQ ID NO: 19479 - DNA, 334 bp, Glycine max
agggattggtaatactgatgctggctttgtgctgggaactgggaaacttctgcttaaggtgcccccaactttgagatttgtaatggatggagaaatgcccgattatttgctttctaaggatttgattctgcaaattattggtgaaataactgtggctggggcaacatataaatcgatggagtttgtcggtacaaccgttgaaagtttaactatggaagaacggatgacattgtgcaacatggttgttgaagctggtggaaagaatggtgttgttcctgctgacagcactacatttaaatatcttgagggcctgacatctctgccatatgaacct

SEQ ID NO: 19480 - DNA, 726 bp, Glycine max
  unsure (1)..(726): unsure at all n locations
cacactcaaaaccctaatagcaataatgctattgatcaaggccaagatctcaattgggcttttccatcctccaccccagatttcagaaaaatctctgaattggtccaacaaaacaacaacaacaacaatagtagcaacaacagcatgtcagcttcagcttcttcttcttcaaccacaactacaacttccacttctcacctttctgcattggagcttcttactgggatcacttcaagttccagtgctggtttgacttctttcatgcctgtgccggttccatctgatccaaattctatctacacatgtgggtttcctctgcaagatttcaagccaaccttgaatttctctttggatgggatcggaaacgggtacacaagccttcagaatgttcaaagtgggaggctcttgtttccatctgatgacttaagacaggtttctagctccaccatcaccacaatggatcagaaacaacaaggagattcaactgggtattggactggaatgttaggcggaggatcatggtaattaatcatcaagagagtcataaagatatatatttatttacttaatttcttctcttgctttctactaagttaattttccttttgaacttttttcttttgggttttaatgagtttccgtcagatcatgtggngacttcacttgtttggatttcttcataactggctaacagctgataggatcgattcatacatgagtttcttt

SEQ ID NO: 19481 - DNA, 725 bp, Glycine max
tccgatctaatccaaattctatctacacttgtggatttcctctgcaagatttcaagccaggaaccttgaatttctctttagatgggattggaaaggggtacacaagccttcagaatgttcatggtgggaggctcttgtttccatttgaggacctaaaacaggtttctagcaccaccacaatgaatcagacgcaacaaggggattcaactgggtattggactggaatgttaggcggaggatcatgatcatgtggggacttcacttgtttggatttcttcataactggctaacagctgataggatcgattcatacgtgggcttcttttccacttccgtcaatttcttatgtgtatctggctcctcttatatctcttcatgatgaccaagttttgggatcttgagatgaagcttaattattttaggcaggcttcagtagtacttggaaaattaaaacaagggttacattacatttgattatatgtaatgatagaagagatcaagattaactccatttttttagggttaacaagtagctagaaaggggggccgggtaaattaagtgttattgctgttatagtatttcatgtaatttcttctatcactgaagaagggcaacatcatcaattgatttgattgtctagcttaccggattcgaaaatgtataatgtccaagaatatattattattattattaaataaattattggtatgctttttttatgatt

SEQ ID NO: 19482 - DNA, 470 bp, Glycine max
cattgttttactgtcagtagctgagtccaaaaccattgatttaaaaaagaatatagaacagagaggaagagagacaaatgggtttgggaatgagaagagagtagaaacaaccgagagaaacacatagaaaaaggaggcatagccaacctattcaaaccatgatgcaaggctgtgaggttgatgccattggcataaactacacgatccacacacacaaatcggagcacccttttaaaatcttcagcaacaaatctgcacatcttgacactgaacaagatggtaaagagccagaagaggaagcagaagttgaacaaagttgcagtggagtaaggcatgtgctgaagaatgtgagtttccaagccaagccatgggagatcctagcaattgttgggccaagtggagctggcaaatcatcactgcttgagattcttgctggtaaacacagccctcaaagtggaactgtgtttctg

SEQ ID NO: 19483 - DNA, 765 bp, Glycine max
  unsure (1)..(765): unsure at all n locations
ctcgagccgattcggctcgagtgtggtggaggaggaatacacgaagcataggcaatgaaatgaggcgttttgactgaccttcttggatctgatcgaatccaaacccaaaccctaatctaatcccaaaaagcttattagtctctctcgatcaatcgaaccagcgagcaagattgtctctctcctaggccatgcgaccaccctgttcctccgccatcgccctctccagagaggtttcctttttcgttttcgccgatttctccatcgattccaccagccatgactgccgacacccacgccgctcctaatatcaatcccaagggcctcctctgcaatgccgccgccggtgcttccgctggggttattgctgctacatttgtgtgtcctcttgatgtcatcaaaactaggtttcaggttcacggtgtcccgcagctcgcgcatggaagtgttaaaggaagcataatagttgctagtatggaacaagtgtttcacaaggaggggttacgtggcatgtaccgtgggctcgcgcccactgtgctggctttgcttccaaattgggcggtttattttagtgcatatgagcagcttaagagccttcttcagtccgatgatagccatcatcttcccattggagctaatgtgatagctgcttctggtgctggagctgcgactaccatgtttacaaatcgcctttgggttgtcaagactagactccaaacacatggaatgagacctggtgttgtgccatatangggcacactatctgca

SEQ ID NO: 19484 - DNA, 784 bp, Glycine max
cgtaaaaggaattgcaagaggtattctttatctacatgaagattctcgtcttaagattatacaccgtgatatcaaaccaagcaatgttcgattggacaatggcatcaatccaaaaatctctgattttggaatggcatggatggtagctacagaccacattcaaggatgcaccaatagagttgcgggcacatatggttatatgtctcctgaatatgcactgcatggacaattttctgagaagtctgatgtattcagttttggagttatggctcttgagatcattagtggcaagaacaactcttgttcttttgaatcatgtcgtgtcgctgacctattgacctatgcatggaataactggagggatgaatcaccatatcaattgctggattcaactctgctagaatcttatgttccaaacgaagtggaaaagtgtatgcagattggtttattgtgtgtgcaagaaaatccagatgacaggccaacaatgggaacaattgtttcatatcttagcaacccttcgcttgaaatgccattccctctagaaccagcatttttcatgcatggcagaatgagaagacattcagctgaacatgaatcatcttcaggttactccaccaatcgttcttccttgtcctctgtgaataagatgtctacgactgctttcttcccctcgatagtttgttactaattactatatgttatgtcaaattaaactgattagatgtttcaacttaagttttcctccactggaatttcaagaaaatattaatattttttagaattt

SEQ ID NO: 19485 - DNA, 516 bp, Glycine max
gatgtctcttagagagaaagaatcccttgaattgcgtatacacagtgaatcttattctgattcttctgacagcgggtgtgaagattcaatcgcaaaaaaggataacatagatgtgactgtggaacaaaactcatgtttggttgttgaaaaaaatgctatgaattcatccacctcagaagtgttgagttcccagtctcttgacggtgaagaatcaattaaagtttccttgttcagtgaatcatctgatgctgttgatgaggatacccatgacatactagctgaagtttcacctgatgcttctgtgtcaagcgaaagacctattatcacaatgacagaacctttatgctccagaaacttcataacttctgacagtctatattcaaagtcactcggaagctaccccttggaaattgaatcttgcaaaaacaattcaggtgatgctactctgtgtatttcagatagttccatgatgcatatatgttgtgaatcatccccccatgtagctcgtcaaatcat

SEQ ID NO: 19486 - DNA, 578 bp, Glycine max
caccccaagaagaagaaggaggacaactggtggagacaccagagtctcttcacgtgttccccgaccacgctcttgaacggccttgccaggggtgccagaggcatgcttggtctcggtaggtcccgcagttcgtttccttcgcaggttttcgacaacttcagcacgcaccgtaaactcaccctctgtctctcctcgtccaaaggggttgtcctcttgggcaacgtggccacctacgagtccgaggttctcaaatctctcaccttcacaccccttatcaccagcttccccaggcaggaatacatcatcaatgttagctccgtcaaaatcaacggcaataggttgtctttggacacttcatcatcagagtcgtccaatgaacaagatggtagtgtaggggctttaactcttttaagcacaattctgccctacaccaccatgcagagttcgatctataactctttcaagacatcttttgaagacgccgctgtggctatgaacatgaccagagtggcctcggtggcacccttcgagctttgttttagttccaggggcgagcaagcggggcccagtgtgccggt

SEQ ID NO: 19487 - DNA, 395 bp, Glycine max
gaaaacaacggtgacaacaacagcaatggctcttcacacacgacaacgttgctcattggctcaaagacgcatcatcattccttttacaaaagtaacaactatccattccctcattcatcatccgcggcatgctagatatatatacatatatatatagttccgagctaatatatatatgtaattaaagataggtgattagtgattattactattagagatcaatcccccatgcaccacatgctttcttatatatatgtatacttcataaatggaaagatcaattcatagagatttttctaatttgttgtaatttattttatatgtaatatatttatggtctatgcgtacattacatatgaataacaatgcaaggttatcacatagttcaatcaaaa

SEQ ID NO: 19488 - DNA, 341 bp, Glycine max
ctttcagctaacccaacgccattagtaaattgaaagcttaacagaggaaatatccttgcagtgaatcaagattcggaggagtgagtggtccttggtgctgatttggcaacaacaaccacagatgagagtttgagtgtgagtgaatccagatccgagtttcgcacttttgcggagaatagaacaatggagtcggcaacggcatcatcatcggaatcggagatggcgcttcctcttcctctggcgtcggagtcacaacaaccctacgtctccgaactcctctcctttacgctcgatcgcctccacaaggagcccgaacttcttcgcgtcgacgccgaccgcat

SEQ ID NO: 19489 - DNA, 744 bp, Glycine max
attaaatctttgtgcccatagtgaaacaagaacctctctggtgaaaattctcatggacttgctaatgcttgatgtaaaaaggcctgtcagttattttagtaaagttgagccaccatatagattgtatgggttgtcagagcaatgtaatgtattcacgtcctcaatcttttgatggagttcccccattgctgtctcgtagaatacttgaaactctcacttatcttgctcgcaatcatctgtacgtggcaaaaattttgcttcagtgttggctaccaaatgctgcaataaaagaaccagatgatgcacggggcaaagccgtgatggttgttgaagatgaagtaaatataggtgaaagtaatgatgggtacatcgccattgcaatgctattgggtctcttgaaccaaccactttatttgaggagcatagcccaccttgagcagctgctagatttactggatgttatcattgacagtgctggaaacaagtcatctggcaaatccttgatacctactaacccatcatcagctccacaaatttctgctgcggaagccgatgcgaatgcagattctaacaatttaccttctgcggatgatgcatctaaagttgatggttcctccaaaccgacagtctctggcattaatgttgaatgtgagttacatggagtgttgagtaatcttacaaaagcagaacttcgggtcctgtgctcactgcttgctcaagaaggtttgtcagataatgcgtata

SEQ ID NO: 19490 - DNA, 596 bp, Glycine max
gccttccattgtgctttatacctgaggaggtaaccagagccgttcacacccccctctctcttcttcaaaacgcaccctattcctccccctattttgcatcgcatttgttcttgaatctctttggtattcctcactcagagcctctcatcagagagagagagagagagaaagtgagagatggagagaatgttccctcccaagaagccctctactatgaattcccatgacagacccatgtgtgttcaaggagactcgggtcttgtcctcaccactgaccctaaacctcgcctccgttggactgttgagctccatgaacgctttgttgatgctgttactcagcttggagggcctgataaggccactcctaaaaccatcatgagggttatgggggtgaagggtctcaccctttaccacctcaagagccaccttcagaaatttaggcttggcaagcagccccacaaggaattcaatgatcactcgattaaggatggtatgagagcttctgctttagaactgcagcgaaacactgcttcatcttctgccatgattggccgcaacatgaacgagatgcaaatagaggtgcagagaagattgca

SEQ ID NO: 19491 - DNA, 327 bp, Glycine max
cggtagctatagctaaagccttgcacaacctccatttctctcttcaattaaaacgcatcctattcatccctcatagcatcgaatttgttcttgaagttcttggtattcttcctagcttcttctcatcttagagaaagagtgagagatggaacgaatgttccctcctaagaagccttcaactatgaattcccatgacaggtccatgtgtgtgcaaggggactcagggcttgtcctcaccactgacccaaagccacgcctccgttggactgttgaactacatgaacgctttgttgatgctgttgctcagcttggaggacctgataaggc

SEQ ID NO: 19492 - DNA, 443 bp, Glycine max
ctttgatgctatcaatgagtaaagaggttccttggtatctggatgatgggactgatcgtgtgcatgtggttggagctcgaggtgcttctgggtttgcattacctgttggaattgaggcatttgaagagtcgggtcggtcacttgtacgtggaactttggattatctgcaaggtctcaagatgcttggagtcaagagaattgaacgggtacttccagttggaacttccttgactgttgttggtgaggctgctaaagatgatgttggcgctattcgaattcagcgaccccacaaagggccattttatgtctctcccaaaacaattgatcaactaattgcaaatctggggaaatgggcaaggtggtataagtatgcttctgtgggcttgacggtgtttggtgcttatctgatagccaagcatgctattcggtacatattggaaaga

SEQ ID NO: 19493 - DNA, 563 bp, Glycine max
tcggaatgctgctcgaggcccttcactcttcacttctcattctctctcttaatatcttcctttctctttcgctttctagtttttctctttcactctcttctctttcgtttttctctgcctttgaatttgccagcgacgaagcatcgagaacctcggaagagtaaaacgagtcaaacgtaatcggcagtagcatgtcgcccaacaacgtggaatctgggacaacggatgatacagaggtagtaggacaacaacaacgtcatagtccaatacatgatattgccttgcagatacagacacaggctccggtggaaacccatgggctataccaaacaaatgatgttcatacgcgtccgatgggcatggccgtgatagacgcgatcctcccaccacaaaatccttctagcttaatgagcttcaaggaagctgtagtgtcaaatgcaaggagaattccccttaagaccctagttactttgctccttgtttgtgttggtatcatggatcatcttgcaaaagagttgagcattcaattccttttggaattaataaactcccatgctgcaaca

SEQ ID NO: 19494 - DNA, 418 bp, Glycine max
gactgaaaaaaagtgagaaacacgaacctcaaacctcagacagaaccaaaaacacacttcttctcttcttccattctctaacgctatcagcatcaacacagtgtcacatccattaacgtgctatggtgtttagttaggaaacaccggtggtaaaattgtacgaagcagaaagaacatggctccgtctagcaaggctgagaaaaaggctgccgtggatgcagctgcatggatgttcaatgttgttacatctgttggaatcatcattgtaaacaaagctttgatggcctcttatggcttcagttttgccacaacattaacaggcatgcactttgctaccacaactttgatgacagttgtactaaggatgctgggatatgtccagccttctcatttacccttgccagatcttctaaaattt

SEQ ID NO: 19495 - DNA, 606 bp, Glycine max
ctttaaagcagggaaaggatggagaagaaggtgaaggaagtgagagtggagtagatctgagtgtgaagcaaaaattcttccaaagttttcatctttcaatcaaagggtcctaaaaaaaatgctctgaaccttcgttttcttcatctttttctttttctaagtccccaatcactataacacaatgcctcgcccttgtttccacaagcttgttctccccactactctccaatccagacaactgaggattccagataattttctgaggaaatatgggacccagctttctacaattgctaccctcactgttcctgatggtagtgtttggcgtataggattgaaaaaagcagacaacagaattttgtttgttgatggttggcaagattttgttcaacactactccattggtgttggatacttcttggtgttcatgtatgaagggaattcatccttcattgttcatatttttaatttgagtacctctgaggtaaactatcaatcggccattagaaaccgtaatgaaggatcttgcttggccaattatcatcatatttttgatgaaatggaagatgtagactcccttgatttgtcggatttgtcacctcagta

SEQ ID NO: 19496 - DNA, 404 bp, Glycine max
ggagaaaaggaggaagcagagagggaggagggtagtgaggaggaagggcccaaagggtggaagggttattgtctctggggctatgctggttgaggttgagactgttcttcagactcaggaaccagtgataaaaccaatttggaatacatttgctagcagtctcagtggaatttggaagggtgtaggtgctgtgttttctcccatcacagctgaaatggaaccaatggaaataggtagcaagaatgaacacctatatgactgctatactctttctcgcatagaggcagtaccatcagtttcaggtgagcgtacatctcaaatccagagaaaggttaactgggtgactttgaatccttatggcgaaataccacagcatattgaaggcagcaatgtagctaaagaca

SEQ ID NO: 19497 - DNA, 400 bp, Glycine max
acacgtgatcgctcaagaagcttatcaaactcttcaatgagagatttgtaatttactgattgcatttccatgttgttattgcgtgtttctatctggacataagaaaagttattaagaccaaacaaagtaagaatccagtgctttgaaagaactcctacacctgaaattatatcacctagaaaagcaaatagaactgaaatagtgaaatctcattaagcagaaagcaacttcgacagcaccacaaaatggtcactgtagaaataattgtgaccataattcaactttacaaaggtaaaatccaattcatattaatatcattttaaactcaatgaaaattttgggcatgacccaactgtcccaaaacctattttatattttatttttagaggaaattaggaaa

SEQ ID NO: 19498 - DNA, 436 bp, Glycine max
gacgacaacagataatagaatagtgattttgactgtactttatcttggtactaatccaattcctcgagggaaacgtgaagatgatcatccacaaccacagcatcatttccaaacaaaaccaaatttgatttcccgtttcattggtattgatggatccggagcagactttcatacgcgtgcaggagaggttttctcagatgctgacgcccaaagtcagagttgctttggagtatctctacctgttcatcgccataaccttattctgcattctcgttgttatgcacgccaattacgttcaacagcctgggtgttcaagtgagctatccggagtagtgacatcagaagcccaacttattcagattaagataaccagtgccggcctgtggtctcataatgattctgaatcaaacagaatagatccccctgaaacagaaat

SEQ ID NO: 19499 - DNA, 438 bp, Glycine max
tctcattcccttcaccaaacaggtgacgcacgacaagacaaacagatcataaaatattgtatttgtattttggtactaatccagttcctcgtgggaaacttgaagatgatgatgatcatccacaacaaacaaaacctctaatttgatttttcggtttcattcgtatgtattgatggacccggagcagacgttcatacgcgtgcaggagaggttttcgcagatgctgactcccaaagtcagagttgctttggagtatctctacctattcatcgccataaccttgttctgcattctcgttgttatgcatgccaattacgttcaacagcctggatgttcaagtgagctatctggagtcgtgacatcagaagcccaacttattcagattaagataaccagtgccggcctgtggtctcataatgattctgaatcaaacagaat

SEQ ID NO: 19500 - DNA, 835 bp, Glycine max
gaaaaaaggggagctgatgctcgctgtatggtttggcacacaagccgatgaagcttttcctgatgcttggcattctgatgctctctcctctggtgatatctcctcagctgcatatgctcatatgagatcaaaagtttaccattcaccaagattatggtacgtacgggttaaagttatcgaggctcaagacttacatgtgtcagagaattcccaaatccatgatgcctatgttaagctacagatcggtaaccagattttgaagacaagacctgttcaatcaaggaccatgattctgcgttgggatcaagagctgatgtttgttgctgctgaacccttcgaggaacctctgattgtttcagtggaaaatcgagttggtcccaacaaagatgagactattggagctgttgttattcctttagaccaaactgacaagcgagctgatgatagacttatccacactaggtggtatcaccttgaagaatccatatcatctgtgatggatggggaacaaggaaaaaaggagaaagataaattttttagtagaattcacctgagtgtctgtcttgatggtggttaccatgtttttgatgggtcaacttattatagtagtgatctcagaccaacatcaaagcagctctggaagaagccaattggtcttttagaaattggcattctaagtgttgatggacttcatccaacgaaaaccagggatggaagagggacaacagatacatactgtgtggcaaaatatgggcataagtgggttcgcactcgaaccgttagtgtcagtcttagtccaaaatacaatgagcagtacacttgggacgtttatgat

SEQ ID NO: 19501 - DNA, 383 bp, Glycine max
gggtgcaggtgggaggaaatagtcggggtccttggcggtccctgtacccaacgaaagccgagagcgaaaaatggcgttggaactctcgtcactatctcttcactcctctctccgccaccagcaccctaattcgtcgcattcaaaccatcgcattccccttcgtttctttgcaccttcccttcctcccacttcgtgtctctccggcgcagcctcagtctccacatttcatcgcactctcttcgccgtaaccgttcgcgcacttcaaagccaagacgaaagcaaaagcagtgatgtttttgaagaagaagaaaaagacgaagaaatatcgaggcagggtgagaaaaaagaactcgcgaagcaaagcatatggagtcagattaagg

SEQ ID NO: 19502 - DNA, 552 bp, Glycine max
tgtcgtccctagaacaaacaaagagaagaaaacccgggaacgcaacctagaacaaaaacgaagcagttgaagatggagcacgacgaagacgaagagccacctcttgctgttcagattcaagggaatgatgaatccgtttctcagcaatcttcttctgttggggtcactctcatcaccggttatcttggttcgggcaagtccactctagtgaatcatattttgaattcgcaacatgggaagaggattgctgtcattttaaatgagtttggtgaggaaattggcgtcgaaagagcgatgatcaatgaaggagataagggtgcattggttgaagaatgggttgagcttgccaatgggtgtatatgttgcacagtcaagcatagtttggttcaagcacttgaacaacttgttcagagaaaggaaaggcttgaccatatattgctggaaaccactggattggcaaatccagctcctttggcatctgttctatggttggatgaacagttggaatcagaagtgaagcttgattctattgtcacggtggtggatgctaaa

SEQ ID NO: 19503 - DNA, 483 bp, Glycine max
agttagttgagattagatagagagaagaagaagaaaaggatattcctcttcaccctttttgattctcaaacccaaacactgcatttgcaggggtttatctttatctagaaccagcatcagagtcaaatccacttcactctttgaagttcctcttcactctacagcgacttcttccttttttgagttttcaccaggagtgttcttaaagtagttagaggatcctttgatcgagatggctcaattgctatcctcttcttgctccttgactgtctgctctagaaataaaccttacttaaaaccctttgacaaatgttcaacaccgttttctatgaaggttgcttgcaataattccaaatctccatttagaaggcttttcttgcaagaacagaagcctaaaaaagattctctagtagtacatgcttctgcagtttcaactagccagggaaccccagttcaaactaactcttacgacccttttaaaca

SEQ ID NO: 19504 - DNA, 410 bp, Glycine max
cttgagagaaatggatatcttctgttgaatgaaaaaggagagaaaatgaaggagcaacttgcagttgataggaccaactgtattgattgtatataccgtacatatgtatctcagagcatgataggctgtaatatgttgtaatataagcttagaagtgcttggtgtctttggtgctgaagaaaccattagttcacatccaaatctggatgaaaactttaagatctcgtgggctaatcatggggatgatataagtattcaatactcaggaactcctgctcttaaacgagactttgtcagattcgggcaccgcacaattcaagggatactacaagatggtgtcaatgctcttctacgatattatttcaataattttgttgatggaacgaagcaggatgcaattgatctcttgc

SEQ ID NO: 19505 - DNA, 514 bp, Glycine max
ggtgggaggcgaggaaagaaaagcattagaatagcgttggaggaggatccgtcatccctcgcaaagtattacttttgcagagctcatcaaaccgaaccttcattcccgccttcacgttttctttcctttcaccaacaacaacttttgtttcttttcctttttattgtattggtgaagcttcaccataattcaattatgagctccaccacttcgaaagccacgtccacgatttgattcctggatccaacgcatccattaagctttcgcgatggcgtggtttagtgggaaaaatacatggggaaacttccctgatttggcgggagccgtcaataagcttcaggagagtgtgaaaatcatcgagaagaattttgattctgctcttggattcgaagagaagggtgaatccagcaatgaagatgccggatcatggcctatacctgctgaacaggaaaaccctatttaatccccgtcatctcttttatgggggaacataagtgaggaaactactgaggaa

SEQ ID NO: 19506 - DNA, 589 bp, Glycine max
ttgccgaacaggcgaagtctttccggccccatgatgatgatgatgatgattcagatgatgactttagtgatgatgaagagttgcagtccccaattgacgatgttgatccttttgttttctttgtggatacaatcaaagtgatacaatcatcggatccatcgaggtttgtgaaccttacccaaacgcttgagtttaattatcaagctctcgctaatggtgttgcccagcatgctgagcagagaagggcagaaattgaaaaggagaaaatagagaagtcaacggctgccacagcttcttaagcttctgaatgtacattattactgctgcattttttaattctcaagttccctgttacccattctttaggagaatcagagggttgcctatatttgaggcatttgtcggctttctggtcgccagttgttggtctttgatcatgaagagtttgcagttttgaagtgctcggagctctgtgcaccgaagttgccattgtccagagagaggattgcattcgaggaactgtggagtcagcagtttctccaggtcttagttcacagcttattgtttggtgctttggggctatcctttt

SEQ ID NO: 19507 - DNA, 495 bp, Glycine max
ctcgaccgggcacatagcatcggatctgatattggtctgaagatgggtgtggctgctgagtctgagtcaaaggacaacctccccctgttactcacccaatctgctgaccctctcaaaaggacagggacggtgtggacagcagtggcacacatagtgacaggggtgataggatccggagtgctgtctctgccatggagcactgcacagcttggctggcttgcaggccccttctccatccttctcattgcttccaccactctcttctcttcttttcttctatgcaacacttatcgccatccccatcccgaatacggtcccaacagaagtgcctcctaccttgatgttgttcatttgcatttaggaataagtaatggacggctcagtggccttcttgtcagtattagtttgtatggttttgcaattgccttcgtcattacaacagctatcagcttaagaacaacccaaaattcattttgccaccacaacaaagggcct

SEQ ID NO: 19508 - DNA, 504 bp, Glycine max
atatcctaaagcatcattggcttcaaaactcatagagagagagagaggagagagagcttaagggtagtcgtttgtatgtttttattttccctcttgttaggttgggagaatgcctatcctttgcaaaccagtgtacattgttgtgacttcattttatgtttatgttcttcaattcagtgactgtttggcctatgaggaggaacatcactctagtagtcacaaaagcactaataacaaagtttacaaggtaaatctgcagaagacatctgatattgcagtacatggattgctcctgtgggcttcaaccgggtttttgatgcctcttggcatacttatcatcagagggtccattaaagcagaacctggatccagaaggagtatagtcctcttctatctccatgttggttttcagatgctttcagtgcttcttgccacagttggagctgctatgtccctgaagaagtttgagaattcatttgataacagccatcaaaaactaggcct

SEQ ID NO: 19509 - DNA, 396 bp, Glycine max
gacgcagaggggctgaaagctgatgtgaaaaaattcctttacgatcttcggatgcaagcagaagtctttgtcataacgatgaaatgggatgcacagatggatggtggtgggtctcctgcacaagatgagtcaatggatgcatttactagtgctcagcaaagaattgatgattacttaacccaaatgaaggcgacggcgaagagagaaggtactcctctaatggcagatggcaagcccgtggttgtgaacgagaagcaggtcgagaagtttctttacacgacacttaagctcaattcgaccattttgagatattcaagaatggctgctgctgtgttggtgagtctacctccacctccagtgagccacccatcatatttctatatggagtacatggat

SEQ ID NO: 19510 - DNA, 601 bp, Glycine max
ggagatagctgcaaatttgaccatcctgtttgggttccagagggtggaatcccggattggaaagaggctccaaatgttgttacaagtgaaactcctcctgagagaccaggggagcccgattgtccatactttctgaaaactcaaagatgcaagtttggttcaaagtgcaaatttaatcatcccaaggtttcctctgaaaatgctgatgtttcttctggcttacctgagaggccatctgagcccccttgcgcgttctacatgaaaactggaaaatgtagatatggcactgcttgtaaattccatcaccccaaggatatccagattcagttgtctgacgacttgagtcaaaatgttgcacagacacaaacaaattctatgatgggtggagctacaggagatacacagccaattaaatctcttatatctccgtcgttgcaaaatagcaaagggcttccagtaagactgggggaagttgattgtccattctacatgaaaactgggatctgcaagtatggtgtcagttgccgctacaatcatcctgacaggaatgcaattaatccacccattgctggattaggtgcctctattttgccatcctcgg

SEQ ID NO: 19511 - DNA, 976 bp, Glycine max
gagaggttcaatgtgatgcttcatgaactaaagattgaacacccaaaaggaggaattgctaggagtgaaactgatgcacttgccattgcagcagatattggatacccagttgttgttcgtccttcttatgttttgggtggtcgagcaatggagattgtgtataccgatgataagctggtcacttaccttgaaaatgctgttgaggtggatccagaacgccctgtattaattgacaagtatttatctgatgcctgtgagattgatgttgatgcactggctgactcacaaggtaatgtagtcattggtgggataatggagcacattgaacaggctgggatacattctggtgactctgcctgctctattcccaccagaactgttcctgcttcttgcttggagacaatcaggtcgtggacagtaaacttggctaaacaattgaatgtttgtgggctcatgaattgtcagtatgcaataactccatcaggggatgtatttttgctagaggccaaccctcgagcttctcgtacagttccatttgtatcaaaagcaattggccatcccttggctaaatatgcttcccttgtcatgtctggaaagaccctctatgatttacagtttacaaaagaagttatccctaaatatgtgtcagtcaaggaagctgttcttcctttttcaaagttcccaggctgtgacgtgtttttaagtcctgagatgcgaagtactggtgaggtcatgggtattgacccttcttataatattgcatttgctaaggcacaaattgctgctggccagaagttaccacttgctggtaccgtgttccttaggttggatgactcaacaaagcctcatgtggagaagatagcaaaggctgttgttgagaatggcttcaagactgctgctaccagagcaacagatgatgttctcaactcagctaaaactccagcggagcgagtgctgaagctgcatgaaaggaggc

SEQ ID NO: 19512 - DNA, 829 bp, Glycine max
gtgttttggtgttgataactggtagcatatggttcctcgtcttcttcgagtccatattcttagactgtccgaaacatatatacttggttttttggttctacaaacaactcaaaacctcgtataatattattgtgtcacaataataatgtctcactccattaattcagagttcaagtttgatcccaaggaaccctccatgcccatatcgtatccaataaagaccctcaaggagttggagtcacgctcctactttgagtcctttcattatccttttaacaaagcttcagttccaattgaaagtgggtattctgaacctttgccaaatcgtagaagaatactagtgtgccatgatatggctggagggtacttagatgataaatgggtccagggagggactaatgctgaagcctatgccatatggcactggcatttgatagatgtgtttgtctacttctctcataatctcgtcactctccctcctccttcttggactaatacagctcatcgtcatggtgttaaggtgctggggacttttatcactgaaggggatgagggaacgactgtctgtaatgaactgctttcaacaaaggagtctgcccaaatgtatgcaaaacacttggcagagcttgctgttaatttaggctttgacgggtggctgttgaatatggaggtatcattgaagccggaacagatttctaacttaaaagagtttgtcaatcatctatcattaacaactcattcttcagcgcccggatcactggtgatatgggttgacagtgtcactattaacggggatctatgggggcaaaatgaacttaatgagcattat

SEQ ID NO: 19513 - DNA, 858 bp, Glycine max
attgcagtggagctggtttccaatccatcaataatattcagtggatgaacctacatctggtttggatgctcgagcagctgcagttgttatgcgtgcagtgaagaatgttgttgccactggcaggacgacggtttgcactatacaccaaccaagcatcgacatatttgagacttttgatgagttgattctaatgaaatctggaggacggattatttatagtggaatgctaggccatcattcaagtagactgattgaatattttcagaatatacctggggtgccaaagatcaaggacaattataatcctgcaacctggatgttggaagctacctctgcatctgtagaagcagaacttaaaatagattttgcacaaatatataaagagtcccacctttgccgggatacccttgaattggtgagagagttgagtgaaccactgccaggttcaaaagatttgcacttttcaactcgcttcccacaaaatagtttgggacagttcatggcatgcctttggaagcaacacttgtcttattggagaagtcctgagtacaacttaacacgtttcattttcatgattggttgtgcaatcatgtttggagcagtattctggcagaaagggaaaaaaataaacaatcagcaggatttgttcaacgtacttggatcaatgtatattgctgtaatattcttgggtctaaattactgttcaacaattctaccatatgtggctactgagcgtgctgtcttgtatcgagaaaaattcgctggaatgtactcttccacagcttattcatttgcacaggtggtcattgaaataccatatatcttggtgcaatcaattttatatgtggctatcacata

SEQ ID NO: 19514 - DNA, 719 bp, Glycine max
cttggatccttagttctttagttctccttctcctgcgagaaacagaactttgagaagcgaaatcgcccactcttgatccctttcgaccgtcatcggatctttctgcggccaccgtctatcgcacttcgttgccgtcatcggcgccggaattctgaatcttaatgaagttgtgaagtgatgatgagtggaagagctatccaataacatgacatgaattccaaaattttctatacttgaaaattaagccagcttaaacaatacaaggatgttttcgttgttttatggactatggaagtacttgttcagcaagatggagcttcatgtactcattctggggattgacaaggctggcaaaacgactttgctggagaagatgaagtcggtgtactcaaatatagaaggcattcctcctgatcgaattattccaacagtgggattgaatattggtcgcattgaagtggcaaatagtaaacttgtgttctgggacctaggaggtcagcctggtcttcgctcaatctgggagaaatattatgaagaggcacatgctgtaatatttgttgttgatgcttcttgtccgtcacgctttgaagatgcgaagtcagcactggaaaaggtgcttctgcatgaggatctacaaggagcccctcttttgatattagctaacaagcaggatattcctgaagcagtatcagctgatgagcttgctcgatatttggatt

SEQ ID NO: 19515 - DNA, 642 bp, Glycine max
cctgcatgtaccggtccggccatgccgtgccgaccgacgcgtgcagtccgcgaagacggacactattcaaggacaccaattgcatggattctagggggaaaaaatgggatcatcatccttcattcatggtgaagatcatgacgacttaaaacatttctactttattacttgccctcagatcaaatggattctgctcctcatatgaaatgtggtcgagcacttggatggtcacactgacattattcacaaactactttttaacaattgcttgcctttgggaatgatacgaagagatctcttgtcgcggcgttattggaggagagaagatgatggaacttatgttattctttaccattccgtgtttcacaagaagtgccctccccagaaaggctatgtgcgtgcttgccttaaaagtggagggtatgttatatcaccagtgaacaaaggaaagcaatcagttgtaaagcatatgcttgctattgattggaaatgctggagattatatcttaaatcttcatcagcacattccataaccattcaaatgcttgggagagttgctgcattacgggaattatttaaagctaaactaggaaattgttcttcatctgattatccatctggagagttgacgagaaacagaga

SEQ ID NO: 19516 - DNA, 443 bp, Glycine max
caatgaattgaatttagcacataacaaattcacaggtgctttgcctgacttaactggaatggataccctcaactatgtggatcttagtaacaactcttttgatgcatcggatgctccaacttggttcacaattcttccatcactcaccactcttattatggagtttggatcccttcaaggtactcttccatcaaaactctttgacattcctcaaatacagcaagtgaaactacgaaacaatgcattgaacaatacattggacatgggtgacaacatttgtccccaattgcagcttgtagatttgcaagacaatgagatttcctcagtgacactccgttcacaatacaaaaatatattgattcttataggaaatccagtgtgtggtactgctctgtcaaatacacatttctgccaacttcagcagcaggctatgcaaccctatt

SEQ ID NO: 19517 - DNA, 591 bp, Glycine max
ggtttgagaaatgaaagacatttgacatcaacggatgcccaagatggcagcatatcagtgaacttgccccaagagccaagatataaaagggattcactctcaaatcagcttcctgtgtttgtccctggtgggtttgagaatatccttcaacctcgttctggcatgaattaacttatgttgttttgagattccaatgagtggacaaagtttttgttggaatcgaaaggatagtgaagagcaattaaaagagtctatgtggtagacacgattttagcctttaagaccatacaaatgaaaagtatggtgaacaacatccgactccaacaggttgttgtttattcggcctaatcatctagggttaacgtgtgttgtcatcaaaatccatctgggcgtttgagagaatgaaatcaacttcattgttccatttgctgaacatgccttgagaaatgtgaatcttcccttatcacttcagtaagcatgacatgagcctccttaatggattttaatttgttattgtagcttttgttccacttgatactaaaattgtcattaccttgccaatagaatattattgtttggcttgtggcttat

SEQ ID NO: 19518 - DNA, 481 bp, Glycine max
  unsure (1)..(481): unsure at all n locations
acctagggaggacacattcaatgacacaaaagcatactcaagtactggcttgagacagtgtgcaatgtgtgagaaagaagtgtatggagaacagtctatttgctgtggccggtgtagagcagttgtttactgcagttcaatctgccagacgcaacactggaacgacacacataaaagcatgtgtggactttacaaggccatgatggagagggaagaagagctggctataatgattttcatgttcccatgttctgctgaccagccttgtaagtggcttgaatcattaggtgtccaccagaagggtatgtggaggagaaagtgcagttgctattctcactgcccttttggtctccttcctgggaaaggtgggctgcaagaactatggggtggaattgatgaatttgaataccctcatgattctncatttaataaccatttcatctcaagcccatttcttctctctgggtggtctgagtactac

SEQ ID NO: 19519 - DNA, 338 bp, Glycine max
gacaaatgggaatcatcttaattcttaactacaagagagagagagagagagagagagagagagagagagacggagtgagtgagcatcatggattcagagacgagtagaggtgcttctttgacggtgaagtatttgcagatggggatatggtggctctcagtgatgatctgtgttgggtatttaatggtttggattgtgatgcccaccaacatcttctttccacatgggtttccagatgttcaagctacggcagattcaatatacttcggcagacatgggacaaccatactcatttacacgattccaatgttattaatagccactatagctaggctata

SEQ ID NO: 19520 - DNA, 796 bp, Glycine max
tgggaagtccccaaagaagaagtttctaacttttattgggctaaccaaaaggctaaactattttaatggtgactataaatagatcaatccaaacctgcggacaggtataggttggcttaaaaccaacatgaaacctgttaattgtgtaagcgatgcctgaatcaaagaaattcttgtggctgggcataattctgttgataaaactaaagtagataattcagtggcttgcgatatcaaatttaaaaaggataagatccgtgaatcgttgaaagttctcgagaatctaattcctggtgcgtaaggaaaggtgccactgttagtcattgatggcactattgagtacttgaaaattttgatgtcccaaactggtgctcttggggtgaaatatcactaagtagtactcacagtcacagccactgatgttacagtatattggttgaaggacaattcatggtgaaaagatgtagctctttgaattcttagctttgttggttgatatgtttatcttagcatgtttgcttcttgtcttctttaaatcctctttcttgaggtgtacatatatggctgggaaataaagtttgtactaatgctgaaatagatagcattgcactttggcacttcggttggagaaaaatgcaggatatggggtttcaatttgttgaccaacatgattatactgtagctttttatggagattaaaggtcacagattgatcactttgaagtgatggagatggtagtgggggggctttgctgtaaatgaggacacttttttatctctctctcaagtgttgcac

SEQ ID NO: 19521 - DNA, 489 bp, Glycine max
gggagcagatagtaggtgaagaagttctcaagagttttctgggacggagaccaaaaccaacttggaactggcatggcaactattggaattggagtaggagtgacgaagctccaaccccacagaccaaagtctaagtccttgtttcttggccagaggcttacgattagaccattttggggggagcctcaatgcagtgaaagaagattattcagtgtctcaaaccccccaagagtggttcaagtttttgcactagcgggtggtgaatggcttgacactgttcacagcctctttgtgggtgttggggttggacttccttgcagtgtgatgcagtgtggtgatgtgatatataggagcactcttcccaagtcaaatggcttgacactcactgtccctggggtgattttggctttggggaccctatcttacctttgggccacacctggtgtggcacctggtttctttgacatgtttgttcttgcttttgttgag

SEQ ID NO: 19522 - DNA, 787 bp, Glycine max
  unsure (1)..(787): unsure at all n locations
ctctctctctctcctgctggaaatggcaactctgcactctcttgcattgtcctctccactctccaactcacttcagaagccacgctcatgtgcagtcccatcttcaattgttcatcaaagtacaaactcttcattcaatggtcaaacattacacctgccgtgtttaaggttacctgtgctaagacaaaatactcccatgcacatgcctgttatcatgatggtcaaaccaaaaatacagttcatccagggaactgatgaacaaacaatacccgatgtgaggctgaccaaatcaagggatggaacaaatggcatggctatcttcacatttgatcaaccctcagttttcgattcttcgggtgaaataggcgatatcactggattttatatgattgatgaggaaggggtccttcagtcagttgatgtaagtgctaaatttgtcaatgggaagccctcaataattgaagccaagtatgtaatgcggagtccacgggactgggatagattcatgagattcatggagcgatactcaaatgcaaatggtttgcaattcatcaaaaaatgagttaatgtgctaactctgcccttctattcttttgcccttttcaggaagtttgtgttctacgatatagtcacatataaaacctgagtgaaatgctatattggcgtacatgtaacttcaattcacatactcatgcattttctgacaccccaagattttatgaaattttgcttgtccnnnnnnnnnnnnnnnnnnnnnnnnnnnnnnnnnnnnnnnnnnnnnnnnnnn

SEQ ID NO: 19523 - DNA, 423 bp, Glycine max
  unsure (1)..(423): unsure at all n locations
gaccagacaatgctaatttaatgaaagtacatattttctgaactcagcattgtagggtggactacctttataggtggtccgtgaaccactattaatgaccctagggtgaatgatgttggtagtcagtctagatccgctcaaggccatggcaaacggtggtggggctcgatccacatccacacaaggcccggacaaacaatggtggtgctcggtctagatccggtttaggccactacaaacgatcaaagtggtgctcgtgatgttctctcgcgtttccagatctgatcatacagatcctcatccccgcctctgctgctacaactcttattatttactttaattatttttagtttggttgtattcgttaactgaagaattaggaatcttcaattntcttgatctgggtatatgtattttgggaac

SEQ ID NO: 19524 - DNA, 248 bp, Glycine max
gtagagagagagagagagagagctaaatagggtaaggagagagagttttaatttgtggagcgaaatggatgcggcattgtcgtccatctctccaaagagctcaagcgcatcatcactgccactgctttcatcctccaacaactatcgccctgccgttattctcccaggcttaaggaacaactccggtgactaccagagtttgaagcaaacgctgaacgacaagtacggcgtggccaccgtggtggcaa

SEQ ID NO: 19525 - DNA, 803 bp, Glycine max
agcagcttctgtagttaatttgcttcccttttttcacactcactctcactaaatggcttcctctgttgctttagttttgggtctatgtctagcactcaacatggttctgccgacacgtgcagctacccacacagtgggagacacctcaggttgggcactcggtgctgattacagtacatgggccagtggcttgaaattgaaagtcggagatagtcttgttttcaattatggggctggtcacacagtggacgaagtgaaagaaagtgattacaagagctgcaccacaggcaattcactaagcacagacagcagtggcaccaccacaatcaccctcaagactgccggcactcactacttcatatgtgcttctcctggccattgtgatggtggtatgaagcttgctgttaaagtaaaggctaaaaaagcatctgctcctgctacagcaccttcaccagctgcaaaggactcaccttctgattctgatgacaccaaagacacacccacttccacctccactaaccctaaaacttcaacctccaccaccccttcaactgaaacctccaccactaccacatcttcttatacatcatctgcaactgctgctggctccccaattgttgctatgttttttgcttctttgatcccatactttgtgttgcgtttgatgtgaatttgaggggagatgttatggagtcaggacagaggcagtgctttcggggtttccttgcctttcaatttgtttactctgttttcttcttttgatccaattgacccattcagattttgctatgactatgagtgat

SEQ ID NO: 19526 - DNA, 517 bp, Glycine max
ggtggaggatgttagaagcacgttcacttgttcaggaatattgctttttggaggaaataaaaaattgtgcccacttttcaagaagatccgacagagatatggatgttatttgcatatctgcagctacaagtgtgcttaagctgattctcttcaactggagaacattcataagtgagcgaggctaatggatcttgaatccagcaagtgttgggacacctcaaagggctcttggaagactattctgctcttggcctaccaaagccttggtgttgtatatggggacttgagcatttctccattgtatgtttacacaagcacatttgctgaagatattgagcattcagagaccaatgaagagatttttggtgccctttcttttgtcttctggactctgacactggtgccactcttcaagtacgtttttgtggttcttcgagctgatgataatggagagggaggtacttttgctctatattccttgatttgtaggcatgctaaagttagtctcctaccaaat

SEQ ID NO: 19527 - DNA, 389 bp, Glycine max
gacaaacaagtgtagaagaagtttttcattatagctccttttgtacttaaaatgaaattgtatcatatacatattgcagtactggcaaagaagtttatgaatgctaggaggcactactactgcacagattaatcatgagtcttccacaaactgcaactagccctcctccacatctgtatccacaggaacttcagcttaagctttaccaagccttcatattctcaattccaatactcttctccatcattctcttcctcttgctttactagttctaccttaagagaagggcttcctatgtatcttcctgttctcacttgcttccaaggaccattgtcaatccaccaaccaccactgcgtatcattcctcaccttgtcgtttggatctgacc

SEQ ID NO: 19528 - DNA, 798 bp, Glycine max
ccctcgagtcgaatcggctcgagcggctcagccgaaccaacgaaccaaccccaaacccctctttttccagaactttcatgtccatcttgccctcacaaacccaagccgcatcttcgtcttcttcctctgcgccatctcctaaccctaattcccaacatggaatcggaatccctattcctcaacccttcccttctctttccccctcaccaatcaacctcactttcggatctctccagatctccgataccccaggttcatcggcttcagctgctcaagattctggtggatcttccgaaaaggtgacagaagtagggtctccaagtggagtaatggtttcacctcagcaaaactctagaacaggttctaggagtcatgggggaagacggactggaatgggaacaggaacagcttcttatcatagaaatcaacaaactcctgggtccgtccgttctcacggaagtgcccctttgccggggagaaaagctcagacggtgaatgggaactacttgctgaattttcaatatgacccaatatcccgttctcaaccacggggtcctcctccttctcctaccactacaagaaggcatcggaagaggaagccgtacaacaaagatttgtttctgcaggcaaattacaagttcatggtgctaggtttgggaaattattcacctgagtcgatggatccagataaaatgttgcagtgggaagatattatatgtgtgacatatttgacccccttttcagttcagtgtccaatttgtttggagtatcccatgtgtccgcagataaccacatgtg

SEQ ID NO: 19529 - DNA, 340 bp, Glycine max
gcaccaaaattttcataagcataggcccttctactgtgaatagcaattatcctaatgctattttgaatgggctggaaataatgaaaatgaacaactctgtgagtagtctcagctcatcaacagctgtgcctttgtctagtacttctggttcaggttctaagaaagttggcttgatagtgggtgtgagtgttggggcattccttgcagtggtcattgttggagttttcttttttctactatgcaggaaaagaaaacgtttggaaaaagaagggcattcgaagacatgggttcccttatcaatcaatgatggaacttctcacaccatgggaaagtaatattc

SEQ ID NO: 19530 - DNA, 453 bp, Glycine max
cggggtcctcaaaccggcgtaaaagaaaccgtctgaaacgctcctcctctttccgttctctctctctgtggcacttgatttcgtcaaaaggcaaagggatgtgttcccgagtgaatgatgttggtttgtatttgctgatgcaattggtggttatgttggtttaagaagctaagaactgttgctactacttcacaatgggtgctgcttgttgtgttgctgccagagacaaaactatacaaagtggatcaaccagtgacaatttgcatcggaatgctcgatgttctccaacatggagctttcggtgggatcatcgggggcgtgtagctggtgaagatacttctataaattggttttcagatggtattagcaggaatgatggatcagagaataaaaatgaatcagcatatgtgtcagaggatggaagtccactgcagaattatcaacagaaaagat

SEQ ID NO: 19531 - DNA, 432 bp, Glycine max
gactgaaagaagagggagggtcctcaaaacggcgtaaaagaaactgtctgaaacgctcctcttctccctcaaaaggcaaaagggttgtgttcacgagtgaacggtgttgatttgtatttgctgatgcaattggtggttaggttggtttaagaagctaagaactgttgctactacttcacaatgggcgctgcttgttgtgttgctgccagagacaaaaccatacaaagtggatcaaccagtgacaatttgcatcggaatgttcgatgttctccaacatggagctttcgttgggatcatcgagggcgtgtagctggtgaagatacttctataaattggttttctgacggtattagcaggaatgatggatcagagaataaaaatgaatcaacatatatgtcagaggacggaagtccactgcagaatgatcaacgg

SEQ ID NO: 19532 - DNA, 421 bp, Glycine max
ggatcgagagagagataaaaaaaagaagaaaaaaaaaggaagagagagaggcaaaggcgaagcttggaagatggaaacccagtgagtgaggttcgagatttgtgagcaattcgtgaaccttgcgaaggtgcaactaagattggatgaagacacggccaatgaactgagagtatgtatccaaggctattcctcgtggaacagagggatattggggtgctgggtcatattgggagatgggtcaactatgtatgatgatctggttggttcagattgttggggggttgttgtggggtttaatatgggaaggttttagatgtattgctgcaggcttgcaggtcttagttattactgagatagtggttttgtgatgactcctatcttggcatgataactaaagtccttgctctaatatatgagttat

SEQ ID NO: 19533 - DNA, 438 bp, Glycine max
  unsure (1)..(438): unsure at all n locations
gactcggaaaaggggttacttttagtgaggtggtgacgggtgtacacaggttttctaaggccctaagaactcttggtctgaggaaagggcatgttgtgattggagtgcttccaaatgtggtagagtatgccattggtgctttggggataatggctgctggtggggtgttctcaggtgcaaatccaacatcacatgtatcagaaattaagaaacaggcagagtctgctgatgccaaattgattgtcacaaatgtcacaaactatgaaaaggtaaaggctttggagctacctattattttgctaggagatgaagttgttgaaggtgccatgaattggaacaagttgcttgaagcagcagaccgtgcaggggatgatttgacaaaggagcctattcagcagaatgatctntgtgccatgccattctcatcaggcaccacag

SEQ ID NO: 19534 - DNA, 802 bp, Glycine max
gccaaatgtgagtccttcaatgcatcatcaggaaggacaggtggttcaataggtgaagatccagctctggaccagttcatggaggcctactgtgagatgctcattaagtatgagcaagagctcactaaacccttcaaagaagccatgcttttcttctcaagaattgagtgtcaactcaaagccctagcagtttcatcagattttggtcaaagtgaaacatcttcgcagaatgaggttgatgttcatgaaaacaacctagattctcaagctgaagaccgggaactcaaagtccagcttttgcgcaagtatagtggatatctagggagcctcaagaaggaatttttgaagaagaaaaagaatggaaagttgccaaaggaagctcggcaacagctacttgattggtggaacaggcattataaatggccatacccttcggaatctcaaaagcaggcacttgcagaatccacaggcctagatctgaaacaaatcaacaactggttcatcaatcagagaaaacgtcattggaagccttctgaggatatgcaatttgccgtgatggatgcaactaactactacatggaaaatgttatgtgcaagccatttccaatggatggcatgcctatgcttctttaaactaatcctctactagaatattcaaaagcttagccgagaaaaccctatctattttaagttgcctaggtcgccaggttgctatatataatgtgtcattgatgaatgttttactttaaattgtagaaagcaggatgaaaattctcggttatccctgaactgcaatctatgt

SEQ ID NO: 19535 - DNA, 692 bp, Glycine max
cgcatccatcataggcataccatacctactaaaactccgcgacagatcatatcatatcatatcatttcatgcgataagctagcttatatatacacacacacatacgagggcagaagggaaaaatttgcttgaaaaaatttctaatctattctattctatatacaattatgccttttccatctggtattctgaaaaggctagtttaatttatttgtggaaagagatataaagcaagtattaaacacatgggtaggggaaaggtggagctgaagaggattgagaacaagataaaccgtcaagtgacatttgcaaagaggaggaatggtttgctcaaaaaggcttatgaactctctgtcctctgtgatgctgaggttgcccttattatcttctccaaccgtggcaagctgtatgagttctgcagcggccatagcatggccaagacacttgaacggtatcacagatgcagttatggagccttggaagtccagcaccaacctgaaatagagacacagaggcgctaccaagagtacctgaagctaaaatccagagttgaggcactacagcaaacacaaagaaacctccttggggaagaattggagcacttagacgttaacgaccttgagcagcttgaacgtcagctggactcttccctgaagcaaatcaggtcaaacaagacacaacaaatgctcgat

SEQ ID NO: 19536 - DNA, 423 bp, Glycine max
atttcttaaccgaaaagcctcaaagaacaaagatttacctcttcggaggttttagtggtgactgctggaggaagctttagccgtggctaggcaagaactgcactcactcactctcgattcaaattgctcaatgaaacgaaacacagagaacacaatgcttcgaaacgacgacgttcgcatcgtttcctcttccatcaaaatccctcttccttccatttccaaacaccctacctgtcctctgcgaaccgcgcactctcacatcgccaacgccacaaactcgattgcgcaactcattaactcgttcacctctcactccgccgagttgactcgctccgtgatacagaaatcgtcgctcctgtgctcggcgacgctgtccttaaccggcgaccggaagagaaaatgtccgattcggcgtctggcgtc

SEQ ID NO: 19537 - DNA, 388 bp, Glycine max
gccttcaatctttgcaagtatgttattgagaaggttattgtgatgagtccagctttcaatctttatgggtgtgcattaattgtgcttgctgaatggaagcccccagtatatgataatacacgtggtatagttcttgtaactgctacaacacgccgtaattcaccaaataatttggattcgaagattcatcacaataaccttctcaataacatacttgcaaagattgaaggcaataatgcaaaagcagatgatgcaatcatgctcgaccaagatggttatttatcagaaaccaatgcaactaacatttttgttggtaaaaagggccgtgttttgacccctcatgctgattacttgtcttctggcattactcgtgcaactgtaatggatt

SEQ ID NO: 19538 - DNA, 569 bp, Glycine max
  unsure (1)..(569): unsure at all n locations
aggatattcacatgctttgtctcagtccaatccattgtctaggtagtgctcttgagggggggaggtggagtatggtgtgatgtggatgtggtggaattctcgtattttggtgcaccagagccagtttcaaaagagcagctgtacacagagatcgtagatgacttgcgtgggggcgatccatgcattggttcaggatctcaggtggcatgccaagagacatatggaactttgggtgccatcgtgaaaagccaaactggcagtcggcaagttggttttctcacaaatcgtcatgttgcagtcgacctagattatccgaaccaaaagatgtttcatcgtcttccaccgactttggtgcctgggtgttattcttgttgcattagaaagagcaacttcatttataatcagataacctttnnnnnnnnnnnnnnnnnnnnnnnnnnnnnnnnnnnnnnnnnnnnnnnnnnnnnnnnnnnnnnnnnnnnnnnnnnnnnnnnnnnnnnnnnnnnnnnnnnnnnnnnnnnnnnnnnnnnnnnnnnnnnnnnnnnnnnnnnnnnnnnnnnnnnnnnnnn

SEQ ID NO: 19539 - DNA, 570 bp, Glycine max
ggctggaatcttggccttcacaaagcttactccttatactgctgtcagtgctatccttcctctgtctatcgtcattggggccaccatggtgaaagagggtatcgaagactggcgccggaaaaagcgggatactgaggtgaacaatagaagagttatagtgcttaaagctgatggcactttcgaatatactgcatggaagaatctgagggtggggaatatagtgaaagttgatgaaggatgagttcttccctgctgacctcctgctgctttcctccagttatgaggatgcagtctgctatgttgagaccatgaacttggatggtgagacaaatttgaagttaaaacaagggttagaggtaacttcttccttacaggaggatctcaacttcctaaagtttaaagctacagtcaaatgtgaagatccaaatgcaaatttgtactcatttgttgggagcatggagtttgaagagaaaaattatgccctttttcatcagcaacttattctccgagactttaaactttgtaatacatactacatttttggagcagtcattttcactgttcatgaca

SEQ ID NO: 19540 - DNA, 437 bp, Glycine max
gtttgaatatgctttcctgggtagaaaaagaaaatcattgaaacatgtttgagggacagcaaaatagaatagaataaaaagggagaaattaaaaaaaaaacttgtttggcttgtaggatattgatgttctaaatcaggttgtgttgaggacccaggcctgaaaacctaaacaattgaattgttgtgccatctcacggatgttgattctgaaggaatgtcaccaacacattccgatacgcaattgagaattgaagaacgagctctttccgcatccggtgccgcctttgtgtctgctatcatcgttaatcccctcgatgtcgccaagacaagacttcaagcacaagctgctggtgttccctaccaaggtgtttgtcaattggccaacacgactctacacgatgttagatgttttgcaatttctagttctgagccaccgc

SEQ ID NO: 19541 - DNA, 1411 bp, Glycine max
atcggtcgagctgggagctagactccaggtgccaagatgatgccgctttgcaaaccgggaacacttgatcctaccaaagtaaagggcaaaatactagtctgcctccgaggtaataaattaacttcagccagtgagggtgaacagggtaaacttgctggcgctgtggcagttctagtgcaaaatgatgacccaagtgataatttacttctggccgagaatcatgtattacccgctgcaagtataagtggaacgggaagtcataatattaaaaacggtacaggcaacaatggcaataacaaggagattttagcttacttgagtgctgcagaaacatatataggagtaaaaccagctccaatcatagcaggattctcatccaggggtcccagttccgtgcaaccattgatactaaagccagacataactgctcctggtgtgaacgtaattgcagcttttacacaaggagcaggtccgtctaatattgcatcagatagacgtcggtctcctttcaatgtgcaacagggaacttctatgtcttgccctcatgtcgctggcattgcaggtcttctcaaagcatatcatcctacttggagtccagcagctatcaaatcagctattatgaccacagctacaacactagacaacaccaatcaaccgattcgcaatgcatttcataaggtagcaactccattcgaatatggtgccggacacattcagcctaaccttgcaattgaccctggactcgtttacgatttacgcaccaccgattacttgaacttcttatgtgcttctggttacaaccaagctttactcaacttatttgccaaattgaaattcccatacacttgtcccaagtcttacagaattgaagatttcaactatccttcaattacggtgcgtcatcctgggtcaaagaccataagtgttactcgtacagttacaaatgttgggcctacaagcacgtatgttgtgaatactcacgggccgaaggggattaaggtccttgttcaaccaagttcgttggctttttaagaagaaccggaaaaaagaagaagtttcaggttatactgcagccaattggtgcccgtcgtgggttatttgggaatttgtcttggacagatggcaagcacagagtaaccagtcctatcacaattctgccttagaaattactctcgatcagcattcttatgttatcattgtcgtcttttgagtgtgtttgcatttgctgttttttaggctgtaatatgagcgtgtttcctactcctattgcattaagctcttttttttttttttttcatgtaaagctttgtcataaataagggaattttatgaatgctgatggaattggagctatcatcaaagaactagtaatgatcggaggaaaatcaagcaaatttaaaccaaagcaata

SEQ ID NO: 19542 - DNA, 481 bp, Glycine max
  unsure (1)..(481): unsure at all n locations
gaccacanactgtcatgccatcctcagttctatctagtgatagtatgcacattgggcttcttgcagctgctgctcatgctgcagcaactaatagctgctttacagtgttctataacccaagggctagtccatctgaatttgtcataccgctttcaaaatatatcaaagctgtgtaccatacgcgtgtttctgttggtatgcgtttcaggatgctttttgagactgaagaatcaagtgtccgcaggtacatgggtacaataactggcataagtgacctggatcctgttcgttggccgaattctcattggcggtctgttaaggttggttgggacgaatcgaccgctggagagagacagcctcgggtatcattatgggaaattgagcctttaacaacgtttccaatgtatccatctctatttcccctcagattgaaacggccatggcatcctggcacctcttcttttcatgatggcagagatga

SEQ ID NO: 19543 - DNA, 405 bp, Glycine max
ggtgtttagcgaacaaaagagagtaaacaaaatggcattgcaggcaccacctagccttcacaccgtcaatggcaatgctggcctgagacgacccttgatgaatccttcttctttttctctaaagtcatccttcttctctggttccctcaatttctatcttcatcccaatcacctccatcttacttcagctccacccaggatttccatgcgtgttgcttccaaacaggcctatatctgtcgagattgcgggtaaccgggttacccttcttttattttttcataaattcaattaacttatgcttttgctaatgttattcattgaagctaacgctatgctgcaggtatatttacaaagacaggactccctttgagaagttgcctgataactacttctgccctggtaat

SEQ ID NO: 19544 - DNA, 297 bp, Glycine max
caaaatggcattgcaggcaccacctagccttcacaccgtcaatggcaatgctggcctgagacgacccttgatgaatccttcttctttttctctaaagtcatctttcttctctggttccctcaatttctatcttcatcccaatcacctccatcttacttcagctccacccaggatttccatgcgtgttgcttccaaacaggcctatatctgtcgagattgcgggtatatttacaaagacaggactccctttgagaagttgcctgataactacttctgccctgtttgtggtgctccaaa

SEQ ID NO: 19545 - DNA, 526 bp, Glycine max
ggggaacaagaggtcgaggaagaagagaaggagaatgacggaaagttgcatccgatccgtcgtagaagccattcactcctctcctttccaagccgttctccatctcgccggtggagcttctcaggtggtgggttcgttgctatcagttcccggtgcttcgaatactgtgctcgaagttgtggttccttactctaagatgtctctcattcagttactcggaaagattccatcccaattttgtggccaacagactgctgaagatatggctttattggcgtataatcgcgctcttaagctctccaagccaggatccccggctgttggagtgggtttcactggttctttggccagcagtcgtgcaaaactcggggaacacagattttatatgtcaacaaggacagccgaccaactttggatatcaagtgtgaccttgactaaggggcttcgtactcgagaagcagaggatagagtttctagtcatcttttgatcaaggcaattggaaatgcatgcaaagttcccggagca

SEQ ID NO: 19546 - DNA, 1832 bp, Glycine max
cgagcggccgcccttttttcggctcgagttccaaataaggatttatagtactttttaaatagttatttattattattattattattattattatttagtttgattcagtgagacacattcatgcagtcaatactcaatacttataaccgtataatgaagatctgatggctaatatcttaaacgtgtgcttctgatatgatccatcgtccatcgtccatcgtccatcgtcctccaacggttacgaactaacgatcgcgtaaacgcgtgtttacaccgactgcaggaaatccgtttggagggtggtaaaaaattaaagattgatctatggtgttggaggcgaaccgaacgagtgttttcaagctgcggcgtgtggtctttctctccgtgacacagcacaaacaaattctcagtgttggagacttgagctcatagagaaatcatagtttgtttaatttcaattctgagcaaaggtcaacatgcaagttttttccattgaaggcgaaagtgctttgtcagttgttggtccaaggccaatggaatggtctactgttccatacaatgcccctcaagctcctgggccaaatggaaagcagcggacctcaagtttggaatcaccgatcatgttgctgtcaggtcaccagagtgctatatataccatgaagttcaatccagcaggatcagtcattgcatctggatctcatgacagggaaattttcctctggaatgtgcatggggattgcaagaacttcatggttctgaaaggtcacaagaatgctgttttagatctccactggactactgatgggacacaaatagtctctgccagccccgacaaaacagtgagggcatgggatgtggaaacaggaaaacaaatcaaaaagatggtagaacatctctcatatgttaattcatgttgtccttcccgaaggggaccacctcttgttgttagtggctctgatgatggaactgctaaattatgggatatgcgtcagaggggttccatccaaacattcccagataaataccagattaccgctgttggcttctctgatgcatcagataagatcttcactggtggtattgacaatgatgtcaagatttgggatttgcgtaaaggggaagttaccatgacacttcaaggtcatcaagacatgattactgatatgcagctgagtcctgatgggtcctaccttcttacaaatggcatggattgcaaactttgcatttgggatatgcgtccgtatgctccgcaaaatcgctgtgtgaaggtgttggaagggcaccaacacaactttgaaaagaacttgttgaagtgtggttggtctcctgatggaagcaaggtaacagctggtagttctgatcgaatggtttacatctgggataccacttctcgccgcatcttgtataagcttcccggtcacaatggatctgttaatgagtgtgtttttcatcccaatgagcctattattggatcttgcagcagtgacaagcagatttatcttggggagatatgaagcacaacgtttaggaactcaaatgaaatgagcatgttggtgcttttgaccaccattagggagtggtaaactttagaaatgctgaattccttctgttgtttcctggtcgatcaattcagtgactatataatgttcttgcaaaaatattatataatgccctttgtttgtaatatgtgatttgacgttggtgagaatggcttcataatttcattgtgaacttcgagacattttgcttaggaaggtgtttcgaaatttttcccctgcagaattggattaaatttaaaaatgaaaaatgttagtgatacattcttgatgtac

SEQ ID NO: 19547 - DNA, 316 bp, Glycine max
aaaacgagtgtttcaagttgcggcgtgtgggctttgtctgaactcagtgaaccacaccacacaacacagacgatttctcagtctcaatctcagtgttggagacttgatcttaagagaaatcatagtttgtttaatttcaattctgagcaaaggccaacatgcaagtttttcccagtgaaggcgaaagtgctttgtcagttgttggtccaaggccaatggaatggtctactgttccatacaatgcccctcaagctcctgggccaaatggaaagcagcggacctcaagtttagaatcaccaatcatgttgctgtcagg

SEQ ID NO: 19548 - DNA, 443 bp, Glycine max
cagaggccatatcttcgcctggatttgtgagcttatttctggccaaagatgtaccgagtgataataaaattggaccggttgttgctgatgaggatctctttgctgtagattatgtcacttgtgtgggacaggttataggagtagttgtggccgatactcatgaaaatgcaaagattgctgcacgaaaagttattgttgagtatgaagagctcccagccatcctttcaatacgggatgccatcaatgctagaagttttcatcccaatacagaaaagtgtttgagtaaaggtgatgttgatcactgttttcaatcaggtcagtgtgaccgaataattgaaagggaagttcatatgggacgtcaggaacacttttatctggaaccacatagcactttgatatggacagtggatggtggaaatgaagttcatatgatatcatctagt

SEQ ID NO: 19549 - DNA, 991 bp, Glycine max
gttggcccattatcgaagttcgggtgttctgttccagcaagcagaagcagaagcagaactcaggtagcgtgcggttgttgggggaaaaatagaaagcgatggcgaatcagggtgctaagaaacgcaaggaagagaacgctcgtcacatggcgaggctccgccaaatcatcatcgcctgcaacgttatctatgttttgcttagaatgttggtgttccattcgagcttcacctggaagcactggattgggttgattgtgacttctttggcatatgttattccctatcaacagctcgcgaagatggcaacccctgcttacgctgaagatggtgaacttttagatggtggatttgatatgtctactggtggagtttgtgggtatttacatgatgttatctacataacatgctttgtgcaagtcatgtccatcgtctctggaaagttctggtacacatatcttgtgataccggcttttggagcatacaagtcctttggtttcattaaaggatttttgccagggggttcagaggaatcatttgaagatgaaaagacccgcaagaagagagaaaagatggagaagaaggcatcgagacccaagtttgccaagacaagaactagatagtttagtgtagggcacccagttacccaatgtaactcaatatccaagattgatggaggttgccctgaaactttcaacttattgcgaacacatgctgcacaaagtctgagttgtatttcatgtattacaatttactttttatgccctccaagaacatgtgtgcttacacacagtttagataagtatttggaaaagctaacctctatgggatattgggactaagagttgtcaattacgggaagattcatcatctttatcaaatgactcaacgttagtgaatgacgtggaattgcttaaatggagtttaacctccttgttggaaatcttacgtgggtgtaaaaaatgggcatatgtatgacggacaggtagctagc

SEQ ID NO: 19550 - DNA, 680 bp, Glycine max
ctgcgagcttacatcaacaagagtgagttagagaagaagaagaaagagcaactcagtaacgacgatgctggagttggtgttgttgtacaagaacccattgctccacacatccctaaccctaatcctcgctttcaccttcgccttcttcaagatccccctcttcttcctccacggcctccagacctacatccaccccgactcccaaccccaatccagcaatggcctccgagccgccatccgccgccccggcagcatcgacagctaccaacccttgtcttccaaaaccgccgccgaaataaaaaagcggaacaagtccaacaacaacaacaacaagtccgatttcgatgaaaacaatgctcagatcttcagaatcacgctcgaccacgcccacctccagtcccgtctcttcatcgatcagtactgcgtcgctttcactctctccttcgctgccctttccacccttttcctccactccttcctcgattccccccagaatcgtgggttcttctccaacggcgttttcgttcccgttctgttatcaattttgagtctttactcgtggggctcgctgctcgccaagaccacgttcgagagatccgcgtccaggaggttcgagaagcaattgagtgttgccttggggggtttgggtttttttttagggcttttgtttgttcctgagg

SEQ ID NO: 19551 - DNA, 717 bp, Glycine max
caaagccaaaactagctgtggaactggaagcacattcacattcacatgcaaaaggaatagctgctaaatgatgaacgccgcaacagcagctaatagcagtgtttattcacagacacagtgcagactactttcctcggatcttcgaagttcgattcctttcttgaatgaacgcaagtcacggttggtggtaagggctggcggtcgtcctcctcaaaatatgggcaaggacgaggatgagaagcagcagcagcgtgtcatacaacaacaacaacaacaagaacaacaagcacctccgcccgtgtctcttagcctggacgacgtgaaccccgtaggactgggtcgaagatcgcggcagttgttcgatgaggtttggagaaagttctcgggattgggtcagatttctaggacaatacggtcggatgatcaggaggctctggatgcccttctggtccgagaaggtccgatgtgcgagttcgcaatccctggcgctcagaatactactgtactcgttgttggtgccaccagccgcatcggtcgcatcgttgtgagaaagctcatgctcaggggctacgctgtcaaggctctggtaaggagggcagaccaggaggtgcttgagctccttccaaggtctgtagagatagtcattgtggatgttggtgatcccgccactgtcaaggctgctggtgaaggttgcaacaaaattatatattgtgccac

SEQ ID NO: 19552 - DNA, 578 bp, Glycine max
gctgtattgtaatccaaaatgtggtgaaaattattccttgtggtttaccggtctacgtgtctgcttcttgacctatgaagccgacggaagggagggccactcacattttctggttcatatgtatctggaagcacatgcaagttctgtcttatgaacagtaatagctgctctgctaaatgatgaacgccgcaacagcagctaacagcagtgtttactcacagacacagtgcagaccactttcctcggatgttcgaggttcgattccttacttgaatgaacggaagtctcggttggtggtgagggctggtggcggtggtcgtcctcccaaggaggatggtgaaaagcaacagcaacaacaacaacaacctgtgtctcttaggcttgacgacgtgaaccctgtgggactgggtcgaaggtcgcggcagttatttgatgaggtttggagaaagttctcgggattgggtcagatttctggcactatccggtcggatgatcaggaggctttggatgcccttctggtccgcgaaggtccgatgtgcgagttcgcaatccctggcgctcagaacactactgtactc

SEQ ID NO: 19553 - DNA, 525 bp, Glycine max
gtcaccacagacattgaatctttgatgagtgccaatattggtagttctcatgttttcgagcgtgattcacatcctagtcctggaagaattgtagatagaccaggtgggatgtctcggatggatcgccgtggggatgtggtaatggaggatgacagatggagtagagtttctggtgcttttcgttctggacgtggtttggatggcattggaggtaatgtgggattccgatctggccaaggaggcaattttggtgtcttaaggaaccctcgtgcacagacaccaccacaatatgttggagggatcctttctgggccaatgcaatcagtgggaaatcatggtggaagaaataatcctgatggggagaggtggcagcgttctgctagcctccagcagaggcgtttaattccttctcctaccctgactcctttacagatgatgcacatagctgacaatacctatgacgccggtaaagcagcacctgtggaagaggtagaccagtcgtagttggacgctatcttgcacaga

SEQ ID NO: 19554 - DNA, 779 bp, Glycine max
aggaaatggagttcccaagattcaacactgataaaagccagtcttggtcaagcatcttctggtgaaactcgggaacatctgtatcataattttgagactgatcctaatagtggcagccttggttcaaaaactaaggatcttgcttatgccgtcaatccaatgggtcaaaactttggctctcaaactagccaacatggacacatggacagtagcgtgagcttagagggtctttccactcctcgtctagatgtaaacggtttgatgccatcagagcatttaaatggtactgaaggctatgtaaatgacaaagagcatccttctgaattggaacgtaatcatcactcagctgaagatgtaaagattaactctatggcagacacaggacccagcattcctcaaattcttcatatgatatgcagtgggggtgatggaagccctatttcaagtaaacggactgctcttcaacaattggttgaagcttctataacaaatggtcattctggttggaccaaagtcttcaatcagattttgacagttgtgcctgaggggggttgctggatgattcagattcctcagtcaaagagcttgctctttcactgatagttgaaatgcttaaaaaccagaaagggccatggagaactctgttgagattgtaattgagaagctgcttcatgttacaaaagatatcattcctaaggtctcgaatgaagcagagcactgcctgaccattgttctatctcagtatgatccattcagatgtttaagtgtcattgtccctc

SEQ ID NO: 19555 - DNA, 623 bp, Glycine max
ggacctttgtagccactaatactattgttgctagccttagatccagtctatgaatggcaaagccaagatcttggactcagatatggtcttctattgtcggagtgtgtgttctgaattttgttctgaacttcaagatcgtggcagtagcagatgacactggaagcaacagtattgtatcagaaggtgactgcaagaacacaaattatcagattttcctccctccaccttatcagaatatatcctctaccatatgcaaacctgtttggcattcatacgaattgaggtacaccaagacgggtgacaccacaactatcatattatctgctccatacactgtggggtgggtgggaattggattttctagggatggtatgatggctggttccagtgcaatggtgggatggattaacaaacatggccatgcaaaagtcaagcagttttatttaaggggtaggaggcaatcagaagtaattatagacaaaggtgaactgcctctaaatactgtgcctgcggcagtggcaacaaatggagctgaaatttacatagcttttcagctgcaaaccacaattccatttgggaagcaaccgattttattggctttcagtactaaacatccactgaac

SEQ ID NO: 19556 - DNA, 424 bp, Glycine max
gaaggtaggaaacccataaatttattctagtaatacatttctgggttttgtttgccttgtgtgtatctttctattgacgagaataatggaatgttcccaattctctgtttttttgcttttgtccatttttgtgggaatttgtttagcttctactgaggaacaggaaagggacaggattgccaagctgccaggacaaccagaaaatgtgctatttgcacactactcaggctatgtgactgtgaatgaagaagctgggagagcattgttctattggctggttgagacaccagctagtattgaaccaagttcaagaccactagtgttgtggctcaatggtggacctggatgctcctctattggttatggagcagctgaagaaattggcccttttagaattaattctgatgggaattcactttactcc

SEQ ID NO: 19557 - DNA, 437 bp, Glycine max
gatccaaaagtcattgagctcattgacaatgttcgaatactacaaatagacatggtatggtgctattttatgatacgagacatcagatggctctcagatgcaggaaagcgtcttgaaatggctcgggaaggtattgaacgtgctcatggaaaggattcttttcgcctcagactcttacaagtaggtcgatatccagaactcgcattgcatttgagactagagctacttgaaggggtagtggcatatcatattcgccaattggagaaatccaaaaaaacattagcctcagcaaggacaaagtttatccagcttgcaagtgccagatgaagccttatcacttgttatgagcatgggctttgtttttgggaacgcgatgcaaagcgagcattgcgaatgaacaatcaagatgttgggggtgccattgatttccttgctga

SEQ ID NO: 19558 - DNA, 544 bp, Glycine max
tagcagctcgttggttacacttggaatcataattgaaaccaagcgtttcgtggtttaaaaatgccgaatcacgcctcaatcatcatttgtcaggattattcggagtcagttccttggcttggacagggcatttagtccatgtcgctattccgggatccaggggggaatacgttcgatggaataatttatcaagtatattgcctcaccccgaaggattaggtccatttttcacaggtcagtggaatctttatgctcaaaaccccgattccaatagtcatatatttggtacccctcaaggagcaggaactgctattctaacacttctcgggggatttcatccgcaaactcaaagtttatggctgaccgatattgcacaccatcatttagctattgcatttctttttctagttgctggccatatgtatagaaccaacttcgggattggtcacagtataacagatcttttagaagcacatactcctccggggggtagattggggcgtggacataagggtctttatgacacaatcaataattcaattca

SEQ ID NO: 19559 - DNA, 400 bp, Glycine max
ggactcaatacgctactgagtcggtttcttttctctattctttttttctttctttcttttcaatagtaaacgcaaaacctcacaaacaacacaccttctgctgggtcttctcttcggggtcagactctaaaagcaagcatctatctaattgatggaagcgtgttttcgtaattttatttcattttagtttttgttattatttcatgaatcatgatcatcgtcttcttctctcgacaaaaccaataagtgtccacttcttttcacgttttcaatcgttctagtctttgttctttgatcttcattcattctttttcgatcacatcattcttaacgacaccattaattaccaccttcagtttcgttaacaatcaatattttttttttttcaaatttgttttca

SEQ ID NO: 19560 - DNA, 731 bp, Glycine max
gttgagaggaatttgaggcatgcccttcagccggtttatgaagttctctttgagcgtctaaacactcatcctggagggttgaggaccttatccattcttcgagaagatatcctctctattctcacagaggaaaatattgcatcgctgagagcattggattcatatttaatggaaaaatttattacgtggcttagtcctgctgccttagagcttcaccagattacatgggatgaccctgcttctttgctggagaaaattgttgcctatgaagctgtgcaccctattagcaaccttctagatcttaagagaagactgggaattggccgtcgttgttttggatatttacatccagctattcctggtgaacccctaattttcattgaagttgcactactgaaggatgttgctcagactatacaggaagttttgtgggatagtcctcctatacctgaaggtgaggcaacatgtgccttgttctactccatatcatcaactcagcctggcttagcggggatcaacttgggaaaatttctcatcaaacgggttgtaacacaggtgaaaagagagatgccacatatctctacctttgcaaccctcagtcccatcccgggattcatttcatggcttttatccaagttagcatctcaaagactgcttgctgagggagataatttgtcacaaccacaagcagagggatccatttccactttctatgataatatacttaaacc

SEQ ID NO: 19561 - DNA, 441 bp, Glycine max
cagctgtcttgcttatattttagctaattaaacccgcaaaccataaccaacgactttgacttgggaaattagacacagacgaaaggagtttgaagaacgatggcagaaggtgtgaaattggaggacagatggggatactatgttgcaacttcttctcaggcatgcgtttcagccatcaactcttactaccatcaggttctcatctatggcagagagaggtctgtgattctggaagcagtggcacatgacaaacactgtgtcttggccaacatcttggcagcacatttccttcactcttctggctcttcccgtgctctcacttgtcttcatgccgctaagtccaaccttgaacatgccaccttgtacgagaaactagttttcgatgccatcagttatatgctatctgaagatagagacgatgatgtagctgttgaattgcat

SEQ ID NO: 19562 - DNA, 927 bp, Glycine max
cccacgcgtccgccttaatatcctaaaattccttcatagaaaagtactcaccctaaacccaaaaggtcaatttaccaatttattttttttatagttcccatgcacttaacgtaagaaatccttcaccttcacttctaaaatctctcttttcccaaatccaccaatctcactcacacacaaatcagaattcacacccacataccaaacacaaacacacaatctctgaattgaaacccaccatgttgattaaagggcatcaaattaaggcaccaattttggtcctcaatttgttccttgtcctaatttgttccacagcttcttccgtcaacgttgttgaatcaaggaaacttgatgagaccactccagtgcctgccacaaacggtactgaagaaaagtgtggatcatgtggtggtaccacttatccgtcgccaccgccaccgttactaccaccaccgtcgccaccaccgccttcaccaaagaaaccaccaccctctcagtattgtccgccaccaccaccgtcgtcgttcatatacatcaccgggcctccggggaacttgtatcccgtcgacgagaatttcagcggagccatcagccaccgccaccgccggagctttgccaccatgttgttgccacttttggttggcttgtttagcacgcttgcgttttggtgattcgcttgtgaagaaggtaatagtaacgatgtatcattcagatcattctaaacacaaatacacaatggaagaattttatggtttatgatgttattgttattgttatagttatgaatatcaagattttacgtatggtacggcacagagaattttgtaccggtaattagtgtttgacaccatgctctgttcttcttttttatgcgatcacaatctctcttgtaattctctgtcaaatttataaagaacgccttttttg

SEQ ID NO: 19563 - DNA, 458 bp, Glycine max
ctccgataagacaacacaacgggatgaatgaaattaccaaatttaccttcactttcccggcgcttctcttcttccttgtctaagttgctggagaggtcactgcaaacatcgagaagggagggtgaaaaaaatcgtaggagagctagacaacatggagttcagtggggccatcttgctattttgtttcctctatctgcattagttgcttatgctaattgttgcttctttttgctttctttggtcttgtaacgccaacttctccaaggtgttgaccgcgcagaacatgaatttaaataggacaaaaatgttgctaatgcaatagctggagaaaacttgaaattactgtgatgcgcattccaaagccatacaacggattaccattaaatggaacccaaagcaagagtccctatgcttttgcaaaagtacttttgcctcaaaagtacttttacacctaattt

SEQ ID NO: 19564 - DNA, 275 bp, Glycine max
gggcaatgggtgtgaactcttactccaacagcatgaagatccaagccgagatacaaatgccacccttagaaatccacaaggttcgtttgccaccagaacgcaccaccttgcagaaactcagacacagactctctgagatcttcttcccagatgatccactccacaggttcaagaaccaaacatgcctcatcaagctcctccttgcacttcaatactttttccccattttccaatgggcccctctctacaaccgttcccttctccgctctgacatc

SEQ ID NO: 19565 - DNA, 398 bp, Glycine max
gaagagaaaagcgagcaatgggtgtgaactcttactccaacagcatgaagatccaagccgagatacaaatgccacccttagaaatccacaaggttcgtttgccaccagaacgcaccaccttgcagaaactcagacacagactctctgagatcttcttcccagatgatccactccacagggaatcagctatgctaagcttgcaaacttgccacctattcttggattatattccagttttgtgcccccgttgatatattccctgcttggaagttctagacatcttggtgttggtccagtttcaattgcatctttggtcatgggatcaatgttaagcgagaccgtttcttatagtcaagatccaattctctatcttaaaatggccttcactgccactttct

SEQ ID NO: 19566 - DNA, 429 bp, Glycine max
gaaggggaccaagtaatggaggatgatcctggatgcaacagagagtgtttgctgtccaagtgtttgagttgcatagactgataaaggtccaacagctaattgctggatcaccagatattttgcttgaagatggcgcttttctgggaaagtctcctccaaagggatctactcccaaaaaacttgcacttgaatatgttgtaaaacctcggcaacaaaaccttaagcgcaaagatgattctgaaaagctaaatcataaaatggaatgttctgcagagaatgcggttggcaaaacatctctttcatctgtgaaagacggtagccacctttcaaaatgcacccctttccctggaaatcagcaccagacaaatgcggctgctgacagtgggatgggtccctggtgtttcaatcagtcaccacctgggcacccgt

SEQ ID NO: 19567 - DNA, 399 bp, Glycine max
tgttcggaacgacagcatgtggtggccgttcagcagaaaagagaaagagggttctggattttcatcttcttccactgccgaggaagttactgaaggaatcgatggcactgccctcactgctattgttacaggggcatctagtggtattggtgctgagactacccgtgttcttgctatgcgtggtgtccatgtaattatgggggtgaaaaatatgaatgctgcaaaaaatataaaagaaacaatacttaaagggattccctcagctaaagttgatgctatggagttagaccttagttcaatgacatctgctcgaaaatttgcatcagagttcatttcttctagtcttccactaaacattttgataaacaatgcaggaatttttggaacccctttcatgct

SEQ ID NO: 19568 - DNA, 559 bp, Glycine max
ggatggagtgagggttttacgccaaaggagcaccgcgacgctgtctctcccactcttctccgccgccggtaaatgcaattctttctccactctttcatttccttacaaaaactaagagacgcaccttcgatttcgcatgctcttttttttgttctttctttcttttaattcaattggttgcacataaattccattttcattcttctccgcttgcttttcattacattaccatattctctgtgttccgctccgcgtgcgtgtgcgtctagggtttcccgccaaagaagcaccgcgacgctgtctctcccactcttctccgccgccgcatgtgaattagaagaagaggaggcgaatttgttaatttgttgtgagtgtgttcgaaatgggtgaaatctggtggtcccttttgggggcggcgatccccgtggtggtggcagggcaagcgtttcgcgtgaagaagcggcgtgcagaggagcagagactgcagagtgctcgcgggagggaaaggagttccgatgaaatcttcgtgtgtgagagggtttgcacttcaaagaggatg

SEQ ID NO: 19569 - DNA, 652 bp, Glycine max
gccgctgacttgggtcaactctatgatctcttcgtgcaactcaaggtcaatcttagagttaatctcatgggatatgactactctggatatggagcatctactggcaagcctagtgaatccagcacatatgctgacatagaggcaatatatgaatgccttgaaactgagtatggagttagccaagaagatgtaatcttgtatgggcaatcagttggaagtggaccaacactgcacttggctgctaaattgccaaggttgagaggtgtggttcttcacagtggcattctttctggtcttcgagtgctctgccatgtgaagttcacattttgctttgacatttataagaacatcaacaaaataaagaaggtcaagtgccctgtacttgtaatacatggtacagaagatgatgttgtcaattggttacatggtaatggactttggaagatggcaagggagtcatatgaccccttgtggatcaaaggaggtggtcactgcaacttagagctttaccccgattacatccgccatctttgcaaatttatccaagaaatggagagcatgacaactgagaagcgcctcaaaaagattcggcaaagtgcaaaccaatcaaagtcaaacactggttgcacctgtagtagatgctgtagagtga

SEQ ID NO: 19570 - DNA, 720 bp, Glycine max
  unsure (1)..(720): unsure at all n locations
gcgctagttattcatcctaggcattctggatcggataatgagagtgtgaagataacagttgccggttcaagtgtcagcgttggtgctgccagtgaaacgcgaaccgtgccaggcagtgaggctagtgatattcaaatggttgaagcaggaaatatggtcatttccatacaagttctgaagaatgtcactgacaatttcagtgagaagaatgttctgggacaaggaggttttggaacggtttatagaggtgaactccatgatggtacaagaattgcggtgaaaagaatggagtgtggggcaatagctgggaagggtgcggcagaattcaagtccgaaattgctgttttgactaaggttcgccaccggcatcttgtttcccttcttggttactgcttggatgggaatgagaagcttcttgtgtacgagtacatgcctcagggaacgttgagtaggcatctttttgactggccagaggaaggactagaaccactggagtggaatagaagattgacaattgccttggatgtggcaaggggtgttgagtacctccatggcttggcccatcaaagcttcatacatagggatttaaaaccttcaaacattctccttggagatgatatgagggcaaagggtgcagatnttggtcttgtccgtcttgctccagaaggaaaagcctctatagaaacaagaattgcaggaacctttggatatttggcgccc

SEQ ID NO: 19571 - DNA, 283 bp, Glycine max
gatgcaaagggtgagtgagagagacattttggtccttgaacataatttggaccaaaaccaaaagatgatggaatccggggctcacttctgtaactcttgtggtgaacaaattggacttgatgctaatggggaggtgtttgtggcttgtcatgagtgttattttccaatttgcaaggcttgttttgaatatgaaatcaatgaggggcgtaaagtctgcttgagatgtgccactccctatgctgatagagcaacggtgtttaatgacaccaaggtttatgaaaac

SEQ ID NO: 19572 - DNA, 450 bp, Glycine max
aaggaaagacagtggagtctgcaaacatgatcaactgaataatgcttacccaaatggagctttgctgccaccttcagctagttgttccttgtcattatccatgacgatgggtaacaagcgtgcagttatatgtggagttacatacgggaaaaggaaattcaagctagaaggaaccattaatgatgttaataacatgaaaaatctacttcttgataactttaaattcccaattgggtgcatacgtgtccttacagaagaacagaaggatcccaatttaattccaacaaagaagaacatactggattccttaaattggctcgtgaaggactgccagtcagaggactcattagtcttctacttctcaggacatggtttgcaacaaccagaagatcgcataggagatgaaattgacgggcttgatgaaactatttgtcctgttgattttttgag

SEQ ID NO: 19573 - DNA, 422 bp, Glycine max
  unsure (1)..(422): unsure at all n locations
aaaggcgtctgatgtggcaaaattcattaggtcactgtgtcttaaaggcagagtttcctaaagggaaaaaagagttggctgtctccctatttcagactgttgttctgatgttattcaatgatgctgagaaactaagctttcaagatatcaaggactctactggtatagaggacaaggaactgagaaggactctgcaatcacttgcatgtggaaaagttcgtgtcctacaaaagttgccaaagggtagagatgtggaggatgatgactcatttgtttttaatgaagggtttacagctcctctttatcgtataaaggtgaatgcaattcagttgaaggagacagtagaggagaacacaagcaccactganagagttttccaagaccgtcaatatcaggttgatgctgctattgtgagggatatg

SEQ ID NO: 19574 - DNA, 524 bp, Glycine max
ctaggaataggaatagtgaggtgggtgttagtataacttgtcacgtgaagggttgttgtaaactgtagataatagaaggttacagaagaacaaaaacctgtctctgtttctccgtcgtggcaattgaaggaagcactgtctgtctctgcaacttccgtcacattcacatggcagcttctgcatctgctactgctgtgccatatctagacaagacagattttctaaagcttcaaaatggcagtgacattcgtggtgtggctgttgatggtgttgagggagagccagttaacctcactgaacctgttgccgaagcaataggagctgcttttgctgcatggttagtggagaaaaagaaagctgatgcttctcagcatttgagagtttctattggccatgattcccgaatatcagccaaattattacagaatgcaatttctcgaggtcttgctggtgctggctagaagttgtccactatggattagcatcaacaccagccatgttcaatagcacactcacgaagaatg

SEQ ID NO: 19575 - DNA, 472 bp, Glycine max
gagagaagagaaggttacagaaaaacaaaaacctgtctctgtttctccgtcgtacggcaattgaaggaagcactgtctgtctctgcaacttccgtcacattcacatggcagcaacaacatcagggaagattgtccaatttgtttttgtgtcacactgccaccaacagaatacacggggtcgaagggactattattggtttggcccttctccgctagggaagttggcatggactgactcttccatgcaattgcgcactttattcaaaccccagaatcattttagtttccagagaaattttcactgcaatgcttctgcatctgctactgctgtgccatatctagacaagacagattttctaaagcttcaaaatggcagtgacattcgtggtgtggctgttgatggtgttgagggagagccagttaacctcactgaacctgttgccgaagcaataggagctgcttttgctgcatg

SEQ ID NO: 19576 - DNA, 767 bp, Glycine max
gatcactatttgaatgttccatttgatctatccaaggtagtttttgtggctacagcaaataggttgcaacccattcctccaccacttcgtgatagaatggaagtaattgagcttcctggatatacacctgaggaaaagctccaaattgccatgcggcatttgattccaagagttttagaccagcatggattgagttctgagtttcttcagattcctgaggcaatggtgaagcttgttattcagagatatactagggaagctggtgtgcgaaacttggagaggaatctagctgccttggctcgagctgctgcagtaatagttttagagcaagaacaagtagttccattaaacaaagggatgcagggacttgctacaccacttgtggaaaacagacttgctgatgggactgaagttgaaatggaagtgataccaatgggtgtcaatagtcgggacatctcaagcacgtttaggattgcctctccattggttgttgacgaaactatgcttgaaaaagtgcttgggcccccaagatttgatggcagagaagctgcagaacgtgtggctacccctggggtctctgttgggctagtttggactgcttttggtggagaagttcagtttgtggaggctacagctatggttgggaagggtgaactgcatctcactggacaacttggtgatgtaataaaagaatcagctcagattgcactgacatgggtaagggcaagggctactgatctgaggcttgctgctacagaaggattaat

SEQ ID NO: 19577 - DNA, 525 bp, Glycine max
ggacttggttgagaatacatattgtacacactcactgctctgtatctctatcactaaatttcaaaatttgctctctctaatcttaaacttgattgcatcagtgaggaagaatggaacgttcaattccagaggctgcagaatgtgatctctccattccaattccaaggggtggacccatttacgttcctaacatggtcggcccctccactagggttcctcactttcagacttgtcttctttctgaacttcggaatctcgaggctgaattgtctgaagatttttctcaccttgatatctcggtgggatgaccttaaaatatttacagaggatgacttaatggatatggctctcaaagaagtatttcaaggtagggagaacgatgaaaatcatcctccgcttctggaccaacccaatgcgagcaggttcggtgagaagaaatcaaatagaaagaggaagggaacaaatgattctgttcttgaaagtgattgtatagaaaaggtggaacaagtggtgagaatcaaacag

SEQ ID NO: 19578 - DNA, 439 bp, Glycine max
  unsure (1)..(439): unsure at all n locations
ataggaatggaggttgctgctgctgctgttggttggaaacttgatacaacaatcatattcccagaagatcaccttttacaaagactgtttactccttctcttgcccggagatatgaagaactctatcaaaagaatggagtcaaaatcttgaagggtgcttccataaaaaatttggaagctggttctaatggacatgtagctgctgtgaaacttggagatggatctcttgtggaggcagatacggtaattataggcattggagcaaaacctgctgtgactccctttgagagggtgggcctgaatacagaggttggtggtatacaggttgatggtcagtttcggacaagcactcccggaatctttgctgntggtgatgtagcagctttccctttgaagatttataatcgtatctctcgagtggagcatgtggatcatgccc

SEQ ID NO: 19579 - DNA, 567 bp, Glycine max
ggccgaatattgttatttgttattaatgtttacgcaaatgcctgaattataagatgcaccacgttctgtgaacttttcaccttcactctgtatcactaatccttctctgcttggaggcttttttttttttttttgatggatccggcaaagggattggaagcttcgggggagaagacccttcaagcagaagtgaaagcttttttcgattctgctcctcctttgcagaaaagtgatgagataactcagaagttgaatcagttcattcaacgcatttcttctccatcagcgaatgggaaagttaggagaattgtttgtgtgacttctggtggcaccaccgcgccattggaacaacgatgtgttcgctatgtggacaatttcagttcaggtcacagaggggccacatccactgagtatttcctgaaggctggatatggtgttatctttctgtaccggaagagaagtttccagccattttgtagatcccttcctgatgatcccttacttgaatgcttcaagcccaccgatgaggcgaacattcaagtttgcgaggcttattctgaagcagtg

SEQ ID NO: 19580 - DNA, 301 bp, Glycine max
caactacaagatgctgctccacgttctgtgaactcttcaccttcactcttttagattttgatggatgcagcaaagggattggaagcttctggggagacccttcgtgcagaagtgaaaacctttttcgattctgctcctcctttgcagaacagtgatgagataactcagaagttgaatcagttcattcaacgcaattcttcagctaggagaattgtttgtgtgacttctggtggcaccaccgcgccattggaacaacgatgcgttcgctatgttgacaatttcagttcaggttacagagggg

SEQ ID NO: 19581 - DNA, 437 bp, Glycine max
cgggtatgttggcttcattaatggaagtggtacggacaacagttgcctgtgaatgtgtttatgtacgagccatggtgatcaaggcattaatctggatgcaaggtccatttgactcatttgatgaactagaatctattattgcatcggaactttctgatccagcttggccagcagcactattgaatgatgtactactcactttgcatgctcgttttaaggcttctccagatatggctgttactcttcttcaaattgcaagaatatttgctaccaaagttcccggaaaggttgatgctgatgtgttgcaactgctctggaagacttgtcttgttggagctggtcctgatggaaaacataaagctttagaagcagtcacaattgtacttgatctaccacctccgcagcctgggtcaatgcttggtcttacttcagtggac

SEQ ID NO: 19582 - DNA, 785 bp, Glycine max
agccaacttgctagggcaattcaagaaagcttgaaaattggttctcctcctcaatatgacaatggttcttcaattctatcttttcctcaccttttcccccctggatacagaatctgtgctggatgcaagactgagattggccaaggaagatttttaagttgcatgggaggtgtctggcatccagaatgcttctgctgccatgcatgccatcttccaatcactgattatgagttttccatgtctagcaatcgcccttaccataaatcatgctatagggagaagcatcacccaagatgtgatggttgcaagaactttatcccaactaattcatctggcctcattgagtatagagctcatcctttctggctacaaaaatactgcccatcacatgagcttgatggcacttctcgttgttgtagttgcgaaagaatggagccaagggatacaaaatatcttttgcttgatgatggtcgaaagctatgtttagagtgtctagactcatcaattatggatactcatgaatgccaacctctttaccttgaaatacaagaattttatgaaggtttaaatatgaaattggagcagcaaatgcctatgctcttggttgagagacaagcgctgaatgaggctatggagggagaaaagaatggtcatcaccacttacccgaaactagagggctatgcttgtcagaagagcaaactgtcaccaccatttcaaggaggccaaggattgcagcaggctaccgagccatagacatgataactgaaccttataggctgatccg

SEQ ID NO: 19583 - DNA, 432 bp, Glycine max
gatgggagaatcttattgtcaaggagttttgatggttcattgaaggtttgggatctgcgcaaaacaaaagaaccgttaaaagtatttgaggatctgccaaatcactatgcacaaacaaatattgccttcagtcctgatgagcgactctttttgactggaacatctgtggaaagggagagcatgacaggaggtttattgtgcttctttgatagagtaaatcttgagcttgtttcaaaagttggcatatcacccacttgtagtgttgttcagtgttcttggcatcccaaactgaatcagatctttgcaactactggtgataaaagccaaagtgggactcacatactatatgatccaaccgtaagtgaaagaggagctcttgtatgtgttgcacgtgcaccaaggaaaaaatcaattgatgactttgaggcaaaa

SEQ ID NO: 19584 - DNA, 442 bp, Glycine max
gacacgtgcgagtgatcaaatattaagaagaggttatggatgtttttaaggtttttcacatgcttgtcttaaaacaattttccagcaaaatccaaatccttcgttctggtaatggcacagaatacatgtctaaaagcatgacacagtatttaaattctcatgtatcaagaggggttgttccttttgtttgattttttttcttcttgccaaactatggcagaagatcattcttcttcgcatatattgccttcaggagctacaagttttcctggtgtgccttttgcagtagctacaggttccactagtgtggctgttggaatagaatttgagtctaatcctaatcaatgattgagctctgttgtactaaatgagttcaattaccttccttggtcaaaagccataactcttgctcttggtggaagatctaaattgagtttcattg

SEQ ID NO: 19585 - DNA, 523 bp, Glycine max
cctctgctctgcggcttatttggtcacgaaatagggttttgcttgcaactaagatcgataagaggacgaagcggggaaagctaccgttgcgtgcggccacaatgggagggtcgcgagttcaagtcaacaagcctcacaagtcccgcttctcttccaaatcttctcgcaatcttcataaaacctctgtcaaggacagactcgcaatcgcaaaatcagagcgcaatgtcggcaaaggagctcgtgcagctcgaattcagagaaataaaatgatacgagatcaaaaaagagctgctgttttgaaagaaaaacgagaactcagtgggtcgagaagtcctcctcgagtgatagttctcttcgccctctgtgcgtctgtggatttagaatcacttgctgatgatctcttgtcattattatctaaagatacgtgtgtggtgctgtcaggaaccgttgcttcttctgaatataggacaagaataacggtactaaaagcaccccatggtgatctactatcatgcatggaaat

SEQ ID NO: 19586 - DNA, 633 bp, Glycine max
cggtgatgcatcaatggaagatctaacaagctctgtagcccagggtacctcagataatgatctttccatggatccagagggttcaaagtctagtaataaaaagagaaaagctttctcagataagccaacttcaaggccaatgaattcccaaaagatgagtgaatttagtactacgcctatggacgatgaattggatgttgttgatccagtgggtcagaaacccaagagacccaagaggataaagaagaatgtgaatgaaaagtttgaagatgcttttactgggattgctgccctgatcccagagcagacccaatttccaccttcaccaagcgattttagtgccgggggttctaaagcagaatcaggccaagacaactgaagacatagtgattcttaaccactacaaaaactttggagttactattctcagccctatggattgactttttttgtggagactgctaagttggctctctggtttatcaacagtttctagttccctatttggtggctctgactgcaaatagtggcttcaaagttgtgtcaaaacaggagaagctgtatatcctaggttgtatatggtagtccttaatgatagatattacatcctcccccaactgtggaagagaggag

SEQ ID NO: 19587 - DNA, 775 bp, Glycine max
gttattttggacacatgccaaacatgggttttgggatgcagcatccgaggtcaccaggtcctagtccagttttatctggatacccagaaggaagtccaggccttccaggagttaggaatgaaataaatctttccccggcttctggaagaaatggaggcataatatctggatggcaagttcagagatcttttgacagtgctcatgaccccaaaattgttaattttcttgaagacttaaaatctggcaaaagtcgaagatttgaactatctgatattattggacatattgttgaatttagctctgatcagcatggaagtcgatttatacagcagaagttggaaagttgtagtggcgaagagaaggcattggtgtttaaagaggttcttccacatgcttctaaattaatgactgatgtatttggtaactacgtaatacagaagttttttgagtatggaagctcggagcagaggagggaacttgcagatcgacttgttggccagatactgcctttgagtttgcagatgtatggctgtcgtgtaatccaaaaggcacttgaggttattgagcttgaacagaaagctcagcttgttcatgagctagatggaaatgttatgagatgtgttcgtgaccaaaatgggaatcatgtaatacagaagtgcattgaatctattccaactaaaaacattgactttataatatctgcatttcgtggtcaaattgctcttctatctatgcatccatatggttgccgagtcatacagagagttctagagca

SEQ ID NO: 19588 - DNA, 431 bp, Glycine max
atccggcggaattgtcactatcttcattggtatgcttatcgggtgctttgcaagccagcgtggtggcaatagtagcgactcgtcattctgggcttgtggcatgggccttaggttgggacttcaggctctatggccctctctacacggtcagtactccattccaatatttcttgtttcctggaccccaaaacctatttttgtttcatcttcaaaatctgattttcaaagcaaggtaacacacataataaataagatgaatttagtcggcacaccaaattaatttgttttctctcaatcccagcctattgaatgcaaaaggttacgaggcaagtattgtaactaaaaaagacaaattgttcactccaaaagtaaattcgttggtcggcccattttggccctagttcactattttctttaagcccaaattatct

SEQ ID NO: 19589 - DNA, 452 bp, Glycine max
acgagctcccctcaggttatcaaacactggctctcagggactctctttctcctcctcggttgtgttgcttggtcatctttcttcattttacagtcgataacattgaaaaggtatccggcggaattgtcactatcttcattggcttgcttatcgggtgctttgcaagccagcgtggtggcaatagtagcgactcgtcattctgggcttgtggcatgggccttaggttgggacttcaggctctatggccctctctacacgggaatagtttcctctggtattacatattatcgcattgggtctgtactctgtggtatggggcaaaggcaaagactattcaaacccaacgccgtcatcacctacaacaaagcacacagagacaccacagcttccaattacctcatctgatatctaacacagatttcctaaggaatttgtgcatagttgcacttctg

SEQ ID NO: 19590 - DNA, 536 bp, Glycine max
aacattgaaaaggtatccggcggaattgtcactatcttcattggtatgcttatcgggtgctttgcaagccagcgtggtggcaatagtagcgactcgtcattctgggcttgtggcatgggccttaggttgggacttcaggctctatggccctctctacgacgggaatagttacctctggaattacatattatgcccaaggattgatattgcaaaccagaggcccagtatttttaactgccttcaatcccctttgcatggtcataacttctgctttaggctccttcctttttgcagagcagcttcatctgggaagtatcattggagctgtcattatcgcattgggtctgtactctgtggtatggggcaaaggcaaagactattcaaacccaacgccgtcatcacctacaacaaagcacacagagacaccacagcttccaattacctcatctgatatctaacacagatttcctaaggaatttgtgcatagttgcacttctgcttctgctgcctcacaaatctgcaatagttatgtgtgt

SEQ ID NO: 19591 - DNA, 1101 bp, Glycine max
gcagcataaccagcgaggattcgagcttgttggtgtacgagtatttgcccaatgggagcttgtgggaccggcttcacacgagtaggaagatggagcttgattgggaaaccaggtatgaaatcgcggttggggcagcaaaagggttggagtatttgcatcatgggtgtgagaagcctgtgattcatagagatgttaagtccagtaatattttgttggatgagtttttgaaacctaggattgcagattttggacttgctaaggttattcaggccaacgttgtcaaggattcctccactcatgtcattgccggaacccacggatacattgctcctgaatatggctacacgtacaaagtgaatgagaagagtgatgtgtacagcttttggagtggtgttgatggaactagtaactgggaaaaggccaactgaaccagaatttggggaaaataaggacatagtgagctgggttcataacaaggcaaggagcaaagagggacttaggagtgcggtggattcgagaattccggagatgtatacagaggaagcttgcaaggtgttgagaacagcagtgctgtgcacggggactcttccggctttgagaccaaccatgagagctgtggttcaaaagcttgaggatgccgagccttgtaaattggttgggattgttattaccaaagatgacagtgaaaagaaaataggagtcaacgacaagtaatgtattgtattccatcctccatagttggttacaaccggactgaagattatggatcatcatgaagttgaaggggaaccaaccacctccacgagttatctataattgatgtaaattttcccggaaagagggaacactgtaaaatattagtcttggcttctttaatgtctattttaaagtggaagacttgtgtagtaaaagggtctgcatctagtactcccaataaaagaaaaaaaagagaagcaaattccttcttccttaatttactaattaaatgaaactggtagtgtccaaataattggttttaatttttatcctatcccagtcagtgtatcataaattggtatttataacatagtatgtttgaaaattaaacaaaaaagcggccgc

SEQ ID NO: 19592 - DNA, 442 bp, Glycine max
gaatttttgaatgagataggcatgatatcttgtttgcaacaccctaatcttgtgaaacttcatggattttgcattgaaggggatcaattgatattggtgtatgagtacatggaaaataatagcctggctcatgctttattcagctcaaaagatcaacttaaacttgattgggcaacaaggcttaggatctgtattggcatagcaaaaggtcttgcatttctacacgaagaatcaagactcaagatttttcatcgagacatcaaagctactaatgtgttactggatgggaatttaaaccctaaaatatctgactttgggctggctaggcttgatgaagagaaaacccatgtcaccacccgaatcgctgggacaataggatatatggcaccagaatatgcattatggggttacttgtcttacaaggctgatgtttacagttatg

SEQ ID NO: 19593 - DNA, 421 bp, Glycine max
tgccttttcaagtatcagtaagaatagaagggaggaggagtctttcatatttaaaaatgtaagcataaaatgtactgaaaggctgattgtttctcagtatgttctttatgacaggtcaaatgctatatgaagcaattgctatctggccttgagcattgccacagcagaggtgttttgcaccgtgatattaagggttcaaatctgcttattgacaatgaaggaatacttaaaattgcagattttggactggcaactttctttgatcctaagcaaaagcatcccatgactagtagagtcgtgaccctttggtaccgtccacctgagcttcttctggggtctacgtcttatggtgttggtgttgacctttggagtgttggctgcattttggccgagctacttactggaaagccaatcatgcctg

SEQ ID NO: 19594 - DNA, 615 bp, Glycine max
tggggatgtgttaaattatattgagtttatagccttcacgagtgagaatgctgacatgcagatgtcacaagtttggggatccggtcaaaataaaaaaaattgataaaatttcaagaacaaaggcagcgttacttctcaacctttgctgttaaactaccgtcaagagccccaaacctctgtcttccaccgacgatgagtccttcttaccgaatgaactgatcttggagatctttcttagggttctggtgagatccctgctgcaaatcacggaaaaccctaatttccgatccccaattcgccaaggaccacctacacctacgtgcctcaatcgccgatccaaacatgacccacctactattggtctctcccaaatatagtgacccctccaaaatcttatctttctcggtgcaatcgctgttccaaaacccgtcaacccctgctgaaggccgttgcttcaggttgagacgcagttgccaaattctaggttcttgcaatggcttactgtgtttgtttaatgttcatacacgttatgtcaaattgtggaaccctttcaccagattgacgtcattccaaagattgtcaatctggttatactcgtgatgcgtattttactta

SEQ ID NO: 19595 - DNA, 774 bp, Glycine max
gtgagaagtgttaatgccaaggagcggacagcttgtgtgaggtggttaaaaaaagttgccagagcagaagatccacgagagtttgacaaggaggaagttgtaagtgtgtatgagctagagggccatccagattatgattactgctatggggatgtggttgtccgcctctcacctgtgtctgtctgttcagaaacagcttctgttggagagtccactgagaaatcaacgcagaaaactgaagagagtgggattaaaatcgatgtaaacgtccaaactggtgaaacttgtgtgcaattttctgacctctcttgggttggaaatataactggccttaagaatggtgatattgaagttacttgggctgatgggatggtatcaatggttggaccccaagcaatctatgtggttggtcgagatgacgatgatgaatcaattgctgctgggagtgaaataagtgatgctgcaagctgggaaactgttaatgacgatgaaatggaagtccttgaggattccagagaggatattgagagggaaaattcaagcagtgttacttctgaggcagaagaaagtggagagaatgattttggtaggactgcagctctctctgttcccctagcagcatttcgatttgtcactagacttgccagtggaatattctcaagaggctcaaggaacttggattctattcccttggagataaaagctgaacgtgaacatccatcacctgtaggtaatgatgagtctacttcacagaaacatattgcaattgatgct

SEQ ID NO: 19596 - DNA, 414 bp, Glycine max
gggcaaacaagtagtggaaagacatacacgatggttggaataactgaatacgctgttgcagatatttttgactatatagagaggcatgaagaaagagcatttatattgaagttctcagcaattgaaatttacaatgaagttgttagagacctcctcagcactgacaacaacactccacttagactacgtgatgatcctgagaaagggcccattttagagaaactcacagaggagactctacgggactgggagcatttaaaagagcttctagccttcagtgaagctcagagacaggtgggagagacatacctaaatgaaaagagttctagatctcaccaaatcatcagattgacaatggagagttctgccagggaattcctgggcaaaggcaactcagccaccctaatagctagt

SEQ ID NO: 19597 - DNA, 1081 bp, Glycine max
cggcttcctgccaacgcacaaagcgagtcactcactcatggcatcctccgctctcatctccgacacccagcaatggaaggacctcaaggcacatgtggaggacatcaataaaacacatcttcgcgatctattgagcgatgataagcggtgccagtccatgctcgttgaattcgatgacattctgttggactattcaaggcaacaagccactcctgaaactatccagaagctatttgaattagcggaggctgcatcgctcaaagaaaagattatccgcatgtacagtggggaacatataaatagcacagaaaatagatcagtgcttcatgtcgctcttcgagcttcaagggatgctgtcatacagagtgatgggcagaatgttgtccctgaagtttggaaagttcttgacaagatccaggagttctctgagcagattcgcaatggttcttgggttggtgctacaggaaaggctttgaaggacgttgttgcaattggtattgggggaagcttcttaggtccactgtttgtacacactgcacttcaaacagaccccgaagctgttgaatctgcaaggggtcgtcagctgcgctttcttgcaaatgttgatcctattgacgtggctagaaatatcacaggattaaatcctgaaacaacacttgttgtggttgtttcaaagacttttacaactgctgagactatgctgaatgctcgaactcttagagaatggatttcatcagcacttgggccctctgcagttgcaaagcatatggtggctgttagcacaaatctcacgcttgtggaaaagtttggtattgatcctaaaaatgcttttgcattttgggattgggtcggtggtcggtatagtgtttgcagtgctgttggaattttgccattatctctacaatacggtttctctgtgatagagaagttcttaaggggggcttcaagcattgatcaacatttctattcgcagccatttgaaagcaatatacctgtgcttctgggtttggtgagcatatggaatgttacatttcttggatattctgccagagccatcttaccttatagtcaagctctggag

SEQ ID NO: 19598 - DNA, 441 bp, Glycine max
gaccgagtggttgtgaagtggtagaatagcctacaatagcgaaagaaagtgttgctgctaattccatttcagtgacccctaattatgatggaggaattgaacaaaccaatggacggatcagcaaccagctggttatccgatttggaaatggatgattacaatttatttccagatgaatgtcccttgaacttgaacttgtttgatgaccaagagtttctctcacaagacattgctagtgcccttcaagaacagacacagaccttgcaacaatctttgtcttcagagtgcccttcaaaaactgtgagcaactcatccaccgatgaaaccacttttgactttgagagaccagccaagttgctgaaaacgacaacaagcagtagttgttgtaactctgactcatccaccatcaccaaaagcctttcacccaaactttgcccatcg

SEQ ID NO: 19599 - DNA, 517 bp, Glycine max
gtagaaagtcgaagacgacacaaagaccagctaaacttcattttgaaacacagaaacaacccaaaaaaaaaaaacctctctactttctctctctacattctccgccatttcccgagaaaatctcgccaggtttggtatgctagctaaatctcatgctttccaaataattctcatggtggatgtatctgctttcaacacatgcttccaaaggatgatagttggtattgatatttgattatcagttacatagcagactaaaaagaaagaattgaatcttgcactgctaatcagtgaaagttttcctacagttatttctttgaatctgatataccatctgcatcccttttttttcttctatgtttgtttcctccataattaccacaagggattgtatgaaagataatgaccaatttagtagtagtttgacatccttgtgatctagtaccatgaagattcaggactattgactcgttcataggatcatcaaaatgaagaagttgtatggaggagttctgat

SEQ ID NO: 19600 - DNA, 1239 bp, Glycine max
gacaacaataattctcaaagtggagaagctcccagagaaaatttcattcacgtgagagctagaagaggtcaggccactaacagccacagccttgcagaaagagtgagaagagaaaagattagtgagcgaatgaggttgcttcaagaacttgttccaggttgcaacaggataactggcaaagctgtaatgcttgatgagataataaactacgtgcaatcacttcagcaacaggttgagtttctgtccatgaaacttgccacagtgaacccagaactgaactttgatgtagacaggatcctatccaaggatattctccaatcacgcataggacatggaattggtgcatatggtcctggtatcaattcctctcacaccttccccaatggaagtttccatggaacattggctggcatgcctagtacatcctcacaattccctcctttgccacagaatgttttggaccacgagttccaaagcttctatggaattggatacgattctaatacagcacttgacaacttggaacccaatgggcggttgaaaacagagttatagtgtgtgcattattatatagccatgttactacaacaacaaagactttggaattttcttgttgactgcacaatttaaccgaagatgaaaatgggaggacaatagagagggaaagaaaacagaaataaataaataaaggttttagttgtatagggtctttaatacctaactgttggcacttcgaatttttagcagaagatgacttgttagatttatcaattggaaaatgagttacacatattatgtgtatggaatctagatcatgtagaacaagttgcagtggtcttgtttaatgacatggagagcagtattttgaggagcatgcgagtaaagtgtgtgcaactatcattacttttattgaattattatgtatagagttgccgggttcggatttttgaagcacgttgttttcaaatttcgaccgtgttgcaaattggatagtgtgtgtacttgactaatgaggagattcttagggcatacaactacaaaggtgaatattttgcaacttgcatgagggtgaaagattgcttaagtagatcagtgcttcaaacattggccttttattttttttattttctccatttttttggtgtttcttatatgaaaagtgtaatttaaacacttatcttctgagaaaacccggccccttgaatacgtaaacatgatacattttcttgtttatgatat

SEQ ID NO: 19601 - DNA, 565 bp, Glycine max
cgtgaattcaaagtcaacttagtccttgtataaaaaatcttcagtcacaaaataattagtaactagttcttgacgagaatggtagagaacagttttataattaaacatgttatcgaccagctcactacaatgaatgaaatggtgtagcacatggcaggggattcaaattcaaagaggcgtgtcagcagaagcactgaatccaaaaacacacaggacataaacataaacataattgaagggaataataacccaaaagcgcaggtgcaagaacgtgctgcagtttttgaccaacatttctacgatggaatcccattctttgctgataataagccttctagaaccaacgagaaggcttctaccactgcgggtgaagagttctacgacggaatcccgcgcttccccgaggactccttgccgaacaagcctaagtcaaaggtctcagaggtgagtttacgcttgggcaaagctgttactactggaattgctattggattagagaaagcagtagaggttttggacactcttgggagcagcctgacaaatttaaatgtgagcagtgggtttt

SEQ ID NO: 19602 - DNA, 601 bp, Glycine max
gatacgcagattgtggttagtgttgacaaaagtaaaatggataatgaagaaaaagagtgttgattttgtgagagatgatgagttatgcaataggagcacttgttgttccgtctgcaactcccctaccttttttgaattccactgctccagtggaagtggaacatggtcatggtgtgaagcccattcaagattggtataagtggcgcctcgttttggcttatgatggaaccaaatacgcaggttggcaatacccgcagtctcccctactgtacaatgcaccgtggagaaagctttaactcaggcaacaaagcttcaaaggaaggatctctgtttggttggtgcaagcaggaccgatgcaggagtccatgcttggggtcaggttgctcatttttttacaccttttaactatgacaacttggaacaacttcatgcagctttgaacggtcttcttcctactgatatccgaattagagagatcagccctgcatcagctgaattccatgctcgattttctgccaaaacgctgttatgagagaagctgcaacatattttgttggcaagcatgatttctctgcctttgccaatgcatcccacaatgatc

SEQ ID NO: 19603 - DNA, 770 bp, Glycine max
acattgctaatggaagtgttgcttcttgcttaagagagcgtcctccatatcaagaacccctggattggccaacccggaaaagagtagctttgggatctgcaaggggtctttcatatttgcatgatcattgcgacccgaagattattcatcgtgatgtgaaggctgcgaacatattgctggatgaagagtttgaggctgttgttgcggactttggattggccaaacttatggattacaaggacacgcatgtgacaactgctgtacggggcactatcgggcatatagctcctgagtacctttccactggtaaatcttcagagaaaactgacgtttttggttatggtatcatgcttctggagctgatcactggacagagagcttttgaccttgctcgactcgctaatgacgatgatgttatgctgcttgattgggtaaaaggacttctgaaagagaaaaagcttgaaatgttggtagatcctgatctccataccaactacatagatgctgaggtagaacagttaatccaggttgcactgctctgctcacaaggttccccgatggaccggcctaagatgtcagaagtggtgcgaatgcttgaaggtgatggcttggcagaaagatgggatgagtggcaaaaggtggaagttctccggcaggaggtggagctggcccctcatcctaattccgattggattgtcgactcaaccgaaaatctgcatgcagtagagttatctggtccaaggtgaccttggcacagtagtaaattaaga

SEQ ID NO: 19604 - DNA, 503 bp, Glycine max
ctcacgtacccaccaaattgtgtgaaaaaattgatctttcgtgcggaacagcgtgtgtgtgttgagaagatgaagggggtgttgtgggttgtagttgtatcaatggtggttgcagcatggatgcccctctcacactgttcaaagaaaccagtgggggtggctagaaaggaggacattcaatacatcaagtgtcaagtgtgtgagaaacttgctaaagaattgtatcagcaggttcaaaacaagcaagctgagatcgctcccaaaaagatctcggagtaccaaatcattgagatagcggagaatgtttgtaatctaaaaaaggctgaagcggattggatattgcgcatagatattgtggagaaagaagataggttagagctggtggaacaagactctgaaggacaatgtaattctgaatgcaagacaattgagcgagcctgtcaagaggtcataggatattctgataccgatgttgccgaatatttatataattccaagcctga

SEQ ID NO: 19605 - DNA, 637 bp, Glycine max
ttcacgcgtccgcggacgcgtgggatttgcaaaaaaaatctgaaagaatagaccttaccgacactctcacgcggttacaagtttccttgtcaagtgttgtgtggttcaagtgggagttgaacaaggtctttttattggcagcttgttttattgccctctttattgaacttttatcataacattaagatatccccagcttcttgtcttttccctggcactcaaactcaattcactgatccaccacatgaggcactcagagagcatttgttgatttggatttggaaggtttttccactttggttacgggaagcaacttaacttccttccttctctccttattttccacattgtacaaatgatcttttcagggtacttggtagtagtggtgcttgacaaagatattgaagatgggaattttgagtactattgcaagcttttttggatttggagtgggaacttcaattgggctagtcattggctactatttgttcatatacttccagccaacagatgttaaggtttagtttttctctgtctcttatttattgtttcttgtaatttttgtattgcgtatgggaacaatgaattatatcgttttcacacccttctttgtttgttgaatcattatttatgatat

SEQ ID NO: 19606 - DNA, 707 bp, Glycine max
acaaagtctttattggccacttgtttcaatgcccctctttattgcatatgtatcataacataacattaagatatatattcagcttcttgtcttttccgttacctttttcccctgaaatcactgatccacaacaagaggcactcagagagcatttgttgatttggatttggaaggttccactttggttatggaagcaacttagctcccttcctctctctttattttccacattgtacaaatgaattttcagggtacttgttggtagtggtggttgacaaagatattgaagatgggaattttgagcactatagcaagcttttttggatttggaatgggaacttcaattgggctagtcattggatactatttgttcatatacttccagtcaacagatgttaaggatccagtaattcaacctttgattgagcaagatgctaaaacattacaactgttgcttccagagatacccacttggattaaaaacccagactatgaccgtcttgactggcttaataaatttatcgagtatatgtggccttatctggacaaggcaatttgcaagactgcaaggagtatagcaaagcccattattgctgagcaaattccgaagtacaaaattgattcagttgaatttgaagaacttagcttgggttctctgccaccaacttttcaaggaatgaaagtctatgtgactgacgaaaagggag

SEQ ID NO: 19607 - DNA, 438 bp, Glycine max
cgcttagagagcatttgttgatttggatttggaaggctccactttggttatggaagcaacttagctcccttcctctctctttattttccacattgtacaaatgaattttcagggtacttgttggtagtggtggttgacaaagatattgaagatgggaattttgagcactatagcaagcttttttggatttggaatgggaacttcaattgggctagtcattggatactatttgttcatatacttccagtcaacagatgttaagctcaaagaaaaggacctgcaagacattttcttctcataattttactaccgacttgttaatagtagaacacacaggattagcttagtcaactctgggaaaaatacataaaatattattaaccaacaggatccagtgattcaacctttgattgagcaagatgctaaaacattacaact

SEQ ID NO: 19608 - DNA, 579 bp, Glycine max
tgagtgcttaaaagggttcacgccaaagtctccagagaaatggaactcaatggttaggacacaaggatgtggccttaagagtccattgacttgtaagtctgatggatttgctcaggttgatggtttgaaagtgccagatactacaaatacgtctgtgtatgagagtattgatcttgagaaatgcagaaccaagtgcttgagagattgttcctgcatggcatataccaattctaatataagtggagcaggcagtggctgtgtcatgtggtttggtgatttattagacatcaaattgtatccagatccagaaagtgggcagcgtctatatataaggttacctccttcggaattagattctatcaggccccaggtgtctaaaataatgtatgtaatatccgttgctgcaactataggagttatacttgctatttattttctctacagaaggaaaatttatggtaaaattattcttctcttctctcacatttgacagaaaaaatagctgaatagttctgcacagaatattttaagtagaaattctgctgtttgtcaattcccttgacaagtgctgttattcaa

SEQ ID NO: 19609 - DNA, 617 bp, Glycine max
gggtttgaaggatgatttggtcaaacgtttggacgaagtccttcgtctggaaagggaggttgatgaggcttctgagcaggatgaggccaatggtttcgatggtcatgcagatgggaaaaaagttccggaagcagttactgtggatgctgaaatggttgattcaactgacagggccagtgccaaaacatttgatactgctgaaaagggcaagggtggttttgttgatccaattgaaacgggaaatgtggaaaagattcaggagattgtggatcatgacagcgataagaatgacaagcaggacagtgtttccaaccaagttaacattaataatagtgtgtcagctatggatcaagaggttgaacctaagggcttgccagctggtggagattatgcaaatgtgggacatgaggcaattgcccatgcttctactgtggagactatcattacggtcactgagagtgtagtaacagaagtagtggccagtggtgaggatacttatcgtgccgaaaagaataatgaggattcagcagcacagctggagaatgaggtgtcaaaggcgcagctggatggtgaggactcaaagccccaactggattatgacaccaagcccttgcatg

SEQ ID NO: 19610 - DNA, 614 bp, Glycine max
  unsure (1)..(614): unsure at all n locations
tatgtgctggaatgccaatgcttacgtggccgttgtttggggatcaattcttcaatgagaagttcgttgtccaggctctaagaattggagtgagaggtggggtggaaacatcctgtgatctggggcaatgaagagaaaagtggggtcttggtgtaacaaacaacatgttttgtaggctatacaagtcttaatggatgagggaaatgaaagggaagagagaagaaaaagggctagagagcttgcggagatggctaagaaagctgtagaaggaggatcttctcacttcaacgtaacccagctaatacaagatatcatgcaacagtccaacaaagactagtactaacgatcatcttcggttatcaaaggcatattaatatatatacactatttcagaagaagttcctaattagcttgcagagggttgtaacatatactgtgtggcaggcctgtgaaggctcgaggaagaagagtatcctgtgtaaactcgagtgattactgtaataaattaatcctcctggaaacaaagaatggatataatcatatagactaaggatttgagggtgaaatataccttgagctaattgaagntttaattttatatgtttgatatcaag

SEQ ID NO: 19611 - DNA, 421 bp, Glycine max
ggaaacaagaagtgaggttgtctttcaaagatggaagaggaggcatttgaaaaaccattgttgaagagacagtatcatgagaactgtcctggttgtaaggtggatcaagccaaggagctcaaaaaggatgtttcctttagaaacctttcttatatatggttggcagtgttatgtggcacattgcctgtggcatcactctttccctttgtttacttcatggtgaaggattttaatattgctgaaacagaggaagacataagtacctatgctggatatgtgggatcatcaatgatgcttggcaggtctttgacatccatattgtggggtatgatttctgatcgctatggtagaaaacctgttatcattatagggattatcactgttgtcattttcaacacattatttggtcttagcacgaatc

SEQ ID NO: 19612 - DNA, 687 bp, Glycine max
  unsure (1)..(687): unsure at all n locations
cagatttttgccctcaaacctgatattctatctctggccctcaattttgtacctagtaaaatgaatgaggtagatttctggaataaatatttcaaagctgagtatctccatagcaccaaaaatgctgttgcagcagctgctgaggctgctgaagatgaggatcttgctgtttttctgaaagatgatgagatattagaaattgaagctcgaaagaaggttcgaagggttgatccaactttagacatggaagcagatcaaggagatgattacacacatcttcctgatcatgggattttccgagacggtagcaaggatatatctgaagcccaaaattctttgtataagagaacattgttgcaagatcttaatagacaaggggcagttgttcttgaaggaaaaactttagatatggagatggaacacccaagaacagtagcagaaattcttgctcggagaaaacaggaatgtgatggggttgtagatgaggacagacaaaacagattttctaagatgaccctgattgatgatcttcacgcaccagataatcatccgtgtgcaccactctgtatcaaggatcctcgtgactattttgatttccaacaagctaatgctgtaaaaactttggatgattctcaaactggaatggagcanatgaaatgcagtttgggttctgaggaagcctatggt

SEQ ID NO: 19613 - DNA, 570 bp, Glycine max
ctcgagccgctcgagttgctgcacagaatggggaaaacggcttacaagaggctgaagggaagccagagcttcaggcaacgccttcttctctctactctctcctccactcccattctcatcgaggacattcgcgccgacgagacatggcccggcctccgcaaccacgaaatttctctcctccgactcttcgaaaccgtctgcgacgattgccacgtcgaaatcaacgaaaccggtaccaaattaaagtacaaaccgggaactattatgggtggcagacaacacagtccacacgattgcggcgtctcacggtccattggttactttctggagccactcattgtgttgtgtttgtttgccaaacagccccttactatcaggctcaaaggaattacaaatgattctaaagatccatctgttgataccttcaagtcaacgactttacctatattgaagcgctttggagttccatctgaaggcttggagattaaagtagagagtcgtggattacctcccaatggtggtggtgaagttcttttgtctgttcctgttgttcagagtctaacggcggtt

SEQ ID NO: 19614 - DNA, 556 bp, Glycine max
ggcagcaatgagagctgaaacataagctttagaataaaaaaaacggagaaagaaattcaaaagggtatctgaaaaatgccttttcatccgcattccttttgagctcgtctacaatggccgatgatctctcttcctttgccaaggatgctttgcttgtgaagggtttgaagagttccactttggtgtggaggcttgttggtttgacccttgcaatggtctctggcgtgtatatatgttcaatttgtctgaagcagataggcactagcagcaagattggctttctagacatcaaggttgtccaaaagccatgcccggaacctaacattgaaccttgggagattccttttgtgcactaccctgacccccaaacttacagcaaggcggaatgtgcttgccaccctgtgcgctattttgctattctgtcaatgcatatatccaggaatggatggtttgagacatttttaaacagtcatgctaacataaactcaaatagagaaatcttttcggttaacgtgagaaggagtgacatgtcaacaatcacagagactctggatac

SEQ ID NO: 19615 - DNA, 635 bp, Glycine max
cactatgatgtcaacaacgaaatgctgcacggttcattttaccaagataggctaggcaaggatataagggcaaacatgttcaagactgcaagccaactagacccttctgccacactctttgtgaatgattatcatgttgaagatggatgcgacaccagatcatgtccagataagtacatccatcacattcttgatttgcaagagcaaggtgctccggttgggggaattggaattcaaggccacatagacagtccaatagggcctattgttagttcttccctggacaagttgggtattcttggcctacctatatggttcaccgagcttgatgtgtcttccgtcaatgaatatgttagagcagatgatcttgaagttatgctacgcgaagccatggctcatcctacggtggaaggcataatgctgtggggattttgggagttgtttatgagtagggacaattcacacttggtgaatgcagaaggtgacatcaatgaggctgggaaaaggttcttatctcttaaacaagagtggctttctcatagccgtggccatgttgatgagcaaggtcaatacaacttcagaggctttcatggaacatatgatgtgcaagttgtgaccccatcaaagaaaatttc

SEQ ID NO: 19616 - DNA, 512 bp, Glycine max
gagagcctgctgctgaaagtgtttgtgaagggaaagtggggagggctgggaagttggcgagtcccggtgacttgaattacccctctttcgcggtgaagttgggtggggaaggtgatttggtcaagaataaacgggttgttactaatgtgggaagcgaggttgatgctgtttacactgttaaggtcaatcctccacctggtgttggtgttggtgtgtctcccagcacgattgtgttcagtgccgaaaacaagacacaggcgtttgaggtcacgtttagtagagttaagttggatggctctgagagttttggctccattgagtggactgatggaagtcatgttgtgaggagtccaattgctgttacttggagcggtgcatactcatcgtccgtttgaatgaattgctgtggagacgacgtctttctcaggttatggattattggatttagtctctttgtaatttttatcatgttggcttattgtacaaactacaaaataacacgtacttccagg

SEQ ID NO: 19617 - DNA, 574 bp, Glycine max
gacatagatgaagtgaaaaatatcttaaaaaactgcggttatcatcccgaaattggaattgacattttgatcgaaagatgtttggtaactctggataggatgaagaagttggggatgcatgatttgctacaagaaatgggaaggaatattgtatttcaagaatctccaaatgatccaggcaaacgtagtagattgtggtctcaaaaagacattgattatgtgttgacaaaaaacaagggaactgatgaaattcaaggcatagttctgaacttagttcaaccgtgtgattatgaaggacgctggagcactgaagccttctccaagacaagtcaactcatgttactcatgttatgtgatatgcagcttccccgtggcctcaactgccttcctagttcactgaaagttcttcactggagaggatgtcctttgaaaaccctgccacttaataataaactagatgaagttgttgacctcaaattgccgcctagccgaatagaacaactttggcgtgggacaaagcttctggaaaagctaaagtccatcaacttgagcttttccaagaacctaaagcagt

SEQ ID NO: 19618 - DNA, 614 bp, Glycine max
attcaggtcgagcgtcattccgccgtcgtcgcaatcgcagggatccatcatcacaagttccgtggaatctaatggtcgttttctctgtgaaacttttcttcagcattctcgtcgtctccctctcactcctcttccttctcgcactgctattgccttcttcccttttctctcaaattcacatttatggagaagcctccttaggggaggtggatatatggagtgttcggagactcgtggaatggagaccttgcaattggtggctacaaggccatcaaacagacaattgctttcgtttttttttttgtttattcttgaaatggtgcagctctaccattacaaacttatggatatatcagagtggattgctatggggggctcaatcagatgcgaagagatttctgtgatggtgtgggcattgctcgtctgttaaatgcaacccttgtcttgccgaagtttgaagtggcttcatattggaatgaaacaagtggttttgcagatgtatatgatgtagattactttatacagcatatgaatggctttgtcaaagttgtcaaagagttaccaccagagattgcttcaaaagaaccagttcgagtggactgtagcaaacggaa

SEQ ID NO: 19619 - DNA, 474 bp, Glycine max
ggatctatcatcagaagttccgtgaaatctaatggtcgttttctctgtgaaacttttcttcagcattctcgtcgtctccctctcactcctcttccttctcgcactgctattgccttcttcccttttctctcaaattcacatttatggagaagcctccttaggggaggtggatatatggagtgttcggagactcgtggaatggagaccttgcaattggtggctacaaggccatcaaacagctctaccattacaaactaatggatatatcagagtggattgctatggggggctcaatcagatgcgaagagatgtctgtgctggtgggggcctcgtgaatttatactccagatccttcaaaaatcttcaatactcttttgctgctttcttaaaattgagaagaaatctacaatggtttcagttctgtgatggtgtgggcattgctcgtctgttaaatgcaacccttgtcttgccgaa

SEQ ID NO: 19620 - DNA, 455 bp, Glycine max
  unsure (1)..(455): unsure at all n locations
gaacgcaaccgtttctgacgaagacaagaacgataacaaaattgaaattgaattgagtgcgaagtgaaatgttgcaaaccctaggaggcgtaatccctcgcttcgtgagtcgctcatggctccgaaacctgacggtgcgtgcaatggcattctcttcctcctcctccgattatggagaccagtcacgtggtggccttccccgcttctactccgaaactcttcctccttccaagggtagtgttatccgcgtgcaaggtgatgaattctggcatatgacaagagttttgaggttaaccaccaatgatagggtacagctcttcaatgggaaaggaagtctggtagaaggatgcatacagagcattgatcgaactggacttgattntgntgcattgaatgatttgatatcaatccctccacaaaatacacaattgcatgtatttgctggttttggtact

SEQ ID NO: 19621 - DNA, 839 bp, Glycine max
gtgtgaaagaaaagttggtggacttctgtaatgtgctggatattccgataactaagaccagtatgaagaaggaggaactgtctgcaaagttgttagaatttttggagtccccacatgctacaactgatgttctgcttgctgataaggaaaagaaaggcaaaaagcgagccagaaagcaaaccccaagcaaatcccctgctaagaagcaaaagcaaaattcacaagttgggaaaaagcaaaagcaatcttctgacatcgaggacagtgatgcagctgaaccttcagatgcaaaagttgattcccgggaagatgatgattcaagtcaaaaaagtgaaggtggtaataaggaaagcatatcagagaaagaggaagattaagaaaaggttcacaaacgttcttcaaaaaagattctgaaggaggatcaaaccacacctgtaaagaagaccactggtgtaaagactgccaagagcaatgaaaacacttctaaaaaatctacttcaaaaagggctgttactgacagtacttctaagtccaagaaacagaaatcagtgaaggaaaacctgaactcgaaaaggaaggatgcaaacaaaaaacaaactgacaagtctttgaaggctttattgaacgatcaaggcaaagataaaagtagtgagaaggccaaagcagaacctagtaaggaggagttgcatcgagtggctgttgatattttgaaggaagtagatttcaataaggcaactttatctgacatcctcaggcaacttggtactcactttgacgtggatttaatgcctagaaagcagaggtgaaggatataattacagatgtaattaataacatgt

SEQ ID NO: 19622 - DNA, 596 bp, Glycine max
gtctactacataacaacacacagacccaacaagaacaacatgaaacggtgccggcttcatctttacgtaattattgcggcaacaatccgaatcccatcttgcgatttcgcctcctcaaaccccgcgagttaaattccctcccgagatccaattgcttccacgtcgaatcggtgcggtacggtgtgttctattcatgagacaagattggaatgcaagtttaattgatcaatactaataatcaatcatcgtagcgagatggtgtcgccgagccaggtggtgaaagtaaagagaaatacgctacgaccatgcatgacatgccctctctgccacaagttcttcaaagatgccaccaccatctctctctgccttcacaccttttgcaggaagtgcatatatgagaaactctcggatgaggagatggattgctgtcctgtgtgccatattgacttaggctgccttccggtggagaaactcaggccggaccataatttgcatgatataagggcaaaaatattcccttttaaaagaaaaaagatcaaagcccaagaagtttgtcttcaatatcattgcctgcaaaaaggaaggaaagatcactt

SEQ ID NO: 19623 - DNA, 506 bp, Glycine max
ccttcgttttcgattcgccgttgctgtcgctgattttggcggaggtaggcggcgggaacgtgttcggcggtggcggcggaggggcaaagagtccgccggggtttctggaggagtttttcagggacccggattttgacagcttggacaagattctaaagggtttgtatgaggagctgagagggagtgtgatgaaggtttctgctcttgggaactttcaggactcattgagggctttgttgtatttggttaggtttcccgttggtgctaagtctcttgtgaatcatgaatggtggattcccaaaggggtttatatgaatggccgtgctattgagatgaccagcattttgggtcccttttttcatatcagtgctcttcctgatcatgcttttttcaagggccagcctgatgttgggcagcagtgtttttctgatgcatcaactaggcgaccagctgatttgttatcttcattttccactatcaaaactgtcatgaacaacttatatgat

SEQ ID NO: 19624 - DNA, 1020 bp, Glycine max
atacattagatattactatactattcctctctctgcatactacatactgttgcaacaatatggttcgtaacgaaagcagcaacaaagagaaggataaagacctcgatcagtttttgtttgatcggaacgacgatgatttggtcgatgaagaacaacaggagattgaaggtgtgaagtacgagagtgagagtagtagtgatggtgacgacgcaaatcggagagcacagcctgactctttctcttctcagcaatggcctcagagttacaaagagactacagattcttacacgatagctgctgctccaaattttgagtcagttctacgggggcccagtttcatatattcaagttttgacaatcgttcaaagagtaacttagacatcgatggaaagacaccttttctatctgctccagaaggcattagacaatcaacttggtgggagaaagcctcggtacaacggcttgtttccggagaattgcccattggatatggatgcagcttcactcaaacaattttcaatggcattaatgtgatggctggagttggccttctatctacgccattcacagtaaatcaagctgggtggatgagcatggcagtgatgcttctttttgcagttatgtgttgttatacagccacccttttgagatactgttttgaaaatagggaagaaatcattacctacccagatataggagaagccgcatttgggagatatggtcgaattgctgtctcgatcattttgtacactgaactatattcatattgtgtggaattcatcaccttggaaggagataacctcactagtctgtttcctggtacatccttagatttgggtggtttccagttagactcgatgcatatgtttggagtttggctgaaggatcttcgtataatctcttatctatcaggtggaggggttgttgcaacaattttgattatgatttgcgtgttttgtgttgggacaatagacagtgttggattccatcacacgggtcaattggtcaaaatggactggc

SEQ ID NO: 19625 - DNA, 1181 bp, Glycine max
gattaccacacatggtcatccacacatgaagcaattttacctaaggggtaggacgtcatcagaagtcaaaatagacaaaggtgggctccccctcaataatatcccttcggctgtggcgactaatggagctgaagttcatatggcatttcagttgcagatgacaaccccatttcagaaacaaccaattttgttggcttttggtagcaaatatccacagaaccaccacctctccaagcatgaagacaaaacagcaattatatttgatttctcttcaggttctacgggcccggtatccaatgggttgattcagatgaggacgaaccatggaattttggctataatagggtggggtctaatcctgcctgtaggggctattattgctagatatttcaggcacaaggatcccttatggttctatctccattcagtcattcaatttgtgggattttcatttgggcttggcacagtccttcttggattacaactctatagaaacatgcatgtccacataccagctcacagaggcataggcatctttgtccttgtcctaagtattcttcagatattggcattcttcttgaggccagacaaggattccaagtatcgaaacatttggaatttgtatcacagttggtttggaagaatggcacttttatttgcagccattaacatagtgttggggatgcaagctgcgggggcaggcagtgattggaagataggctaccgattcgtttttggtattatggttgatgtagctattgttcttgaagtattggcttatttgaaaaagtcagaaaagcgttctcttcctcagactttccaaatggacccagttggagatgctaacttcccaaccaatctagctaaagggtgaatgtgttggctcctagttttgtttgcacttgtacaagctgtgtcaattgtctcattcagccacttcagactaaacctcattcatcctacactactgcatgtgaactgagttgtggagctttcttgatgtagatagatatgtagccacctagaagtttgccaagatggacaatcctgacgtttggcttcctcacctgaacttgagattgaaccttttttgctttcttcattggttgtttttttgcatccgcatggtcagaaatggaatgctactacatttacatctatatatattttgtaattcttct

SEQ ID NO: 19626 - DNA, 339 bp, Glycine max
ggcattcttcttgaggccagacaaggattccaagtatcgaacatttggaatttgtatcacggttggtttggaagaatggcacttttctttgcagcattgaatatagtcctggggatgcgagctgcgggagcagggaatgattggaaggcaggctatgggttccttcttagcattgtacttgtcgcagttatcgttctggaagtcttggcgtatttgaaaaggtcagaaaagcgttctcttcctcagactttccaaatggacccagttggagatgctaacttcccaaccaatctagctaaagggtgaatgtgttggctcctagttttgtttgcacttgta

SEQ ID NO: 19627 - DNA, 581 bp, Glycine max
gggttttatgatgaatgtaagcgaaggtttaacgtgaggctttggaaagcctttaccgactgttttaacttccttcctgtggcagcccttatagatgataaaatattgtgcatgcatggtggtctttcccctgaactcacaaacttggatgaaatcaggaatctacctcgtcctactgcaattcccgacactggcttgctttgtgatttgctttggtctgatcctggtagggatgtgaagggttggggtatgaatgacagaggagtgtcctacacctttggccctgatatggtcgctgaattcttgacaaagcatgacttggacctcgtttgtcgtgctcaccaggttgtagaggatgggtatgaattctttgctgataggcaacttgttacgatattttcagctccaaactattgtggtgaatttgacaatgctggtgcgatgatgagtgtggacgaaaacttgatgtgctcatttcagattcttaagcctgcagagaaaaaatcaaagtttgtgatgtcaaacaagatgtgatggttggcacatcactgtcaaatgtattcgtggagctaaattaaatc

SEQ ID NO: 19628 - DNA, 512 bp, Glycine max
ggtgaaagaaagggaatagaagcgaaaagaaaggaccaaagaatgaagaagattcaatcggatcgaatacaaacttgacgtccgcaatgaccctctctctcaatactttctctctctaaaacgcacggcatgaagcagcagcagcagcagcagcagcaacagcaacagtacgttgtttcactgagattaaagacgatgctgcttctgcactgagaaaaccctagacacttatagtggacgcgaattcagaaaccccaagtggaaagtccgagccttttcgttccttctcagttccttgatcagttcccagattctgttactgttcaatttcacaattttcaactctcggtgattgcttgaagaccgtgatatcgaaaaagatggtgcctccggggccacccactcccattggtggtgcccagtctgtttcgccttttcttttaagatcgaattcgggaatgctaggagctcaaggaggtcccatgccaccacagtcgtctttcccttcactc

SEQ ID NO: 19629 - DNA, 830 bp, Glycine max
cattcttcccctctcctctcctatcatatcttcattttctttcaggtaaggatttgagaagattttgtggaacctggaggattcggccctacagggacagttaatgaacctacataggaatacaacgtgaatctattaatacaaggttttatcttcaatggagaacaaaccagataaaatgcttcatgataatgaggagtgcattgacagcacatcaactaacaccaatcatccagagattggtgtgggcaaaggtgttttgaagaattttacaagatcttcgggggatgttgcagagacaaagatagcagctgattggaaaggtggagaaaattgcccaaagggtacacgtcctgaggaaattgatgcatctggggatgtaaacatggaggcatcaataacacctgatgatgttattcgggctggaggatttggtgccagggatgatatcagtagctttcttcctgttgcaagtgattctaccgacttcgaagcttcaatccgagatgcacgagattatgaagaaccacagggtcaagtaagcaggcccggccttggttggactggtgctactaagggggaatgaatgttgttgctgttatgtgctccagtattagcaacttttgtttttagctgggaggaccatgtgtttgtggctaatattttttaaaatcaaagtcatatatgatgccaaagaaaattttgttagtaatatcactaaatgatttacttgtataaatagttgatccgttgcctagtgtttggtttgtctttgttaagtgggatgtcctatgtaaaaatttcgtttcctgagaactcatccttgaatt

SEQ ID NO: 19630 - DNA, 269 bp, Glycine max
cttcattttctttcagcatggagcttgttacttgtaggaactggctaaacaatcgtctacaatatttggatgaatgatagtgagataattcagtctcccagcaagtttacaatcgtctgcaatatttccctgccctctgggtttggtaaggatttgagaagattttgtggaacctggaggattcggccctacagggacagttaatgaacctacataggaatacaacgtgaatctattaatacaaggttttatcttcaatggagaacaaa

SEQ ID NO: 19631 - DNA, 756 bp, Glycine max
gggacaattccaaatgaaatctgcaatatctcccgattgcaggacttgctgttggatcagaatttcattacaggagagatccctcatgaaattggaaattgtgcaaaacttcttgaattacaattgggcagtaatattttgactggaactattcctcctgagattggtcgcattaggaacttgcagatagctttaaatttgagcttcaatcatcttcatggatcactgccccctgaattaggaaagctggacaaacttgtttctctggatgtttcaaacaatcggctatcgggtaatatcccacctgagcttaagggaatgttgagcttgatagaggtgaacttctcaaataatctgttcggaggtcctgtgccaacatttgtaccatttcagaagagtcctagttcaagttatttgggcaataaagggctttgtggagagcctttgaactcttcatgtggagacctttatgatgatcacaaggcttaccatcacagggtttcttacagaatcatactggctgtaattggttctggtttggctgtttttatgtcagtaaccatagtggtcttgctgtttatgatcagggagaggcaggaaaaagtagccaaagatgctgggattgttgaagatggcaccaatgacaacccaactataattgcagggacgatttttgttgataatctaaaacaagcagtagatcttgatgtcgtcgttaaagcaactctgaaagacagcaacaagctcagcagtgga

SEQ ID NO: 19632 - DNA, 399 bp, Glycine max
  unsure (1)..(399): unsure at all n locations
gacaggataaagcactgacgaagcggcactgtgaccatgtccctattttttcatgcttgttagagagacaggtaaagttgctgaaaggagctgctttttctcgtgtatctgctagagctgttataggcacttgagcaatttggaaatgtcgaatttattgcggcattctttgagcaaattcactttcagtccaaacggaacaccaactgggagagaaaaagtaacaccaaaacataagcatctgagaccatttcaatgtgtgctgacacaggataacagaagcattgccgtcaagaatggcaatgattcattggtcatatgtcgggttgtgaatgggatgtggcagacgagtggtgggtggggcagaattgatagggatgatgctgntgatgctatgct

SEQ ID NO: 19633 - DNA, 558 bp, Glycine max
  unsure (1)..(558): unsure at all n locations
tagagagtgtagggggaagacgtgtgggagcgggagaagagacaagaaagagattgaaaagtggattggaggagatgagagtgcctcggagatgctgagtagagtgagcagcatgcgacctttcttgtttcctccgccgctccacagggttcctctccgcgtcggaaacgtcgtcgagcttgtggggccctctccttccgccaaaacgcacattctcatccacgccgccatcacttccgttctccccaaatgctacggaggcctcgaccacttggtcctctttctcgacctcgattgtcgcttcgacattgcgcgcttctcccaattgctcattcatcgcattacccaacacggaacggattcttatgataaaacgctgtatgctctctgtatggcccgttttttgtacgtccgttgttacgacagctttgaatttcttcacactctcaggacattgcattgtcgcttagagaaggagaaagaagttcacggagttggtgtccacctnctcatgattgacagcatcggagcttttcattggatggatcgtgcatcgat

SEQ ID NO: 19634 - DNA, 684 bp, Glycine max
gtgctacatgcaaagctgccgaccgtgtcacgctactatgttagctgcctttcgtggagactgtatgttggcattggaagaggggagttgttgccatcaaaggatgggcgccggttgttgttacagacatggctgctgcctctgatgaatgactacaactggctgcagcatggatgcaggtcatttgataggaaacttgtggaggaaggaattgggaggactattctcaccttgcctcttgaggatcaacaaagcattttgctttcatggttggggagtttcttgaaaactggtgatagctgtcccaatcttcaaagggcatttgaggtgtggtggaggagaaccttcattaggccatatgtggagaaccaaggtaatgttgctgtgtcagatagtagttcaatgttgccaaagcagcgtgagtgaataaagggttcatgaatatgtttcattggttgtggagttggagctttatattaacgaggtcgaggaagacgtaaagatatgtgttgaattgcacaatgtgggattaatctccagcagctaacaagtactgagaagtgtcatgtgatttgcatggcttttactctggattaattctttgaggaagacctcattgaattaataaacttcagtaattggtttttgtattatgtcttcaaagaaagaaatggattggtgttt

SEQ ID NO: 19635 - DNA, 488 bp, Glycine max
ggagagagctgttttagttagaaaaaaacgaaccgggttttctttctttgtttctctctctctctctctctatttctcacataaaccgcctacatgcatgcggttcataaatcagcaaagccttgaaaagttgctgtgtgtgttcgaagaagacaacttttcctttattatttatttttctcactgagcttcagttaaagtagctagctagctagagggaattctgctgttttccatggctaaagcaggaaagtttttgttttgatctcaatcaagctcctgttatatacgagagagagagagagatgctgtgtttccaaagtaagagaaatccaattgaaggcctcataaagtttgatcaagagggatagcaatagcatcatatctatccatcacaccatgaataagatcagcaacttgagttgtgttaggagctctgatctcatagatgccaagcttgaagagcatcaactgtgtggatctaaaca

SEQ ID NO: 19636 - DNA, 649 bp, Glycine max
aacacatgcagctgttagtgcgagttcaatgtcagattcagtctggaaggatccagatgttggaaaaccaggcacgatatcaagccgatttcaagaatgataaggatgcagccagtatcttgggcaaactcacttctgaagcaggcaatgaagagtgggatgatagcttactgaccaaagaggaagtagaggcaagattgcagaggaaggtggaagcaatcatcaaaagagaaagagcaatggcatttgcatattcacatcagctatggaaagccactccgaaatcaactcacaccccgatgacagatacacgatccagtggattcccttggtggtggaactggttggaaagacaaacacctgcagcaactccacaagaaagacaaagcttgaagaattttcaaatcacacctccaagaccatactcagagcaaaagactagtccaagacctggctccagcactcaaaggcagccgcagtcgcagcagcagcagcctcatgtttcctttgataatatggacactcccacaccaaagtccacaatatcaaccatagtgacatcttcaaaaccggcgcgaacgcctccatttagaactcctcaggcaaacggctcaggctcaggctctagatatccgagaccaaggggtgt

SEQ ID NO: 19637 - DNA, 535 bp, Glycine max
ggggattaggctgtacatgcaagagattgacactaaggcaggcaaagcaaattccacaggattggtgatgctttgtactagaaacattggaagttaccaatcaatccaagaaatgatgaaggctgattccaaatctccttgggggaatcatatttctttcttgcacgtacccatacctaagctaagccaagccagcctatccaacccccttgaatttgtttggagagcccaaaaaataatcaagaggaagagaaagtctttcactgtttttctcattgaatggcttttagatatggagctgaaattaagaggacacgaggccgtggctaaacatatctatgggacactaagagactcaagtgttgtcgtatccaacttgattggaccaatagaacctatggctttggcaaatcatcctgtgaaaggcttgtatttcacaatgactggtggacccgagagtataaatattgcagttataagctacacaaaaacgttaagaattaccttaaaaacacagaaagggtttattgatgag

SEQ ID NO: 19638 - DNA, 520 bp, Glycine max
cccacgcgtccgggacattgttataagcgatgtgcatatgccggacatggatggatttaaacttttggagcacattgggttagagatggaccttcctgttataatgatgtctgcggatgatggtaaaagtgttgttatgaagggtgtgactcatggtgcttgtgattacttaattaagcctgttcgcattgaggctttgaagaacatatggcagcacgtggttcggaagaggaagaatgagtggaaagacgcggagcaatcagggagtgctgaggaaggagatcggcaaccaaaggcttctgacgaagcagattactcttcctcagcgaatgaaggcagttggagaaactcaaagaagagaagggatgaggaagaggaggcagaggatagagatgacacatccacactaaagaagccgcgggttgtttggtccgtggagctccatcaacagtttgtggctgctgtggatcaactgggaattgacaaggctgttcctaaaaaaattctggaattgatgaat

SEQ ID NO: 19639 - DNA, 498 bp, Glycine max
  unsure (1)..(498): unsure at all n locations
cgtattcatgtgctgtagcttaaggcataacatacacactgacccataacataataaaccttttttttttctttctctctctcaagccaaagacggtgcaagaccaagatcttcttcagctccttcatagtttcagattgaattggtttttgggcaccaaatagcaatggccacggtggagaggatcctgttggccctgcaaaatgagggtgcaggaggagaatccttgttggggtcaatcaaaattgctgtgatgcccatagttaaagtgttcaccatgtgctccttgggactccttatggcttccaagtatgttaacatcttgcctgcttctggaagaaagcttttgaatgggctggtctttactctcttgctaccttgcttgattttctcccaattgggacaagctgttaccttggagaagatgcttgcttggtggtttattcctatgaatggtgtcctgagttccataacaagctcactcattgngtttggtgg

SEQ ID NO: 19640 - DNA, 426 bp, Glycine max
ggctcagattagggtaatccaacttccaaaccctaaaagtctacgcttttaattttctgttgttttctctctcaaatcggtgctcccttcggcggcgcgtgagggtttccagcggcgcgtgagggtgttattcgcgcgttattccaagttccccgctgacctatgctttgtccgacccacattggagagttcacgccggagagaaggcggaatctcactggacggccgtgatttggcacctccatggcttccgccgtccttgctaatcggaacgaacctaattggcaacggcatagaggcggtggagctggattcatgggaaaaacacctttctctaaccctaattctaaattagcgaatatgcaagacgacccaatcggcatccgatgatgcttactctatcaaccggcgatcgaacgacgccct

SEQ ID NO: 19641 - DNA, 431 bp, Glycine max
taagagggggctcacaatatatcagactatattgttgcactacttggcttcaaccaaggtctcattagaatccaagatgatggagaaggaaagagaagatgagattgaggacatgtcaatgtcacctccatctattggctccatgcagattgcagggagcaatggcttcggtcacagcatggaggtcatgtctcaggcataccttccaaatatgtacacagagattggcataaaagttcaggagtcaagctgcaaccaagatccccccctccccatttatctcatgtttgaagatgtagagttcagggtaatagatagcccatcggcttccaataaccctgtgaagacaatgatgtcaaaagtaggcacccaacaccacgtggaggaagatagatgcaagaaaattttgaagagtatcacaggaagcattg

SEQ ID NO: 19642 - DNA, 489 bp, Glycine max
ctctggacaattatatgcagtgtgctctttttgagaaaacagtaaggtggggactagcaactaggaacaactgatccaagccaaagagggtttggagggaacagttgcagtgagctttctgagatggacatgatgaacatggaaactaataataggaagtttctttctctgcctctcagtaacaacaacaacaactctggtaatgcccaaatgcgcagtagtagcgataatagaagggtacctgtcactagcaatagcaatatcgctcaggaacatcactacagccaccacaaccccaccgacacttgcagtgtgagggataaaatcatggcacaccctctttttcctcgtctcttgtcctcttaccttaattgcctcaaggtgatgatgaactctaaattgttctccatattaacataaattacacacatatctttccctttcttcctaacacaaattgtccttatatagaatatgtaaggttggttt

SEQ ID NO: 19643 - DNA, 912 bp, Glycine max
gccagatctatattcctgtcataaactggtttctcttggctgtttctttggtgcttgtctgttctatatccagcattgatgagattggaaatgcatatggcattgctgagctgggggtgatgatgatgaccactattttagtaactcttgttatgcttcttatatggcagatacacatcattgtagtgctgagttttgctgtagtcttcctgggattggagttgactttcttttcatcagttctgtggagtgtaacggatggaagttggattatattggtctttgctgtaataatgttttttataatgtttgtatggaattatgggagtaagctcaagtatgaaactgaagtaaagcaaaagctgtcaatggatttgatgcgagaattaggctgcaatcttgggacaatacgagctcctgggattggtttgctctataatgagttggtcaaaggaattccaggcatttttgggcattttctaaccacacttccagcagtacactctatgatcatatttgtgagtattaagtatgttccagttcccatggtgcctcaaagtgaaaggttcctttttaggcgagtttgccagagaagctatcatatatttcgctgtattgccaggtatggttacaaagatgttcgcaaagaaaatcaccaaacttttgagcaactgctgatggagagcttagagaagtttatacgtcgtgaggctcaggaaaggtcgctcgagagtgaaggggatgatgatactgattctgaggatgaggactctggttctagggttcttatagctaccaatgggagtgcatattcacttggagctccactcctggctgatcttcatgatacaaccatacccatacccaattctgaagcaggcacatatgaggaagcaaaccctgtatctccta

SEQ ID NO: 19644 - DNA, 565 bp, Glycine max
gaccacatagacacacacataggaaacaagccggtcatcccgcacacccacttacacaaattgtataattagtaaacgaccacatagacacacacacaacgaccacacactaatatatatatatatactcaattacatttccacacctcacttaacgttcgatacaattctctaagagtgcgtttggatagagaattttaactgaagaaagtaatttatgaagaatttaaagttttggaattttattttctttataacctcattctcattccacctgaaagtttccaaaatctcattcttgaactctcgaccttccctcgcattgatggtcctcttcttcaagaaacaccgtcagagcttgtggagtgtcgatcgggtgcgagcgtgaggggacacgtagaactgtacctaccagtcaggcagggaagcagccgtcgatgccaatcacttgacggaggtgctccaaatgggttagctctatgagctaccctaacctagggctccaaatggcggagagagtcgtcaacatgacgaagagaactaagacagcctataggctctgata

SEQ ID NO: 19645 - DNA, 433 bp, Glycine max
aaaagaacaacaaagggggaattaaaacccgtgaagcataccattgccccatgccaccaagtcatgaaaaattggcctagggacaacatgagcagattagcacttcatgggaaatcagaattcaagaatcaagtctttggaccagagtcactcgagttcgatcacatgggtcgtggcccctacactggtttagccgatggacgcgtatgttcgatggatgggggagcaacttggttgggaaacatttgcagttgtcacatctaattggacggagaagctttgctttaggggcaatgattcgaccactgcgaagcaatggaagcatgagaaaacatgtgggcgtcccctaggcctaagatttgacaaagtgaatggagatctatacatagcagacgcatactatggacttcttgtggttggacctaatggggga

SEQ ID NO: 19646 - DNA, 1463 bp, Glycine max
gtttattgaggagaataggagcgagaagcgtaacaaaaaggtagtagaggagaaacggtaaacaaacattgagacgaggaatgacttgagcagctgcaataaaaagagggtaactttcttcttcttctttctctccccagagaattcaattaatccaaacatgttcttttgaggttttggtcccggatcagccatgtttcttttcatatttctctcaaccctcgttttaatcgcggttcgagcgaagaagctatggatagcaatcgaagagaagctatggatagcaatcgaagactggttccacgtgtaccagttcttcaaagtcccagaactcaacgaaaccacgcagcataaccacctctacaggaaggtctccctctacttacattccctaccttccatcgaagactctgtcttcgccaacctcatcactggcaagaagcaaaacgacatcgtcctctgcctcggccccaaccaaaccatccaagaccactttctcggagccacactcttctggttcaaccaaaccggaacctttgttctcaagatcagaaaggtggacaagcggagaatcctccgtccttaccttcagcacattcacgccgtcgccgacgaaatcgaccagcgagggaagcgcgacttgcttctcttcatgaacatcgccgacgacttccgacgctggagatccgttccgttcacgcatccttccacgttcgacaccgtcgccatggagccggatctcaaaagcaaagttaaatccgatctcgaatcgttcctcagagccaagcagtactaccaccgcctcggccgcgtctggaaacggagcttcctcctctacggtccctccggcaccggaaaatcgagctttgtcggcgccatggccaatttcctctcttacgacgtctacgagatcgacctctgcaaaatccctagcgattcggatctgaaatcgctcctcctccaatcgacgccgaagtcggtggtggtgatcgaggatctggaccggttcctggcggacaaaacggcgagaataagcgcgtcgggaatactgaacttcatggacgggcttttaacctcgtgttgcgccgaagagagggttatggtgttcacgatgaacacgaaggagcatgttgacccgaacctgcttcgtccgggtcgggtcgacgtgcatattcattttccgctttgtgatttttcggcgtttaaaacgcttgcgagtagttaccttggcgtgaaggagcataagttgtttcctcaggtgcaggagatttttcaaaacggggcgagtttgagtcccgctgaaatcggtgagttgatgatcgcgaaccggaactcgccgagtcgtgctattaaatcggtcatcaccgccttgcaaacggacggtgatgggagggggtgcggcttgatcggacggcagacggatgatgatgaaatggatgaacctgatggggttgtgtgcggtg

SEQ ID NO: 19647 - DNA, 277 bp, Glycine max
ctctatcccaccaaactcaattaattcatttttctgaatagccattcccagaatccaaacatggtcttttgaggttttggtccccgatcaccatgattcttttcagtttcacctccatcgttttaatcgcgtttggggcgacgctgttccagacggggcatgcgacgaagctatggagaagaatcgaagactggttccacgtgtaccagttcttcaaagtcccagaactcaacgacacgacgcagcacaaccacctatacaggaaggtctccctcta

SEQ ID NO: 19648 - DNA, 970 bp, Glycine max
accttctcgatcgtgtcgagcttttcatcccctctgtccctctttctttagtcctttctcacctcttttgttgcctttctttcacgttttttcgtttcgctcgcgttgaaatcgcagagaccaccggcacgccaccgtgaaccaccgccgccgcctccgtcagtcactgtgccaaaaatgttgccggcgagcgactagatgatgctttcttatgttgtggaagctgtgggagggtgttggaagattacttttttgctgaggagccttcatttgttaagaatgcggcagggcagagtaaattatcaggcaattatgtaagaacagttcaaagtgagtactctgaatcacgtcaaaggactttagatagagcttatgatgaaattaaatatttaagtttcggccttggagttaatgatgaacatatggctgaacaagctttgaccttttataaaatagcgcttgagcgaaatttcacccgtggacgtaaatcagaacaagtacatgctgcttgtctctacattgcattccggcacaacaataaaccataccttcttattgatttttcaaattatttaaggacagatgttttggggctaggagcagttttcttgcagctttgtcaagtgttaaggcttggagagcacccaattgttcaaaagcctgttgatcctagtctttttattcatagatataccaagaatttgttaaagcgagggagtaaggctgtctcggatactgcactggccattgttgcaagcatgaaacgtgactggatgcacacagggaggaaacctagcggactatgcggtgcagcattatacatatctgctcttgctcatggtattaagtgctctaagccggatattcttaaaattgtccatgtatgtgaagcaacattaaccaaacgattggtagaatttgaggatacagagtcttctagcttgacagttgaggagttgaatacaatggc

SEQ ID NO: 19649 - DNA, 396 bp, Glycine max
cttgttttacaaaacctggctcaatggcagggcaagctatgctagttccctttatattaccaaaagcctgtcttattttcttggtttctgacacaagatttttggtgaatgggattctggcacttatttttttgaaaaccactgcagaagaattgaaagaacactcatttgagggactgttatagcctcattatctttatcctttagcactaaaataccatcaggtgtttccaatacttgtaattggttcttagatattcttccaatccaattgaatggggaaaccaagaagagaagatgttctttggtttgtgctttttttctggttttgtagcttttccaatgccttgctttctccaaagggtgtgaactttgaaatgctagctttaatgggca

SEQ ID NO: 19650 - DNA, 400 bp, Glycine max
ggaacttatggcgtattcgaattaattaagagagtgggtagaataagctacttcactgccatgtaataacttgtcattggttctatatatgtttgatgtcgttgtatattcgagacttgtgaaagattaggttgatcctcttttgagcctcttttgtttacttttagtctttttctaatccatgttgaaagcacaaacatggtgtgttgttttatacaattcctcataacaacaattatgcaacagttagaaatttgtctcagaattctaaaccattataatttattttctgttgctttagaggaagcgtcctagcagaatattcgaattggaatctcagaattctcaactcaaagaggatttgaaggtcgtgaggaaccagctcggtgtgtctgaatca

SEQ ID NO: 19651 - DNA, 375 bp, Glycine max
cataactgtttttctttctttctttcgtccctctgctctaccatcaacgtctctctcttcttcgggctacattcctgggatctgctggctttgcttttcaagggcaaaaaatgacagatgcaaagccagatacacccttgacggcatcttcatcgcgaaaccttcctgatttcaagaagtctgttaagttgaagtatgtcaagcttggttatcattacctcatcacccatggaatgtacctctgcctttccccccttgtcgtgctgattgcagcccagctttctaccttctcccttcgagacttggatgatctttgggagcatctacaatacaacctgatatctgatattctttgcttaactctccttgtttcct

SEQ ID NO: 19652 - DNA, 520 bp, Glycine max
  unsure (1)..(520): unsure at all n locations
ggaaattgcaagaaaagaaatgggattggattggatgcttaggtctgatagtaagacgcctgtagttactgaaacagatgaaacattgtcagaggaggttcctgtcgaggagtcaaagaaggcaaatcctaaggaactgaatccatatctgaaggataatggaagtggttacccggaagaaagtggagctaaagttggtgccgaccaacttctatcttcttcccttgttggggatggaggagcaagttggagacttaaagccttaaagcgtgcacaagagcaagcagctcgagatggacggagattcaacgaggttgtggaagataggtggggttctcttggtgagttgactgcagctgttgcatctcatgcagctgccccagctcgtgctcatctgcgtgctatagggtgtagacaaagagggataactgaagaggattcacaagattctgataagcatggtcgaagggattctaaaagggactactntaaagatgtttctgttcggcaccatgaaatg

SEQ ID NO: 19653 - DNA, 1214 bp, Glycine max
aagagaatcaccaaaagagcctgggaaacgtagcaggttatggtcccatgaggatcataaagcaagttttacaagaaaacatggggactagaaagattgaaatcatatgtatgaatttttcctcatttggagaagaagtagaatgggatggagatgccttcaagaagatgaaaaatctcaaaacacttattatcaagagtgattgtttttccaaaggtcccaaacatcttcctaatactttaagagtattggaatggtggagatgtccttcacaggattggccacataattttaacccaaagcaacttgctatatgcaagttacccgatagtagctttacgtcactcgggttggccccattatttgataagaggctcgtgaatttgacaagtttaactttggacgagtgtgatagtttaacagagataccagatgtatcctgtctctcaaaattggaaaaattgtcatttagagattgtaggaatttatttacaattcacccttcagttggtttattggaaaagcttaaattcttggatgctgaagcttgcccagagcttgagagttttccaccgttgaagttgacctctcttgaagggcttgaactttcgttttgtgccagtctcgagagttttcctgaaatattaggaaagatggaaaatataacagaacttgacttgagcgaatgtcccataacaaaactcccaccttcatttcgaaatcttactcggcttcaagagttggagttggatcatggacccgaaagtgctgatcagttaatggactttgatgctgccaccctcatttcgaacatctgcatgatgccagaactatatgatattagtgctcgccgtttgcaatggaggctattgccagacgatgctttgaaattgacctcagtcgtgtgttcaagcgttcattctctcactttggaactgtcagatgagcttcttccgctatttctctcatggtttgtaaatgtggagaatttacggctagaagggagtaaatgcacagtcattcccgaatgcatcaaagaatgccgctttttatctatccttattttgagtggttgcgatcgtcttcaagaaattagagggattcctccaaacttggaaagattcgccgcaacagaatccccagacttgacttcctcaagcataagcatgttgctgaatcaggaactgcatgaggctggacacactgactttagt

SEQ ID NO: 19654 - DNA, 664 bp, Glycine max
tggagaagaccacaaaagggggagggggaaagaaaaacaaacaaacactggttgaggttcaacgaacgcacagagtcgatcatactgaaagtgattaagggccgagttgcatgagttgaatcggcggaaatgggagctagtcgaaagcttcagggcgagattgatcgtgttctcaagaaggttcaggaaggcgtcgaagtcttcgatagcatctggaacaaggtttacgacaccgataatgccaaccagaaggagaagttcgaggctgacctgaagaaggagattaagaagctgcagaggtacagggaccagattaagacatggattcagtccagtgagatcaaagacaagaaggttagtgcctcatatgagcaggctctggtggatgcacgcaaggttattgagcgtgaaatggaaagattcaagatctgtgagaaggagacaaaaacaaaagcattctccaaagaaggcttaggtcaacagcctaaaactgatcctagagagaaggctaaatcagagacaagggattggttgaacaatgtgtttggtgagttagaaaatcaaatcgatatacttttgaagcttaacttgagggactttcttttaagataggatatgatatcaggccccttataattggactcattttagaaaacattaattt

SEQ ID NO: 19655 - DNA, 585 bp, Glycine max
attgattgcttacaattggttcaccactagtctggcattgggcactgaagtgagaatcgtaatcaatgggtgcgagtcgaaaactccagggggagatagatcgcgttctcaagaaggtccaggaaggcgttgaagtcttcgatagcatctggaacaaggtttacgacactgacaatgctaaccagaaggagaaatttgaagcggacctcaagaaggagattaagaagctgcagaggtacagagaccaaattaagacttggattcagtccagtgagatcaaggacaagaaggttagtgcctcatatgagcaggctttggtggatgcacgcaagataattgagcgagaaatggaaagatttaagatatgtgagaaggaaactaagacaaaagcattctccaaagaaggcttaggtcaacagcctaaaactgatcctagagagaaggctaaatcagagacaagggattggttgaacaatgtggttggggagttagaaaatcagattgataactttgaagctgagcttgaaggactttctgtcaagaaaggaaagaacaggcctcccagattgacacatctagaaacat

SEQ ID NO: 19656 - DNA, 616 bp, Glycine max
ctttgcttaatttccctttcccttcaatattgtttccgcagttttaaaacgataatttgatcactactgacgtaatagctagactagctaatcatggaaatctttcaagccacagcaggaaagatgcagattaatcccaagagatttacaacattattctttgttgtacttttcatatcatttcctgttgctttcatagtttcttcaatctatcgaaactcaagtttcgctattttttatgaggggttaacagaatcatcggctcaaaacgttacaaacaatggttttccgttgggaggaagagtccacaatactacatcggatgatgagattgagactcacttaagaacaagccacaatgataccgtgtcggcggtgttgccgggcaatattcaaaacggtagcactgtagaagacagagctagaactatgaatagtactgcatcaggaatagaaggcaaagtagaaagaggaacagatcggaacgtaactgctgagttgctgaatggtggggcaaactttacaactcatggatttgaattgggaggaacaagccaaaatatatataacacgttatacgcatgcgtttttcttactgatttccattcaaaacttc

SEQ ID NO: 19657 - DNA, 467 bp, Glycine max
gatcttgaaatagtgttcaatagaggtcgagttcgtattgccacatggaacaagactctattggcatcaaatttacaaccatctagtgagagctgcgggaatgccggatttctgatgttcaactcaaaatttcttaaaccaaatggaagcaagttattgagcaatcaaaatcaacatatcatcacccatggtgagagaaacattgttactgaacacacaacacaacttgcttgtgtttttaccgaagaagtgtgtggagatggagattgggctcatggaagttttccgcttgaggaatacattcaggctctggatcgttccaaagatgagatgtactataatcactctcttggtatgcgctatagtaagattacagagcaaatatatgtgggatcctgtatacaaacagaagatgatgtagaaaccttgtcaaaagttgagggagttactgctgttctgaacttcca

SEQ ID NO: 19658 - DNA, 279 bp, Glycine max
cgaggttaagcatagaagaaagaagagaatggctagatacagcgtcctaacacgcgtggcgaccggagccgccgttggcggtgctatcggcggcgcagtcggtgctgtttatgggacttacgatgcaattaggtataaggttcctggactcctcaagatatggcatatagggcagaccactctgggaagtgcagctgtatgtagcttgttcctagcggcaggaaccttgatacgatctcactaggttgtttccttagattgtgcagtcatggtgacgag

SEQ ID NO: 19659 - DNA, 399 bp, Glycine max
ggtctgaaggcgaggttaagcatagaagaaaggggagaatggctagagacagcgtcctaacacgcgtggcgaccggagccgccgttggcggtgctatcggcggcgcagtcggtgagataattttcacttcttattcacggtttggttggatccttttcattaataggcaaacacggcacagctttcgctctgttcttaggttagtgtgaattttggaactggtgtgttgcatgcaggtgctgcttatgggacttacgatgcaattaggtataaggtatgcgattcaaatcctttatttatgtaatcgattattgaatgagtgaatttggaaaggcaattgcaatcttttgtaatttgattgggggcagtttagtctcaaaagctatgctgattatgact

SEQ ID NO: 19660 - DNA, 390 bp, Glycine max
cgagcggccgccaatgatgatgatctgaggaaccgtgtttgtctcgtgtctcatctcatccatgaagagaaggagaagaagggatccaaaatcagaagaaagttacgatttttcgagatgggtctgtccaaggagaatctgaaaggtctcatactagctttggtgtcaagtgggttcattggggcaagttttatcattaagaagcaaggccttagaagagctgcagcagtttctggtgtcagggctggtgttggtggttattattatctcttggagccactatggtgggtgggaatgatcacaatgattgcaggagaggttgcaaacttcgttgcatatgcgtttgctcctgcagtcctagttacccctcttggtgcactaagtattatt

SEQ ID NO: 19661 - DNA, 304 bp, Glycine max
gcaagctcaaagtgctgaagtttactttgacttcttccctgtggaggttgatagtcaagagggagttgctcacattggtgaattgaaatctggtgtctatgttccacacaagatacgagagagttcattggggcaagttttatcattaagaagcaaggccttagaagagctgcagcagtttctggtgtcagggctggtgttggtggttattattatctcttggagccactatcgtgggtgggaatgatcactagtaagctttaaatactgtataattttgcttctatgcttttagtattgtcat

SEQ ID NO: 19662 - DNA, 492 bp, Glycine max
gttagttctcctgttgttgttgtagcgctgattgaggtagcgctgattcgatcgcatcagaacattcattcacattcatatcctctctctccgatcccaatggcggatgagagccccaaaccagagaccttcgaactcaacaatggaagcatgcaggtcctcctcaccaatctcggctgcaccatcatctccttatccgtacctggaaaagatggtgtgttatctgacgttgttcttggccttgaatctgttgaatcctatcagaaaggtcttgctccttattttggctgcattgtgggtcgagttgctaaccgaattaaggatggcaagtttatacttgatgggattcattactctttgcctatcaacaatccaccaaacagtctccatggtggaaatgttgggtttgataagaaggtatgggaggtagttgaacataagaaaggcgaaaccccctcaatcacttttaagtgccacagtcatgatggagag

SEQ ID NO: 19663 - DNA, 365 bp, Glycine max
gacaggagggaggtgagggactgatgactgagatagcggtgattcaattgcatcatcacaatcacaacattgcttattgacattcatatcctctcattctctctctttttctttctcttcaattccaaacctatggcggatcagagccccaaaccagagaccttcgaactcaacaatggcagcatgcaagtcctcctcagcaatctcggctgcaccatcatctccttatccgtacccggaaaagatggattgttatccgacatcgtccttggcctaaaatctgtggaatccaatcaaaaaggtttggttcctaatttgggttgaatggtggccaggtttccaacccgatttaaggttgccaggtt

SEQ ID NO: 19664 - DNA, 392 bp, Glycine max
gggctttctcatgtctctcccgtccttggattatctttcatgtaagattagtcccagaaagccaattgtaaagaccctttatttgtgttgttgttttttagtttttcttttcctttttatttattttgttttgagttatggaagcttgctgctgcaaccttgaagtggatgtaaatggagaagagactttcatggtggacaagactgttattactcagtattcaaacaaatttgctagactggttggaaaggcttagtggtgccccaggaaaccttaaggtattattcctggattttcccggagggcctgaaggctttaacctaaggtaaaaatcttttaccaccatgggaccacttgttttaatcccttcaaattggttctggcctggtgg

SEQ ID NO: 19665 - DNA, 401 bp, Glycine max
  unsure (1)..(401): unsure at all n locations
gtatggaaaatgatggaaagcttgcaactttaacgttgcagatatggaaaatttggtattgatttgattccccgaattatttacattctggtcttcttgagtttctttgcaacaaaaccaattttctgaggaaaaaccaacatgttgggagtttgtttactttgctttgcatttatgggagcttgtgttttggcattcttgtaggaatggatgaaaaactgagacatagaccatgtgtcatgtctaaatatacattctaattttcattttgtgtcccttcattcttctcagtctcattttggcttctatatggcacactctactcttcttgtgattgtggaggagtgtagggtttttggtaccctctgcttcacttgacanatgttgagaatgcatgcatg

SEQ ID NO: 19666 - DNA, 543 bp, Glycine max
ttgctcacactagccaatacataccaagcacatgcatggagaaaggtggcacctattgaagagaaacctgaaactccaatcagtttctgcaacgaacaggaacttgaattaagttgggttgctgcaacatgacacatgctaacaacacttctggtgcttcactatctgaaaccgaatatgagatggtgaaacacatcatcgacattccagaccttgaggagctaaggttgtcggagtgcagcatctacaaggttccttacaatctccgaaaggtgaacgaggaagcctacacccctcagtggatctcaataggcccaattcacctcaacaaacaagaactcaagccaatgcaagagcacaagaaaaggtacttccactgcttctgggagcgtgtctccaacgaacaagccatgaggaacttcaaacaccacctcgaaacgaaagaagaccacattcgacattgctacgccgacaaattccccgacatacccaaagagaagttcgtggacatgttgctgttggatgctgtgttcatcatggagc

SEQ ID NO: 19667 - DNA, 435 bp, Glycine max
gagtggaaagacagtatggaaaaaccctgatgggtatttacctggtaggatggccccattaaagaagttctatgtatttatgacactggcttatgtttgccttagcatcatttggttttttcagtatgtgagattttgggatgatgtactgcaacttcagcactgtatcacagctgtcattgctcttggattgtttgagatgattctctggtattttgagtatgtcaatttcaacaatactggaatgagacctattgtgctcacaacatgggtcgtcactgttggggctataagaaaatcaatatcacgacttctcattctctctgtctcaatgggttatggtgttgtgcgacccactctgggtggtcttacatcaaaggttcttttacttggaataacttactttctagcatcggaggtactgaatattactga

SEQ ID NO: 19668 - DNA, 361 bp, Glycine max
gttgatagaaggtatggagctacaaggcactctgagagactttctccaaggcatgaagaaaaagaacggagacggtctgaagagactgtggtttctcaggatgatgccaaacgccgaaaagaagacgattttcgagatcgaaaacgtgaggaaattaaggtggaagagagggagcgggaaagagagaaagcaaacattctgaaggaagagttggatttaaatgccgcatccaagagacgtaaacccaagagggagcatttaccaactggtgaacctggtgagtactcgcctgtggcccatccaccttcttccgctggtattggcatgtcactagcatatgatggaagggatagaggagaca

SEQ ID NO: 19669 - DNA, 451 bp, Glycine max
  unsure (1)..(451): unsure at all n locations
gtatgaacagagctgaaaaagaagctaggatgaaaggcatgcaggatagccttgagaggagtagagctgaaatgaaagtcaagttttcggggtctgcaaacagacaagattcagcatcaggtgctcaccgtgccgagaaacttagatatttcaaatcaaatattaagagagagcagcatccaatagattctcttcagaatgaagatgatgaagatctatctgagttctcagaagagaagacttatggtgcttcaaggcaaagtaggaaaatttttcccaacagacatataccttcaggcacacctcgtacaacagctgtgtcggtctctcgttcatctggtggcaggcgaagagacaatcctcttgcccagtctgttccaaacttttctgatttaagacaagataatacaaagccttcttctggagtcagtanaacaacccgctctcaggt

SEQ ID NO: 19670 - DNA, 571 bp, Glycine max
gtcattagaattaatgcttactgactttattgtggccattgattctggcgttcctcgtcgaccccctgctggaaaacgtgcagatgaccaggttaattatcctaagttggtcgagttactactcaatagctcagagttttcctctaacctgttacatgatataaccggagggagactaggattccctcatccagaagacacaaatacaatcattgatgttcatactactgatgtaacatcagtagttcatgcgttccgtagtggttttcgtgctgctcttagggatctgcagggattccacatattcctactcacactgcatcaaaaacttgataatttgttaagatcatttatgaatactataggcaaaatatcatcaggggagtctgaaaaagaggatgcagtggttcctgactcaccttcacccactgttgtgggtagttgtccctctccatctagtaaggaaaggctttctaatgatgtccatcaagattgtagtgattcagaatctcagagaaccgctccaaggacatcatcgtcttcaggcaatagagattgttgcgactctgct

SEQ ID NO: 19671 - DNA, 389 bp, Glycine max
accaatttgttttccagaataagtaggttgggagtgatgatgttatgtgtagcacataggaattgccgaattggatacaatccggaagaataagcttggagagcaaggcaatatttggatgttttatggcagaaataggtgcacggcaggcatgggtttcagcttttgtgactcaatcacccaccataaccattattatcagtacatagtactagttaatctcagtcatgcctattcctaggtttatgctcttttcatcccagcatcgctccactgctgcggccctcgctcttcttcgaaggtgcgttccctctacgacaactcaatctgttaggtattcaaaatcaacaagtcacggtaaaacaaaacattatcttcatcctgtattc

SEQ ID NO: 19672 - DNA, 498 bp, Glycine max
gggcatgaggtagagcagaggaatggcgcgacgggaaaggggatagaacggggaagtggcactggcgaatgagaatgagtgtagaaaagaaagtccatggccatgagtgtgggcgtggcattgccatccaccaccaccagtctcagtttccttcgctaccgctctcgctctccaattcaaaataaaatccgttttccccgtcaaattgtttctaaattaaacagtgcagaggtccaggttcaaacctggtaattttgctttctgaatcacgtaattttatttttatttttctgttttttgaaacagtcttcaggccttgtattgtagcgtgtgggattggaggggttactctattcgctatcaacattctggaaatattggccctgcactagttttagtccacggttttggagctaacagtgaccactggaggaataatatttcagttcttgcacaatcccaccgggtgtactccatcgatcttgatggatatggata

SEQ ID NO: 19673 - DNA, 634 bp, Glycine max
cgagaaatgagatagaaaggggaagtggcactggcgaatgagaatgagtgtagataagaaagtccatggccatgagtgtgggcgtggcattgccatccaccaccaccagtctcagtttccttcgctaccgctctcgctctccaattcaaaataaaatccgttttccccgtcaaattgtttctaaattaaacagtgcagaggtccaggttcaaacctggccttgtattgtagcgtgtgggattggaggggttactctattcgctatcaacattctggaaatattggccctgcactagttttagtccacggttttggagctaacagtgaccactggaggaataatatttcagttcttgcacaatcccaccgggtgtactccatcgatcttattggatatggatattcagataaaccaaatcctcgtcaaatcggagaccattccttttacacttttgagacctgggccactcaactaaatgagttttgtcttgatgtcatcaaggacgaagcattctttatatgcaattctattggaggagttgttggtcttcaagcggctgtgttagcaccacacatttgccagggtattatccttctcaatatatctctgcgtatgcttcatataaagaagcag

SEQ ID NO: 19674 - DNA, 764 bp, Glycine max
ggtcacaaaagatgtttcacttctatctagatggatggcgattgacctctatattcgggaagtggatagcctcagatttgagctatccatgaaccactgcagtgataggttgtcaagattggcacatgaaattctagaagctaagcatgagaatcgccgtgagaattggaatcagtctgcgaatagaagtctcacacttccaacacaacttccagctagagctcatttaccttctattgctgaaaatggtgaatctcggcatcccagactagacattccagcacctgattacatgcaatccaatcacaaggatggtggggtttctgtaagttcaactacatcaaaacttgccaatcccaatactcgattaccaggaacaagttcagcaaattccagtgcttcttcagctgcacttggtcaaaagaaattgtatgcagaatcccagacaggaaagtccacttttcaaaagcttttggagccaatgcttcctcaacttcctggaattgctccttatagaattgtcctggggaatgttaaggataagcttgagaaaagtcgtagacggttagaaattcttcttgaggatgttgcatgtgactatgatcctttggattactatgaaacatctgatcagcttttggaacctctgctcctctgttatgaatctctgcaatcgtgtggatctggggtgctagctgatggtcgacttgctgatctgattcgtagagttgctacctttggaatggtgttaatgaagcttgact

SEQ ID NO: 19675 - DNA, 825 bp, Glycine max
ataagacaaagattctgcgaaagagggaggaggatattcggaggagaaatgaaattaaggaacaaaagcgatatgggatgacacccttaaagaaagctgtggatctagagagattgaaggaattggtctctattgggtttgacaaggagcttgctgctgaagcccttagaagaaatgaaaatgacactcagaaagcattggatgatttgacgaatccagaaactaattctgctttgcaggtcaatatcgagtccaggaaaaggaagagacagaaaccagcacgagattctgaaattgaaaaagttgtgcaaatgggttttgaaagatcaagagtggttgctgcttttgaggccggaggtagtttagatgaagtattgcaaagactgacagcacaacctgggactgaccccacgcaacctcgagaaaattcagcttctgcttcccatggtggtgcaagttcatctgctcctttgccagacaatgttgatgctgatttagcgatgtataaggttgaagatcacagtaaaacagagcaacgagatgtagagatggaagatgagctctctgcagatatagcgaaagcagatgccttggctgattatgacatcggagttactgtagaaggggaagccataactgagtaccttgccctggttgagtctgcaagctgtcgtggggaaactggtccttcccagtaagaaaaaaatgatttaaaatattatggaccatttagaataatattgaccagtttatgtaaacagcaggatatcatataaataatgaacgcctttatgctcttccttgcgggagcttttgcacacaaga

SEQ ID NO: 19676 - DNA, 497 bp, Glycine max
cggatgggctattaacaggacctaatgagcaaattttggttctcgcagcaaccaacaggccatttgaccttgatgaagctatcataagacggtttgagcgcaggatcttggttggtcttccatctgttgagaacagggaaatgatcttgaagactcttttggctaaagagaaacatgaaaacttagacttcaaagagctggcaaccatgacagaaggatatactggaagcgatcttaagaatttgtgcatcactgcggcttatcgacctgttagagaactaatacagcaggagagactgaaggacatggaaaagaagaaaagagaagcagaaggccaaagctctgaagatgcttcaaacaataaagataaggaagaacaagaaattaccctgaggcctttaaacatggaagacatgagacaggccaagagtcaggtggctgcaagttttgcgtcagaaggatccgtaatgaatgagttgaagcagtggaatgatttg

SEQ ID NO: 19677 - DNA, 643 bp, Glycine max
cacacaagtgggacaaggaaagtttgttatttccaatagaatatcttttcccatgtacatgaacttaccgatatctgattaaatgcaggtggctgcaagttttgcgtcagaaggatccgtaatgaatgagttgaagcagtggaatgatttgtatggagaaggaggttcaaggaagaaacaacaactcacttacttcctatagattgtggaatgctacttttatttttggttttgtgaccattcatcctcaacgatacatttcaacaaaggaaggaatccttcaccagagatgttgaattgaaagcatgccgaaatgtcagagatcttatgattcccagaaaagctcgagttctggcacacacttctaatctctaaaggatgtgtagaccatcatgcactatgtttaggaaagggttctcggtttttgcttgggttgactagaaacaaatgagcacctatattaggggatttatattatgtcatgcacggttttggaagatgcaatggctttgtaggaagtaggaatattttacacccaacattttaggtatgttatattatatatgatcagaattttcagacagtagagttttgtaaattgattgtgcaactgtactgctaatacagtttggctcaattattc

SEQ ID NO: 19678 - DNA, 435 bp, Glycine max
gtacaaggacaagagtattgtcggaaatgacgggggtgaaggagctgttgaagatttaatagtagcaactaatgcaattgtggtgcctgtgggagctgctttggctattgctgttgctagctgtgcttttggagcacttgcttgctactggcgttcgcagcaaaagagtcggaagtattttcaccacctacactctctaaagaacatttgataattaggagggcctagaagaacgtggaagtaggaaattggagacaagtacacttcaaggcatgaggtgcatagcagctttcataggcaaccaattattatggtctcactccaaagagccttgccaaagttcctttttgaatctatcctgaatagaaaaatgtacagaatacaattcttgatttggagaccattactgatctgtgctattttctttcacttttt

SEQ ID NO: 19679 - DNA, 367 bp, Glycine max
ggactgaggggtttaagagcataagtggcttgtgcggttgagctgaacactcagttgttgaaccatgctttctcgcactcgcacctttcctctcatttccctcgcttccaaagtgtgtgcccctccactggaagccctctactccacccacattgtcggcgacaagcccgttctggttcgggattttattcattctgcactctaccatccgttacatggctacttctcccaaagatcgcggtccgttggagttctgcctaatgctattacgttcaaccaacttcaaggccggaaagcttatatgaagtacttggataatatttacaagcagagtgacatatcatggtttacaccagtgggacttttt

SEQ ID NO: 19680 - DNA, 815 bp, Glycine max
agagcaattgcagagtaaaaaaaacacatatgctgctaaagaagaggaatatgccaagaaaataagggaactggggccattgacatcagatgcttttgaggcgtatagacgaaggaatattaaagatttgcacaaaatgctgcacaggtgcaatgagcaattgcagcagttcagtcatgtaaacaagaaagcccttgaccagtatataaattttacagaacaacgagaagaacttcagaaaagacaggctgaacttgatgcaggagatgagaaaattaaggagctaataacagtgctagatcaacggaaggacgagtcaatagagcgcactttcaaaggtgttgctaggcattttcgggaagtattttccgaacttgtgctggggggacatggtcatctggttatgatgaaaaagaaggatggtgatcatgatgacgacgaagatgaggatggtcctcgtgaagcaaatccagaggggagagtagaaaagtacattggagtgaaagtgaaggtctcatttactggacaaggggagacacagtccatgaagcagttgtctgggggtcaaaaaactgttgtcgcccttacacttatctttgccatacagcgatgtgatcctgctcccttttatctatttgatgagatcgatgcagcgcctggatccacagtacagaactgctgttggaaatatgattcgtcgcttggctgacatagcaaacactcaatttatcacaacaacattccgcccggagctagtgaaagttgctgataagatatacggagtaacacataaaaacagggtcagccgtgttaat

SEQ ID NO: 19681 - DNA, 460 bp, Glycine max
gagaaagagaaagagcatttagagagtgttgagttgtgtgacatgtaacaccaaactcactcaaacctacctttgtttttctccttctttttcttctcagtttcattctcttgctcatggacatggatgtttgccgaaatatatcagtttcttcaagtgagtgtcagcaagagcttcccacccttgatgaccttttctgtcatcagaacacggaagtggattttggcatggaatggttatcagtgtttgtggaagactgtttctctagtaggccaagttgcctcttgccaccctctggtggtggtgttcaaaccacaagcactagcaccaagccttcttcaggcacaataatgccaagaccccaacaaagtcatcactgtcctttgcagaattttgctgtgccagggaaagcaaggagcaagagaaagagactttcagcccctagaacaacaaaacacac

SEQ ID NO: 19682 - DNA, 507 bp, Glycine max
gaaatatgttagaggctttggagcggatggggctcagcaagtatttccaggcaattgtgacagaagaggatggaatggagtcaatagctcatagatttctttctgctgctgtcaagttggatcggaaaccttccaagtgtgtggtttttgaagatgatcctagaggagtaactgctgcgcacaattgtacaatgatggccgtagcattaattggagctcatcctgcgtatgatttggggcaggctgatcttaccgttgctaactttagtgaactttctgtgatcaacttgccgaagactatttgcttaccagggttcttcatttatggacttacagaagcagatcatagagaaaactcctcccaaaaggaaacttacgatagacaccattttttaatacattttccttcccatccccccccgctaaatttccttgtaattaaatagttatgctgtcgtaattttttttttatatataataaaaattgcaatcagttcggtctgattt

SEQ ID NO: 19683 - DNA, 717 bp, Glycine max
aaactcgaagatgacctaaaactatgtaaaggtgatctgcgtgtaactgaagaaactatcaaaagcttgagaagtgataagttgattttggaacagaagctatctgagcttgagaagaagagtgctgaagagattaattctcttcaatggaaacttgagcaagaacgcaaaactctgaactctaaagtgtatgaccttgaacgaaaactggatgtgtctagacaagaattaactgtagctgagtctacactctcggtcaaggactctgaattggctgcattgaagaacaatttagatgaactagaagaattgagagacatgaaagaggacattgatagaaagaatgagcaaacagctgccatactgaagatgcaagcagttcaactagctgaaatggaattgctttataaggaagagcaggttctcagaaagcgatattttaataccatagaagatatgacaggcaagataagagtttattgtcggttaagacctcttagtgaaaaagagattgcaagcaaagaaagagattctcttactactactgatgagtttactgttgagcatccttggaaagatgataaaccaaaacaacacatttatgaccgtgtgtttgatggtgatgccactcaagaagatatatttgaagatacaaggtacttaatgcaatctgctggggatggttataatggttgcatatttgcttatggtcaaact

SEQ ID NO: 19684 - DNA, 626 bp, Glycine max
tcggttatattgttggcgaacacggatttagatttaaatcttaccatggcagggggttttccttttactcctttgagcaggacagcaacatctgaatatactcacgatgatatgggaagggatttaatgatcggtcagccttcagggagtgagattggtgatcgtgcagcttcatatgaatcacgtgggccaagctgtcgtaagagaaatcttgaaaaaggtggatgctctgataatcggcctgttcttaggttgcaacagcaggctgatagtgatgaaggaactgtcattgatcgtgatggtgatgaagttacagatggtggacaatattcagctggtccttcaaaacgtgcacgtgactctgatattttcgacacatattgttcacctcaacaaagagactcatctggtgccggtccgagtcattcaatgggtttagaggcttacattactggaaatcgagtttcttcataccgtcaaggtagtgacctcccaatgggtatccaatcagctagagactcaacccgtgcatcattgtgtattgcaatggacacaatatgtcatagtgtgaatggtgattctatggaaagtgttgaaaactaccctggaaaccttgatgatgttca

SEQ ID NO: 19685 - DNA, 490 bp, Glycine max
tgtgggttcaagcagcaagcaatggacggaagagagagcaaatcttctctcacttcacaaacggaacctctcgactaccctcattcccgtttcttcactccaatgcaacaacaacattctcatgaaatggtggctttgaagaaggcatatgcggatgtgattctgaatactgtgaaggaggctgcaggtagggtaatggtggcggaaaggagagctcttatgttccagcaggagcttgcttcatccaaagaagaggctcttcatatgttaatgcgtttgaagcagatgatggatgctaagacagctgaagcagaaaaggcatcattggagaagcaaagaacaattgatgagcttgaagcacaattgaatgaagcccaggatatcataacagatctaagggcagagttgaagcttgtatatctggagttagagacggcaaggaataaccaggtccagcctttgaatggacagaatgaaaagcaagttgtaa

SEQ ID NO: 19686 - DNA, 635 bp, Glycine max
aagagaagggttttaagttaagaagcaaaagctcgaggtgggtgtatgtttgagaagtaagaagcatggctcagtatggttacgcataccgaagcgctcaaatatccacctacaacactagcaatgtgagaaacattgaaactggtgcaaagccatttgctccctacgtccccaaatttagtaacggtaatggttactcagacgggatcgttaccaagaaaaaaataattccagttgctagcaggccttattatgaggacgagagtgacaacgaccatgatgacgatgaagggaagcatccacatcaaacaagcccacgtaaatttgatgacttcctcaccaaggtgcacaatgaagctaaccgtagtccaccaaggtcctccggtcacgtgacttcacctgattggcgccactcctcgcagccaaaaccttacaatggcggctatgctgactacggaaccaacaagccaattggaggtgccaataaacatgatggtcctggttatggcaacaacaaggaagggaacaagcctttatatggaggtaacactaagatttttgataaccatcatgcttatacaaggtcctggccagatgaaccactttgatcatgcttatcatggatacatccaaaa

SEQ ID NO: 19687 - DNA, 905 bp, Glycine max
ggggcggagaggccattgattggtcggtgcttgcctctttgggaggaggttagaaccaaggtggtgaaggagtggtgtgttaagtacagtgttgcggaagcacctgtggtggaaatacttgagaaacggttcaggaagaattatcaccctgcatggtctgctgcattcatacttgatccactttacttggttaaagatgcaagtggaaagtaccttcctccgttcaattgcttaactcgtgaacaagagaaagatgtagataagttattgacaaggctggcttcgcgagaagaagctcatgttgtgttgatggagctcatgaagtggagatcagaagggcttgacccactttatgcacaggctgtgcagatgaaacaacgagacccggttaccgggaagatgaaggttgcaaatccactcagcagtagacttgtttgggaaacttgcctcagcgagtttaaatcccttgggaagcttgcagtgaggctcatttttctgcatggaacctcaagtggatttaagagtaattgttctttcatcaggaagatttctgcaaataagcactccagagtttccttggaaagagctctgaaagtggtgtatattgcagctcatgccaagcttgaaagacgagacttttccaatgaggaagagaaggaagcagaactgcttgccagggaaggtagtgatgatggtatgctggctgaggtctttgctgatgcacccctgctgtaatgtgccacttttcaacccctatagaattctgtaattttaggatttatcatattttttttccagagctgttctattatttcccttattccacgtgaaaaatattttgtgacttgtgattgaaacaaaaaaggatattggaagacacctgactgttatgtcatcttttattc

SEQ ID NO: 19688 - DNA, 564 bp, Glycine max
ccgtaaaatgttgtggctctgaaggcggttttgtatgggaagattaggaaagggaagtcgaaggaggctgtgaagtttgtggaggatttgattgctgcggagccgaatgaggttgagtggaggctcttgctggcactttgttatgagactatggggcaattgagcaaggctaaaaaattgttcagggaaatcttgaagaagaggcctcttctagttagagctttgcatggtttggctatggcgatgcacaaaaatcatgaaggccctgctgtatttgaaatgctaaataatgctcaagagttagcttctcgtgaaaatagagttactgaggagagaaatataagaatcttaattgcacaaatgcatgttgtccagggtaatttggaggagggcttaaaaagatttcaagaattgattgatcaaaatcctcgagattttaggccttatatttgccagggtataatatacaggctcctgggtaaaaatgaggaagcggcacagcagtttgaaacatatcaaactcttgtacctgaagaattttctcagagaggatttcttgatgat

SEQ ID NO: 19689 - DNA, 458 bp, Glycine max
ggggataagacttggcattttctctatatccatcctctcaccattattgcctcaatttcatactttctttcatgatcacagttgagggactgcaaattctctgcttctctacacatggagccggtgtcgcgtgctaatttcttttcattccaaagattttggctaccgtttcagggacagggagggatgaggcagcaagttgatccctcggctcacacaatcaagtcccatggagcatcacttgcaagaaaacacgctcgtgattggcttatattgctgcttctcatagtgatagagattgtcctttttgtcattcatccatttaaacgctttgtgggaagggacatgatggaggaccttagatatcctatgaaagaaaacacggtgcctgtatgggctgttcctttattatgcggtctgttgccaaatggcgttttccttctcttctatatgcgcag

SEQ ID NO: 19690 - DNA, 414 bp, Glycine max
atttggaccaagagaagagaagcggtggtttaaataataaagtgaagaagaagaagaagtggcttgtttaaggaatggcttctctgctcctccctccaactccaactgctacttcttccacagttaaacacaacaaaatccaaacgaaactgaaaccaaacagcaatgctcatgcagctacatgtaatttcttcttatcatcgaattcaaacgcaaaccaccgtttcaactctgcaaagtgccatgcattgttggatgacgtggccaaagggttgttggagagcagcagcagcgttggcgtggaccagttccagagactgaccgaaggcttatcccacatgcagaggtgggtgttcctctgtctttggtggcttgacgtggatttacctgactgcaagaccaggtgttcttgtc

SEQ ID NO: 19691 - DNA, 382 bp, Glycine max
gaaaggcccatcattcacgacaacgaaagcgtcgctagttcgttccattcccctctccatagaaacgcttttgacaaaatcctaacatttgttgtggcagttattgaaatccaaattctcggggcagatatctttcgaccttgcttcacaccattcaacgaactgcactcactgtgctctctagaaccctaacttttgtgctaaaaccctaaaccacgtcgaatcgatgattgaaccctacaacaagctggttaaactagcggcgagggctttttacgatgatcttaccagcaaaggagataatcagcccaaaacgggaaggagtgataacaggggaatagctgtggtggttcttgacgcgctcacgagacgacaatgggtt

SEQ ID NO: 19692 - DNA, 585 bp, Glycine max
acgcgtccgtaagctcggaattcggttcgagcggttcgagaaactattttttaacgagggggagaaggaaacaaaacaacgaattaacgattgaggttgagttggtgcaaaatctgataatggcagaaacagaagacaaaacccttcaagcctcgcccatgaacgaaaccaagaagatgaagaagaataagaataagaagaagagcgacaaaaaaagacctcgggagattgctaccgaggagcgtccagaggaagaggagaatgagaataatacagatagcgatggagaatcctcgaagaagaagaagaagaagaaggtggaaggagaaagtgaagtgaaagagaaaaaggtgaagaacaatggtggctctggaattatgagcactgagtcatttgaatctctcggattgtctgaacctacttataaagccattatggatatgggattccaccacatgactcagtggcaagcgcgggcaacgcctcagaattgatgctaaatcaagaatgcagattcaagcgagggcaattccgccacttttgattggaaaagatgttcttggtgctgcaaggactggttctggg

SEQ ID NO: 19693 - DNA, 382 bp, Glycine max
ggcggcgcggcagagcaaatacattgcaggtgatctttcatctcagaacgtctgatttgagcctctctcagtgacaacagtttctgagtcttactgatcttttcttctctctaatctcttgtgatttttcttctctctaatctcttggttgcgtggcagactaaatgattttgtgtttttggttctcttttaggtgcgattctgattctcttctcttaaatcattggctttgattgtattcattggtgccatggcgtttcccagtttgattacaacaatcattaagtccgtgttgggttctttgattttccttttctttttcatggattggtacgattaggcttcaggtttttcaatatcctacttgcaaccaggtctggtt

SEQ ID NO: 19694 - DNA, 1018 bp, Glycine max
tcgcacgcacatgcgaggtcgactacgaagacgacagaagggatctgttgattgtcgtaaagttgttcatagcttgcatgtctattttcttcttgtgggggattttaacatacccattatatatcaagttaagcgtctccgtgatgggaagagttttgctactaggaaagtggatgcaattcaaaagggaaatgtcatattcactttgctggcttcatttcacaaggaagaagtagggtttcaccaccaggaagtgtctatcccatcagtccctgctccagatacgcttttatcgttggaagagcttcgggaacaacgtcttactgaccctcgtctcccaggaacttaccggaacagggttgctacagtggaattcattccctggcccatagagatacggttctgtgaacctaaaatttcaacaaatcagaccaaatctcctcctagtttgagatattggcttagagcaaggggaaaactttcagatgatgaagccttgcataggtgtgtggtagcatatacttcagatctaatctttcttcaagtgagtttaaaccccaaccgtaggaagggcaggaaggcacgtgctgtgagtctggaccactccatgtggtttcacagacctttacgagctgatgactggatactatttgtgatctttagtcctactgccaataatgcacgtggctatgtcactggccaaatgttcaatcagaagggagagctacttgtatcagtggttcaagaaggtgtaatgagggaagttatttctgcaaagtcagccatcaaatctaatttgtgaaaatctgaatatgcatagaactagtggttttctttttagttctgtcttgttttatagtgcatggtgaggacatctcttttgttttccttctatggtgacccatataattggtggtgcccagtttatcaccatcatatagtgtatatttatttttaatcaacggttcaaaattgtgattgacaagtaattgatgtgttggatttatttacattaact

SEQ ID NO: 19695 - DNA, 722 bp, Glycine max
attacagtgcttgaaaccgttcaatcagtgaaatggccaaggaagatgtgtttgagttcctcgggaacgttcctctgctacagaggcttcctggctcgtctgtaaggaagatatctgagcttgtgattctcaaacactatgagccgggagagtatgttgttcgtgagggagaacgtggggatggtctttacttcatctgggagggagaggctgaggttgttggctctgttaatgctgacgatgataatcatccagagtttcaattgaaaagatttgactattttggttttggtttatcaaatgaagttcaccatgctgatgttgtagctttgacaaagctatcatgcttggtgctgccccatgagcactcagcattgctgcagccaaagtctatttggagtgcagaaaaatctcatgatacatgctcacttgtggagcatatattgcatttggaccctatagaggtagacatcttccgaggaatcactcctccagatgctccaacatttgggaaggtatttggtggacaaatagttggacaggcactggctgcagcatcaaaatctgttgattgtcgtaaagttgttcatagcttgcatgtctattttcttcttgtgggggattttaacatacccattatatatcaagttaagcgtctccgtgatgggaagagttttgctacaaggaaagtggatgcaattcaaaagggaaatgtcatattc

SEQ ID NO: 19696 - DNA, 623 bp, Glycine max
gctgatgattggatactatttgtgatctttagtcctactgccaataatgcccgcggctatgtcactggccaaatgttcaatcagaagggagagcatcttgtgtctgtggttcaagaaggtgtaatgagggaagttatttctgctaagtcagccatcaaatctaatctatgaatagctaaaaatgcactgaaacttgtggtgttctttttagttttgtcttcttttgttttccttctatagtgaatgatcgggtgaaccatacaataggtggtgcaccactatatcaccatcatatagtgcacctttatttttaatcaacggttcaaaattgtgattgacaagtaattgatgtgttagatttatttacaattaactagttttaaaatttacaaattggtccttttgttgtcgcgtttgtaccatctcctacaaagattcacgcctctgtcggctcttccatcaccacgagccttgatttctgttggcatccgcaacagccatggctcatctcttcatttcaaaagtaatagctttacttcatcaatcactatacaaccagaattgccaattcaaatgtaagaaaaatatacttttttttatggacaaatgatacatataacatt

SEQ ID NO: 19697 - DNA, 384 bp, Glycine max
ggcacatgggagttggtacggaaacggtgcattcgagcgcgtgtttatctagtctctctgcgtggatctgcagaagtggaagaagaagaagatgcagtggtactttgtcgctgcgctcctcaccgtcctcaccagttctcagggaatactaaccaccctctcgcaaagtaaaggagagtacaagtatgattacgccacggtcccatttcccgccgagatctccaagcttgtggtgtcaagtttgttactgtggaaggaatgcaaaaagtcacctttgccaaagatgacaacggagtggaaaacggtgtctctgttccccattccctcagttatatatctgatccacaacaatgttcagtttgctacactcacttatgtggacac

SEQ ID NO: 19698 - DNA, 854 bp, Glycine max
gaggtgacagttgcaaataggaacggagagaggttctgcgccgttgcttatcctctgagctgagagcagaagagaacaagaaacgtcgtcgttctgcactttgaactttgaagttctaacaccttcttatcttatctttctctctacctacagcttcaccaatgactatgactggtttaatttcaaaccgcaacttcgcttccttctttgcctcaggaaatgtatatagatcgggaaaggatatatccgttcaaagagggggaatttctatttctggtgtatctgttgctaaggatccctttccaagatggcagcataagatgtatttgccattggaagagagagtttcaaaacaaatgcaaacatccaacaacaaaggggagcatcgttctcttgtatcccagcagtccagtcagtgcaactttaaactaaaggctagtggaagaagtcgttgttccttcctttgctcagctccttatggcaccaacaatgttggacatggggaagtatatcgaccttggtttgagcaaaagaaagcatgcacaaactgaagttggtaaaacaaataagttccgtgtttgttacaagtctgaggagtatgacatttcacaaacaaagatggatccactgcaatcaactgaagggactggggaagccattcttttggaaggaagagcatcaccttggtggcagcagtttcctaagcgctgggttattgtactgctgtgttttacagcatttcttctgtgtaacatggatcgtgtaaatatgagcatagcaatacttccaatgtcacaggaattcaactgaacagtgcaacagttggcctaattcagtcatcttttttctggggt

SEQ ID NO: 19699 - DNA, 323 bp, Glycine max
gatttcccggtcggcccacgccttccgattccaaagaagggtgtgggtgattccattcgaacaccagacaaccaccaccaatcttaaggtggctttcttctcttttggtcgaccgtgtcacgtgcgagaacaatgagaattgccattttccgctccctatctaaacctttgaatcttattcgattcaatttcatcacgacttaaataccatcgcatgttcattcattgatggccatgttcttcccttaaaccttcttcaaaaagtcaaaattgaaaacctttctctctcttaactccttctcgtcatcgccccaaagcttctc

SEQ ID NO: 19700 - DNA, 903 bp, Glycine max
gtaaaaacaagactagcgatattagaatataattctcacaagacgagtaaaaaatcataaattaaaagatatgttcaaagcattatcaatctacagaaacccacccccttaacaataatcctaagttgagaaaagaaaagtcaagagagttgcaaataaatagaaaaggaaaaaaaaggggaaaaaacattaaaactgatacattgcaagctggaatgatacacatgcccacaatagcatcgcctgctgctcagcttccacttggaaagattcagttataattcaagtaaacaacacatccaccgaagcctaacttcgaaaatataagtatcaatatgattcatggctctgatttggacaaggagatgagcttgcacattactgcagggcattagttgctgtgctggtaacagcaactcaaccaaaatagtatcataggaagtaatcaggtgttctcctggttacatctggctctcccctccttggagctggctcaaactgaatgaatgtgtgtcctttgcagtcgtcaacctcaagaattgatgccatgttcccacaacgataacaatagttaggtgcactaaatatagtaaccaccttttgatcatgtccccagttatagccttccataaccagctggtgagctctagcaatcagcttcaagttattggtatggttaaattgctcagatatgtcctggccaaaggtatatccagcacctctaggagagatgccccaaccacaacgatcatctggatcagaccatagaagatcacacatgggtccctcatgaggaacttcttgtacgcgatcaaaattacgtatgttatccagggtttcaatagatggcgacaacccaccatgcaagacaaaatatttcagattcaacctatgaaagttaac

SEQ ID NO: 19701 - DNA, 402 bp, Glycine max
ggcagcataaagtagcaaagtcttgcaggccacaatgcaaaactttgcagaatctcatcaactttcagttatgtgttcttcttattcatctaatgttgatgtctttgacactggcaagtacaccgccaagctgctaagggttgaatctgaatcagaatcatatacacacaacaacaattttccaccaccaccaaagtctctcttgattgccactcctcttgaaggtggagatttccctcttctgctgtttctgcatggctatcttctttacaattcattttactcccagctaatacaacatgttgcttctcatggcttcattggcattgcccctcacgtgtacacaggggctggaccagatacaagtgatgagattcattctgcagctgcaataacaaactg

SEQ ID NO: 19702 - DNA, 428 bp, Glycine max
gttgcttgaaaatgataactttgaagatcaatcttggcatgattttgatcccgctgcttttagtatccatgctgattctgatcctgttagtttggatgaatctctggatgaagctcatttcagttcaccagcttttggcaagagagatcaattacaaactggtacatttgatgctgcacaagcaaaggaaactggcagattaggtgaatttcttgcatgcaaatactttgtcgataaagttggcaatactgcagtaaggtgggttaataaagataatgaaactggacttccatatgatttagtcattggggaggataacagccaagaattcatagaagttaaagcaaccagatctccaagaaaagactggttcaacatatcagcgagagagtggcagtttgcaaatgaaagatgccaatcttttagca

SEQ ID NO: 19703 - DNA, 426 bp, Glycine max
gatcgtgagtggggtcctcgcttgacaaaaccgggtctggttcctccagttactagaaaatatgaagtcattgaccaatattgcattgtagctgatgaggaggatgtgcgaaggaagatgagggtttcattacctgatgactatgctgagaaactgagtgcacaaaagaatggcactgacgagtcagatatggaacttcctgaagtaaaagattacaaacctagaaagcagctaggaaatgaggttatcgagcaagaagtttatggaattgatccttatacgcacaatcttttgcttgattctatgccagaggagttagattggtctttgcaggagaacgcatttgtttatagaagacacactccttcgaacattgaataagcaagttaggaattttactggagctggaagtacttcaatgagcta

SEQ ID NO: 19704 - DNA, 500 bp, Glycine max
acgacgggctcatttgtgatacatgacgttgaaacctgagaggaaagtttaattggcagcattccatttccataagaacctccgctagctagctgcgtataaaatataaaatataaaggggaaaaaaaaaacgagaaaacagtgtcatattattattccttccttctcactgtgtctggtgcataaacctcaacaacacactcttcaattttctagggtttgagttttgctccctttttcttcgccttctccaatggccgcttcctcgctcctgagatccgcgcttctcgctccttcctcctgcgatcgccccaaggtatataccaatgcctcaagttctaatttaaaatccaagggattacatagcagcatttttggtacttcaattcaatgtgactccttagtcttacaaaattgcaatggtcgtgggatccagcctattaaagccacagcaacggaaatccctctccccacccagcaatcaaggagcactgggaaga

SEQ ID NO: 19705 - DNA, 590 bp, Glycine max
  unsure (1)..(590): unsure at all n locations
gcggccacgcgtncgnccacgcgtncggccacgcgtgccttcacgcctgccgccaaaaaacgacagtaaagagaaaaaggatgaggtagagagaaggtgggagtggcagagagaagattacaaagaaatggggagatgggtgaattgtaggggcaatatattcccattcctggggatggtgatggctatgctagctcaaagtggaagcatggtggtaatcaaagttgccatgactgatggaataaacaaatatgtcatggttgtgtactctttggcactctccaccatcttgcttcttccctttgccttgtttcttcacaggtcagagcgtcctcctcttacattctctgcactttgcagtttcttcttgcttgcattctttgggagttcaggacagataatggcttatgttggcatagatctaagctctcctactcttgcatcagccatgcttaatctcattccagctttcacttttatacttgctctcatttttaggatggaagaagtacattggaaacattccagcagccaagccaagttcttaggaacaatagtatcaattgctggagcatttgttgtgatactgt

SEQ ID NO: 19706 - DNA, 305 bp, Glycine max
tgagggctgtaccgagaagactacagaagctgatgctggggatgtattacattgaagcactctactttacttttgggtacatgtatcgtttcgtttagtttcatcccactcaacgtatttggttttttttcaccgttcactaatgtcttgttaatgtgtgcaaaggctactagatattatctgattctaagtaaggttttgtggttcacattcttgggcatgtacaacgcattgaatgtatcatatcccatgaagtgactaattactgctaacttgctaattttactgatttttttaaattacgc

SEQ ID NO: 19707 - DNA, 383 bp, Glycine max
gcttggcaatgggactgagtcagtgaaaccctggcggtgggactgacactctcccaagcaatggaagttccttatgaagcgccgtctaccgacatagatcgacgagaccataagctaaaatgcgctgaagcgcgaactcatgaacaaacagaaagaagaagataggaaacgcatggaggaggacaaggccaaaaaggcagctgacatgcagaaggctaacgataacacatctgcacctgctgatgaagatgatatggacccaactcaataccttgagaagaggcataaagtatcttgcaggtcataaggcagaggggaataacctctatcctgacaaattctatgtcactatgtcttttgatcaatacatcaaggaatatgga

SEQ ID NO: 19708 - DNA, 563 bp, Glycine max
aactcatctgatgttgctgcttccaagtctcccagtcaggaacaagtttcagccaccaaagagaaaaatggggatgtcaaagatggtgggagtgattcctcaaatggggtgctgaatgagtcattccctaagcctgttgtgactgctaacatcgagccgcagccgaatgtggtagcagcaggattttgtagatatgtacatgaaaagcatgcagcaattcaccgagtcattggcgaaaatgaagcttcctatggactttgaaagtggaccaactagttcaggaaactctagctctgaacagaagatacagacaccaaagagcactaactcccgtgtgttttatggaagcagggctttcttctgaactttggatcaagggaaatactttcaggtgacttagattttagaatgaaacctgatatcagtagtgaatgaaataatgcactgtccagtgggattctcgcttctgtacttgttgatctgttataggtaacagggaatcttaactttgtactctcacaggcttggtcctatcttaactgctaaatgaacttttttctgtc

SEQ ID NO: 19709 - DNA, 446 bp, Glycine max
gagagcttctcagcatgcagtgttagcagtgtgtcaacaaatggggtttcatctccttcagtggctgcaagctcagactcgtctcccaatgaggaaaccaaagagaaaaatgtggatgtcaaagatggtgagactgattcctcgttccctaaacctcttgtgactgttaacatcgagccggagccgaatgtggtgcagcaggattttgtagacatgtacatgaaaagcatgcagcaattcaccgagtcattggcaaaaatgaagcttcctgtggactttgaaagtggaccaactagttcaggaaactctagctctgaacacaagctacagacaccaaagagcactaactcccgtgtgttttatggcagcagggctttcttctgaactttttgatcaagggaatactttcaggtgacttagattttagaataaaaaaaaaaaaaaaa

SEQ ID NO: 19710 - DNA, 651 bp, Glycine max
  unsure (1)..(651): unsure at all n locations
ctcgagccgctcgagccgcaaaaagtggggcgggcacgcagagcagagggaggaagaaagggtcgaagagaatgtgggaatcaattgttttgacggtggttgccaccgccggcaacaacatcggcaaaatccttcagaagaagggcactgtcattcttccccctctctctttcaagctcaaggtcataagggcatatgctttgaacaaaacctgggtgataggttttctaatggatatatttggggcactgttgatgttaagggcattagctcttgctcctgtctctgtcatccaaccagtttctggctgtggactggcaattctctcagtcttttctcatttttatctcaaggaagtcatgaatgttgttgattgggtgggcattaccttggcaggttttggcacaataggagttggtgctggaggtgaggagcaagaggctgctgctctatctatttttcacataccagggctggcatttattgttttcatcttgtttatacttcttagtggatggcttcgaatatgcaagcgccaacgaagagaacaagagatgatggaatatgacgtcgttgaggaagtcatctatggctntgaatctggtattttgtttgggatgtcatctgtcatatcaaagatgggatttctat

SEQ ID NO: 19711 - DNA, 478 bp, Glycine max
gaaacttgaaagtaacagtctaacaacagatcgttaaggagaccaaaccaacagaacagagtaacagagagttagcattgcaacaaagagaaagaaaagttgaaacattttcagacagtggcatgtgggaatctattctgttaacggtggctgccaccgctggcaacaacatcggaaagatccttcagaagaagggcactatcattcttccacctctctctttcaaactcaaggtcataaggtcttatgctttaaacaaaacctgggtggtaggttttctaatagatatatttggggcattattgatgttaagggcattgtctctggctccagtctctgtcatccaaccagtttctggctgtggactagcaattctttcaatcttttctcatttttatctcaaggaagtcatgaatgctgttgattgggttggcattacattagcaggttttggcacaataagtaaagagttggtgct

SEQ ID NO: 19712 - DNA, 901 bp, Glycine max
gtgctctctttgcccaatgcttagggttgaacaaagagtctgaggcttatgcagaggagcttttggatactcttgctaggcagagaggtattcaggggggttccattaacaagatccagatgaaggaattctgggatcatatttctgaccagagctttgatactaggctcaaaacattctttgacatggttgataaagatgcagatggcagaatcaccgaggaagaaattaaagagattatctgccttagcgccactgccaacaaacttgcaaacatacagaagcaggcagaggaatatgcggctttgatcatggaagaactagaccctgaagacacaggatttatcatggtaaacgatctagagatgctcttgttgcatggaccaacccattctactagaggagatagcaagtacctgagtcaaatgctaagcttaaagcttaagcctataggtgaagacaatcctattaagaggtggtacaaaagcaccaagtacttcctgcaggataattggcagagaacttgggtattgctactgtggattggcgtgatgttaggtctatttgcctacaaatttgtgcagtatagaagacaacctgcatatgaggtgatgggccattgtgtatgcatggccaaaggtgcagccgaaacacttaaattgaacatggctattatcttgctaccggtttgccgaaacaccatcacttggctaaggaataagaccaagcttggcgttgtggttcctttggatgacaacctcaacttccacaaagtgtatcgccgccgcaatagcagttgctgttgctgtacattccatctatcatcttacttgtgattttactcgccttcttcatgcaagtgatgaaaagtacaagctgatgcaaccttttttcggagaca

SEQ ID NO: 19713 - DNA, 746 bp, Glycine max
ggcgtaaaaattggagcaattggtggaactcgctgggaacattcaaaatccaaaggagagagccgacagagtggggtcaagtgtgaatgaaaatgctgaaactgaaaccgacatatgcaccctaaattgcttgtgtcagtcaacacttgcaagtgagatagacaaaacactcaaacagggtgatgttatgtgccactcccactactactgctctgctgtgtctcactctatctgtctctttgaatactgtgccaaaattccacacacaaacaaacagataacataacagaagaagaactcaagagatggagagtggcggtaatgggaagagagcacatgaagaagcggggccttcatctgggattgatggaaggaaacttgaaatgactgaaaaagcgagtgatgatgataaagaagaggaggaggaggaggaggaggaggaagaaggagccattgaagatagcaaaaatggtttttttgttcctgggcctcttctttctctcaaggaacagatcgaacgggacaaggaggacgaaagcctaaggagatggaaagagaagctgttgggttgcttggaaagtgatatagatgggcaattggatcctgaagtgaaatttcactccataggaattctctctgaggattttggtgaaattgtcactcctctacctgtggatgaaaatcgcaatggctgtactctatttactctcaaggaggggtctcgctatcagcttaagctaaaattt

SEQ ID NO: 19714 - DNA, 691 bp, Glycine max
gctgctaaaggtgaggaagttaagaaaaatggaggggttggcatgattttggcaaatggtgtatttgatggtgaaggattagtagctgattgccatgtattacctgccacggcagttggcgccaccggcggcgatgagatacggagttacattgggaatgcgcggactccggccaccgcgacaatcgtgttcaaggggacaaggctaggggttaggccagcacctgtggtggcatcattttcagcaagagggccaaaccctgagtccccagagattttgaagcctgatgttatagctccaggattgaacattcttgcagcttggcctgatcatgttggaccctctggggtaccctctgatgggcgtaagactgagtttaacatcctctctgggacttcaatggcttgtcctcatgtttctggtttggctgctttgttgaaagcagcacatcctgattggagtcctgctgccattaggtctgctttgatgaccactgcttacactgtggacaacaagggtgatcccatgttggatgagtccactgggaatgtttcatcagtgtttgattatggtgctggccatgttcatccagtgaaggccatgaaccctggattggttcctgatatctccacttctgattatgtgaatttcttgtgcaattcacattacaccaccaacactatccatgtca

SEQ ID NO: 19715 - DNA, 433 bp, Glycine max
ccgaaggtgaaggaagagaaactatgcgcgagagtgaaccgagagaggggcacagttgagtagcaaagcactgagcgcagtgggtgggtttactctcactctcagtcccatcaatttgaaactcccccttctcccttccaatcgcctctttaaccgcactcccttcaaatcttccatttccttctccctacgctccaacgacgagcaacaacccctcggcctcgacatcgccgcactaaggtccccttccgcgcgctctctctatttcactcatctcgttcgttgcaagcatagcatttatggattcgattgttcaagagcactttggttacgggaacaggtcagctttcgtgaagctcattgatgggaaatagatcatggtcggagttgtgttcagactctggcccgtcaaatggcccaggattctgaactc

SEQ ID NO: 19716 - DNA, 453 bp, Glycine max
tgataactatacaacacaagcacgaacactcccttaccaaaacggcacttgtttattgtcgtttagatcccatggatcacacgcctgctgcgcaacgtcgtctcaaagccattcacgcccacctcaccgctaccgccaccgccgatgactctccctcccacctccgatccaaccccaccgccggcgagttcttctccgaacaagggtatagtgttgtactcccagagaaattacaaacaggaaagtggaacgtttacagatctgtacgatctcctctgcagctggtgaccaagtttcctaatcatcctgaaattggtaccctgcacgataattttgtgcgctcagttgacacctttcgagactacaaatatctgggaacacgtgtccgtgttgatggaactgttggggagtacaaatggatgacatatggagaagcaggtacggcccggtcag

SEQ ID NO: 19717 - DNA, 383 bp, Glycine max
tctcgagccgattcggctcgaggttttatagtgctcggcgaatccccctgattgcaacaccaacccaactcgaagaacaccgtcgccgttcgccgccgtttcctgaagccgagtaaaattttctccgcgctactctccgagttcaacattgctcagaagaaaccaccatgtctccgaaactgctattattggcgaattagggtttgtaaattaggttttaatggcgaccgacactggtcccggtcgcgtcgtcacagagaaaggactggctacgaggtcttcgagagagacattaaggaagaatgcgcttgcgagcggttccgccacgaacgccactccgaatcgcaagtcggaacggctcgagaagcggacgccgccgtcgc

SEQ ID NO: 19718 - DNA, 490 bp, Glycine max
ggatgtgggaagtgatgcatgaatgccacaaacttcagtttcagatcatgtcagcagcatataacaacagccatgctagaatcaccatgcattcagaattacgtagacagattacttcctatcttgaaaatgaactccaatttctatcatcaagctttaccaagtggattggagctcagaaattctatctggaggctataaacggatggcttctcaaatgtgttcgtcatgaagaaaaatcatccaagagaaaaaggaagcctcaatctggccctagccgttatgatcttccaatatatgtcacctgtgcagtctggttggataaacttagtgacttacctgtaaaggatgttgccgattcaattaaaagtttggcgacagatactgcccagttcttaccacaccaagacaagaaccaaggaaaaggtgctcatcctcatatgtcaacatggaaggctgatattggtggtgaatcagcagatggtttatt

SEQ ID NO: 19719 - DNA, 356 bp, Glycine max
cttcaacagggcttggacggaacccggcgctcgttccccaccccggccggccgcccatagccagccctccgtcacctcttcaccgcaccctcggactgccccaaggcccccgccgccggtccagcgccgcgcagccaccgccgccggcgccgcctctccttagtcgccgccatgacgaccgcgtccacctcgcaggtgcgccagaactaccaccaggactcagaggccgccatcaaccgccagatcaacctggagctctacgcctgctacgtttacctgtccatgtccgtctccgctgcctgtctctggggatccctagtataacacattcagtgttcccctttcagtcttactac

SEQ ID NO: 19720 - DNA, 609 bp, Glycine max
gttggacttgcaagttgcaacagagacagaaaaaaggactcaatcacgaagcagaagaaacccaataagtatttctcatttttatggctcttgccctgaagtcaagttgcttcttgcaattgaagaaacctgaggctggtttcaatgtttgtttttcatctaagaaagctataatctccgtgaaacgacacactcccgtggctgctatcaggaccatggacgcagtgggactctctgcaacattcaccaggttgaaaaaagaaggaaaagtagctttcatcccgtatgtcactgctggtgatcctgacctttcaaccacagcagaagcactgaaagtgcttgattcatgtgggtctgacataattgagctaggtgttccatactctgatcctttggcagatggtcctgttatccaggctgctgctacaagatctttagcaaaggggaccaattttaatgtgattattgatatgttgaaggaggttgttccgcaactgtcatgtccaattgcactgtttacatattacaatccaatactgaagcgtggtactgagaaatttatgtccaccataagagacaagggtgtacatgggcttgtagtcccagatg

SEQ ID NO: 19721 - DNA, 812 bp, Glycine max
gacggagaaaacgaattcaattgtgtgtttggcttgcttgaaggtccacatcatttctcaacccacattgcatcccacttactccttgtagtaagggaataatgtaaattactgcataattaagcactatcctttaaatctatcaaggcaataatgactgattaggtacagtgcattatcatattatctgcaccattttactgtatttaagtatttgcatactttgcttaatgaagcagacaacaaaaccagcgggtatatatatagatatacatatctagggttaatgttatcagcgacgaaattaattgcaattaagtggcatagatcttgaagctgagaatcgcgtgcgccatgaatagaggtgaaagttcaggtggtggacagagctcgttggggtacctatttgggtcagaagagaagccaaatcagcctctgcccacaaggacagctccattaccaccctatggcattgacatcgataactccatgccccatcacggttctaactgccaacttgttgtctcaaacaaccgatctcaaggccaccacttgggaaacattgtaactgatcgtccgtcaacaaaagtcaaatcggtacctggtggtcattcatcgcttggatacttgtttggagataagtgatgtttctttctccgacattgattgatagcggtgttattctctgacaaggagaatccatactgcttatggtgtagctatatatgtgtggggtttgagtgaatcactaataatttgattttttagaatgaaaaaagaaaccaaaagataaatcaaataagagattaagt

SEQ ID NO: 19722 - DNA, 685 bp, Glycine max
tgctggctaaacctttctctcacataacataaggaaaaaggaacatattcactttagttacttcaccacaacaaaacactaacgttgttgttgttcacttcaccaagcattctcttatgctctgacagacactctggttggttgacatggattccaattccaaggccattttggattatgctttgtttcaactcactccaaccagaactaggtgtgcgtcgatcagaaaattaaaatctttacttagtggggtgcttttgtttttactctgtgtggttggttgatggttttctttgcagatgtgagttgttagtctttcgtggaggtgttcatcagaaaatagcttctgggttgtttgagcctttcgtttctcatctcaaattcctcaaagatgagatctccaaaggtggatactcaattaagcttctgcctcccaaccacggtgccttctggttcaccagagccacgtttgagagatttgtgcgctttgtcagcacaccggctattctggagaggtttgttagccttgaaaatgaaattcttcagatcagaagttcatttcaagctaatgctttttcaatgtccgttgcaactccagatgaaggatccgtgccacaagccaatggcatcacaaggaggttaagtgattctacaaagttaaatgatgtacttgaaggagttgaca

SEQ ID NO: 19723 - DNA, 502 bp, Glycine max
  unsure (1)..(502): unsure at all n locations
ccatcgagtcactaggggaaatgactggtagtttgcttgaaatgaatcaggatgttgccaaagtcattctagagtgccagcaagatatatggaacaagaaggacagagagctcttctccctggtggaggacttctttgaaaatagcctccagacattggacttctgcaacgctcttgataaatgcttgaatcgagcacgcgaaaggcatgttatagttaagtctgcaattacctgttttgaggaagaggtgcaaaatggggttgaagggtccacttatttgaagacattgcaagagcttaagggtttcaaggaagccggggaccccttcaccgaagagttttattcctttgttcagtcagtttatcaacagcaggcatcaatgctgaagaaattgcaaatcagaaagcaaaagcttgataagaaactgaaatccctgaaaacattgaaaaaggtgtcaaatgccattttcngggctgcttttgtgtctggtttgattttctc

SEQ ID NO: 19724 - DNA, 663 bp, Glycine max
gatgcatgtcatggcattggcaacatcaaggaacgggtccacgcccactcccactcccactcccactcccacggacactcccactcccacatcgaagatggagaagatactgacgttcgacacgtcgtcgtttctcaggtgttggagcttgggattgtatcacattctgttataattgggttgtccttaggagtttcgcaaagtccgtgtaccataaggccattaattgcggcgttatcttttcatcagttttttgaagggtttgcgcttggaggttgcatttcccaagcgcagtttaaagcctcgtcagcaactataatggcttgtttttttgcactgactacacccttgggtgttgggattggaatggctatctcttcggggtataacccttacagccccggtgcactcatcgccgaaggtatcttggattccttgtcgtcggggattttggtttatatggctttggtagatttgatcgctgcggattttcttagcaagaggatgagttgtaactttaggcggcagatactgtcttactgcatgcttttccttggggctgcattgatgtcttcgctcgcaatttgggcatgatgtccctcccctatatagctgtaatccctgctttgttcaatatttgatttcatatccgttttttttttt

SEQ ID NO: 19725 - DNA, 463 bp, Glycine max
acatgaagcccttgacttcacagcaggaggaacttttgtcttctgatgaccataataatgaaataactgaacaagggaatgttgacaacacggtggaacaaggaaatggtaaaatggaaggagacgtgcccaactatgatgatgctaagccactacaccttaatactgagcagcatgatgaaataaccagttcaagtggaagtgtctctgctgagggaaatgagccatcctttgaagagcggaggcttcctggaaatgacctgtttgaagaatcatctatttcatcatcagtcaatactttggtagatgagcaggttacaaatgataattatgaggttgatgaagttaaatctaaatctccaaattctggatcctttttctctgttcccggcattcccgccccatcagtagtttctgcatctgtacaagtgcttcctggaaaggttttggttcctgcagctgt

SEQ ID NO: 19726 - DNA, 829 bp, Glycine max
gaaagaagttcaggataaaagtagtgtagaatatcaaaggttaacgtgggatgctttgagaaagagcattaatgggcttgtaaataaggttaatgctactaatataaaaaatataattccagaattgtttgcggaaaacctgattaggggaaggggactcttttgtcgttcatgtatgaagtcacagatggcatctccaggatttacagatgtttttgctgctttggttgctgtcgttaatactaagtttcctgaagtgggggatcttttgctaagaaggattgttttgcagcttaagagagcttataagcggaatgacaagcctcaattactagcagctgttaaatttatagcgcatctggtgaatcagcaagtggctcatgagatcattgctcttgagttactcacagttttactcgagaaacctactgatgacagtgttgaagtagctgttggttttgtcaccgaatgtggttcaatactgcaggacctctcacctaaaggccttcatggtatctttgagcgttttcgtggaattcttcatgaaggagaaattgacaaacgtgttcagtttctgattgaaggcttatttgcaataagaaaagcgaagtttcagggctatccggctgtttcgtcctgaactagatcttgtggagcaggaagatcagataactcatgaagtctccttggatgaggagatagatcctgagatttcccttgatatattcaagccagaccccaatttcctggagaatgagaagcgttatgaagagttgaagaaatcaatgttgggtgaggaatctgaggatgatgaggaaggcttggattc

SEQ ID NO: 19727 - DNA, 580 bp, Glycine max
cagtaccctcttctctcgccgcaccctctccctttccctcctcaaaatcccttccagacccacctcctcccagcccgcccctaccccaaccccaaccccaacccttgccgggcccaccaaaaagcccctccacgtcctcttcacccaagccctcggcctctcccaaaaacccaccccctccgacgaagaagaagaggaggaagaagaaactgcctccgaaaccctaaccgaactcaagaacaacctgaagcagttagagcaagagattaagaccttcaaagacagcacaaaagatgttaccctaaaatcagagaagaagaagcagaagatgagcttgttcgctgtgtttaccaataagcagagggaaccgaaaccaaaggaggagtcactcgctgctgctaagaagctctcccccgatgtggcggtgttcgtgcagtacttgttcaagaaggggtatttcaacgacgccaatttcgctaaggggaggaagaactttaatcctgattggttctccaatgtcttcgccttaggctatatcaagtttgccgccaacaaattcgccagagatcatcgagaaatc

SEQ ID NO: 19728 - DNA, 967 bp, Glycine max
caaagccactcctttatctttaaatactagagatgccttgctatatctgaattcattaccttttcctcttttgatatcataatggcttctatttcttgtaggagtgctattttcagctttcttctcatctccatctttctttctgtttacaatattaaagtgtgtgaggcacaagccaggcctcccacagcgaaggggctatcatacaccttctacgacaaaagctgtcctaagcttaaatctatcgttagatcagagctcaaaaaggtcttcaacaaggacattgctcaagctgctggcttgcttcgccttcacttccatgactgctttgttcagggttgtgatgggtcagtgttattggatggatcagcaagtgggccgggtgagaaagaagcaccaccaaacttgactttgagacctgaggcctttaagataatcgaaaaccttcgtggtcttttagagaagagctgtggaagagtggtctcctgctccgacatcactgctctcactgaacgtgatgctgttttcctttcaggaggaccagactatgagattcctttgggaaggagagacgggctaacctttgccacaagacaagtgacattggacaaccttccaccaccctcaagcaacgcctcaaccatcctaagctccctcgccaccaaaaacctcgaccccaccgacgtcgtagccctctcaggcggccacaccataggcatcagccactgcggctccttcaccaacaggctctaccccacacaagaccccgtcatggacaagaccttcggcaacaacctcagacgcacgtgccccgccgtcaacaccgacaacaccactgtgcttgacatccgatcccccaacaccttcgacaacaagtactacgttgacctcctgaaccgccagggcctctgtacctacgaccaagacttgtacactgataaaaggactaagggcattgtcaccgact

SEQ ID NO: 19729 - DNA, 399 bp, Glycine max
  unsure (1)..(399): unsure at all n locations
tcttttagagaagagctgtggaagagtggtctcctgctccgacatcactgccctcactgcacgagatgctgttttccttaatttgataaaaacagtcaggaggaccagactatgagattcctttgggaaggagagacgggctaacctttgccacaagacaagtgacattggacaaccttccaccaccttcaagcaacgcctcaaccatcctaagctccctcgccaccaaaaacctcgacccaaccgatgtcgtagccctctcaggtggccacaccataggcatcagccactgcggttccttcaccaacaggctctaccccacccaagaccccgtcatggacaagaccttcggcaacaacctcagacgcacgtgccccgncgncaacaccgacaacacca

SEQ ID NO: 19730 - DNA, 670 bp, Glycine max
cctttgtatcctccggccgaggaccagaaacatacaccgagattcatccgaggtttacatcttttaacagatattttttcttacattaaatacatacggatgtatggaatcaaaccatgacaacatagtaacatactaggtttattggtctcccactctctatgttttttttttggggatttttgaattagtaataaatttttgtttttttcttaaatataggtagatctgagtcgtggggtttggtttttggatgaattatagatgttggcagtttgcagattggtgtaatgatgaagcattttgacctggggggtttcacttgtgcgcaaaaggttttcatcattacttccttttcgtttctttctttttctctgatcaagttatgatggtgttttgttgtcaggggggtgtaactacctttttcttcgttcatcattagccagagatcttctcccaagtatgttttcctgtatccgatctgtctgtttctgctatgttttctcagatctggccacctttgaaactcagctaaacattctcctctttttcaagcccctcctcttcctcccccttaatttttttttcattctacctttctctctctatttagggtttcctggcctatgttctgtctctaatctctactaagatttatttatgtgataat

SEQ ID NO: 19731 - DNA, 715 bp, Glycine max
ggtggacatggttactcctttgtgttcccaattaacatatgaggggctacttgacgagtttctgcacatcaacaatggttctgtagagcttgatgcatctattatgggtcttcagcaagaagggaagaaaactaaaggtccacttaattcaagtgacaagctttttaaggagatacgagatctcaactttgaagttgttgtccagattttgcgccaaaaagctacttccatgaagcaagactacacagaaatgacaactactacgcagacagtttccgagttgaaggactttgtgaaaaagctgaactcattgccagagatgaccaggcacataaatcttgctcagcatctatcaacattcacatcaaagccttcatttcttgggcaacttgatatggaacatacaattgtagaggcccagagttatgatatatgctttgagtatattgaagaactgatccataagcaggagcctttgacaacagtcttacgccttctaatcctattttcgattactaattctgggttgccaaagaagcattttgactacttcaggagagaactactccacagctatggatattgagcacatagcaatgctaaacaatttagagaaagctcggactttttaaaaagcaggagtcacaaagcaattggcttactagaaaacgtgctctacagcttgtggttgaagacagtgatacggccaacccca

SEQ ID NO: 19732 - DNA, 601 bp, Glycine max
ttggaccttacagctcagctagaaaggctttaatgctatgtttttaatcctgtggagggagagaggatgaacccacagcactgaaagtaacgttagaaacgagaaagtttgcattattcacaatttcgaaaactcactcacagtggagaagggagtcccacacatcctagcattaacaagaagaagaaaaaaaaatcaacgctttgggtttttctcttggctgcaacttttggtctctccgcagaatctcgttccaattggagttcatcctctaaaggggaaggtggtgtttggaatctgggaaaatgggtttgttttctgggatttttatgggggtgttgttcggcatcgcattgatggctggatgggcgcgcatgatgaagtaccgaagtgccaaacgaattgcaaaggcagctgacattaaactccttggatcccttaatagagatgatttgaagaaaatttgtggtgataatttgcctgagtggatatcttttcctgtatatgaacaggtgaaatggctaaacaagaaactgaccaaactttggccatttgtggcagaagcagcaaccatggtgataagagaatctgttgaaccact

SEQ ID NO: 19733 - DNA, 1178 bp, Glycine max
ccccttcacatttgttcggtgcaagtgaagtgtcacggttaaaaaagtgatctttttgttgcggttttccaagtttgtgggtgatgagcttcacatagacaaagaccaacgaggtggggcagagagaagaagagatggtgggaactccaattaacggaagaacaaggctatcttttggtgttgtgaatggtggccatgatcttggccccagtagtgctccaccaagcaatgctggctcagattatggcattatagagttcacaagagaggatgtggaggccttgctgaatgaaatggccaaaaggaaggacagatttaattacaaggaaagatgtgaaaacatgatggactatataaaaaggctgaaggtttgcatcaggtggttccaagaccttgagattagctactcactagagcaagaaaagttgaagagttcattggaattggcccagcaaaaatgcacggaaataggttgagatttttctttgtttcttttttcggaaagtcctcatcgagtttggggactaaggcggttagattcatttgattgcagagctgctgctaaaaatcaaggaagaagagctaaattcaattattgtggaaatgagaaggaattgcacttctttacaagagaaattggtgaaggaagaaacagaaaaaacagtggctgcggaatctcttgttaaggagagagaggctaggcttaactttgagaggtcacagagtacactacaggaggatcttggacgagcacaacgagagctccaaagtgcaaatcagaagatattgtcactcaatgacatgtataagcggttacaggattacataacaagcttgcagcagtacaatgggaaactccattcagagctttctacagttgaaaatgaacttaagagtgtagagaaagagaaagctactgtagtggagacccttaccatgttaaagggtcagcttactttgtctatggcttctcaagaagaggccacaaaacagaaggatgcattggctagtgaagttacatctctccgagtagagttgcaacaagtgagggatgatcgagaccgccaattatctcaagcgcaaactttaacatctgaattagagaagtctaaagattttacagaaaagtcctgctctgaactgaacaaattgactttaagaacaaatgaactggagac

SEQ ID NO: 19734 - DNA, 283 bp, Glycine max
gttctagcttgggtcatggttcgatgtatggattccttgagcctcattcaatacacaatacaaaggatagacgtggtcaatgtcaagattacattgaaagatgtgttaaggaatcccaacgagaggtctacctaggagtttatttgaatcgggcccgttggcaactggttgttttgtgtcctacaaacaatgttgtcgtgtggttttgttcgttgtgtaagaagcctgatgttcatatcaaacctgcaattaataagttaagttttatattataagtcattta

SEQ ID NO: 19735 - DNA, 490 bp, Glycine max
gacacaataataagtggagactctattgtaagttctaacagcactgagtaacggcaaagtccttgctggttgcttccattcgcgatggcgttgcaggagaggctagacaagttcaagaaacagcaagagaagtgccaaacgacactttcgaccattgcagctaccaaggccgccgcggcaacccaaaagtccgccacacatgcctcggcaaatggaagaaacgctgcccctgcggttaagttttccaacgacaccgagaggcttcagcatattaatagcattcgcaaggcccctgtgggtgctcagatgaagcgtgttattgatctccttctagagacacgacaagcttttacaccggagcagataaatgaggcatgctatgtcgacatgaaggctaacaaagatgtctttgagaatctgaggaaaaacccaaaagtgaactatgatgggcaacgattatcttacaagtcaaagtatggtattaaggaca

SEQ ID NO: 19736 - DNA, 1025 bp, Glycine max
ggggctttggagtgtgtgttcgggtcttggccgcgaccgacgaagatgttcacttcacgattgtctccatctctcctattccccgcatttcatcacaaactttattcgatttctcttctctattcgcaatcatcgctgttaactggtgcattctggaacactggctggttaatgattcatagtgttctaaaagcaagtaggtttcaaaatccacgtagagaagcccttgttttgaccattgctatcagtggttgtgtttgtcgtttagcatttagctcaatgaaagaaatcaattgtaaagtggattctagttcatgtactcttgcccccaatagggaaccctgcatcacagagtccttatcagttagtgggaatggtactactacttcatctatgagtgtaaaatccacccctgaaattgaaaagaagtttgttcatcatgtatatgatgctattgcgccgcatttgagtgccacctcgtttgccaagtggccgaaggttgcagcatttttgtcatctttgcctttgggatctcttgtcctcgatgccggatgtgggaatgggaaatacttaggtttgaatcaggattgtttttttataggatgtgatataagtccttccttgattaagatctgctcggacagagagcatgaagttctggtcgcggatgctgtgaatctcccttacaggactggtttcggcgatgcggcgatatctatagctgtgttacatcatttaagcactgaaaatagaaggagaaaggcaatagaagaattggtcagagttgttaaaaagggtggccttgttctgattacagcttgggctgtagagcaagaggatagtaagctgattaccaaatggacaccactgaatgagaagcatgttgatgagtgggtaggaccaggaagtcctcgtactcgggcgccttcatcctcatcattggaaagtatccccgaaagtgaggcgagtcgctctggtgagcacatggaagtctgcaatgagccacatgtatcaagagatttgga

SEQ ID NO: 19737 - DNA, 675 bp, Glycine max
tctaaatcaattatttcctttatcttgtttatgtactctgactctgtgagagagtgtttgtactttgtagtagcaagcgagcatggctccgaagaaggttcttctcctttgcggggacttcatggaagactatgaagccatggttccatttcaggcattgcaagccttcggtctcgccgtcgacgccgtctgtcccggaaagaaatccggcgatgtctgccgcaccgctgtccatgtacttgccggcgcccagacttatagtgagacggttggtcacaatttttcactcaatgcaacgtttgatgaagttgatgctgcaagctatgatgggttgtgggtgccaggtgggagggctccagagtatcttgctcatgttcctggtgttgtggaactggtgaccaagtttgtcagtttgggaaaacaaattgctagcatttgtcatggacagttgattctggctgctgctggagtggttaaaggccgcacgtgcacggcttttcctcctgttaaacccgtgctagttgctgctggtgctcattgggttgaacctgacactgaggcagcaacagtggtagatggtgatctcattactgcagctacttatgaggggcacccggagctcattcgccatttcgtgaaggcattaggaggaaaaataagtggttttgataagaa

SEQ ID NO: 19738 - DNA, 710 bp, Glycine max
atcgagccgaatcggctcgaggagatgaaacacttggtgagcttagcaagaaaaaagcaacagaaggtgtaagggttttaaacgcttgtttgggatgatagaacttcggttcctttgttaaaaaaagatgggttaatggccactcatgatcaagaaacagaggaggatttccggggcactgaagtgcattgtgttttatgccctcgcaatcctgatgatggtggaagctttgttcaggatttagaaatttccaccatgtttactcattaccagaaaattgtagtcgtggatggtgaattgccgagtggagattctaataagagaagaattgtgagttttgtggggggtattgatctctgtgatggaagatatgacactcaattccattcacttttcagaaccctggacacagcacatcatgatgactttcatcagcctaactttggtggttcttcaataaaaaaaggtggtccaagggaaccttggcacgacatccattctcgacttgaaggccctattgcttgggatgttttgttcaactttgagcagagatggaggaagcagggaggaaaggacttacttgttccactgagagaccttgaagatgtcattattcccccatccccggtaacttacattgatgatcatgagacatggaatgttcaattatttagatccattgatggtgaagctgctttagagttcccaga

SEQ ID NO: 19739 - DNA, 1072 bp, Glycine max
  unsure (1)..(1072): unsure at all n locations
ggggagagttttgaaaatatgattaaatggtattttactagtctactagtataatcacatggcagctacaaagatcagataatgctgttgggttagacatgcccaaattgaagaaccttttgcctggaattttcaaaaaccaaaagtatttgtagttctcccgaaaattgatcattatgtttgaaaataatttgtaattgagttatacatgcctccatctagcagtgcctctgctgtctagctataaaaattctgtacacactactaaaattagataataagtattctttctatctatttattcattttcttatttatgtttttgtttgtttcgaggatgtcattcggctaacctccttctctcaacccgatggcccgctgatgggaaatggttcctttaagtcctcatcactagttccaggtataaaagaaggaatatatctcggtccaccaccaaaagaatagcttcccaagaattctccacaaggatctgttttgctaggggcaatttcatatgggaagctgtcctttgttggtcagggagagaataaaagtcctgaaaagcaccctgcatcatatcagatttcttatatagttcccccaaataagattgatgaggacaagggaaaaggttcttccttatcttccaagaagaatgtttcagaacgtttaaaagaagaggtaagagatgcaaaaataaaagttctagcaagcctaaaacaagaaactgatgaagagcgtttggagtggaaagagctatctgccttgcttaaatcagaatatccaaagtacactccattacttgcaacgattttggaaggtttagtttcttggagtaatatcaaagacaaaatccatcatgatgaagaggtggttggtgcagccagtgaggtgattaacagtattgacagagaagagctagcaaaattttttgctctaaaaaatgatccagaagatgaggaagcggagaatatcaggaaaaagatggagttaacccgagaccaattggcagatgcactgtaccaaaaggggcttgcgctggcagagattgagtctttanaggacgtagata

SEQ ID NO: 19740 - DNA, 1108 bp, Glycine max
caattttatatgatttctgactcaaataagcgcgtatattcaagtggagatgtctatccaagctcttctaatcttcccaatggagaatatattttacagttatatttgaggcatgacaatgtgcagattttggaaaagatgaggcatttggtgttattcattgagcgaaatttggaagagaaggatgtcattcggctaagctttttctctcaacccgatggcccgctgatgggaaatggttcctttaagtcctcatcactagttccaggtataaaagaaggaatatatctcggtccaccaccaaaagaaaagcttcccaagaattctccacaaggatctgttttgctaggggcaatttcatatgggaagctgtcccttgttggtcagggagagaataaaagtcctgaaaagcaccctgcatcatatcagatttcttatatagttcccccaaataagattgatgaggacaagggaaaaggttcttccttatcttccaagaagaatgtttcagaacgtttaaaagaagaggtaagagatgcaaaattaaaagttctagcaagcctaaaacaagaaacagatgaagagcgcttggagtggaaagagctatctgccttgcttaaattagaatatccaaagtacactccattacttgcaatgattttggaaggtttagtttctaggagtaatgtcaatactgttaatcacctcattggctgcaccaaccacctcttcgtcatgaggtgattaacagtattgacagagaagagctagcaaaattttatgcactaaaaaatgatccagaagatgaggaagcggagaatatcaggaaaaagatggagttaacccgagaccaattggcagatgctctgtaccaaaaggggcttgcgctggcagagattgagtctttaaagttggcagacttgacttggtgtatattgtcaaaggacgtagataagtccccgactttggctgccacagaaggggcaaaagaagacatagaaaataaaaaatctacggatggtcgcagtcaaggagatttgtttgaagagaattttaaagaactgaagaaatgggttaatgtgaagtcaactaaatatgggatcctttt

SEQ ID NO: 19741 - DNA, 505 bp, Glycine max
gactggaaagaggatctctactccttcagaggcaatatatcttggccttggaacacactatgtgccatctggaaagttaggttcattcaaggaggccctcttggccacaaacttttcccaggatccacatcaggacatcaaagtacttttagcaagatatgagtccaaccctgagtccgaggcacagttgaaattgcttttaccccagctagtttctacatttggaggaaataaatcagtcactgaaatcattgaggagctaaaaaaacaccagtcaagcactgaccctaatgtcgtggagtgggctaatgaagctctccaaggccttggaaaaggtgctcccttttcccttttcttgaccaacaagtacttctctttggttgcctctgcagtggggaataatgacggcgaactatccacgcttagtggcataatgaaaactgagtatcgtattgcctgaggtcttcactacgacatgatatttcagaaggtgtccgagcagtgc

SEQ ID NO: 19742 - DNA, 1028 bp, Glycine max
gggcgtcaagattgatagttatccataagtgatgtttatccttaatttcattattgaggagttatatcaatttttttctaacacattttgttaatacattttttctaattagtatatattataatattatgagaaaaatttattaaataaggtgtgagcgtctaaaatcatgtgattttcatacatttcttaataagaaaaaagtgttcttagcacttctatttattacttagtacaggattttaattttaacgcttaaaatgtgacacaatttacatgtgaatctggacaagtccatgctgacaagaagtttgcctcgtacttcttaaattaacgtttttttttaagcacgtggttgtttggtcccatcgtgaaatttcatgtcgtgtctcattttatcgttggagtgagaaataggaaaggatatttatctatggcgatttgcaagttgaaatctttgctttctctttcgaaatgcaactctgcgttggtctcctcttcaatacgcgctttctcttcggcacaggttccccctaatcacttgcggaatgttggattcattgggcttggaaatatgggatcacgaatggcaaataatctgatcaaagctggattcagactcacagttcatgacctaaactctgatgttctcgagatgttctctcaaatgggagttcccacaaagaaaacaccttatgaagtttcagaagcaagtgatgttgtaatcacaatgttgccaacttctgcccatgtgattgatgtttacactggaccaaatggtttgcttcatggtggaaaactcctaaggccatggttgttgttagattcatccactattgatccacaaacatcaagaaacctttctgctacagtaactaattatattctaagagaaaaggaaggtgaatgggaaaaacccttcaagttggatgctcctgtatctcggagtgttactgcagctgaagctgggacacttacttttatggttggtggctctgaggaagcatttcttgctgcaaagcccttac

SEQ ID NO: 19743 - DNA, 435 bp, Glycine max
gattctttggcccttgccaaaaagccagagatttttggatttagttgggagagaaggatcattccaagggctcttgttgtccagtatttagtcgctaaaggcttgaggaaaaagagtgccagcatgattgtcccatttgctgtttctgataaggagtttcttgaaaagtatgtgatgcgatttaaggaggaagaagcggaactattaaagctgtaccagggaaaaatgagtggtcatggaaataaggaggatggtgcagctcctttaaccgtagtgtaatttaaaaaatatctaggtccatatttaatttattccatgttagtggaaataatgtcaagtgaaggctaactttgagtgattgatatgtttttcagacgtttagctgggaaatatatcatataacagctttcggatacagcattataggctagagct

SEQ ID NO: 19744 - DNA, 488 bp, Glycine max
ggcactgttgtttagttatttcagtgttgctggtagttgtattgtagtattatatccgttttgtaaagcataaagctttaagctgataggtaattggaggagcgattggggtgagatgatgatgatggtaaggatagggatgttttatggggaactgggttcttctactctttgtttatcccatcgctgcaataactctacactttcacatatacacaaacatccctctcctctaatatctccaaactatgctgctactcacactcacaacaaacgattagttgcttctgcttcttcagctccatcagttagcggttcaggtgctgaatattccgagcagatggtggatgtgggagcaaaaaagaaaaagaagagtatagcaggcatagatcaggacgaattagtggatccaaagcttttagctgatctagacagttgtttttgtgagttcacaggagtgcatatacaccacaagatatgtgatgccg

SEQ ID NO: 19745 - DNA, 499 bp, Glycine max
ggcatagtctatgtcatcttctgcccaggagcattcgactgaaaaagtatgccattagtaagactctctagaagccttaggagctatggagtctggtgaggtagctcttgtctcttggtcagctgtttccgctcgagtgaaaatgcttgatggggcgagatttgccttgggtgcgctttccgggtgaggtttaataaaaaaagtcaagtaggacagcggtgaccgcgaatggctatagttcgtcacttgcggtataaaaagaaaagtcaggagctttgaagatcagccctaagctaaagcgctttctttctagtttgagagatggaaatgcctaatcaagtagccaagaatcatcgatttcggaggggaaatgaatttaggaaggatccgatcccaagtgacattgaatcagttgggggtataagcgctgctatttcagcagttggtgttggaggactgaatgccagtcgaaaggcgcatctatgacttaatacctaat

SEQ ID NO: 19746 - DNA, 1263 bp, Glycine max
tttgacaattggcaatcgatgacattagtgaaccatggttaattaacttcaatgcttgctctagtagtatatagctcctctattttcttcaatatctctcatcttcctttcacatccgctcattaattgattttctcatctttctcctcttcacaagtaacaataacaaaggcgatgacacaaattctactgcatgggaccctccaagtcacaatctatgagctggataacctcaaggctggaagtggtggtaatattttaaccaagttggtacataacatcgaagagactattggtattgggaaaggaattactaaactatatgcaaccattgatctagagaaggcacgggtgggaagaaccagaatcatagaaaaggagcacacaaatcctaaatggtacgagtctttccacatttattgtgctcatatggcatcaagtattatattcacagtgaaagatgacaatcctattggtgcaaccttaattggaagagcatatgtccccgctgaggagatcttggatggcaaagaaatagacagatgggttgaaatatagatgagcatactaaacctatacattcactttccaagatccacgtgaagctgcaatacttccatgtttcaaaagacttgagctggggccaaggcattggaagtcctaaattccctggagtgccttacacttctcacacagagacaagggtgtaaggtttctctgtaccaagatgctcatgtcccagacaactttgtccctaaaataccacttgctggaggccacacttaccaacctcatagatgttgggaagatgtttttgatgcaatcaataacgcacaacacttgatatacattacaggatggtctgtttacactgagattacgttggtaagagattctaggaggccaaagcgtaggagatgcaacacttggtgagcttctcaagaaaaaagcacgtgatggtgtcagggttttgatgcttgtttgggatgatagaacttcggttcctttgttaaaagaagatggcttgatggcaactcatgatgaagacaccgagaactacttctacgacagttaagtgcactgtgttttatgccctcgaaatcctgacgatggaggaagcgttgttcaggacgtagaaattttctccatgtttagtcatcatcagaaaattgtggtagtggacagtgctttgccgaatggaagatcagataaaagaagaattgtgagttttgttgggggtattgatttttgtgatggaagata

SEQ ID NO: 19747 - DNA, 478 bp, Glycine max
ccaaaagatagagcaagtagaagagatagataaatggcaagcgagctaagcatggcggtggttggtggtggtgcctgccggaattgaattgaattgaagagagatgttgtttcaggtgggcgggcaaggcagtcgccccaccttcttcgagatggcggcggctcaacaactgccggcgagcctccgcgccgctttgacatactccatcggcgtcttggccttacggagacccttccttcacaaactcctcgacttcgaagacgaatccttcgccttactcatgctcgtcctcgaatcccacaccttacgaaccacagatgcttccttttcggaatctctctacggcctccgaagaaggcccgccaatatcgccctcaagaatgacgacgccactaccaccaccaccagcagcagcgcattacggaggcgccagagagttctttccgttgattttttggttgtgttgccgtatttgaat

SEQ ID NO: 19748 - DNA, 394 bp, Glycine max
gggcgcgggtgcggtagaacccttccactgtggtgactctgcgatggatctgatgcctgaattgaacgattatttggtttaattgttctgctggagctttcttaagagggtttggggttttaacgccaaagccaaaacaggagaaagaacatcatctcttcgctaacttgaactagcatggatgtttgctactgtgcccccatttttttgtttccattttgcttcatgactctatatttgaatctaggctttatatttggtccatggtcgtgcttttttttttgcttgccatttttcttttatgaaatggccattggttcttatctatgtttctcatattcgttctacgtctcgtatatggttttcttgctgtaaatgtttttggttatataag

SEQ ID NO: 19749 - DNA, 297 bp, Glycine max
tactgcgatgaggaaatcaaaagcagatgagaagattctcagctacaacgatgtggtgcttacgcgatctgatttacacatccttagtggtccatattttttgaatgatcggattatcgagttttatttcagctatctttcttcatgtcatccctatcaggatatcctgctggttccaccatccattgcattttggataatacaatgccctgtcgctgaggctcttggtgcattcatagaaccccttcatttgcctgatacgacactgggtatacttcccgtcaatgtctatgatga

SEQ ID NO: 19750 - DNA, 395 bp, Glycine max
tccacgcgtccgcccacgcgtccgcccacgcgtccgcggacgcgtgggtttctgaattatggtaatggcattgaagatgtttccgctgctctgcgttctgtctctttttgctacctcgtctattatcaccatcactcattccaagactgttccacccattcttgacgttactaatttcaaccgaaccagtttcccgcaaggctttgttttcgggacagcgtcagctgcataccagtatgaaggtgctgcaagggaaggtggaaaaggaccgagtatatgggatactttcactcataaatacccagaaaaaataaaagaccacagtaatgcagaagtaacggaagacgaaaaacaacggcagaaggaggagagaggaaacatgaagtacatgaatt

SEQ ID NO: 19751 - DNA, 417 bp, Glycine max
ggggagaagcacagaagggtggaggacaacataggatggccgacgttgctgtgtcaacggtcgttaccaagctgacggggctgctggtggaacaagcagtactggcggcggtgtctgtttcacacctggcaggcggaagagagcaagtggtgaatttgaacaacgaattggggtgcatgccgagctttctgagggacgcagatgcaaaacaagaaggcaacgaccgcgttcgcatgtgggtgtcggaaatccgagacgtggctttcgaagcagaggaactcatagaaacctacgtgtacaagaccaccatgcagggaagcttagacaaggtcttcagaccctgtcatctctacaaggtcaggaccaggatcgacaagatcctctccaagatcaagagcatatccgacaggcgcgaga

SEQ ID NO: 19752 - DNA, 411 bp, Glycine max
tggggggggagaagagtttgctgaataagagaccatcggggattaacgaactatgaattgaactttctcaatggctcagattcccaacctagacaatgctcctgtcaatctcacatccattagggagcattcgcaaaaagagctcctcaacatcctcaagaatgttcgaggaaagaagtgtttagtcattgatccgaagctcggagactctctctcgcttatcatacagacatccattctcaaggagcatggagttgaattgcggcatctttccggggacccaattcaaactgactgcagcaaagtagtttacattgtgcatgctcagccccagttgatgagattcatatgttctaatattcataatgatgtatcgaaaggactgcaaagagaatatcatgtttattttgt

SEQ ID NO: 19753 - DNA, 397 bp, Glycine max
  unsure (1)..(397): unsure at all n locations
ctcgtagtacgaatattattccaagttctaccatatagtgtacagcaagaagacacgaacaatggagttgtggaagctcttcgtaactgcattaatgccagttcttaaggtgctcctcattactgctgttggcacatctcttgctctgcaccgctttgatatactgagggagagtgctaggcagcacttgaatacaatagtatactttgtattcactccggctcttgtttgcagcatcctggctaaaactacaacatttaagagcctggttgcggtgtggttcatgccattgaatattcttctcacatttatcattggaacaacactaagatggttgtttatgaaaataactaaagcacctnctgatatgcaaggccttgtgttgggatgttgtgct

SEQ ID NO: 19754 - DNA, 763 bp, Glycine max
ggggcatttaaagctaaaattaattatttaagccgaaaagagcatccgactcgtgcttgctctctctgtggttttgggtctctctcactcacaggcacagcaacagcaccatggaaggcgcaacgatgttactgttgtcgccaatatcgagctgcaacgtgcgcagtaagcatttaaactactcactcagaaggcgtactgttattcttctcccagggcactgaaaatagtgagcatggcgaaggagggaagcgacaccggcaacggcgtggtagaaaaagcagccatagcgggtggattgatctcaaccccagtaattgcttggtctctctatactctcaaaacaacagggtgcggtcttcccccaggaccaggtgggtcaattggagcattggagggtgtgagctacctcgtggtagtgggcatagtgggttggagcttgtacactaaagccaaaaccggttcgggacttcccaacggtcctttcgggttgttgggtgccgtggaaggattctcctatttggcattggttgcgattgtggtcgtgttcgggttgcaattccttgacaagggttacatccctggtcctctccccgccgatcagtgctttggctagctaccttcttcattcgcttctcttgctttcgataatgtaataataatgtcagccactacaattctatcctggatggataaggtcgcaccgtcttgtcttaggatgtcattttccactacctctgttactaaacaaattactttgcat

SEQ ID NO: 19755 - DNA, 1101 bp, Glycine max
agacaataaagcagtctgtggagatgaggaatagtgtctgtcatagtgctacaatatatgccaatgcaataatgcatgctggaacaactgtggatactttcctcagggaaaatttggattggttgagcagagctactaattgggccaaatttagtgcaacggctggtcttggtgttatccatagaggccatttgcagcaggggaggtcactgatggcaccatacttacctcagggtgggactggagctggtggtagtccatactcagaaggtggtgctctctatgcccttggtcttattcatgctaaccatggagagggcatcaaacaatttcttcgtgatagcctgcgcagtacaactgttgaggttattcaacatggtgcatgtttaggtcttggtttggcatccttaggaactgctgatgaagatatttatgaagaaataaaaaatgttctctacactgatagtgctgttgctggcgaggctgctggtattagtatgggcttactcatggttggaactggcagtgataaggcaaatgagatgctcacttatgcccatgagactcaacatgaaaagattattagggggttagcattgggaatagctcttacagtttatggaagagaagaagaagctgacactttgattgagcagatgactcgggatcaagatccaatattgcgttatggtggcatgtatgctttggccttggcgtataggggaacagcaaacaataaggccattcgccagttactgcactttgctgtgtctgatgtgagtgatgatgtcaggaggactgcagttctagcattagggtttgtgttgtactctgatccagagcagactccacgaattgtttccctcctatcagaatcttacaatccacatgttcgatatggagcagctcttgctgtgggtatttcctgtgcgggtacaggtctcagcgaggctatctctttattggagcctttgacatcggatgttgttgattttgttcgtcaaggtgcccttatagcaatggctatggtcatggttcagatcagtgaagctagtgactcacgcgttggaacatttaggcgacaattggagaaaattattc

SEQ ID NO: 19756 - DNA, 491 bp, Glycine max
tatctctacctctctttatttgagataggtttgaatgcgagtcttggggaccttgagttttcggagaaatcgaagaaggaaaaggtgagaagcttgagtgctgttgccaaagcattatcaatgggttgccgtgtttctcactctcaaaaaccaaccaagaaatttaagcttcccataaagtttctgaaggactgcaatggcgttgatcatgcctctgttccacggaagatacgttcagctgtgaagaaacggggtcgcgaatccttctttggtgattcagaaaaggtgaaccataggatgaacggaatggaatctccccaaaaagatggcataaagaaatccaaaaaacaaagaaccccgggctggtccacgaggcaagtttcaccggggcccatcacaaaggatgaggaagaggttgtggagactctatatgccttggctggaatagttcccttcagataacgcctccaatgttgttaagagtgaacttg

SEQ ID NO: 19757 - DNA, 423 bp, Glycine max
ggatgaggaaccaggcgatgatgaagaaagcagtggccaaagacaatacaagcttcccatggcaaatatcattcctttccccaagagtaatgatccttctagcgctcctgatttccctcctggaaaacatgttttggcggtctatccaggaactactgcactttataaagcaacagttgttcaaggccctcgcagaaggaagaccgaggattacgtgttggaatttgatgatgatgaggaagatggatctttacctcaaaggacagtgcccttccgcaaagtggttcctcttccagaaggacatcgccaatgagtttgagtttaagctacttattatggttgtgtataaagcagaaactagaccattgcatatgtgccacttgtgtaatatgctccgtgtgatgtggtttgtaagaatgacat

SEQ ID NO: 19758 - DNA, 418 bp, Glycine max
ttattggggtttagaaatgtgacttttctaaatggggttgtggcagcgtgcgtgagttagtagatttcgccaaacacccttcccgcagaagtctatgaaccttgagttgtggactttataatataattcttcaaaatcaagcgcttcccattcatatagtatcgcctcatcgtgaccggaattcaacggaaccgcttcttcatcctccaccgtcctgggtaagctaagctagctgccatgtcgaaggataaagacgctaccaatctctcacgcaccttcaagtacctattagctactcagttcttgtcaacaggaattccatttatattcaatacatggattgtaaggcatcttactcaagaggactatgcgctgtatgcagttgcagttcatttgctagtcacatgtattttatttc

SEQ ID NO: 19759 - DNA, 738 bp, Glycine max
tgctttttttccttacccatcactctgatcgccgtcgcccttcttcaaactcagaaagcctctttttttagcctcacttctcattttcctcatctgggtcttcaaccttttcgatcattcacactttgcattaattgtactttgaatttcagtttttcccgttaattttgatcttcttccctttcagtttttctcattaagcgttgggaggaagaagaagaagaagaagaagaagaagatgatgggtgcaaagctgggtcttttgttgtgtgtttgtgttttgctgttggggtgttgtgtcggtagatttgtggtggagaagaacagtttgaaggtgacttcgcccaagtcgttgaagggtacatatgaatgtgcaattgggaattttggggttcccaagtatggaggaacgttggttggttccgttctgtacccgaaggtgaatcagaaagggtgcaccaacttcagtgatgtcaattttcagtccaagccaggagggtttcccacttttcttcttgttgatcgtggagattgctacttcactttgaaggcgtggaatgcacagaatggtggagcagcagctattcttgtagctgatgacaaggcagaaacgttgatcactatggacactcctgaagaagggaaagcaaatgatgattatgtggacaagattagtattccttctgctcttatcagcaaatccctgggggatagcatcaagcaggctctctctgacgg

SEQ ID NO: 19760 - DNA, 427 bp, Glycine max
aatttacagttgaacttaactcacacgtctcctccatcatttcgacacctttaagatttctatgcttttttcctttctcacgcatcactcttctgctgacccaaactcaaaaagcctctttttttggcctcacttctcattttcctcatctgggtcttctccctttgatcaaatcacacttgcattaattgcactttgaatttcagttttttttcccgttaatttcgatcttcttccctttccgagacacaatcaagctttgggaagaagaagaagacgatgggcacaacaaagctgagtcttttgttgtgtgttggggttttgctgttggggtgttgtgtcggtaggtttgtggtggaaaacaacagtttgtaggtgacttctccgaaatcgttgaagggtacgtatgaatgtgcaattgggaatt

SEQ ID NO: 19761 - DNA, 566 bp, Glycine max
ggaagcagctcacgatatggaggaggatggagctgataagggaacttttccaagtacaaggagtgttgagaaggtgggggacatgaagcaagtaaatgatgctgtgaatttgagttttgctactaaggattccgaggaattgaagtcaaggttgagtataatggatgcaaagctaagagaggctgaaggaaccatcatgaagttgaatgaagagaggcgcaggaacatccgagaaaaagatttgctgaagcaagagttggagatgttgaagaagaaaattaagatgaaaagagctcaggagggattcccgttactgtttgtctgtgtggtttcgattgtcagtatggcagtcggatattatattcatccataagggggaattgagtatagtcacagatgttccaaaatcatggtgttctccttaatgattcgatagaggacaattcgatgttaattcatatggttacactcgacgaatgttaatatgtgatacgttgaaaccttcctttctgaattgcttgtaaaatcaactacatctattaagaagagaatcataatatgcagcc

SEQ ID NO: 19762 - DNA, 599 bp, Glycine max
ggagacatttttttttcctcaccctcaaaatacgtttctttgagtccaaagcgcgcactgtggaaattcttaacacatcgtttggccaaaaccgaaattaacaaaaactcatttttccaatggagtgccagtttttccttcctccttaaaattgttccttcccccattcaatccctttctgcatttcagatctaagaccataattgggttcctcgctctctaaagaacaagggactccaatttgggtactgtactagtttataaagatttcatttttattataaaatatttaagggtgggggctagagaaggagaggaatggggttagttggggtccaagaaaacgggaacggtaatggagatggaatctctgagattccgttggggaccaaaacaaaatacatcaagatgacctctgatccagttgaggaagatgaagttttgcaaagcaggaagtatgagaccaagaaatatatctttgcatgtgccgtttttgcttctctcaattccgtgcttctcggcattctagatgtgggtgttatgagtggagcaattatattcattcaggaggatctgaagataagtgaggttcagcaaga

SEQ ID NO: 19763 - DNA, 389 bp, Glycine max
gatacaacagttatagtgtgaactcaactaagaataataataaaaaaagaagaaaaagaagcggaacaatggagctaactcctgcgagtgttgtttggtgacagttgaagtcgaacaaaagacggctagaaacgcggcatggcgtcgtcgaagcttgtctcgacgaatccggatctgccacgggacccttcttcttctatatctcccctttcttctcttctctccgatctgcaccccatggacgacctcctcaagtccatcacccccaattccgtcgacgacttctggaaggggatcgctgccgcctccaccgacaatgccggcggcgtgaccctcgaggatttcctcaccaaggccatccccgtcacagaggaagacgtcagaggtgc

SEQ ID NO: 19764 - DNA, 497 bp, Glycine max
gtgaacatgagagggaggaaaggagaaagaggagggaaaggattctggctgagaaagtagcagctaaagcaataaatgctatcaaggagcgggagaatatagtggccaaattagagggggagaaggaaagtctagagaaaatacttgaggagcgagctaaacaacaagcacaagaggcttcacagcttcagagcactatgatggaaacaatggaagctgttgagttagaaaagcagaaacataataatactagaatggaagttcttgcacgtttagctaaactggagactgtcaatgctgatcttgcaagatcccttgcagctgtgcagtggagccttgaagttgaggttaagcaagtggcagaactcagacaggaaatcactttgaaaggattggtttacgaaaaacttaaaaagggaatggccaattcttggcaaacttggactttaccaaatcaaattggtttaaaagggggttaagttgaaacggaaaatttt

SEQ ID NO: 19765 - DNA, 717 bp, Glycine max
cttgcgtgtggagtgaagaagattaacgaaggatggaatctgggtctagcgaaggagaagaggtgcagcaacgcgtgccgttgagggagagagtggagtggtcagatgttactccggttcctcaaaacgacggccctaaccctgtcgttccgatccagtacactgaagagttttccgaagttatggattactttcgcgccgtttacctcaccgatgaacgctcccctcgcgccctcgctctcacagccgaagccgttcaattcaactccggcaactacactgtgtggcaagttcgaattaaatgcttccgattgcatttatttttgtttatttcgtctttgttgcaggtgtggcatttccgacggttgttacttgagtcgctaaaagttgacttgaacgctgaactggactttgtggagcgtatggccgctggaaattctaaaaattatcagatgtggcatcatagacgatgggttgccgagaagttaggtcctgaagctagaaacaatgagctcgagttcaccaaaaagatactgtccgttgatgccaaacattatcatgcatggtctcatagacagtgggctcttcaaacactaggaggatgggaagatgaacttaattattgcacagaactacttaaagaagacatttttaacaattctgcttggaatcagagatattttgtcataacaaggtctcctttcttggggggcctaa

SEQ ID NO: 19766 - DNA, 606 bp, Glycine max
gggagtgaagaagattaacgaacgatggaagctgggtctagcgaaggagaagaggtgcagcatcgcgtgccgttgagggagagagtggagtggtcagatgttactccggttcctcaaaacgacggccctaaccctgtcgttccgatccagtacactgaagaggtttccgaagttatggattactttcgcgccgtttacctcaccgatgaacgctcccctcgcgccctcgctctcacagccgaagccgttcaattcaactccggcaactacactgtgtggcatttccgacggctgttacttgagtcgctaaaagtcgacttgaacgatgaactggagtttgtggagcgtatggccgctggaaattctaaaaattatcagatgtggcatcatagacgatgggttgccgagaagttaggtcctgaagctagaaacaatgagctcgagttcaccaaaaagatactgtccgttgatgccaaacattatcatgcatggtctcatagacagtgggctcttcaaacactaggaggatgggaagatgaacttaattattgcacagaactacttaaagaagacatttttaacaattctgcttggaatcagagatat

SEQ ID NO: 19767 - DNA, 582 bp, Glycine max
ggagtaagaataatacaaaaaatataccacggacccgcatatcaccggtatacccacccctctttccactgtaggagggactggagagtcagaaattggaacataagattgagacaccaaaatatagcttactatacacaacactgtgttgtgcttgtgaatctgccttcgaagagaatcagcacagcagcaacaatggaggcgccgccatttgcttattctgcttccacttcctctctcttttctcttcgcaacaagccactctcatcccctacaatcacccatttgggcaacaccaaaccatcaaagagtttctcggttggtgcctcctcttctagggattctgttgtgactttgcttgattacggtgctggcaatgttcggagtgtcaggaatgcaatcagattcctcgggtttgagatcaaagatgtgcaaactccgcaagatattctgaatgcaagtaggttagtttttcctggggttggagcatttgcggctgccatggaggtgttaagccaaacttggaatggatgaagcactatgttcatatattgacaaggatcgtccatttttggcatttgt

SEQ ID NO: 19768 - DNA, 622 bp, Glycine max
tgtgtacactatcccatcccccactatgtagtttgccaactattccccactatataaggctcttaatttttgggtattacatatcacaaacccaacttcagtattcctctcactacgtacacaacctatatataagtgtctgtgttttttcaaaatgttgtacaaatcatctgtgaggcctttaaaggtggtcatggctaatttgcttacagtgtttttgctaattgaggtgtttgcatatggctacagttacggacaatatggcttaaacacgaattactacttgatgagctcttgtccttttgttgaacctgttgttaagaacattgtcaacagagctttgcaggatgatcccaccctagcagctggtctgattagaatgcactttcacgactgcttcattgagggatgcgatggctctgttctgattgactccactaaggataatacagcagaaaaggattctccagggaatttgagcctgagaggctttgaagtcatagatgccatcatagaagagcttgaaagacaatgccctggggtggtttcatgcgctgatattcttgccatggctgctagagatgcagttttctttgctggaagcccagtgtatgacatacct

SEQ ID NO: 19769 - DNA, 392 bp, Glycine max
gaggaaaaaaagaagaaaaaaactggggagatattctgatcagaaaaattggggtttgaactttgaagcattaaggaactacgaaggcatcaatttctctttcttcttgggaagaattttcttctgcgcaccgaaattgcatcttctacagtggtccatctgttcttcttctttctgcttctgggttggtttgtctttgtatccttgatggaatggaaggagaaagtgtttcaagttcaagtaagtcacaaaatgatgtcatagagaaaatgtctctcaatgagggcatggaggatgggaatggggaagcgccagagcacggtctccaaaagttggtacaacttaatgaggaagttggagaacctaaagttgggatgactttcccttctgag

SEQ ID NO: 19770 - DNA, 664 bp, Glycine max
ggagagatgcgtgtttgagtctgtgtgtgtgaaggttgaacaagacccgaagcattcgcaacccccaaaaacgcggcgttttgaacggtccacgacacgaacatggccgaaacgtcttctacagaagaggatcacattcatattcccatcgaaattttcagcgacgacgaaatggctctaattgaagctgctttcgcttttgctgccactcgcactttctcttcagggggttcttcttcttcttcaaaattacccctttgcacaaacgccttatccatcacacctttgtccaaaagaaagttatcgagtgacattgaggatttacccacttgcaagaaaaaacacactctttctgattcttttcttcaccgcttcaggaacaaacggggcttggccgtcaccgatctcacttccacggaatggtgcccaaaacaaatggagttttctctccttcttggagggagaaaagtgaatgaagcaatgagagctggcattgctcgccatgcaaagcttgaacaagaggtcatatcttgtttgttacctcactcattcagcttcttacttcacccatcttactttacattacatgtcccttcttcacttgttattggtgatacaatgggttttttttttttttttggattaatcattgtaattaggacct

SEQ ID NO: 19771 - DNA, 596 bp, Glycine max
ctttctcggcggcgagagccgcgattcgagccgcaggcgcgccaagttctacgcggatttcgaggagcgtaacttttcaacgcatgccggaaagtgcggtgcatctaatgaatacggtgattatgaccatattaaaggtactcttcgacccaacggtgagacttgttatgatgcatttgcattgatgggtgctgttgaggagagtagtagtggcttcgattcccgcattgtgaaagagggtggtgagggagatgatagcgatatctcgaaagttgaagatgtagaggtcagaatggatctcaccgatgacctgttgcatatggttttttcgtttttggatcatcccaatctctgcaaagctgccaggatttgtaagcagtggcgaggtgccagtgctcatgaagatttctggaaaagtttgaattttgaagatcggaacatatctgtagaacaatttgaggacatgtgtagccgctatcctaatgccacagcagtgagcttatctggttctgctatttacttgcttgtcatgaaagccatctgttcattaagctgattggtctatgttgagaagattgaatatcaatgattctata

SEQ ID NO: 19772 - DNA, 780 bp, Glycine max
tgttgtcaagggagaagggaacttaatgggatctcaccacatggtggctgagccattgctcgcaaatgggttgttgaatcctagaactagtctaggctgtgatggtgtgggagaagtacttccttcactgggtctatgcggctctttttggaggaacaatcaagatcagactcagcaacaaaacaacgggttttgcacttggagaacatcaaagtagtggagttcaagaactttaccacaagctcaggtcatcgtcatcagcaattaattattgtggcagtgataactcaccagtgtttctaagcaacatggcttcttcttcctcttctttgtccaacattttggagtcatcttcagtttctgggagtgaattcgggtgctggaatccaaccctttcctggtctgatcttcccactaccaatggagcatatccttaattaaccaccgcatgcaataactactttcctcttttttgttcactgttcaaatttttcttttcgagttattagatatatagaactccttaatctatagtttatagatgttaatctgtatgctagagttttttctcgtgtttgtttggttgctttggggtggtggataagtaatatggatgtgtaggtagcattagatctttttaatttccactctcgcgtctttctatcatttgcttctttctgtatttctggatgatggtgtgtttatcttatctctctcaaatggtatttcaagaactaccagagagtttagaatgaatggaaaacacagtgtttgattctc

SEQ ID NO: 19773 - DNA, 245 bp, Glycine max
tgatgttgtggttcaacgtgacttgcctccactctgggaaattgatatgaatggaaaagttaatggagctgtggaaacttgcagaggggacgatcagtgggtaatgtctaagcattttaggaactacttcaatttttcccatcctcttgttgcacaacatttggatcctgatgagtgtgcttgggcttatgggatgaatgtatttgatctgcgtgcatggagaacaacaaacataagagagacat

SEQ ID NO: 19774 - DNA, 415 bp, Glycine max
actcgagccgctcgagccgctcgagcggtgaggttccggttaaacctgtggttgcagatgaaactagtactgagagcacaaacaatgatgaacttgaaccacacgaagagggttatggcgaaaaccccctcggtcaagaggcaatcttgtgggaaatacaaaggtgttcggatgcggaaatggggcaaatgggccgcggagattcgtgaccctttcaagggcacgcgaatctggttgggcactttcagcactgcagaagaggcttctcaagcctatgagaccagaaggcttgagtttgaggtcatggccaaggctctatctgatgagaagagcaacaatggcagcagcaacaacaatgttgttgcttctgctgaaactgaaactgtggctgcccctgaaaataacagttcaaact

SEQ ID NO: 19775 - DNA, 569 bp, Glycine max
acgacagaaagggattcattgaagtattacaattcaacctttatgggagctcggcgttgtagatgagctggatgtttccatttgagatgcaagacatcttactgccttccggcacaaatggtgttaaagacctacacatttctgcttctcatagtagtaccctggctctctttgcttctctaggaaagaaattatcactgctcagcttggacagcggcaaccttgttgtcaattatgacctacaggttcctgcatggtcttgttcatgggtctcaacaattcacattacatatatgctggactacagaatggttctgtcttagtgtttgatatgcgccaaactgcaggacccatgaaatcccttgttggtttgactagcaaccctgtgcatactgtacatgctcttgcacaaacttcaagtttgtcttctggtgttaaaaccatcctatctgcatctgctgttggcctttgtcagtggaacattgattctgaagagcgatggacttggaacatttccctgcatttaagacggccgcttatggttcctgaaactgataatcaaggagtct

SEQ ID NO: 19776 - DNA, 474 bp, Glycine max
agtgctatagagatagagagagagagagaaagaaaagagtgtatgtatttatgcgtttgtgtgagagatagagagatagagagagagaaagagttgttgataaaaacataattattttttcttcttggtctttggagggtcatgtagatgtagtagctatagatttttggtttatttgttgataccctttttcttctttatcttatttttgttttgaaatctgaaacctttcaaaatcggttttgggtgtgagtgaatctcgtgagttgagatttttttttctttctttctatctttgcaccgatgaggatccggaaaaggccggtgcttttcccttcttggctctcgccgttgcgtctctcagatccccacctgatcaaccggtcaccggtggtggtgcaactaagcgacgctacttccaccgcaccgaaactttcttcttcttctgctgctgcagtgttcctcaccatgctg

SEQ ID NO: 19777 - DNA, 445 bp, Glycine max
caacatcatatcataaaaggggagattttagatccattatggaggggtcagatgggtttatcagtagatgaacagaagaaaaagcaagaacagcggcttctgctgaatgacttaagaaacttagaagacaacactcaagattttgttagctgctgccaatcaagtggagttggctgctgccaatctaacggaggagactcttttttccgtcagaatcatgtgttattggaaaggagaatggaccccgatgttattgagtcagaggcaaagctctcagcagatagtaagagcagtgagactgtgatttctcggatcaatagtggtaaaggagcttcacgcaagtttctatccatgacaacttggctggatggctgggagcaagaagatacttatgcagctcttgctgttgtctgtgctgctgtgtcagttgccattggctataact

SEQ ID NO: 19778 - DNA, 540 bp, Glycine max
gaaattaccgttaaacgaaagtaagaactaacatctcgttcaccgcttgtactttggatgatgatgaggtgagtgtgtaacgagaaggtagggtagggtgcagattgcagaggattgggaattttgaatttgaacaacaatccgagcttgcttgtttcctcgttctgttctgagctctaatggaagcactatcccttcccataaacactctcaccaattcctctgccaaacaacacatttatctgagtgcttcttccaattatgcctcagtctcttcttccttacaactcaatccttctctcccaaccagacccctcactctgaggaaaagcgcggttcgagtccaagccgagaatgaggattttgaattgaagcaaatgagggacatggctgctgccagaaagagatgggaagctctgataagagatggaaaaattaaagttcttactcctagggaagctgggtatgcagttcagctatcaaacaagccccttcttgatgtccgtccctcaaatgaacacaaaaaggcatgggtgagag

SEQ ID NO: 19779 - DNA, 823 bp, Glycine max
cctacgcgtccggaaaccccaaaaggccaagggaaaacataagtgtgactttggtcgtagcaaatgcgtggtaccaaaaagatgcaattaaactattgaattggaagctgagtgagtggtagtgtgagtgagagagggagacccatccacttcttccatttccacgccttcttcattcacacaacacaacataacacaaaagcgctctctctaatatctagagacaggatttccaacacactcacctctcagagcgcgtgcccttcaaacatgatcatcatcgtcttcttcctaggacctgtttcagattcttcgtagaggagtactagggctgatcactggatctttcaaatttggaatgatttgatggggaatatgacttgcagcttcaacaagactgattcaattgagtgctgtgaagctgaaatgcagaaggctgattctcaggaatctggtcctgcgttgaagaagtcaaaaaccaaaattttggcctctcaaaatgtagataattgtgaaatggaagaaagtcaggatagacttagtgacatgccggattgtcttatccatcatattttgtcatttatggaaacaaaggatgcaattcaaacttgtgttttgtcgaagcggtggaggtatctttgggcttcagttccctgcctgagtttcagcagcaaatcattcatgcgtttggttaactttaagaagtttgtgctgtgggtcctaaaccatcgcgattcttctcatgtcaaacttcttgtttactaccgttttggggtagattatacgacagatcaaggtctattgaataaggttattgagtatg

SEQ ID NO: 19780 - DNA, 616 bp, Glycine max
ggtttactccaggcacacctgagtttatggctccagaagtgtatgaagaggattacaatgagttggttgacatatactctttgggaatgtgcatcttagagatggtcacttttgaatatccttatagtgaatgcaaccatcctgctcaactttgcaagaaagttgtatctgggaagaagccagaagctctttacaaagtagacaatcccgaggttaggcagtttgtagagaaatgcttagcaactgtgtccctcagactttcagctagggaactcttggaggacccttttctccaaattgatgattatggatttgactcaaaagttttgcagtatcaaagagattgttatgaagtaacgccattaattagacaacctgtgaatggaatttgtatcattaacaacaacttaatgagtggggacactgataatattggtggttatgggcctgtatctgaattggattatcatcaagacgattttgaagcgactgaaattggtctctttgattgtgaagaggacgacaatttggctgaagttgacaccacaatcaaaggtagacgagaagacgtggcatctttttgagactcagaatagcagataaggaaggtcgaatt

SEQ ID NO: 19781 - DNA, 419 bp, Glycine max
ggggaacagaaacaagaaaaaaaaactcccacaatagggatgaggagtgccgacaggattaattgaggtcagggactgaaagggggtgttctgttctgatcggatctgaaatcatcgggaaaatgtcgtcgtttctgcaccagagaagcagtctccagaacccattctcgaatccattcccggcatcaactccatcatcatcgaattcgaagaaatccctgtccatcatgggccccaccaccctcctagccctaatctccctcatagtcatactcggcgtcttctgcccctgggtgggctttccccagggctttcccttcactcccactcccacttccaaatgggctcactacactttagaacaagcgctctccttcgtcgccaaaaacggttcctccgtcatcgtctgcattgtgagc

SEQ ID NO: 19782 - DNA, 1225 bp, Glycine max
tattttttgacactcagtttctgcctcttattttttcttttcctcactttctctctctactttttctctttatttctagtcttctctgtctatcatagatcttgaactatcctggcaagaactcagagcactaacatcttgcagccacaaaaatgggcttctttctgttaccaaaagcaactccttgcattttgttcttggctctgctgtcttgtacttgctttacttctacagatgcttatgatccactcgacccaaatgggaatatcacaatcaaatgggatattataagttggaccccagatggatatgtggctgttgttacgatgaacaacttccaacaatatcgtcatatcgcttcacctggctggtcaatgggatggacatgggcaaaaaaggaggtaatatggagcatgatgggagggcagaccactgaacaaggggattgttcaaaatttaagggaggcattccacattgctgtaagaaagatccgacggttgtagatttgctacctggaacaccttacaatcaacaaattgcaaattgctgcaaaggtggggtgctcagttcatgggtgcaggatccaaccaatgcagtttcctcatttcaagtcagtgttggtagagctggaaccacaaacagaactgtcaaagtccccaaaaacttcaccttgaaagcaccaggaccaggttatacttgtgggccagccaagattgtggcacccactaaattcattacttcagacaaaaggagagtgacccaagcactgatgacatggaatgtgacatgcacatactcacaatttctggctcagaaaactccctcttgctgtgtctcactttcatctttctataatgatacccttgttccctgcccaacatgtgcatgtggctgccaaagtaactcgtctcggtcagggacctgtgtagatccagatacaccacatttggcatcagttgttgctggctctgggaagaataacttttcacctttggttcaatgtactcgtcatatgtgcccagtccgtatccactggcatgttaagcttaactacaaggagtactggcgtgtgaaggttactattactaattttaattacaggatgaattattctgagtggaacatggttgttcaacatccaaactttgacaatctgactcagctgttcagtttcaactacaagtcattgactccttatggttcaataaatgatactgcaatgct

SEQ ID NO: 19783 - DNA, 417 bp, Glycine max
ggcgcaagagaagagagagggagtaatggacagagacgaagcagaaaccatggagaatgtggaattcgatgcttctgagattgagtacgttagttacggtggcgagcatcacctccctctcgtaatgaacctggtggaccaagaactcagcgaaccttattccatcttcacgtaccgttacttcgtctatctctggcctcagctttcattcctggcgttccacaagggtaaatgcgtgggcaccgtggtatgtaagatgggggaacaccgtaacactttcagaggctacattgccatgctggttgtcatcaagccctacagaggaagaggcattgctacggagcttgttactaggtctatcaaggtgatgatggaatcaggttgcgaagaggttacattagaagcggaagtgacaaa

SEQ ID NO: 19784 - DNA, 423 bp, Glycine max
ggctaagcgaaaccaaaccaatctttttatctccaccctttttatttgggaataataataataataagcacttcaaggttgtgaagccttgaaggtgcatcaacacttgtgtcaacacaagaatgaggctctctgttttacttctagtgttcctcgcagttctggctgccacaaggcctagccttgtagactgtagggtccttccttcaccaaaaaacacagagaaagcccctcatgagcctctcaaagtgattcgatttctcatcaatttagtgatggcagaaaaggccaacactagtgagggtaatataagcaacaggggtttgactgagaacaaattccaaaccatgccttcagggccaagcagaagaggttcgggtcactagcaccatgtttcagttaatcaactatcactgctttttc

SEQ ID NO: 19785 - DNA, 846 bp, Glycine max
ggtgtttctcttttactccctcaactcaactcgaccacctctccccttttgcaattccaactctttagctagcaattagcatggcacaacaccaattacgttgtgcaatcaactctgtttcaagggtttctcttcaattctctaactaataactaaaagtaggtctttttttcttctggctgaggtccctctcgctgcttctttgaactccgacacagattagtgggcatatatgatggctgcgagctgggatggagctagtgaccctggcagccagtcagacgatagctttcattttgagaggttgcacattgagcctctttatgatgcctttgtatgtccgctgacgaatcaagttatgcgtgatcctgttactttagaaaatggacagacttttgaacgtgaagcacttgaaaaatggttcaaggaatgtagagagagcgggcggagactgctatgcccttttgactcttcaagaactaagaagtacagagctgaatccaagtatggctttgcgtaacaccattgaagaatggactgccaggaatgaagctgcacagctggatatggctcgccggtcattgaatatggggagtccagaaaatgagactcttcaggccttaaagtatgtccagcacatctgccgaagaagtcgatcaaacaaatacactgtccgcaatgcagggcttatcccaatgattgttgacatgctgaagagtagcagccgtaaggttcgttgtagagctctggaaacccttagagttgtggtagaggaagatgatgagaataaggaattgttggctgaaggggatactgttcgcactgtagtaaaattcctttcacatg

SEQ ID NO: 19786 - DNA, 407 bp, Glycine max
gacgaaacaatggtagaactagtatctcaatacccgagaacgtgtgaacgaaaaatagcgtttattttaaactagaagactagaagattacgtatttgattatgcaaagcggtgcacaaattacataatccagagtccagaactcacactatatatataagcaggacctaggcttcttctttgcactgcaaatcacttttctactttgagtcttcttgatccttctgtgtctccttgaactcaaacatggcagatgaggtggttctgctagatttctggccaagtccatttgggatgagggtcatgattgcacttgctgaaaagggtatgaaatatgagtacaaagaagaggacttgaggaacaagagtcctctactgctccaaatgaacccggttcacaagaagat

SEQ ID NO: 19787 - DNA, 675 bp, Glycine max
tctcgttttggttcaatctttgtcggcttctattcccttcactttctctttctctctttcctttttattttttcctcttatgcttttctttttggttttttccccctcactttgcgcttgtcgatctttgtaactagctataatgcaagcacctcaagctgcatcagccactgatgaagctcctgagatttcccatcaggctgtcccccagcgaaacaaagaagtttcagacagtggacccggtggtaggcgccctgatatttcacttcaagttccccctagacctacagggtttggcagcactagtggtgtaagggttctggatcattctcaaagtttcggtaaagggatttcatcatcaagaggcttcttgcgggccttgagcttcaaaagaaaaggaaatgtagcagatggcgaaagaagttccctccttaattcagaccccaagacagctgcagacagtcctaatatggcctccatatctgaaattgcatggaaaagatgtacttctcttcctgttacacctgcatcaaatctgtctccttcagtttctacgcccatttctgcaagggcatataatgaacagactaagcctcataaagatgttgattgttctaaggtttcaaggtccctttctgtacccgggcgaaatgttgttattgtaagatctgtctc

SEQ ID NO: 19788 - DNA, 939 bp, Glycine max
gtgtgattccacaatctccaatgcatacgaagagcttggctactctaaaacatcagcttttacggaataagcttgtatctactgcacgaaaaagcatgcggagaaatgttaatttgagccagttataccaaaatatgaaagaagcatatgatgaaattcagactccattggttccccaaatgccaactacattggggctgaaagaactgaaggaatctactattgaactggcttcaagtcaaggatatattgatgcccctgttgatgaggttgttttcgatgtggataaggatgttgatgaccttttgccagttgaagttaaagaacagcgcctcagcaatctgctgcaggcattgatggttgcagcttgtgttgctgctatgcctctcttgaagaagataccaacctcagtgctttggggttactttgctttcatggcaattgaaagcttgcccggaaaccagttttgggagagaatactatatcttttcactgctccaagtcgaagatacaaagtgatggaggaacaccatgcagcctttattgagaccgtgccattcaaaacggttgccatgtttaccttattccagacagctgacttgcttctctgctttgggctaacctggataccaattgctggggtccttttcccattgttaatcatgcttcttatcccagtacgccaatatttccttcccaagttttttaaaggagcccatcttcaagaattggatgctgcagcatacgaggaagcacctgctattagtttcaacttgtcattcgatgtaggtagtttgaaccattatcaaactagcataaaaggtctttcttttaatttgttccatttacaagtgagaatgcacaaaacatgctccaatttagtccttatcattagccattaggtttgtgcattgattttctttttcaaacaatcatttt

SEQ ID NO: 19789 - DNA, 597 bp, Glycine max
gatatcctattacaattggcactgcaattcctttgaaagcaagtttcttcatcacttatataatggttgatggatgggctggtatagctgcagaggttttgatgttgaaacccctaatcatatatcacttgaagaattttttcttggtgaagactgaaaaggatagggaagaggctatggatcctgggagtattggcttcaacactggagaacctcgaatacagttgtactttttgctgggtctagtctatgcttcagttacacctactgttcttcctttcataatagttttctttgggctcgcctatgttgtgttccgtcatcagattatcaatgtttataatcaagagtacgagagtggtgcagcattctggcctgatgtccattttcgtgtcattattgcactgatagtgtcacagatagttctgatgggactccttaccactaaagaggctgcttcatcaactccatttctaattgtactcccagtactgacgatatggttccatatatactgcaaaggacgtttcgaacctgcgtttgttagatatcccttacaggaagcgctgttgatcattctgatggctaataatccta

SEQ ID NO: 19790 - DNA, 608 bp, Glycine max
gttgtgttggttgtgctgagtcagggatcggcgagttggactcggggactgaggagactcgtgctgagtcgcgccaccgggttggggcatgtgggcttggagatgctgattcgggcgtgtcccatgttggaggccgtggatgtgtcccattgttgggggtatggcgacagagaggctgcggcgctatcgtgcgccgcgaggttgagggaactcaacatggataagtgtttgggagttactgatattgggttggccaagattgctgtcgggtgtggcaaattggagaggctgagtttgaagtggtgcttggagatttctgatctggggattgatcttctttgcaagaagtgcttggacttgaaatttctcgacgtgtcctatctcaaggtagcaagcgaatctttgagatcaatagcttctctattaaagcttgaggttttcattatggtgggctgctctttagtggatgatgttggattacggtttcttgaaaaaggatgtccactacttaaggcaattgatgtaccaaggtgtgattgtgttagctcatccggtttaatatctgtaattagtggacatggaggtcttgagcagttggatgcgggata

SEQ ID NO: 19791 - DNA, 738 bp, Glycine max
ctctctcttacctttgcatccattattaatgatcaagttctctttattcaacctctcaacaaactaaagagtgaaagatcacgctgaaggatccctgctaattaaattaaagcaacttaattagcagtatagcatgtccaacaatggcagcaacaacccttatgttcaaatttcccctcttcacaccaaccgtccaaagccaatggatacggtgtgtgatgcattaaaccgctgcagcaggaaggttggaaaagcaactagaagagctgagaccatggctgacaatttctggaatcatatcagaattggttctagtcttgctgatgcagcagtggctagaatcgttcaaggaacaaaggtgcttacactaggaggacctgatatattatttcaacaatcatttgggaattttccaggagagaagctcataaagtcatttgcttgctacttatcaacatctactggacctgtaattggaacaatatatgtatcaactaaaagagtagccttttgcagtcgacgtatccactgttgtcaattatccactttctcgcttgctagcaataacccagtagtgctgccatgtataatggtacgtcgtctgcaacctctgatcaagttaaagcaacggttagtcctttctcaaatagatttaaccctgcagaaaaatacatgcagcttgtcacagtggatggttatgaattctattttatggggtttatagcatatgacaaggct

SEQ ID NO: 19792 - DNA, 404 bp, Glycine max
cccacgcgtccgattccatgatgtgagtgggagtgagagatagccaacaatagtacgcataaacagaggtagtgcatagacctagctagctaagagggtggtgagtttcacattcacatagatacatacatcttattttttcattgggaaggaaaactctgagttaagttgcagagacacacgttaaccctgtgtgaagcctctgtgtctccacctgcattattcaacacacagtaacagcactggtagtagtagtagtagtgtttgtttgagagagagagagagagagacaacaagcaacactgttgatgcacagaaggaagaagatagactacacaatcccaagggaggactgatctgaatctgaatctgattcccaccatttactttgtacaggctataga

SEQ ID NO: 19793 - DNA, 906 bp, Glycine max
ttccagaaccccttattccttctcttaataaagagttgcagtatgaaccaccagtgctggagagtgctgctgggccacataccataattaatggcaaagaagttgtcaattttgcttcagcaaactatcttgggtttataggtcatccaaagctacttgactcatgttcttctgctttagcgaaatacggtgttggttcttgtggtccccgtggattttatgggacaattgatgtccaccttgactgtgaagcaagaatagcaaaatttttaggaacccctgaatcaattctgtactcttatggactttccaccatgttcagtgcaattcccgctttctctaaaaaaggagatgtaattgtggcggatgagggagtccactggggaatacagaatggcctttatctttctagaagcacagtggtgtattttaagcacaatgacatggattctttaagagaaactttagagaacattactgccaaatataagaaggccaagaatttgaggcgttatattgttattgaagctgtctaccagaattctggggaaatagcacccttggacgagatcattaaattgaaggaaaaatatcgctttcgtgttttgctagatgagagcaactcattgggtgtgcttggaagttctggaagaggtctcactgaatactgtggagttccagttgagaagatagacattataactgcttctatgggacatgcattagccacagaaggaggattctgcactggaagtacaagagttatagatcaccaacgattgagcagctctggctatgtcttctctgcttctttgcccccatatcttgcccgcgctgctattacagctattgatgtcctcggaggaaaatccccatctgataaaaaagctgaagaaaaatattgct

SEQ ID NO: 19794 - DNA, 406 bp, Glycine max
ggctgagaaaattggcatgaaatttgaaacactagtggtgagcgcgcttcatctttttacattccctccattttcatttcacgatttcctccctatcacaatcataatgactaaaagcctcctctcttcttcttctgcttaggattttactctcttcgcaaattcattttctacattcccctctctctcgaatctcaacaatgccttccgataccctagaaaaccagaaacctcaagtggaagaccaacaagacctagctgaagacagccacacagagcaggaagtcaattcggagatgaaggggagatgatggcaaaggcgaagaagagaaggagaaaagaggaggaggtagaaggcgatgaagaaaatgaggagaaggaggaacgtgacgagcttgaatcaaaa

SEQ ID NO: 19795 - DNA, 335 bp, Glycine max
caacaatcaacgtgaggttgcgtgacaggtgaatgggttcgaacagggcggaggtacgaggttcacagagattacaggctctgattcaccatctccactcttctattccctctgactctaacgaacccaattcaaaattcaccgtttggaagaagagagcagcagttctgatctgcgtcttcgaaggcgccgatgggaatcttcgagtatttctcacccagcgggcttcctctctctcaacccactccggtgaggttgctttgccaggtggcaagagggaagaaggtgatgctgacgatgtacaaacagcgctgagagaggctaaggaggaaatt

SEQ ID NO: 19796 - DNA, 351 bp, Glycine max
cacacaagctatttcactatccttgtgttaatttgcccgtatcatcaccatcatgggtgtttttactttcgaggatgagaccacctctactgtagctccagctaggctttacaaagctttggttaaggatgctgataacctcgtcccaaaggcagttgaggccatcaagagtgttgaaatcgttgaaggaaatggtggccccggaaccattaaaaagctcacttttgttgaggatgggcaaaccaagtacgtgttgcacaaagtttgaagcaattgatgaggctaattggggatacaactacagcgttgttgggggtgtggggttgccagacacagtggagaagatctcat

SEQ ID NO: 19797 - DNA, 393 bp, Glycine max
gtctgaagctactcagatcaacagtgcagaatcagctcatgctgagattcaggaattgaagatggagcttgataaaactctctttttggtagaaaagctaaaaagtgagctaagtgattacaaagaatccgaatccagggccttggaagtagttggtaaaatgcaaatgcaattggaaacagcaaatcagactgtggaaactcttaggtccgatggcatgaaagcagcagaagcttacaaatctttggcttttgagttggagcaatcaagaactcaagcaaaatcattggaagcacttgtgagtagacttcaggctgatttgcttagcaatgctaacaaaagtatgttaagtccaactccaaccaatgaaaatgaaccttctcaggaaaatga

SEQ ID NO: 19798 - DNA, 449 bp, Glycine max
ctattgcacacggatctctatagcctaaaccctctttcacatattattctctctctgtcttctttggctagatggaaatgaaaagtatgaagcattaatcacttctcttccctcgtttcagttattgggaaatttttgctgctgtagtctttgctgttttgattcatttccagttcatcattgggagatattagtatttgggagttacggtgtttgctcaaagatgattactaacccttcattgcatgcttcaacattgccaagtgctttatcttcatctctgattactctacatggaagttctgtaaagtgtatgccctgccttccatttagagccctaagaaaaatcaactggataagagctacatctgctgcagatggagggcctattgagtcatcgccagctttgggatcaaaaaatcctcttgcgggtggtttggacattcctc

SEQ ID NO: 19799 - DNA, 584 bp, Glycine max
  unsure (1)..(584): unsure at all n locations
ctataagacgacagaaggggggagaaacaaggcaaagcaccacaagttgacagagagagcttatatattattaccgtcaattcttataataacacttgcaaatagagcattatcaactttcacctttcataggtatagtaaagtgatcattcagggaatagaagcctgatcaggttgaatgtacagtactcatcagcaacatcaaggaaagaacattcactcttcttcttcttcttccagaatgccaatcccttctgagaggcatatgttccttcaaacaggaaatggctctggtgattctggacttgttctctcaactgatgctaagcctagattgaaatggacacctgatcttcatgcaaggtttatagaagctgtgcagcaattangaggagctgacaaggcaactccaaaaacggtaatgaaactcatagggattccgggtcttaccttatatcatctgaagagccatctncagaaatacagattgagcaagagtctgcatggacaaagtaacaatatgacacacaaaataaccataaattcaggtgcagcaacagacgaaagactcagagaaaataacg

SEQ ID NO: 19800 - DNA, 657 bp, Glycine max
  unsure (1)..(657): unsure at all n locations
acaagggatctggactctaaacaaagtcactgcttctctagttttgcaacatcaatcttggctcagagagaggttgcaacttgcaaatgcaccaccgactgattattgttcaaacttcaaacttcgaaatcaaagtttctgattctgtctatttccgagctcacccttgatttggtttccttatagaggatcaaaagtcaaaatcataatcaactacaacccaccaacaccaccatgcagaggtggaagtggaacagaaagaaaccccccatttgccctttgcttgcgcttattttattgattttcatagccttctcaaccctccacagtgaacacaccatacaacgaatccatgaaaatccagatcatgttcacaaccaccgagaagtttcttcagccacctgtgtcaaaccaaacctctctggtcacctaaagcaagcaccagaggttttggatagattcagtagatgcaactccactgcggagtatagtggccggaaaattgcttggctcggcgattctcggcattccggtcactggagtgcgcaggccggagagttgtgatgttttttcaggcaaatgggtgttggataatgtttcacatccactttacaatgagtcagattgcccttacatgtcgtgacaattnggctgtca

SEQ ID NO: 19801 - DNA, 357 bp, Glycine max
gcaacttgcaaatgcagcaccgactgattattgttcaaacttcaaacttcgaaatcaaagtttctgattctgtctatttccgagtactgactagtctttattacataccagctcacccttgatttggtttccttatagaggatcaaagtcaaaatcataatcaactacaacccaccaacaccaccatgcagaggtggaagtggaacagaaagaaaccccccattttccctttgcttgtgcttattttattgtttttccatggattcgttgtatggtctgatcactggggagggttgatgaggctatgaaaatcaatatcatgagcacaagcaaagggagaatcgggggttacttttg

SEQ ID NO: 19802 - DNA, 560 bp, Glycine max
ggttcaccttagaaaaagccacttgacaccatggccacggaaggccatatcaacccattgttcaaattagcaaagctgcttcatctgagaggctttctcataaccttcatctgagatgagtaactctacagagagaaagccacatgcactgttgacaccattaccacttcaaggccatatcaacccattgttcagattagcaaagctgcttcatctgagaggctttcacataacctttgtccacactgaatacaacattaaacgcttgctcaactcaaggggtcctaaagcccttgatggccttcaagactttcattttgagaccataccagatagtcttccccccacatatggtgatggtgatgtcactgaagacgcagtgtctcttgctaaatcagtgagagagaagatgctcgtaccctttcgcgatcttcttgctcgtcttcaggattcttccactgctggccttgtacctccagttacttgcttggtttctgattgttccatgctttttactatacaagctgctgaagaactttcacttcctattgctctatttt

SEQ ID NO: 19803 - DNA, 557 bp, Glycine max
ggtgaaaccaaagtggtgtctgacaaggcagtggagaaatttgactggaatcccttacattacatcaagaagtcatctgatgttggtgtggaaaacaaaactgagcagggggactcaatagccatgaaaggaaggagtatgctgtactcaaaactagggtgccaacaatctaaagcaattaggctatttttgcgtatgaaaaggcttagatatgttgaaatcaacatagatgtgttccccggtagaaaggtggagctggaaaagatttctggatctgcttctgtacccaaggtttttttcaatgaaatactaattggaggctggaatgagctaaaaaacctggatgagtctggtaaacttgatgagaaggttgactttcttattactgaagcaccattatttgaagccccatcaccacctctctctggagaggatgatgtgtccagtagtggaccacttgatgaattggcaattattgtccgtaaaatgaaagaatctattgctgtgaaggatcggctgtataaaatgcgcaggttcactaactcttttctcagctc

SEQ ID NO: 19804 - DNA, 500 bp, Glycine max
atcctctgttgagtttgattcctatttactcaatgtcttctcaagctccacctgctggccagtatccttctgggttttctccgtttttcccatttggtgcacctcagcaaactccaactggggtgacgacaaggggtgctgccacacccgcgccatcgacggcttataagaacccactggccccacgagactctagttcaacaatgaacgggttcaatgctcaagatacttctgggaagaaaaaacgtggatcaccgtcgcgccacaccaaatcatctgtaaataagcctaagaaaagtcaagagccacctgctgatttaagtggcttagttggtattagccctgcccaaacagaagatggtagccgtgaagtggttaatattgtgctcatggcctatgatgcacttcggagaaagctctgccaactttaaaaggcaaacgaattgaactcaagttcgatcaagcgtgcagattttaaagcttgcaatactttgaagacc

SEQ ID NO: 19805 - DNA, 486 bp, Glycine max
gggcacctgacaactaagaagagaagagactcaactcaacaatggcttcttctattcagtgttcagtttgggttccttcccttcccaacactaacaccattcgctttctttctgttaacccaaactctgttactttctcttcttcttcccttaccagaatcagagcctcctcttcctccccaaccgtcgaagaagccgctatgaacatcgacaacctccgacgtttcatcaaccttaactccggaaagtggaacggctctttctatcaatttgattcatgtgggaatatgttgcaacaactgagtaccaggctttctgctagctcttatggggaagatgaactcatgagtctcattcaaacgctgtatattaaacaaccttcatcaagtacttcaatttctggagatgacaatgatgcagaatgggcagagtacaaaattaaggaaaccaatatgtttactgttgacaaatatcaacaaataggct

SEQ ID NO: 19806 - DNA, 440 bp, Glycine max
  unsure (1)..(440): unsure at all n locations
tatcgagccgaatcggctcgaacatggcatcgtccaaggtagcgacgacgacgacgacgacgacgaattcggatatttcgagccagcaggtatgggacggcgccaccatggagatggagtctcaagacaacatgaacatgagcatgagcctccaggatttgttgaccgaaaacgacgccgtgccaccctctcatagtcatggaaggggaaagagaaaaaccctagtggaggaacccctcgtcgtcgataaggtcactcttcagaaacagagaaggatgataaaaaacagagaatctgccgctaggtccagggaacgcaagcaggcttacacagttgagctagaatctttggttacacatnctttcgggaggaagagaatgccatcttgttaaaacaagaggccgataggaaaaggcagaggttcaatcagctcatggagt

SEQ ID NO: 19807 - DNA, 437 bp, Glycine max
cggcaaggcaaggctaaggttgtggacgagaaaggtgttcagtgtccaagcgttgagaagggaagaggtacacatggcaagtggcaactgacctcattgttgatagttgatacttggcctcgaagatgcacttgctactatccaagtccccactattactgatacataattcttctatgctcctccaccgcttctctcctcttctcctccctccttttctctttcgccaaccccccttcccctcttcgaatttcaaacctctcacactcaaggtcctctccatggcatcgtctcattcctcccaccacatacacactaatcgactcgcttccgaacagagcccctatcttctccaacacgctcacaaccctgttgattggtatccctggggcgaagaagccttcgccgaagcgcgccggcgagacgcgcctatcttc

SEQ ID NO: 19808 - DNA, 610 bp, Glycine max
ttgagttgggaaactctagttatcccatggtcttggtccaagtcccaatgtacaacgaaagagcggtttatcagctatcaatcggtgctgcttgtggcctttcttggccttcagacagaatcatcatacaagttcttgatgattctactaacccaacaatcaaggagctggtgcaaatggaatgtagtagatgggcgagcaaaggggtgaacataaagtacgaggtgagggacaacagagacgggtacaaagcaggggctctgaaagaaggcatgaaacgcagctacgtgaagcaatgtgactatgttgccatctttgacgccgattttcaaccggagcctgatttcctctggcgaactgtcccattccttgtcaacaaccctgaacttggtctcgttcaggcacgcttgaaagttgtgaatgccaatgaatgtttgatgaccaggatgcaagagatgtcactggattaaccatttcagctgtggaatcaagaagtggggtcttgcacttatgccttctttggcttcaacggaactgctggtgtatggagaatttcggcgctgtatgagtctggagggtggaatcataggaccacagtggaagatatgga

SEQ ID NO: 19809 - DNA, 665 bp, Glycine max
gtcgtgtgaagatgacgtggctgctgttgttgttgagagtgatgttagggaggagattgtgaaggggttgagtgggcttagagttggtgaaagagttgtttcggagagtgagggttcgagtggggatcttcttccctccttgttggtggtggttcgtgtccccctccacctccggtgccgcctcccaagccttccgtgacggggaacttgaattcgaggaggagtgtggccgggagtttgaattccggcagcgtcggatcgtcgaggagggcagttacgtggccggttgtttcggctaggacttcacctgctgggtctaggccgtcttctcccaggtcacataatgaaagtgaggggtacaacagtgctgatgaacagaagccttgcctggtttcatcttatgatgattttgaaagggagcggcagtttgaaattgatatcagaagggcaaaaggttatgaagtcaaaaaaatgatggaggatggaaattgtcttttccgagctgttgcagatcaggtgtatggggactctgaagtgtatgatttggtcagacagatgtgcatagattatatggagcgagagagagatcacttttctcagtttataactgaaggcttcacatcttactgcaagagaaaaagaagagataaggtctatggaaacaa

SEQ ID NO: 19810 - DNA, 568 bp, Glycine max
ggtagtataaataaaatagtgaacacttggaaaacgacagcccgtttcatcaaatagaaccgtagaggcctaaacgacgtagcgcgcaagcaagggggaaaatcgcgacctatataaattagggtttttcaaaatcagatacagacggaacgaagaacagttagtttgagatttaggacttgatggatacggaagaaggagctcatggaaagggaacacaggtggtatctttgattgagaaggccaccaactccaccgcgccggaggtcgatccccgcctcctaaaggccatcaagacggtggttcgctattccgattcggagctccgcctcgcaacccaaacccttatggatctcatgaagcgtgaccactctcaggtcaggtaccttgcgcttctaataattgacgagctcttcatgcgttcaaagctttttagggcccttgttgttgagaacttggatcagttgctgagtttgagtgtcgggttcaggcgaaatttgccacttcctgctccgccagctgttgcgtctgttttgcgttccaaggccattgaaattttggagaagtg

SEQ ID NO: 19811 - DNA, 693 bp, Glycine max
gcaaagatgagtagtagcggcgccaagaggagcggtcccccaaagcaccagaacaagtacgcttggaaacccaacgctggtcgcaaaatcaacgaaactgaagttggaggaagattcagacccctctctgagatcactggggtgtgccctcgttgcaaggatcaaatcgaatggaaacgacgttatggaaagtacaagcctcttcttcaaccagccaaatgtcagagatgttccaagcgtgctgtacgtcaagcttaccatagcttgtgtcctggttgtgccaaggagcatggtgtatgcgcaaagtgttgttgcagtacgaagcaaatagttggaagggatatttcagaagttgaggctgagcaaaagatgcttgaggaggccattaagaactctcgggagagagaaaggagatccttattgcgtgctatgaacaaagacaaatctaaaagttcaaatagcgccccaactgatactaaaggtaacaaagttggacaattatttccaaatgcgtcacttgaagactatgccaaactgaatagagttaatgtgggtcatgacgatggtgaaatatgtgatgatagtgagggtgaagtttgtgaagatgaagatgataacagtgacaatgaagattgtgatgaagatggaaacagtgacgatgaagacggtgacagtgagaatgaagatgtgatg

SEQ ID NO: 19812 - DNA, 492 bp, Glycine max
aagacaaaaggttcaaactttcaagaagagattaatttgccaaaactttgcagtgaataatcttgaaaatgaaatcaatacagcattctcactgatcacgatcgcagctttcgatctccaccttttccctaggactctatcgtacttatcttgtcggtggtgctatgaatttcttgctgcggtccacgacgggcgtgtacagagagccttctccgtcgattccggttccggagccgcgtgttgatacgcatcataggtctgcatctgctggatcttctttggagaatcgtgtgtctgatgatccgtatgcgtggtatgatgcaagggttgttagtggcgtgttccttaagcacgtggatgttgctgaggatgaaggatgggttaccattccatgcaaggaacttcctgaaaactggacttgtgcaccagatatacagtctctgtgctctcttgatcgctcctttcttttccctggatacatcttcattcaaa

SEQ ID NO: 19813 - DNA, 527 bp, Glycine max
ggagggaagtggaagctagtagtccgtttcagcgtgtgtgatactttcctttcatcttcttcttctctctgcgataaaagcaaaacctaaaatttggtttaggcataggaatctgttgtagagttgatctacctggaatggagggagcatcgtggaatagtagtgtttgtgtggcaccgtttctgagcaagacctacgacatggttgatgatccttccaccgacttagtggtgtcgtggggcgaaaacaacaactcctttgttgtttggaacgttccccaattcgccacagacatcttgcccaatcattttaagcacaacaacttctccagcttcgtcagacagttgaatacttatggttttagaaaggttgacccagatcgatgggaatttgcaaatgaaggatttttaagaggtgaaaaacaacttttaaaaagtatcagtaggcggaaatctgctcatgtaaatggtagtcaacaagcatctcaagtgcataaatcaactgctggagcatgtgttgaagtgggg

SEQ ID NO: 19814 - DNA, 449 bp, Glycine max
gtgtgatacttttctttcatcttcttcttctctctgcgataaaagcaaaacctaaaatttggtttaggcataggaatctgttgtagagttgatctacctggaatggagggagcatcgtggaatagtagtgtttgtgtggcaccgtttctgagcaagacctacgacatggttgatgatccttccaccgacttagtggtgtcgtggggcgaaaacaacaactcctttgttgtttggaacgttccccaattcgccacagacatcttgcccaatcattttaagcacaacaacttctccagcttcgtcagacagttgaatacttatgtgggcatcacatcactttttctcccatcattatcatcttatcttatttcttcttcttcttcttcttcttcttcttcttattattattattattattgctttttgcttatgctaaacccctctttttc

SEQ ID NO: 19815 - DNA, 419 bp, Glycine max
cgacgcgtcagctgatgccagaagcgacagtaggcgggtgaccaaagtgtgatccatccacaagtggaaaaccgatccctttcctcacagtaatgctaccataattaacactgtctatctagagtgtttgtccgatccatgacccatggcgccagccactccaagatttgttgtgccaatagacttgaagaagaatccatgggaacaaaacgctcctctccataaccgatggcaccctcacataccgcacgtggcggctgttaataccggtgaagtcttcagggtagagatggtagattggacacgaggtgctattaaagacaacgattcagcactagacataaaatttctagacctctcaactgtccattatcttagtgggccaatcagaattctggataatgatggggtcccagccc

SEQ ID NO: 19816 - DNA, 786 bp, Glycine max
  unsure (1)..(786): unsure at all n locations
gatattcaagaactagctgataaattggagattggtcataagttttatataattggtatgtcaatgggaggttaccctgtttggagctgcctaaaatacattccacacagattatcaggagcagccttggtggctccatttataagctattggtggccttcttatcctgaaaatctactaagagaagcatttctgatgctaccttactcagaccaatggacttttcgagtttcacattatgccccttggttgttctattggtggatgactcanaaatggttcccttcattgactttgacaaatttgttgtctcctgatgatatagagatcgtgaagagcttgtcagaactccaaaacactggccaggagaggataactcagcaaggtgaatatgaatcattacaccgagacataatgagtgcttttggaaagtgggaatttggaccaacagacataacaaatccgttccctgataataatggttcggttcacatatggcaaggctttgaagataggatcattccctacacgctgaaccgttacatctctcacaaattaccgtggattcgttatcatgagcttcctcatgcaggacatctatttctcttcaagaaaaatgaatgtgagtctattatcagagcacttgtactcacatgatatttcgtaatatgatgtagtgtgcggagtaaaccattggtcttgtgaatgcgatggcaacaaaactttgtaagcagttacgatatatatttttttaaatcttaagagttgttcttatttttacaatat

SEQ ID NO: 19817 - DNA, 761 bp, Glycine max
cttttactacatattaacttgattagaaaaaagatgtgacctcagaagcaagctgaagaagccatgatgtcaagcctcactcaaacgatggagcgggaggagggagaggaagtgataggggagacctcaaattttagctttaaaaatgctctctggcatggtggttctgcctacgatgcttggttcagctgtgcctcaaatcaggttgctcaggttctgttgactctgccttactcattctctcagctgggaatggtttcaggcatcatattccaagtcttctatggaataatgggaagttggactgcttatctgattagcattctgtacatcgagtacaggaccagaaaagagaaagagagtgtcagcttcaaaaaccatgtcattcagtggtttgaagtgttggaaggtttactgggtccatactggaaagccattggcttggccttcaattgcacttttctcctctttggatccgttatccagcttattgcttgtgcaagtaacatatacctcataaatgaccacttggataagaggacctggacttacatattcggagcttgctgtgccaccacagtgttcgtaccttcatttcacaactacagaatttggtctttccttggccttggcatgaccacttacacagtttggtacatgaccatttcagccattgctcatggccaggttgaaaatgtgactcacacttggcccaaaaaaattggtattgtatttcacgggcgccaccagcattctctaca

SEQ ID NO: 19818 - DNA, 374 bp, Glycine max
gaactttgtttccccagaagcaaggtgaagaaaccatgatgtcaaaccttaacgaaacaacgattgagcgtggtgaagagagagaggaagagaacgtgggtggtggttcacatgccagtttgaaaagcattctttggcatggtgggtctgcttatgatgcatggttcagctgtgcctcaaatcaggttgcgcaggttctgctaacactgccatactctctctctcagctgggaatgctctctggcatcatattccaagtcctctatggaataatgggaagttggacagcttatctgattagcattctgtacatcgagtacaggaccagaaaagagaaagagagtgtcagcttcaaaaaccatgttattcagtgg

SEQ ID NO: 19819 - DNA, 771 bp, Glycine max
gacgagacgatgtttatataatcaatctgtcaaaaccagttgtgtgtattgtttctgccaggcaaatatcaatagcaatagcagcaatgtcaatgttgagatcagtttgtcagttaagggtgggagtcacaactccaaaaccttgcctccatccctcaatcttcttattctccctttccctctctcacaacactcacactctcaccttctttccccagaaccttccgtttccacccactttcactccctctttcaccctttgtgctcttcatgcctcccaaagcaacagcttcgtatggcactggggctagtggtgctgctgaaggtgataggccaagggagatattggtgcagcatttgttggtaaaagaagatgaccagaagcttctgttgtatcttcagcagaaaatctcttcaggtgaagatttgagtgatcttgctgcggaatattcactatgcccatccaaagaagaaggagacatgcttgggtgggtcagaaaggggcacaatggttcctgaatttgaagaggctgcatttactgcacctttaaaccaagttgtaaggtgcaaaacgaaatttggatggcacctgctgcaggttttatctgaaagggaagaatcaattcttcaagacattcaacctgatgagctgcatatgaaaattcacgatcccagctttttggatgaggcacaattaattgatgtgcgagcgcctgatgaagtggccaaagcatctttgccaggatttactgttcttcccctccgacaatt

SEQ ID NO: 19820 - DNA, 678 bp, Glycine max
cacaatctcagaagaggaggagagatcgagttatataagaatggcatgcatagagagagcatctccagcactgaagcaaatactgctcaaactttgctggtctttgctgtgctgagaagcccctggagattgatcatcacttatatgaatttgggtcagtggagtaccatattcagtctcaagcctctaatccacaagtagcttacttgtcaatatcaatgccacctctatgccatggagtcatacaaaatgaactttcttcttacaccattgaaatggtaaagggtctttgtccaaatgttgtggggattgcagagccagccaaagaaggatatcaacttactctgaagcttaaccttaatcagattccacaaaacaaagactatgataaggtcattaaggagatttcaacagtacattcagtaattctgagttcacagctcgaaagaaatattgtggaacgtgaattctgatgatgcacttcaggggatgtacaaacccatcaaactagtctaccatccaaaagaccatttctttctcattaggcagccacaaagaatcatagcggtattcccaattcgttttagagaaaagtcagatgtgatcattgcaacggctttctttcaagagcttgtggattgtgggagttcagataaatgggccaaggtaccaccttgc

SEQ ID NO: 19821 - DNA, 1200 bp, Glycine max
agatagatcacatatggccccaagcccaagcccatgtccaagcccaccggcagtcccgtatataatagtagttatgcgtggtgactatggtagcacccaagccaattaaccatgacggttatacaagtccctatgatcatgattatgatagctatggggactactactacatagatgggtccaagcccactgtcagtcctgtttataatagtggatatggtggtgactacaacaacatacaagggccatagcccaagcccaagcccactggcagtcccgtttataatagtggatatggtgacaactatgataactacaacaacggagaagggggcaagcccaagcccaagcccacaggtatttccgttaataaaaatggatatggtgggggctatggtagtggaagtgcaagtccaactcgacatggcaactatgatcatgagggtgactacggcaactaccacaacaagcacggtggatcaaaacccgcttcaggctggagtgattcaccaagaaaagggatccaactaaccaaggcaacgaataatatcgacgaggccatggagttgttgatgaaagaagctgcaaaattgcgtgaatatgagaacaaggcccatcaaaatgggccaggccagtttgggagcaggcccgcgccaccaccagcaagcacatgtgacaggaccatgaatccggtgcgacaacgcttcaatttcggtgatggggggaaacgtcctgattatgattatgacaagagacggggctatggagtcatgaatcataaggaggctgagaagaagtttaatggcgtcaccctcgatcataattaaggaggctgatgaggataagtttaatggcatgcatgtccatccaataagctagcagctatagctatacatgtatgaagaattagtaacatgtactcttgttgagtaagctctcaggtgcatgtgctttcagtaattacatggtttggctttcttaagttaattaatatatgtatcaatgcttctctatatgtaataatgatatgacatgtgtgttgtacctgattttagaggcaaaagcgatgtgtaaggattgaataaatatatgtggagtgctatttaaataacgacccttgttggctatatatgatatgatcattggcctggtaaaatggtcgatcaatgacatatattcatgcatcatccttatattctt

SEQ ID NO: 19822 - DNA, 650 bp, Glycine max
gagggaagggaatggcaacgaccacgagagggaggaaagaaaggaaggaccccataacaggcacgacacactatcctgttcttttctattgcccttttccttcactttactccttgcatccaattctctcgcgaaattaataaaggaactttaactttcgcgagcgacacaaacgcaatcaaatcaaatcatagattgatttggcaaccccaattcccttttgattattttttttttttatgaattaaagcaatgggtttggttgcttagtgtttttttggacgcacgaaagatgattccttggggtggcctcagttgctgtttgagtgctgctgctctttaccttctcggcagaagcagtggcagggatgcggaaattcttaaatccgttacaagggtcaatcagctgaaggaactagctcaactgttagatgcagaaatattacccttgattgttacaatttctggaagagttagctctgaaaccccaattaactgcgagttcagtggtttaagaggtgtaatagttgaagaaacagcagagcaacattttcttaaacacaatgatgctggttcctggatacaagattccgctttgatgctatcaatgagtaaagaggttccttggtatctggatgatggactgatcg

SEQ ID NO: 19823 - DNA, 409 bp, Glycine max
aatgattttatgaggttggaaaggaaggaccgcatagcacgcacgacacactatcctgttcttttgcccttttccttcactttactctttgcatctaattctctcttttttacgtacatgaaattaataaaggaactttcgcgagagacccaacacaaaagcaatcaaatcatagattgatttggcaaccccaattcccttttttgatatttttgaattgaagcaatgggtttgggcgcttagtgtatttttggacgcacgaagatgattccttggggtggcctcagttgctgtttgagcgccgctgctctttaccttctcggcagaagcagtggcagggatgctgaaattcttaaatccgttacaagggtcaaccagttgaaggcactagctcaactattagatgcag

SEQ ID NO: 19824 - DNA, 420 bp, Glycine max
ggaagcaaactagtgattgttacattcgcacctgaatttaacattcatggattctctgcttgactttagcatttgacttgtgaggtaatataatccaaacaagtttcaacagcattctttctgctcaagaagtctttactgcttcaaccagtgaccttcaactttctgtgtcctctccttttaattcagctgaaagtcattgttgatgtcctcaatgggtgatccagctgatgaaaatcttgaaaggaaagagatggacgtgagacatttgtcatcttcacatggccaagaaccatatgtccacaaggttggaattccttcaagacaaaaccttttcaaggaattccaatccactgtaaaagaaacacttttcgcggatgatcctctaaggtccttcaaggatcaatctaagtcccgaaa

SEQ ID NO: 19825 - DNA, 425 bp, Glycine max
ggttaccacacacaataaaaatgataactaaccaaccaactgattaacgttgtgttggtaactgtgttcactcaccttgcaacaatggcactctcagtttgcagcatgaacattaaccccatagcatttagcagcgccatctttctcattcaagtctctcaaattcccttccttctggccaacacaaaaggtgaagatgggtcctctgagtgtgtctcccatgggatttggaacatgggcatgggggaatcagcttctgtgggggtaccaggaatccatggataatgagctccaacaaatcttcaacttggctatggacaacggcatcaatctctttgacactgctgattcttatggcacgggaaggttaaatggtcagagcgagaagcttctggggaggttcattcgagaatttcaagagcaaa

SEQ ID NO: 19826 - DNA, 742 bp, Glycine max
gctcacaaaagggagaggacaatggctaagcgtgcaatgcgaatggggatgttcactgagaggtatacaagcttggcatctctacctcttcatggttcacctttcaggtctcttggccttgaagctcattctgcaatgcaccgaagacacgtgccgtcctccgcggcagcactgagggctcctgatatgagagctgctgcaaaatttgagagaaaccaatttggatcactggttttcgtggaagatgatgatgttggattcttttggcctggcagtttcagacaggtagaccaacaaggagctggtgatgttaatgtaggacatgctcaaagttcaaatgctagtttagctccaatggtgcctcctccaccacaagcttctacatctcctgatctcacattgaagctttaagtttaaggcttaagaaaatgacgatacatacacaagcaaaggccttcacaaagtaataaataagtggctaagaactgactcatccgttgctttgcatccagccaaatttcctcaaccactcatttttattgtgaggggtttaattatcagagtttttatgtgtatgtatcgaccacttctcttgagattttttagtctttgatttcattctcttcagacatgaaattattaattaatagggcgtgcaatgtacagtgagatgtgtatttccaatggcgacttgaacttattttaatctcacattattaatggtatcttttacttaattgtt

SEQ ID NO: 19827 - DNA, 649 bp, Glycine max
gctgataagaaaggcatcatgctgcggttctgtaatcttaaggaatgtgaaagtcacattcacagcgtagatagcccatgtgcaaatatacgaatggagatagggtggccacttggcgttacatttgtccatcctcatgacttacctaacaaggcaaagctgggttttctagaagcatatgaacctggttggacagaagcccatcaaaactcagacaggaatcagtccccctgatttccaacgtatgggcgacaatggatcaagttgtgaagatagccctatatagttctcagggggctctgaatctatctgtagctaggctttagagttttatacctgctgtctgtatatgcaacttttgaagctcttaggattatgagacgctaatccaatgaaaatgaatggtagactcagctctacaactgatggaggtgttgcttactagtatcaaccatatgtaaaatgaagactataagcctctcttggtcatgaacatgcacgagtcatggaggaatgcagtcactgtcacatggtctgcaacaagtttagttgtaacttttttgtccttaagttatgtcaagctggttgaaagtgtaaacaggatcgcattttgtcacaatgttatgtaaagctgaaaattgacgtgttt

SEQ ID NO: 19828 - DNA, 506 bp, Glycine max
  unsure (1)..(506): unsure at all n locations
agaaatcaaagtcgatcaagttccagcaaataatcatccacaaaatggtgtctttacgagtctgaatgacaaatttggtgacagggagtctgaaaaggttttgaaccaaacaaagaatggggataatagtagtcaatcaggttcatctaatcatttagagaaagatgccaatggctctcaatcaggtgaagacagcggtgttaagagtgtttctgcttacagatcttcttcgcatcctataaccgcaccatcccctttgtctggtctgcctgaattctctcaccttggttggggccactggtttacattaggggacctggaacttgctacaaacaggtttgcagaagataacgttattggtgaaggtgggtatggaattgtttatcacggtcaattaatcaatgggaatcctgtggccattaagaagctcctcaataatttaggacaagctgaaaaggaattcanggtagaagttgaagctattggtcatgtgcggcataagaact

SEQ ID NO: 19829 - DNA, 763 bp, Glycine max
gaatagcaattgcattcacaaagtagtggatgaagactgctttgacttcagggatttatggtctattgtattcccatctgaatcagaaaagattattgcaacagtaacaagaaaatcaaatgaggtagttcatactcaagcaaaagttatgactgatcacgatgtcatgtataagtatgtatcgaagaatgtactttttgtcgcaaatgcagcaccaaaagccagaggggaaattggaacagccaccccagaggaggcattgttggtcatctatatcattgatactgtgactggtcgcgtattgcatcgcatggcacatcatggttgccagggtcctgttcatgctgtatttagtgaaaactgggttgtctaccactattttaatctcagagcacacagatatgagatgtcagttgttgaggtctatgatcagtctcgagcggataacaaagatgtctggaagtttgttcttgggaagcataatcttacatcacccatctcttcttattatcgagcagaagttgttacaaaatcacagtcatacttttttacccattctgtgaaagcaatagaggtgacttcgacggccaagggtataacctctaagcagcttcttattggaacaattggtgatcaggttctggcacttgataaacgctttttggatccccggcgcacacttaatccctcacaagctgaaaaagaagaaggaattattcctcttaccgattcattgcccatcatttctcagtcctacattaca

SEQ ID NO: 19830 - DNA, 362 bp, Glycine max
aacagtaagattgctaaaatgattattttacatgactatccacttcatattgtggaacaccaaggtttcattgattttgttcgagcactacaaccccagttcaatccactgagctttaatgctattcaaggggattgtgtctctatgtacctcagagagaagcaaaacctattgaatcttattgatgggattcctggacgagtcaacctcaccttggacttatggacttcaaaccaaacatcggcctatgtttttgttcgagggcacttcgttgatggtgattggaacttacatcatcctatacttaatgtattcatggtaccatttcctgattctgatggttccttaaatcaaactatagt

SEQ ID NO: 19831 - DNA, 401 bp, Glycine max
cagcggtaatgagctctctggggggaggggaaacaagattactgccatgcggattttgaattatctcaacctttcaagaaaccatcttgatgggtccattccaggcaacattgcctctatgcagagtctaacttctgttgatttttcatacaacaatttctctggtttggttcccggcactgggcaattcggctactttaactacacttctttcttagggaaccctgaactctgtggcccttatttgggtccttgtaaggatggtgttgccaatggccctcgacaacctcatgttaaaggtccattctcttcttctctgaagcttttgttggttattgacttgcttgtgtgctccatactattcgcagttgcggcaatattcaaagcccgggctttgaaga

SEQ ID NO: 19832 - DNA, 796 bp, Glycine max
agcgaaacccaagacaagaatcacagcgcacagtgacacatacatagaaaaaaacgaaacacaaacagaaacagagttattggaaaacacgaaacactaattgatttgaattcgattcgattgaggattgctgtttgggtgtcttgatggtgtcggtgaacccaaaccccgctcaaggcttctacttcttcgatccctccaacatgacccttcccggcgtcaacaatcttccaccgccgccgccgccggctccggctgctcctgccgccgtcgaggatccgaataagaagatccggaaaccctacacgattaccaagtccagggagagctggactgagcaggagcacgacaagtttctagaagctctccaattatttgatcgggactggaaaaagattgaagcatttgttggttcaaaaacagttatccagatacgaagtcatgcacagaagtattttcttaaagttcagaagaagggaacaagtgaacatgtacctcctccccggccaaagagaaaagctgctcgcccataccctcaaaaagctcctaaaactcctactgtatcccaagttatgggcccattgcaatcttcatcttctttcattgaacctgcatacatttatatcccggattcttcatctgcgcttggaactccagttactaacatgccttcgtcatcttggaactataataatacaccacaatctgtcaatgtgccacaagtgaccagagatgacatgggattcactgtagctggacaaacagctcctcttaattgttgctgcagcagtagtaa

SEQ ID NO: 19833 - DNA, 663 bp, Glycine max
tcttttctttcttctcttcatcaaaacaccactctgacaacattaactccccgaatgttggatggagaagcaacaatggccacgtggccgcgcatgtgcgacacgtgccgctccgccccctcctccgtcttctgccgcgcccacaccgcctttctctgcgccacgtgcgacgcgcgcctccacgcctcgctcacgtggcacgagcgcgtgtgggtgtgcgaggcctgcgagcgcgccccggcggcgttcctctgcaaggccgacgccgcctccctctgcgcctcctgcgacgccgacatccacggccgccaaccccctcgccagccgccaaccaccgcgtccccatcctccccatcgccgccgcccccggcaacaacaacaacgacgacgacgacgttgctgacgttgacgacgaagacgaaaccgcttcatggctcttgctcaaccctatcaagagtgctactgtccctaacaccaataacaataacaataataacgggttcttgtataacggtgaggttgatgagtatttggaccttgttgataattgtaactcttgtggtgataatactcacttcgcttcagctgctgctactactgatcattacgctcagcaccaacatttcgctggtgtttctcagaagagttatgctcgggacagtg

SEQ ID NO: 19834 - DNA, 604 bp, Glycine max
cttcaagcagttacactggtaaagtatacacatacgatggcttgtacaaggttgtcaattattgggcagggaagggaatatccggatttacagtctacaagtttagacttaggaggcttgaagggcaacctacattaactacaaatcaggtatattttacatatggacgtgtacctcaatctctaacagaaatacaagggttggtttgtgaagatatcactggaggtcaagaagatatgcccattccggctacaaatttggttgatgacccccctgttccacccacagatttcacatattgtaagtcactcaaggttgcaaaaaatgtgaagcttcccatgaatgccaccggatgcaaatgtgaaggcatttgtaatgacccaacaagctgtgcatgtgcattgcgtaatggctctgattttccatatgtatctcgggatggtggcaggttagttgaagccaaagatgttgtctttgatgtggtcccaaatgtggttgtgatccaggttgtgtgaaccgaacttctcaaaaaggacttagatatcgtctcgaggttttccgcactgcaaacaaaggatgggctgttagatcctgggattttata

SEQ ID NO: 19835 - DNA, 437 bp, Glycine max
ttgacgcgtgggtcagaattgagcaatcgtggcccaacatttgacatggatttatctgattttatggatgaagaagacaaaccaatctcatatgaaaaagcaaagaaatactttgctcaagatccttcccaaaagtgggcagcatatgttgcaggggcagttttggtcttaatgactgaaatgggtgttcaatttgaagacagtatcagcatgctggtttcatctgcagtcccagaaggaaaaggcgtatcatcttctgcatctgtggaggttgctagtatgtatgctattgcagctgctcatggattaaatatcagcccaaggcatctggccatactctgccagaaggtggaaaaccacattgtaggagcaccatgcggtgtcatggaccagatggcttctgcatgtggtgaagccaacaaacttcttgctatgat

SEQ ID NO: 19836 - DNA, 427 bp, Glycine max
tttattatcacactcacagagagagagcatcgtgatgatcatattacgactcaaaaaaaaaaaaaaaggagagagaaagtgaaaaaaaaacctttttttttagagagagaaagagagggtagccctagaaaaatatgcaaccggataaggacttttgcagctgagacactgcaaaaagagttatatagagagagaaaagaaaaagtatttttttttatatatattttatcctttcaattttgatgttttctttttttatttatttaacatcttttttccattgttgtggagtaatttgcttctttgcagtgcacactgacacagtgacacagtggttctctcacctctccttccctgtgtggctctgccacctgtgcaccacagctttttgaatcctgttcctaaaattttcctgtgaaagattctg

SEQ ID NO: 19837 - DNA, 1129 bp, Glycine max
gattatcaatggatgctagaattgaaaatgtccatgctggaagctcagcagatggtatgacaaggggtcttggttctgagaaaaaacgacatagtgtgtctggttttactcctcaacatgctaattcacaagccactgaaaagattaggatgagcgagaggcagattttgggtataaaccgtacaaaaattgaagagatatggttagaggtgcttgagaggatacaaattactggtctgaaagagtttttgtttaaagaaggcaagctgatctctgttagttttggggcagctccaactgtgcagctaatgttcagttctcaattgaccaaatctactgccgagaagttcagaggtcacatcttacaagcatttgaatctgtccttggatcttctataacaatagaaattagatgtgagttaaataaagatacagcctgggctgttcaacaacctcttacattgccctctactaatgatagttcgtctcagattagagactttaatggtgttggcactctagctcatccatcagtaactgattctgttgaaaagagaaggggtgaaattgtagaagaagcagcttctcaagtggagcaaaagaatagcaagcagcaggttgatgctcatggaacatcttataaaagtttagaaggtacaagtataggacaatcatcagcttcccaaaaaaagccaattgttaagtcgcatttagaccaaagaaagcttatggagcaaggtcaaagtcgaagtcttgtaagaagcaaagtatctcttgctcatgtgatccaacaggcagaaggtcagagaagtgggtggtcaaaacgtaaagcggtttctattgctgagaagcttgaacaagagaatctgagactggaaccaagatcaaggagcttgatatgctggaaagcatcaagagtaacccggcgaaagctgtcacgcttgaaaattcgaagccgaaagccacgtgcactgctgaatcttgtctcatgtgggaaatgtctgtctacaaaatctccaaggtagttttggtaaatatggatcgagttcctgtaaactgaggagtacacttgagagaatttgttgattatcaggttacttatgtgttccaataatgaaaaccaacttct

SEQ ID NO: 19838 - DNA, 525 bp, Glycine max
  unsure (1)..(525): unsure at all n locations
tgaggagttggataggattgaggagtttctcaaatgggttagctacattttcgaagatggaagcacgtatgaagggactgtttgggatgactatgctcatgggaaaggagtttatgtttctgatgatgcattggtcaggtatgaaggtgaatggtttcaaaacgatgtggagggtcatggtgtagttgaagtcgatatacctgttatagaacctgctcctgggtccaagcttgaagcaaagatgcgagctcaaggaaagataatagcaagggattttctgtccccagaagacagagaatggcttgagaaggatattgaagatatgtattatcttgcagatgggaactatgaaatccccttttatgagaatgaggaatgggttacgcaatttggaagaaagccggagaaaggtcgctatcgttatgctggccagtggaagcatgggaggatgcatggatgtggtgtatatgaagttaatgagcgtatcttatatggtagattntattttggagaatatgtagatga

SEQ ID NO: 19839 - DNA, 427 bp, Glycine max
tgacatacacacgcatgtacaccttaatggttatatagggtggcttcttcttggtgttattcttgttctggcttgtgctttaatgcattcttcttcttcttcaaacctcttaataactactgtgccttgaatgttgggtttgagtatatctctttctcctccaaaagtagtgccacttacgtagggcatgatgatgaagaagagtgggtttgagaagatggtgatgttgcagaagaacaacatgaacaagggaagctatgatgatgagaaaccaaggagtgagacgtttttggtgaacatcaatatcatggggagtgcagggcctattacgtttgtggtgaatgacaaagagcttggttctggggtcattgatactgctctcaaatcttattcccgtggagggaggcttcctgttcttggttttgat

SEQ ID NO: 19840 - DNA, 437 bp, Glycine max
  unsure (1)..(437): unsure at all n locations
gaaanccaggggtatgggtattttgcgacgagggaagcaacgaggcggagttttgatatcagtatcggtgatgaagcaacacgagttatctctgttactgcgtctcccatgggcactaacccttctctatggtgagatgttcgcttactgggttccacccctcttcacctgttcctggccccatcttctccgcagttcttcttcttcttcttcaacgcaggttcaaacagacagtgggaattatcagggtgattatgttaaagtggctgttattgcagatccacagctcatggataaaacttctctccgtcttcctgcaagatcacttgcactggaacttgcagaattctacactgatttaaacatgcgtagatcattctttgcatctgtcctgcctttcaaacctgatgtcatatgggttttaggtgattactttg

SEQ ID NO: 19841 - DNA, 654 bp, Glycine max
cgatttcaatggccgcagaaatttgtggcgggtctctattcttatccgttaaaactcaactgcaactgcagcagcgaaaccagcaaaacgtgttcttccatgctcaacgtagcagaacgcgaagaagcactaccagattccactcatccaaacgcctcctttagttcttccgcctttccaaatgcgtccgcgtttcgccgcggcgccgtgtgccaggtcgccagcaccgacttcgaatccgccgccaaagtcggagaggatcgtctctctaaggtgccggtgcgtaatataaggaacttctgcatcattgcgcatattgaccacgggaaatccacgttggcggataagttgcttcaggttaccggcacggtgcaccagcgagagatgaaggatcagtttctcgataacatggatttggagagagaaagaggcatcactattaagctccaggcagctagaatgcgttatgtgtttgaaaatgaaccttattgcttgaatctaatagatactccggggcatgttgacttctcgtatgaagtttctcggtcactcgctgcatgtgaaggtgctcttctagtagtggacgcttctcacggcgttgaagcacaaaccctaactaatggttatttggctttggagaacaacctggaaatt

SEQ ID NO: 19842 - DNA, 509 bp, Glycine max
ggtgtaagagtgaagagtgaagagtgaagagtgaagagtgaagtaacaaagcaaaaagagcggagggaaagtcgtgggaacgaagaagccaacaaagacaaatcaaggtgaaaaggaaaaagcccttatgcttttttgagtttgtttctcaccagcttgagttgtttagaagctcatcttaagcattgtggcagacctgagtgagcattttttgagtggaaaatatgagctacagtggctcctcaatgagttctggtagtggatcttctagaaggacatttgagtttggaaggacccatgtggtcagacctaaagggaaacaccaggcaactatagtttggctacatggccttggtgataatggctcaagctggtcccaactcttggaaactcttcctcttccaaatattaaatggatttgcccaactgctcctacacggcctgtagccttatttggtggatttccttgcactgcttggtttgatgctggggagatttcagaagaagct

SEQ ID NO: 19843 - DNA, 425 bp, Glycine max
cgctgctagagaaatttggcgccgcaattgtcatgacccaaaattatatggttctatcgagtaacctttacaaccttgtgtcgtcaaccaccctccaccgcatcgtcgaacacccgtatgtcgtcgtcgtctcaccaccacagcgcctcgcattagagcaccgggccgtcggagcaggttttaaggctcttaatcatgttgagatttattttctcgaggaagtcgcaccactttgctgttgcaattacattgcaatttccactgttgacaaaataaagtacccacaatcagctaaacaggaaaaactcaattttaacactacttgttgtatcttcaggttcaacccaaccaagtgtggtgtgaggaagaggtaaaaagtaacatagaggtgaaagagaaaggaagagatgtctaggacgctagtg

SEQ ID NO: 19844 - DNA, 408 bp, Glycine max
agaacgacgggggtgaaaagggactatatgtaaagaagtgcttgagagactaatctgcacacagcattacaatgggaagaagcagaagcatattcagagagagaaatggaagcagcatgggtcaatattctgatgctgatactgatactgactctgatatgggcatggaagaagctcaactcattatggctcacgccaaagaggcttgaaaagatcttaagagaacaaggccttcgaggcagtccatacaggtttaaggttggggacacgaaggagacattgaagatgcaaatgcaagccatgtccaaacccatgaatctcttctctaatgacataggaccgcgtgtgtctccctatgatcattacattgtcaacaaacatggcaaaaattcttttatttggaatgga

SEQ ID NO: 19845 - DNA, 1103 bp, Glycine max
ctcgagccgttgaaatttctctctctttattctgaatgggactcacagcactgaaggcagagaatctgaagccagtaatcctcctcaaagctggtgttcccttggctgtatctttggctggtttgatctatgcatggattgttgcaaagaaaaacttatctaccaaagttttttcttcaccagaaaaagagtgtgtttctccaaaaatcacttgtcatcaaggaacaaaacatgaagaaagctttcttcacaatctttcttctattaaatatgaagaatcatcattttctcccatgaatagcagtgttctttctgggagcttggtgatccatgatcacaacaactgttgtttggaacaagagatcactagcctaagaagccaaattgaaggacttcaaatgagggaattggccttgcgtttgcagtttgagctgtattgtgaaatgaaggaacaagaatctttgcttctagatgtcaaaaacatgttgtctttggagaatgatcgcgctgagttcttgagtaaagagatttcgtcgatagagaccgagactaagaggttggggagttttgtagtccaatacatgagtgttgttgaagagcatcaatattggaaatcacagaatagggtgcttcaaaggagggttcaaaggctacttagggactcaaaggccaaatctcgtttgataaagggtcaggctttgaagatcaaagagaaagaagcagtgatattgagaaaccatgatgccttgcaaacaagggtcagtgtcattaacaagttaaagggtgaaatcatagagctgcaaaggattttggaccaattggaggatgagaagaatgaggtcgccaagaagcttgaaaccgcagaagggtatgtgtctaagtcagacaaggaaaagatacatagaaaacctttgaaatattatttggaggttgaatcaagagatgtgagtaaggaagactacaacaaggttctcaatgaattggaggaggtcaagaaggaacgcgtaactgaagttgaagagctgattcatttgaggagggtcaatgcttgcttaagggaagagctaatgaggcactatgaagaacaacatgagcaagataga

SEQ ID NO: 19846 - DNA, 409 bp, Glycine max
gtagcactaatgataagaataatttcaacaatgaacagcatgtggttgtggatgaccgcaacaacactagagtagcgtctaatcagggagagaatggatctcaagaagtagatcctcagattaggcaaaatagtacttcacaggatttgccagaaccacattcacacagagataaaatgtataaagctgtttatagaagatcaagatctcatagggctgtgactaatttagctgacagtagtggccagggagaatccaattcaaatgggagaaacagtaatttcaatgctacagcaaacttcagcaatggcacaaatgaagctattcatacaaatggatccttagagttggaaccaaccacttgtgatccaaattatgagcggaataatctcaaagtgctgcaaggacc

SEQ ID NO: 19847 - DNA, 413 bp, Glycine max
gggagattagggtgagtgatgcgaaactcgctaaaacagaaacaaatccaattacgaagaagaagaagaagaaggggtttgagcctgaaagaacataacagtgggactgtgggagttggggactcgtttgccaagttgcttctcttctatctccgtgcttctggatgatcaaaattacggcattattattattattgaagtgatttttgcaggtttgcccaaaaatggaatcggtgccaaacccaaacaacggggaggaacccacttcgtgggatgagctatacaacatcaatttgatgccttcagagttatttctcaagttccgaaaagaacttcagggcattcgagttggtctcaatatggagttctataatgccccggtcaatgaatatcaagcaaagcttgtattgaag

SEQ ID NO: 19848 - DNA, 462 bp, Glycine max
gaaggcataggtaggcacaagcacaatcatgagttggtgcggactgagtggtgtgtcgcgttgttgacattagaatttgatcgatttggggttggggcggaagaaagtggaaacgacgccgttggaaggtgggaagaagatgagttcgcagcaaatgcaaatgcaaattcaaatccaaaacagtggtggtggcagtggcaacaacaacagcagcaacatcccagtgagcgaggttttctggactctcgtcgacaaagccgacaaaaaattctccaaaatcagagaccttcccttttaccaacgcagcaggcatgatacttacttttataaggtgttcaaggtctacacacaattatggaagtttcagcaggagaatcggcagaagctgattgaagctgggcttaagagatgggagattggtgagattgcatctcgcattgggcaactgtattttgggcagta

SEQ ID NO: 19849 - DNA, 428 bp, Glycine max
ggcggaaacgacgtcattcgtagttgggaagaagatgagttcgcagcaaatgcagatgcaaatgcttatcattgcggtggcagccgctgtatcagcagcaacatcccagtgagcgaggttttctggactctcgtcgacaaagccgacaagaagttctccaaaatcagagaccttcccttctaccaacgcagcaggcatgatacttacttttataaggtgttcaaggtctacacacaattatggaagtttcagcaggagaatcggcagaagctgattgaggctgggctcaggagatgggagattggtgagattgcatctcgcattgggcaactgtattttgggcagtacatgcgcacaagtgatgcaaattatctatcagagtcgtatatattctacgaggccatattgactcgggagtattttaagga

SEQ ID NO: 19850 - DNA, 851 bp, Glycine max
  unsure (1)..(851): unsure at all n locations
ggtcaaacatgggatttttgaggatagtgagagtgaggaagatattttggatgaaggggatgatgaggtggaggaagagcatgatcatgaacccgaagaatctttgaaacccgaacctgaggttaagaaggatgctgaagtccctttgccaccaccaaaagagacagaaaggcagctctctaaaaaggaaaggaagaagaaggaacttgcagagcttgaggctcttctagctgattttggagtggcaccaaaacaaagtaaagatggtcaagatgagtctcaaggtgctcaggataagacaggtgttgagactgatggagatggagaaaagaaagaaaatgtccctgcagaatccaaaacttccaagaagaagaaaaagaaggataaagcttccaaggaggtgaaagaatctcaagatcaacccaacagttctgacacaaacaatgggcccgatttggccacaggcaccgaaaatgtggaggaggatacatctactgttgatgtgaaagagcgtctcaagaaagttgcttctacaaagaagaagaagtctagtaaagaaatggatgctgctgcaagagctgctgctcaagaggctgctgcaaggagtgcaaggcttgctgctgcaaaaaaaaaagagaagaaccattataaccagcaacccgtccggtaaaagaaccctgctccttgacatcaatacaggaatttgtatttcttgttcatatgttgatgccgaataaacagtgggctttaggctctggtgagaatggtgatgattctggtcgtatttctgtggacctgggaaatttctcatgtagttttttttttggggaattagacaattagtgttgntc

SEQ ID NO: 19851 - DNA, 617 bp, Glycine max
cccacgcgttttaatgagtgtgaagaaagagacctgaaagtgtcgttgagtcagtgtgtgtgtgcatcagaccaaaagcaacaatgggaggcacttgtgcagatcttcaccaccatgaatcagatatagaactcactgatgctgaaaggattggcactgatgttggacctgacagtggcaccaaatcccagggtgaagaagctgaaggacaacactacgttgaggtgaccatggacattcatcgtgactctgtggccttacacagtgttaaaactgttgcagctgatgatgttgacatggtggaagaagaagaagaggaaggtgataaattgggtttgatgggaaagaagaggcttgagaaaaaaacatcctttggtgcctctgtggttcagagtgctgccaatcgcatgaagcagctgaagcgtttggcatcattttcaaaaccagcgcccaaacactttgaaaggacaaagtctgcagtgggtcatgctctcacggggctcaagtttatcagcaagaccgatggtggcgcatgatgggttgaggtggagaagcgctttcacaagcttactgctaccactgatggctatcttcctcgtgctctctttgcccaatgc

SEQ ID NO: 19852 - DNA, 329 bp, Glycine max
gttgaaacaaatgagtgtgaataaggagacctgaaagtgctgttgagccggtgtgttcatcagacaaaaaaaaacccagcaacaatgggaggcacttctgcagatcttcaccaccatgaatcagatatagaactcactgatgctgaaaggactgacacgaagttaggggcttctgattcaaaagctggcaatgatgttggacttgacagtggcaccaaatcccaggctgaagctgaaggacaacactacctgtaggtgaccatgtacatttcatcgggactgtggggcattacacagtgttaaaactgttttatacggtgtttacatgg

SEQ ID NO: 19853 - DNA, 603 bp, Glycine max
gacagcaaatgccaaaagccaagttaattccctttctccactcttcacaaacacaaacacacgtattctcttgcaaaactaagaatgaaggaggagttggtggttgaagaagggtaccttttcaaagaagagactcacttcacagtgctcaaaacctctctcttcttcaacggtgatggcttcgctgtctacgattgcaaaggccaactcgttttccgcttcgactcctacggtccccgcgcgcgtgacaaggacgagctcgttctcatggatccccatggccgttctcttctcactctccgccgaaagaaaccgagtcttcatcaacgctgggaaggcttcaaaggggagagaacggagggtcataaacccattttcagcgtcaagagatcgtcgatcatcggacggtcgaggaccagcgtggcggtggaggtgtacgatagccccggtgtggagtacctcatcgaaggttgcttcccgcagcgctgctgcaaggttttcaatgccgctaaggaacttgtggctgagattcgtcgcaaagtggaccccaccaccagcgttatgctcgggaaggaagtcttttggctctgcgtgaagcctggt

SEQ ID NO: 19854 - DNA, 403 bp, Glycine max
tacttaatgggagtgtacttaatttaaagaggggctaaaagaacaatgcgattctcaaaagcttccttctacactcttcttctccgcaaacctcataaccatcaccatcaaaactacgtcgttttatcgcggcgtcgcgtagtgaccttggcagtgggtgtgttgatcttgctgagtgctctctacattttctggccatcgggtcctgatctgaagatcgtggggctgaaactgaggcgcataaaggtgcaccctgtgccgccaatcaccatagacatctccatgcttctcacgctgagggtgcacaacgttgacgtctacttcatggacttcggagcggttaacgtcgccgtcgcctacagggggaagatgctgggccacgtgacgtccatgcgcatgcacg

SEQ ID NO: 19855 - DNA, 494 bp, Glycine max
caaaatctgcttctcatgatgcctttgctgtattaattcatctcaaagctccacattcagggagaaaacaaaataatgatgcaaacagtactgaatcatcacctctggttgagaactctcgtgcctcagttgaccttgttacagttcttgatgtgagtggtagcatggctggtactaagctagcgttgctaaaacgagctatgggttttgtcattcagaatcttggtccatcagaccggctgtctgtcattgccttctcctccactgcacgccgcatctttcctctccggcagatgactgacactggacggcagcaggcattacaggctgtcaattccttggtttcaaatggtgggacaaacattgctgaaggcctgaggaaaggtgccaaggtttttttccgaccgacggtggaagaactcggttagcagcatcattttactctctgatgggcaagatacatatacagtcaatagcaagcctaatgttggaac

SEQ ID NO: 19856 - DNA, 805 bp, Glycine max
gcagccagttacgtgagggggcttcagggaactgacggtaaccggttaaaggtcgctgcctcttgcaaacactttacggcttatgaccttgataattggaacggtgtggatcgctttcactttaatgcacaggttagcaagcaggacattgaggacacgttcaatgtgccattcagaatgtgcgtgaaggaaggcaaagtggcgagtgtgatgtgttcttacaatcaggttaacggggttcccacctgtgcggaccccatcctcctcaagagaactgttcgtggcctgtggcgtcttgatgggtacattgtatcagactgtgattctgttggggtgttttatgataaccaacattacacaccaacgccagaagaagctgctgccgatgccattaaagcaggtttggatttagactgtgggcctttcctagctgtgcacacgcagaatgcggtcgaaaaagggttgcttagcgaagctgatgtgaacggtgctttggtgaatacactgacggtccaaatgaggttaggcatgtttgatggagagccatcggcccatgcatatggcaaattgggcccaaaagatgtgtgcaaaccggcccatcaagaactcgcccttgaagctgccagacaaggaattgtgcttcttaagaacactggtcctgttttgccactctccccacagcgtcaccataccgtggctgtgattggacccaattctaaagccaccgttacaatgattggaaattatgctggttagtgcatgatatccccaagtctaaataaataaatttggctaaaacagcttt

SEQ ID NO: 19857 - DNA, 529 bp, Glycine max
gttcaaggaatgctggattcacttcgggttaaggcaacaagcagctttgaattggcatacaacactgcttgttcattaattgcaaggaatgagtacacagatgcagaacaactcttattgtcaggccgaagaattggtcaagaggtcctgatggaagataacttggctgatgatgagatagaaattgaattgtctcctatagctgtacaattagcctatgttcagcagcttcttgggcgtaacaagatgctattgaagcttatacagacgtgattaaacgagatatggctgatgaatcatcaatcgcggtggcagtgaacaatcttgtttcactgaaaggtccaaaagatgtttctgatagcctaaggaaacttgatcgacttaaagacaaggagaatcaaagcttccgactagctcctggactagacttgaaactttcagcaaaaagaaaaggaagcaatatatgcaaatagggggtcttttacttcttcatgccaataagaatgagcaggcacgagaacttgtttct

SEQ ID NO: 19858 - DNA, 612 bp, Glycine max
  unsure (1)..(612): unsure at all n locations
ctctcactctttctccacctttcttgctttcttctccttcctccatttcctatcttcattcctaccaatgactgacatcactgatgatattgctgaggaaatctccttccagagcttcgatgatgactgcaggttgcttggtaatctcctcaatgacattctccagcgtgaagttggcaccaacttgcttgacaagatcgaaaggactcgagtccttgctcagagtggttgtaatatgaggcaggcgggtattgtaaacatggcagagatgcttgagaagcagttggcttcggagttatcaaagatgacactagaagaagctttcacccttgctcgtgccttcagccattatcttactttgatgggtatagctgagacccaccatagggttcgtaaaggagggaatatggcacaaattgcaaaatcttgcgatgatatatttaaccagctggtgcagggtggagtccccccagaagaactttatgacacagtctgcaagcaggaggttgaaattgttctcactgctcatcccaacagattaaccgtcgaaccttacagtttaaacacattagacatgctcatcttttggattacantgatcgacctgatctt

SEQ ID NO: 19859 - DNA, 569 bp, Glycine max
tactaatggtattaatggaaatgctggagatggtgttcaagcagttgagaatcctgtgatgtccgagtctggtgcggaagtttgcgatttccctctagagcgttgcatgaggatagtgcctcatgatcagaacactggagccttcttcattgctgtactgcaaaaagtttctcctctgccagcaattacagaacaaacaaaaataaaaaatgatgagcaatatgtagaacccgcataccagagtcttaatgatgcacatgtgccacatattacttcatcagaaagtgcacacgatgaagtcttcaaagcagtggctggggaaaatgtagatgacgctgaacccaacactgaagatttggaagttggtcctgttacatgtgaagaacagaattccaaggaaactcaagaacctgataatgtacaaaacacagcaaagagggttccaggcaaaagaaagctacaaattcaaggcaaatggaggggtgttgaccctgttgtctttttcaaagatgaaacaattattaatagtataagggatttctatggaattgatgagcgttttccattca

SEQ ID NO: 19860 - DNA, 333 bp, Glycine max
gtgtaccgtgcaatacaaaggacttgcagcccatgaccgaggatgcagcacgcacaatgcttcaacagattgcccagtggcatttggttaatgaggatggtgtgttgaaattgaggagatcatggaaagtaaagacttttaccaaaggattggaatttttcaggataatagctggtcttgctgaagctgaaggtcatcatcctgatcttcaccttgttggctggaataatgttactatagagatttggacgcattctgtgggtgggctgacacagaatgacttcattctagctgctaagatcaatgagcttaatttgcatgacttgctaagac

SEQ ID NO: 19861 - DNA, 547 bp, Glycine max
cgaggatatcttttagttcatacaaatggcgggctcaaccaaatgcgttctgggatatgtgatatggtagcagtagctcgaatcataaatgccactcttgtaattccagaacttgataaaaggtcattttggcaagatactagcaatttctctgatatttttgacgaagagcattttatgaattctctagctaatgatgtaaaaatcattaagaaacttcccaaagaattggttaatgcaaccagagtcgtcaagcaattcataagctggtctggcatggattactatgagaatgagattgctggcttgtgggaagattaccaagttattcgagcttccaaatctgattcacgattagcaaacaacaatctgcctccagacattcagaagctccgctgccgggcttgttatgaagcacttcgcttctctcctcgcattgaacaaatgggaaaattattggtggagaggatgaggtcatttggtccttatattgcattgcatttgcgttacgagaaggatatgctcgcatttagtgggtgcactcatg

SEQ ID NO: 19862 - DNA, 575 bp, Glycine max
attttaatcctaaaaatatataaaaagcatcattataagccgtctttaaggctcatgattaaagattgctaacttcaggacagtctaatacaacacagaatttttatatcccaaacaaaaaggttgagttcggaattactattaatattatttttatttcttctggaggtgtttgtagcaggaagtgaaacaaccgcatcagcactagaatgggctatggcagagctcatgaaaaatccaatgaaattgaagaaagcccaggatgaggtgagaaaatttgtagggaataaatcaaaagtagaggaaaatgacatcaatcaaatggactacatgaaatgtgtaatcaaagaaactctaaggttacatccacctgctcctctcttggctcctagagagacagcatctagtgtgaaactgggagggtatgatattccagcaaaaacactggtatatgtcaatgcatgggcaattcaaagggaccctgagttttgggaaagacctgaaaagttcattccaaagagacatgataacagccgggttcattttaatggccaagacttgccatttattacatt

SEQ ID NO: 19863 - DNA, 554 bp, Glycine max
ggaacttcaaggatgagaatgtgctcttattgggttttctctttctattattctatataaggttgcttctcctcccttgatgactccaaattagcagagcactctaatttttatttttattttcattttttgttttttaagaaaaaaggctaaccttctgactttccaaagaactgagtctagtaatacaccaatggatggaattttcgcttacaccattctcattttgcttaccatattttcatttatgttcttaccaaaaccaaacagaagaagacctcagaaccagacacttgcaaagctccctccaggctcaatggggtggccgtacataggagaaacccttcaactctattcccaagacccaaatgcctacttttccaccaaacataaaaggtatggcgaaatattcaagaccaacatcttgggttgcccctgtgtgatgctgacaagccctgaggctgcacgctttgtgctagtgactcaagctcacttgttcagaccaacatacccgaaaagcaaggagcgtttgattggtccttttgctctgtttt

SEQ ID NO: 19864 - DNA, 650 bp, Glycine max
tcctcgcgtccgcccacgcgtccgatttgagagaattttgtttcgtgctactagaggaaatgtatttttgaggcaggctactgttgaggatcccgtcacagaccctgtgtctggagaaaagactgagaaaaatgtttttgtggtcttctatgctggtgaaaaagcaaaagccaagattctgaaaatatgtgaagcctttggtgctaatcgttacccttttgctgaggaacttggaaagcaagctcaaatgattacagaggtttctggaagacttttagaattgaagaccactttagatgctggactactgcatcggaataacttgctaaatactattggggctcaatttgagcaatgggatgttttggtgaggaaggagaaatctattcatcataccctgaacatgctgagccttgatgtgacaaaaaaatgtcttgtggctgaggggtggagtcctgtttttgcaactaagcagatccaggatgcattacagcgggcagcattggactctaattctcaagtcaatgccattttccaagttttgcaaactagggagttgccacctacctattttcgcacaaacaaatttacttcttcttttcaaggaattattgattcatatggggttgctaagtatcaggaggcaaatc

SEQ ID NO: 19865 - DNA, 691 bp, Glycine max
gggtaatgagaataaagtaaatggtcttgaagcgtcttcagttaaatccatatctaaacagtctaatgtggtcagtaataccaaaggtgattcattgatgggtctggaaagccataaccaacagcttgccagttcctctgctgatgaacaggccaaagcagaagaagaatttaagaaatccttgtacggagctgctgctgatggaagcagtagtgatgaagaaggagtatccaaaatgaaaaaattacgcataaaaatacgagacaaaccaattgcctcttctactgtggatgtgaataagattaaggaagccactaggcagtttaaacttggtgaagggttagctccaccaatgagaagcaggtcctcatctggtggaagccaggatcttggtcagattttgtccctgccaccaccaactacaggattggcgtcttccactgtttcaactcctggtgacctttttggtacagatgcattgactcaatcagaacccatttcacagccaactactggggctttgggtgggggacttaagccaggacctattcccgaggatttctttcagaatacaattccatcccttcaagtggctcaaacattacctcctgctggaacttttctctccaattacactccaggggttgaaattaacaagacaactcctaatcaggttagtgcttttcaggtt

SEQ ID NO: 19866 - DNA, 584 bp, Glycine max
ggaatcaattgttgatagggcgtttgaaaatgttgagcgggtcgatcttacaacactttgatcaagtagtgggagactgtttcatggattgcgtgaattgtctgatcaggtttgccaacaataaaacttcacatcgtattagcttgaaggctattgcactcctgcggatctgtgaggaccgtctggcagagggtcttattcctggaggtgctttaatgcctattgatgctactttggatgcaactttcgatgtaactgagcattattggttcccaatgctggctggtttatctgatctaacatcagatcaaaggccagaggtcagaagttgtgcacttgaagtcttgtttgatttactgaatgaaagaggtagcaagttctccacagcattttgggagagtatattccatcgcgttctgtttccaatttttgatcatgtgagacatgctgggaaagagggctttatttctcctgatgatgattggtttcgtgaaacaagcatacattcacttcagcttctatgcaaccttttcaacacattctataaggaggtttgttttatgttgcctccactactgggtctg

SEQ ID NO: 19867 - DNA, 491 bp, Glycine max
ggcggaaagtgggtttaatggtttttttctagagagagagagaggcatgatggccaccaatcccatgaacatagctttggcctcttattcttattctcagtgttgagagagagagggtgtggtagtgattccagatgctttggaaatggggaaaaatgaacaacaacaacaacatgtgcaggaagaagggcaggttgaggctccaccctgttgttgggtccttcttcgaccattcagtttcaagtgtctgttccttctcctactcagtttgtcggctctgctttctgcactcttttgggttcttcctagacacaccatcacatatagttttgatgcaaaagatgtaattaagcaaagtgcttctgttcagacatccttcagactggaaaaaccggtttcacagcttattccatatattgaaacattacaacatgatatacgtgacgaaatagctctaccaaatacagaggtggctctcctgtccatgcacc

SEQ ID NO: 19868 - DNA, 441 bp, Glycine max
cttgaagaccagagacttattgaagatatctgtacggacaatgatgctgttattcattttttcgtccgaaaatcagatgccaaggtaaggactaacccagttgacaaggattttcaattatcaattgacgcatcatatgtgcacaatctggtaccaaatttacatgcagaccagttagggtcagtctctgtaacaaatgaggtcctggagaggagccaattaacaagagattttgttctggaaccaattattatgaattccaacatcaaaattccactggtgatccaagacctaattaagagcacttcggagggattatagaaaggctgtagacctattcaatcttcagagggatcaggaggagcttatctcatgcaagattcttctggcttgaagtatgtgtctgttttcaagcccatagatgaggagccaatggcaata

SEQ ID NO: 19869 - DNA, 572 bp, Glycine max
ctgattagtagtaattaggggtcaagaaacaaagtggagatcggagagagagagagagagagagaggagggaaaggatgggttgttgccaatcatcgacgttgctgagagtgggagagagggagactcaccctgaaaaggaaaaggaaaaagaccaccagaggctctctgaggccgagaaagagggctttgatttctccttctctgagttctcgctggctgagctgaaggcggccaccaacaatttcagctctgactatatcgtgtctgagagtggggagaaggcacccaaccttgtttacaagggtcgcctccagaaccatagccgctggattgccgtcaagaagttcagcaagtctgcttggcctgatcccaagcaattcgtcgaagaggcttccggcgtcggcaagttgcgccatccaaggctcgctattttgatcggtttctgctgcgacggcgatgagaggcttctcgttgccgagtacatgcctaatgatactcttgccaagcatcttttccactgggaaactcagactattgagtgggctatgcggctgcgagtcgctctttaca

SEQ ID NO: 19870 - DNA, 601 bp, Glycine max
tttttatagttggaaattcatttaatagaatattaatgagtgctggattgtaataagtaaacagtgattagtagtaattagcaacagtgagggtgaaggaagggtactgaagcatagcatagaaacagggaaactaaaaaaattgccaaaaaggcaaatcacgcgaacacaatagttgtagagtatagagtctgtcgagatctcattcatgatcggtgataattgttgaagagagagagacagagagagagagagaggatgggttgttgccaatcatcgatgttgctgagagtgggagagagggagactcaccctgaaaaggagaaggaaagggaaaaggaaaaagagcaagcgtacggaaaccaccagaggcagtctgagggaggagagggcgacggcgagaaagaggtggttgatttctcgttctcggagttctcgctggcggagctgaaggcggccaccaacaatttcagctctgagtatatcgtgtcagagagtggcgagaaggcacccaatctggtgtacaagggtcgcctgcagaaccagagccgcttgattgctgtgaagaagttcatcaagtctgcttggcctgatcccaagc

SEQ ID NO: 19871 - DNA, 468 bp, Glycine max
ctgcatgggctgctgcatagatgaaggcattgataaaccaggtggcggttgaagcaaagattgttggtgtaattgaggaagcccatttggggcaccataatatccttgccaatacattggtggcatagcaagccgaccaccatttgcattaggagcaggtggagaagctccccacgatcctatgttccctccaggttgatacaaaggtaagggcccttgaaaatttgacccgggaagtccaagctgtgtggtatgagagctaggatcagtcaaagacccacttacagcagaaggcaaacttgtagatgtggtccccggccctggatagggaaaggaaaaagaccaccagaggctctctgaggccgagaaagagggctttgatttctccttctctgagttctcgctggctgagctgaaggcggccaccaacaatttcagctctgactatatcgtgtctgagagtgggga

SEQ ID NO: 19872 - DNA, 416 bp, Glycine max
gggttcaagtaagtctcattaagtttccagaagttgctattcgctcactttctctctctctctagctacctccaaccttataatagtcaaacaccctttctttcttctcccccaaccttcttccttcgacacaaaaatttcccaaactccaacaaaacccaaatccaaataccctttttagtattcaatccaaaggattcacctttgtattctcctcacagtggggcatcatctctcagaagaaatttttttacaaagaaagaggaaaaagaaaagaaaaatgttgcagttgttcttcactgtggctttctctgcggttcctctgaccctttacgtgccaccaatccgaagcctaaacctgtttgtggaaacaatggaatatgttgagaatcaagaacccacaggaacagagttta

SEQ ID NO: 19873 - DNA, 569 bp, Glycine max
ggagccaaggcccagacagacaccgcgtgctcttctctctcactaccattgatttccccgcacgttcctctcctaattcccctcctttttcgctactctttttcttttggggtgaaaactgaaaactagaaagaagcgtacggagagaaccaaagaaaacgaatccaatgggaggatgtgcaactaagccgaaggtctcccaggacgatcccgatggaaagcccaaggcaccccaaccagaaccagaacctgaacctgaacaccaacaacccaacaacaaagacaccctgcaaaccaaagtaccccaagtggaacaaggtgctgctcacaaagaccacaacaaccttaatgtcaacgaaattgttgacgacgaccaagcaaacaaaccacgctctctcagctccttgttcaagcagaatgaagataaaaggggttccacagaaaatgagaaaaacaaagttgaggagtctgtgaaagaagaagtgttagaggtcaagatacctgcggaagatactaaaagcaatgagccaacagttaaacaagaatctctaaagccagaggagaagctg

SEQ ID NO: 19874 - DNA, 494 bp, Glycine max
  unsure (1)..(494): unsure at all n locations
catatccaccggccaccgccatttagatcgccggcactctcagccgcgatcaccattccaatccctacttcaccactgaggcgtaacacaacagagccattgaatcttagccatgaggagaactggctttcacaggaggcaaagcggaggaggctcacgattcaaaggaatgatcgtgaagttgccggttgctgctgtggtgctcttgatctgcacgctctcattgttcttctcctcaacaggaacttcttccaatcttcaatccaactatcgctcccagatccgtttagaagagctttggagcaacgcaggttccggcgggtggcggccgtcgtctgctccgagaactcattggccccctcctccgactgagagcaacggctatttgcgtgttcgatgtaatggtggcctgaatcagcagcgtagtgcgatctctaatgctgntcttgctgcgcgaatcatgaatgctacacttgtgctacctgagttggatg

SEQ ID NO: 19875 - DNA, 412 bp, Glycine max
ggatgtaaaaaatgttatgccttcttgtgtgaggagaacagcagactacataggttcgaaatacacaacaacttcacagaagtgagcaaaacagcttcatgttttatgccccaccacctcgtgactgtgtgattaacttcagcttctcataagcctcagcacaggcatgagcatagtctgacaatgcacggaagagttcaggcaagcgagttttgagactctgcagtgatttctctcgcacctgaatgcaatgtttttggtgggattcaatttcctcttctaatctcttctgcaagctctcaacaacaaactgcctctccgagacaggattatttgtgtttacttcctctcctctttcatgttctgcttcatcaggccctctccgcattaaatgcttctggtaccattcctc

SEQ ID NO: 19876 - DNA, 1343 bp, Glycine max
aagcaactgtgcaggtcgtggatttgcaagttttccttttgcctcgcattacttcgaagcctttggttcctagctttccgtgctttgccaacatatacgtctctctcatggaaaagccacatgttgactttgggctaaagctcataggggctgatcttatgtctattccgggagtctacaggattgttcaggagcttatcaaagatcaggttgcaaacatgtatctatggcccaaaaccttggaagttcaagtgttagatatgtcaaaagccttgaagaggcctgttggaattttacatgtaaaggttctgcaagcaatgaagttaaagaagaaagatcttcttggtgcatctgacccttatgtgaagctaaagcttactgaggataaattgccatcgaaaaagactactgtgaagcacaagaacttaaatcctgaatggaatgaagaattcaatatggttgttaaagatccagactcccaggttttagagattaatgtttatgactgggagcaggttgggaagcatgacaagatgggtatgaatgtgatccctttaaaagaagtttcccctgaagagactaaacgtttttctcttgacctcctaaaaaatatggatcctaatgatgtccaaaatgagaagtcacgagggcagattgttgtggaattgacttataaacccttcaaggaggaggatttgggcaaggggtttgaggagacacagacagtaccgaaagctcctgaaggtactccagctggtggaggtttgcttgtagttatagtccatgaagctcaagacgttgaaggaaagtatcacactaatccacatgtacgccttattttcagaggggatgagaaaaaaaaccaagcgcattaaaaagaacagagatccaagatgggaagatgagttccagtgtatggtggacgagcctcccaccaatgatagattacatgtggaggttgtcagcacttcatcacgaaacctgctccaccaaaaggaaccattgggttatatcgacatcaatcttggggatgttgttgccaacaaaagaatcaatgagaagtcccttcttatagactccaagaatggtcgcctccagatagagttgcagtggagaacctcggaagcatgatgattaaattctccatagatttgtacttctgtttcctttctccccgtctttccttttttaaagtttgttttccatgcagtgcaaggaaaaggtgagaaaagggtatttcttgtgctcctgggatatatattgcttttatttgtcaatcatgtacatgtttgagataaaaaggtttgaaataccaaaagcatagatatgatttggtttggatt

SEQ ID NO: 19877 - DNA, 534 bp, Glycine max
actaaattgagcttcaagacactggaaaccagaaactgagtaggataaatctccattaatctaattgaattgcttttgttgatatgagttcagattctgcaaacaaacattgaaagataatggacacaattctatggcttcgaaactccttagcatatctccccttgcaaccaaaaaccaaaaggttacaactcctcaaatacccagatgctttgtcctcaagtttgtcaaatatctttggctctcatcagctcttcaccctgaacactttgttaaccatgaccattgcttcaattcagactcattctatgcatctcttattgataattctacccacaagagacaccgtgatcaaatacataaccggttagttatctccgggctgcaacataatgggtttcccatggcccaaccggttaatggggggtccaatctttgaccaatttggtatgcccggcagcctgttggatgaatttggttcccctgcctggttaatgtggaaggctatctttgggagttattcaaggaccattt

SEQ ID NO: 19878 - DNA, 772 bp, Glycine max
tggaaaacttctcctcatgcttggcaaaatccagttcaaactccacaaactcattgatcattatcgttctcatatattccagacaattaccattccctcagagtctctcttgaatgaacttcgaattgtcgaggagatgaagcggcaatgcgacgagaaaagagacttgtatgactatatggtaacaagatatagagaaggaggcaggtctaaaggcggcaaaggggagactttttcattgcagcagctgcaaactgctcatgatgaatatgacgaagaggctacattgtttgccttccgattgaaatctctgaagcaaggacaatcgcgtagtcttctaacacaggcagcacgccaccatgctgctcagttatgtttcttcaagaaagcagtcaagtcccttgagacagtagaaccacatgttaaatcagtaactgaacagcaacacattgattaccacttcagtggtcttgaagaggaggatggggatgaaggtgattatggagatgatgttggggggggctatgatgagaatgatgatggggagctgagttttgactatggtcaaatcgaacaagaccaagatgtttctacatcacgaaactcaatggagttggatcaggtggaacttacacttcctagagattctacagctgaagctgcttaggaaaacttagacaaccttgtaaggaatttgttttccttcaaggttagggcagggagccaatctgccccactttttgctgataataaaccagatgcaagtgaaaaa

SEQ ID NO: 19879 - DNA, 400 bp, Glycine max
agaaaaggtatttgtatttcttatgcttatttgctttctagagagtattaatctgtgttttaaggcaattgtaatattctgctttttattaagtttcttgatagcttttgtacaaaaaacaaagctttttcccatctacttttgcccaactttattactgctgaatattgatttactttctatgcattcagcagtgaaaaaaaaagcgctttaagtttgcacaacaataaatctcttagcaataataaatactctttgattaattgcaattaatttttcatataaaacaaaattccatctcatcaccacttgtgattcgttgtaggaagctgtggaatgggagtacacatctaaagttgcccgcataatgcatgcttgtcggcacgactcacatgttgct

SEQ ID NO: 19880 - DNA, 1036 bp, Glycine max
gaaatgttgaaagaaactgagaaatcagatactgagctcaaatcagaggcagctaaaccgtcccttccacagtggttacagaatgctaaaactaataaagataacggcaaagtaatggatcaggctcagaaccaagaagtgaatgtgaagaagaggactcaagaaatacagaagaaatggcatgattcctgtttgagtttacatcctaaatttcatcagctaaatgtgagcacagagagacttgttccaacttctttgtcaatgactggcctatacaatatgaatttgctggggcgccaattccaacccaaaataccacggaataaaaatctcggaacctctttgcaattgagctcaaatccaacgccaatccacccaccagagcatgcggtgagcccaaagcaaatgcctgtaacaaccgacctggtccttgggcaaacaaagccagctgatgccgttccagaagaaacacacaaagaaggcattaatgacttcttgagctgcctctcttccgagtcacaggacaagttcgatgaattacagagcaaaaagctgattgatgcggactctttcaagaagctcttgaaaggcctgacagaaaaggtgtggtggcagcaggatgcagcatcagcagtggccagcacagtaacacaatgcaaactgggtaatggaaaaagacgcttccaagggtgacacgtggttactgttcgtgggtcctgacagaattggcaagaagaaaatggcagcagctctttctgagctggcatctgggtccaccaacccaataataatacccctggcgcaacgccgtgcggatgcaggagactctgatgcccctcatctccgtggaaaaacagcacttgatcgaatagcagaggccatcagaaggaacccactttctgtcatcgtgcttgaggacattgatgaagccaacatccttcttcgtgggagcataagaagagccatggaacaaggccggttcccggattcccacggccgtgaaatcagtcttggaaatgtcatgtttatcctcact

SEQ ID NO: 19881 - DNA, 879 bp, Glycine max
ttttcgcgtttcgcttcacttgaaaaaagcccattgacgaatcaaatagagccgcataggttacgattacagaaggcgcgtccatcaaatcctggcacaatattagttggtaatacagataactgggaggagtctaccatggctgatgccagtcccaggactgatatttctacagatggtgacactgatgacaagaatcatccgtttgatagaaatcaagcccttactgctgtttccgactctagtgacagatcgaaagataaatcagatcagaagactctccgcaggcttgctcagaaccgtgaagctgccagaaaaagccgcttgcgaaagaaagcgtatgtccaacagttggaaagtagtcgtttgaagctgacccaactagagcaagagcttcagcgagctaggcagcatgggggattttcatatcaagctcgggtgatcaagcacatacattgagtggaaatggggcaatgcaatttgatgcagaatatgctaggtggctggaagagcagaatcgacaaattaatgagctgaaagctgctgtaaactctcatgcaagtgacactgaacttcgcatgatcgttgatggtatattggcacattatgatgagatttttaggctgaaaggtgttgcagctaaggctgatgttttccatttgttgtctggtatgtggaaaacacctgctgagaggtgttttttgtggcttggtggttttcggtcatctgaactcctcaagctgctggttagtcaattggagcctctcgcagagcagcagctgatgggtattaccaacttgcagcaatcctcccaacaagcagaagatgcattatctcagggcatggaagcattgcaacagtcccttgcagagacattgt

SEQ ID NO: 19882 - DNA, 554 bp, Glycine max
atcatgtgatgcatcattcatatgttgtctattgttatgttaattggtcttgctagttgctagcacatcaatttctattatgtgttggatgacatcatggttcagccagattctatttttttctggttcttttccattttcatctttggtttatgattgatcattgctgagaaaattatcctcaactgggattttcatttccggggggagcatgacctgaattgcatggttttttttttttgttttttggctagattatatcaaatcaattaagattctgggttggatggcatgatggtttagccagattctgttttttctggttcttttttagtttcgatcgttggcttatgatttatcattgctgaaaaagttattctcaactaagatttttctttttctgggggaacctgaaatgaattgcatgtttttttggcttgactatatcaactcagttaagaatttcgccacgtaactcttgaagtacataaggtgatttaagagtttgagatcataaaattttatggttttaactcttaatatgcctttttctg

SEQ ID NO: 19883 - DNA, 679 bp, Glycine max
  unsure (1)..(679): unsure at all n locations
gaaactcttaagccactaggcagcccaagttgtgagtgataaaattgagtccaagaaaacaacgggattgaatgtctcgcagaggcaactaacccttctgttgctgattgcgctagagcagctgaaaaaaccctacatggctgccgaagcacttgcggaagcgtttcatcaattccgtatccatttggcataggcaactcttctgtcaccggtgaaaactgtttcttggagagggcattgatgctcacttgcataaactccacttgatatctcggaaacggtaacgtccaaattctggacataaccctcgacagtaaaatggtcgtgcttgccttcatctcgaaagtttgcaaaatcgaatcttttggtagagtagacacgaaaggtaacgaagccagtctcacaactccggcttttaccgtctctagcgaggacaacaagttcgtaaccgtagggtgcgatacctatggctatctcaacagctttaacaacgacatcaggtctcgaatggggtgcttcacaaggtgtgacaccatagagagtgtgcaaagcatgcaggaagatggaaagtgtacggggatagggtgttgccagatggatacctnctcgaatgaagaatattagcatacaagcattcagctattacaatttcaattactcttcggacttcaacaaatgc

SEQ ID NO: 19884 - DNA, 633 bp, Glycine max
  unsure (1)..(633): unsure at all n locations
ggaagtgaaagagagattgatttgactatgagcatgcagtgagtgtgatcaataactctacccattgcttcaaattcaatatgctttttggtttcgtttcgtctcggcttgtctttcactttctcaaccacccaacacaacacaaattccctttcttcttcttcttcttcttctaaatagatagaaggaatttagattaattaaaacaacctttcattcattctgttgtgttgggaaatatgatgttcgactttgccaggatttggacccgaaacacgttaataggtctcggcttgggtcagtttctttctcttctcatcacttccaccggcttcacttcctctgaattggctaaaaaaaggaattaatgctccaacttcacagtcgtttctgaattatgtgttcttgacgcttgtctatggaactgttctcctatatcgaaggaaagcactcaaggcaaaatggtactattatataattctcggattggttgatgtagaagcaaattttcttgttgtgaaggcataccaatacacctcactcaccagtgtgatgctgcttgactgctggtcaattccgtccgtcatgcttcttacacggctnttcttgaaaacaaaatatagattcaaaaag

SEQ ID NO: 19885 - DNA, 606 bp, Glycine max
gattgaaggctctttatggccagaccaagagtaaaaaagggagggtgaaattgttggatgctgaagaaataccagcaccaattgttcatgtcgagaaagatatgtttgtactggtggatgatgttttactgctacttgaaagggctgcaatagaaccactgcctcctaaagatgagaagggtcctcaaaaccgcacaaaggatggaaactctggggaggacttcagtaaagattctattgagcgcgatgaaaggcgtctcacagaattaggtcgcaggactttggaaatatttgtccttgcccatatattcagcaataaaattgaggtttcctaccaggaagctgttgctctaaagagacaagaagaactcatccgtgaagaagaagctgcatggctggctgaatgtgagcagaaagcaaaacgtgggggtgagagggaaaagaagtccaagaagaaacaggccaaacagaaacggaacaaccggaaaggaaaggataaagggagggaggagaggcctgctgtggctgtatctgacaagcaccatcacaatcctgctgatgagaaaaaggattctaacatggaagaagttcaagctcttgatgaaa

SEQ ID NO: 19886 - DNA, 507 bp, Glycine max
cggtcgcgtggtcggacgcgtggggtcgcaacacaagaagagaggagagcgttttccttttctttttaattttttctttggttaagcttaagcaacaaccgtcaccaagcacacgcgcagacgcaagctctttaaacggtggagaacgtgaactgaaccacttcaaagttcaaacccagattttgcaacaaaataagcacgccacaactcacctccactttgcttgagggttatattctattctatataaggggaagctcaacttcttcctccttgtcgcatacatagatacatgggttcggcaccagaagtgttggctcagagaagttgtggaaagctcattgggactcggttcctacagtacttgaatggaggtcctctctccttcaaaacccaccaagccatcgttctgattgtaacattttttgcttatgctagttaccatgccaccagaaaaaccacaagtattgtaaagagtgtccttgatccccaatcatcagctatagg

SEQ ID NO: 19887 - DNA, 478 bp, Glycine max
  unsure (1)..(478): unsure at all n locations
cacaatacaattaagctcatcatctggtcctgaaattggtgaagaaagttgtcttgtggtggatgagtactcagtagtggtgccttattgtgggtggagagctccaaagggatcgcattgatctaattcttgtagatgtttacacttgcaagctttgcatgcaattcctggattcagatgtgattcagtggttcacttattggatcatgcgatcccttaggaactttccatcaactctaaacatcttgttgatccatttgagccaaccataacttcaatgtcctgcagtctccactggcagatctcgatgattgccaagctcaataaaataagacaaattaatattattgaaattgtccatatcatatttcactttctatcgttaggttagtccataagctagaaatgagtaaaatatatagtttcacagcaatatcatctcttcattccattagagtggggaagaagtggngaaagg

SEQ ID NO: 19888 - DNA, 1294 bp, Glycine max
ggagaattcgccgctcaaggctattgactttggcctctccatattcttcaagccaggtgagaggttctcagaaattgttggaagtccatattatatggctccagaagtgctcaagcggaattatggaccagaaatagatatatggagtgcaggagtaattctctacatcttattgtgtggtgttcccccattttgggctgaatctgagcaaggagttgcacaggccattcttcgaggacttatagattttaaaagggaaccatggcccagtatttctgaaagtgctaaaagccttgttaggcaaatgttagaacctgaccccaagcttcgattaactgccaaacaagtgcttgagcatccctggattcaaaatgctaagaaggctcctaatgttccacttggagatgttgtcaagtcaaggcttaagcaattttcgatgatgaacagattcaaaagaaaagcccttagggtcattgctgatttcttatccaatgaagaagttgaagacatcaaagatatgttcaagaagatggataatgataatgatggcattgtctccattgaagaactaaaagctggattccgaaactttgggtctctactggctgactctgaagttcagttgcttattgaagctgtagatagtaatggtaagggaacactagactacggggaattcgttgctgtttcccttcatttaagaaggatggctaatgacgatcatcttcacaaggccttctcctattttgacaaagatgggaatggatatattgaaccagatgagctacggaatgctttgatggaagatggagcagatgactgtacagatgtagcgaatgacattttcctagaagtagacacggacaaggatggacgtatcagctacgatgaatttgttgctatgatgaaaactggaacagattggagaaaagcatcaaggcattactcacgtggaagattcaatagcttgagcttaaagttgatgaaagacggttctttaaacttaggaaatgagtagagttgtctaagtgtttgcctatattcgatctgtgtttccaaatagtgtaatattcctcctacaatatggacttggcttctttgtgataattatttggttccacttttagatgggttgctttccacttggtgctgtgcgagtcacgaaggattgggtacgccaattatgcatgcggtttgttacttgtgtaaaacatggtgccttggagccaatggtgtgacatgtatgatgattccactcgttttaaccactcctgccttctctttcggtttgacc

SEQ ID NO: 19889 - DNA, 370 bp, Glycine max
ggttgatgccattaaagagttgcaatctcatggaaatattcgtttgaagagaatgggggaacttgatactagaccattccttgaagcaatgaagcaaagatataatgaggaggatgctgaagagagagcttcagagctgtgttcattgtgggaagaatatctaaaggacccagattggcatccattcaaagttatcatggttgaaggaaaagaaaaggaaattattagagatgacgatgaaaagctgaatgggttgaaaaatgacttgggtgaaggggcatataaagcagtggtggaagctttgttggaaataaatgaccttaatcctaggggacgatccttaacctcagattaatggaactttaaccaa

SEQ ID NO: 19890 - DNA, 440 bp, Glycine max
gacgcggagatggagttaaaatagaagaattatgaccagggtcggttgcgtcgccgttcaggaaaattgaattcaatctgaaacgccctgtggtcatagttccaattccgaaagaatttcggggtgtttccgatttccaaacactcactcacacccatccttctttctttcaccgcaatattttttcctttttgaatcaaacttcggtttcttaatttctcattatcatatcttagatcttcagttttggatccacacaataatttgggggaaattgaattgaagcatcatcatcatcgtcatggatagcataatgagcaagctccgcaacctcgacgcgtaccctaaaatcaacgaggatttctacagccgcacgctctccggcggtgtcatcacgctcgcttcctccatcctcatgctcttgctcttcttctccgagc

SEQ ID NO: 19891 - DNA, 448 bp, Glycine max
tgacggagaaaccaatggctactgctgcaactacaactactgccccagattttattgaatgagaagagaagagaatctccaaacccaacactttgtttgacattcccattcattcacgctataatgattcgtcaatctctttacacccctccttccatcaccttctcaaccccatctccaaaacgtcaccgtttcgctcctcctagttggagaattcgatgcgacgcgtcgtcggtgtcggtggagcagaaggttgttgggccttaccctggtgggctgggcccacacacgggtagagacccaaacgcgaagaacccaaattggctgaggcaaaaagctcctaaggccaaagggttccagaagattaaggattcctggtccaattggaggttaacaattgcttccaagaagcacaatgccccaaccttagaaaatggtggaatggaag

SEQ ID NO: 19892 - DNA, 527 bp, Glycine max
gaatgacagagaggccaacgaggaagagaaaaatgggagacacaaaggagagagctacgaagaaacccgcggcaaaatggcctctcatcaaacccaaaaagaatcttcagattagccgcctccgagatttcgatctcttcacggtccagaattttttctcctccgctgaatcaaaggcattcgttaaaattgctgaagaaattggttttactcatcaggggagtctaggtccaacttatggcgaagcattcagagataatgatcgaatgttggtggatgatcctgtccttgcagatactatttgggagtctggacttagcaaactattttctgatattaaaattcgaggaaagggtgctgtaggcctcaatccaaatattagcttctataggtacaaggttggtcagcgctttggacggcatattgatgaaagtgttgatcttggagatggaaaacgcacttattatactctgctagtgtattgagtggtgggcctggtgaacttaaatcaaagcccaaaaatgatt

SEQ ID NO: 19893 - DNA, 402 bp, Glycine max
atagtcaaagagtatgttttgggctcgcagatggagctggggaggagggaagttaaggacaatatagtacgacagcaggagcttgcagcatatttcactcactgcaaccttcagacacctcacttgaggttagctttgcagaatgcaatgactgtctgcttcagggcgaagaaccttgccactgctgcaaactttgcccggaggctacttgagacaaatcctaccaatgaaaaccaagctagggcagcaaggcaagtggtagcagctgctgaaaaaaccatgactgatgctacccagttgaactatgatttccggaacccatttgtaatttgcggtgcaacctacatgccaatctatcgaggacagaaagatgtctattgcccatattgttcttcacgtttt

SEQ ID NO: 19894 - DNA, 406 bp, Glycine max
cgttctcgtgggcggacgcgtgggttctcattcgtgtttcgttaacgattccgacgctgaggaagttggtactttcgatgatgaaaatgataacccttctgaaggtgatgtggcattgagcaaggggctccagccatgtgttgggaatagcaaaagcaagcatatgattgagcaactacttatgaaggagtcattctcaagggaagaatgtgataggctgataaaaataataagatcaagagtggtagatcctgcaaatgatgatgatggggataagaggccaacggatatgcccaccaggatcctggaaagtgattaacctaacctcaatgatgttgccataatgaaggcaaagaaatggctgcaggaaaggaattcagctttggatccaattccggatttaggt

SEQ ID NO: 19895 - DNA, 575 bp, Glycine max
tcggttctgttacctatgttccgtgctctacttgtagacactgtggtagccaccaggatccaaagttccgaccagaagattcagaaacctatcaacctgttaaatgcacatggcagtgcaactgtgacaatgacaggaagcagtgcacgtatgagagacggtatgctgaaatgagtactagcagtggggcccggggtgaggatgttgtatcctttggaaatcagactgagctttccccccaacgtgccatttttggctgtgaaaatgatgagactggtgatatttataatcagcgtgctgatggcgtcatgggtttgggccgtggagatctaagtatcatggaccaactggttgagaaaaaggtgataagtgatgcgttctcactgtgctatggtggaatgggtgttggtgggggtgctatggttcttggtggcatatctcccccatctgacatggtctttacacattcatatcctgttcgaagtccatattacaatattgatctgaatgagatacatgtttcggtgaagcgactgcatttaaacccataggtttttgatgggaaacatggaact

SEQ ID NO: 19896 - DNA, 956 bp, Glycine max
ggtgttgtgttggtgttgtgtggtgtgtcgttgggaggggggaactcttggtctagctttggagccatcccaccaatccatcacccgatcacatttcaaagccccaacacatcacaatttacacaacacacatcacaattccgaacttagtgtacaacgaaagtccaacacacgaatcaaatcagacacacaacacaaacacaacacacactcactctccgttatccacacacaccattactctgttctgttctgttctgttctgctctgttctgtttcccaccacacccccccatggattgttggtactctcctcaccctctccatgatgaattcgagaagcttgtcattcgaatgaaccccccaagagttgctgtggataacatttcaagcggaacagacactgtcataaaggttgatagcgcgaacaagcgtgggagcttgttggaggtggttcaggttctcactgatatgaatctcagtgttagaagagcttatatttcctctgatggagaatggttcatggatgtttttcatgtcacggatcaaaatgggaaaaagtttatgcaagatgatgttgctgaccgcatgcaacagtcactgggtccaagagcctctagttttcgatccttgagaaggtctgttggggtccaagctgaagcataacatacaaccattggattaactggaagagacaggccaggattgctttcacaagtgtctgctgttcttgcagacctcaaatgcaatgtggtagcagcagaagtctggacccacaattcaagaatggcatctgttgtttacatcacagacgaggcgacgggattggccattgacgatccggatcgccttgccaagattaagcagcttctactgtatgtgctgaaaggagacatagataagaagagtgctaacactgctgtttctgttggttctactcacaaggataggaggct

SEQ ID NO: 19897 - DNA, 517 bp, Glycine max
gaggaagtgattgagaagatcatcgccaacgggggcgaggaagaggttctggggaaggccatacaggaacacgggagagggaaggttctggaaacagtggttgagattcaggacaggcatgatgctgccaaggaggtggagaagagtctactggagctgcaccaggtgtttcttgacatggctgtgatggtggaggcacagggtgagaagatggatgacattgagcaccacgtgctgcatgcttctcactatgtcaaggatgggaccaagaatctccagagtgcaaaggagtaccagaagaagagcaggaagtggatgtgcattgggatcattctgttgctcattcttattctgtttattgttattcctgttgtcaccagtttaagcagttcttgagtttttgttttttaaagaaggcctttgaggaggagaggagggagggatttggagagtttggatgatgatgaattcttcttgactcatcgtgtttagagtgcttgatgggagatgatctggt

SEQ ID NO: 19898 - DNA, 480 bp, Glycine max
ataatactcaccacccaaaccgcaataaccacacaactccaacgccactgagttagggtatttcatggagatccccaacaacaactatggaggctcctcttcttccgctatcaaggccaagatcatggcccatcctcactatcaccgtctcctggcagcctacgtcaattgccaaaaggttggggctccgcctgaagtggtgggaaggttagaagaagcatgtgcatctgctgcagtgataatggcaggtggaacagccagcataggcgaggatccagcgctggatcagttcatggaggcttactgtgagatgctgatcaagtacgagcaagagctctccaaacccttcaaggaagccatgctctttcttcagaggatcgagtgccagctcaaatctctcactatttcttcttcgttggacactactgcttgtaatgaagctattgataggaatggatcatctgatgatgttgatgttca

SEQ ID NO: 19899 - DNA, 380 bp, Glycine max
attttctgcactaggttgtcaggcaattgcaagggcaggatggagatatagtgggagaagaagttcctacaacaccaaaaaaaatgggtcagcttttgaatgaggtaattgaagctctttcttctgtgtcatctcctgaactggccctgagactgtatctgcaatgtgctgaggctgctaatgactgtgaccttgagcctgttgcttatgaatttttcactcaggcatttgtattatatgaagaagaaattgcggactccaaagcccaggtaaccgcaatacatttaattattgggtctcttcagagaatgaacgtctttggcgttgagaacagggatacattaacacacaaggccacagggtattcaacaaagcttttg

SEQ ID NO: 19900 - DNA, 1117 bp, Glycine max
  unsure (1)..(1117): unsure at all n locations
ggaagaacaacggcagggtaagtatattgggaatggtggtggatgagccgaagctctgtcttatgaaaaaattccagaactggctctgaaactgtgtcacaaagtgtgcatgggcaattgaagactatgaccgtgagcctgatgactatgcaatcgacactcaggcactcaggatacttggataagaattcacagccgacgatgtcctttttaaccgaatacttactactatgactgctttctagagactgcatgtctttggcattgataacagggatacattaacacacatggccgcagggtattcagcatagcttttgaagaaacctgatcagtgccgagcagtttatgcatgctctcatctcttttgggttgatgatcaagatggtattaaagatggagaaagggtattgctttgccttaagcgtgctttaaggattgcaaatgctgctcaacaaatggccaatgcagcaaggggtagcagtggtccagtgacgctctttgttgaaatactgaacaagtacatttactattttgagaaaggaaacccgcagatcactagttctactatccaagggcttatagaattgatcatgaccgagatgcagagtgactctgcatcagctcttccagcttcagatgccttttttaccggcacattgaggtacatccaattccaaaaacagaagggcggtatgctgggtgaaaaatatgatcccatcaaggtctcaatccctgcctaacatatccaagacacccaaatgtgaacttgtatgaaaagccaagcatgttgttgtgagtgttcatcttcatcttgaaaaacaaaaaaggtttatcagtgttcactactcgtgcattataaaatgtttgcagtggcatcaagtttattttgaagtgaataattttaaatcttcctacaaattcttctacttgctaaatgaagaactaattgaatgtattttatactgcaagatattaaatgtacttacattttcatttagttcttctgttgggcagattagtaggaggatnnnnnnnnnnnnnnnnnnnnnnnnnnnnnnnnnnnnnnnnnnnnnnnnnnnnnnnnnnnnnnnnnnnnnnnnnnnnnnnnnnnnnn

SEQ ID NO: 19901 - DNA, 295 bp, Glycine max
acctacgaaggacaacacacgcattcaagcccagttatgggtcgctccaacaactttggttcggtaattatgtctggatctgctggaaactacatgtcccaatattatcagcagcagcatcaacaagtccacatcgatgcattgtcctctttgggtttcctctcttcttcgtcttcaaggaatgccacttttcctcaagagactgccttgttaagtgactatgggcttcttcaagatgttgcttcttcacatatgttgaaagaagattagatgattacttcattactgcttttat

SEQ ID NO: 19902 - DNA, 470 bp, Glycine max
  unsure (1)..(470): unsure at all n locations
attaattcttggtcggtggtttgtctatcagaggtgtttttttgcagttgcagtagaacctaagatttgtgttcagatataaaaaagaaaaaaaaaaaaaggagcaacatagtcatttcctttgaccaagatgaagtttatgaaacttggatctaagccagattcttttcagagtgaaggggataataatatcaggtatgtcgcagctgagttggcaactgacatagtcattaatgttggaaatgtaaaatttcatctccataagtttcctcttttgtcaaaaagtgcacgcttgcaaaagctgattacaaacagtaatgaagagaacaatgatgaagtccatatccatgacattcctggcggatctgctgcttttgaaatatgtaccaagttctgttatggtatgacagtcactcttaatgcatacaatgtcgttgcagctcgctgtgcagcanaatatcttgagatgt

SEQ ID NO: 19903 - DNA, 1276 bp, Glycine max
gcgagaggaggaagaagtgtgaaaaaatggcggcggctgcgaactctgagggcaatgctcagaaaccgagttcggaaacgtttcagttattctcttcctccgcttccgccttcggaatcttcgacgatgctgcgcaacaagttcctcctatacctcctcctccctgcgttgaagtcctcgcttctgaggttccttcatccctcaaacacaacgtggactctgtaaatttagatggagttattttgttaaaggggcgggtgaatacccagcaagtttttggtttgtccaactccgatttagttcccgggaaatatgaaggaggacttaagctgtgggaaggttcacttgatctaattaaagcccttcgttcagatataaaaaatgggcttatctcatttgctgggaagcgagtattagaggtaggatgtggtcatggactgcccggaatctttgcatttcttgagggggcagctgctgtacattttcaagacttcaatgctgaggtcctacgttgcctcacaattcctaatttaaaagcaaatctttctggagaatctcaaccatcatcatccaactcgacaatttgtgacgaggcagaagttcgcttttttgctggcgactggagtggaattgataaactgctccctcatgttactacagatgcaaaacataatcaaggtgatggttatgactttattcttatggcagagacagtttactcaatcaacagtctccaaaatctctataatcttatcaagaagtgcttgcaacatcctgatggagtagtgtatatggcagcaaagaagtattattttggagtaggtggtggaactcggcggtttctgtctgtggtagagaaggatggtgtcatgactagtagcctggttgctgaaatcacagatggttcatctaatgttcgtgaagtatggaagcttgcatccaagtagtattagtattttcttccttcaccagtcaaactatcctcggtttatttgctcgtgattgcccatgcatgaaaagggggctgttggaagggtgccgatgggttgatcattcatgtcggatgagttttggtaatggttgtagaacccgtatggtcaggagagaatcttgcccctcatttcaagctatacttctctctctgcttatagtgggcttggttttcttggtcaaatgtattttctagttggtaatgcaaatatatattattttcgcccttgtatttaaaaaaaaaaaaaaaaaaaaaccgcccgctttagagattccaggctacgta

SEQ ID NO: 19904 - DNA, 2146 bp, Glycine max
cccacgcgtccgcccacgcgtccggatttttcgaaaccttagcttcagagagagagagagagacaaagagagagaagcaatcgtggtctctcttctatgagcttcacttcgattcccgccacttctctgcaagcataggattttgggttcttgtgtgaaggatatggctgaggtggtgaaatcagaggagtgttgtcaggagaataagcaatctactgctgcttcttgctcctctgtatccgaaggcagtggcagtgcaattcacaagtctccggggagatgtagccctgcatccacatcgccctcacatcggaggaccaccggccctataaggcgtgctaagggcggttggactgcacaagaagatgagacattaaggaatgctgttgcagtttttaagggaaagagttggaagaaaatagctgagttttttcctgatagatcagaagttcagtgtctgcacagatggcaaaaagttcttaatccagaacttgttaaaggaccttggacacaggaggaggatgataaaattgttgaactggtgtcaaaatatgggcctacaaaatggtctttgatagccaagtctttacctggtcgaataggcaaacaatgtcgagagcggtggcacaatcatcttaatcctgacataaagaaggatgcctggactttggaagaggaattggccctgatgaatgctcatcgtatacatgggaacaaatgggctgaaatagctaaggtccttcatggaaggactgataatgcaataaagaatcactggaatagttctttgaagaaaaagttggatttttatttagctacaggaagacttccaccaattcctaagaatagtccacaagttcctgtcaaagatacaattagacgttctgctagtaaatcaatgcttggttgttcaaataaagaattaaatgcagctgttgaaacatcatctgaaactacagccattagtaagctagatgacagtggcaggaatcagtttgagtcctcaggcacagttagagaagttggtgattcttcaagtgttcctgcaaatgactctgccgattctgactgtgtagaatgcaagcctggatcatccaacatcaaccccagctgtagcaactcagaacacgtgtcaagagctaattttggaacaacttttgggccaatatctgagaattctggactcaatggaaactcaacttttgagcattgtacaaacaatggtgacaggagcagtaccaggttaatcggaacatcttcacaagaaaatccaacctgtggttctttgtgttatgagccaccacagttagatggttcagttcccatagattctctttatttaaattatacttgccagcagaatgagtactgtccgagtccaacgatgtcacctactggtttcttcactccacctcgtgcgaagggtagtgaattatgcactgagacacctgaatcgatcttgagaaaggctgctaatacttttccaaatactccttccatattgaggaggagaagaactggggcccaaacactcaccagtcccactaaagttttgaaagtagataataatccacatacttctaataaaacagagagaaccaatgatgattctggttctgggcatttctccgggagtccagcaagccatggctatgggattggcattcccaacaataaggcattcaatgcatctcccccatacaggttaagatccaagcgaacagcaattgtcaagtcagtggagaaacaactggagtttgcatttgacaaagagaagaatgacgacaagaggagtaatgtgatgactgaagatcgtctgcatgaaaaaaaattggttgtgacatagtgcataaattggattatggctggacttgcttttgaaggtagctgattgtttctctaaattgtttgacaatgtttaccaattttatgaagaaaattcagtgcacgggtcacaatgacttggcacttctccacacttgatagttggctgtcatttccatcacacttcaacaaaattcagcaacagtagataaattccatttacttgtggatacatatagctagttgtatctatcagatttgtacagttgtcttaggaaaaataaattttctaatgttttatcaatgtttttagattccttcc

SEQ ID NO: 19905 - DNA, 442 bp, Glycine max
tcgtgtatacctgaaagaagctaagatctattttccatcaagagatgatccacagtgcgttgaaatttgtttcacagacacaaattgccttgccccggaaggctatttaacatcaactattatgaacttctacattcaatatttgcagcaacaagcattgttgacaaatagatcgttatctgcctaccattttttcaatacatatttctacaagaagcttaaagaagctgtttcctacaagcaaagtgatagagagatctttgcaaagttccgaagatggtggaaaggtgtaaatatttttcagaaggcttatgttttgattccaatacacgaggacatgcacttcctgcccaaattttgcatttgactggagcgtattgttagatatatatcttacctgcccctctactcagttctgggtttattacgcatgtttcatgta

SEQ ID NO: 19906 - DNA, 701 bp, Glycine max
ggtgaagaaagagactaccagttatcgagtgacaggtttatcttcttctgcttggtagcttcaattccatctacctgcttagtgttatttatattccacactgtcatcaatcagtaaacaaagttaaatctgatccttcattcccttctcccgtggcagctctcactgttggccactgttgctgtagcaatagggtaccttcatctcatcatgaattcactaacagaagcagatcacccaggatttttattctatcatcttgccatggtagaacaccagatcccaaagaaaagaaagatgatcataagatgggagaaggaaagctgagcttgttgaaatggaaaatgttaaacgacattgagaaggtagggaagagggtgaagcagaatttgagtccacagcaaaagcaaaagggtgattggaaagacttgttgctgatgagtatatcgttgcagtttatgtgtacatatcccagatgctagtttgtgcctattttgcttggacctctatgcccaaacccatctggtagctaagctagttaattacttgtcatcttcacttgcctttcatttgtagaaaaagatcatcattatgattataagagaagaataagatgtgtgtattggtcatgtatactatacacgagtgacagtaatatgtattcgtaaatggtaatagatgatggctgttttattattttc

SEQ ID NO: 19907 - DNA, 1131 bp, Glycine max
aaaggaatcaaagttgattctgggcaatcaaaatttttcagggtttcgggaagagaagggaatttgattaagctgggaaaagttaagccagacgtttctgaattcaacctgacctctggtagaggcaatatgtctgatgggcggataaaacatagtattgatggaatgattaatcaggttggaataaaagccccatcaagaggtgaaaggacatatttggggaggcagtcagaaggcagctctgatgcatatgagacagatgacaataataatcgtacaccttcacattctttgccaaaagattccaaacctttactaagatttaaattcaagaaacccagcattgaaagtcaaaattctcctcatcaggaggaagagaagatgacaatcaagggccagaggtcaaaaaggaagagaccttcaccttttaaggagaaagcatcttttaatgagtctgaaggtgtaagtcaatcacatcaagacagtgcaatggatgggataatggatgcaaactggatattgatgaaattgggcaatgatgcaattggaaagagagttgaagttcatcagacatctgacaattcttggcacaaaggactggttactgacgtagttgaaggcacttcaaagttatatgttgcattagacgatgggaaagtgaagaccgtggaactcaggaaacagggggtccgttttgttcctcaaaagcagaagagatcaaagacatgaactaaacttgtccgcccttagtgatcatttaatgtggagatttttcttaattgacttcgaagattttcatctttgaggcctcttgctgaatttatattcgtagctgctcacattgccgctgatttttgggtgaagcattctcgattggagcaaatttcagttgaaagaactaaccatttacctcggtcctttttctgggcggcaggttcttgatctcgagttagatttttgttccttttctacatgtatctgatttcaaagtagattctacctgtgatgtataggttcaccatttctgtagaatagagtagtgaaggccaaggtgttagctgtatgattaatattgctagtagatttgtgaattccaggtttcatgatttgagatatttgtcttgcaagatg

SEQ ID NO: 19908 - DNA, 1331 bp, Glycine max
gattgacagtatcagagacgaggttcggcttctgcaatcaatctacgagggattgcaggaagatccaagggaagtgaagggatacagaaaagaggacttcaggattctgtgggtcccagttgtggatgagtggaatcttctgcacagggccgagtatgataacctgaagcttgaaatgccgtggtatgtggcggaatacttctaccccttggccggaataaggctcataagggaggacttgaattacaagaacaaacccatcatccctgtgctcaaccctcaaggaagagtggtcaactacaatgccatgcacatgattttcgtctggggcatcgatgcattccctttcagaccctctgatgatgatgtcctcacccagaaatggaattggttctgggccgaaatgaagaaagtcaatcccaagctacaagacctcatcaaagcggacagtttcatcttcatatatggaggcagtgacaagaagtggctgcaagatttcgctcaggcagtggaaagaatcaaaaggcatgagatcatcaagagggcagacgcggtgatagagcactatccattcggaagggaagatcacaggatcgttcctcgcttctggattggcatagagagcctgttcgcgaacatgattcagaagacacacaaggaccctaccattgaggagattaagagcttgctctgcctcaaacagcaacaacccgggtgggttcttctcagcaaagggtcgaacgtgaagctgttggggggtggggacccaatgctggccactgcagctgatttcgagatatggaaggaaaaggtgctggagaaagcagggtttgacgtggctttcaaggaatactatgagcagaagcgtcgcaactaccctcaggaatgctcgcacatgcagttggctaactaccctgctgatattcttcacccaattaactgccctgatgctgcttgtggcagatccatggagatagcttctgtcagttacaagtgctgccacggtcaaacagctcatcacaaggctgaagttccagagagtggcgatgtcatgattgagaagaagctctacgcttcttaattgatggatccatccacgagtttgttggtgatttttctggaggagcctctattttcccagtttggaattcaattgtgtgcactactttatcatttttacgtttcggctgttgtgatgaagcctcttctgtgctgcccttgtatgggttgaaaataatggctacaaacagcgtctgtttgtcttactgcaattgactttgattcaattaaagagaaacctgttgggcttccacaaaaaaaaaaaaaataaa

SEQ ID NO: 19909 - DNA, 340 bp, Glycine max
ccagatccatggagattgcttctgtaagttacaagtgctgccacggtcaagcagctcatcacaaggctgaagttccagagagtggcgatgtcatgattgagaagaagctctacgcttcttaattgcaccgatccattttgctgacggatccaccttttcaattctattccaagtctgtgtgcactacgtacttttatcatactattctcatttgtacgtttcggctgtatgttgtcatgaagcctcttctgtgctgcccttctatgggttgaaaataatggcttcaaacaccatctgtttgtttatctgcaattgattttgattcaattcaagagaatcc

SEQ ID NO: 19910 - DNA, 557 bp, Glycine max
ggaacaagaaacgcgtctggatttaacagttgtagagagaaggaagaagatggtgcttccgcaagatttgataactgaaatcctgttaagattgccggtgaagtctctagttcgtttcaagagcgtgtgcaagtcatggctttttctgatatctgatccccgctttgcaaaatcacattttgaactagctgcagcacttgcagatagaattttgttcattgcatcttctgctcctgaactccggtccatagacttcaacgcatcacttcatgatgactctgcctctgttgcagtaacggtggaccttcctgcccccaaaccctattttcactttgttgaaataataggttcctgcagaggctttatacttttgcactgtttatcccatctttgtgtgtggaatccaaccactggtgtccacaaagttgtacctttgtcacctatttttttcaataaggatgcggtgttttttacgcttctttgtggttttggatatgacccatcaacggatgattacttggtggttcatgcatgctacaacccaaaacatcaagcaa

SEQ ID NO: 19911 - DNA, 898 bp, Glycine max
ggaaggaagaaggggaagaagaggccaatctcacaaacccagaaacgatagagcggaagaggttgaaatccttggccatttcccacaacattctctctgagacacctgcacggagctccgttcagctgaacccttcctccgtcgtggccaagcaccacggcaaagacatcatcaagaagtctcagaggaagagcagcaggtacctcttctccttccccggcttaattgctcccatcgccggtggcaagatcggtgacctcaaggacttgggcaccaaaaaccccgttctctacctcgatttcccccagggtcaaatgaagttattcgggaccattgtatatccaaagaacagatacttgactctacagttccctaaaggtggaaagagtgtaatgtgtgaggattattttgataacatgattgtattttcggatgcatggtggatcgggaggaaagatgaaaacccagaagaatccaagctggaatttcctaatgaattgtatgagggacaccaagctgagtatgactttaaagggggtgcaggtgcaggtgcagcttctgtagttaatcaaggtgttcccagaaccaacattcaacgtgtagagcaagagtcaccaaagacacccaccgaagatgatttgtcagacaatgaaatcaatttaaaagatacaaaggaattggttccggtccgacattcaacaagaactgcaaaaaaatcatacaaatttgctgaaatttcttccggtgatgattctggtgaaaacggccctgagctttctgatgatgaagagaaagtggtagaagttgatactgctatacagaaaaaaactgtagtttttgacctcgatgatgaggatgatgcaccagtagatcaacctgccaagataaatactgagtc

SEQ ID NO: 19912 - DNA, 796 bp, Glycine max
  unsure (1)..(796): unsure at all n locations
ggtttntgttaatgggcttgtaagtgttgtggtgaatgtgatgggtgatagtttcccggagctaaaacaacaggaaacacacattcggaatataattgaagaggaggaggaaagttttgggagaaccttaattaagggaattgagaaatttgaggcagctgttcgacaagttcagggaaacatactgagcggggaggaagcatttgtcttgtgggatacatatgggtttccattagatctcactcagcttatggctgaagaaaagggattagttgttgatgtcaaaggttttgatagtgctatggaagctgcaagagagagatccagaagtgctcaaacaaagcaagctggtggtgccattgtcatggatgccgatgctacctcagctttgcacaaaaggggcattgtcccaacaattgatagctcaaatatgcttggttcaaggaccatgagagtgtggtaaaagcaatatatactggttctgagtttgttgatactgttaacaccggtgatgatattggggtagttctggagtctacaagcttctatgctgagcaaggtggtcagatttttgatactggatcacttgagggcccacatgctttatttgaagtgcgtaatgttcaagtttatggaggctttgttcttcacattggtaatgggactggtgtctcagttggcgacaaagtagtgtgcaaggttgattatggaagacgcgcccttatagcccctaaccatacctgcacacacatgttaaattttgcccttagggaagtatttggtgatcatgttgacc

SEQ ID NO: 19913 - DNA, 332 bp, Glycine max
ggttgtagaaaggaggaaggtttggtcattgttgcagcactctcctaactttcttctttgctttctataacttactgggcacttatatagaaatagatagatagtctttgctttcaaagtttacactttgcttcgcgattaatccacgctcctagctcttctaaataccctttctttcttttgcaaccatataataccccgaaaccgttctcttttacatcggtatcgttgtcgcagatggagctagctttgagcttaggcgacacacccaagcccttctctttgcccgcaaaaaatgattctgtgagtttcaaaatagcactgggtgacga

SEQ ID NO: 19914 - DNA, 356 bp, Glycine max
  unsure (1)..(356): unsure at all n locations
ggttccaccattgttttcttgtgagaaaaaagtgtaaactgaagactgaagagagccgcgggaccctattccagccaaatcccaggattgtgaacactgactgaacaaacaccagagacagtatttggggcagcaattttcttttccggattccaaacctattttattttttctatttttcagttcatccttttcaaagttctggtttattgaaaacatttctcacaccgtccaacttcaattcaacaanccgcccttttgcaaatttggttcttttctctttctctgtcaccactttccttcgtcgtaggtcacagcgcgcgcttccgcattacccgcttctctctgcaaatgta

SEQ ID NO: 19915 - DNA, 794 bp, Glycine max
ggaacccatactctatcaaccgtagggggaaattttgtcccaggagcgagtgtatttgccgttggcaatggcactgcaaagggtgggtcaccaagagctagggttgcagcttacaaagtgtgttggtctccaactgatcctgcaagttgttatggcgctgatgtgttagctgctattgaccaagccatagatgatggcgttgatatcatcagtctttctgctggtggaagctacgttgtgactccagaaggaatattcacagatgaggtttccattggggcatttcatgcaattgctagaaacagaattttagttgcctctgcagggaatgatggacccacacctggaactgttctcaatgtggctccttgggtcttcacaattgctgctagcacattagacagagactttagcagtaatttaaccatcaacaataggcaaattacgggagccagtcttttcgtaaatttgccacccaataaagccttttctctgatccttgcgactgatgctaagcttgctaatgcgacatttcgagatgctgaactttgtaggcctggaacacttgatcctgaaaaagtaaaacggaaaatagtgcgttgtattagagatggaaaaataaaatccgttggcgagggtcaggaagctctatctaaaggcgccgtggcaatgcttttgggcaatcaaaagcaaaatgggagaacccttcttgcagagcctcatgttttggctactgtgaccgacagtaaaggacatgcatgggcacagcctggttacataactgccattgggga

SEQ ID NO: 19916 - DNA, 825 bp, Glycine max
actacaaaatgagtcagttactctgaaatggccaagaaagactggaatttctgaagctgatttctttgaatctgatgactcatggtttgatgctccaccagagggtttcagtttgactttgtcaccttttgcaactatgtggaataccctcttttcatggacaacatcatcttctttggcatatatatatgggagggatgaaagttttcatgaagaatatctatcagttaatggcagagaatatccttgcaaagttgtcttggcagatggtcgctcatctgaaataaaacaaactttagccagttgtcttgctcgagctttacctgcgcttgttgctgtgctccggctgccaataccagtatctatcatggagcaagggatggcatgcttgctggagacaatgtcatttgtggacgcacttccagctttcagaacaaaacaatggcaagtggttgctcttttgttcattgatgcattgtccgtatgtagattacctgctcttatctcatacatgacggataggagggcttcatttcatagggttttgagtggttctcaaataggtatggaagaatatgaggttttgaaggatcttgcagtgccactgggccgagcacctcacatctctgcccaaagtggggcatgacaacaaatagtgcattttttttttatttggggaaaatttacctgtcaagcattggagtgcttgtttataaacataaaaaatatgcaatgacaattatgctaggcctctagcaacacgggaaccagatttctatattctctaatgctagctagagagtgatgaatgcaaaattgatattc

SEQ ID NO: 19917 - DNA, 617 bp, Glycine max
  unsure (1)..(617): unsure at all n locations
ggcgatctgagagtgaagttgaatgcaaagaaaaaatggcgtcgataactggaccacagattctactgcactctggttctccatggttgaaacagacgatgaaaccctcgtcatcaccctttctcctcttcccaaaacacactcctcgtcgcaccttctgctccatcaattccaattccaagggttcgagttccatcgttcccgacctcctccattacctgaaccactcctggacccaattccacgccacagccgaagctaaacgacaattactcgccgccggtttccacatgctcgacgagaaccacgactggcacctcaagcccggcgggcgctacttcttcacccgcaacatgtcctgtttggtcgctttcgccatcggagataagtcagctcactttacttcttcaccttctctcttttatttttctttatcgccaaatgttattgttagtttgttagttttttgttagcgagggattcgaatccctccctcccttctctgtagtatactttgttccgttacggttttgtgctgttttgtttgacgccgttgtttttgcctaggtacaatgtcggngacggttttcacgtgatagcggcgcacaccgacagcc

SEQ ID NO: 19918 - DNA, 569 bp, Glycine max
actcgagccgaatcggctcgagcataaagatgatgctaaagagcccattccttctgttctgtactctttgagtggtgacaatggttatagaaacaactcagtatcaggagctggagggacattcctgtttgacaatttgtttcctggaatgttttatttgcgtcctgttttgaaggagtatgctttctcacctccagcacaggcaatagagcttggagcaggggagttcaaagaagtagttttccgggccacacgtgtagcctacagtgctacaggtatagtcactctcttgtctggtcaacccaaaggagaagtttcggttgaagcaaggtcagagtcaaaaggctattttgaggaaactgtgacagattcttctggaaattatcgtctgagaggactactgcctgatactgactatgttgttaaagtggctaaaagggacgtgggcagttctaatatagagcgtgcatctccagattctattgctgtcaaggttggaactgaggatatcaagggatcggattgtatagtttttgaggagccggaaatgacaattataagttgccacg

SEQ ID NO: 19919 - DNA, 279 bp, Glycine max
ggatcttttgttggttattgggaaacgggttgtgacggatccttcaagggaagaaagtgggtgctcgagtggtgtggagtgcattcttggcattctaagggcccttaagatggggtcctgcttctctgcggaaaagcacgagccctccccccaattcaccaaattcatcatctttcaggaagagcaagagcctctcccagaagaggcttggatcaagagcctcttcatttgagtattggaggaatgagcctccttttatgatccctgtgaggatctttc

SEQ ID NO: 19920 - DNA, 1103 bp, Glycine max
gtcagacgaaggaagtaaggaagctagtctatatattttaaatttgtgatcatcttcattaatatttcattccatggcttcttgtcactcgtctcccactctagtgtttacagtacgaaggaggcaagcggagctaatagcgccggctaagccgacgcctcgtgaagttaagaaactatcggacattgatgaccaagaagggcttcgtttccaaatccccttcatacaattctatggtaataataaagagtcctccatgaaagaccctgttgaagtgataagaaaggcacttacaaaaactctagtattttactacccctttgcgggtaggcttagggaaggtcctggccgcaaactcatggtggattgcaatggtgaaggcgttcttttcatcgaggcagacgctgacgtcacgctgcaccaattcggtcccagttatcttcttcatccaccgtttccttgcttggaggagcttctgcacgatgttcccggttcacgtggagttaccaactgtcccctcctcctaatccaggtaacgcggctcaagtgtggcggtttcattttcgccctccgattgaatcacagcatgagcgacggattcggcatagcgaaattcatgaaagccttagccgaaatcgcctgtggcgcaacggaaccttccctcactccagtgtggtgcagggagctcttgaatgcaagaaacccacctcgaatttcacgcacccatcacgaatacgaggtggaaaacaaagccaaaggaactatgatgatcccattaaacgacgtggtgcaacgttgtttcttcttcggacctagagaggtagcttctctccgtagtttggttcccaaacatcttggtagatgcacaacatttgaggtcatcactgcatgcatgtggagatgccgcataagagcattgcaacttgacccagaggatgatgttcgcttcatttacactattaacattaatgccaaggtgaatcctccattacctaagggttattacggtaatggatttgtgctctcggcagcggtaaccacatcacgaaggttatgcgagaatccatttgggtatgctttggaattggtaaaaaatgcaaaat

SEQ ID NO: 19921 - DNA, 562 bp, Glycine max
ggagaaaaaaaataaaataaaaaataaggggaatgaatctggtggcctggtggggagtggggactccgcgatcctcgacagtacaatttcaccgagttcccatcagcagtgcgaaggggagtcccatggatcagccgaagcgagtggttgtctgcggcggcggagtaatcggagtctgcaccgcctactttctggcggagaagggcgccgctgtcacgctcatcgagaaatccgacgtggcgtgcgccgcgtccggaaaagccggcggattcctcgccctcgattggtgtgacggaggaccgttggaagagctagctcgcgccagcttcaatctccaccgttcgctctccgaagaactcgagggtccgcgatcgtacggttacagagccctcaccactctcagcctcaccgttgccgaatccgaaggctcctcttctgccacatcaacgttgccgtcttgggttaacggagcagctcgcagttgtaaaacgattggaacaccagaaacgacggcgcaggtgcacccgcggctcttcactcgcgcgctgattgatagagcggt

SEQ ID NO: 19922 - DNA, 406 bp, Glycine max
tcgagaactaaaactaaaacccagtaaggctgaacatgctaatggacatgaacttcttttatcggaattcagaagggcccaaatatcaaacaatagaattttggctaatgccggaactggaatgtgaacaaacatacacataccagcagtaacagacacgtgtctgatttcttttttataaaataaatagaacccaatcggatgagtatgaatctagtggtgggggttctgcggccaccgcttattgcatttcggcgaaacaaaatctccataatctcgagagtgaattcaattgagtcgtcatcatcatcgcccatggatcagccgaagcgagtggttgtctgcggcggcggagtaatcggagtctgcaccgcctactttctggcggagaagggcgccgctgtca

SEQ ID NO: 19923 - DNA, 521 bp, Glycine max
ggggggagtgaaattagaattcctagatgcttggagagtgagctcaccgagctgcatcttagccttttgctccttcaggatgttgagttaaaaacagccgggattataggttgtgcaagattacacctgtgaggagtttgtatgaacataggcaacataaggtcaatattaccttattagcatccctagaaaagggaaataaggaaaaacggaagtgaactgcaccaaccgatcattatggcaaagaggtcccaaagattccctgtgaattatgagaaagatcagtcaggatgtatgtggggttttattagtatatttgactttcgtcatgcccgctttactcggaagttgatcgcggataggaggcatggcagcaagcatgctgttgctgctgcacttaccaagaacaagtttgaagtgttgagcaatttggatgaagaatatgaaggcaattttgacagaggagagagtaacgcactaacactgacaaatgatgcagatagacttagtgtgaagaaact

SEQ ID NO: 19924 - DNA, 483 bp, Glycine max
tgatggtgtttcagaaatgattgttgccgtttcttatttctttgatcacgagtattatgacaaccaggagcatcggaaagaactgggtgatattgacattgggaaatatgttgctggtggtattgttgtttttaatctggatacgaaacaagttaaatggactgcagaacttgatctgagtactgatacttcaaacttccgtgcctacatatattcttccccaactgtcgtagatttggatggtgacgggaatcttgacattcttgttggaacttcgtatggcctgttttatgtgttggatcatcatggtaaggttagacaaaagtttcctcttgaaatggctgagattcaaggagctgttgttgcggctgatgttaatgatgacgggaaaattgaactagttacagctgatacacatggaaatgttgctgtatggactccaaaaggagatttaatatgggaaaaacatctaaagagtcttat

SEQ ID NO: 19925 - DNA, 407 bp, Glycine max
ccacaaatagttggttcatataacgggatgccaaattttgtaacataactcaaaagcagcaagtgacaccgcatgtatctctaaataacattatactcaatacaattggatgggtttcataaaataaacaaaaattgcgtcgccttacaagcgtgatcctctaatattatactaccaaattcgccataaaattctcatcctatacggaaaagaaattggttcaaaccatcagaatgacaaacaaaaattgccttatcaatcctcatgcaaagccttcatcaaatagagtctgttaaagctctgccctgacaccccattgatttggttgcagtagttggaaatttgatttggtatgaagaagctcttcaaccgtgaaggctctgggagcggcttgaaaatgggatttg

SEQ ID NO: 19926 - DNA, 369 bp, Glycine max
atgctctgtgtgtgcagatggaattctcgtttggtccccgaagatggttgcctaaagaattactgcaagacagacgtgctgatgatgatgttggtaacaatgaaaattatgcgctgggattgcatgctcctggtttttttgataaaattctaaatgttgacaactgcttactgcaatctcatcctgctaataagggacttgcagctgtccaagaatgttggagagatccacaacttggtttttctccctacagtgttcattcacacaagggatttcttaagcatttgatgctgagaactggaagggatgtaacaacttatcagcctgaagttatggtcaactttgtgacctcttcctacaagcctgagc

SEQ ID NO: 19927 - DNA, 411 bp, Glycine max
gggattgaatacgaacctgtaacatgaaggctacgactattacagtaagaaatagtgctgcagtctcaaaaagttgaaagtttaagtccataggttgccctattatccagccaataacaacacaaaatggtatctgcataaggaaaaggaaaacgtgaaggaaatgaaagactttttgttattaggaggaacttataaatgaaaaaagcagattactgtccatgaatgctgcatcaagccatcaactactacataaaggaagaagttgaaaaaattcagtggtttcatcacttagtttcaatcgtactattatgttatatatcctactaaattttgctttttcttatttagacaacatgccaatcttttagcatggtgaactccatcagaaaaatgcatcactaaagttct

SEQ ID NO: 19928 - DNA, 1253 bp, Glycine max
tgttatccacgccagctgtatctgcttttttttgtgattccctttggttctggggtggaatgtacgtataaaagttgatatcttggtttcgtttcttggttgaggagaattgtttggggctgtcttggtgttgggctggtcctgaatttttttaatgcctttttggttggtttctagttttttttttttttaaagtgcgtactaggaactctctctctctctctgggaattgggtgcttctatttgtttaatggaagattatttatgggtttagattattgggtttaacagttcatgcctagtcaccaatacgcgtttggtatacgtattgaaatctttctttcttcttttgtgcaaatttgcttggtctagcagccatatctgcatctggttttgcgcgtggtgtacacccagacattctcgctgatctagttgggataaagtgtctccttatattgccaagacgagtttactgtctggcgggagtgttttttgtttggaggtcttatatacttgtgagaaagagagctttttgtatttgagtagttgggtgatagaggaaggcgaaggttctttggtggggctagatatggcctctggtgaagggaggcggcgtcatcatgatcttgtgcctcttgctgcattgctcaagagagagatgaagagtgagaagatggagaagcctactgtgagggttggacatgcagctcagtccaagaaaggggaggattactttctaattaagactgattgtcaacgagtgcctgggaactcttcatcatccttttctgtatttgcgatctttgatgggcataaaggaaacgccgctgccatttttaccagggagcatttgttaaatcatgtgctgggtgctcttcctcgagggcttggacgagatgagtggttacaagctttaccaagggcattgggtgctggctttgttaagactgacaaagaatttcagagcagaggagaaacttcgggaaccacagctacattcgtaatagtggataggtggactgtgactgctgcatctgctggagattcccgttgtatactagatacccagggtggtgctgttacctccttaactgttgatcaccgacttgaggagaatattgaagagagggaacgtgtcacttctagtggaggtgaagttgggagacttagcattgttggtggggctgagattggtccccttcgttgctggccagggggtctatgcctttctaggtcaataggtgacatggatg

SEQ ID NO: 19929 - DNA, 528 bp, Glycine max
caaaaaccatttaatttttctctctcttttttcttttttttcttttttttttctctggtgtctgtcatggaagttaatactactacaaccactgtaccttcagggccaccaactaggaaccattcttacacacaacaccgcttacattcagaaagacatagccataaccatagccatggccatttcccctccaaaaccattctcataatcatcgcattcgtcaccttagtcacggtcctatttatcattttcgtggtcctattcttgatccgtcgccaaaaatcctccagcaagaatggaacttgcgaagaagacagcagagagcttcctgacacaagcagcaggctcatcactttaacaacgttgaattctagcccaaatgtgaaaagtgggtgtcttcatgggggaaatttgagcaggaccccagcacctaaatttcgtggagtacaagtgttcacgtatagggagttagaaattgccactgatggattcagcgaagcaaatgtgattggtagtaatggaattatt

SEQ ID NO: 19930 - DNA, 512 bp, Glycine max
tccgggtcgacccaagccgtccgccaagccttccgaccggttccaaaaggccaccgaagggggacaccgtcaaattgggagaatgggttttcgggatgaccatgattttagtatgcatccggatttccgtcaaaggcaatttggtccacaaggagctgtgaggggtggacattatgcacgtagccgaggtgctgcatttgcgggaccatctataccttatcatgatagagcatggtacggtatccctgatggaggccctagtgagcctattcctccaaggaggccctactccccaggtggacagtttgacatgccttttatgggaaggcattttgatgatccatatctatacgatgacaatatgcaaggaatgaaacggtcattttatatgactgaccctgagcctgattacatggtgcctactagactacgtcctcgattggattatgcagatacacctatatttcctggaactcatcaccatgattcttttggggctggcagcatacagt

SEQ ID NO: 19931 - DNA, 403 bp, Glycine max
ggaagaggaaggggctagagaaaaaagaactagcgggcggggggctgagaaccctaacatgtactagtactactactacattcctgcatattactttgtactatttttttttaaccatagcatcaagagcacaaagatggtgtgagctccttcgtgtgaaaagatgcgcctgaagaaagggccctgagctacccaggaagatcaaatcctcacatcttacattgacaaacatggacatgggaattgtcccgccctcccatagcaagcaagcttggtaaggtgtgggaaaagctgtatactacactggattaactatgcgtggcccgatattctaagacggactctcacaattgaagaagaagaaactatcattaagctgcatgacatgctgaagaacaggtgg

SEQ ID NO: 19932 - DNA, 743 bp, Glycine max
  unsure (1)..(743): unsure at all n locations
tgcctcgtaccggtccggaattacccgggtacgaccccacgcctgtccggcttttgcgagaagaccgactagaagtggatattcagtgttnnntaaaaaaaccgtggaagattnntaaatgtgtcgattctaccaacagtaacccttgataatgtgctcttgaaaatgggctgtcagtgatttgaccacccatcttaaatcanncttaatcttggatgctctcgacagattactcgatgcctggacttagcannaatcttaccagtcttgagtggattgataacatttggatctctttggagcacgcatttcagacaatggaactacatttttacgatcgttcaagaacttgcaatcccttgaaatatgtggcggaggattaactgatgctggtgtaaaaaatataagagaaattgtctccctgacacagctaaacctgtcccagaattgtaatttgacggataaaactttggaattgatatctggtattttcttcttgccttcaatactttatataccccttgaaattcgggtaatcagaattaaatatgaaaggaaagaaaaattggatggagaatattatttgtttgtattggtttttcattcctctccttgccctgtaattggatcgagtaaaagtttgttctgctttgattaacacatctttgtatatctttatatctgaatacaggaatgacagctctgaggtcgctaaatgtttcaaatcctcgtatacccattga

SEQ ID NO: 19933 - DNA, 633 bp, Glycine max
ttgaaatatgtggcggaggattaactgatgccggtgtaaaaaatatcagagagattgtctccctgacacagctaaacctgtcccagaattgcaacttaacggataaaactttggaattgatatctggaatgacagcactgaggtcgctaaatgtttcaaattctcgtataaccaatgaaggactacggtatttgaagcctttgaagaatttacgcactcttaccttggagtcttgcaaggttactgcttctgaaattaagaagcttcagtcaactgatcttccaaatttgataagctttcggccagaataaatcaggagaataagagaattctgttatctgcctgttgaacaattctctgtacatatttatggctactgtttggataaaaaaatgtacataaaaatggcatgcaagaatgtaattatgctttattttgcatgtttgtatttccccgtctaagaaaaattgtacataaatctttttctttctccctttctcctctgggtaaatatgcctggtggggctatctatagtatgtgcataatgtaagtgtaataaagatgtttggaccagagtgatggtgctcattattatgttcgtatagtaatgaattgtatttgactgagaaaaa

SEQ ID NO: 19934 - DNA, 369 bp, Glycine max
tgttactagctgcaccataattagagcatagcaaatatcaaaatccttcaaataaaacttaagctatatgaactttgatgtagacctatttgtttcaagcacgtctttagaatgaccgtttcacggaaacataatcctatgtatggatgatgcttgtaaattgtaaattcaaaacaatatgcaagactagccttattctacatgatatcacgattccagtgtaggcatttacaagatgaaacagtctacaaaaaccaactgccatagatgatgcatctagtttgagcagcatccaattttcttcaaaacggaggaatcgcctttcacatttattgactgacctttagatgggacagcataagaactggc

SEQ ID NO: 19935 - DNA, 421 bp, Glycine max
gagacacaaaaatgttgtacaaactgttgtatgaaatgttaacatttctctattaaataaaataaaccaaaatagaaaccattcaaagttccctggctcgtttttagatcaaaatcttactatcttacactgtaacaaacactaaacattaacccagaagtaataaaggggaataccaaaaagttggctcatttatccccacaaggactctatggtatttagggtgacatttaaggagggacttgaggtgggatcaagggcaagatctgggtagcaagcagattcctcttgtgtaggcctacagcatatcctgtcaaaagaaactccttcctcagtgttgtcatggacgaatcgaacaatgaaggcgcacgtacactcttgtggatcatgtatcttcctatggatttttacaattcgagca

SEQ ID NO: 19936 - DNA, 517 bp, Glycine max
agagaaactactttctgaagaatcatttttgcgtctcaaagaagctggaactggtcttcacacaaagtcagtagacgagcttatcagcatggcgcacaagttttatgatgaagttgccttgccaaagctggctatggactttggatcacttgaactttctccagtcgatggtcgtacactgactgactttatgcatttaagaggattacagatgcgatctttgggtaaagtggttaaacttgcagagaatctgccacacatacaatccctttgtattcatgagatgatcactcgagctttcaagcatctacttaaagcagttattgcctctgttgaaaatgtagctgatctatcttcagccattgcatcaacactgaatttcttacttggtgggtctcgaacagaagataccagtgaccaaagtttgagtgatgatcataacctcagaattcaatggttacatctgtttttgtccaaaagatttgggtggacactaaatgatgaatttcaacattta

SEQ ID NO: 19937 - DNA, 265 bp, Glycine max
ctcgagccgtccggtttctccattcaacgatttgcgctgtgaatcgatcattcattaacgatctttcaaggaaatattcgttgcgatcggtgattctgttgttgttattgaaaccacaatgcggggctatggcgatgaaggagatggttacgatgattattatgaggatgaagatgagtatgaagaggaggctgaggaagagtatgaagaagaggaagaggcgcctaggaagccttcaaaagaagaaatggagtaccttgagttg

SEQ ID NO: 19938 - DNA, 734 bp, Glycine max
cgttgagggccccagaacctcttctctccgttcacgccttccacaacaaccaacaaggcagggtttcgttcttgtaactcgaattggcgtcgagtgaagtgaagggcttcaaaaaccagagggaaactatgagcaatctcagaaccctatgtagacctcagacggtgttctctttcattagtttccgacaccaatttcgttctagggtttcctttcgaaaccctaattgcaagccccgtttgccatctccgtttctttattctacaatcggttcctgggtttcgaatccctggtttcgcgtgaaccagaggagaaccgtggccaaggcaacaaactgggctgaacaaaaatccccatatgaaactcttgaattggaaggagatgctgatgaggagcagataaagaatgcttacagacgcttggccaaattctatcatccagatgtctatgatggcagaggaacacttgaagaaggtgaaacagcagaagctagattcatcaagattcaagctgcttatgaattgcttatagatggagagaggcgaagacagtatgatatggataactgggtcaaccccatgaaggcatctcaggcatggatggagtggcttataaaaaagcgaaaagctttcgatcagcgtcgtgatatggcaattgctgcttgggctgagcagcaacagcgcgagctaaatcttcgcgtgcgtcaactttctcggttcaagattgatccagat

SEQ ID NO: 19939 - DNA, 489 bp, Glycine max
agatcagcgagcggttctttctttttttttttttttcatgtgaaggcggcgctaggaacgcaaaataaacaatcaaacattattacagattgtagcttgggtgccaaactatccaaacaaatacattattcctattcatattaaccttgccaagcaattcaaattattctgcggaccaaccacagtttgcattatttcaaaagcattaatggaagaacaatatgagaaggagaaggaggctgagggaaaataaaatacacaaatcagactcaaagacaacacccattcttatcccattgaaaccttggaagggggattaattattaaccatgaataccccaagttagcattcatctttgagggggatcaactgtgcgaacattagcaactgtcattccctcaattcggtcctttgtgatttccacaaagtgaccaacaatctcatgaaactgcttaagccctgacaggggaagaatgatggaggatcta

SEQ ID NO: 19940 - DNA, 555 bp, Glycine max
cctctcaattcggctcgggcgagcgttggtagccatttgtgattctgaaaaacccatcaagatggatcaagacagttctattgggaaagttttcaagttcacacatgttctggctgcctccttcgccggttcagttgccgccgccgccgcctcaagctaccggcgggcaccgtccacggtggtgggagagcagaagaaggttattcccgagctacgtaggacggaatctgggcgtctcggggagatggaaaagttctcccactatgttgcaaggcaaatggggtttgaagatgctgatgaggttccagagctatgcatattggcccaagagtatttgaagaaatccaaagggtgcgatgaaagcatctttgaatatatttccagtggcaatgtggagaacactgattctctatatgcgaaattagttgaggagttagagagatgcatcctcagttatttagcatttcactggaaccaagctacatctgtcattagtcaggttttgggtgtggagtctcagcagaaaaaaaagctgaagggaattctattggcagc

SEQ ID NO: 19941 - DNA, 1645 bp, Glycine max
tacaaacctctctccgtatcactccaagttataggtcacattgtcacaatgtggtcaccaattgttctactgttgtgccttattcctcctgtgttcttgctattcttcttccaataccgtagaaccttcaagaactcaaaccttccaccaggtcctagaggccttcccataatagggaatctccatcagctagatagctcgaatcttcatcttcagctatggaaactctcaaagaagtatggccctatattttcccttcaactaggtttaaggcccgccatagtgatttcctcatccaaagtggccaaagaggcacttaaaacccatgacgttgagtttagtggaagaccaaaattacttggccaacagaaactgtcctacaatggaaaagacatatcattttcaccaaatggtagttattggagagaaatgagaaaactttgtgttgtccatgtccttagctctagacgtgtctcgagcttttcctcaataataaattgtgaggttaagcagatgataaagaaaatatctaggcatgcctcatctttaaaggttacaaatttgaatgaagtgttgatatctctaacttgcgctattatatgtagaattgcttttgggagaaggtacgaagatgaaggaactgaaaggagtaggttccaggagctactcaatgagtgtgaggccatgttgagtatcttctttgtttcggattatgttccattcttgggttggattgataaactgagtggactgcaagcacgtcttgagaaaagtttcaaggagttggataagttttcccaagaggtcattgaggaacacatggatcccaacagaaggacttcaaaggaagaggatataattgatgtcttacttcaactgaagaagcagcgttcgttttcaacagacctcactattgatcacatcaaagcggtgttcatggacttgcttatagcagcaacggatcccactgcagcaacaacagtttgggctatgaccgaactagtaagacacccaagggtaatgaagaaagttcaagaagaaattagaaacctaggaggtaagaaagatttcttagaagaaaatgacattcagaagtttccctatttcaaggcagtgataaaagagacattgagattatacccaccagtgccactccttttgccaaaagagacaaatgaaaattgcattatagatggttatgaaattgcagccaagacattagtatatgtgaatgctttggctattcaaagagaccctgaaatatgggaagacccagaagaatttttgcctgagaggttcttatacagcactatagattttcgagggcaagattttgagttaattccatttggtgctggtcgtagaagttgcccgggcatgcttatggcaactgcctcattggatcttatacttgctaatcttctttatttatttgattgggaattgccagcagggatgaaaaaggaagacatcgatactgaagtcttgccaggacttgtccagtataagaagaatcctctttgtattttggccaaatgtcacatgtaaaagtctgttaaaattgtattctataatctatataattttgggtacagaatctataatcttcatttatatatataataaaggaaatcaagtggtcttt

SEQ ID NO: 19942 - DNA, 723 bp, Glycine max
caaagtttgtgataactaataactggagtgtggaggttgtgagcaactttcactggtgtcgtctggtctccatgcaccttctcaaatttcctcgctctccatcttccttcgggaatgcgttctttctggtgggtcatcatgttttggacataagagtgttccgtaagaaccagagatgtttcagagcgtccatatcgtgttcggctgttaggaacggttctattgagcaactaagtgatgcacggcttatatactccgtcgctccatctatgggccacaaccaggagtctcatccagaatcacattttagagttcccgcgattgtcaatgctctagaagaaatgcagctcacttccaagttccgtggcccagaggtaattgaacttcaacattttgagcctgcttcagttgatgatattgcaagtgtgcatgcaagagcctatgtttctgggcttgaaaaggttatggatcaagctgtggagaaaggccttattttccttgatggttcaggaccaacatatgccactgccactaccttccaggagtcaatagttgcagccggtgctggattagccttagttgactcagtggtgatctcttaacctggcatgtccatctcttggtaataatctgtgtgtgtgttttggggaggggtaagtgagtggatatggatatgtacatatctacttcttctggtgacttcatacttgaaaggactatttg

SEQ ID NO: 19943 - DNA, 682 bp, Glycine max
aaaaattccaacacaagttctatactaaagtgcagagagcatgagctagcatctatatatgctatgatagacttaaggaaagtgtgtctggtcattgtgttgtacatgcatacagatagtatgaggagcgcactggtatggatttttaccttgaacgtttgccttcacattttatttattcctggtggtgactcaaagccgcatccgcgtttcagagagaaaatcactgaggattacaatcgcggatttataagcattgactgtggagcaagtaacgattacttggacgaggaaacaagtacattttataagacagacacagatttcatagaaacgggagaaaacttgttggcgtcttcccaatttattgacataaatatccctggttttggaagacaactacgcacattgagaagcttccctgagggaaataggaactgttatactctgaagcccgagtataagcaaggtgaacagcaaagttatctgattcgggctatgttcggatatggaaactacgatggaaaaaatcatccccctacgttcgatctctatcttggggtctactactggataaatgttaacccggcaaaatattcctatctttggaccgagattattcatgctcccacaacagacaccatacaagtgtgtctggttaatattgacactggtacacctt

SEQ ID NO: 19944 - DNA, 190 bp, Glycine max
aacctttcatccattaatcggtgactctatcagccccttatataccatctgtattgattattatgttcataattttatttgtatttatatttacactacaaatagtcttcgaagatagattatgttcaaaatacatggttataacattgtcttcaccttgataagtttcttcattttgttcattgatctt

SEQ ID NO: 19945 - DNA, 992 bp, Glycine max
ccatcgagccgaatcggctcgagttctaacttccgattcatggcagcgtcttctcctctccctttacccgaactccatttcctttctccgcaaatcacccccaaacgccgtatttccctctccaaactcccctccatttcccgccacgtcacctccaacgtttctctccgcaccgcgcgaatccgcgcaagcagagaagaatccgcgttggccgaccgagtcaacgacgtcgaatggaccggaaatggcgccgccgccgctgcttccaacgccaatggtgcctccgttagtggatacgtcaacggcgccactaacggaagcttggtcaagtacggttacgaagacggaaacgacgttgctgctgcggaggtggtggaagttgaagcctctaacaagctgagcgaggatgggaggaagaagaggttggaggagattgggaaagaagacgcgtggttcaaacaaaccgggaacgaacaagtggcagttgcaccctggggtcgttggaacaggttcaagacttactccacaatacaaagaacctttgagatttggggatttgttgccacgttcatctttaaggcttggctgaacaaccagaagttctcttacaaaggaggaatgaccgaggaaaaacaaaccttaaggcgaaaggcccttgccaagtggctgaaggaaaacattctgagattaggtcctacattcatcaaaattggccagcagttctccactagggtggacattcttcctcaagaatatgttgaccagttgtccgaacttcaggatcaagttcctccatttccctcagagacctctgtagctattgttgaagaagagcttggagctcctttaggtgatatctttgatcagtttgactatgaaccaatagctgctgcaagtcttggtcaggttcatcgtgcgagattaaatggacaggaggttgttattaaagtacaaaggcctggtctcaaggatctttttgatattgatcttaa

SEQ ID NO: 19946 - DNA, 375 bp, Glycine max
caagaacagaagctgctaacgaacagctgcggaaagaattggaggagaaaatcgaccaggtcaaaacttattacaataagcatcaacttgaaaagcaggcaaataaagagaagatttgttttggttgcctggaagttcacgagatagctgcctttgtgctcactccagctgggcactacgaggcaattactaggaactgctctaactactacttatctgatgaatctgtagccctgtttgcagaccgtcttcctaccagacctaactacatcgttggacaaattgtgcatattgaacgccaaattgtgaagatgccgacgcctcggcctgagcacggtggggctgataaatttacccctgacaaggggactgact

SEQ ID NO: 19947 - DNA, 559 bp, Glycine max
ccaatgcactacaaaaactggctgaaatgagtcgacaacttctgaacaaagctatcatgagtgttgaagctgataactacatcagtgtccctgatggtaataaagcccccgatttgatccccgacaccaataaccctgaatgtttcgaagaggtaaaagcaagagttgctcgcctctcatctttgtctgagcagcttgtgatgcaggcgggtattgttcctgcaaactaagagagagaggtaatgaagaaagttgtgtgtgtgttggggggtattgtattttgatatctttttgctcccaaagccattgcaaggctaacttgtcccttggtagatcataaaatcttcccttagtttgcaagatatgtacaatgtacagatagtgatcacatctgtttttggtactctactacaagatatgtacgtacaatcattacatgaggagttactattttagtgttactcttaaaggattatctctcctcctctttattattattattataatatgtagtgaatttttcattatgtacattatgaataatatatttattatatat

SEQ ID NO: 19948 - DNA, 408 bp, Glycine max
gttcttttcctccactatgttttttttttttgcaattatctttcttatttaaaagatgaagcaagcaaacagaatcccctcttttgatcttggtttcaatattcatcatcaaatcactggtcctccttttatagaaatcttagatctgcttttaacacaaggttttggtggagaagaagaagcaaagacgacggtgtataaatacaagagtagaagaagaagaagaagcaattagagggagagttagtgagcaaggtggatcgaaggcaagggaagaggtctctccctcctcatgaggagaaaaaagaagctttcaactttcctattattcatccaacaccatctcaaaatcgaaaggaacaagcttcaccatcacccgtttcactcctcatgagtaacaacaaaaac

SEQ ID NO: 19949 - DNA, 449 bp, Glycine max
cctcactcagattgctggtggaatatgggctgacactgtgggaggaaaacaggtattgggatttggcgtggtttggtggtctgttgcgacggccctcactcctatagctgccaaacttggattgcctttcctactagttgctcgtgcattcatggggattggtgagggtgttgctatgccagccatgaataatattctgtcaaaatgggttcctgtgtcagagagaagtagatcactagcgctggtctacagtggcatgtatcttggatcagtcactggactggccttttctcccttcctaattcatcagtttggatggccatcagtattttactcctttggttctctagggacagtctggttttctgtgtggcttagcaaggcacatagttcacctcttgaagatcctgaactgcggcccgaggaaaagaagctcattactaccaact

SEQ ID NO: 19950 - DNA, 1046 bp, Glycine max
cggtacccaaattagtggctagtgttgagtgtttactctgaaatttgatgagcaccagagactggtaagggtgctgcgtccactcattcattactcactatactcatacggggtttctaaatcatatgccaaattagtagacaccctatgaattgttgttctgccatggcgtcccttctcaaatcaccttcctttctctctcctttgaaccaaaagttgaattatgtaagcttttctcccatgaccacaaacctgcaatccaaattttgtcgtgctagtgtaagaaatgggagatggcatgttcctagtttgacaataaaatctcaggcagctgttgaaggggatgtacttgagaaagaatcagtctctatcaatgaagaaagtgattacggggtcgtttgtatgcaccatgttggaattttatgtgaaaacctagaaagatcacttgaattttatcaaaacgttctaggcctcaagattaatgaagcaaggccacatgataagcttccatacaggggtgcttggttgtgggtaggctctgagatgattcatttgatggagcttccaaaccctgaccctttaactggacgagctcaacatggtggtcgagatcgtcacacgtgtattgcgattcgtgatgtttccaagctgaaagcaatctttgataaagcggggatcccttacacacttagtcattctggaagaccagcaatctttgcacgtgatcccgatgcaaatgctctagagtttacacaagtagatggttgatgtttatggatattacttgctaggctacacccctttgtcgctataagtcaccagaatgtagaaataaagttacaaatgattacatgtatgtaaaggctgaagggattgtaactagtaagagccatagtaaagttgtttgctactctgctatgcagtggcactagcagcaatagaatactggcgttcatcttatatatagcacacctgtaaggataaacggtacgtgaatactgagaaataagattgaaagaaattagaatatggcaagtgatcttttc

SEQ ID NO: 19951 - DNA, 625 bp, Glycine max
agaattgttacattgaattaaaataataggaaaagaagaggctccagttaggcaattatggcttggtcccatccaattcgcaaccaggaaatggatgtggttccttatccagtaacacccccaaacctcatttctctgccacatgaaccctcccaaacacagaaaccatagcaaaaagaaacccagattattgattattaataatggaagccatattcgtcaccaaacccgcttcccattctctcctcttaactaaactctctccgaatcccaaacacttgttccctccacaccaacaatcctttcacaacatccgccacaaacccacgcgcttccgccccgtcatcgctgttttccaaaaccaacatcaacaagatgcagctgcagcttccaaccacaccgaagatgagtcctacggcgaagtcaaaggcatcattggaagcagagccttggaagccgccaccggaatggagtacctcatcgagtggaacgacggccacgcgccgtcctgggttcccgccgacttcatagccaaagacgtcgtcgccgagtacgaaactccctggtggactgccgccaagaaagccgacgagtccgcgttgaaaaacttaatcgaatccgacga

SEQ ID NO: 19952 - DNA, 1215 bp, Glycine max
ctatcttgagatcaatgttaacactaattggttctgttatatgggttgggcactcctcaatagagattcaactggaagttactcagtccaatgaagagggcaatgattcagactcagtagcactgacagccaacttcatattcgttgctcgagactcaaaaactgggaaagctgctccagtgaatcgactttcgccagaaactgctcatgaaaaacttctttttgtacaagctgaagcaagaagtaatttgagaaaaaggaaaagaggaggggaaaagagggactttgagaatggggagaaaaataggcttcgggccctattggctgaaggaagaatcttctgtgacatgccagctttagctgaccgagacagcattcttctaaaggataccagccttgagaatgccttaatatgccagccacagcaaaggaacatccatggtcgaatatttggaggtttcttgatgcatcgtgcatttgaattggctttctcaacagcatatgcctttgctggattagctccttgctttcttgaagttgatcatgttgatttcttaagacctgttgatgtaggggactttttgcgtctcaaatcttgtgttctgtacacggaggttcacgatccagatcagccacttatcaacgttgaagttgttgctcatgttacacgacctgagctgcgtactagtgaggtatcaaatactttccacttctctttcactgtccgtccagaagccaaggcgatgaaaaatggatttaaacttcgcaatgtagtaccagcaacagaggaagaagcacgacgtatattagagcgcatagatgctgacaacttgaatgaattcttcagagcataagaagatagacatcaattagctgataaagtatttaaaatatccaccgctaattatgtgagcagaagttcaaagatgattaactctcttatataatagatttttctgcccaattttaagagggatctagtatgccttatatgtctagcatcattggacttgatagaaggcaactggtgtttagacaagtatatgaacctgaatctagtaggcacctgctgtgcaagttgtataaggaaaaacataggtaagccaatgaaagaaagtttacaatgaattctgtacaatcaatgatggctatagtggattgctacgtctgttacttgtggcatataaagcaagtgatattatattactattacgc

SEQ ID NO: 19953 - DNA, 497 bp, Glycine max
caaaacactgttacacacttgtcactgcctccatcaggtcgctgtcgcgctacctcgcacatagcctcgataggccaaagcatattccaaacaaccatcaattggtgggacctccgttcctgcatgcttcttccccgtttctcctaccttctccgccaccctcctcctctccacgccatggcgcgtgccgtcacgtgcgccactcagccctctcatttccacgcctcgctcggcatcgccacctctcgccaccccgtctctctgccctccaaatcctcgcttttctgccgcacctttcacgccctcgcgcggtgccagagcgaagagatgacgcggcggcgcgtggctggagtccgcgccgggcagagggagtacaggaaggcgaggagaagagcgccgcccaagagcaaaggcaaggagctgcaactctgtgtcgacatttgcatcgaagaagatttgcctgacgatcctgaaattttgagcattgcagagttgct

SEQ ID NO: 19954 - DNA, 610 bp, Glycine max
tcgtgtaatgctttacatattccgcaaaggagaggagttcatccatggagtggagtttgtgcttctgatatcatttaatgaggatgcactgggtaaccaggcagagcatgcattagcctctctggcatcaatgatgttggaatctccttccttgatagtccaatttacacatggtttgaattttagtccaagctctaaggaatatactcatggagttgtgattcgatttcgatcagttgaggcatttgagatatttataaacagcaaagagtacaaaaatgcatggcattataagttccagcctattgcccacaaatctttttctcttcactcctctgttgatccagtgggaactgaaattatgtagtgaggatggtttgtggttatcaagaatagatgcggcttggtttccactttttagaaacaagaatgaaagttatttcctgctttttattttcacttacctgttcttttgccataaattattatacagtataagtgtccacttgtttttgtgacattcggaaacttgattgcctcacgattttttttttgtttaatgtaacggatacatgtaaaattgtatgtgattgcctggacctgctatctg

SEQ ID NO: 19955 - DNA, 639 bp, Glycine max
ctcgagccgaatcggctcgaggaagaaatatcaaagagtgaatggaaccatgcagagattgtatgtaacctgtcgtgggacgaatgcggaatccatgtattgaaagagcaaagtagcatggaggatattcgattcactgatccttttaggaaaagaaaaaattgttgttcggaggaggttgctgttgggggaaaaaagcaaagattagtacgcagtgaagttgttgagacaaaatttgtagagcagcaacaacatatgggttttttgtcacacgtgtggaactggacactatcacttgtaatgtctcgcagatccggcaatcaataattggatgaaagagagaattcaagttcagcagtggtatggtatcaacgctgacaaaagacaacagtgtaagtagccctactgattcttgttgtctagtcaagtttggttttagatattctattttgctttggattcaatgaaaatagatcgagcatttcaatctcttaatacattcctctgaatgtactttttttaaagaactaaaagaaaggagttttatgcaaatgaataaaaaaccaaataattacatcagatggagcaatgtctattgcatagtcaatcaccatccaatactaataaagatacgagagc

SEQ ID NO: 19956 - DNA, 431 bp, Glycine max
gaagaaagatccccatactgttgcatctgctgctatggatgttttaaaactggttcgagatctgagaataacgccccgtgtgttagttggtcatagttttggggggaaagttgttttgagcatggtcgaccaagctgcaaagcctcttgctcggccagtgagagcttggattctggatgcaacccctggaaaagttcgagcaggtggagatggagaagatcatccagaagaactcatatcctttctaagtacactgccaaaggaggtcccttcaaagcggcatgttctcagagctcttattcaacatggattttccaatgatgtggcgcagtgggttgtgactaacctgcgaccttccggctctcctggttcacaatcatcaagcttctcatgggtgtttgacctaagggggattgcagaaatgtatcaat

SEQ ID NO: 19957 - DNA, 1417 bp, Glycine max
tttttgtatatcacacattctctgtgtacacttgaatttgagacacgtcgggcatcatactattggttgttgcatgcgttaagcatttaccaaccttatgtatgggagtattcaaggttgaatgtctctaacacagttatgtcaaagcgtaagctaaatcgtctagttacagagaagtgggttgatgggtgggatgatcctcgtttgatgacactagctggtttgcggcgtagaggcatgactccaactgcaatcaatgcttttgtacgaggaattggaataactagaagtgatggcactttgatttctgtggaacgccttgaatatcatgttagggaagaattgaacaaaacagcttctcgtgcaatggttgtcctacatccactcaaggttgttattactaatcttgaagccaactcagtaattgaggttgatgcaaagaaatggcctgatgctcaagctgatgatgcttctgctttctacaagattccattttccaatgttgtatatattgaacattcggacttccggatgcaagattcaaaagattattatggccttgctcctgggaaatctgtgatactcagatatgcatttcctataaagtgcactgaagttattctagctgatgataatgagactattcttgaaattcgagccgagtatgatccttcaaagaagaccaagcctaagggggttctccattgggttgctcaaccttctcctggagttgatccattaaaggtggaagtcagattgtttgagaggctgttcctatcagagaatcccgctgaacttgacaactggcttggcgatttaaacccaaattccaaagtgataattcccgatgcatatggtgtgtcttccatacagaatgcaaaagttggggacaatttccaatttgaaagattaggctcttttcgttgactacttgttgtttcttcatctatctttgcttaatatctcatccttatatctgctattccaggctattttgtggtcgaccaggactcgacatcagaaaaacttgtttttaataggactgtcaccttaaaggacagctatagcaaaggtggaaagtagggtccctgaatattgcttagaagtaacaaggtgggggacaggcaggtctgcgggtaatacttgtttaaatggctacttataatgcatagttttttctttgagggggtgggggggttatgtacaaacacatttactggccacttagccatgtacattttctcaagggattactcaatagttccccagttatttgattaacttttgtttggttggttttgtagtttgaaggttatatttgtatactctcaatgaagtagtagcaacattgctgttattttcctacgatttttgtgagtgtaccattagtattgaagaatctttccctttacataat

SEQ ID NO: 19958 - DNA, 880 bp, Glycine max
tcttgtactcgtgggcggacgcgtgggcggacgcgtgggaaaagattattatggccttgctcctgggaaatctgtgatactcaggttagtagaaggcacaaattgatattgtgagtgagaatttataggcccaatattcaaaattttcattattttgtgcagatatgcatttcctataaagtgcactgaagttattctagctgatgataatgagactattcttgagattcgagcagagtatgatccttcaaagaagaccaagcctaagggggttctccattgggttgctcaaccttctcctggagttgatccattaaaggtggaagtcagattgtttgagaggctgttcctatcagagaatcccgctgaacttgacaactggcttggcgatttaaacccaaattccaaagtgataattcccaatgcatatggtgtgtcttccatacagaatgcaaaagttggggacaatttccaatttgaaagattaggctattttgtggttgaccgggactcgacatcagaaaaacttgtttttaataggactgtcaccttaaagggcagctatagcaaaggtggaaagtagggtccctgaatattgattagaagtaacaaggtgggacaggcaggtctgcgggtaatacttgtttaaatagctacttataatgcatagttttttctttgagggggtggggggttatgtacaaacatatttactggccacttagccatgtacattttcttaagggattactcaatagttccccaattatttaattattttgtttggttggttttgtagtttgaagattttttctgtttactcccaatgtagtaccaaattgctgttattttcctaccattttgtgtaaaattagttctg

SEQ ID NO: 19959 - DNA, 440 bp, Glycine max
aaagtgataattcccgatgcatatggtgtgtcttccatacagaatgcaaaagttggggacaatttctaatctttcaaattggaaattgtccccaacttgaaagattagaaaaacttgtttttaataggactgtcaccttaaagggcagctatagcaaaggtggaaagtagggtccctgaatattgattagaagtaacaaggtgggacaggcaggtctgcgggtaatacttgtttaaatagctacttataatgcatagttttttctttgagggggtggggggttatgtacaaacatatttactggccacttagccatgtacattttcttaagggattactcaatagttccccaattatttaattattttgtttggttggttttgtagtttgaagattttttctgtttactcccaatgtagtaccaaattgctgttattttc

SEQ ID NO: 19960 - DNA, 516 bp, Glycine max
agaaattaatatatatcaaccaaaatggggttgtacaagatttcattatgtctattgtgtgtgttggggttagtcattgtgggtgatcatgttgcgtatgctcaagactcaccaacagactatgttaatgcacacaacgctgcaagatcacaggttggtgttccaaatatagtttgggataacgcagtcgctgcttttgcacagaactatgctaaccaacgcaaaggtgactgcaaactcgtccactctggtggtgatggaaaatacggggagaatcttgcaggaagcaccggtaacctaagtgggaaagatgcagtgcaattgtgggtgaatgagaaatccaagtataactacaactccaactcgtgtgttggtggggagtgcctgcactacactcaggtcgtttggagaaactctttgcgccttgtatgtgccaaagtaaggtgtaacaatggaggcacattcataggttggaactatgctgccactggcaactatattggccaaagaccatac

SEQ ID NO: 19961 - DNA, 271 bp, Glycine max
cccttttataattaaaattaaccatagttaatataatggggtcggggattaaggtttcgttttctgtgttgtgtttgttagggttagtcattgtgggtgatcatgctgcgtatgctcaagactcaccaacagactttgttaatgcacacaacgctgcaagatcacaggttggtgttccaaatatagtttgggatgacacagttgcggcttttgcacagaactatgctaaccaacgcaaaggtgactgcaaacttgtccactctggtggtga

SEQ ID NO: 19962 - DNA, 318 bp, Glycine max
caaatatgttcgttgattttctccaaaacttagaggttgatacggatcctaataaaggcttagtgagtcgcgctatccctaatgattttcagtatcgtagccccaggctcgcaacactggataggaactctgatagcacagaatctgagccaagggaaattggcaacagggttttcaatgtgtccagcatacttgtgaccgaagtggatcttttgcagcctgaaaggatccataatgggattgtgtttaatgttgtcaagaaagaagacttgtcacccttaagtggtagcagtcatgattttgaaaattacaacattg

SEQ ID NO: 19963 - DNA, 500 bp, Glycine max
gttcctttatatattgcggagacttgcccatcacaaatccgtgggacattagtatcattaaaagaactcttcattgtccttgggattctgctgggttattttgtgggaagctttctgattgagacagttggaggatggcggttcatgtacggatttagtgctccagttgctgtattaatggggcttggaatgtggactctccccaattctccacggtggttgcttctcagagcagtgcaaggaaaaggttcttttcaagatttgaaggaacaggcaattgcttccctgagcaaattaaggggccgaccacctggtgacaaagaatctgagaagcaaatagaagagacccttgtctcattgaaatctgtctatgcagaccaggaatccgaggggaatttcttagaggtgtttcagggtcccaatctgaaagctttcataattggtggggggctagtcctatttcaacagataacaagtcaaccaaagtgtctgtattatgc

SEQ ID NO: 19964 - DNA, 955 bp, Glycine max
  unsure (1)..(955): unsure at all n locations
tttctttccacgcgtccgagagtttggaaaacagaaggctaagagagaatatggagagtagtgagggaattaggtgtaaggtatgcgtgaccggcggtgctagttacataggctcttgccttgtcaagaagcttctgcaaaagggctacaccgtccactccaccctcagaaactttaaggacgagtcaaagataggccttctgagagggttgcctcatgctaatgatgagagactggtgttatttgaagcagacatatataaaccagacgagtacgagccagcaattcaaggctgtgagattgtctttcacgttgctactccctatgaacatcattccggctcgcggctggttggttaaataaacatcaatatcaatgcaattggagtatactatatattttgaccaatttttcttaggaatttaatcacctatatatgttgcgctaatttaatcaccatatctgtattattaattgaagtgaggattaattaaatattgatggcatacatgcatccatagtttaagaacacaagtgaagctgcaatagcgggggtgaaaagcatagctaagtattgcattaaatcgggaacggtgagacggctaatttacactgcctcggtggttgctgcttctccgcttaaagatgacggctctggttntaaagatntcattgatgaaacttgttggacgcctctcaacctttcaatggggactcttcatcaggtataaattagaagtaaaaagtaacaacattataaataagtgaatgatagtaacaacttatttgaatatagttttttttaataaacataaagaatgtgtttgggtgtcaacaaaggtgggttgagttgataagaaatgaacttatcctacactgatgtggtttgatttccgctgctgaggtgaacatcttattaatgaataatcttttataagtacgtattgaaccttaa

SEQ ID NO: 19965 - DNA, 561 bp, Glycine max
aaaacagaaggctaagagagaatatggagagtagtgagggaattaggtgtaaggtatgcgtgaccggcggtgctagttacataggctcttgccttgtcaagaagcttctgcaaaagggctacaccgtccactccaccctcagaaactttaaggacgagtcaaagataggccttctgagagggttgcctcatgctaatgatgagagactggtgttatttgaagcagacatatataaaccagacgagtacgagccagcaattcaaggctgtgagattgtctttcacgttgctactccctatgaacatcaatcggattctctgctgtttaagaacacaagtgaagctgcaatagcgggggtgaaaagcatagctaagtattgcattaaatcgggaacggtgagacggctaatttacactgcctcggtggttgctgcttctccgcttaaagatgacggctctggtcttaaagatttcattgatgaaacttgttggacgcctctcaacctttcaatggggactcttcatcagtggtacactgattcgaagacacaggctgagagag

SEQ ID NO: 19966 - DNA, 422 bp, Glycine max
attttgctgataaagagctctccaagcagtcagagaaatcttgactatgatttatatatatacaatggttgcgacaaaactcttatcattgattagagaggaaagacagccaaactgagctgagtagactgtatcatactagatacactgtgattacatgtaaattaaaggtagaagctgatgtgttcctggatgaaatagatttagcaattgttgggaatgtacatgagcttttctagaacagctgattttaacacagattagcatgattgatagaaactgttgattttagcatagaataccgtattttcgctctttgtagcatgtgggtctccgaaatttcatttcctttgtaattagatattgtaagacaataatgtgctagtaactaattttatgcttaatattggtttcctagctat

SEQ ID NO: 19967 - DNA, 487 bp, Glycine max
ttgatcccaattcgtatgagatgagggttgaagagcgagattcgggttcttacccgggtttgcccggttgctacgttttgcacacgctcagtgccaccgtggagtgtttgcccgaaggggatttttgcacctacgaggtggatgagtatggaggggtttttgaagacaaaattgttgcggatgaagctgtttctgttaagaagcattattggacttgggttagtgctgattccatcggcacttgaattcatgtaaacctttttttttatatatagttgagtttaaggataagctgacatttttttttctgtgtcatgttgaaagtttttatggatatgaatattaataccattaccaacaggtttttttttacttatattgtaagtatatttgaggtaataaggtggggaaattattagagtgaagctgctacttcttgtacttgatgtcaataaagcaggggtatagaatttgatgtaattatggc

SEQ ID NO: 19968 - DNA, 411 bp, Glycine max
tagcaactaactccaaaaaacctcactgtatggccatcaatctcagcaccactgcttctcttcactccaagccttcttttctgacccataaacacaacaacctcatcaaaatctaccatccttcttcctctttactcacaacatgtgctcaaacacaagggactgacactggagttacacaggaagatgcttctgctggtaatggatctttatcttcttctcgtgcacagctggatcttttggagcaacttacatctacaagctcacctaatagtggttatgaaagtgatggaagcaaacttacaatccgagagcagctcgagcagttgtttggagaaagggatgatgatttcaccatacccctaggtaaaaacttgaagaaagtgagtgcgaagttcttgaccatctcac

SEQ ID NO: 19969 - DNA, 399 bp, Glycine max
cctgtatgggggttgggggcttgatttggcaggtggaagagattcactttgttgggttcttgagcaagcttcttgaaacaaaaataatgcaggttctccgtttcaagcatgggcagatatactctgtaggtgtttcagtatttcttggtggtaataaaccctcaagaataggtgacgttcgtggagacattagcataaatttctcctgtgatccagagatatcttccaagctggtagatattgctttggatgaaatgttacgccttcaagaggaagggccttcagaacaggatgtttcaaccatacttgaaattgagcaacgagctcatgagaatggactgcaggaaaattattactggctggataggattttgcacagctatcaatcaagagtctatt

SEQ ID NO: 19970 - DNA, 404 bp, Glycine max
ctcgagccgataaacatgaactaaacaaacagccaaagaatcaatcatcctccttcaagtaatcaagcacccttcaaatctcaaattcagaatcaatcaattaatcaaataatcaatcaggttgatcatggacaggttagtgaaagcagacacaaaggaagtggagatgatttttctgaagggccaaaagtgcagctcctccttcaagctcaccaacctcatgcacaccatgtcagtggcagtgtctttaaccaccacaaactcttctcttttctccatcaacaaacccttctccacaattcccccactatctacggcatcatacaaactacaactctctcagccctccgatcaaccccctctctccgaccctcccgacgccatcaccgtccgagcaaccatgc

SEQ ID NO: 19971 - DNA, 809 bp, Glycine max
tgacttgatcttattgaggagcccatgatagtgaacgcaaagcagtaccatgctattctgagacgcaggcagtatcgtgcaaaactggaagcacagaacaaactcatcaaagaacggaaaccatatcttcatgagtcccgccatctacatgcactgaagagagctagaggttccggtggacgctttttgaatgccaaaaagctccaagagttgaaactcacttcagcaaaccgtggcctagatgtttctggctgtactcaattgaatctgagtggaaatatgtcagaatcaaaggttcaagcagtagaaaacttgaactacagaaatggtgcttctacaaccacgtgttctgatgtcattagtacatctaatagtgatgatgtcttccagcaacatgagtcagactttaggttatgtggttacccttctcatattggaaggaacatgcagggttattccgcagacattggtggtggtggtggtggtggaaatcaacaccgtctatcagtccttatgtgacaaacttttatggcacactagcaagttattcttcagcgctctgttggagatcataattgcctgtgttccatagggaagtcatccttggctcatttacattattatgtttttactaatatgtttatgttagttgttttggaacaaagatatagacctttgctagatttcaattttcttatattgatgactgaaatatttgggcaaagtagcacatttaactgactagtcacaagcaatatttcttttatgttgatgttacattggaaaatgtctttttgagaactaaggtt

SEQ ID NO: 19972 - DNA, 724 bp, Glycine max
gatagaggttgtatgcaggataccaaccaagagtctggtgctacactaccggggtatggaggttgcagttccttggctgagaaacacggtgaaaaacgtgttgccgaaaatgatgatgatgtgagggaggacaacaagaagctgagagaatgggtgccttcccttgttcctaagactgggggtggggggtactttctgcatagtaacccaattgaagtgaaagagagctcaggagaagatgaaatttcacatattgacaaagtgactatagcttctgatcaggggagactgatgagtagtggttctcagttcacagaaggagatagaccctttcttcaatgttcagaggagaagccttctttgccgagttcgtttagaacttgtgatctgaatctcattgaagcgtctgaagtgcatgaaaatcatgttgatcatccagttctgctgtacccccctgcggtttctgaaacaaagaaagctgtgccaattgacatagatctgaccatgagtcatgctagcgtatcagggaaattcaatactcatgcaacaaatggcaaagagattgaagtaattgatttagaaaatgatgattccattcaagaagagaagtcaatcgacagtatggatagaaagacagagactatgtttcctggccttgaaggtttttccagccatgctcaaaatgcttgctgacatgcatgatgttcaggatggatatgggctt

SEQ ID NO: 19973 - DNA, 452 bp, Glycine max
gactactgaagttactgcctaaatctaaatgccagcttcgtaaatttgatgacagtggacatttcctattcctggaagacagcattgacctggtgacaatcatcaaaggcacttcatactaccgccggggcaagtatcatgactatgcatcagattttatacctccaacacttgatgaggccaaaaacataatagaatcaaacagtttggttaaccttattgcaagtgctgtaatgctctcaactttggaggatgggacgcttgtaaaaggccttgctggaattccttcagaggggcctgttttgtttgttgggtaccacatgctactcggattagaaaaaattcccctggtttctcgaatttttttggaaaggaatatccttcttcgaggggtagcacatcccatgatgtttatgagatctaaaaatggaaggttaccagatttatcttct

SEQ ID NO: 19974 - DNA, 622 bp, Glycine max
tatagcacacagaatcaccaaaacagccacaacacaacacaaaactctgctatattcctcttttgcatgaaagagaaaaccctctcaatggctcaccaatattcctcctctaatgaatctgatagccagatcattcctcctcaaccattcaaattgaagaaaccccaccaacccaaaggcaaacaaatggggcaagaacaagaaaacgagtctcagtatctcgagggattagtctctgactctcggccacgaaaatatagtggcaaagataataacaacatacttgggcgaatcccatctgcttcgaaaatccacaacaaggtggaaattgcattggatcacaatgctacaaaagaaggaatcacaagtgttgaaggtgatcatcaagatagtggacgtgagaagttgaagaggcatagagtggaagttgctggaagggtttggattcctgacatatggggacaagaggagatcttgaaggattggattgattgcacagcatttgatgctcctttggttccaagcagaatcgtctatggcacgaacggctttggttgaagaaggtagaagagccacatcgggtggattgagaatcgagaacaggtgctgaatttttttcatc

SEQ ID NO: 19975 - DNA, 453 bp, Glycine max
tgacaatactgatttccatcaagaatggaaaatggttaaaaaggtcaataaaatgaggcttgctgaatacatcgaaacaatgagtggtgtgaaggtcagtttggatgctatgtttgatgttcaggtgaagcgtatacatgaatacaaaagacaattgcttaatatacttggaataatccatagatatgattgtatcaagaatatggacaagaatgacaggaggaaagttgtaccccgtgtttgcataattggtgggaaagcagctcctggttatgaaattgctaagaagattatcaaactttctcatgctgtggcagaaaaaatccctactgacactgatattggagatcttctgaaattggtttttatccctgattataatgtctctgttgctgaattggtaataccaggggctgacctttctacacatttaagcactgcaggacatgaagc

SEQ ID NO: 19976 - DNA, 576 bp, Glycine max
  unsure (1)..(576): unsure at all n locations
tttttccgtttgttttctttcttctattccttttctttattctctttgttttttccacaactagctacaccaacacaatgcatgatcacagtcatcaataccctcttccttgtttgtattgccacccttatagctatattaggatggttcaaaatctcatagagagatgcatgctctttcacatgagccaagaccagtgcataagggcactggcagaacatgcagggattaagccacttgttactgttacagtgtggaaagagttgcaaaaggagaacaaggagttctttcgagcatatttgcaagttgccactcccaggccattattcatgagtaagatctaaacttccatgtcctttcgaggataaagctgcgttaaacttttaaactaagatgttttaaatttataaactaattataattaaagatttgtatgcaactcaacattagtttatgaccataaatatttgtataattaagcttttatatgttgtgcatgcaataccataaataagttatctgcagcatactgatatcagntattgtttgtttcctttttaaggtagatgttttcaa

SEQ ID NO: 19977 - DNA, 463 bp, Glycine max
  unsure (1)..(463): unsure at all n locations
agagcnatgacggcgcacgcacgcgaacttaagcttggaatccggcgcgcgtgttctgcgtctccaatccaatctctcacctctccgcatttgcttccttgagggccccgcccttcttcttcaactctccggcgcttcgcatccacgccggcggccgggaacggcggggctcggcggtggcgactcgtgcgggtcccagcactagcagcatcctctttgccattgcgctcccgtcctctctcctcggcgtcaccattttagctgcacttcgaatgggcgataagctcgaccgagactggcttgaagagatggcaagaaatgaagctttaatggaacttgaaacatatgatgacgatgacaatgatgataacgatgatgtcagcagcgaagaggatagtatggaaactcatgtgcaagaaaagcctgcccttacacaagctcgcaatagacccaaaagggaagc

SEQ ID NO: 19978 - DNA, 1533 bp, Glycine max
tgctgttcttctctcattagcaatgcagggagtcttccgaggatttaaagacactaaaactcctttatatgccactggtatgccttgacaaacttaaattgtctttgatctaatgtcacaatatcctgctattatctgattctagctactctttctttgatgtatctagtggcaggagatgtaaccaacatagcactagatcctttattcatgtttgtattccgcttgggtgtcagtggtgcagccatcgcccatgttatatctcagtatgttctgcgaagtacatttatgcacaactatcttttccatggtatcttaattttccttttgcttcttttgaccctaattatcccttgttttcaaatcaactgcgtaggtacctaatttcagcgattctcctgtggaggttgttggaacaagttgaccttgtacctccaagcataaagcatctgcaattagaccgatttcttaaaaatggtttgcgtttatttttgagagtcatcgctgtaacattctgtgtgacgctggctgcatcattagctgcacggcagggaccaacatctatggccgcatttcaagtatgtctgcaggtttggttggcagtgtctcttcttgcggatggtctggctgttgctgggcaggcaattcttgcaggtgcatttgctaataaggacttcaacagggccacagcaactgcatcccgagttctacagatgggtttggttctaggattggcacttgcattcattcttggaacaggattgcactttggtgctaaaatatttacacaagatgctaatgtcctccacctcattcaaattgggatcccgtttattgcagtcactcaacccctgaattctttagcatttgtttttgatggtgtcaactttggggcatctgattttgcatattcagccttctccatggttgtggtggcaattcttagcatcatttctctgcttattttgtcatccgctggtggtttcattggaatttgggttgctttgaccatctatatgggtcttagggcatttgctggcttcttgagaattggaacgggatcaggaccttgggagtttctaaggagctcatgagtgcacatggcagacaccataattatagcttcatattaggcctaggtttcagtggtgtttgctgattacattaaagtgagataagctacccctaggttgttaaatcgcttgaaaaattcttctgaaagactagacaattctccctgcttgattgtgcttggggtatttggttgaaaaatctacctctgcatcataatatgtacagaaaaatctctaactctactctcatagtctcatatatagtgaaatgaaatgaaatatagaatcaagcttctgtttgtaaccatgcaaatataattaattgcatgaataacgtgaaaatgaaagattgcatggaatggaacaatcactagtgctgaaaaaagatgcagaactcctttcgtttttaggaagtttgtatatggtaatcacatcaacttagtcctcattgcaatataat

SEQ ID NO: 19979 - DNA, 461 bp, Glycine max
tctgactctcctatgctacatcctgcaaagcagtatctgaaattgaggtcccttggtgctcctgctgttcttctctcattagcaatgcagggagtcatccgggccttggaggtcactaaaactcctttatctgccactgtgccaggagatgtaaccaacatagcactagatcctttattcatgtttgtattccgcttgggtgtcagtggtgcagccatcgcccatgttatatctcagtacctaatttcagttattctcttgtggaggttgttggaacaagttgaccttatacctccaagcataaatcatctgcaattagaccgatttcttaaaaatggttttctattattaatgagagtcatcgctgtaacattctgtgtgacgctggctgcatcattagctgcacggcagggaccaacatctatggccgcatttcaagtatgtctgcaggtttggttggc

SEQ ID NO: 19980 - DNA, 588 bp, Glycine max
gcgttattgattccgtgacggtgacagcgcggcggctttcaaatctctttctctctgcctgctttttttctctgtctagaatccatttgtggcctctgagagaccctttgggaggaaacgccagaaaacccaaagttttgttcttcctctctttgcaatctctatacagaagatttatggataacaggtgcaaatctggttcactgcaacactgttccgtcgcaaatttcttccaccgacaagtgcttgacttcgtggttccgtcgctttttcaacccttcgatagattcattccttggttacgctttctatctcccaaataacattcaagctaccctctttgtcctgttattttcttctgaaaaaaaagggcttacagttattgactaggacttttagcaagcaaactctccagattgtggctttctgagttctaaatctgcacgagtcttcagacagagagattgcaaagtgatttgagaccaaattatggtgtaaggaccaagatggccgcttcagcccattcttctcttaagatgatgtcatgggctaaaggtcaatcctttggttggacagcttttgatctca

SEQ ID NO: 19981 - DNA, 1298 bp, Glycine max
tggagagcaaaagagcagatggatcctcctaatccctaaaataggccttcttctgtaacagcaaaaacaaagggccggctattctttttgttcaatgtaaaagcattcgttcatagtagctaagaggaatccgaacttatcatgattcaatttatagcaagcaatctctgattggaaatagccttgatctcgaacatcacctaagctatttgagctcctgtctaaactccccgagtctatgaaacccaaacccttcatcttcgccaagcgcttcccaattccgttgcttttttcttttccattttctccgcaacaacaacgttttctcttctccactcacaatcgccactccttcgacgaagccgttccaggttgcagcgccgtttaccaacacgtgctcaagttccagcgtccaccgaccattcggtggagcccgcacctcgagaacaccgctagtttcatcggcaccgtcgcccgcgaaccgacgcgcgttaactcaacaaccggtaaattcggagtttacaccgtgcttaaggttccaaaatccaaccaatcaaatagctcctctttccggttgcttctgatgatgcggaacaatgtggcttaacttgcttcggaacacttgaaatcgaatgatttaattcatgttttaggttctttggggtctttcacgaaacctgatgccaatggaatccttagattgaattacaagttagaggtgaaggagttcgagtttgttgctcaaaggtctggttatctaggcgacaagaaattggaatctgttgaagatgctggcatgcaaaaaaatcaaaatcggcttcacctttggcaagtgtttttttccaatccaaatgagtggtgggatcaaagaaagagcaagcgaaatccaaaacagcctgattttaagcacaaggataccggcgaagctctgtggctaagtgagtatgatcctccatgggttaaaaggcaactccaattgtttgactcaaaaattgctggaggatctgcaggtcgtcgttcacgtgtcaccaactgggtttatgatgagtagctgattgatatcaataaaagacgacatgtatgggtaattgaaccttatacacgacaattttgtacttactgttaccatttgcaacacagcttagtgaacttgggtataatttatgtaagagaatggaaatcactgtaattaattggcgctattctctaggcaaaacatatcagctgtgagaaagcttagctcacttgatcattactcagtagctgaaaagaatgaaagggttaaagttgatgacttg

SEQ ID NO: 19982 - DNA, 389 bp, Glycine max
atgagttaagtggagttgcaccacttgaggaatataagtgcccaatatcctcaaggttgatgtatgatcctgttatcattgattcaggagtaacatatgaaagaatgtggataaaaaagtggtttgatgagggtaatgacatatgtcccaaaaccagaaagaaactagtccatatgggattaactccaaacatggccatgaaagacttaatatcaaagtggtgcagaaataatggagtctccattccagaccctagtaggcatgcagaagatatttgtgcatgggaaggctcaaacacttccattagcagcttaagaagttatttcaatgatttcaccgcaccagtggatcttagtagcatgtcaattgggccattggatactagtttc

SEQ ID NO: 19983 - DNA, 639 bp, Glycine max
gttatgggggccaccaacccaccttagcaacatttggtgcggaccaatatgatgagaaaaatccaaaagagaagagttcaaaagtggctttcttctgttacttttactttgcgctcaatgtcggttctttgttctccaacactgtactagtctactatgaggatacagggatgtggacaatgggtttcttggtatcattggtctctgctgccatagccttcttggctttcttattgggaactccaagatataggtatgtcaagccatgtggaaacccagttgtgagggttgcacaggtattcactgctgtttttagaaaatggaaggtgtctccagcaaaggcagaagaactctatgaggtcgatggtccacaatctgcaataaaaggcagtagaaagattcgccacaccgatgattttgaattcatggacaaggcagcaacaatcaaagagactgaggagcatagtccaaagaatccatggcggctttgcactgtgactcaagtggaggaagccaaatgtgtgttaagaatgttaccagtttggctatgcaccattgtatacacagttgtgtttacacaaatggcttctctttttgttgagcaaggggatgtcatgaactcctacataggaagttttc

SEQ ID NO: 19984 - DNA, 526 bp, Glycine max
aaatcctagatcaactacttcagatgatactccttgtatggataagactgatgatagtcttacttcagaaaaggttgaggatgacattcccttcgattataatcttgttgataatctccaagacaatgataaggacttggaggatagaaatgctccctcaggtcaaaagctatctggtgttgattacttgagatgcaaaatgaaactcttgaattctgttcctgttgagcctgaatgggaggatgatgatatttacattagcaatcgaaaggatgcattgaggacaatgcggtcagcatcacgccattctagggcagcttctagtgcttttcttagaggtgatcatttttctgctcaacatcattcaatgaaagctcgggcggaacggcatactgctgaagaacttaattctgatgcagccaaaaaaattttaagcgtcaggaataatgaaaatgatatctggaaacttgatttgcatggtcttcatgcaactgaagctattcaagcattgcaagaacatctctac

SEQ ID NO: 19985 - DNA, 522 bp, Glycine max
gccacagagagagatagataagaagtaaggaggtagtaggcagtgtgtttgtttgtgttgtgttgggcgttaaggatggtgttgaattgcaaaagcaaaaacatcctccttttagttttgttagccatagcaatagaaacgggatggtcatcagaagaagaaagcagcatcatatcacgattccagcaatacctgaaaatcaacactgcccaacccaccccgcgttaccacgaagccgccgatttcctgatatcccaaggtaaagccctctccctggaatcccaaagcattgagtttgtggcaggcaagccacttgtccttctgaaatgggaaggctcaaaccctaacctcccctccatcctcctctattcccacaccgacgtcgtcccatcggagcactctaagtggacccaccaccccttcagcgcccacctcgactcctccggccgcatcttctcccgaggctctcaggacatgaagtgcgtcggcatgcagtacctcgaggccctccgactcctcaag

SEQ ID NO: 19986 - DNA, 407 bp, Glycine max
attttccttcaataactctcccaacaaaatatctaactaatcctcacaccactctcttcttcttcttcttcacttctcacactcattcattcttattattactatccacaccctttcgttcgttttggttggttctcatgggttgatcttgacccccttgccactgcgacgccgtttccgttaaatggagtgggacagcaattccgatctcagcgatgacgacgccgtttcgtatgtcctaaacgacgacgatgatgacgccgttggacccctccccttccccgtcctccaaacggcaccgtgcggcttcgtcgtcaccgacgcgctcgaccccgaccaccccatcatatacgtcaacgccgtcttcgagatggtcaccggataccgcgccgaggaaatgctcggtc

SEQ ID NO: 19987 - DNA, 459 bp, Glycine max
cagccatcagagaatgtgatattggtcaggtggaaccttaggggtgtgccacgggttccttgggaggccaaaggagagtttcagggcacctcaaggtacaaattggacagaaatggaaaaatttatgaacacaaagttgataatttggcattcaatttccctcagaatattaaaccagtttcagttttggatttggttactgcatgccctgcaagtccaaatcctacctttttgtggggtcctgttgatgcatactcttcttcatggatagccttttacaaggcagttagggacacattggatcaagaaaggagtttgctaccacaagatggtctagctacatgttcatagctatgtatgagctagcacttaatgtttcataggttattatgtataccttaagggtttataggttagggataaatataaagaatttgatccatagcataaaatggtttt

SEQ ID NO: 19988 - DNA, 684 bp, Glycine max
  unsure (1)..(684): unsure at all n locations
cacaccttcttccgttgttctcttccaattgccttgattttctcggaaaattcttattttccgagaaagttcgtgtttttactgttgaatcgagaattcccaaatcggggtgtctgaaattcaaagctgttgttgttgttggcggctggggttagtctctgtggaggtttgggtgttttttgaggcagagcttattctcattttgctccaatggagatgcaggaccaaatagaaagcacaagatcaaccatatttggctcagctagtaacatccattccaatggtgaaaagcaatccgaaaatgttgctcatataccttctgttggaaacaaccaaactcccaaggtgaggaaaccatataccattactaaacaaagggagaagtggactgaggaagagcatcaaaagttccttgaagctttgaaattgtatggtcgtggctggcgccaaattgaagagcatataggtaccaaaaatgctgttcagattcgaagccatgctcaaaagtttttctctaaggttgtgagggaatctgagggcagcgctgagagttctatacaaccaattaacatacctcctcctcggcctaagaggaaacccctgcatccatatccccgtaaatcagttaactctttcaaaggacactgcataccaaatgaaacagaaatatctncatctacaaac

SEQ ID NO: 19989 - DNA, 467 bp, Glycine max
caccttcttccgttgttctcttccaattgccttgattttctcggaaaattcttattttccgagaaagttcgtgtttttactgttgaatcgagaattcccaaatcggggtgtctgaaattcaaagctgttgttgttgttggcggctggggttagtctctgtggaggtttgggtgttttttgaggcagagcttattctcattttgctccaatggagatgcaggtctcaatcgtcttacgtccactcttctggagactttttctcctcttttaataggaaaaaagagaatttcaatatgaattcatccagtgactttatttcttaaaaggaactgaaatatattctagtgacatcattttctttcatgatcaaattatccttctctttttcttttgtttccattttttcattggaggaaagttatcaattcatctgctctattgaatgtaggaccagataaagcacaaga

SEQ ID NO: 19990 - DNA, 739 bp, Glycine max
gatactcactcatcacatcagggtcttctcttcttaattttctcactgctttttcctcttctatggctggccttcaacaatacaacttcttccccaccgatctcttgtaccctcgtccacaaccccaacaagcttctcctaaacccaccatgcttcccctccaaacccctaatgttcaagatcacactcagcaccaacaaccaccaaggaccaatgccaccccttcaacttcttctgccgttgtttatagccaaaagggtcattctattgctgccgttgacgacaacaacaaggtctccaaattctcatcagaccctctttcttggttgctttggatgcccgaagatgaagatgaaaattgttcggactcttcttgaattgtccttcaattctcctcttcgagagagtggtctaatgactctggtgaggtcgactacatggatcatactcgactacatgaatcatactgtgccgttggattaaagaccaaagaataagattaaatgatcatttcatgtttataggagtttggacactgaaaattattattattattgaagggactaatacctcttcttttttatgccctttctttactcttaagcctttgatcaattatcctttttcacttctttttttcattggttttcatgaacatttgagttagtttacactatagaacctgaatggtcctactcatacgtacaagatgaaaatcaataaaattgaagcttgtgtt

SEQ ID NO: 19991 - DNA, 350 bp, Glycine max
gagaaacactcaattttaattttcagctcattagctatttgctgaaaactaggagtgagaaagatggcatcttcaaaaccgcatggtgtagaaaacgttggaagttgtttgagaaacaccaaaggcttcaccctccaagtccttaccggttgttggttcatggagttctcctcattcatgatcatgtcagtgtcaggagcaagctacatgtttagtctttactcaagggatatcaagtcagttttggggtatgaccaatccaccctcaatttcttaagcttcttcaaagacttggggtccaacataggcatcatttcaggcctaatcaacgaggtaacacccccttgggt

SEQ ID NO: 19992 - DNA, 461 bp, Glycine max
cccactcgtccgtgcgttttaagtgcctcgttagttagtcttgaagcatctacagcacaggctatatgcttggattgaagttgggaaagcacttttgtgaattccactgcacaaaatgaagaaggaagagtgcatatttggattaaagtttgcaaacataagtttgattcaaaagtgaggaataaggtattaaaatcaagagggtccattttgtcacttatgttgcggcgagtggagatagtttggaatctgggcttgtactggtctaacttggtgtatgatttcctggttggaagggatgaagaggttgttccgtatcgtgctcgacagcttaggaatctcttgtgtgatctgcggccttcctttattaaagctggtcaggttcttgcaaataggccagatatcattcgagaagattatatgaatgaactgtgcattcttcaagatgatgttccttcatt

SEQ ID NO: 19993 - DNA, 481 bp, Glycine max
ctttcttcttttatttctcttgctctaatctcacaagtcacttgcaaatgctcccaatttcctcttcaatttagggtttcatctttcgcttcgagtttgcgcatccatggattccatctacgcgagctcgacgtgcacggttcctcaccttctccgtcgcgagactctgttcttgccgcgaacatcgattccttcttcctcgcttcggcgagcgaagaaggcgcggcgcgcgagggtttcgagttctgcctcgacgacgacgacggcgagcagtatcgcttcaaacggcgccgtttcgagggcgttgcagggagtgagcaataagagtaacactgcgctggagcagctcgacatcgagcgtggcgtatgcatccctttccgcaagtactcgccggagatcgtgaggaataaggtattaaaatcaagagggtccattttgtcacttatgttgcggggagtggagatagtttggaatctgggc

SEQ ID NO: 19994 - DNA, 365 bp, Glycine max
gtgagtgagggagcaatggagaagattgcagcactcgctgctaatactatccacacccctctcttacccaacaacaccactcttccaaagacttcatcttttcaaccctttttttctaaccagctacttggcctccccttatcttcttcttcatcttctgcttcttctttaaccgccgccaaacggttctcttgcaggcctatcaagtgttccgtttccgaagccacagagcccaaaacagagaagaagaggcaattgctgagaagaggggatgtgaggaacataactattgttgctcaagttgaccatggtaaaactactcttgttgatgccatgctcaaacaaactaaggtattatgtgataa

SEQ ID NO: 19995 - DNA, 289 bp, Glycine max
gggaatgctctcaagtgcagtgcctgtcaaggttattgtcacacgggttgttccgtgagttcaacagtctctacatgtgaagaagttgagttcttggccacatgcaaacaatgtcatcatgccaaattacttactcaaaaagagtcctgtaatgaatctccaactagtcccttactcttaccaggacaagaacgtagcactttggcagttctgaaggggccaaggcctaaatgtgatggtcaaggattgatttctactatgacaaagaatagtcgacttgacatgaaac

SEQ ID NO: 19996 - DNA, 1789 bp, Glycine max
aaaaaaattacatagaaatcaaatactgtactatgatctcacgcagacaataatttagctctggagactcaggtggttctaacgtgtgcagctgaaacctccgtgtcccacgaaaaccttacaaaattgaattgtggtattacagtatccaacagcaccatgctggattctgccactccccatgacaaaatcaccacagcagcttctggcttcgtacttgaggatgttcctcatctatctgcttacatccctcacctccaaacatatcctgacccgttgcaagacaatccttcctattctgttgttgcgcaatattacgtgaatgtggatgatacaattgcacaacagatagttgtacacaaaaatagtccaagagggacccattttcgtcgtgctgggcctgctcagaaggtatattttgattcagaggaagtacacgcttgtattgtcacgtgcggtggactttgtcctggtctaaatacagtgataagagaaatagtatgcggcttatatcatatgtatggggtgcacaaagttttgggaatacagggaggatatccaggtttttattctcgaaatacagttcctttgacaccaaaggttgtgaatgatatccacaaacgtggtggaagcatccttgggacatcatatggaggccatgacacctcaaagattgttgatagcattcaggaccggggaattaatcaggtttatatacttggaggatatggaactcagtatgaagcagctatgatttttgaggaagttagaaggcgtggcttgaaagttgcagtggtcggaattccaaaaactattgacaatgatatcccagttattgacaaatcaattggtttcgacactgctgttgaagaggcacaacgagcaatcaattctgctcatgtggaagcagaaagcgcggagaatggaattggtgttgtaaaattaatggggcgttacagtggatttatcgccatgtatgcaactcttgccagccgtgatgttgattgttgcttgattccagaatcacccttttacctggagggtccaggaggactgttggagttcattgagaaaagactcaaagagcaaggtcacatggttatagtcatagctgaaggtgcaggtcaggagcttctttctggcaacccctccattgttaataagccagatgcttctgcagacaaattatttccagatgttggcctgtggttgtcccagaaaattaaggatcactttgaaaaacgtcaaaaaatggctataaatctgaagtacatagatcctacttacatgatccgtgctatcccaagtaatgcatctgataatgtatactgcaccctccttgcccaaagtgctgttcatggtgcaatggcaggatacacaggcttcaccgtgggcccagttaatggcagaaattgttacattccattccatctgataaacgagggagagaagagggttgtgataactgatcggatgtgggcaaggttgctatcttcaacccatcagccttgcttcttgaacccaaaagaaatcacaggagaaagagaggaaagaacggaaaaccaaaccacagatgggcagaaccattcagaaatagcagactaaacagggcatatacagagcacaaatataacaccaagttaaaatgcctttaaaatgtggtgatcaagttaaatgatcaaatttaattaacgtaagatcaactgattgatcattgacgttggacaaaaccaaatctagtacatcttttgcagtatttaagccacaatgagtaacatcatatatttac

SEQ ID NO: 19997 - DNA, 546 bp, Glycine max
tggttatctttcccaggctctccttatatggaaaattgatgctagatcagtctgaaagtatgctgttgtgttgacatgtgtaaaatcttgatctctttttgtgctttcatagggagtttaagcggtttttcagacggtctttgcttgaaacctctgaattcctcaagaatgattgtttgaaaatcaactgtacagttggagttgtggtttcagcaattgattgtccacaacttcactctattaacatcccggaatctgacattggatcacactttggtgcactattggataatatggaaggttcagatattacttttgatgtagctggggataagttccctgctcataagttggtgttggctgccagatccccacaatttcgatctaaattttttaatggtttagatgaagaaaagaatgagattattgtaacagatttagaaccaaaggtttttaaggtaaaaactatatgtttcccctttccatattttctttccctggtagcatcaagcttgtttaggatttattctgttattctgtattttt

SEQ ID NO: 19998 - DNA, 658 bp, Glycine max
attctgttttccgctgcttgtttgtgcctgcgtagttacaaagtaaaaagagggaggactaggacaaaagttgttggcagtcatcatgtcgagcgcttcgttgaaggagatgaggaacggtggtgaggattatagcaatggtcatggtggtggtggtgtgagggacttgtatggagaggattgtgccactgaggaccagcttatcactccatggactttctctgtggccagtggatgcagtttactgagagatccacgctacaacaaagggctggcctttaccgagggagagagagatgctcattacttgcgtggccttttgcctccagctgtcttcaatcaagaacttcaggaaaagaggttgatgcacaatcttcgccagtatgaggttcctctgcataggtacatggccatgatggatcttcaggagaggaatgaaaggctgtttcacaagcttctgatcgataatgttgaggaactgcttcctgttgtttacactccaactgttggagaagcatgccagaaatacggaagcatttttaggcgtcctcagggtctatatataagtttgaaggagaaaggcaagatccttgaagtactgaaaaactggccagaaaagagtattcaagttattgctgtgactgatggtgagcgcata

SEQ ID NO: 19999 - DNA, 292 bp, Glycine max
accccaattccgaagcaaaaactaccttcacatccacaaaccacacctcccccataaataaaagtaacctccctcatggaagagctctcagcggggcctctcgtccccgccgtcgtcaaacctgaaccgtccaaaggcgcctccgccgctgcctccggcggcacgttcccggcctccacgtcggagccggacaaggacttcctctgtccgatttgcatgcagatcatcaaggacccgttcctcaccgcgtgcggccccagcttctgctacatgtgcatcatcacgcacctcc

SEQ ID NO: 20000 - DNA, 939 bp, Glycine max
ctgtagggttagagtaccattttcatcattccgcccagtgaaaccagatgatccagtgttagatccttttcttgtgcatactttgaccatacgctttgagcctagaagacagaggcctgttgaaggaaatgcaacaatgaaacaggatttaagaagctttaagcttatattggaatatattaaagccttgcctactgggcaagaaaccgattttgtattagtttcatgttctggactaggaattgagccttccaggcgggagcaggttcttaaagccaagagggctggtgaagattccttaagaagatctggccttggatacacaatagtccgtcctggtccattgcaggaagaacctggagggcagcgtgctctaatatttgatcaaggaaacagaatatcacagggcatcagctgtgctgatgtagctgatatatgtgtgaaggcactacatgatacaactgcaagaaacaaaagctttgatgtatgttacgagtatattgctgaggatggaagggagctttatgagctggttgcacacttgcccgacaaagcaaataactacttgacaccagcactctctgtcttagagaagaatacctgatcatcccttgttgagacaaaatacttcccagaagatttcataaatttgctacctacgttcttctacttctgcattggatcaatgcagaagtgattcatgtaactatttttcctgtatatatattcttgtgtagcacaaatctacgacttgagaaattaatttatttataaattcttcctttgaaaattggaattatacaaaaaatatagatttcaatagttaaaatgcatcatacaatcaatgatatggatatatacatctcgccttgtataatgaaacaatagcttaaatatgattttggttgctataaatatactcatttcattttgactttt

SEQ ID NO: 20001 - DNA, 453 bp, Glycine max
aaagtgggattttgtagggttagagtaccattttcatcattccgcccagtgaaaccagatgatccagtgttagatccttttcttgtgcatactttgaccatacgctttgagcctagaagacagaggcctgttgaaggaaatgcaccaatgaaacaggatttaagaagctttaagcttatattggaatatattaaagccttgcctactgggcaagaaaccgattttgtattagtttcatgttctggactaggaattgagccttccaggcgggagcaggttcttaaagccaagagggctggtgaagattccttaagaagatctggccttggatacacaatagtccgtcctggtccattgcaggtaaagtttctattgctgctcctaggtagaacatgtgattgatttagttgcagaaattagcatttctgtggcacctggatacaagggagcccc

SEQ ID NO: 20002 - DNA, 498 bp, Glycine max
ggaatcttcaccagccctcttggctttaagaacctgctcccgcctggaaggctcaattcctagtccattgcaggaagaacctggagggcagcgtgctctaatatttgatcaaggaaacagaatatcacagggcatcagctgtgctgatgtagctgatatatgtgtgaaggcactacatgatacaactccatggggcagaagctttgatgggtgtgacgagtatattgctgacgatggaagggtgctttatgagctcgttgcacacttgcccgacaaagcaaataactacttgacaccagcactctctgtcttagataagaatacctgatcatcccttgttgagacaaaaaacttcccataagtaagattttataaatttgctttctacggccttatacttctacacaactgccaaactgattcatggaccgatttttcctgtatatatatacttgggtataacaatttactacttgaaacattaatatatttataaat

SEQ ID NO: 20003 - DNA, 452 bp, Glycine max
gggaggattatcaatgccgaagccatggataatgcacagctgtggttggcttgggtgcaaagctctagttggcttgcaagccttatttttcagtttttacccaatgtgatcatatttgttagcatgtatatagtgatcccttcggctctttcgtatctctcgaagtttgaacggcatttgacggtgtctggggagcaaagagccgcgctcatgaagatggtttgcttcttccttgtgaatctcattctcttgaggggtttggtggaatcgtcgttagagagtacgatcttgaagatggggcggtgctatttggatggagaagattgcaagaggattgagcagtatatgagtgcttcgctcctgtccaagtcatgcctctcctcacttgcatttctgatcacaagcactttcttggggatttcttatgatctcttggcacccattccttggat

SEQ ID NO: 20004 - DNA, 792 bp, Glycine max
attcgcgaaacaaaaatcatgattattttttgtctacgttgtcagcagcctctgaccgcaaatccacgagatgttagttttttctagccacaaacgcagaccaacccctggcgcacattagccaccattagctgtctcactctaacatgcgcttctccagccgctgcagactctgctccacttgctacttcctctagaagaagcctttttcaaatctctctgccaccggacccgttttcttctgttcatttgggtttctctcttccaatttatggcttctttgagacctaccctctctcaactttccctttcccaatccaattttctcagaaaatctacatggaacaatcatctaccttgctatttacacaaaaggatcgcaaagttgcaaacttttaccacttctaagtcttccactttcagggtttgctgtagttctcaagagaccaataagcaaaacaatggtgaagagcctccagagtcattatttatgaaggaattgaagaggagaggtatgacccctacttcattgcttgatgattacaaacaaagcgactatggacttgatgaagaggtgtatgtgaatgaagaagatagaggtttcccaaaaagaaaagctgtctcaaccaatgttgagaggagtctagacaatcagagggaacgttctatggcactgaacagtgaaggtcttgagggcttggtacctcgtgctaaacttcttttgacaattggaggaacattcttcttgggatttgggccgttgatcctcataattgttgcaaccttttctgc

SEQ ID NO: 20005 - DNA, 782 bp, Glycine max
gcttagtccccaatcacaggaagattttcaattatttgcagatatctgttttaaatccttcggtgacagagtaaagtactgggtaaccttcaatgagccaaattatctagtcccacttgcgtaccgtttaggtatattcccaccattgcgctgctccagcaaatttgggaattgcagtgagggagattcagagaaagagccctttgtggcagcccataatatgatcctatcacatgcagctgcagttgatctttatagaaacaaataccagactgagcaggggggggaaatcggcattgtcctacactgtgactcatttgagccgttgagcaattccacagcagataaattggctactgaaagagcacaatcattcagcattaattggatcttggatccaatcttatttggtaagtacccaaaagagatggagatgattctaggaaccaccttacctaaatcttccagtaatgacaaagcaaaactgaggcaaggactggatttcattggcataaatcactatgcaagttattatgtacgagactgcatatcatcagtgtgtgaatctgggccaggagtttccacaacagagggtttatatcaacgaactacaatcggagagcttactccgtttgattggctcagtgtttacccactaggcatgaagagtattcttatgtatctaaaagacagatataataacactccaatgttcattaccgaaaatggatatggcaatttgtatgatccagatcttaccgaggaagaatatcttaatgatt

SEQ ID NO: 20006 - DNA, 378 bp, Glycine max
atgatcactatgaagatgaccttttaagtattgctgatcctctcaatcagataaacctggcaaattaccttcttgatttctttgttagcttttctcaatctgacagacagctcttaaatcacatttgcaagagcttgtctcagtctcaacgaagtgccattcaactggtactgaagagatgagaatttcgtgtcctgtcttcgagtgccgtctcaaggatgggttgataataccagagagagtgaaacaaagtgatggttggaaaccaatatcttccattgttcaggttggggaatctgtctgcagttctgaaaggtattctctttctgctgcagtgttcccccttggatgtctattgattctttttattggatgtgt

SEQ ID NO: 20007 - DNA, 1066 bp, Glycine max
caaaacctgaaaacctaacagaagaaagtgcaccggaaagaaagcagaaagcagaaagcagcgatggaaatccactcagaggaggagaatggcgtagcagaagagtcacaagcacttgagcagaaggagaagcgaaaggggaagcacgacaagcccaagccatgggacgacgacccaaacatcgaccactggaagatcgagaagttcgacccttcatggaacgacggcggcatgctcgaagtgagctccttctccactctctttcctcagtaccgcgaaaagtacctccaagaagcttggcccatggtcaaatccgctctcaaggaattcggcgttgcttgcgaactcaacctcgttgagggttctatgacagtttcaacaaccagaaagactagggatccctatattatcatcaaagccagggatcttatcaagcttctatcacgaagtcttcctgctcctcaggcgataaaaatacttgacgatgaaatgcaatgtgacatcattaaaatcagtggcatggttcgcaataaggagcgatttgtaaaaagaagacaacatcttgtgggtcccaattcttccaccttgaaggctcttgaaatactcactggctgctacattctcgtccagggaaacacagttgctgctatgggttcattcaaaggcttgaagcaagtcagaagaattgttgaagaatgcatgctgaatagaatgcatcctgtatacaacattaaggttcttatgatgaagaaagaacttgaaaaggatccagcacttgcccaggagaactgggataggttccttccaaaattcaagaacaaaaatgttaagcaaaagaaggttaacactaaacagaagagaccatacactcctttccctccacctcaacagcccaggacgattgatatacaattagaaactggagaatactttttaagtaacaaacggaaatcagcaaagatatggcaagagaagcaggagcggcaggctgagaaaactgctgaaaacaaaaggcaaagagcagaggcctttatcccacccaaggagcctgcaaatctggtggata

SEQ ID NO: 20008 - DNA, 640 bp, Glycine max
gcatcaggtaaagacactggaactataaagagagctggcagaaagggacttccaatccttttcttctctattcttaatgccttatgtgctttttgttgggtttttgttggaaacttaagactagtaggtagaagtatttctccttgaatatatttatgtaaatccaaagttttgctgctaggtattttgtctgggacctcccagaatgactgttgtctgggatctccccagaattaccaaacagtgctgtcctaacatattctcaaaataaaaaaaaatctttgtgaatactggaggcaatataaggtgtagggtaattctaatgaaccttaattcaagagaaggcgctgtaaaggaatttgcagggtgaattgctaacttgattcataaaaactttagcaagtttttatgcttgtctaatcttatttttggataagtttatttagtttgttctttttggccccatgtaatatattgttctttattaacccggagagcactttattttggagattgattgtacatggataagatcttatcttgtggaatctgtctttgtatttgtaatgatcttttgttggttgtaacttgtaagttgtaacgcctgcattagcattagattaatattggtcgataaaaa

SEQ ID NO: 20009 - DNA, 883 bp, Glycine max
cgtatgtgggaggaggagagggagttcaacgtgtattggccaaggttaagggcgaagaagaaattgatggtgatgtagcgtgttatctggagtcagtttttgacatgatcagtgatgatgcctttcattggaataatattgagtctgtggtgtcagatgcccgggaagagaaggggtgtgtggtgccatgtgatggtggggttagtgaacaaggaggaataaagagagacatatttttgagactaaactatgatgaggttattactgcttggtctagccaaggttcttctccatggacaacttcaaacccacctaagttcaactctgattatgacttctccttgggtttgagtggtgtaggtggggaagtaagaagcttaagagggcacctagatggtggaagagaagcaagagtgtcaaggtatagagagaagagaaggactcgtttgtttgcaaagaagataagatatgaagtaaggaagttgaacgcagagaaaaggcctagaatgaaaggtcgttttgtgaagaggacatgctttgttggagccaatgcttttcctgcttaccactgacatcaatcaattaacggatccatctttgctttttctgcaaatttgggttaatacttggtttggctatatatatgtacgtatatatagcctgtattatataaatactagtaaataatattactgggccaggttaattttactagaattgttgcttgggatatttctgtctatatatatctctagacaggtttagtaattagtactaattaatgatcatctttattggcaggtttaagccttttgtaatccaattttggaagccttttcattgtttctcattagaaattcaattgttcaatgctgatgctgtt

SEQ ID NO: 20010 - DNA, 557 bp, Glycine max
gctcaatgggagatgcaaagaatgtgcttcaatatttgttcaatgctactgcccaagcaaggtgcaaattgtgggaaaagaatatggaactgcaggatttgaaagaacaactaagtgagcttgtagcactgctacaacaaagtgaagcacagagagaggaacttgtaagggagcaaaaaataaaggaacaagctgttgccatcagattgaatacaccggcattgcaggaaaactctcgatccttgaaacaccttgcggatgaaatgagtggtccattatctccaatgtcacttcctgcaccaaagcaactcaaattcactcctggagttgttaattggtcaggcagggagtcagctacatttttagatgaagcacgaaaggtgtgtctgctagattctatttctctgatgatgataatgtttgttttccaattaagttttaatgggtttataaccagatgatacccattggagagttgtcaacgaagaggctagcagctataggacaagccggaaaactttggaagtggaagaaaagtcatcatcaatggctgctac

SEQ ID NO: 20011 - DNA, 456 bp, Glycine max
aaaaaaaccaacccaactccacactttccacactcaatttttcggcatcaacatgaacaatccaactcttataatcttcttccttgttattttctccgtcttcttcgcggcgtcggcggacggcggcgacgatgagccgctgatcatgcaggtggtggagggcagcggcgtccggttgggagcagagcaccactttttggacttcaagcgcaggttcgggaaggcgtacgcttcccaggaggagcacaattacaggttcgaggtgttcaaggctaacatgcgccgcgctcgccgccatcagagcctggacccttcggcggcacacggcgttacgcggttctctgatctcacggcgtcggagttccggaataaggttttgggtctgagaggtgtgaagttgccttccaacgcaaacaaggctccaattctccccaccgataatcttcccagtgattt

SEQ ID NO: 20012 - DNA, 667 bp, Glycine max
ggctgaaaaagaaaaaaaggaacatacgagataatcttctgacaacatgcgagaaacaataataataaatagtaaataaaattaaacaaggaaaaaaaaatggtcattcactgattcacgtgactaaataaatactgaaacctatcactttaccctcagttctgttgttgtgttgtgttgtgtgtcttcccttggtgttccagtttttatttgcagccgccatgtgcggaatcctcgcagtgttgggttgcgtcgacaactctcagaccaagcgcgctcgcatcatcgaattgtctcgcaggttgcggcatagaggtcctgattggagtggcatacattgctatgaggattgttaccttgctcatcaacgccttgctattgttgaccctacttcgggggatcaacctttgtacaacgaagacaaaactgttattgtcactgtaaatggggagatatacaatcacaagcaattgaggcagaaactgagttcccatcaatttcgaactggtagtgattgtgaagtgattgcccatctttatgaagaacatggagaagaatttgttaatatgctggatgggatgtttgcctttattcttcttgatactagggataaaagttttattgctgctcgtgatgctagcggcattacccctctatacttgggctg

SEQ ID NO: 20013 - DNA, 470 bp, Glycine max
aaaaaacgaaaactttgccaaccaacaaagcattgaaagcaaagtcaccactcttgaatctgtggccacccagattgagaagaatggccaaaacaacaacaaaagtactaaaacaacacaatctcaccactctttctagaaaaccctgttcctgacatcgcctcctcataaccctcaggctcaaacacatcattaacaaaaattccaatcactttgaatcctctctctctttctctcttgttctccttgaaactaaccatctcttgaatctgaagttacccaagacttgcctttcaagtgtgttcagtttcatgtattggtcttatattggcgtatttaattttgggatgacatagatcttgccttgggaacagtaaaagaaagcagaaaaagcatgtttgcatctctacaggtgaaatctgaggtgtggattgttcttttttgagttaaaattccaatatagggagtta

SEQ ID NO: 20014 - DNA, 1261 bp, Glycine max
tttgattggaaaagggaagccacatgaagctcaggccgtcttcaacaacttaactgaagaagggcataagccaactctcataacatacacaactcttgtggctgctctaacccgccaaaagcgtttcaagtctattcctgcacttcgtgctaaagttgcagacaatgggatgacagcctgattcaatactctctcaatgctatgatcaatgccttttctgagtctggcaaggtagatgaggccatgaaaatctttcagaaaatgaaggagtatggatgtaaaccaacgactagtacttataatactctcatcaaaggatttgggattgctggaaggccttatgaatctatgaaattgctagagatgatgggtcaagatgaaaatgtgaaacccaatgatagaacatataatattctcatccaagcctggtgtaccaagaagaaactggaagaagcatggaatgttttgcataaaatggtggcttctggcattcagcctgatgtcgtaacatacaacaccatggcaagggcatatgctcagaatggtgagacagagaaggctgaaaggctaatattgaaaatgccgtacaacatagtgaaacctaatgaacgaacttgtggcatcataataagtggttattgcaaggaaggcaatatgacagaagccttgaggtttctatacagaatgaaggagcttggtgtgcatccaaatccagtagttttcaactctcttatcaaaggatatctagacgctacagacacaaatggagtagatgaggcactgacattgatggaagaatttgggatcaaaccagatgtagtaacctttagcaccatcatgaatgcatggagttcagcagggcttatggaaaattgtgaggagatattcaacgacatggtgaaggccggtatagaacctgacatccacgcatatagcatccttgcaaaaggctatgtgcgtgccggacagccacgaaaagccgaggctcttctgacttctatgagcaaatatggcgtacaaccaaacgtggtgatcttcactaccatcatcagtggatggtgtgccgcaggcaaaatggatcgtgcatttagactttgtgagaaaatgcatgaaatgggaacttccccaaatttgaaaacttatgaaactttaatatggggatatggagaagcaaaacaaccatggaaagcagaagagatacttagtactatggaagagagaggtgttgtccctgaaatgtcaactatgcaactggtggctg

SEQ ID NO: 20015 - DNA, 560 bp, Glycine max
gcagtttgtgacgggcgcacctcgccttcctccgggaggattggcatctctcaatccgaagttaactaatgttcgaaagcattgtagcaaccgggcagacacagacctacctagcgtgatgacttgtgcaaattatctcaagctacctccgtactcatcaaaagaaaggatgaaagagaagctcttgtatgccattacggagggtcaaggatctttccacctttcataattgcactctcttgactggtccatatttgaatcatccaaatgtaattattagggtaattgatagttatgtagataagggtgctagtgacttgctggcagtggtctaaaggagtttattgcagtggtggccacacgagttacttggggatgaagctactatcgtcacttgactacaaaaattgttgggggtgtgtacatagcacgctgatagtttaagttgattgactagtatcagctatagagacatggagggcattttcaagggtcacgcttggatgtacagtatttgtacaggaaccttaatcattaatattttagtcgtttacttgcat

SEQ ID NO: 20016 - DNA, 475 bp, Glycine max
tttcagattgcctgattaccgacatatataacgttatggatgagtctggatatgcccaacagtactttgtgtcaaattattttgaccccaatgttgatattaaaaacgctattcggaggtttacttttccttacttgagaagatgtgcgttgttgtggaagatactctattcttctatcccagcaccattctgtgatgaggaaaatatattggatagatcatggaatgccccaaaggacataatggactgggccaatattgagatatttgaggtcgctaaaattcaagagctcgagaaaatgttcaaaattccctctcttgatatggttctcaaggatgaactttcaagatctacagtctctatttggtgccatcatttttgcaaggaattcgacttgcgcagaattcaacaaaatatgcatgtaacacctgctgttccatttgagttaatgagattgcccaatgtttatcagga

SEQ ID NO: 20017 - DNA, 476 bp, Glycine max
gcagcataccatatccaatcattctaacggataggatagaaaagagcaaaactgtttgagtctgagagaacttgaaacaacaatggcttcactttccctctctctctccacaccaacaacaccaacctcactctccttcacatcatcctccatcttcttctcttcacaccaattccacacacacaataattctttcaaatccaacagctttcccgttttaccctccaaaaaacccctctccatttcctgcaaggcctcccctcctcttcccgtcctcaacttctccggcgagagggtcggcgagtccttcctcgacctccgctccgcccctcccgacaccgcccgagccgtcgtccaccgcgccgtcgtcaccgacctccagaacaagcgccgcggcaccgccttcaccctcacccgcggagaggtccgaggcggcggacggaagcccttcccgcagaaaaaaaccggtcgcgccc

SEQ ID NO: 20018 - DNA, 541 bp, Glycine max
ggtgtggttgtgccttataatgtgacatttgaccattctcaagctgctaaacaagtatatgagaggttccaagcttgtttgggcacaatcctgacatctgggttgcctcaagccaatttgtcacctgctcagcttgaagaccttcctcttttctctattggtcatagcaatggggcacttcttcaagtactcacaggaagcttattttctgagaaaatacctaaggctaatgccataatcgcatacaacaacaggccagcaacggaggcagtcccttactttgaacagtgctgccctgcagttgggtcctgcagtcagccaaatgatgccagttgtggaggcaactcctttttactcgatagctagaaatgcatcaggagatgtgtggaagatgatgttggatgctgttagatcaactctacaggaaaccgagcaggaaatactgaattcattaactaaatttgttgatcagttaccgtcagtaatgaatgaggttacacaaggagtatcagagttcaagccaacaccatctgaaaaccgt

SEQ ID NO: 20019 - DNA, 646 bp, Glycine max
cctcgagccgaatcggctcgagggctcgagctatctccgaatcaaccgcataagctatgtgtgaagatgctttccatacactatttgtttttcttatttctatataattaattatgccctcttatccctccattccttgattctctctctcacaaatggaagcaaaattggttgcacagtgcaatagtccaacactaactttagctcactggaaactaaaacaaccttgtgtggttggagtgctggcaaggcctgctgatgacatttcaggagaagcaagaaaaactaatcatgtgtacaaagatggcttgtttgatcgcatagccataaactatttatcaaaatgcgttcaagaggcaacaggactcaaaaatagtaagagtggttatgagagcctggtagaggcagctaccctggcttcgcagagatttagtcctattgaacagcatcaacttgtcattcaatcccttgacagagcctttcccaagccaatgcttttactgataaggacactgctaccaccctctaaattcgcaaggaaattgtttgccatcttcaccactttgttctttgcttggctagtcgggccctctgaggtgagagaatcaaaggtggaggggagaagagaaagaaatgtagtccacat

SEQ ID NO: 20020 - DNA, 1104 bp, Glycine max
aagccaccaaaaaaaaaaaagtagctagatttgttggttatgttcaccttgaaccgttgaagctcttcttttgccttgcaacaatttcaagtaacctctgccactgatcacaaacccagtaatggttttttctgctgtgttcactcccactctcaaccttgccatttcatccagcacatactgttgtagaagaagaacatcatctaccacaagaagagttgttacagtgagagctagctccacagagaaggatgaatccaaggacaaagatgcttcagcattcaacccttttgggtttgtcactgacaacccttctagccgaaatgccattcaactgcctgaaaaccctgctgaggatggcaacgttggccaaatgctatataggatagaagacaagggcaaggaatatgggtcatatgttaaatctggcaagttaagatggtttgtgagagaaactgggtcagcaaatggcagaagaggaacaattgtcttccttcatggggccccaacgcaatcttttagctaccgagttgttatgtctcagttgtcggatgccgggttccactgctttgcaccagactggataggatttggtttcagtgacaaaccacaaccaggatatggttttaattacacagaaaaggagttccatgatgcattggataagctgcttgaggtgctgggggtcaaatctccttttttcctagttgttcagggatttcttgtaggctcatatggactaacttgggccctgaagaactcaagcaagatatcaaagctggctatactaaacagtccactaacagattcatctcccattcctggactttttcagaagctaattcctctatatggtgaatttaccagccagaatgctattattgctgagcggtttattgaaggaggtagcccgtatgtatccaaaaattgtacatgactattggccgttacgttctgaaaaatgaaaaggctgacgtgtaccggctaccttatttggcaagcagtggacctggatttgctctacttgaagctgcaagaaaagctaacttcaaaggtactttcagtgaaatagcagcaggatttgcaactgacagatgggataaa

SEQ ID NO: 20021 - DNA, 546 bp, Glycine max
gacatgtttgggttaataatgaatgcaaaggcaaccttatctggcagttgctgaagggtttccatgcactgttggccaaaaacctagcaaggcaaagtattatttggaagacacaagtgagattttgagaatgttgcaaggccttgccaatgcttctgagcactctactagaacttctttgcaaccagcttctcattaaggttctttttaatgtgtagagtgcaaacacacacacacacaatttggctacaatgtagtactatttttctatactatactgggatatctatcttgtgttagatttcgtgatctattttattttctggctgacttgccttcatttattgatatcccaactatgttgcaactatcaataggttgttttgaaagtagatgaattacatggggtactgtatttattgtttcttttcttcactattgattcgggccattttgatgtatgataagattgggaaaatgaatgctaggattgtgaatgtactgtatcaagtaacatctcttgttggcagaaaaaaaatctagaag

SEQ ID NO: 20022 - DNA, 265 bp, Glycine max
cagaaacctagcaaggcaaagtattatttggaagacacaagtgagattttgagaatgttgcaaggccttgccaatgcttctgagcactctactagaacttctttgcaaccagcttctcattaagctttttttggtcagttttcttcatatgtgcacaaatttcagtgagtggttcttttctttctttagcaacaattgctcgtacaattaattgggggccgaaagctgtggacttgtggtcatataaatgttttaccgaggtggt

SEQ ID NO: 20023 - DNA, 559 bp, Glycine max
  unsure (1)..(559): unsure at all n locations
gaagatgtgccttaacaacaacaacaacaacaaattggaaaacgaaacaacaatggatggtttggtgactttcctagaccagacaataacaacactggcctactttttgggtttcaacaaccaaatagaagcaacgggaatttgggtgagaacactaacttagttcccaaacaacctcctcctcctttatcattaaactcaaaccactcccaaagacaagcacaacagcaccaacaacagccaccaccactttttccaaagccagcaaatgtaacttttgcagctgctcctatgcatttgttgaacaatgcacaacttgctagccctggcagaaggagagggttgattggagttgctgagcattcgatgaatgttggaatggttggtttagccacagctaatgtcacagcttctgcctcaagtaaaatatcacctgatgttattacaaggagtaataatgttgataactctccaatatcaccgcattatgtaatcaacaggggaaggaaatcagtgccatagagaaagtgttgagaggagacanaggagaatgataaaa

SEQ ID NO: 20024 - DNA, 1401 bp, Glycine max
gctagtcttcaattaacacaacattttctaactcctctctctttatatatagctgctttgtttggtacattcatttcatatcatggctccatcattggaaaccagtaacggtgaagccatgcaccttaaacaggttgaagaagagcaagatggtatacttttcgccatgaacatgatgtctaccatggtgtatccgtttgtggttcggaccgcgattgagttagggatctttgacatcatagcgaaagccggtgaaggtgcgaagctatcagcagaggagattatagagcaacttggcacaaagaaccctgaagctcccacgatgttggaccggcttctcaggttattggctagtcactccatgctatcttcctctcttgatactgaagatctccaacatggccaaaactctcctaagaggctctatagtcttacctatgcttccaagtattttgtcactgatgctgatggtgtctcgttcggagctaccttgaacttacttcttgacaaggtcttcttggaaagctggactgaactgaaaggagccatcttggaagggggtgtagcattcaacagggttcattccatgcactcatttgagtacccagcagttgatcctaggttcaatgatgttttcaacaaagctatgttcaaccttactactatagtcatgaagagggttcttgagttttacgaagggtttaagaacattaataggcttgtggatgttggtggtggtcttgggatcaatctcaatctaatcacttctaaatatccacatgttcaaggtgttaattttgacttgccacatgtcatagagcatgctcctacataccccggtatcgaacatgtaggaggagatatgtttgagcagtgttcccaacggagacgccatttttatgaagtggatacttcacgattggagtgatgaacaatgcttgaagttgttgaagaattgtcataaagctattcctagtgatggaaaagtgattgttgtggacttaattcttcccattttgcccgagagcacagttactgctaagagtggtttccaagctgacctcttaatgatgactcaaaactcaggaggaaaagagagaacccaacatgaattcatggaattggcattaagttctggattcagtggcatcaaaatcgtttgcagtgtctctggcttctgggttatggaattttataagtaaacacacttatcgagtgttgctcaaattgttcttctattatccttgcttgttgcttgaaaaaatagtatcatgctcgaacattatttaccaattatctaaggacatatgttcaatctttgttgttgttatttatatatatatatatataaaagatattagccaataaagatcttacctcgtattgtgaaggttttcccat

SEQ ID NO: 20025 - DNA, 793 bp, Glycine max
gccagacacacataatggtttatattggtgtttgttcccggaggggttctctaacgggtatgagtgttataggctcttggaattgtcataaagtggacactgtccgggatgaatcagctaatttaccctcagacttgggcattcactctagttgtacttgtttgtgttcttacccaaatgaatcatttaaataaggcactggatacttctaatacggcagtggtatctcccatatattatgtcatgttcactacatttaccattgtggctagtggtattatgtttaaggactgggattgacacagtccaacacaagttatcacagaaatatgtgggtttgtgaccattctatcaggaacttttcgtcttcacaaaactaaggatgtggctgatggtttacaaccatctttatctgttagacttcctaagcattcagaagaggatggctttgatggtggtgaaggcattcctcttagacggcaagaagccatgagatcgccatgatatattctttgcatcacatcttgcttttctaaatgagcttgaggcgctggggagggattttgccaaggtcgtctgtaatttactgattatttccctccccatcatattttttacctgatacagctgggtcgaaggatgagagtttcctatcactgttcttttggcctcctgatgattatgctttctgatcttgccttgcatgcccatctacactccataccggagacaaaagctaatgtaattttctgcacattgattatatatagtgtacctcagttaaatgaaaata

SEQ ID NO: 20026 - DNA, 569 bp, Glycine max
gcagcttctcatgagaagaaatcatgaaagaaatctgactgtacagatctaagcttcctaccgttcttatccaaaaccattcagttctatcactttcctcctgtgaatgaaaattttcctcacttcttacgcatatatatagttctatggtactgcacaatttgtataatcaactgctgatacaaagcaaccagcatgctgaatgatgtttattcgtacttagtttccagaatattgaattacttcccatataagtgactacaacgggatgggatggacatatacagatatcaaaaagccaccacaggcagcaaatgagtctccgactatagctgagataatgtagtatcactttcttcaatctcatcaaattccactggtttcccacaaacaagcttcctgtaaatcaaatatcaaattataaggacatttatacattcatatattaagaatcaacaacttagaaataaaacaatacaatacagctatttcaaaataaaaacagcaaattctctaacaaaataaaacaaataatttataaaaacaatggattagatgcaactagatga

SEQ ID NO: 20027 - DNA, 636 bp, Glycine max
catagagacgattcggctctagtccaagcagtagcatttgctgtctactggaattagaagccaagctattgtctctataacgagcatcaaagaagttattactggtgggcatgctgataatagtattaggctaatatcctcagatggagctaaaacattagaaacagcttatgggcactgtgctcctgtaacttgccttggtctttcacctgatagtaattacctagttacaggatcccgagacacaacagtattactctggagaatacatagggcactttcatctcactcaagtgccgtatcagaacactccactgggacaggcacatcgtcttcaaccagtaatagttcattgcacttaatagaaaaagaccggagacgtcgaatcgagggtcctatacaggtacttcgggggcaccacagtgaaatactcagttgttgtgttaactcagatcttgggatagttgtttcctgctcccattcatcagatgttctcttgcactctataagaaggggacgtttaattagaaggctcgatggtgtggaggcccatactgtttgcctttcctctgaaggggttgtaatgacctggaatgaatcacagcatactttcagtacttttacactcaatggtac

SEQ ID NO: 20028 - DNA, 497 bp, Glycine max
gcttctcatgggctctatatttcagtgcctaaatcctgccttaactattgctgctgctcttgcataccgcaacccatttgtcttacccataaacagaaaagaggaagccgatgcagcaaaacaatcttttgcaggtgattcttgcagtgatcacttagcccttctcaaagcttttgaaggatggaaggaggcaaagcgaagtgggaacgaaaaacaatttggttgggataatttcctatcccttgcaaccttgcggttgattgacgatatgagaatgcagtttctcaatttattatctgacatcggatttgttgacaagtccaggggtgctactgcttacaaccagtatagtcatgatttggagatggtttgtgcaattctttgtgctgggctctaccctaacgttgtgcagtgcaaaagaagaggaaaacggacagcattctacactaaagaagtagggaaggttgacatccatccggcttctgttaatgctgggg

SEQ ID NO: 20029 - DNA, 495 bp, Glycine max
gcgcgccggcggtaccgcccgtcggatcacggaatgtcgcccgtgacgaccgaggatttcggcgacgagtgtgatcagtcgccgtcggggagcggatacgtctcggaggcgtctccgtggtggcggagaacgccggcggtggcgccgtcggcgcggcggtcgaggctagggcacacgaagagcgcgtcgggttcgggcatggcgctttgcctgagtcccctagttcgggcgagtccaaaccggaggtggaaccacaagggattgccgccggagatggcggaggttagggccgcagcggcgaagcctcatctctcggccgcggcgtcgttttgcgcgaaccgttccaggaagcttgcggattttggacgagtcaaccataaccgttgattttgtttagctttcaaatgagcggacccgacccgatccggtgaattttcattctcattccatatgttatcggttttgtgcacattcttcatttcatttcttcatcat

SEQ ID NO: 20030 - DNA, 372 bp, Glycine max
ctcattaaaaacattgatgatggatagcaaccaactcaataaaacactgctgagtgtgatcagaaagcttagacttgtcaccttaaccgcgtcaaggaacaactttgaaggtgcaataacagatgaatggtgccaacataatcttgttatgttagacctatctcacaataaattctctggtacaataccctcttgcttcgaaatgccagcgtacttgttcttgcagggaaacagtcttaccggcacgatacctgaagcattaataagcaactactcccgaccaacggccatagattttagtgacaacaagtttattggaactattccagatagcatatataagctttggtctttaagatttcttttattggc

SEQ ID NO: 20031 - DNA, 700 bp, Glycine max
ctcgagccgaggctgacagttaacgacgacgtggaggaaggtgaacctcgtcgtatcatccgcttcctccacttcctccacttgccttgccttcccatttcattcctttcctgccacactcattcatcctccctgagaaatgtcgaagccgctgcttctacccactcctcccctcaccacctccattcaccgcttcaacacttcatcttcggcttctgcccttcaattccaatgccgattctccctttctcttctctctcgtctccaccactctcccacttccttccgctccctcgtgcgtagaacaagagaccttccccttcgcgctttcgattcctcctccgatgccaatagcgaagaaaaagaagaagtaaaggaaaatgaagagggcgttgacaacccgagtggaagtaggattgccgacgaggattatccgagcggccagtttgacttcgaaccggttaccggatggagaagcttcctcgtcaagctcaagatgctagtcgcgttcccttgggagcgtgtccaaaagggcagcgtcctcacaatgaagcttcgtggccagatatctgatcaagtgaagagtaggttctctccaagactttctctgccttaaatttgtgagaattttttgaaagcagcgtatgatcctcgtatttctgggatctatcttcatattgatagtttaaattgggggtgg

SEQ ID NO: 20032 - DNA, 563 bp, Glycine max
tcctcgcgtccgcggacgcgtgggtttgtttgtgtatgtttaaaattatggaagtttaattgaattctatcagcaaatggctgtgctctctaaacatgttggttcttaaatggtgaaatacagtatccacggtctatttattaaatgagcattttaacatatttttcttgttagtgaaattgtgttagacctgattaattaaggaggtcatttttgtctgtgtccagtctccactccacccgtagtgttctatcacacatggcaaagacacgaatattacctttttacacaatactttcttcctattgtttcatcgtaatcctttcttcaatgcaattggcttgaaacatgacagttctacagctttacaagggtgaattgtgttgatcatcttttatagaaaaaaggtttcaattattgtcattctttcttgtgatcagttttatggtggttccatatcagagggctccgagttacaaatagaggttgcagagtttttctggaggaatgttcagctcaatggaagcctgatcataatatctgaaaatgttatgggctcaatg

SEQ ID NO: 20033 - DNA, 573 bp, Glycine max
gatgaaaaggagagtttagttgaaaaccacaacaatcatgaggcccgggaggaacattacaagggggatgatgcttctagtgctgtggctcatgatactcatgcaactagcactgaaactgagacacttagcttggaaaactctgatgtaaacttagaaatgaatatccctaaacctgaaaatgagacaacttattcagacgaaagtgtcgggaagcaaaatgattcagatttgaaagtttcagaaggtaatgtgatagatggtatatcttcaaatgcaactgctgttcaagagactggaaataacactttgtccaaccctgtggatgatagctcatttctaaataaaacaactgcaacggactctgactgccactttcaatcaagcagtaacctaacagtagtgaccactgaagcaagcaacaacttgaccttagctggtaatgatacatcaagttcatctgaacaaaataaaacagtgatgttatctgaatctcaccaagctcaaaacagcacgacgaacacaacaatccctggagatgtaaaagatgtgcagacagaaggattagagcag

SEQ ID NO: 20034 - DNA, 407 bp, Glycine max
aggctttccatctggtagccacaggccaccctcatgaggtagcagggcctgttgttgggcttggctacttccttccttggatgaaacctcgttccttttcttcacaaattcaaaaaattctgcaacttggcgtgcatattgcctcttcgcttcaatatccttgctgaaatcaatattgggttcacagtccagaaccaaagcaggaaccttctgaatgcttgaatgcatgtgaccaccctccagataaaaaacgcggtctcttatatcagggtgtaaagagttgtcaatatgatggggcagctgattgacagtaatagaccatgattaccactttgggagggaaataaccagctttcatgcttttcatggaggtcgcagagatagtcaaggctgactccaccttcttc

SEQ ID NO: 20035 - DNA, 374 bp, Glycine max
ttttccctctcccattcctactcccaaatcacaattcctcttcggtgttttctttttctctgagtctcagccatatccatcatctttctctctccgccgcatgcggcggtgacgtttgatacccttcttcttatacagatccgccgccccttcttcctcccaacgccgctttctgctgtggacccggtttatgacgattccttggcaaacaacaaacgcatattgaagaatttgtggtttcacgattttacccctcgaaatcagaagtatcagtagcgtctacgcttgacaaccctacgatgatgagtcagcatccccgtaggaagctgccacgtggcaacccaagaaagggcaagcacgctgaagttgacaag

SEQ ID NO: 20036 - DNA, 466 bp, Glycine max
aaccgaaccaaccaaccccccctttttattttggctgttctgttgatcgcaaatcctcatctcatccctattcgtcgcaatctccactgcaccactttccagcatcttgaatttcaaaatgcctaaagttagaagattgaagtccctgtctactgattgtaatagaccgtatccttacccatccaactccaaaaacattgagctgcataaacctatgaatttgttggaatcggctgatgaaatgaaagaatgggaggaagctagatgtcctatttgcatggaaccccctcacaatggtgttcttttgaaatgttcttcctatgagaagggttgtcttccttacatgtgcaataccagttaccgccactccaactgccttgaccagttttgtaagtcctttgcttctcatctctcatcagaagtactgcaagaaattcctgtcacaggcagagtctcacatagtaga

SEQ ID NO: 20037 - DNA, 387 bp, Glycine max
ctgctttctcagttttttctatgtgactctgtttccataggccgggttttctatcattgcttattacccttttgcagatttactttatcaatgtcataaaacttttacatgtttcatcttttttttgcagtactagattgcattgttttctttctcgttttccgggaaagtgatcacatagtaggtgaataccagagctcacaccactcttcaggcaatgaagccacctttaaatgatgacaaagtttgatgcttatggatcatgcaattgctttctgtatgaagaagaggtgtaagctttttatccaaaactgaaactgggttctttcacttctcatgaaaaaaacggagtcctggccttctgcattttcttttttttttcctttt

SEQ ID NO: 20038 - DNA, 821 bp, Glycine max
gcagatttgataaggtaccacagttgatttgttcattataaaaacaaaactcttgcaaaatttattttccactaatactcaaatattgattttctttcctgaacatacttgcagcaggtacagataccactgcagccacatcagtttgggctatgacagccctagtaaaaaaccctagagtaatgaagaaagttcaagaagaagttagaaatgtggggggaacaaaagatttcttagatgaagatgatattcaaaaacttccctatttcaaggcaatgataaaagagacgttgagattgcacccaccagccacactacttgtaccaagagaatcaaatgaagagtgcattatacatggctatcgaattccagctaagacaatattatacgtgaatgcttgggttattcatagagatcccgaatcttggaaaaatcctcaagagtttattcccgaaagattcttggatagcgacgtagattttcgtggacaagatttccaactaattccttttggatcaggtcgcagaagttgcccaggtttacctatggcagttgtgatattagaacttgttcttgctaatcttcttcattcctttgattgggaattgccacaagggatgataaaggaagacattgatgttcaagtattgccaggactcacccaacacaagaagaacgatctttgtctttgtgccaagactaggagccatatataactactagatggactttgtgatcaaaataataaaataatgcatgttataatgttctatcaagaaattttaatgtgctatacttgactttttggttagtgttgttat

SEQ ID NO: 20039 - DNA, 504 bp, Glycine max
ctcttcttcttcttctttctctttctctttctctttctcttttccctttctctttatctctcttccaaccctaattccctttttccgatgccggacttccacgactccctcctcaccaccacgccgccgccatcgcgccccgtccccgtccgcgaggactgctggtccgaggaggcctcctccacgctcgtcgacgcctggggccgccgctacctcgagctcaaccgcggcaacctccgccaaaaggactggcaggacgtcgccgacgccgtcaacgcgctccacggccacaccaaaaagacgcaccgcaccgacgtccagtgcaaaaaccgcatcgacaccattaagaagaagtacaagatcgagaaggctagggtttcggcctccaacggtactctctcttcctcttggcctttctacgagcgcttggacgctctaatcggccctaattttagcgcgaagaaatcaacctcttcgccgtctccgtcgccgccggtggctctt

SEQ ID NO: 20040 - DNA, 488 bp, Glycine max
gtcgttcctcctctgccccagtacaactccaccaccaacttggggttggtggggatcaccgacaacgccttgaccgtgggacccgaacccgggtccaaggtggtcggaaagatcgaggggttgtacgcgggcacctcacaatcggagttcaatttattgattgttgtgaattttgccttgaccgaaggaaagtataatggcagcaccatcaccgtggtggggcggaaccgcctctccctcaagattagggagatgcctgtgattggaggaagtggggtttttaaatttgccactgggtattgttgaaaccagcactctctatgttgatgctgataggtctaccattgggtacaacatttatgtttcacattactgatcaatttgtggtaactttatgttacaaaacttcttctatgttcccttacgtactgctatgattaattgggtatccggtgttttacatatatatatattttttttatcaatgt

SEQ ID NO: 20041 - DNA, 393 bp, Glycine max
  unsure (1)..(393): unsure at all n locations
ctcgagccgctcgttcggctcgagcttctctcagtctctctccggcccactcttgaaaaaaatccccaaaattttgttctctgaacaaaatctcgccgtttcggttcctattctctttctcccaaccaatctctttctctctcatcggttgcgtttccttcgcacgaaatcgctggatttccgctatttctacctcgatcgctcgatctggagcgagacgaagaagaagaagaacccctttccttgataattgggaacacacacagaaacaccgaaactgtgccctaaaaagcaaaacccctctcacttcttccccgatggcggattggaagaagagatctgcgacgccgagcctgatctanggttttcgaatctagggttttgaggaagaag

SEQ ID NO: 20042 - DNA, 898 bp, Glycine max
  unsure (1)..(898): unsure at all n locations
ctaaattaacccttacctcactatcttcatttcaccatgggttccacaaaattaaatttaccctctttttcactacaacctggtatttctatgtggcaccgtgcttcaagaagttgcaacaagcgcgttagagcatagtgtgatattagtggagtttcttctacaatttgtgtccatggagaaaaactctcttgattatagtcctttgctttctcctcgtggtgatgaaactgcaagcgagacaacagcatctcctcttgtgtcagctactaaatggactctcaagactttgatcttggtgatctttgttctatgggcagctttcatcttttctctccctgcaaagcctgtgaatgagttgttctcaaaatggaatgatctcaaccgtgacactccttttggagtcacaggaagcatttttctggtcttcactgccccaattctcataattgcatttcttgccatcgcacacctaattcttactggggaggatcagcttcaggggaagaagacgtccaaacttccaaggtttcgcctatggacatttcctgtgcttgtgcagggaccatttggggttgtttctgccacagagcttattgggattgtcctcgttttgttgtatgttatctgggctctctatgcttacactgtgagggcgcttgattttatctctgaatttgctgtgccgtcctttagagacaagagcataatcatgttcaaagttatgggacttcgcacgggcgcaattgggttaatgtgtttgactttcctatttatcccagtttcaaggggatctgttcttctccgctatatagatatcccttttgaacacgccacangatatcatgtatggctgggacatcttacaatggtgatttttactgtccacggactcctc

SEQ ID NO: 20043 - DNA, 692 bp, Glycine max
gtggaaagccaggacctcacaaaattcacggtattggggctggttttgtgcccaggaatttggatcaagatgtgcttgatgaagttatagcgatgtcaagtgatgaagcagttgaaactgcaaagcaattagcactccaggaaggcttgctggtgggaatttcttcaggagctgcagctgcagctgctttgaaggttggaaagaggcctgagaatgcaggaaagcttattggggttgtcttcccaagctttggtgaaagatatttgtcaactattcttttccagtcaatacgggaagaatgcgagaaaatgcaacctgagccatgaattgactttgcttgttaatgtttcatactcattttccacaagtatctgtatggaatgacagtgtcagatgtccatgttatgcccgtgtttctcatttttgacactcaagaaattagataactgtgtacaggtcattgatttgacttacaacacagattaatgacccttgattgaagaaattttagatgtaataattattggcattgatgacaacgtagcaaatttctgccttatgttcgctattaaaaaataattgatgaaacagtttatctatttctttttgtacactgccttctctttggactctaaccctttgtttggttagagaagaaaagagaggaaatgaaaggaaattttcaaaaataa

SEQ ID NO: 20044 - DNA, 513 bp, Glycine max
cttactcctcctgcagttgaggcaatatcagagagttttggagagtggattatcaaaggtttaaagaaggaaaaaggataccctgtagagcatgttcgatcgtctctcgggcgtagaccctcgagtcacagggtccaaattgagcgtcgcagtctttgcaggtctggctcgcgccggttgcatggtgtatgatatgggactagccaccaccccggcttgtttcatgagcactttgttgcctccatttgcctatgatgcttcaatgatgatgacagcttctcacttgccatacaccagaaatggtctgaaattttttacaaagagaggtggactgacttcaacagaggtggaggaaatatgtgaaaaagctgctcgtaaatatgcaaataggatggccaaggtgtctactttgcttaatgttcttccaacaaaagttgattttatgagcacctactcaatgcacctacgagaaatcatcaaggagagaatcaatcatcctttgcattatgacac

SEQ ID NO: 20045 - DNA, 1879 bp, Glycine max
  unsure (1)..(1879): unsure at all n locations
gggcaatcatgtccattatcattcaagggaagcccctattggatggctcctgaggttataaaaaactctaatggttgcaacctagctgttgatatatggagccttggatgcacagttttggaaatggctacaactaaacctccttggagtcagtatgaaggggttgctgccatgttcaagattggtaatagcaaggaactcccaacaatcccagatcatctctcttgtgaaggaaaggattttgttaggaaatgcctacaacgtaatccacacaatcgcccttcagccagtgaattattggaccacccttttgtaaaatatgctgcacctttagaaagacctattctgggtcctgagtctccttcagacccagcagtatcagggatcacacaaggagctacaacttcgggcattggacaaggaaggaatccatctaagttggattcagatcgactttctcttcattcttctaggtttttgaaaactaatcctcatgcaagtgaaatccatattccaaggaatatatcttgccctgtctcacccattggaagcccacttttgaggccaagatcaccacaacacatgaatgggcgaatgtctccctctcctatatctagccctcggactgcttctggtgcatccacacctcttaatggtggtagtggtgccattccatttagtaatcacttagtttacattcaagagggtcttggaagcttgccaaagtcttcaaatggtgtctacgttagtggccctgctgctcatcatgacttgaatgttgacatttttcgaggaatgcaacagacatctcacattacatcagaactggttccaagtgaaagtgatgttttggggaagcagtttgcacggtctcctcataatgagccgtatgatgttcaatcagtcttggctgaccgtgtttgccggcagctgctgggggataatgtgaaaattaacccatcccttgatctaagtcccaactctttgctcagccgggctaatggtttatgacatggagcattttccttggcccactttttgagcaagtcttcgatgttcgtcagaatgatccatttattgttctatttgctgaggaagtaattgtaaaataaggagccaaagcataggagaatcaatgtaataaattttgatctaagaatataggagctggggcatataattccattttgcatggcttcaggctcaggctagtggagttcagaacctttcattggaagtgccaaactaagccttaggatgaaacttcctgacatttgatttgtctatatcaactgaaggctgcaaaaagaggagcttatgtttgtatgtagaattttcaagatgctggcagcatcagtgcatgatgagtagggagcttggatttctctctggtgcctaagatatgagaaatggtaggattaatgttaatattaactcaaggaatgagtttttctaatcatatgtatgcagttccttcagttaaagaattcatgcaatgacaactgtatcttttagaacatcatatagatgccaaaacaaaaaatgaaattggtacaaaatttagtttctagactattttttgggaggtgatattgctgtacagaatatgggagactgtattgtgattctgcttttattgatgggaagctaaggatttgtggaacctatacatctcttgattgcatgctcagatgtattctgtcattatataccccttctactggatttattttgtacattatcatttgaagtaaaaaattgaagataatgatttgtgatccnnnnnnnnnnnnnnnnnnnnnnnnnnnnnnnnnnnnnnnnnnnnnnnnnnnnnnnnnnnnnnnnnnnnnnnnnnnnnnnnnnnnnnnnnnnnnnnnnn

SEQ ID NO: 20046 - DNA, 509 bp, Glycine max
ctgggaattggttacctcaggatctcaataaggggagattggattatttttattacattataactgctctagaagtcgttaatttcggttactttatattgtgtgccaagtggtataaatacaaagggactggttctagcagcagtggtgaccttcaactcgatcaagtatccaaaccatccgaaagaactgttaacactgtctagtggttctcatttaaacctgtggttatattaagtacttagctttaagttttgtggtttataatgatgttattttactgatcgtctttcatacagaatgtctgtaatcttaaacctaaaaaaatggttgagcttacggttcataatgtttctttagaaagaacaaataaggtagtctttctttatttttaggattggattggggaaatagttttattgtaaaccttcttgttttttttagtattgatagcttgcctttagtgaaaccaaaaaaatatatgaatttattgaaatgtactttgattt

SEQ ID NO: 20047 - DNA, 500 bp, Glycine max
gaagctgccacagaaggcttcagcttcagcatcacaaacatctgagcaagctgatgatacagcttcccaggatagcaattctgattttgtcgcaagaactccacctcctaaaagtagtatagttagtcctactgctacaacaccagcagggaattttgctactcctgtttctatgaatgttcctgtgcctaacttgtcgagtccaccagccattgcatcagtcatgcctggttcaaattctgttcagagttccttggagattagtagtcctgtggatgcttcatcttttgttaatcagtctagcactatgaaggaggaagagattaatagtttccctggtcaaagaccatctccatcgcttccctgatgttacactcgtaaggaacatcagcagaaacagcgtatcaaatcaagcaacaaatagcatacctcttgcttctggcaatatgggttccagcaatgggcccccttggttcaatgccttctgcaccttgaataac

SEQ ID NO: 20048 - DNA, 842 bp, Glycine max
  unsure (1)..(842): unsure at all n locations
cagatatcaagtgattcgcataaattcaaagggactgcgtgacggttgcaagtggttggaaatgtttgaagatgtgagggcaatcatattttgtgtttccctgagtgactacgaccagatgtggcctactagtactggtcagcttcgtaacaaactgctggcaagcaaagatctttttgagagtctggtgaagcatccttgtttcaaagataccccatttgtgcttctcctaaataaatatgatgtctttgaagacaagataaacaaagttcctttgtcaatttgtgagtggtttggacacttttgtcncgtgagaccccatcacaacaatcatgccctagcgcaccaagcatattactatgtggctatgaggttcaaggagctttattattcactaaccggccagaagttgtttgtggggcaaactcgaggccgggatcgctcgtcagtggacgaggcattcaaatacatcagggagatcatcaaatgggacgatgagaaggatgatgatgtatatgaaatcaacccagaagagtcattttacagtacagaaatgagttcttctccattcatcagacaagaatgaattcccaaccttggatagcccttctttgagactaaatggtcttttatatgtggatagagtgtcgcagctccaaagaatttgtaggagcatagcatttgttgaaggacagggaggtcagttggctgggctgtgttgtggagtatgttgttttattttgttcttttaggatcttcctgaaacaggttcagaatgatttttgccccttcataaataagctaatttgattgagaggttgtaaattcagaggttatttgtt

SEQ ID NO: 20049 - DNA, 419 bp, Glycine max
cttcaacaccaacaaagtctacatccaaagagaaaactgaaaaagtcactaaaggaaaaggcaagaagaaagagaagtcaagccctagtgataatcagttacgtgatgcgatatgtaaaattcttaaagaagttgacttcaatacggcaacatttactgacattctgaagcaacttgctaagcaatttgatatggatctcactcctaaaaaggcatctataaagctgatgattcaggaagaactgacaaaactagctgatgaagcagatgacgaggaggacggagaagaggatgctgagaaagatgaagccccatctacaggccaggaggttaaagcctgattgaggagtagacctgactgcttagcaatgcatactataacccttgttatgcatgcttcatctgtacactttgttggg

SEQ ID NO: 20050 - DNA, 521 bp, Glycine max
cagccaataacttcggactccgtctctaacaaccaccgcaccgcgcatcggcgcgatgccggaaataacggcctccggcatcgcctctttcggcaagaatctttgcgcagaaatatcgaacacgtcggcgcggaaacctacttggtttctcgtctcgccttcacgcttcttcgctatctcgggattgggtaccgtcggattacacaattacttgccctaggatgttatgccatgctacttatgcccgggtttttacaagttgcatattactatttcttcacaagcaaagcaaagcgaagcattgtttatggagatcagcctagaaacaggttggatctgtatctacctgccaatattggtgaacctaagccaggtttgatatctgtaactgggggagcatggattattgggtataaagcatggggctcccttttaggactacagttggcagaaagaggcattatggtggcatgcattgattacagaaattttcctcaagggaccatcagcgacatggtaaa

SEQ ID NO: 20051 - DNA, 309 bp, Glycine max
gttattatctaagcattgcatcaaacaaaactaactgaaaccaaaaccttgagaaaactgagcatggcggagagtggcggaggaaatcgccggagagaaccgcttctggtgtcgccggaggaagaggctgcaaaagcatcgtggaggcttaacgtcaaagagtttcgtttgccaagccaaacgaatgatcatcaaaatcaacgatccttcactttccatggccttcttcgtaaacccaggaagcaacgcaaagtggcagaatattacaagaatcaggagagactccttgaaggatttaatgagatggag

SEQ ID NO: 20052 - DNA, 806 bp, Glycine max
gtagggttccacgtgtgggtgacatacatagaattgagacctcgacctcgacctccactgtcactgtgagaagaagaagaagaagaaacgcagtgactactgcaatgagagcggtggttcagcgcgtggcctctgcctccgtcgaggtcgaaggccgcatcgtctccgagatcggccccggccttctcgtcctcgtcggaatccacgactccgattccgacgccgacgccgattacatatgccgaaaggtcttgaacatgaggctgttcccaaatgaaaatacgggcaaagcgtgggaccacagtgtgatgcagaaaaattatcaagtcttgttggtgagtcagtttacgttgtatggattcctggagggtaacaaaccggattttcacgttgcgatggcacctcagagagccaagcccttctatgcctctttagttgacaggtttaggaacgcctataactctgatgcaatcaagggacggtgtattcggagcaatgatgaaggtagatttggttaatgatgggccagttaccatgcagcttgattcaaattcaccaaattgatgcagcagaatcttgatcagcggttgatctggcttgatgaagttgagcttgaattttgactcttccgtcagaaagaccaaatgcaagacattcgcattatgtgtttattcattctagttgaagttctttgttccccaatgtagtagtgaccccattttgtaacactatttagttcaaagaatgccttagattgtccctgttcgttctgccatatgggaatagagtttggatccctaatggac

SEQ ID NO: 20053 - DNA, 468 bp, Glycine max
cccacgtgtccgatttatccaattatctttctatagaataatacaattttctggattgagattatgtacggtctcctgaaaattttagatgaactttataaaacatatatttgccttgtctaggaaggatagaggagaggttgatcttgtttttggttgattcagtggtaaattctctccaaggtgcacgtgcatctcagcaactgaatcattcatctcagttgataaaagaaaaacttcactgtaacaaagatgtacaaaaggtctaatgaagaaaaggatgtaagtagtaagaaggttagaaattgtgatacagcagaaagcaatattcaaagcgcgattgtcgatggcgaggacacatctgagattccatcattcccattaggaaatttgagtactagttggtgctcactggtttggaaaaccggctgctattaagacagccaacagatacttcttgcttcaaaa

SEQ ID NO: 20054 - DNA, 1024 bp, Glycine max
attcggctcaagggatgttctggtccgtgcaaagatcttttgtgtgtagacagttggtgctttgacgtggtggattgtcatgttgtccagatgagtgttgacggccacagccacgagctgaaagaactgaatcagcgcttacgagatgggaagaagattgctggtggggagcgtggtttatgcgaggaagtgaaatgtaatggaattgctgaagaagttaaggttgaacagggggggactgtggagtcctcctctgtccagcagcatataccacagcctcaaggggcaataatttgttgggagaggtttttgcatattagatcccttaaggtcttgcttgtggagattgatgactctacccgtcatgttgtcactgcactgcttcgcaattgtagttatgaagttattgaagcagcaaacggattgcaagcttggaagatattggaggatttaaccaatcatattgatcttgttttaactgaggtggcaatgcctggcttatcaggcattggacttctatacaagattatgggccacaaaacccgcaaaaatattccagtagttatgatgtcatctcatgattctatgggtttagtctttaagtgtttgtcaaagggtgctgttgactttctagttaaacccatacggaagaatgagcttaaaaacctgtggcagcatgtttggagaagatgtcacagttctagtgggagtggcagtgaaagtggcacacaaacccagaagtctgtaaaatcaaagagtcttgagaagtttgataataattctggaagcaatggcgaagatgataatggaagtataggcctgaataatgtggatggaagtgacaatggtagtggcactcagagctcatggaccaaacgtgctgtagaagttgatagtcataaaccagtttcccagtgggataaaatagctgagtgccctgacagtacctgtgctcaagttgttcactccaatgctgaaatgggtgggaacaaggtggttcctctagctgcaaaggattgtgcag

SEQ ID NO: 20055 - DNA, 381 bp, Glycine max
attcatttgattgtatcagacaatcggtgatcaaaactttcctaaaaaattcctcatggtgttcacatttccaactcttctgtccatgaagctccaaccactttcgctgcttcttgtgatgtacttctgtgcatttgctacttcttctgagattgcttcagaagcaaatgctttgttgaaatggaaagccagccttgacaaccacagtcaagcttctctctcttcatggattggcaataatccttgcaattggcttggaattgcatgcgatgtgtccagttctgtttccaacataaatctcacacgtgttggattaagaggtacgcttcaaagtcttaacttctcattacttccaaacatcctcattctgaatatgagtta

SEQ ID NO: 20056 - DNA, 491 bp, Glycine max
cttccttaggctcggattccggttcgagctcattcctctatctctttggctattagcaaacactctcatatttggttgttctagttctcactaccatgtcaacccacattgaaagcctgtgggtgttggccttagcctcaaaatgcattcaagagaacattgcatggtcactcttgatcatcatggtcactctctggctcaccatgaccttcttctactggtctcaccctggtggtcctgcttggggcaaatactactactttaattactggaaaaaaaccacctcaaccaacacaaacatcaaccttaaaatgattatccctggtcctagaggctaccctttcattgggagtatgagtctcatgacatccctcgcacaccaccgtattgctgcggcgggggaagcatgcaacgccaccaggctcatggctttttccatgggtgacacacgcgccatagtaacgtgcaaccccgatgtcgctaaagagatt

SEQ ID NO: 20057 - DNA, 457 bp, Glycine max
gggctatcgcttcctctttctctctttaaatacacacacacacacactcactttcttgcttgttctaactaccatgacaacccacattgataacctgtgggtgttggccttggtctcaaaatgcacacaagagaacattgcatggtcactcttgaccatcatggtcactctctggctctccatgaccttcttctgctggtctcatcccggtggtcctgcttggggcaagtactactcctttcattactggaaaaaaacaaccacaaccacaacctcaacctcaaacaacacaaactccaacaaccttaaaatgattcccggtcccaaaggctatcctttcattggaagcatgagcctcatgacatcccttgcacaccaccgtattgctgccgctgctcaagcatgcaaagccaccaggctcatggccttctccatgggtgacacgcgtgtcatcgtc

SEQ ID NO: 20058 - DNA, 1487 bp, Glycine max
gcgacatgaatgagtacttatctctcttctctcgctagctgtttataaccaagacactaactaggtaacatagaattgagaagtaatggaaatgaagaagccgtgttgtgaagagtcagagacaattgttggatcctgggaatgttggttcgacgatgcatgcatcgttgacatggattactttgtgaagaccctttcaagcatcaaacagaaaggtgttcgtgcagacttgattggttccatcatcactcattatgcctccatatggctccctgacctctcttcctctgctgaaaatggtgtcaccactcacttccaatcccccgaaagcgtcacaaattcatggatgaagaagaggttctttgtggaaaccttggtgagtgttctgcctcctgagaaggattctgtcccatgcaacttcctccttcgccttctcagaaccgccaacatggttcgtgttgacgccacttatagaggtgagcttgagaaccggatttcgtggcagctagaccaagcttctctcaaagagctcatgataccctccttcagccacacgtgtgggacactcttggatgttgagctagtcctcaggttggttaagaggtttatgagtttggaccgtgatggtgctgctttggttaaggtggccaagttggttgattgctacctcgctgaggctgctgtggatgccaatttgaccttgtctgagttcattgcacttgctggagctcttccaagtcattcaagagccacggatgatggcttgtaccgagccattgacacgtatctaaaagcacatccagatgtgtcaaagcaagaaaggaagggcctgtgtaggctgcttgatagccggaaactcacaacggaggcctcacttcatgcagctcagaatgaacggttgcctgtgagagctgtgattcaggtgctcttctccgaacaaaccaaactcaaccgccacatagattggagtggctccttcagtagcttgaggagccccaatggaggccttgacccaccaggacgatgcctttcaaagcgtgaaacaaatgctcagcaaatggagataaggaagctgaaggaagatgtttacaggctgcaaagccagttcaatgccatgcaagggcagatggagagaatggcggcgaagaagaagggcttattcaaatggaggaagtttggaatgcctacgtttagcagaaatgtaggagaggtggagataattgaagaacaagaggaagaggaggaggctgaaagggaagttggatttggaagaccaacacctatggacatgaaaaccagtctggtcaaaaggactccccacaagtggaggaaatccatgtcctgaagcagaaactatacccgatataatgtgtgttattttgttatattatacaagttcgtttttttggagttagactcgagaaataatgtaagatatacctccgtcgtatttggaataaattcaataaagatgtgcgtataccatc

SEQ ID NO: 20059 - DNA, 846 bp, Glycine max
ggctgttaaggcattgggcctgccaaagctgtcgtttggtgacagtgagtcagcgacgtgcgggtgcttggtgtactgtacggccgtaatttcaattttgaagtgtttgagagagagagagggagacacaacacaagggaaggaaaaccaagtggaatcaatagccatgaagatcgttcggagagacctagtacctaatggacctggcagcgttaagatggtggcagtggattcggatgatctctggtttgcgtataacttgatagctcccggagactctgtcatggccgttactgtcaggaaggttctaagagaagctgctaatggcggacgggaagcagaacgcgtcaagctcaaattggaaattaaagtcgaagagctttctgattatgacaaagaaggttctattttgcgtgttcgtggaaagaacattttggagaatgaatatgtcaagattggagcatttcatactttagaactcgaactgcagcggccgtttgtgctcagaaaggatgtttgggattctttggctttggaggtactacagcaggcctccgatcctggtgcaagtgctgatctagcagtggtgttgatgcaagaaggattagcccatatcctccttgttggtagaagtatgactgttactcgttcgcggatagaaacatcaattcctcgcaaacatgggcctgcaattgctggttatgagaaagctttggataagttctttcagaatgttttgcaggctttcttgaaacatatagatttcaacgtggttcgttgtgctgtaattgcaagtccaggatttacaaaggatcagtttcaccgtcacttatttttggaagcaga

SEQ ID NO: 20060 - DNA, 673 bp, Glycine max
gaaaaatactggtagcccaaggacaacatcagcttcaacaaccaacaataagataagccaaagttcttccttatcctctcagcaagccaagaactcttctgctgtgccggcccgtaaatcgtctcctgttggcagcaggaatgtgccatcaatactcaatgttcctcagctaactccctcttccagcactgggagtaaatctcaattgccacagaagcagcagccgcagcagcaaataccaaagcaagcattacaacaggcccagcttttgttctctagtccttacgtgcatccgcaatccaacagtaccacatccaccaccacagttccaagtggttattaccttcaacatcaacaacggcgtggccctgagcagatgcagcgaccgggctcttcccctgccgtaaacaatgtgaaaggcagcagtgccttacctacacagggtcttttgcatcctgcacaggttgctgcaatgcaaccctctgggagccaccctcagtttgttcctactggcttttcttatgcttcttatcatgttcattctgtgccctcagttcaagtgaagccagcggagcagaaacaacctgcgggtgagtagaatgatataatatcctttatttgctgcacccctgtgcttgcggttatcaaagaagaaaggtatatagcttgagtg

SEQ ID NO: 20061 - DNA, 416 bp, Glycine max
ggaattgaccgacggacccacgcgtgcgcctacgcgtccgctcttgatgcttgcatttgagcactctactaaaatctctaggacatgggtgatactccaaagcgttcaaacctttcacgaagaatcgcatccttggtcagggtccgcgagacacgcaaggaaagatgttttgacaagaaaattaggtattccgtcagaaaagaggtcgcacagaggatgcatccgaagaatgggcagtttgcttccttgaaggaaagcccaggttcatctaattcggattctgcacagagttctgggcaagttggcacttctcattctgaatctggacggagatgtcaccattgtggtgtcggtgaaaataatactcctgcaatgcgtcgggggccagctggaccaaggactttatgtaatgcttg

SEQ ID NO: 20062 - DNA, 854 bp, Glycine max
gttaacttgagaagtagtacctaggctcactgccttaaccttatcacaatggataataactaactcctactaatacttgtcctttatttgttcttaaaggagaaacaactttccattcacgacacgctcacgccgtcaaaccaacttgagtgcgttccaggaaacacatcccctctccatttcattcacttctctgctctctctttctcccacgaattcccaaacttattttcacgcttccaatttccgtcacgtaaaccatgcatcaccgcctcccaaattagggtttccgacaggcgcgtggaggaatcgatggcgaccgtgaatccgcagcctctgcagttcgaggaccctgctatacccgtcgacgacgatgacgacgacgacgacgacgacggcggtgatgatgacgctatggatgacttggaggatgcgaatgttaattcagtgaacgttgctgctaatgccgcggcgagtgtaaatcatgaagcggtagtggctatgccttccagaactagcgagctcactctttctttcgagggagaggtttatgtctttcccgctatcactcctcagaaggtgcaagctgtcttgctgcttttgggaggacgtgatgtgcaggcaagggtgcctgctgttgaacaaccatttgaccaaagtaacaggggcatgggtgatactccaaagcgttcaaacctttcacgaagaatagcatccttagtcaggttccgtgagaaacgcaaggaaagatgttttgacaagaaaattaggtattccgtcagaaaagaggtggcacagaggatgcatcggaagaatgggcagtttgcttccttgaaggaaagcccaggttcatc

SEQ ID NO: 20063 - DNA, 308 bp, Glycine max
agcggtagtggctatgccttccagaactagcgagctcgctctttctttcgagggagaagtttatgtctttcccgctgtcactcctcagaaggtgcaagctgtcttgctgcttttgggaggacgtgatgtgcaggcaggtgtgcccgcagttgaaccaccatttgatcaaagtaacagggtaatgtatacatctacttaacgagatcagttttataacttgtaatgcctttttatgcttgcatttgagcactctactaaaatctctaggacatgggtgatactccaaagcgttcaaacctttcacgaag

SEQ ID NO: 20064 - DNA, 265 bp, Glycine max
ggaattgcaaacacaacccctgctctccacaacgtaacgcatcttcacttcacttcattcaatcctctctcccctatccttctcgtaccctccaccaattccgaaacttattttcaacgcttccaatttccgtcactcgggtcatgctccgaaattagggtttccgacaggcgcgtggggggaatcgatggcgaccgtgaatccgcagcctctgcagttcgaggacccagcgatacccgtcgacgatgacgatgacgacgacgac

SEQ ID NO: 20065 - DNA, 765 bp, Glycine max
tgactctcttcctagctgaagatgctgttatacttggcattgatgatgaaaaatattggccattgatgcctccattgccttcatatgggtatgggagggagcatcctgggcctcgatatggcagtttgattcatggtcaacatcttaaagatgttgtgataacagggcataacggtaccataaatggacagggacaaacatggtggaaaaaatatcgccagaagcgtctcaaccacactagggggccacttgttcagatcatgttttctagtgacattgtgatcaccaatataactttgcgtgactctcctttctggacacttcatccatatgactgcaaaaacattacaataaaaggtgttactatattggctcctgtgtttggagctccaaatactgatggcatagatcctgactcttgtgaggatatgttgatagaggactgttacataagtgtgggggatgatgcaattgcaataaaaagtggctgggatcagtacggaattacttatggaaggccttccaagaatatagtaattcgaaaccttgttgttcgctctaacgtcagtgctggcatctcaataggcagtgagatgtctggtggggtatccaatgtcctggtggagaacattcttgtatgggaatcaaggcgtgccatgagaatcaagactgctccaggaagaggcggatatgtgcggcaaataacttacaaaaatctaatgctcaaaaacgtgcgcgttggaattgtgatcaagacagattaca

SEQ ID NO: 20066 - DNA, 615 bp, Glycine max
tgaaaatggtgagacaatctcagatgagcgtaaaatcagaataaagcctttgcccaaaaggatagtttcaagaccacctgaatttccagctgatcatcctgttagtgatgtcggcttggttagcaggaattcatcacatttagattcatttctggatcctgccttcatgtccatgatcaaagaccccgatcaacggcggatggagcagtgggagaaaactgctgaagcacaaagaggctggaattgtgctaaattgattggatatggcgaccttggtcgaccctcattgtctgctgccgaagaatattctctacactctagatacctgtctaaagcaaattccttgaatctttctgaaattgcagaaatgaaaattgtctatcgtggtggggtagacagtgagggtcatcctgtcatggttgttgtgggggcccactttttacttaagtgccttgatctggagcgatttgtgctctatgtggtgaaggagtttgagccgttaatacagaagcctttttctattgtctacttccactctgctgcatctttgcaggtgcagccagacctgggttggatgagaagattgcaacaaatacttggtcggaagcaccagcg

SEQ ID NO: 20067 - DNA, 940 bp, Glycine max
caaattcggggctttcatcaattacacccttcattcgcttcattccacccttcacctgaaaaaaaaaaaaaaccaaacaaacaaacaaaaaggagtgcaaaccatgggcgatgcaattgatttgtccggcgacggaggagtcattaagaccattgtcagaaaaagcaaagccgatgctgttggtccaacagaaaattttcctcttgttgatgttcattatgaaggcacacttgctgatactggtgaagtttttgacactacacatgaagataacaccatcttctctttcgagattggaaagggcagtgttatcaaggcttgggaaattgctgtgaaaaccatgaaggttggagaagttgcaaaaataacttgcaagccagaatatgcatatggtagtgcaggatctcctccagatattcctccagatgcaacacttgtttttgaagttgagctagttgcctgtcggccaaggaagggctccagtttgggaagtgtttcagaggagagggctaggcttgatgaactgaagaagcagagagagctagctgctgctgccaaagaggaggagaaaaagaagagagaagaagcaaaagcagcggctgccgcacgtgtgcaagccaagttagaagccaaaaaaggtcaaggaaagggtaaaggtaaagcaaagtaggaagttatcaaacatctacatgagtttggtatatgatgacaatcaaatagttatgtgttatacactattcagtatctcactacttccccgttggcccgtccgaaaccttatataaatgaaatgctgctttggctagatgcttttgtctaattatatggacaccatatttcgtcccttctgaatgtagctagctgatatatacaagcaattctgtaataataagcgttggatacgtaataaagttgatgggaatgatgagttccctatgtc

SEQ ID NO: 20068 - DNA, 567 bp, Glycine max
ccccttttgtctgaacaagcaagttttcctcataggctcgcaatcggaaaccctaaccctaaccaattgcgataatctttccccaaaatggcaattgcacgcactggagtctacgtcgacgactatttggagtacgcgagcacattacccgctgaacttcagagactgctcaacactgtccgggaacttgatgatcgatcccaatctatgataacgcagaccaggcagcagacgaagtacactatggggttctcatcacatggctccaagaagggtaatcacagttataataacaattatgggaatgaggacgatgatgcagctattgagaaaatgcggaaagaaatcgaggtgaatcaggatagtgcattgagtctttgtactgagaaggttttgttggcaagacaagcatatgacttgatagatagccatataaaacgacttgatgaggatttaaacaactttgctgaagatttaaagcaagagggtaaaatagcaccagatgacccagcaattctgcccccatggcctatagtccctaaagctgaaaagcgcaagcccatatat

SEQ ID NO: 20069 - DNA, 396 bp, Glycine max
actactactacttttaccaccttaacccaacccaaccacattatcaacatgtctgacattggacgacagtcgctcggagacaaggccggagccgccctcaagcccgactcgcagaagacctacctcgagcaggccggcgacgccatcaagggcaaggccgactccgccgcctccaccggacagccggaatcccagaagtcgtacacccagcaggccggtgacgctctctcgggcaaccagaacgagaacaagggctcgctcctcgactctgccaaggacgcccttggtatgaacaacaacaaccgagcttaagtcgatcgttatcggtccggcgccggttggttgatcggagggaaggaggaagaagacattcagtagcctttattactatgagat

SEQ ID NO: 20070 - DNA, 405 bp, Glycine max
ccaaggaatgataaacccatctcccattgtttatgctggtttatttgcagcccttgtgataagtagtaggtgtgtatggttataatacttaaatgttgcatatcaaaagatgagttggagaacagctagtagtcagaaatatcagacagttggaaagggccttttaaagattactcaactttttgtagctttcatgaatgtatgactctaggtctttggggacctgatatttaatttggatgcttcatattctcccgcatttatttcccaatgtgcattctgaatattgacttaacaggtaaagaggctcttgatcagatccaactatcatactcagtctttcctttgtcaagttcctcatcgcaagaacgccatgtgcaacaatcaatgcatgcaccacctttt

SEQ ID NO: 20071 - DNA, 437 bp, Glycine max
aaaacgtgttgtggttgcaggaaaccgagccagggatgctcttgttgcgcagggacttaaagttggtcttgttgaagttcttcttggtcttcttgattggagggctggcggaaggaatggcttttgttctcagatgaagtggaatgaatctgaagcgtctattggcagggtgcttgcaattgaggtcttgcatgcctttgctactgaaggagcccattgcactaaagtgcgagagctattgaataattctgatgtttggagtgcttacaaagaccagaggcatgatctcttcctcccttcaaatgctcaaatctgcagctgctggcattgctggtctcattgagaattcatcatcgtcgagactcacttatgctcttactgctccaccataatccactacctctagaactcctccatcatcctctcccgacttcaat

SEQ ID NO: 20072 - DNA, 733 bp, Glycine max
cagagacaaagcgctctctctccaaaaaaaaaaaaaactcgctaaattacaaaaatctcttcaaatcctctcaaccgaacccttattcataaaaccctagattttactttatttgtttccctcaatcgaatcgattttccccttccgaaaaccctaattccttcctcgctatcgaagatggacatcgagcagaagcaatcggagctcatagaccacttcgtcaagcgtgcctccgcggcctccgacgccgctgcactatcctccgttctcgtcgaagccacttctcacccttcgctcttcgctttctccgagattctcgctctgcccaatcttcttcagcttgaagcaactgagaattctgcttatcttgatatgcttcggttgtttgcacatggaacatggaatgattacaagagtaatgctgaccgtcttccacaattgatacctgatcagatcctcaagcttaagcaacttacagttcttacactggctgagacatataaggtactaccctatgaccaactgatgcaggagttagatgtgacaaatgttcgtgagcttgaagattttctaattaatgaatgcatgtatgcgggaatagttcgaggaaagttggatcagttgcggcggtgctttgaggtccaatttgcagctggtagggacttgaggcctgatcaactagggaatatgatacagactctctctaactggatgtctacatcagaaaatatgc

SEQ ID NO: 20073 - DNA, 415 bp, Glycine max
acgacttaacccataatagttcttaaattcacatgtataatcgcttcatcgtcaaacagtcacttctcaccgtcactttagtcagtctcttgcggtggcacaaactggatcacgtttcaaacgactaacttggtgaccggtgaggtgttcctagttaccatacgaaagaggattttggtgtaggatgggatcgatagagaacgcttccaaaccaaggaaggaaaatccgaaatttgaattgccagcgggttttagatttcatccaacagatgaagaactcataaatcaatacctcacaaagaaggttgttgacaactgtttctgtgctatagccattggtgaggttgatttgaacaagtgtgagccatgggatttgcctgggttggctaaaatgggtgaaactgagtgtattttt

SEQ ID NO: 20074 - DNA, 452 bp, Glycine max
ggctcgaggcgtacatctgaaatgtatgtggtggagagcaaggtgggcgccatagggtgcatgctggtgtccctcttcttcctcgggacatggcctgctgtcatgactctgctagaaaggcgcggtcgtcttcctcaacacacctaccttgattacaccctcaccaacctcatggctgctgttatcattgctttcacctttggtcagattggcaacgctcaacccaacttcttgtctcagctttctcaggataactggccttctgttctgtttgccatggggggtggagtggtccttagtgttggaaatttgtcaacacaatatgcttgggcttttgttggtttatcagttgtagaagtgatcacatcaagcataactgttgttataggaacaacattgaattactttttggatgacaagatcaacaaagccgagatttttcccaggagttg

SEQ ID NO: 20075 - DNA, 376 bp, Glycine max
ctccctcgtaaccaaaagccatttccaactcaaaaaacatggctccttttcctcttatgtgcttcgttattttgctcctatcctccactgtttcagtcacagccaccgccacccatacaaccttagcagtgggaaaactcgaccaagttccacacataatgtgcaaggagtgcgagcttccacccccaccccctaaagagtgtcctccgccgccgataccactagcacctccaccaccgttaccaccatcaccttcaccaccgttaccaccatcacctccaccaccgttaccaccatcaccttccgcaaccttaccggcacctataccgctatcttcttcgccacccttaaccgcattttcttcgtcaaccttacc

SEQ ID NO: 20076 - DNA, 422 bp, Glycine max
gaagacatgagtttgtaaattgaagtgcgaaagaagcttaaaccccaaacccaaaaccaaaaccctagcgaggttggttggttcccaattcccatggctactccttctcccccgaaatcgaagttcagtgtctatcaaaacccttccttttcggcggttctcacttccaacagtcttcaaccttccaagtccaccatcctctccttcttctccgcctccgcattcgcttttctcgctgtcttctttagggaaaacggcttcgtccacattttgagcttcgcagctttttcccctgtcacagcttgtaagtttccaacctcaatttttttaattagggtaatttctgatccctttattgaacttcagattggcttgccaagacgctacaagctatagtgggttttatcttcattgtttctgca

SEQ ID NO: 20077 - DNA, 456 bp, Glycine max
ggaatactaataatgctgttgggaggtggctggtggctttgcaagatggggatgggaaggggaggggtattgagcttgtgatggaggaggtgagtgggagagagaggagtgtgaggagtcatagtcagaggaggcatgtgtttgaggacattgatgttgatttggtggtgggagaggagcaagagaagaagcatgaggagttgggtggagaggaggaagagcaggctagagttagcatatgtattcctcccaagaatgctcttttgttgatgaggtgcagatctgatccggtcaaaatggctgctttggctaaccggttttgggaatctcctgttcacaaagacaaatgtcaagaagaacaacaagatgatgaagaagaaagtggagatgaggaggaagagcaagaggatgacaaagagcaacaccacaaaatgaaagatgaacaacaagaagaag

SEQ ID NO: 20078 - DNA, 808 bp, Glycine max
gtacgcacacgacacaagtctttgaattttaaactcctcatccttttctttcttctgttttattattgcaagagttaagaactcgactcaagaagacagcaaaagtacaaagctatgggcaccatcatcgactcccatttcttggccttcactgcccttgtcactattgcctatcagtttttgtttttcgtcgtcactgcgctcctcaaattcgacaaagtcactgattttgctggaagtacgaatttcattataattgctgcattgaccctggtcatcaaaggctcctggtattttcgacagataatcctcactttgtttgttgggatatggggaattcgcctcggccttttcctcctattcagaattttgcagtggggagaggaccggcgcttcgatgaaatgcgtagtaatttgggtagactggccatattttggatatttcaggctgtctgggtgtgggctgtgagtttacctgttacggtggttaatgcaagcgacagaaatcccttcctacaggttgttgatatagtagggtggattttgtgggctgtgggttttattgtggaaggtacagcagatcaacaaaagctgcatttcaaaagatcttcagaaaatagagggaagtggtgtaatgttggactatggaaatattctcctcatccgaactagttgggtgaaatattgctttcagtggggaatttttgtggcatctacacctgtactgaagggtgctggatggctggtgatcattggaccaatcttgctgcacattattggcttcattttgtccagtggcattccactt

SEQ ID NO: 20079 - DNA, 451 bp, Glycine max
cggaattcctattgaagaaaggaggagggtcacgctatccaagggcgtaatactcttcatcctaatttctttgatcccttgcatttcttcacctttggatatacatagcattggtctagttcttaggtccctgtcttgcccttttttggattttagtcagagtagtgaatacagtttgttcatgaaagttgattactttccactgtccagtcttgtgcgcctaactggaggtattgcagcatggatgcttttcttggcatatttgaattagtttattagcttgtacagagatttcagtaatgctgagagcttgttatagttctttggcatgttatagaaaattcattattattattcatcaagtaattatattttggtatattttctttgttaataatacctaatggtatcatttgtaacatgtataaaatagggttcaatttaaatagag

SEQ ID NO: 20080 - DNA, 359 bp, Glycine max
attccaactccatttccctctctatttatttatttatttgttatttatggaatgtgcttctctaatctgttatccaaatgtgttaaagggttcaaatgaacattttatctgctacgcaattagatttgctctaggtgttgctgctctatttgacgcaatgtttttttaaatcttacaacagccctattagattggctctgattgcttcagctctgcttgaccatgcacaattgtctccgcagttgtgtcactgattattttatgtctgattaatttaaggttaataattgcttctgtcatgtgaaactcattccaccagcacgattctagtcacattataacttttatgatggacagga

SEQ ID NO: 20081 - DNA, 351 bp, Glycine max
ctcatcttatcaacacaacatcccgcccttcctcctcttccctcatagtatcccgaccctacactctttgactctaaacagtcactactacttcttcttctcaatcctaccagaactcgaacaaccatgtccaaccttatcgctactaagcgggtcgacctcctcgccccttacctcctccttgaccaggggtcgcgtgtgcaggctgagtacatttggattgacggtgatggaggtcttccatgcaagactatgactctggataaagctccggctttcgtcttcgagctcaaagagtggaactttgacgggtcgtcgaccaaccaagcacccggtgacaactctgatgtc

SEQ ID NO: 20082 - DNA, 439 bp, Glycine max
gcacgcgtacgtaagctcgtaattcggctcgatgtttcccagagttctatactttcaacctgatcatcgaacagcccgtcgaccgcgtcgactcgcgccctacccccgacgtcacacccgtcgtcacccctgccggctctcgcatgaactcgttctctggtggcgagcgtccagcggtcaagaacaactttggcaaggcctcggatgagctcacgggttacgactcggtcgtcggctcgcctgtgccttctcgacctggcagcccgggcaatgagaagcgcaccgaggacggtgtgccccagcagaacacgggtgtcactctggatgcgttcaagcgggccctaggtgccaacgcgcagaagaagaagacctttgacgatgaggaatgagcggtgcgacatcagggaggggggcagaagagtagggagagcgcaactca

SEQ ID NO: 20083 - DNA, 695 bp, Glycine max
ggaaattgtacttggagaggcacgtggaattgggagttagagctaggtctgttgtgaagtttctggaagcttgttctcgttctgaatcacttgaggttggggactatctgaaagctgttgacaccttgattggtacgatgtttgggtttgaagacgtgcagaggttcttgatcaaccctcaaatgaatgtgctgattaacttggttggggtacactactgcctcacaacccttgggattacgggtgacaatcttgtagaagcccttcggactcatgagatctccgatcggcgtgtctgcatcaagtggtggaaagttggtagatggtactatggcttccgcatgagggatgagtcacattctcggtgggtttctttggcagatttggcaacagaagatgatgagcatgttttgggagtgcttcgccgaggtactgttcatgaggttttacgtgttcagatctctgtggttggtcgtccatcaacaccttggtcctgccagattacccagagattggaatagctatacggagataaactaaagtattgatatctatctgaattagtatgtgtatagttattgtttgtaaaattctgcggtaacatgtatagtttgtcatcaaagataagacaataataagttcataatgttcgttatcttcttttcgtggtatatttgaactccatatctcgttgt

SEQ ID NO: 20084 - DNA, 774 bp, Glycine max
  unsure (1)..(774): unsure at all n locations
tctgaattcattagttatcctatttacctttggactgagaagacaaccgagaaagagatcagcgatgatgaagatgatgaacccaagaaggaggaagaaggagacattgaggatgttgacgaggagaaggagaaggattccaagaaaaagaagaagatcaaggaggtgtctcatgagtggcaactcatcaacaagcagaaaccaatttggctgcgaaagccagaagagatcaccaaggatgaatacgcttctttctacaagagcctcaccaatgactgggaagaacacttggctgtgaaacatttctctgttgagggccagcttgagttcaaggccattctctttgtgccaaagagggcaccctttgatttgtttgacaccaggaagaagatgaacaacatcaagctttatgtcaggagggtgtttataatggacaattgtgaggagctcattcctgagtaccttggatttgtgaaaggtgttgttgactccgatgacttgccgctcaacatctctcgtgagatgctgcaacaaaacaagatcctgaaggtgatcaggaagaatctcgtgaagaagtgcattgagatgttcaatgaaattgcggagaacaaggaagattacaacaagttctatgatgctttttcgaagaatttgaagttgggtatccacgaggatagccagaacaggtccaagttggctgatttgctcagataccacacaacatacgacacaatcagncaacttggacctgttctggctatcctcgtggatacc

SEQ ID NO: 20085 - DNA, 511 bp, Glycine max
gaagattacaacatgttctccgcaatttcattgaacatctcaatgcaattgcggagaacaaggaagattacaacaagttctatgatgctttttcgaagaatttgaagttgggtatccacgaggatagtcagaacaggtccaagttggctgatttgctcagataccactcgacaaagagcggagacgaattgacaagcttgaaggactacgttacacggatgaaggagggccagaaggacatttactacattacaggagagagcaagaaggcagtggagaactctcctttcttggagagactcaagaagaagggctatgaagttctcttcatggtggatgcaattgatgagtatgcagttgggcaactcaaggaatacgatggcaagaaattggtttcagccacaaaggaagggttgaagctggatgatgagactgaggaggagaaaaagaagaaagaggataagaagaagtcatttgatgagctctgcaaggtcatcaaggacattctggg

SEQ ID NO: 20086 - DNA, 504 bp, Glycine max
cgacaattcaggtttgaacatgaccaagcctgaaagagggagtcctatatctttgccaccgaagcttactcaaataaaggagaaaccagttgtttctggcactccaaatgatcaatctgatgatggaaagaatgttgataatcaaaccattagcaagatgaagcttgctcacattgagaagaggcctactagggtgcctagacctcctcctagaccatctggtggagctgctgttaccgcaactgcaaatccttccaacggagtaccatctgctccaccacctcctcctcctcctccaggcgctccaccaccaccaccaccgccaccaggtggaccacctcccccacctcctcccccaggaagcctatcaagaggtggaatggacggtgacaaagttcaccgagctccacagctagttgaattttatcaaacattgatgaaaagggaggcaaagaaggatccttcatcactattagttacttctgcaagtaatgcatttgatgc

SEQ ID NO: 20087 - DNA, 371 bp, Glycine max
gaacgacaacacgcctcactctttatcttaattaactgacgcgtacgactttatatcacaatgaacaacactgatgctgccaacggaaagggaaagttcaaaccctacagaaatcgacctggaaagagacaaggacttcttgagctcttcaggtttctcttaattcttgcatcaggtcctgcctttttgggaggagtcttctctatcttcgttgctctctctgcatttgtccttggaataattggactcttcgcatggactcgaagacacgctaaactctttattttggtagcaattgctgtgatcgcagcagccattggcagcatcattttgagaggaacattccacgctcagtgcgtttcctttcacca

SEQ ID NO: 20088 - DNA, 525 bp, Glycine max
atcaagccgtgatatctgagcattctctcgaggttttctagaatcttacaaagacctacaagacttccgaaacctgcaaatacacaaccgccatcatgggtaaggagaaagtctcacatcaacgtcgtcgtcatcggccacgtcgactccggcaagtctaccactaccggtcacttgatctacaagtgcggtggtattgacaagcgtaccatcgagaagttcgagaaggaagccgccgaactcggcaagggttccttcaagtacgcctgggtcctggacaagctcaaggccgagcgtgagcgtggtatcaccatcgatatcgccctctggaagttcgagacccccaagtacttcgtcactgtcatcgacgcccccggtcaccgtgacttcatcaagaacatgatcactggtacctcccacgctgactgcgccattctcatcattgccgccggtactggtgagttcgaggccggtatctgcaaggacggtcagacccgtgagcacgctcttatcgcctacattctc

SEQ ID NO: 20089 - DNA, 262 bp, Glycine max
ataccttacaccgcgcgctgtaaatctgagtatcaaacaacttcccctcaccaccacataacctcaaacaacacaacaccgccaacatgggtaaggagaagatgcacatcaacgtggtcgttatcggccacgtcgattccggaaagtccaccaccaccggccacttgatctacaagtgcggtggtattgacaagcgtaccatcgagaagttcgagaaggaagccgccgaactcggtaagggttccttcaagtacgcatgggt

SEQ ID NO: 20090 - DNA, 585 bp, Glycine max
tgttggtgcagaagtggcgcggtcgaatattgatggtctcttccagtttgctgcgatacttaatattaaccttgcggttataaaccttcttcctttgcctgctttggatggaggtacattggcattgatcctcattgaggctgctaggggtgggagaaagcttcctttggaagtggagcaaacgatcatgtcttctggaattatgcttgttataattctggggttattccttattgttcgagataccctaaaccttgattttatcaaagacttgttgtaattaattattgtgaattctatagttagcagtgggcttcaaaaaaagtacttcatgattcttatcttcaatgctgttgcacaccagtgtcttagccggtggtatatctgtactagaggaggcaagatcattttaaacgattgaggtaagtttctttctccaaggatgtcatgtgagaagcacccctttgttaccaattcattgatctgatccggattggatttgtgatcctagaatataaatttacgagttacagatacttactagcttcgattatgaattttaatattttctctctttgcatttta

SEQ ID NO: 20091 - DNA, 1422 bp, Glycine max
ctcgagccgctcgagccgctcgagccgattcggctcagatggggtcggggtggtgccgaccggagctactgggggaaatgtacgagcgccttcgcccgcactcgccgagtgcgggtactgatggggtcaaagtcgatgtcatccacttgctagacatggtgtgtgagaaatatggagggcgagtggatatggcgaaagcatattacaaagctctcactgcttccgtgagaaaacattttaagggcaacggcgtcattgccagcatggagcattgcaacgatttcatgttgctgggaactgaagcaatatcccttggtcgtgttggggatgatttctggtgcactgacccttatggtgatccaaatggtacattttggctacaagggtgtcacatggtgcattgtgcatacaacagcttgtggatgggcaatttcatccacccagattgggacatgttccaatctactcatccttgtgctgccttccatgctgcctcaagagccatatctggtggccccatttacatcagtgacacagttgggaaccacaactttgagctgcttaagaccttggccttgccagatgggtccatcctcagatgtgagcactatgcactcccaaccagggactgtctctttgctgaccctctccatgatggcaaaacaatgctcaagatatggaacctcaacaagtacactggagttcttggggtgtttaactgccagggaggaggttggttccgtgagattaggtccaacaaatgtgctgctgagttttctcatagggtatcaaccaagaccaatatcaaagacattgaatgggatagtggaaagaatccaatttccattgaaggggtgcaacttttcgcttcgtatttcagccaagccaagaaactcatcctctcagcaccatctgatgacagtgaagagatttccttggagccattcaatttcgagcttataacagtttcccctgtgactgtcttgcctggcaagtcagtgaagtttgctcctattggtttggtgaatatgctaaacactggtggagcagtccagtctttagcttttgatgagggtcagaatttggttgaagttggtttaagaggcactggggagatgagagtctatgcctcagagaaaccaagaacttgtagaattgatggcaaagaagttgattttgaatatgaagggtctatggtcaacattcaagtaccatggcctggttcttcaaaattgtccactgttcagtatgtattttaagcctagaagtgatttctttttaacttttgaatggttgtccacagtgaatgatgtgaaagggctttttctcccttactaccgagtgaaataatagagtgatctaataattgtatcaagagcccccctcctttttattcaatgaaagccagcctttcttgagtgt

SEQ ID NO: 20092 - DNA, 579 bp, Glycine max
gttatggaaccatcaaggagtagaggtgttcagtttccatttgctgtgatggaccgggttatcataaagggaaataaaaggacaccacaacgctttgttgggcgcgaagctattgttacaacgcaatgcctgaatggatggtatgtggtgaagacattggacaatgcagagagtgtaaagttgcagtatcgatcccttgccaaggttatggatgatccttcaaaacctgcagcctccagcaagatgccacctaattggctttagatctgcacttctgcagcacagttccgtgatcaaatacttctacaccaagctgatgccactagatttttagcgttcaatgcttacatacctacaaaaattcttctttgtaattccattgttgtattccttgcgagaaaactctgctagctgctgagtttgtaaatatagaaaccttaccatgctttgtgctagtcaagattttagtatctgcgtaatcattttgttatagatacactgacagaatatatattctcttttttattttttctacatgaacagataaatgtttgagtggaaatggttgtgaccattatt

SEQ ID NO: 20093 - DNA, 548 bp, Glycine max
ctcgagccgaatcggctcgagtagagagaaagatgggtagtagtgaatatcagactctgcacattttcttctttcccttcttggctcatggccacatgataccaaccgtggacatggccaaattatttgccgaaaagggtgtgaaggccactataatcaccacacccctcaacgaacctttcatctacaacgccattggaaaatccaaaactaatggcaacaaaatccacatccaaaccatagagtttccttctgcagaggctggtttacttgatggctgtgaaaataccgagtcagtcccttccccagaattgttgaatccgttttttatggccacccatttcctccaagagccacttgagcagctactgcaaaagcaacttccagattgcattgttgctgatatgttcttcccatgggcaactgattccgccgccaaatttggaattcctaggctcgtcttccatgggactagtttcttctccctgtgtggtaccacgtgtatgcccttctatgagcctcatgacaaatatgcttcttctgattct

SEQ ID NO: 20094 - DNA, 490 bp, Glycine max
cggctcgagtaccaattgaagatggaattggcaaagaagttgccactcggatttcaactactatggaaaccaacaacatgttttacacggattctaatggacgtgattttatcaaaaggatacgagactacagaacagactgggacctagaagtgaaccaacctgctgctggaaattattaccctattaatcttgggatatacacagaggataataaaacagaattctcagttttggtggatagagctattggaggatccagcttacaagatggacaaatagagctgatggttcacaggagattactacttgatgattcaagaggtgttgatgaggctctaaatgaaacagattgtgtcggtgatgattgcaggggtctaactgtccaaggtaaattttactacagaatagaccccttgggtgagggcgctaagtggcgtcgtacttttggccaggaaatatattctccacttctgttagcctttgctga

SEQ ID NO: 20095 - DNA, 672 bp, Glycine max
taataagaatggctctactcaaacaatggccttacgaagtgttttcttctaccttctatatatctctttctttctttatcagtgtgcttttattgtttaagctcacaaaaagaaccaaacccaaaaccaatctgaatctgcctccatctccccccaaacttccaatcatcggcaatattcatcagtttggaacactaccacatcgatctcttcgagatctctctctcaaatatggtgaaatgatgatgctgcagttggggcagatgcaaactccaaccctagtggtgtcatctgtagatgttgccatggaaataatcaaaactcacgacctagccttttctgacagaccccacaacactgctgcaaagatcttgctctatggatgcacagacgttggcttcgcaagctatggagaaaagtggagacagaaaaggaaaatatgcgtccttgaacttctaagcatgaaaagggtgcaatcatttcgtgtcataagggaagaagaggctgcgaagttggtaaataagctacgtgaggcaagctcgagtgatgcaagttacgtgaacctaagtgagatgcttatgtcaacgtctaataatattgtgtgtaagtgtgctattggaaggaactttacaagagatggttacaacagtgggaaagtgttagcgagggagg

SEQ ID NO: 20096 - DNA, 520 bp, Glycine max
gagggggagaggcaagacaacacaggtggatgccaagtctaaggataaagtcattcttaaaaaggttaaggttggaatccaaggggctgaggagtttggtgattatgaggagtggttcaattacaggctatctagggcagcacccgaaacatgtgctgacttccttggaacttttgtagctgatcaaactaattcacagtctacaaaaggtggaaaatggcttgtttggcagtctgagggagatcgtactcttgctgattacatgaaagatcgcaactttccttcaaacttggaatctgtgatgtttggacgtgtcttgcaaggagtagactcttcgaaacgaaatgcattgatcatcaaacaaataatgcgccagatcattacatctcttaggaaaattcacgatacaggcattgttcatagggatgtaaagccagccaacttagtggttactaaacgagggcagattaaactcattgattttggtgcagcaacagacctgcggattggaaagaattac

SEQ ID NO: 20097 - DNA, 1089 bp, Glycine max
acgagctcgtccgaattcggcacgaggtctgcaactgcatctttgctcactctatctgcctcttcaaccaacaaaccaatcattagtgcttgtggtgtcattcctcttcttgtgcagatccttagagatggaagccatcaagctaaagctgatgcagtaatggctctctctaatttatcaacacacactaacaatctcagcatcattctcgagacaaacccaatcccttacatagttgatcttctcaaaacctgtaaaaaatcctcaaaaacggctgaaaaatgctgtgctttgatagaatccttggtggattatgacgagggcagaactgccttgacatctgaggaaggcggggttcttgcagttgtggaagttctcgaaagcggcacactccaaagtagggagcatgctgttggagcactgctgacaatgtgccaaagcgaccgatgtaaataccgggaaccaattcttagagaaggtgtcattccaggacttcttgagcttactgtccaaggaactccaaagtctcagtccaaagcacgcagccttctgcagttactgagagagtctccttatccgagatctgaaattcaacctgatacccttgagaatatagtatgcagcatcatatctcagatcgatggcgatgatcaatctggtaaggcaaagaagatgctggctgagatggtccaagtcagtatggaacagagtctgagacatttacagcaaagggctcttgtatgcaccccaagtgatcttcctatagctggctgtgctgcttctgaagtttcttcaaaatgatagttgccgctggccaactgtctttttttcactttttttgtctttgcaattgcggtttgtgaggtaaatttccatagtagaaaacgtaaaaaaaagaaaaaaaagaagaaggaataataatacatagtgaaggatgccagtcctggccattgtggaggtatcgagtgactggtaagtgtcaataaactaagttgtcatttggtaaagagcaggattttgtagttggcttgtaaagaaacgggtgtataaattgacatacaagtagtaaaaactggtgtaagaatttac

SEQ ID NO: 20098 - DNA, 577 bp, Glycine max
attcggctcgaggaaatattggcaattcaccagtttatggagatatggatccacaacggttaaggggattagctaggggaagtttgaatgctaaagacggtcaatcaattgcaaatgatggatcaataggctctccaatgcaatctacttcatctaagatcaacatgccacagatccaacaatccacctcccatcaacaacaggatcctttgcatccacaacaattggtgcagaataaccggaaaaggaaggggcctacatcttcaggaccggccaacagtactggtaccggaaatacacttggcccttctaattctcagccatcaactccatcaactcatactcctggtgatggagttgctatggcgggtaacttgcagaatgttgctggtatatccaaaggtttgatcatgtatggtactgatggagtgggcggtcttgcatcttcgacaaatcagctgttgcaggatgacatggaacattttggagatgttggctccttagaggataatgtggaatcatttctctcacaggatgatggtgatggaagggacttgtttggcacattgaaacggat

SEQ ID NO: 20099 - DNA, 1191 bp, Glycine max
ctttggttctctaaggacagtctggtggtctgtgggggctagtaaaggcccttagtcaactcctggaagatcctgaactgcgggctgaaagaaaagaagctcattactggcaactgttcctccaaggaacctgtgaaaacaataaccttgcgattaattttggtcaaagccgccagtctgggctctgatagtgtcccatttttgccacaactgggggactttcattctacttacatggatgccaacatactataaccaagtcttgaagtttaatctttacagaatctgggctattttgtgttttaccatggttgataatggctatttctgcaaatgttggtggttggattgcagacactctagtgagcaagggtctatcagttacaagggtccgcaagataatgcaaacaattggatttctcgggccagctttcttcttaactcaattgagccacgctaattctcctgtgatggctgttttgtgtatgacatgcagtcagggaactgatgctttctctcagtccggattgtattcaaaccatcaagatatcgcccctcgatattctggcatattgcttggtttatctaataccgctggagtattggctggtgtctttggaacagcagcaacaggttacattctgcagcatggctcctgggatgatgttttcaaggtttcagttgggttgtatttggttggaactgtggtatttaatcttttttcaactggtgaaaaaatcttggaataacttactctcattgatcattggtacttgtcatgccacatgtatagataagtctggagtactttccccagaagaagcactacgagaagaataggagttttaattaagaagcaactcattttacttaaggcttttgtgcctcacagaatggtaaattttgtggatagaggagcattggagcatatagatcagagggatgacaatgtgtccttgaaagaggaattggcataatttagtccctgatgtttttatcaagggaaaaggtttagaagattctactctgaagcttctgttttttttcccatttttggtgggaagatcatagtgattgcttaacttaaaatcatacttgtaaatataattttcataccaacacatcaattttgtaacaattcatcaagaaaagtgatttatgtggtattattcatcaagcttcttttctttg

SEQ ID NO: 20100 - DNA, 433 bp, Glycine max
atgatgttttcaaggtttcagttgtgttgtatttggttggaactgtggtgtttaatcttttttcaactggtgaaaaggtcttggaataacttactttcattgatcattggtacttgtcatgccacatgtatagataagtctcgcgtactttcccacagaatggtaaattttgtggatagaggagcattgagcatagatcagagggatggcaatgtgtccgtgaaaaatgaactggcataatttagtccctgatgtttttatcaagggaaaaggtttagatgattctactctcatgcttctgttttttctcccatttttggtgggaagatcatagtggttgcttagtttaaaatcatacttgtaaatattattttcataccaacacatcaattttgtaacaattcaacaagaaaagtgattcatgttattcatc

SEQ ID NO: 20101 - DNA, 411 bp, Glycine max
gaaattgataaccactaatcaatttggtccttgatgcattagtaacgaaactgaccgctatgccaaatcctcaacaactaaattggttgatatttgtcaaatttgatggataatatcaattttaagaactaaattgatattctattttaacaaataccttacttattgcatctcacattaacattgtaatcaaacgattctttaattatcacacaattcactcaagtaaacctttttgtttgtttgcaggagctgtttttgctgtcaaaataggtgagttaattagtatgtgttataatagtttgacattgttattactattgattatatgatggtatgcaccactttgtgtctttcactcttctaataattaagaatgttagtttaattattcatttagatattttagtc

SEQ ID NO: 20102 - DNA, 415 bp, Glycine max
tgataaatgaagcttccacttttgctagtgaaacagtggagcccaacaatgatctattacttccaccgtatcctagccaccctccatactctgtgtctatggacaaggaatatctctcacagatcccttctgtgaacaagtctggtcgcaatgggttaatcacgcttgacccaatgattgagggctgccatgagtctcagtgaaaaagagcaaaatcatgttgaaaatggggctaaaaattcgagaaaaggattgggattttttataacttctgcagccaaagcaatgctcacggtagttggcgtggtatcaatattaagtttgtctggttttgggcctaagttgggcgctcgtttcagtgtgcaaggctggtgtcacagagtagaaaatgagagatcgacaactaaaaatgggg

SEQ ID NO: 20103 - DNA, 544 bp, Glycine max
tcccacgcgtccgcggacgcgtccgattttgtttcggtcaaaaaaggagacaggaaaggtttcatagattaatatatgttatgggcaccatcgcctctccagcttcttcttcttctccgttttctgatgctttttctcaaaggtgtgtatgaggctgttgttttgctgaattgtttgtgggatggcaacagcaatacaagtcatgaaggagatgagctaaaataatgggtgattcttctcttctcacttgttggttgtcaatggagaatcaccacccatccacgctcctgtccatggattctagtgcttcttcacatgaggaactggatttggagatgaacacacagatcatactttcgcgtccccccgatatcaatttgcccctttcagccgagcgcagccctcctccacagccatggaattctgatccctgtgatattctggatgttggtcttggcactcaaggctatgagactgagacttttctcaaccttcccaaagctggaaggaagtgcaccaagcgcattgatagcatttggggtgc

SEQ ID NO: 20104 - DNA, 1027 bp, Glycine max
gacattcaatccctttggtttaatctctctagggttattttctctctcttggattccattcctgcgtcttcatcagaggtagcgccaatggaagcggcggcgacggcaacggcaacagttctcgcaccaccgtcggctttcctcggaagaccctccgtactcgccttccgttccaatcttcgcttctccactaagttaagcacttctgtagctatctccaagcatggtcatgggagacactgtgttggaactagaaggggttttgtagttagagctgcatcatttacaccagagtcatccgaaccgagttccaagattgctccacttaagctggagtctccaattgggcagtttctgtctcagattttgataagtcacccgcatcttgtgccagctgcagtagagcagcacgcttgagcaattccaaactgattgtgatggcgataaacaaaagaaagagccttctgcttcaggcaccgacttagttttatacaggagaattgctgaggttaaggctaaagagaggagaacagctctagaagagatattgtatgcattggtggtgcaaaagttcatggatgccaatatttctctgataccctccttaactccaaaccactctggtcaggttgattcatggccaagtgaagatggaaaactggaggagcttcactcaccggaagcctatgagatgatccaaaaccacttggctctcattttgggcaaccgtttaggggattcaacatctgttgctcagatcagcaaaatcagggtaggacaggtttatgcagcttcaataatgtacgggtactttctcaagcgagttgtgcaaaggttccagctggagaggacaatgaagattcttcctaatgcaacagaagagaatagcattcaacaaactgttgtagatgattcaagaatcagaggcggagagggccattctcatgttatgtcccatcctgaagtttctactttgcctggtggtggcatcagctctgggggatttggctatggttcaaaagtgtcc

SEQ ID NO: 20105 - DNA, 490 bp, Glycine max
ttttaatctctctagggttcttttctctctcttagtttccattcaatccctgttcatcagaggtagctgccaatggaagcggcggcgacggcaacggcgactgttctcacacccccgtcggctccgcccaggccgtcggttttcctcggaagaccctccgcactcgcattccgttccaatcttcgcttctccactaagttgagcacttcagtgtcgttctccaagcaaggtcacgcgagacacagagttggaagtaaaaggggttttgtagttagagctgcatcatttacaccagagtcatctgaaccaacttccaagattgctccacttaagctggagtctccaatcgggcagtttctctctcagattttgataagtcacccgcatcttgtgcctgccgcagtagagcagcaacttgagcaattccaaactgattgtgatggcgataaacaaaagaaagagccttctgcttcaggcacctgacttagtt

SEQ ID NO: 20106 - DNA, 650 bp, Glycine max
atttgcagggatgaagaatatgatattgggaagaggaagaagataaggggcttcaagcatagctttggtgggcctaatcttttccaagaaattgctgtcgagaaatcgaagtttaaaagggcaaagtttgaccaatcttgctcagggaaccctccatttaggatatgacatccagaagaactctatgccttctattgcttggaggcttcttttgtagcaattttgtcaaacgctgaaagtgtaatgaagagagcacctaccttattcttttctccagtaaaaaaatttgtttggtggttcacatcattgtctttgggacagagccgcagagggttgggtttttgtgcacctgtgttcctgttggacatttctcattttcagactgtattattgtaggagctgcacgccgtagctcagaagttttgttcatgattttaaatcattcaagacaatttgtatttcagttttatgttacgaagcgtgtttatcgtgtacccgaagttagtatttcggtttgagtttggattacgtactaaatctttatgtactattaatttctaggaaaaattgtaagatagttaatttatattctaattcatgaatgtaagtctgtttttgtttggattacataaaaggaaatgttttcgtgt

SEQ ID NO: 20107 - DNA, 411 bp, Glycine max
gattccttatgcatttttagtcccttatcttccgtgttactcaaggcaacttcagtatccactaactatccctggttgcaactagtgactcatcaacagcatattctagccatgtcaagtcctcagtgttttgagaatccaccaaaccttaactcggacatccatggagcaggaactgtccaagaacttggaggacttaattcctacgtcactggatcttccgattccaaattggcactcatcctggtttctgatgtttttgggtatgaagcaccaaaactaaggaaacttgcggacaaagtagcagcagctggattcttggttgttgttcctgatcttctgtatggtgattacattgttgaccttaataatcctcaatttgatcgagagtcatggcgaaaggctcatgga

SEQ ID NO: 20108 - DNA, 437 bp, Glycine max
cccattctttcgggggtcttgactctaccgtgtcagagtggtgcatgaagctgcaaaaatggctagtaacacaaacaccaacaacagcaacaagaaggagaaagaccttgagtttttctttgaggaagatatcaacgaattgggtgcacaacaaatggatgctgaaactgccaagttagagagtgagagtagcagcagcgatgacgagggaaatgatacaacacgccgtcactctttcacttctcagcaatggcctcaaagttacaaagagaccacagattcttacacacttgccgcaactccaaattttgaatcaattctacgagttccaagtattatatattccagttttgaaagtcgttcaaagaataacttggacatagatggaaagactccttttctctctggtcacgaaggcattactcaatcaacatcgt

SEQ ID NO: 20109 - DNA, 408 bp, Glycine max
ctcatatggctccttcgcaaatccgaattttctgtctctgaattttctttctctcgccttctctctctctctctccctacaaattcatttttctcgtttcttttccgagaaagttcattcgcattgcccatctgtgcttgcgtatctgttgatcccgctctgattctatccaattctcacacgcgtttatcccttgttctccaaatatgggctcagtttgaagttgatgtggtcaaagtcaaaatggattcacatgtaatatgataaagacatcacctagccaactgggttttctgaaggttgcaacatgttgatggacctttccctttttgtagatctcttctacaatgaaaagtggattattgatgatactaaatgcttcatgctacattttaactctaacccacg

SEQ ID NO: 20110 - DNA, 843 bp, Glycine max
ttctgaattggtcactcgagatgacagttatgtgaagaaagccaaatcatcgttttactccaatgggtatggatttgagcccactatcccatcaaaagctagtatcttggattcatcgttaaaacctacatcaactgcaggccaagatggggataagttgagtttgatcaagcttgctagcttaattgaagtgtctgcgaagaaagggactcgtgatctcaaactgcagaacaagttaatggatcaggttgattggctacctgattcgatagggaagttgtccagcttggtgactcttgatttgtctgagaatcggattatggccctacctgctacgattggtgggctttcgtcgttgaccagattggacttgcattccaatagaatcacggagcttcctgattctgttgggaatcttcttagtctgctttatcttgatctgaggggaaatcagttaacactattgcctgcttcttttagcaggttggtgcgtctagaggagctcgatttgagttcaaatcagctttcagcgcttcctgactctatagggtcgcttgttagactaaaaatattgaatgtggaaacaaatgatatagaggaacttccacattctgttggtagttgttcttcccttagggagcttcgcgttgactataaccggcttaaggccctgcctgaagccgttggaaagattcagagcctggagattttgtctgtgcggtacaataacatcaaacaactacctacaacaatgtcatctctaacaaacctcaaggaacttaatgtgagtttcaatgagctcgagtcggtgccagagagcttgtgtattgccacctctcttgt

SEQ ID NO: 20111 - DNA, 653 bp, Glycine max
acacaaaatggctatacaagcatgtgcacagggttcatcatgagtatgctacaccgtttggtcttacttctgaatatgctcatcctgctgagatacttttccttgggtttgctaccatttttggtcccgccattactgggccccacttgataactctctggttatggatggttctgagagtcctagagacagttgaggctcactgtggttaccatttcccatggagtctttccaacttccttccattgtatggaggagctgatttccatgactatcatcaccgtttattgtacaccaagtctgggaactattcatcaacttttacttacatggaccggatatttgggactgatataggctacagaaagttgaaagcattgaagagcataggagttgaagacagtggcgagcaaaagaaacaataagaatacgtttttaggaatatccaggaatgattagagagttgatttgcaaaagggcatatttgaaaaatgtctatgatatcaactccttatgtgttcttgtgtttttgtagtagctggtgtttgtcttcaatgtgctgatggctttttctggacattcatgccctgttattagaaaaacttcattattgacagtaatttcaattttgggatgtttccctttgctgatct

SEQ ID NO: 20112 - DNA, 1119 bp, Glycine max
gtccttaccgaaaactagaggccagggtctcggagtgtttgggtttgtttatcttaaacaccacaaacacagaacagaggtgtagagaagaaagctcaaaaatatggcggcagagtcatcactgagggtggcgactcccactctttgcaacctcaatgggtctcagagacgaccaaccaccaccactctctctccgcttcgcttcatgggttttcgtcctcgaccctcctctcactctctcacttcctcttccctttcacacttcttcgggagcacaagaattaactccaattcttcttcttcttattcttccatttcacgccaacatgctccgagaagaaacttctccgttttcgccatgtccggcgatgatgcaaagcggagtgttccattgaaggattaccgcaacatcggcatcatggctcacatagatgctggaaagactactacaacggaacgcattttgtactatactggaaggaactacaaaattggagaggtgcatgagggaacagcaactatggactggatggaacaagaacaagagagggggattaccattacttctgctgcaaccactacattctggaacaagcaccggatcaacattattgatactcctggtcacgttgacttcaccttagaagtggagcgtgctcttagggtgttggatggagctatatgcttgtttgacagtgttgctggcgtggagccgcaatcggaaactgtgtggaggcaggctgataaatatggagtcccgcgaatttgttttgtcaataaaatggaccgtcttggagcaaacttttatagaacaagagacatgatagtaacgaatttgggtgctaaaccacttgtaattcagttaccaattggttcagaggataactttaagggagttatagaccttgttaggaataaggctatagtttggtctggagaagagctgggtgccaagtttgatattgtagatgttccagaagatcttcaagagcaggctcaggaataccgagcccagatgatagaaaccatagttgagttcgatgaccaggctatggagaactacctggaaggaattgaaccggatgaggaaactataaaaaaattaattaggaagggaac

SEQ ID NO: 20113 - DNA, 247 bp, Glycine max
ccttaccgaaaactagaggccagggtctgtagtgtgcgggtgggtttgtttatctcaaacacagctcacaggtgtagagaagaaagctctcaaaagtatggcggcggagtcatcactgagcgtggcgactcccactatttgcaacctcaatggttctcagagaagaccaaccactctctctccgcttcgcttcatgggttttagccctcgaccctctcactctctcacttcctcttcccttccacac

SEQ ID NO: 20114 - DNA, 581 bp, Glycine max
cggctcgagccgacttcttaaagctagaattgatggtttgccagtcaaagaggtggttaaggatacagaagtggttggaggaagagttcactgaaaaggttcaaaagagaggtggtgcacttattcaaaaatggggaagatcatcagctgcatcaacttctgtgtcaattgttgatgccataagatctttagtaactcctactcccgagggtgattggttttcttctggtgtatatagcgatggaaatccttatggaatagctgaaggtattgttttcagtatgccatgccgatcaaagggtgatggcgattatgaacttgtcaaggatgtcatatttgatgactacctccagcagcgaatagctaagacggaagctgagttgttggccgagaagagatgtgtggctcacctaacaggcgagggaattgctgtttgtgatctacctggtgataccatgctccctggagaaatgtaacaagcctatatctcctgaatgccaaagcagacattgaaataggtcctgcaaacttgtgtcttaaaagatactagttagggaatcaataaataaaatatttttatt

SEQ ID NO: 20115 - DNA, 702 bp, Glycine max
ctcgagccgattcggctcgagcacacacatatatatatacacatagtacttcataatatccatacaatccaacatggcttagttgatctctcttcaaactccttgcattctttctttctttacaacaatgactttcgaagagaagacaatttatcaaacctctttagcctcaattcccaactacacccttctagagtgtgtcttggggctatgcttcaaagtgataaccatcctccttcagcttccttatgagtacatagacaacaatccaattcccaccatagtcttcaagggtcgcccaagaaccttccatgccttcataacatgcataatcttcgccttctccggtgctaccaatgcacttgtggcattcaataagtcaagattttctaggctttgtgggtattatgcaatggcttctatggcttctgctttggcaattctcttgtgggcagtgtgctgcacaggcatcaattagaatggctggactttgattctgaaactgctatcgctttataaagagtaaacagtgttgtgttgtatgttgaagatttttggtttcaacctcttaggaaactactggtttatgtgagagccagtaagaatgttagataaaagttttgagcaaaattaaaattaattattgattggtaatttattggattaataattataattctaatgcaaaaaacatattaaaat

SEQ ID NO: 20116 - DNA, 336 bp, Glycine max
gcattgtcctgtttagaaataacggtcatggcttctctgctctctacaactgcaaccacacttcaacataatcacacaatctgcttctcccctgtcaaacccaccaccccaaataccattcccttctcaacaaaccggtgtttcaagaacaactcttcaaagtgcaatgctttttttgataaaatccccaaagacttgttggagaccacttttcatttggaccagttccctgtcttccaatcagtgatagggaagtttcagaatgtaactggagacttatcagacctgcagaggtgggggcttgggatcctagcagggctgacatgggctttttca

SEQ ID NO: 20117 - DNA, 527 bp, Glycine max
cgataaactaacaacgtccctatttccggtttcaaattccctccggcgacacattcggattccaatatgaggacccgtttatcctcgactcgggtcatcttcgtggcctcgctctgtttcctcgcaagcttcgaattattgcaagccaaaaccatcgacccctacaaggttcttggggttgataaaaatgcaagtcagcgggaaattcagaaggcttttcacaagctatctcttcagtatcaccctgacaagaacaaagccaagggtgcacaagagaagttttctcagatcaataatgcatatgaacttttatccgatgaagagaagagaaagaattatgacttgtatggagatgagaaaggaaaccctggatttcatggtggccatcctggaggtcaggatggatatacttattttacagggggtggtcctggacaaagccattttaacttcaaaccagggggggactggcagggtatgggtggtcagggaggatctaagtcattctccttttcttttggcagctc

SEQ ID NO: 20118 - DNA, 606 bp, Glycine max
cggctctaggttccatcatcttcatctggtaccagatctgtgccattcatttcttctagccatggacgagaagctcatacagcggttagaatcggcggtgttgcgcttggagtcgctatcctccggactccacccctccgcttcacaatccggcggcgcccacgctcccgatgcggcgctcgatccctccgtcgtcgccttcgccgatctgatcgaccagtacgtcggtagggtttccggcgctgcagaggttatcggcggacaggtcttgggtgtcaccaaactggtgcaggaagctttcaatgttcagaaagagcttctgattaagctcagacagactcagaagcctaacctcgctgggttgtctgaatttctgaaaccattgaatgaagtgatcacaaaagctaccaaattgacagaaggaaggagatctgatttttttaatcacttaaaggctgctgctgacagtctctcagctctagcatggattgcatatacagggaaggattgtggtatgagcatgccaattgcgcatgtggaagaaagttggcaaatggctgagttttacagcaacaaggtgcttgtggagtacagaaacaaagaccc

SEQ ID NO: 20119 - DNA, 402 bp, Glycine max
gactgcgttgtgttgtgttgtgtctcttgtgtgtgacagcttcacctccgtgcaataatttattcaattttcttcttcacaacatgatgcataagctgaaataatcaggaaaaagaaaagataaaaaaagattctttcttggcttgtctaatgaaggaataagagcctccaagcaaggaggaacgtgtctgaatctccttataaacaccgagatttcagagagaagcagagaagcagaatctcgtgccacctcctacgttaagttaaaggaatcctatttttgggcatggaaatcctctcatatggatctggaccatgcagtcaagcagtggattcgaagtggaaattggttgacaaatgcttgaattcacgtcaatcaaggtttcccagtgttggaaatgg

SEQ ID NO: 20120 - DNA, 676 bp, Glycine max
acgagccctttcactctcatttttttctttccttttaattttatttcaattttggagtcaatacacgctcagattcatcatcatctcagtctcttcaaccttcaaacctccgcgttttctagtgccttgttgctacttacaccctattgttgaaaagtcaatcccccacaaatccctttttccacatccaccccttctccatttccttccttcaaaacattgcttacccttctcttttttcccccaaagtttcgttcttttgtatcttctctcattcaaagtttgagtcttccgcatttggggtgccctgaattgccgtgcaagttcagatctgcttacagaattcatatttgaatcggtgaagattttgaaaatgatcgtgagaaaaggcatggggcgagcaaagtcactgcttttgctgcttatggtgcttttgttttcctttgccacttataatttggtagctatgatcatggaccataaggcagatgggttggagtctttgaatagaaaaatgatggtatcgggaaagactaattcaaagtttcatgttgccgtgaccgcaaccgatgccgcttacaatcaatggcaatgccggattatgtactattggtataagaaagtgaaggacatgcctggatcagatatggggaaattcacccgtattttgcattct

SEQ ID NO: 20121 - DNA, 386 bp, Glycine max
cccacgcgtccgcgaacttcttaatttcacaacctcccctccctctctcccttttcgtggaacccatttcccattttcccctttccaaaagaatgaatgcataaagtttggtggcgactgatcctttttcgatcccacataaccaaagagaatgacaatatcactggtaggtttgattatttaacagaaaaggactgctggaaaatgggaggttgctgttgttctgccaggaaacctcacctgcatggaacaccagtgtattactattgcccaccaactttagaagagcgtgagtctttaacatctaatgatggtagggctatgtccctcactactggattgctggtaggcttgaacctggaaacttccacacctgatacatacca

SEQ ID NO: 20122 - DNA, 408 bp, Glycine max
gaaccataaccaaagccatagcatgagccaccttcctgaaacccaattccttaacagtttctcacccttctcttctcttctcttcatctactcttttcaaaaagaatagatgcatgaagtctggtgacctctgatctgattccctcttgatgtcaaacaacagaagagaacgaaactatcaattatttatttcattaagtaaaaagaattagtggaaaatgggaggttgctgttgttctgccagaaaacctcatctgcaaggggcaccagtatattactattgcccaccaacttttgaagagcgtgagtctttaacatctaataatggcacgaatgcttcagtcaatgctggatttctcattggtttgaacctggaagcatccatgcctgatactttccagtcccctc

SEQ ID NO: 20123 - DNA, 456 bp, Glycine max
cgagaataaaacaaacaaaaaatattcaaagatacagagaaccataaccaaagccataggcccccccctgaaacccaattcctcaatagtttctcacccttctcttcatctactctttccaaaagaattgatgtataaagtctggtggcctctgatgtgatccccttttgatgtcaaataccagaagagaatgaaactatgattgattgacgttgttttgatttaacaaaagaattagtggaaaatgggaggttgctgttgttctgccagaaaacctcatctgcaaggggcaccagtgtattactattgcccaccaacttttgaagagcgtgagtctttaacatctaatgatggcttgaatgcttcagtcaatgctggatttcttgttggtttgaacctggaagcatccatgcctgatactttccagccccctcctgtgcctctaccttatgatat

SEQ ID NO: 20124 - DNA, 491 bp, Glycine max
cgcaaacccaaaattccacagcggaccccagctaaagcaaactcaagactctagcctctttattaaggaccgtctcgtcttctcgatagtccgttagtatgctctgcggttgttgaatcttttttagattattcctgaacccttcaaaaccctcttatctctttcttcgatcgcttggcctgatattctttttggctgagagatcaagcaaaaatgagcgtggttggatttgattttggtaatgagagctgcattgttgctgtcgcaagacaaagggggattgacgttgtgctcaacgatgagtcaaagcgtgaaacacctgcaattgtatgctttggtgacaaacagcggttccttgggacagccggggctgcttctactatgatgaaccctaagaattccatctctcagataaagaggttaattggtagacagttttctgatccagaattgcagcgagacctgaagacattcccttttgttgtcactga

SEQ ID NO: 20125 - DNA, 473 bp, Glycine max
gggaaaagtaatattctatatctgcgataagaggaagaccaccaccacacaacatagctctgctcaaaaacacaaacacagtgagtgagtgagtgagtgttggctaatatggataaaagctgtgatccctctgcagcactcctactagcacatcccttcctgccaaccccaacaacaatagcagggatcaatatcttcgccacctcaacaagctttctcaaaagatctccaaacccctcattaagaaacccaccttcgaccctcctcaggcccaagcccaagccccaaacccaaacaatcaggtgcaggcgcagcagaacctgcaacatcagccgccggtgtacaacatcaacaagaacgacttccgtgatgtggttcagaaactgacgggctcacctgcgcacgaccgtatctcaacaccgtcttccattcagccacccaagccaccgagttcgcgtctgcagcggattcgt

SEQ ID NO: 20126 - DNA, 386 bp, Glycine max
aaaataatgaggatggtgccttgtaaattaagctacagcttaggggctcttttagtattattagtactattattttatcgatatggttttggaggataaaaaagttcatctggaaggttggcccaagttctggagcaattgttggaagaaaggttttcaaaatgaatgagtggggtagcgtgaaaatgggtatagaaaattgattttgttgttaggcatgctctgatgctcactcaaatgttggcacaggtaggcagaatttaagtgtggcagcaattattaatgctttggacataaagtcaagtcataaagaaaagatcattgtttaaaaaaacaaaactgacaaccacaacaacaataaaaaaggatcaaaattttaaaaaggg

SEQ ID NO: 20127 - DNA, 516 bp, Glycine max
ctcgagccgaatcggctcgaggtttggattcaatacatgaatggtctagtgttctttctctgggagagcagcaacgccttgcatttgctcgtcttttgctttcaaagcctcaattggctttactggatgagtctacaagtgcacttgatgaagtcaatgaggtacatttgtaccaaaagattggagcagctaacataacatatgtcagcattggccatcggtcatccttatgtgcttaccacgacaagatcttaagcatatccacatttaattctgacagtgaacagctaaattggtgcattgaacccattgaacccactagacccgagtcctctttaaaatttacaaatctttgagctagcaatgctttgctgcttaccatctcatgagacacacatggttcaattgcattgaacaataattttgatatataagatgtcaatctgtacattttcccttgcaacttgctgctataatattttattagaatcaaaaaaaaaaaaaaagggcgacaaa

SEQ ID NO: 20128 - DNA, 600 bp, Glycine max
aacagattcctccgtgaggaacttttcaaaattgaacatggagtgtgcacaaattgccaattcgactgtcataagctcgttgaggatataagacctttgtcattggaaaggcggcgtgagtacatagagaaagtagcaccgaaagttgctaaacggaagaaaatgtttgagaagcttgtcaatgaaccaactgaaggcaatgcatggcatgctgaccatattgttccagtatatgacggaggaggtgagtgcaagctggagaatctgaggactctctgtgtagcctgccattatgatgtcactgctgcacaatgtgctgaacgacgcatagccaaagcaaatgccaggaaacaactaaaagcgttaatgaatagcatgaaaaatggtattaagggtgctactggcactaatactaaggaccataagcttctcgaggaagaagggagtatggtagaagatgagcttttagttgaggttcctggcagtgcctattctttagcagacagctaagtggagatgccgtgtggaagggattgcaaacagctacagaaaatttccatcgtcatttcaaccgagttttttttgtagaaagtaaaagca

SEQ ID NO: 20129 - DNA, 287 bp, Glycine max
ggaacctctttctcaggttttataaaatctcatgtctgttcaaagctttcttattcttcgtattcatcatacaccacgccaaatcacaatacccttcaggtaattttgctctttttgtttttacgctgaatctgtttgttccccttcctccaacgtttttcattggggtttcgacccactatgttggagctcaacactaagttagattccttttgattttcatccattatctgtgattaggaacaccgatgtcaccaatttcacatcttgtgggttttagttggatg

SEQ ID NO: 20130 - DNA, 259 bp, Glycine max
cggaacctctttctcaggttttataaaatctcatgtctgttcaaagctttcttattcttcgtattcatcatacaccacgccaaatcacaatacccttcagtttttgggaattttggctcagttgagatctctgtgaaacgggtttggaaaattttttgatcttgaggtttatgagattttaactgtggaagacagatggtgggtgagaagtttgggggggccgaaggtgacaagggtgtgttagagtctgtgttgggtg

SEQ ID NO: 20131 - DNA, 279 bp, Glycine max
cctctttctcaggttttatacaatctcatatctgttcaaagctttcttattcttcgtattcatcatacaccacgccaaatcacaatacccttcaggaacaccgatgtcaccaatttcacatcttgtgggttttagttggatgttttcaagggtttgattctagggttacttatgcagtttttgggaattttggctcagttgagatctctgtgaaacgggtttggaaaattttttgatcttgaggtttatgagattttaactgtggaagaaagatggtgg

SEQ ID NO: 20132 - DNA, 1087 bp, Glycine max
  unsure (1)..(1087): unsure at all n locations
gcgagaagggcttgttgatacagcggttaaaactgcagacacgggatatatgtctcgtcaattaatgaaatccctagaggatttgtttttacattatgattatactgtaagaaatgctggtggctctattgttcaattttgctatggagatgatggcatggatccagcaggcatggaaggaaaaaatggaaaaccattgaattttgagcggttgtttcttaaaagcaaggccatatgtcccaatgatgaagatgatgaaattttatcttcctcagatgtgagtaaagtagttcatgagaagctctcagaatttgatatgtctaggctagcagagaaaggggtttttgaggtgggcttctctgctgacttcgttgaatctctacaatcctttatcaaagataatgcaaaattaacggaagaaggtttcactgatgagcattctcaaaacctgaaaaaatttgggcagaggatatctgggatcactcgtaaacagctagatgtttttttgaatatttgtctatctcgttatcattccaaaaaaatggaggctggagctcctgttggtgcaactggagctcatagtattggagagcctgngacccagatgactttgaaaactttccactttgctggagttgcaagcatgaatgctactcttggagttcctcgtgtcaaagaaataatgaatggaaacaaaaaaatcagtacaccaattatcactgctatacttgagagggatgacaatgcaaatactgcaagaattgtgaaaggtcgaatagaaaaaacaaatttaggccacgttgcaaagagtataaaagttgatatgacttcaagatcagcatcagttgttatcacccttgacatgaaaagaatccaggatgcacatctaaatatagatgctaatattgtaaaagaatcaattttacgaactaaaaagacaaaactgaaaccagagcatatcaagattttagatattaaaaagcttgaagtggttccccaagatgtggacagaagtaaaatccattttcagcttcactatctgaaaaatttgctatccgacagttgtagtgaagggcattaaaactgt

SEQ ID NO: 20133 - DNA, 413 bp, Glycine max
ccaaaccaaaaaaacctccaacgacattacagcgttcaatctcgaaccttcaaacgacggtcacacacaacacaatccatgccattctgaaacgcttcttcttttgcttgaacgaccgtcgtttcgttccgaaatggggactctaacgagttgcagtttcatgcctctgaactcggagtttcgccgcgccttcagggagaggattcagtgccacaagctcacgcgcttgaggggcacctcctgcttcttctcacgcgcgcgagtacccaaatggggcaagtcgaagctccccaatttcgatagccttaggagttttgctactaagaacgacaacagcgacggcgacaaggacaacagcaaccacgttggagccgccggagaggaaagtggcggcgactattctaaatcaaatg

SEQ ID NO: 20134 - DNA, 578 bp, Glycine max
  unsure (1)..(578): unsure at all n locations
cgaacgttatctttttctgtttgaggcggaacatgaagtgaaacacagtacagaagaacgttaattatccaaccgaggcaagacaaagggctatttttaagcttctaggctctgtcacttccttcttcaggccccagtcttcacgttcgaatgtttctcttcccaaaaagagactgtggtggtggtaccttttagtttgtactaatcaacagagaaaactcattaatggagaaactgaaagtgtctgctaagaatgatcctgctgccagcagtgatcaggcagactcatttccaatattcgaactgcgggacagtcagaatgttggactgcagagcagtagaagagtcgaagatgatacaaaagctgtaagattggatggagattctgtaattgctccctctaattctgcaaacaacagtaaggaacctgtcaacaagtggatggcatttgctaagaagcctggtttcacagttgatggcaactcagcaacanaggataaaagtaaaaccgaagacaattactcgaggaatcatctaaaagagaagccgtcttctggtcaaaattttttaagcgaagc

SEQ ID NO: 20135 - DNA, 666 bp, Glycine max
tcggttcttgtacaggcactcaagttactgcagaaagcactggagatatatagtgatacccctggtcagcaaagcacaatagctggaattgaagctcagatgggtgtcatgtactacatgttggggaactattctgaatcttacaacactgtgaaggatgctatttcaaagcttcgtgctattggagaaaagaaatcatccttctttggtattgctcttaatcaaatgggacttgcctgtgtgcagcgttatgccttaagcgaggctacagaattatttgaaagaagcaaagagtattttggaacaagaatatggaccgtatcacccagaaacacttggggtatatagtaatcttgctggcacatatgacgcaattggcaggctggatgatgcaattcaaattctggagtacgttgttaacacgagggaggaaaaactcgggaccgcaaatcctgaggtggatgatgagaagaggaggttgggtgagttgttgaaggaagcaggtagagttcggagcagaaaagccaggtcactggagaaccttcttgatggcaatgctcacgctgcaaacaatgttgtcatcagggcatgatgaggatgtctatcaatgactcatgaaagaaaatcggcgctttgcaggaactcaaagtggagcaagctaaaatg

SEQ ID NO: 20136 - DNA, 621 bp, Glycine max
  unsure (1)..(621): unsure at all n locations
tttgtatttagctaccctcagtgagggtgtagtttaccccttcatcatcttttctgttttttttcaaagaaaagtaagaagggattggtagtagtcttttgcagtatctgcttcagtttttaggattaatccatgtcactccacctactagtaaacccctgatatgtttcattccgagtaatgcttatttccttagtcctagacctagttctctcctggcttatcttccattttcatggggtgtgttgaccgttctatgccaaattttaagggtggcaaaactttatgaagtttgtttggatcgtgacttgtgagatgtggtcagttgcaactcagtttttctccctaatgtccgttgtggctcataaatttgtctgtgtttctttctttctgcctcagttacttgtggattttgtttggtctgctggaatatgttactgactcttaactatacaacattttgtatctgaattaaatctccttgttaatttatatagctgttcttcggaagctatgtcctatggcatgattatctacattttatgaactgttgtatctgttgtcagttgtttgatcttttaaatgaattggtttccaaatattgatggaacttgngctatg

SEQ ID NO: 20137 - DNA, 152 bp, Glycine max
gggaggagctggtgccaaaaaggctattctcatgaatatgcccaatgctggtctttcaatgtggagatattttggtggagatctcgtctttgaaggttctaagaagacctctccctacattaaatgtaccggctctttctttatagcatttg

SEQ ID NO: 20138 - DNA, 710 bp, Glycine max
cccacgcgtcctcttgcactaattaggctactctcaatttcttctccttcactctcagagaactcatatggccgccacactcactcttctaaagcttccaatccttcctaacaagccattactgccacgcccatcaacctcaaaactttttccacttccttccatctattcaaaattaaatatcccaaaagattatattgtttctcctaacaacatcgatgctctcaagcctgcctttctttccctctcggcaatcacatttccattgttattagaaaccaaggatgcacttgctgttggtggagagtttgggatattggaaggaagatcatttgctctcatacaccccattgtgatggggttcttttttcttgtatacactgtgggcagggtacttggggtggcaatggcggcgagttaggactatccagaatgatattaatgacctcaagaaacaagtcaaacctaccccagtcaccccagatgggaaaccagtggaagaagcatcaccatcaccggttgaactccaaatacagcaactcacagaggacaggaaagagctgatcaaaggttcctataaggatagacacttcaatgcaggatccatacttctaggatttggggtgcttgagtcaattggtggaggagtcaacacatggtttaggacaggaaagctttttcccggtccacatttatttgcaggagcagct

SEQ ID NO: 20139 - DNA, 364 bp, Glycine max
agaatttcttgtacattttggtcctcgggctgcctcatgtagagcaaaagagaagtggggttcagaagaggttgttttctgggtaaatcttgctcagaagcagctacagcaagctattgataatgtaaaaatatggtcaagattgacaacatctgaaagtattgaggtcttggagaaggatttggctgtttttgggttctttattgctttaggcagaagtacaaggtcatttcttttgacaaatggttttgatactctagatgatccaattgaagatttcatcaggtatcttattggaggcagtattttatactaccctcagctctcatccattagttcatatcaaatgtacgtagaggtagtt

SEQ ID NO: 20140 - DNA, 541 bp, Glycine max
  unsure (1)..(541): unsure at all n locations
atcaaaatgaaattttaattttgattggagaagaagacaaccaacccttacaaaagtatatctaagttttgtcctgaagcaattaaaggagtgttagtgcaataaattctaataataagaaataacctaaaataattatatttttaataaattttaattattaataaagaatgtgtgaaaaaatatgttagtaatatttgtcaagggattatcatttaccaatatatggcaatggagccttttcagtttatcaagtacttttattgctgagaaaaaaaagtactttaattgatgtgtttgcgatttcagtgtatcattagtatgtacttactagtagaaaaactgaagatatgctgttgcattgtgttgtagcaattaaataaaaatttcagttcaaagttactttgagttacgaatatatatgaacacttggtttactctccaaaaaaaaaaaaaaagggcggccgccgacnnnnnnnnnnnnnnnnnnnnnnnnnnnnnnnnnnnnnnnnnnnnnnnnnnnnnnnnnnnnnnnnnnnnn

SEQ ID NO: 20141 - DNA, 376 bp, Glycine max
ataaaagcatatttgtgtttataagcagtgtgactcagtgaagtgtgtgagttagttatgcctggcggtagtaggaaccctcttgttgttgggcgtgttataggggaagtaatagacccctttgaaagttctattcctttcagggtcacctatggtaatagagaagtgggcaatggttgtgagcttaaaccttcccaagttcccaaccaacccagagtgagtgttggtggagatgacctcaggaacttctacactatggtcatggtggatcctgatgctcctagcccaagtaaccctaatttcagagagtatcttcattggttggtgactgatattcccgaaactacagggcctaatttcggtaacgagatcgtaa

SEQ ID NO: 20142 - DNA, 284 bp, Glycine max
atttgcttcatcattatggctgtgaaccttgggaacttggcgttgctactggacctgacttcgccgcggtgcgtgattctggagaggtaagcgcgtcccgccggatccgacgtcgtttcgtgcgcgccgtcgtccaagagggactacccctcctcctcctcctacgcggtggtggcgcgtcggaattcgaactcggagaagaacggcgttgatttcgacagtgacgaggaggaggaggatgctcagtagggggtagccagctgagtagggttcttagactgcta

SEQ ID NO: 20143 - DNA, 1029 bp, Glycine max
tcacagcaggaaagagttttagccttgaggtcatttaaaagtggcaacacccccatattggttgccaccgatgttgctgcacgtggtcttgatattccccatgttgctcatgtggtcaactttgacctgccaaatgacattgatgattatgtacaccgaattggaagaacagggcgagctggaaagaaaggtcttgcaactgcattctttaatgacaacaattcatcgctagctagagctttatcagaactgatgcaagaagcaaatcaagaagtacctgcttggctctcacggtatgctgctcgatcttcttttggtggaggcaggaaccggcgatcaggcggtcgatttggtagtcgtgactttcgaagagagggctctttcagtagaggttcttctgattactacagtgcgggaaacggcagtggtggtggatatggaggctcgggtgggtatgctggtggagggtatggtcctggggtcacgagtgcttgggattgactttcttcttttcatagcattacataccatcttaggtataggtgtggatgcgcctacaggatgatttttctccccccagtgtttttatgatcttcaatttacttgtgtttcaagccatcatcattttgtactattttacagtgctaatcattgtggggaatgggttgtgtatgtggtctagtatccacatcaataaaggttgtgtaatgatggtaggtattggtgattactaacatattaggaatttcgtgtcgacaactttttatacccttcattttgggtggtaattttggtgggagactggttgtagattatgcaaggggagaaatcgagctttttgttattgccgatcgtggttatctgacttatttctctcgaagcatactctttccagtgtcaaccaatttatgttggaatttaatatttccccactttgttgggctaaggtttttgtaatattacagtggtggttgaaatgaacaacaggttcccgccgatgatttcaatggaacatacccgttatgcctg

SEQ ID NO: 20144 - DNA, 658 bp, Glycine max
aagcctcttcttcttcttcttccttgtgtgtgttgcagtaagtacccaaatcaatgttcacactcacttctccttcttccagggccttacccatggattctcttcccaaattgcgccacccttctccatttcccactcccttatcctcttccctctccttccgctctttaccgccaccccattttccttcgtcgtcgtttaggttaccctccatcagagcctcctcctcaccctcccaaaacgaccccgcttttcgcaccccagaaaacacgccctccctcccccccctcctccaaaccctaacctccttcctctcccccctcctcgaaaccacctgcatcgtcatcgccgccgccgccttcttcttcatgcgcttccaccacacgcccgccgtcatcgccgctccgctcacttcccccgccgcggaaaccgacaccgccttcacccaggaggaagccgagaggcttctcgaagagcgtctgagcaccaaccctcgcgataccgaggcgctccacgcgctcatggaggtcaaaatcaaagcgcgtaagatggacgaagcgttcgaggttttgaaccgtctgattgagctcgaaccggaggagcaggagtggccgctcctgaaggcaaacatgcacatctacaacgacgaccacgccag

SEQ ID NO: 20145 - DNA, 877 bp, Glycine max
ggtctgaagaactttggaaactgcttctcttcccacacagctcacacccaacaacaaacatacaaactctcctctcacaagggcaagacagtaattccacattcccaacaacggagccaaccaaccaaaacctttctccttcttcctcttcctccccaattcccattcagatccgattaagccttaaccctaattcccctcccaccacccaccaacaatgggggacttcaaccaggcttacttccccaaattcgtcgtcgtcctcggcctctccgacgctgccatctccatcctcatgctccccgccgacgtggccaaccgccaggcctgccgccacgccatctacaacggcgcctgcagcctcacgctccccatgaaggacctctggctcgcagtctacatcctcgacgccgtcctcgtcttcttcgttatccccttcgccatgttcttctacgagggcgaccaggacaagagtgtggggaagaggatcaagagtgcgttgttgtggatggtcaccacggctatagtgtgcgccctcgttctgggtattttgtatgggctggttggtaaggtggactttactattaggcatctctcttcatccacaacttcatttcctagcacatggacattcagtagtggtcaaccttgtattggaagtgatgcccatcagtgttcagcattctctgctagtccttcatcagagaaaacatggaccatgcgtactacctttccagaatatgttgttgcacttgctactattgttggatctgtgcttttcgctatatttggaattattggtattgcctgtcttccattaggacttatattttcatttattcggcgtccaaaggctgttatcactcgctcacagtat

SEQ ID NO: 20146 - DNA, 474 bp, Glycine max
aaaaccaccaccggaacaaagccaaatttcttcactccctctctcctcattttctctctctaaaccagatccgaacaagccctaaccctaattcccaatcccactcattcctctgatacgatcgtttcgaagatgggcgatttcaacctcgccctggtgatcgtggcggtggtggtgtgcgtgatcgtgttcctggtgaacgtgtacctcctcgtgaactaccagcaccccgatgacgccaaccaggcctacttccccaaattcgtcgtcgttttgggcctctccgtcgccgccatctccatcctcatgctccccgccgacgtcgcgaatcgccaggcctgccgccacgcgatctacaacggcgcatgcagcctcacgctccccatgaaggacctctggctcgccgtctacatcctcgacgctgtcctcgtctttttcgttatccccttcgccatgttcttctacgagggcgac

SEQ ID NO: 20147 - DNA, 483 bp, Glycine max
agcgccacgaatgctatacaccgcccaacacttcgtcaacaattctgttacgctttcgaacaaactttttgctgcaatggctactcactctgctgcgacggagaggacttacaaagaatcattcgattccgctgcaaacaagcgctacgctgatcacataattcctcatattctgcatctgtatggatcatctgcaacctctcgcgactttgaaatctatgccgcaaatgcttcatttgaggatccacttatgtgtgcccacggggtgaaacagatcaaatcagcattctatactcttcccaaggtatttaagaagtcaaagatagttgaatatagtatcaaagaaaatatggcttcaccaggaaatggagagatattaattgacaataagctctactacaaattcttggggaaggatatatatatgagttcgcttatcaagttgtatattgacgagggtcaagttgtttgccatgatgactg

SEQ ID NO: 20148 - DNA, 441 bp, Glycine max
  unsure (1)..(441): unsure at all n locations
attggaatttggaagcacagcgaggcagagtagaagatgtttatgtggcgggaacctcttgactctggagaagaaaacccgcgtttccttgggtagtcgaaaggaagcagaatgggatccaaaattcttccaaaatgggcatcgaagccttgcgtaatgggaatcgacgaagctggaagaggccccgttttagggcctatggtctacggttgcttatactgctctcagtcctatctgaagaccctttccacgttgagttttgcagattctaagacactcaaggaagagaagagggaagaattgtttgaaactttaaaactcaatgattctattggatgggatgttgatgtcattgacccccgggaactctccgctaaaatgcttaagaagaataagattaacttgaatgaganttcacatagctctgccatgggcctcatt

SEQ ID NO: 20149 - DNA, 1089 bp, Glycine max
gcactgctgtttaagcagcagcttactgccttccttgaaaaaatatatggaatgataagagacaacctaaaaaaggagatctctccattacttggactgtgtatacaggctccaagaaactcgcgtcaaagtctagtaaaaggacgtgcacaggcaaatgcagttgctcagcaagctttaattgctcactggcaaagtattgtgaaaagcttaaacaattatctaaagataatgaaagccaactatgcaccccctttcttggtccgaaaagtgttcactcaaatattctcattcatcaatgttcaattattcaatagtcttctgttgcgtcgggagtgttgttcgtttagcaatggagagtatgtaaaaacaggtctggctgaattagagcagtggtgcatcgaggcaacggaggagtatactggctctgcttgggaggaactgaaacatatcaggcaggctgttggattcttggtgatacatcaaaaacccaaaaagtccctgaatgaaattacaaaggagctttgcccagttctcagtatacaacagttatacaggataagtacaatgtactgggatgacaaatacggcactcacagtgtgtctacggacgttataacaaacatgagagctatgatgtctgaggactctaataatgctgtcagcacttctttcctgttagatgatgactcgagcattccgttttcggtggatgacatttccaaatcaatgcacccagtagaagtagcagacgtggatcctcctccgttgatacgtgagaactcagggtttgggttcttactagcacggtcagagtgatacaaatacccaatgaatattgtctctgatgctccatcttgtggctatccccggggtattgcaccaaggtgcaggtgccaagctgtgcatataatttcgttgttgtcacgtgtatagtatattttagccaactcaggcttctaatattggtttgttgcccgggttaattcatttttacccctcaagtttcatcaacacgaggggtttttttaagaagccatgtcactattgatgtgagtcatgtgataaatggcggtcataggtaaaggc

SEQ ID NO: 20150 - DNA, 526 bp, Glycine max
  unsure (1)..(526): unsure at all n locations
tctacgactgatgcccaccaagaagatcaagcgtaccaccacgacgacgactaccaagtcgaccaaggccgtcaaggtttcgggtgcctcgaagaagaaccccctcttcgtgtctacgcccaagaacttccgcaagggtggtgacattcagcctaagcgtgatctgtcgcgcttcgtgcgctggccgcgctacatacgcctncagcgtcagcgcaagatcctgtaccaacgcctgaaggttcctccttcgatcaaccagttctcgaataccctggagaagaacattgcgacggacctgttcaaactgttgcttaagtaccagccggagaccaaggctgctaagactctgcgtctgcgcaacatcgctgctaggcaaggaggaagcctcggcccctcctgccgtcgtgaaatttggtctgaaccacgtgacttctctgattgagaacaagaaggccaaggtcgtggtcaccacccacgacgtggaccccattgagctggtggtgtttctgcctgctctgtgccgtca

SEQ ID NO: 20151 - DNA, 735 bp, Glycine max
ttctcatattcagtggattcatttcatcaatcactttgcctttctgatcataatcaccaaaatgccccccattggatccagttcgtttcaaatacatgcaagccataataatatttatgatgttgcaggttgttgtttctgctcaagaccatattatgtgcattgagactgagagggaagcactcctccaattcaaggctgcacttctggatccctatggcatgctctcttcttggaccacttctgattgctgccaatggcaagggattcgctgcaccaacctcaccgcccatgttctaatgctcgaccttcacggtttgaatcgttcttggagacatgcttatttcaagttcataagcaatttctcagatgctatttatgtcatggcagccgtgaaagttttcaagttgcatcacagaggatagctgaaaaattctgaattgtaggtgccagcttgctgaggtggaaaatgcaaagagacacttttaatttggaggtgagaaggcatctctcacagttgcatttgaagaccgagagagaattaaggaaggcttctagagctttaggcagccaattgtgattgtgatccatctagtttattttccttattaatttctaaacattttgtttgtagtttggcatgtaaatctgaactggttgttttgtatcaagttgatgaatcttcataacaatgggaactgagaggtttggttattgcttcttcatttttgggtc

SEQ ID NO: 20152 - DNA, 1180 bp, Glycine max
atattatccaatatatttggactctctctcttcttcacatgctcattggctttcagcatatctatggcagaggcaaaactaaggtatgctgttgttactggagcaaacaaagggataggatttgagactgtaaaagagctggcctcaaatggagtcaaggtggtgctcacagcaagagatgagaaaaaaggccatgaagcctttgagagattgaaagagtgtggtttctctgatttggttatttttcaccagcttgatgtcactgaatctgctagtatttcttcactagtagagtttgttaagaccaattttgggaagcttgatatattggtgaacaatgcaggaatcagtggtgccaatctggatgaagtggaaggatcaacatttaaatgggaggaactgactcaaaccaatgagatgactgaaaagtgcctaacaacaaactactatggtgcaaagaaaacaactgaggcatttcttacccttctgcagttatccaattcacctaggattgttaatgtttcctcccaagcagggttgttaaagatcatatcaaacgaatgggctaaaggggtgcttgatgatgctgataatcttacagaagagagaatagacgaggtactcaaagagtttatcaaagacttcaaagaaggttcattagcaaccaaagggtggccaaccttcttgtctgcatatattgtctcaaaagcagccatgaattcatacacaaggattctagccaagaagcaccaaaacatgtgcattaacagtgtgtgccctggttttgtcaaaacagacataaacaaaaacactggcatcttaaccgttgaccaaggtgctgctagtgttgtgaaattggcactgttgcctgatggttccccttcgggcctcttctatattaggcaagaattgtcaaacttctgaatgattttaaatgtaatgcaaatacattcatgcagacacatgaattaacacatgacagaatgttcctcttgcccgtattttttacccttatgcaagtacgaccattatcttctattcttgctaggaattgtcaaagttcttatttgtcatcttctggtgaaatttaatttctagaacatgagatgaactattcttggtttaaggtaatataaaaatcaattccagttaattgttaaaaaaaaaaatcaaaaaagga

SEQ ID NO: 20153 - DNA, 382 bp, Glycine max
ctgcaaaggaagcctcttgcaattcaaacttttctccaacatcttcatatgattgcaagcaaaatattaataatagttttcaacgagatgggaaatcgaaaaagttggggaacgaagttcttattgaggacttgcagaaggaccttaatgctagactccaaagagaagctgcattagaagcagctctatctgtgaaagttgaaatagaagatgacctaagaagtacacttgatgaaataaaacaccaaaaacaagatttggaatatgagcttacaaacatgcggatgctggtgtcaaagatgaaaaagtctgggattaatgttgaggacaagtcaactaatgatgtgcaaaccaaggttaaaaatgggcatccaacatctaa

SEQ ID NO: 20154 - DNA, 466 bp, Glycine max
ccttcgcgtcctttggttttgctctgtcatagttacaatctgggtgctagttgatagttgcattttgtaggctggaaatgaaagtgagggttgtttgcaggaaaatttacgactatatacgctatgatctcaaagaaatcgctttccctcctccttggcaagaccctctcaacatcaaaaagcgtcgcaaattgacctgggaccagcgtatctgggttttgaagagagctgcccggctttatgctgcaagctgggttcgtgacattggtcctgaccttcggcctgatgattataagaaggatggtgacatgactgatgaaacaaatggtgaaaagaaaacaactataggaaaagaaccctcaacactggaggaccttgctgttgctgcaagagggggaatggagactctcagaccggctttgcagcgtgtgtacatgaccagagcatctgcatacagagatgctct

SEQ ID NO: 20155 - DNA, 358 bp, Glycine max
agtacatgtttagttgtttgctgaagccaaaccaaataattctgcatttgatcactgtgtctttattttgattcaaaggctacaagacttcataactacctactaaatgcttatcttgttcctcatttcctggatcataacccaacctcttcattttgcctcatcaattcctcttcttagagatggcttgtgaaaccaagacatgggtgggtatgggtcttcttttcttggctgctaactacttgcaagattgtgttcatggggtatcccaagttccttgccttttcatctttggggactctttatctgacagtggaaacaacaatgaacttccaacctctgcaaaatctaattacag

SEQ ID NO: 20156 - DNA, 328 bp, Glycine max
agataccaactacaagagcaaaatcacccaagctcggtcgtaagaagagttcagcaaattcagagtcagatggaaacaacagcagcagttcacgactagctcgtttaagtctggatgagaaagtgtcagagagtaacctcactaagggacctactcctcctgtccatcaaaagaagccacaacgaagatctcttcctgctcggctggcccctgaaaggaacagtgtatcaaattcaaggactgcaccaacttcatccaaggctatcaaagatgaaaagttctccttgtatagtgctgctaaaaagacatccagcttatccaatgctac

SEQ ID NO: 20157 - DNA, 401 bp, Glycine max
aaaaaaagagagtaaacacagtttaacaagagactacataaggctttttttaatttctctagcagttgagtttaattccgatgaataagaaaaatataatcataatcatattatactatgtcttcattggtactgaactcttccgttgcggtactgaactcttccgttgctgtcgttgctgtccttggggaggcaactggcaggaagatctcttctccctgacactttcaacaccgcaatccaccattaatcgggaacccgacaagagcagagctccgccacgattacggaaagataagaggcgtgaaagagcaggtattgagatgcagatcagtgagaacaacaacttattcgagcaatctcgacgcaaagagaagataagcaatttaaaatgctcatgg

SEQ ID NO: 20158 - DNA, 530 bp, Glycine max
aggcaatactccaagttatttagatacgagttctcagatgacaatgattctcagggttctgcaccttgttctcccgttcaaggatctatcgaggatagtgttcctggtagtcattgtcaagcctttgacagacaactttcaaaattcagttgctttaatttcaaaccaaatattagtaggacatctgggcagatgcctcttccacctgaagagttaaggtgtccaatatcgctgcaactcatgtatgatcctgttatcattgcttctgggcagacttatgaaagggtttgtatagagaaatggttcagtgatgggcacaacaactgcccaaagacccagcagaaactttcacatctttgtttgactcctaattatcgtgttaagggccttgtttctagttggtgtgaacaaaatggagttcctattcctgaaggccctcctgaatctcttgatcttaactactggggattggtattatcagagtctgaatctacaaattcaaatcttgtaatagtgtcaccttttgcaag

SEQ ID NO: 20159 - DNA, 481 bp, Glycine max
  unsure (1)..(481): unsure at all n locations
tgctgattggctacgtaaaaactactcagataaatatgtcattcttgcagttaacaagtgtgaatctccacgcaaaagaattatgcaggcatctgaattttggtcccttggatttgaaccacttccaatatcagctatctcagggactggaactggagagcttcttgaccttgtttgttctggcctacagaaaattgaggaatctaataatcttgttgaagaagattatgttccagcaatttcaattgttggtagacctaatgttggcaaaagtagcattttgaatgcactggttggtgaggacagaacaatagtcagccccatcagtggcactacccgtgatgctattgatactgaatttactggaccagatggacaggaaaagaacagccattgcttcagctgggagtacaacagaggctttatcagtgaatcgagcatttcgtgctattcgtcgntctgatgttgttgctcttgtcat

SEQ ID NO: 20160 - DNA, 881 bp, Glycine max
atacatttaagttcatttcctcctctcctctctcttcattttatttttcttccatctgctaggaaaatgtctgtcagcgttgagggctctgcctttggggcactatttgaagaaaaaaatgtccattctgaagacagcaacgagcttgtgttgcatggtgcatttccattggctaaacatgagagacagaatggatttaatgccacagacatgaatgcatttggaaactccttcaggaactatgatgcagaaagtgaaaggcaaagaatggtggaggaattatataggatgcaacacatcaaccagacatatgactatgggaagagaatgagggaggagtatgggaaattggacaaattagaaatgggtatatgggagtgttgtgagctgctcaatgaagtgacggatgatagcgatcctgatttggatgaaccacaaatacaacatttgttgcagtccgctgaagccattagaaaagactatcctaatgaagattggctacatttaactgctcttattcatgatcttggaaagatccttatgcttccaagcttacttggccttcctcaatggtctgttgatagagatacatttgcccttgtatgtgctcttgatgagtcaaatgttcaccacaagcatttcaaggacaatccggataacacaaatcctacttataacacgaaaaatggaatctacaaagaaggaattggactagacaatgttgtgatgtcatggggacatgatgagtatatgtatttggttgcaaaggaaaacggcaccactttgcctccagtagcattgttcattatcaaataccattctttttacgctttacatagggcaggagcatatacacatttgatgaatgaagaagatattga

SEQ ID NO: 20161 - DNA, 1058 bp, Glycine max
cgcgcttgcaaatggaggtttggttcctgtcagtgaagctctgaaggtctgctgatgtctccatgtaaagtaatcttgtgtagagtttctcatgtatgcatgtctaatcagatttcgtccgcagtttctgtaaggatggaacaggttgtcgttccatgtctttaaatctgctatgaaatttttgcttgtgagattttcatttctgtcggggggctggagtttggagggttggatagttcaagtgcttgggatgtggagagtccatgattcacttgaggaggatatcatgttcgtgtgttaattcctcacaatgtttttgcagtgtggttgatataggctggtccgatgaacaataatgttgggaaagggaaaaaaggtttggcagaacaaaatcatatgttatttgacaaaaagagtctcgaaaatggagtagttaatggaggggtagcctctggatcatcaactgaagatgacacaagatttaataaggtggttgaagatggaaacaatggattgaggggtctgattcaaatccatgggagcttgcagatttcacaacaaccacctcaagagccagccgtatgctgggagagatttctcccattaagatcgataaaagttttgctggtggaagatgatgattcgacacgccatgttgtgcgtgctctgttacggaattgtagttacgaagtcactgccgtttccaatggccttcaagcgtggaaagtcctggaagatccagaaaatggcattgatcttgtcctaacagaggtagctatgcctattttgtctggaataggtcttttgtgcaagatcatgagccacaaaactctgaagaatattcctgtgattatgatgtcatctcatgattctatgggtatagtctttaagtgtttgtcaaaaggtgcagttgattttttagtgaaacctattcggaggaatgaacttaaaaacctctggcagcacgtttggagaagatgccacagttctagtggtagtgggagtgaaagtgcgacccacaccagaaaatttgcaaagtcaagaagtaatgatgcatg

SEQ ID NO: 20162 - DNA, 855 bp, Glycine max
tggcaacgtccaacctctcccaccaaactgcacggccgttccccacagcgtgcgtcagttcccggccaccaagcgccgccgttaacctccggcggcacctcccacctcctcccaagcccagaaaactgaccctcaaaaccaacaaccgctccaagtgggccattcaattgagcctagtggagcaaagcccaccaaaatcaacgttcaacatgcagcaactcgtgggctttctctacgacgatctaacccacctcttcgacgatcaaggtatcgatcaaacggcctacgacgaacgcgtcttctttcgagaaccaatcagcaaacacgacactttgagtggctacctcttcaacattgcacttctaaaaaatctcttcaggccccaatttcagttgcattgggtcaaaccgacaggaccgtatgagataactacacggtggaccatggttatgaaattggtgctacttccttggaaaccggaactgatctttacaggaacttccgttatgggcattaacccagaaaatggcaagttctgtagccacgtggacttttgggattcaatagagaaaaatgagtatttttcttttgaaggtttgttggatgtaatcaaacagttgaggatttataagacaccagaattggaatcacccaaatatcaaatattgaaaaggacggaaaattatgaggttagacagtacaatccattcatagtagtagaaacaaatggagacaagctatctgggtctactggcttcaatgatgttgctggatatatatttggaaagaattccacaacagagaagataccaatgactactcctgtattcacggaaaccaatgatgctgacctgt

SEQ ID NO: 20163 - DNA, 372 bp, Glycine max
cttaattaatcactcctcgaaacaaatctacttttgctattccacttctctcatcacccctttcatctttgatatgaatttcttagctctatcaaacaaaggaagaaaaaaacagccacaactgagattactggagatggtgatcacagtttttctcctcgtgttagccattccttcacctcttaaaacagcagaatcactaaatttcaacataacaaacttcgcaaactccgagagtgcaaaaaacatgttatacgtgggtgacggcgctgtgaacaagaacgggtccatagagctcaacatagtggactatgatttccgcgttgggagagccttgtacggacaacctctgcgcctttgggactcatcttc

SEQ ID NO: 20164 - DNA, 694 bp, Glycine max
gggagaagaaaacaaaaacatgattttttgcgccttggtccgaatgtatcgatgatgttgtgtccccatcacaagttgattgtcagaataaaaacattaaattcatccaacattgggaagaagaaataactgagcagcaaagaaagcgagtaatcttttccgtgagatcggtgtgtgaattgtatattcccatttcaatgcagagatccggttatgggtccgacggaatatacaggtcactcagaccttccatcgtttttcccaaaaactcaaacctctcactcgtttcccatcttttcaacagagtcgcagcctttccatcaaaaccagctcttatcgatgcagactcttcagaaacactttctttcgcggaactcaaattgctaactgttagggtcgctcacggcctccttcgtctcggagtgaccaaaaacgacgtcgttctcttcctcgctcccaacgacatccgctacatcgtctgcttcctcgccgtcgcactctctgcgtgcgctgccgtcaccaccgtcaaccccgcctacaccgccgccgaagtctccaaacaggccaacgactccaaacccaaacttttggtaaccgtcgccgaattgtgggacaaactcgaacacctcaaactccccgcggtcttcctacgttgttccaacgctccccacgcgccatccagcgcgactaagct

SEQ ID NO: 20165 - DNA, 469 bp, Glycine max
attccatctgagaatccttttgtagcgattcaaggatgttgaacttcattacaatagttgtactattaggttgcatggtatatactgtagttgctgctggaagaagctggaaagcaaccacagcaccacacaaagttaacatgaatagagtaacattgggggcggggggctataggcagttaagttataaagccccctacggtgcagtggatattccaagaccaagaggtgaagctaccttgagctgcagtctgttacattttcttttggtagccgtggcctgttgcatatttcccccctcgattataatgattgtgtatagcttgtgcaatttgtttgttcttactccttttcaacattgcatttttatcggctcaatgtgctatgtctccacatgaagagcagaaatggatatatataagattgccgggttaaaatgtacccaaaaacaagtctgcggaggttggtt

SEQ ID NO: 20166 - DNA, 493 bp, Glycine max
gtgaaaccgatcgcctctctaaatccttctaatgcaagacaaaagtacccttcagagccgcgcaaatcatcttcaatgcgattatccggcgaaagagaccatggcctagaacttgaacaattccccaagaagaagtaacgtctcctgaaggccttacttagccggcgccaggctatgaaggatgacatgctattctcatacttggacgagttctgatgctttacaaccttatagaaagcaagggaaacaagtcaattttgcttgctagttcgataggtggcactttgtcatttaaaatgaacgtttacacggtaattttctttcacctgtattttaaattaagtgtaactaagcccccaaaattatgatgtgtgataatgtaatagttcaagctttattttcaagatgaatgttatataatggagtaaatttggcttcattttctgtcttttgcacccccttgaaattcaaggtgtccaactattttcccccc

SEQ ID NO: 20167 - DNA, 814 bp, Glycine max
  unsure (1)..(814): unsure at all n locations
cgtggggaccttcgattctcgaagaaggaaaaggtgagaagcttgagtgcggtcggaacgccgtcgtcgaccttccaaatggcttgtattaatgtctctgaacagcaaacacatgaaccttcttcgaccgtcatcgccaccaccaacagattccgtctacataagaatttttttaataactgcaacggtgcctctgttccacggaagctacgttccgtgccacgaagaaacggggtcgcgaatccatgttacttgattcagaaaaggtgaagcataagatggatggaatagaatctctcaaaaaggatagtgtaaagaagtccaaaaaacaaggaatgtggcgtgactggtcccctagagaaggagcttctggggccatcacaaaagatgaggaagaggttgcggagactctctatgccttggctggaatgttccctcacaatgcctccaatcataagagtacggatttagatggcaaatctttgccagataattcatcagttttgcaagacttggaggataatgcgagtgctgctgctcttcaagattctattctagcctcagcaactgctcctgttgcaagtcctagttatcatgaaagttcagctggagatacttcaaaaatcagttggttgaatgaagctgttggtcaaaaacaacctgattttcctgagagtgcaacgctcttgatgccatctcatagcacttctataacaataaatcttcagaccatgcctgtggcggctaagcgtgaaaatagcaacaaagctgcattgcatgactctgnagtatgtctagcaatgggatttaatat

SEQ ID NO: 20168 - DNA, 539 bp, Glycine max
gtactgatgtatctgagaaaaggatagttggagtcttccatgggctccttcatctcgcactccataagcaaaccgagcgcaagaacgttagcaacttgcgtagacccttggccttacctcagaagtttactaaagtatttgagcgtcatcctggtattttttatatttccaagaggagtgatacccaaacagttgttcttagggaggcctataatggtcaggaacctgtgcagaatcatgcccttgtacaaattagagaggaattcgcaagcctgctgaagaaagggctattggataggagtaagggtgtatacaaaaaaagcagaccccctaatttggtggagggtttgacaaaggaggtttgcattgctaaaagacctaaccagtttagttctgaggatgaatcggattccatgtttttttgaatatgattcggatggccctccacaaaacccttggtggtatatgtgaatgtgagatttctctttagccataaagtaaaaccggtttggaatagtgacaatcttgaaatttggccc

SEQ ID NO: 20169 - DNA, 415 bp, Glycine max
caagtatatgattcttcatatgcgccggtttactaaaaagaatggttttgttgaaaagaatcctacgttagtcaactttcctgtgaagaacctggagttgaaggattacattcccttgccaacaccaaaagaaaatgagaaattgcgaactaaatatgatttgattgccaatgttgttcatgacggcaaacctggtgaaggattctatagggtatttgtgcaacgcaaatcagaagaactatggtacgagatgcaggatttgcacgtctctgaaacacttcctcatttggttgcactttcagaaacttatatgcagatttatgaacagcagcagtaaaaggccgagtttgaatccttctctgtgcatcgtaacctgaagcacgtagtatgcagaaaggttgagactatgagaggt

SEQ ID NO: 20170 - DNA, 462 bp, Glycine max
gtttttcaatttattcgtagttcattaaagaatatttcttaacaagattgttttcagatagaagaaagaagaaagaaaatgggtggtagcagtgagaagaacaaaaacgcagagctgatcttgattccctcgccaggaattgggcacttgacttcatctctagaatttgcacagcttctaatcaaccgtgacaaccgtctttccgtcacaatcctctgcatcaagttccctttcacaccctttgcagactcttacatcagaacagctttagcctcacaacccaaaatcaaactcattgatctccctctagtggagccaccaccacgggagctagctctcaactcccctgaacactacatatggaccttcatggaaagcctcagaccccacgtcagagccatcatgcaaaacattttatcacacccaggtgttggttcagtccacgatatcattgctatgtct

SEQ ID NO: 20171 - DNA, 645 bp, Glycine max
ggggaagcaccagatgcacgtgagggtcatgatgcagcacttgttggcaaacgactatttatgtttggtggttgtgggagatctgctgataacattaatgaggtgtactacaatgacctttacatattgaatacagaattgttcgtttggaaccgtgctacaacatcaggcactccaccatctcctcgtgatggccatacttgctcatcttggagaaacaaaattattgtgataggtggggaagatgaaaatgattcttatctgtctgatgtccacatcctggatactgatactctaatctggagtaaactgtgtacgtcaggccaattgttgccacctcgagctggtcattctacggtttcttttggcatgaacttgtttgttcttgggggctttacggatgctcacaacctatacaacgacctgtatatgctcaacattgagacttgtgtgtggacgaaggtggcaactacacctaatggtccttctgctagattttctgtagctggtgactgtttagacccatatatgagtggtgttcttgtgtttgttggtggttgcaatagaaatctggaggccctggatgatatgtattacctatacacagggattgcacgggaaaatgaacagcgaacagagaagtta

SEQ ID NO: 20172 - DNA, 1180 bp, Glycine max
ccatatcattagaagtgaagctgatgtgatgctttgtggaggctcagatgctgctattataccaattggtttgggaggctttgtggcatgcagggcactctcacaaaggaatactgatcctaccaaagcttcacgcccttgggacattaaccgtgatggatttgtcatgggtgaaggggctggagttttgcttttagaggaactggagcatgctaaggaaagaggtgcaaccatatatgctgaattccttggtggaagtttcacctgtgatgcatatcatgtgactgagccgcgtcctgatggggctggtgttatactgtgcattgaaaaggcattagctcagtctggagtatcaaaagaggatgtgaattacataaatgcacatgccacatccacaccagctggagatcttaaggagtaccaagctctaatgcattgttttggtcaaaaccccgagttaagagtgaattctacaaaatctatgattggtcatctactaggggcagctggcgctgtggaagctgtggccacaatacaggcaattaggacagggtgggttcatcccaatatcaacctagaaaacccagataacggagtggatgctaaagtgcttgttggctcaaagaaagagagactggatgtcaaggcagccttgtcgaattcatttggttttgggggtcacaattcttcaatcatatttgcaccatactagtgaaacagatttcagagcagtactttcttattattataagttactgagtacccagacaatgtttattgcatactaactccagtgttttggttggttgagaatatatgcggtgtggattagttggttggatcagtaactgttgagaaacattgttttttgggatggggttggttgtgtgcctacagaatcagagtgttgatagattatcattatctggtgctcctggtgggagagagtgagtcgctatctatccactaccataaaatcctatctttaccatgaatggctagagtaggagttgacccacttttgatgtaaccgtttaacaaccattttgatgggatggatacagtcttttgttttattcccatgtacaaatagaccctcatggctctgggcattgggcaataaccaaatttcagtgattgtttagcggactcgtcgaatagattatgccttttcagtttc

SEQ ID NO: 20173 - DNA, 478 bp, Glycine max
atttttcaaggtctatttctctctttttattattcttgtttttctttttatgtgcccatcttttttttttctggtgaagaattttttgtttttgagaaaaaaaaattactttggagttttgtggtatggtagtgaatctataacaagagggcttcttgttgtaggtaaggcaggcagacttgtatttgctgatggttgataccttactgttgtatttgcctataactttgcttcttggttatgtgaatattctgggaattaaccatttatgaattggagctttcaaatttgacatgctttttatgatgtcaaatgtcttaaaatgggaagaattcctttccattcaactacacatcttttcttttgctcttatcgtgtaataccccatatttattattttttattttcaattatttaactggttacatgcatcctatctgcctattccgcttcgtcgatacaagtggggtcatgttgg

SEQ ID NO: 20174 - DNA, 789 bp, Glycine max
aaaagcggtctcatgaagccctccaagtcccactccagagatccggttccgcagccggacgccgcctccaacttcagcgctccggcggcgccctccgccaatgtcgtcgtgaatctcgtctccttgacccccctcacgctctcctccagcggctccgtcgagccggtgcctccattccgcgacgctcccgtcgcgtaacggcataacctcttcctccagaagctccacgtgtgctgctacatcctcgacttcttcgacacactgaataacgttagggagaatgaaatcaagcgccaggcgctcatggacctcgtggacttcatccaatccggctccggcaagataagcgagaactgccaagaagagatgatcagaatgatctccgtcaacatttttcggtgcctcccgccggcgtcgcacgaaaacacaggccaagaacccaccgatcccgaagaggaggaaccttccttggacccttcttggccccaccttcagctcgtctacgagcttctcctcagatacgtggtttcctccgacaccgatacgaaaatcgcgaaacggtacatcgaccactcctttgttctcaagttgctcgatttgtttgactctgaggacccacgggagagggagtatttgaaaaccatactgcatcgtatatacgggaaattcatggtgcataggccctttattaggaaagctattaacaacattttttaccgctttatatatgagactgagaggcactctggtattggggagcttctggagattctgggcagcattattaat

SEQ ID NO: 20175 - DNA, 781 bp, Glycine max
accagcaacctcaacgcctctgatgtagctttcaccaccaccctgacagagcatcccgcggtgccaccactgccatcattctcgcagtgtctttggcatcaagttcgccgccccatcggagacaccaccaaccgtcggaacccattgttgttgcaagctaatattacggatctataaaggattttaagaatgcaattacagaacaaaataaatatggcaaaataaggttttcctcgtggtggggtcatcgacgttggagaactaccggcactggagcaccagatctgcaccaaatagtggcacggtcggaaatcaccatcggtagtggcatgcagcagaaagtggttgtggagggaattagggtgtagtataagattgtgaagctcaaataaatccaattgttcataaaaatggtacatgatagatcacttgtaaaacttgcccactagccattgtatatttcataagttaaaatcttttggtttaattaaaaaaaaaaaaaaaaaaaaaaaaaaaaaaaaaaaaaaaaaaaaaaaaaaaaaaaaaaaaaaaaaaaaaaaaaaaaaaaaaaaaaaaaaaaaaaaaaaaaaaaaaaaaaaaaaaaaggggcggccccccctttttgacctcttcaccccggaatttatttccggcccggtccctgaaggcttcccacttttccttttagggagccgttttaaacctgggcgtaatcatggccatagctgttccctgtggaaaattgttttccgctcaaatttccacaaaatttacaacccgg

SEQ ID NO: 20176 - DNA, 789 bp, Glycine max
ccacaaccaaaaccaaaacacacaaacactaagaaagaaagaggttttagttttttagcttaagcacaccaactaactccacctaacttcttttctctctggggttctttctccatttccattggctttcaaaagtcaccaacacaattctcccttcagagtttcaatggctgtttcaacaagtttccctggtgcaaagttggaggctttgttgctgaaatgtggctcctccaatgctgccactgccactgccaccaccaccacccatttgtcatgtttttgcaaaaccagaaagacacttgttcagagtcagagagggcctattcgctgtgaggcttcttctgcttctgatgttgcggctgatgccactgagacagctgctagggtctctgctcttgaacagcttaagacctctgcagctgataggtatacaaaggacaggagcagcatcatggttattggactgagtgtgcatagtacacctgtggaaatgcgtgaaaaacttgccataccagaagcagaatggccaagagccattgcggactttgtagtctgaatcatattgaggaagcagctgttctgagcacctgcaacagaatggagatatatgttgttgctctgtccaagcaccgcggtgtcaaagaagtcactgaatggatgtccaaaacaagtgggatcccggttgcagacctttgccagcatcagtttctgctatacaacaaagatgccacacagcacctttttgaagtatctgcaggtcttgattctctagtgttgggagaaggtcaa

SEQ ID NO: 20177 - DNA, 449 bp, Glycine max
ccatatgcccaaacccgcgtcgagattgagtacatgcactaggagatggagcagtaggttgtagttttttagcttatgcacaccaactaactcctcctaacttctttctctggggttcttctccatttcattggctttcaaagtcaccaacacaattctcccttcaaagtttcaatggctgtttcaaccagcttctcgggtgtaaagttggaggctttgttgctgaaatgtggttcctccaatgctgccaccaccaccactcatatatcatgttttggcaaaaacagaaagacacttgttcagagtcagagaggggctattcgttgtgaggcttcttctgcttctgatgttgtggctgatgccaccaagaaagctgctagtgtctctgctcttgagcagcttaagacctctgcagctgataggtatacaaaggaaaggagcagcatcat

SEQ ID NO: 20178 - DNA, 585 bp, Glycine max
ggacgctattgggagtggttgttgggggctgtggaaatggaatccgttaccgcagtctcgacggcgtcgtattcgctccaattcgggttcggcggatgcggccggcggaggcggttaccggtttccggtgaagcaggcggtgaccgccgcctccctcgccctcaccggcgacacaatcgctcagctcagccaccgttggaggaaagcaaaggagggcggtggcagtgtctctcaggatgaattgtggagatacctttcagaccatgattggctgcgtgctctgcgaatgacttcatatggattccttttatatggtcctggttcttatgcctggtaccagtgccttgaccactgtctccccaaaccaacagtccagaacctagtgttaaaggttgtactaaaccagattgtgttaggtccatgtgtcattgctgttgtttttgcatggaataatttatggctacagaagctctctgagcttccagaaaaatacagaagagatgctcttccaacgctactttatggatttagattctggatccctgtcagtgtattaaatttctgggtggtgcctcttcaagcccg

SEQ ID NO: 20179 - DNA, 1292 bp, Glycine max
tacatacacaagctagttatctgataattacaataatgggttccctccctcacgtagtagaggattgcatgggcttcctccaactctatagcgacggttccattttccgttccaacggcatagaattcaaagtttcacccattcaagacaactccataacctataaggattatctctttgacaaaagattcaacctttctcttcgcttctacaagccccaacaacaacacatagcactcagcaataagaaggtccctattgtgattttccttcacggtggaggcttttgcttcggttcgcgcacctggccccatattcacaactgttgcatgcgcctcgcgtcggggctccaagcggcggtggtttcgccggactaccgtctcgcgccggagcaccgtcttcctgctgcggtggacgacgccgtggaggcggtgaggtggctccagaggcagggcctgagcttgagggaggacgcgtggttgagtgggggcgttgactttgaccgcgtcttcgtcgtgggtgactcgtctggcgggaacattgcgcaccacctggcagttcggttggggtccggttcgagagagatggacccggttcgggtacgaggttacgtcttgtttgcgccgttttttggcggggaggttcggaccaagtccgaggaaggtccaccagagcacatgttgagccttgagttactagacagattttggaggctttcgatgcctgttggaaagagccgagaccacccattggcgaatccgttcggacctggaagcccaaatcttgaacaagagaagcttgatcctattttggtgatagtaggtggcaatgaattgctcaaggatagggcaaaaaattatgctacaaggttaaaagaattagacaaggacattaaatacgttgagtttgaggggtgcgagcatgggtttttcacgcatgattcattctcatcagaagttgcagaagaggtcatccaaatccttaaacgattcatgcttgcaaacttctagttagaaggcacgcacgcacctgaaaaaacaaattcaacagtagaaagacactcatagtgaaatgtaattaaggttaattaattagtctgtgtaattttagcccggtataagtagttcgtgggaatttataagtatatataaatgtcaatttcatggtgtgtacgtgtagcttttcattggagattgtagtcaagtatctttcttagctatttgtgctataacttttgaattgtatcagtaacttctccagcgaaaaattcataataatagaattttaataag

SEQ ID NO: 20180 - DNA, 449 bp, Glycine max
ctcgagccgtatcggctcgagcaccattcaagctttcaaaagacaaaatagaattacagtttgaatggtgctcgagccgttacggcccgtgctcgtgccgattgctgggcacacgttcgcgtgctggcgtcgaacaggcgaaggaggggagggtcgtaaatgtctcatcaagacgtcataaattatcatatcctgaagggattagatttgataaaatcaatgataaatccgggtataacagtttgtctgcatatgggcagtcaaagcttgctaatgtgttgcataccaatgagctcgcaagacggcttaaggaggagggcacaaacatactgcaaactcagttagcccgggaccaattgccaccaatctatttcgttatcacagtttaatggaggtgtttgttggtatacttggtaaatatgcgatgaaaaatatacagcagggagcag

SEQ ID NO: 20181 - DNA, 382 bp, Glycine max
caaaagcctctcttcaaattcagcaactcctcttctctccctccttctatttactataccggggccacaactgaagcagagtcaactccagtttctggagatgataattttgcaaaatgctacgtatgtagtttggaagtcagtgaattgagacataggaactgtgacacatcttgattgtaatttgctttttctatgctgcggacaatgtgcagaggatctaagaggttgttgttgtttgacgtgcactactgctcctcggcttagacctgttttaaatggaatgcagagatacaaaaaatggcactactatcgggatatggattttcaagggaaaatgaaaatttcagcttgaatgcccttgtcaaccaatggaaaaagc

SEQ ID NO: 20182 - DNA, 519 bp, Glycine max
cttgctctttctttctttttttcccctatccctttagcttaattttttggctacgttatggggatccttagcgatcatcataatcagaagcatcaccaccaccaccatcatctcatgagttttcatttgcacattcctcaccttcagtactttcaccatcaccaacaacaagagaagaaggaggatctgaaggacattccaaaagggtgtttggccatcttggtagggcaaggggaggagcaacagaggtttgtgatccctgtgatgtacatgaaccacccattgttcatgcagttgctgaaaaaagctgaagaggaatacgggttcgaccagaaaggccccatcaccattccttgccacgtggagcacttccgctctgttcaaggcttgattgataaggacaaatccctccaccatggccatcaccaccatgcttggtgcttcaaagtttgattcatcagtcacactctagcaacatgaatttttaaattttaaaatcatgtacatgatatttcttgt

SEQ ID NO: 20183 - DNA, 649 bp, Glycine max
ccactctcaatcctctccaagcaaaatccttgtgttttcttctctcatcctggtttgctgctggctgctttctattcttacctcaagagaaataagagaatgggtgcaaagaaatggtttaagataatagtcaaattgaagaaatcgaagaaagataaatccaaagaagaaaagatcactgatgaaaattcaaacgaatactccaacgggaagcagagtactcgtgaagagtcaagtagcattcccaatgaaggtttaatgatggacaggacagttccttcaaagttgatggatgatattgcagctactcggattcaaaatgcatttcgttcatttatggcaagaagaacattacaccatctaaggggtgcagagaaattcgaagctttgattcaagaccacctggccagggagcaaacagcaactgcactaagctatatacattcatggagcagaatacaagaacaaattagagttcgaagaatctgtatgataacagaagccaggattaagcaaaagaaattggaaacccagttaaaaattgaggccaagattcatgagctcgaggtggagtggtgcaatggttctgaaaccatggaagaaataatttcgaggttacatcagcgagaggaagcagcaattaagcgag

SEQ ID NO: 20184 - DNA, 1039 bp, Glycine max
acgagttgatgcaataacacagtacttagatatgggtacttacagtgaatgggatgaagaaaagaagttggacttcttaacaagagaacttaaagggaagaggcctcttgttcctgttagtatagaggttcatcctgatgttagagaagtcttggatacattccgaattgccgctgaactggggagtgattcacttggagcttatgtgatctctatggcctcaaatgcaagtgatgtccttgcagtagagcttttacagaaggatgcacggcttgctgctattggggagttgggaaaagcatgtcctggtggaacgttgcgggttgtccctctgtttgaaactgtgaaagacctgagaggagctggttcagttatccggaaacttttatcaatagactggtaccatgaacacatcattaagaaccataatggacatcaagaggttatggttggatattctgattctggtaaagatgctggtcgctttactgctgcttgggaactttacaaagctcaggaggatgttgtagctgcttgcaatgattatggaataaaggttactctattccatggtcgtggaggcagtattggtcgtggtggtggcccaacatatctggctattcagtcccaaccccctggctctgtgatgggaacgcttcggtctactgagcagggagagatggtagaggctaagtttgggttgccacagatagctgttagacaacttgagatatacacaacagctgtactacttgcaacccttcgtccacctatcccaccccgagaagaaaaatggcgtaatgtcatggaagagatctcaaacatcagttgtcagtgttaccgcaatgtagtgtatgaaaatccagaattcctggcctacttccatgaagccacaccagaggcagaacttggcttccttaacataggtagccgccctacaagaaggaagagctcagtaggaatcggacaccttcgtgcaattccctggttatttgcatggacacaaacaagattcgttcttccagcttggcttggagtc

SEQ ID NO: 20185 - DNA, 512 bp, Glycine max
gcttccttcccagaactaaataaacctccttcgactctgcagggcacatttctccatatcagaccacacctctcttttctcttcggttgtagccacggattcatgacagagattatcaactcatgcctagttcgaagactattttaactgttttagttttgagttcagaataaagcacgcagcagagaaatctcgaagtgcaaccaagaaattgcttgaagatttcacaaagaaacgaagactagaatcgccaaaagaacaagtccaaagtccaatgaaattaaaatttattattgtattgtgtgcctcaattagcacgtttgtatgtatgggagaatgggagccaacttggagcacaagagctgcagaagaagctgaggctgtggcagcaataccatgttcaggacatggaagagcctacttagatggtcttattcttaaagatatgaataagtctcgttgtgaatgcaattcatgctatgctggatctgactgctcccagtttttatctg

SEQ ID NO: 20186 - DNA, 385 bp, Glycine max
atttaattaagcaacttacttccttcccaaacctccttgaactgatgagaaggctcatggctcagcttgtctttaaatctcgaagtgcaattgtccaagaaattgcttgaagatttcataaagaaaatctaccatagaaaaactagaaatggccaaaagaacaagtgcaatgaatttagcattcattttaatattattgtgtgccccaattagcatgtttatatgtatgggagaatgggagccaacttggagcacaagagctgcagaagaagctgaggctgtggcagccataccatgttcaggacatggaagagcctacttagatggtcttattcttaaagggcatgaacatgtacatgtttgtgagtgcaattcatgcaatggt

SEQ ID NO: 20187 - DNA, 450 bp, Glycine max
caacccctaatgccaagggcttgttgatcctctttcagaaatgttacatatttagagcctggggagagctcggatattgaaacaaatcctggttctaagataagtgttaaggctacagcaggaccagttcttggacctccatggcaacgtccagagaatgggtatattgttacatccccacaaggccaattgtctctctactacgaaccccactgtgtatataatcaaagtttcactgagaaggaaagggcagatattgtgataacaccagtcataaagcagcttttgcccaattttaccttggtttcgggacaagaagatgcagtgaaacttgcaaagctgcttcaagccaagttcattgtgccaatgaaaaatggagacctagatagcaaagggcttcttgcaagcttaattagtggtgaaggaacagtggaatcatttaaggaactt

SEQ ID NO: 20188 - DNA, 454 bp, Glycine max
atacagttcactctcagtctttgccttgcatccattgtacctgagagtacaggcactttctaagaacatacccgaggcgatcaagaaagagattgaaaaggcaaagcagcaactagatgggaaggatgttgattatgaggctacaatggctactaaactctcaattgctaagaaagtttttgctcaagagaaagatttgatacttaattcaagttcctttaaggagttcttttctgagaatgagggttggttgaaaccctatgctgctttctgtttcctgcgggacttctttgaaacatcagatcgcactcaatggggtcattttgctcattactcagaagataagctagagaaacttgtatccaaggacagcctgcattatgagataattgccttcccctaccattcaccgccttcatttccatttacaattatcagaagctgcagaatatgc

SEQ ID NO: 20189 - DNA, 903 bp, Glycine max
actcgaggacaagacatatgccgttacctctataatcatcagaacaaggatggtgggtggggttcgcatattgaaggtccaagcaccatgtctggctctgtcttgagttatattactctgagattgctaggtgaggggcctaatgatggacaaggggaaatggagaaggcacgtgactggattctagggcatggtggtgctacttatataacgtcatgggggaagatgtggctttcagtacttggagtgtatgaatggtctggaaataatcccctgccccctgagatatggctccttccatacatgcttccatttcatccaggaaggatgtggtgtcactgccggatggtctatttgccgatgtcctacttatatggcaagaggtttgttggtccaatctcaccaacagtattatctttgagaaaagagctttatacagtaccataccatgatatagattgggatcaggctcgcaatttgtgtgcaaaggaagatttgtactatcctcacccacttgtacaggatattctttgggcatctctacacaagttccttgagcctattctgatgcattggcctggaaaaagattgagggaaaaggctattatttctgcattggagcatatacattacgaagatgagaatactcgatatatttgcataggtcctgtaaataaggtgttaaatatgctttgctgttgggtggaagatccaaattctgaggccttcaagttgcatcttcccaggatttatgattatctatggattgcagaagatggcatgaaaatgcagggctacaatggaagtcaactatgggacactgcttttgctgtccaagcaattattgcatctaacctcattgaagaatttggtccaactataaaaaaagctcatacctatatt

SEQ ID NO: 20190 - DNA, 846 bp, Glycine max
gacggaattgtgaattatgtgaagtcacaaagtcaaaagcacagtttgacagtatcatgtcatgggcaactggtggtggaggttcaaaggaataacctttttgttgccacctttatttttatttaagcaccttggtttctccgtctttcttggagacacacacacgctctctcatgactctaaccaacttacccaccaactaataatctttttaattccaaaaaaccaaacaatgcctctttttctcacttcacaacttttatttctgtttgagttctccaatggcagctcctgcaccattctctctttcttctgatcccttcgcttccaaatctgccacatcaacgatctttggtcctgccgcgctgaaaaaagggaactttgagcaaacccatttcggaattttcacggctttaaggagaaatcaaggtttcactttaaaggcttcaatggggcctccgggatttacagagaaacttaataacaacaagctaaagactttagctgatgctgaagatgggtgtgatatatttaatgacctgaaagataggtttttaagttttaaaaagaataaatacatgaaaaatattgaacagtttgaaaatcttgcaaaggttcaaacaccaaagttcatggttattgcttgtgcagattctagagtatgcccttctaatgttttgggatttcaaccaggagaagcattcatgattcgcaatgttgctaatttggttcctacctttgagagtggacccacagaaacgaatgcggctcttgaatttgcggtgaactcccttctggttgagaacatcttagtcattggccacagctgctgtggtggtatacgtg

SEQ ID NO: 20191 - DNA, 404 bp, Glycine max
atctgctctctcatacattcaactagctgctgtttcaacaagtaaggagttatcagggtactctatggtggactttgatattctgtaattgatttgatggaatcttccaaccaattcaatgaatcatttaggcaaggtcttacagctggatatgtctttgctgcaacttttgtcatagtactttatatgtcctcttgtctccctgcacaacttatcaagaacaggaagaatagaacgggtggatttaagaaagcaacacagaagcgtaagttgccgcttcaggagttgaaacaagaaaaaaacaaagagaaacgaaagagagcaagacagatagacagagatcttcctgtggagttgctagagagaagaataaagatcaatgacattggatggttgacatgtaa

SEQ ID NO: 20192 - DNA, 462 bp, Glycine max
ctcgagccgattcggctcgagcggttcaacagttcgagggtctgaacaacatgggcaacggaaatatgcttgttatggaaaagggttttggtggaaggtatagcttactgatgcatcatggagaagaggaactaagacggtttggattcacggatgaaatgctgattgatcaggagtggcataaatttgcaaagcctgctgatctgaattacgattgtccaatggtgaattccttctttccccacctcagtgacagtgaagaaacatgcaggtacgattacgaacaaggagggtgatcaacaatttataccaacttcatagtcaatgcataggctacaactacaaagaatattttttagttaaataacgataatgaggagtacgttcttgtaactaattagtagaaaaagttgtacccaaaaaattaaatatatatatataaaggaagaatcagatgtctgt

SEQ ID NO: 20193 - DNA, 336 bp, Glycine max
gattatctctatagggattcagatgtggagtcaatgtctgatggtcacaataataagacagcttacgggtataatgatgtctttgatgaaccctcgatgggttgggctcggtatgctcataccatgagaatatgggtttataactctggtttcttttatataaggcctactcttccttcaattgagctcttggatcgtgttgcaactcggctttccaatgacccaaaatcatgggatcaggcagtttttaatgaggagctctttttcccttcacatcctggttatgatggacttcacgctgcaaaaaggacgatggatatgtacctttttatgaac

SEQ ID NO: 20194 - DNA, 424 bp, Glycine max
gattgttcaacacttaccttataacataattgggcaggcatcctccgcattgtggagcaattagggtttcatcctccgcattgtgaagcaatcgagcgcaggcatcaattgggaaattagggtttcattttcttcttcttcgtttttcttattactcaagcaattcgttctctcgaacatggaaccggaagggcaaaagggtacggtgaacccgtcggcaatgttagcttctctgcttagtaggagagccaaacttcacgaagatcttcgcagcattgaaaagcaggtgtatgatatggagacaagttacttacaagatcctggacaatgtgggaatgtattaaaaggatttgaaggcttcctatcttcgtcgaagaacactgcactttgaaaaggtctagaaagtttcaacctgaagataggc

SEQ ID NO: 20195 - DNA, 426 bp, Glycine max
ggatgcatacaacacaacacgaaatatgagacttctctcatctatcgttataatttactttgatacgaagctctctcgatctaattttccgattaacactaacaatgacggatgcagctgaagacgctacacgacgccgtaatgcggtggccgagtaccgcaagaaacttcttcaacacaaggaattggactccagagtacgatccgtcagagaaaatttgcgtgcctcgaagaaagagttcaacaaaactgaagatgatttgaagtctcttcaaagcgttggacagatcattggcgaagttcttaggcctctcgacaatgaacgcttgattgttaaggcaagcagcggacctaggtatgtggttggctgccgcagtaaagtagataaagaaaaactgactgctggtacgagagtcgttcttgata

SEQ ID NO: 20196 - DNA, 473 bp, Glycine max
gaaaatttccttcctcactgttcactctgtttcctcaaacctcaaattttcaaaaccaatctctccagccttcatttatctagtaattggtgttgagggcataacatcttcctgaatcctgaagttctaagcaattgttgaatcttgaagaaatcagcatgcgttggttgggtcttttggttgatgtgtatcgtcaagttgtacgcttgaacttatattgcaaagttattctataggtctccaataccataaacccttttactttgttacttttggagtttagtcccttatttttaactactgccatggaaggcaaccactgtttgatcatttcttcagatgagtatagaattggctgaaggttaggaagtgaagatagagcctggtattttgtatcttcagtgttctttgtcatcgtctcatatagttctatagttctagctgattttgattttataattagcttggttcct

SEQ ID NO: 20197 - DNA, 678 bp, Glycine max
gcaactccaccacagttgcagaacagcacaaacacaagacagtgccaaggaaaaatactcagattcagcgttagtgtgtgattgtgaggctgttgagtgttgagtagggaagaaaagtgaagacctcaaaacaacgagctaaatcaggctcttgaggacaaccaagagaagaagaagagtgaagaagatgactggaatgacgaagaatcaaccgtcacagtggtggtggcttgatagccacaccacttctaatcgatccccttggcttcaatccactctctctgagcttaatgagaagacaagggcaatgttaaagttaattgaagaagatgcagattcctttgctaaacgtgcagagatgtattacaagaagcgaccagaacttgtgagcatggttgacgatttctacagggcacaccgctccctagctgagcgctatgatcaagtcaagcctgatactactggaattggacacctcattactggggggtcacctttcgcttcagcaaagtatcagttggagaagttgatgactttttcagataacggatatgatacctattctgagcattgtgatgtgtacgagtctgaagaatctgaagttgatgatcctgaacaagaggaggaggaagaagaagggaccaagtttcttgataaaagcacaaaaaaggagcaagt

SEQ ID NO: 20198 - DNA, 505 bp, Glycine max
cggctcgagggccaggttgaaggcggtttgaaaattgcgaagggctctctctctctctctgcctccactcaatttagccaacttttcagatattttcactgctcaacttaagactaagcatgagcagcagcagcagcagcagcagattgtttgagaatgggtgaagtgccggctgtgatgcaggcggcgacgcagggggaacagagcaacaatgcctccgctgttcattgggagcgctttctgcctcggatggtgcttcgggtcttgcttgtcgaagctgatgattctactcgacagatcattgctgcacttctccgtaaatgcggttacaaagttgttgcattttgtgatggcttaaaggcatgggagacattgaagaacaaagcatttgacttagatctcatattaacagaagtggatttgccatcaatatctggattttcacttcttactttaatcatggagcatgacatttgcaaaaacattcctgtcataatgatgtctt

SEQ ID NO: 20199 - DNA, 717 bp, Glycine max
cttttcagatattttcactgctcaacttaagactaagcatgagcagcagcagcagcagcagcagattgtttgagaatgggtgaagtgccggctgtgatgcaggcgacgcagggggaacagagcaacaatgcctccgctgttcattgggagcgctttctgcctcggatggtgcttcgggtcttgcttgtcgaagctgatgattctactcgacagatcattgctgcacttctccgtaaatgcggttacaaagtgatgtcttctcatgattcagtaagcatggtgtttaaatgcatgttaaaaggtgcagctgattttcttataaaacctgttcgcaagaatgagctaagaaacttgtggcagcatgtatggagaaggcacgccataagcaggcctcctcaaaatttaacactgccggagattgaacttggttttgctgcagaaaaccatgctgcaagcaatgactctagtggttctgtggcttctacaccaaaagatgatgaatgcagtgagaaaacaagtgaggctcatgatatttgcccatcgccatttttggaagctgagagtacctacatggaaaatatgcaggatatattgcagctgaagagctcttcaaatttgagcaatattgacacagtgaagcatgaaaactctaccaaatgtgaaagggagtcagataagcataatgatgaagctggagagaaatcactgtttatattg

SEQ ID NO: 20200 - DNA, 435 bp, Glycine max
actcaattcagccaacttttcagatattttcactgctcaacttaagactaagcatgagccgcaacttgtttgaaaatgggtctagtggcggctgacaagggttcgatgcagacccaagaggaacagagcgacaatgcctccgctgttcagtgggaacgctttctgcctcggatggtgcttcgggtcttgcttgtcgaagctgatgattctactcgacagatcatttctgcacttctccataaatgcagttacaaagttgtcgcattttgtgacggcttaaaggcatgggagacattgaagaacaaaccatctgacatagatctcatattaacagaagtggatttgccatcaatatctggattctcactttttactttaatcatggagcatgacatttgcaaaaacattcccgtcataatgatgtcttctcatgat

SEQ ID NO: 20201 - DNA, 378 bp, Glycine max
cccggtttgaccaatttgcaatatctggatctccgttgtgattcagctataatagcagaagatgtacaagggatgagtatgcttgaatgttttggaggaatctttctcggcaaagataattacaatagttacgtgcaagaaattctggacagaggtcatggacctaaaacttatgatatccatgtagaagatgttagggatctgatatttgcatttgatattgatgatccagtttctctatacgaagatcatcaaaatgtacggttttggcaatgcgaaggattgctgtatttactacccagagacctttagaaattgtgtttggaacgcatgatcaatggtgtgcttatatgggctctgcataaaaggttttttttt

SEQ ID NO: 20202 - DNA, 519 bp, Glycine max
  unsure (1)..(519): unsure at all n locations
gtttccgagtttttcatgtcaataaaataaaaaggaaaagctggagaggagaaagaagcttcaatgcttttgttgactcanagcattcaaatgttccttcgatcgtagaaaacactctgcaatggcggttactgttcctgtccccagccattcctcaactctctgctttttttctttctctaactcacaagtgttgttgtttcggaggagaggttattaaggcggcatcatggggagtagggctaggcaggggaggagattgcagacgatgatgaagtgcatgtgcctgagggagccgttgaagggagaagatgaaacggttccttcttctgattctcttgcaatcagggaattctattcttcaacggcaagtgggcgttctggccccgacggagaaattgagatgatggggtcgggttctgggaacatggatgaagccgaattgtccttgcgtgagagtggcatcatggacatcatgggcaatgaagaagcaagagctttgttaggaaaagatgaata

SEQ ID NO: 20203 - DNA, 280 bp, Glycine max
atagagcttcgctgctcatatgtaaacggacggacacctatctcgattccccagtaagtgcctccgccattcaaacggaattttcgcaagaaaacaagttccggccaccatggcaggaaagtttggattaggggaaagtttacttccatgtaaggtcgaagaagaccatcacactgagcaaggatttatggcaggtatacgtgtcacttatcaaccggttgttctggaatcgaaccgaaacccatgccttgaaatagaagaaggcccaccaaggatgaat

SEQ ID NO: 20204 - DNA, 873 bp, Glycine max
gtcccgcgaggcgagaggaagagaagagggagggagtttcatgaacaatctatttgtgttgttgttggaatactgagctgagagtggtggagtcaggatatcatatcatgtgcactctctcactgccatgcctctcttattctcttcacactcacacttaccagtctggacgcttctctcccccttgttcttttatcttcacacctcatagacgctctcacagtcacttcctgactccatgctcctccctcagacagagagaaagagagagcaaaaagcaactaggcaagatcaacactgccccgtctgagtctggcttgaagcgcttgtttagtcccaataacaacaagaccgaagtcgaaggtgacgccgacgccgacgccgacgctgacctcgacttccaggatggaaccgccttgaagggcaccctcttggccggtctcttgctcctcggtgttgttggcggttttgcctccgttggctatatctacaaggaccaagtcaattccttcttgaaccacctctccgtcttcattgaaggttatggtcctgctggatatgcattattcggtgccggttatgctggattggagatccttgcaattcctgccattcctttaaccatgtcagctggacttctatttggatctgttgtcggcactatcatagtctctatcagcggaacagtggcagccagtgttgcttttctaattgcaagatattttgctcgtgagcgaattgtaaaactagtggaaggaaataagaagtttgttgctattgacaaaagcaattggagaaaatgggttcagggttgtgaccctgctttgtttggaccccctctgttgccattttctttgggggaattatttattt

SEQ ID NO: 20205 - DNA, 472 bp, Glycine max
acaatacaacacaatacactctccattgtctcactcctgtttcttctcttcactcttcatttcctctcactaatctctttctttgatccatattctgccataacagcacacgataactaaaccacaacaacacttgaagttagttacttgtactttctctgaaactttgattgtgtcaaaatgacgcagcagaatgtggtagtgtctgatactaaatcaggagtttccttaacggttttctcaacaacacaaaagccaccggcggcgccaggagggtacatttccattccaaggaggagggttttgaagaaccttgaaatcaatggaggccaaagaatcaatgcatgggttgagtccatgagagcctcctctccaacccatcataaatccacaccttctttgtctcaggagcataactcttggattcttcaccatccatcagcattagacatgtttgaccaaatcattgacg

SEQ ID NO: 20206 - DNA, 891 bp, Glycine max
ggttggttttacttgaacttcattactaaaagagtttatatatagtaatgaatacagatactaaaatgtttgagacacgcctatagctcaattcagacaattagttcaagaacatgcatttgatgttccatgacatatttttactaacccacattagcttccaaggtatatatgttcagcttgataccatgaacagtgatttaacttttattgctacaatggttgcacattggctaccatctgtgacattattgttctgtgtacttgttctatcattcaatttcaggcttagtcctatgaacataaattatttaccaatctcgttttggatcctaatgacatccatgtatgatttcccttttagctcacgtttaaggaatccattgaggtaatctgctactccaatccttttgaacaatgcaggtctttcaggagtaacgaggcttggtgctggacctataactctgctcatttgaggccggtgaaacatggcaatggaaatcctctctttttctgaattgactattccccgatgttcaatgcttcggtaaatcccattggtcagtatctccaacatgtctccaacgttgatgacaaaagcattagagagtggtttaacaggaatccactttccatcttttcttatttgaagcccttccacttcattgacttggagaaggatggtaagggcacccgaatcagaatgcggattgattccaatgactcgttctggttggggacatggagggtagtaattcatcctaattccttggctaggatcttcaaataactctgagagttcatttgttttgatcttgagagcttttttcataaggccaatgattgtgatgcacatttttctcagctctaagcaatagttctctagctcgt

SEQ ID NO: 20207 - DNA, 338 bp, Glycine max
gtggaatcttatgtgaaaggaaaagaaaaaaagatcttggcgtcaaaccctaatcctagaaatgggtacctcgtcggaggtttgcaagtggagtttccctaccaaccatatggatctcagtttgcgtttatggctagagtgatttccacccttaatctagttcagaaagaaggccattgtcacgcgttgcttaagtctccaagccgtactggtaagtccctttcgcttctttgttcctctctcgcttggcagcaccacttaaatctcaacatgaccatctcaagcccgcgtcggaagcaaccaccgatcctttggctataatggcgaatttgttcccg

SEQ ID NO: 20208 - DNA, 261 bp, Glycine max
attattgtacataagcagtagtatgataggttatacacatgatgggaaatgttttgtctctttggtagcataggttagttgattcttatgtaaagagaaagcataccacatcaaccaacgagcttcttgatggctcatgagatgtcgaatttattaaatgtggcaacacgttattcgatgtaaaacttttgtccacaaactttgtattcaaactattaaattcatttatgaaaataaccatacacatacttttagttgact

SEQ ID NO: 20209 - DNA, 383 bp, Glycine max
ggattctggaaatataccaatatagtatgccgtactggtacgcacgtgtgacatcgtatgctgcaaaccgctgaagttacttccacttttattaccgtgcgagaaatagcattatcctaagcgaaactacgcggtgctttccatgcatacccagatgagttgtaagtatggatttcaagtatctgctggctggtatgtgtgtttgggcttggtttggatcaataacttttgcaacttctaatgatgggaggttgatgaggattggtctaaaaaggaggactttagaccttcagtgtcttaaagctgcgagaatcaaagaggctgggcatcacagggatttagggggggttaatagaaactgttgtgatgaagatatagtatat

SEQ ID NO: 20210 - DNA, 450 bp, Glycine max
catccaacagaaatcaagtgatgaagtcccaagacttgccggaaggatgcgtcgcacacatattgtcgtacatttgtactcctgaagacatagtcaggctctccctcgtttccaaggccttttattctgcagctgattacgacactgtgtgggatcgttttataccctctgatttctcctctaccatttctccactttcttcctctaactctaagaaggatctctatttcactctctccgaccgtcccaccatcatcgaccagggtagaaagagctttcaattggaaaagggaaaagcgaactgcgaagaagtgctacatgctttccgctagggatatttctattacatggggtgagaattttatccaaaagttaaatactttttacatattctcatacaatttttattttgtataaaaagtttaatgttgtattgtagatcttttcaca

SEQ ID NO: 20211 - DNA, 405 bp, Glycine max
cccacgcgtccgatccaacagaaatcaagtgatgaagtcccaagacttgccggatggatgcgtcgcacacatattgtcgtacatttgtactcctgaagacatagtcaggctctccctcgtttccaaggccttttattctgcagctgattacgacactgtgtgggatcgttttataccctctgatttctcctctaccatttctccactttcttcctctaactctaagaaggatctctatttcactctctccgaccgtcccaccatcatcgaccagggtagaaagagctttcaattggaaaagcgaactgcgaagaagtgctacatgctttccgctagggatatttctattacatgggctccaacgcagggagaggcttctcaatattgggagtggaaaagcctacc

SEQ ID NO: 20212 - DNA, 543 bp, Glycine max
ttcttgacgaaagatcatgacatacgccttggtgattttggacttgccaaaatgttgacttcagatgatctaacttcctctgttgtgggaactcctagctacatgtgccctgagctccttgctgatataccttatggctctaaatcagatatttggtccttgggatgttgtatatacgaaatgacctccctcaagcctgcattcaaagcatttgatatacaggccctgattaacaagattaataagtccatagtggctccactgccaacaaaatattctagctcgtttcgaggtcttgttaaaagtatgctgcggaaaaatccagagctgaggcccagagcttcagagctgcttgggcacccacatcttcaaccttatgttcttaaggtccatctcaaaattaacagccccagacgaagcacattgccagttcactggccagaatccaactacatgaagaaaactagatttttggtgccagaagatgatcctgtttccatctatagggataagcgacattctttcaccaatgatcggactcta

SEQ ID NO: 20213 - DNA, 743 bp, Glycine max
aaaaccattgctttatgaaagaacaacaaaaagaaaaaaagaaaaccattgctttatggtggtgacaaagtaaggtttgtttcatcaaaaagatggtggcacccattgctgtttcttctccaaagtccacacttttgcagaaccccatctgttttggtgactcaagttcaagttttgttggggggtctttgaagggtctttgcttcaatctgaaacgaaggcaacaaagaagagaattgaccaatttggttgttgcttcatccacctcaagtgttacaaatagcaatgctagtggcaggttttacttcaacatcactggttttcctttcccacttggtccttttctcaacaggcgcactattaggactgaggctgtgaaggattgtatatggctattcgaacaagagcaggcattaggcttcagcagtgtttccacaaacattagaatgacagttatcaaactcaaatctgggggcttatggatccatgcacccattgctccaactgatgagtgtattcagcttattaaagaattgggggctccagttgaatatattgttctccctacttttgcttatgagcacaaagtatttgttggtccattttctagaaaatttccccgtgctcaggtatgggtggcaccaaggcaatggagttggccattgaacttcgcattagaattcttcggcattcttcgtgctaaaaccttggaagatgaagatttatctgcttcttgggctggt

SEQ ID NO: 20214 - DNA, 537 bp, Glycine max
tgcaaacagtcatcatccatcttttgttgttgttgttgatctccgcctccctcctcaactcactattccacccaaacgcaccgtcttttcattcacattcctctcactcagaatcagatcacaccaccgcaaaaccctaaattcaatttttcgatcttgcccctcgcagccgttgtggaaatggggagcaggagggacgaggcgcccgccataaacagcaccaacgtcttcgccgccctcggaagcctcaagaagaagaagaagaagcccgagaaggaccaccagggcccgtccaagcccaaggacaagaaggacgtcttttgggcccccgcgcctctcacctccaagtcatgggccgatgtcgacgacgaagatgacgacgactactacgccaccaccgctcctcccgaatctgtttgggccgcgccgaccgtcactcaaaacgacgccgctgctgctgaggaaagtgagagtgagttggaaggtctcgatgatgcagatgatgatgctgaggatgaacaagaaaatgaaaatgac

SEQ ID NO: 20215 - DNA, 362 bp, Glycine max
ctctttttgttgttgttgatcacctcctcaacccactattccaccttcttctacgtttttctcttcccaccccttagtctcagaatcagatcacaccaccgcaaaaccctaaattcaattttctccatttccgatcttgcccccggactgcaaatggggagcaggagggacgaggcgcccgccataaacaacaccaacgtcttcgcggcgctcggcagcttgaagaagaagaagaagcccgagaaggaccaggaccagggcccgtccaagtccaaggcccaggacaacaagaaggacgtcttttgggcccccgcgcctctcacctccaagtcatgggccgatgtcgacgacgaagatgacga

SEQ ID NO: 20216 - DNA, 211 bp, Glycine max
aatttgtagaaagtgcagctgcgaggcagcgaaagagaaagggatttacttctgagatcaaagatggaggacgagaaaatagttggatacgttacggcgttccttaagaagaaaggcttcacgcaaaccgagaagcttttccaggaagaatttcaacacaacaagtccaacactttcaatttcgttctggaacccgacattgccaaccacc

SEQ ID NO: 20217 - DNA, 507 bp, Glycine max
tgatatgatggctaagaaatataagcaaaagctaccaccttctgtcaccactcatagattagaacccctaccaaccagttgcttgccttttgaaaatgaagcactttatgcaaactggaagtggtttaagtttgaaaaataatgatgaaacaagttgacacaaaaatcatgatatttttcactgacagaagctcaagtgagagaacttgacattgcgtgggggcaatacctgtgtggaagaaaacatcaagagcctcagtagttttggttttgatgcagtcattgttctcctgatgagttccatgaagatcactggctattatgtggtcaaaagggtcaaagcataattcggtgttttttttgtcacgaagaaaggttctttttcctttctttatatcttaatttttcaggtgccgggcgtcattttatagatagattcatgtaaattctgggataaatttcgagcttaattttgattaacgctcagagtaaagcttttgcactatc

SEQ ID NO: 20218 - DNA, 530 bp, Glycine max
gttgaagcttctttaaataacagtgaattacggaaagattcagccattctaataaatgagatgggggtcaatggagattgttatgatggtagaaacaaggaagttaacccagttcttggcgaaagctcagaatgggaaattcaatgggaggatcttgatattggtgagcgtattggtattggttcttatggtgaagtttatcgtgctgattgcaatggcactgaagttgctgtaaagaagtttctggaccaagatttctctggtgatgcgctagctcagttcaaatctgaagttgagatcatgataaggctgcggcatcctaatgtcgtgctcttcatgggagctattactcgctccccacatttctctatcttgacagagtttcttccaagaggcagtttatataggctattgcatcgtcccaatcttcgacttgatgagaagaaacggttgcgcatggctctagatgtggctaagggaatgaattacttgcacacgagccattctcccattgtccaccgagatttaaa

SEQ ID NO: 20219 - DNA, 380 bp, Glycine max
ctcactttcactattttcaaccaggcataaaaaaagatacaacccagcgccaaaccctaattctccgaaagttgatttctttcaggaaagttctttctaaatccacgcctcctgcagacccatatcgctttttttcttcattctaattctgcgccaccaaatttgcgatctttctgtgcctccgaatcatggagaaggaagagaacgaaccccacgttcagaaaagtggcggcgaaagcgaacacgctgaacccatagtgctcgttctctttcaagtgcccgagtgttacgtctacataatacctccaagaaagagtgcagcttcttacagggctgatgaatgggatgtcaacaaatgggcatgggaagggatattaaaa

SEQ ID NO: 20220 - DNA, 773 bp, Glycine max
ctttcgcgttttccgtctcgtattaaaattggttgtagcgtacgctcactatgaacacgcgcctcttcatcctcattgctctctcactctcttcttcttcgccgtttcttgtcggccttcgctgttcactctctcgctaaatttcaaaaccctagaaccgcttctctaaccgcaaatcaaaatcaaatcgaatccaatccaatcgacgcgctaggtatttggtgttcggctgctgttttctctcctagctgcttctgctgttttatggaaaaatgtcttatcagttaactgtcgagatgtttcagttcccaccatgtggttcgttgcaaacagtatgagtgcttccatggtgtgttttggaaggagtcggatcttgttaggttaatttgtacttgcaactgacaaactcagcctcagcttaatctttctatatcttatagatggatcgtcgtgatacttcaggatttgtcagcggggggtgcattaaacacctgtagacacatctaaccctaactttgtagataagcatctcttttttgacccggaggtcaggaaggttgtactgtgaaattcataaataggattagatattcttttggcagtggtttcatcacttccatggatgcgaggttcaagaactttttaggatttgctgctaatcattctgcaaatgcattcaagattttgggcagttcaatgcaaattgaaggaaggggagctgattatcatggtacagataccatcttacgacttgattcccctggttcttcaat

SEQ ID NO: 20221 - DNA, 407 bp, Glycine max
gttgctgctcatcctccgtaacctccgagctctgcaccgaagaacgaagccatggggtaacctaacaattctccattactctttcgatatgcttcactgcatgtttatgttccttttatgttttatttgctttgttcccaaaaattgaacgcacacgaaggaacttgagctcgtgaatttatatatgcttctggtagatctgtttctcatcaaataatctcatcgattcttcccgtgtgaaaactttatattttctacaatgggattatgtatatttatcggtgtagtgtttatgttggttttccccccgttttgtgcaatgtgatttgcttcttcaatggtttttgtttaattttatttggtcgatgatctaaagcttccttgtaaatatcgattatttcattgat

SEQ ID NO: 20222 - DNA, 742 bp, Glycine max
gatttttctttcgtacaagaaacaaccaccagactgcgatctccattatttgagtactacttcgttgcataaagggttcaacatttcgtgcgtgcacagtgccaaatcgtgatcacatgaacttaatcttaatctgttagctagcttcaaatgcgttattgggtctcacaaaaaggagctagctaggaagtgaatactactattatttacctgccacacacacagaaacaacatagatctagaagcaaaggcaaagaaggatttcaagctcaattgtttagcttaattaatttccttcaatcaaatgattcagaagatgtttgaccccagccgttctggtatgacaagaagctcctcccatgtagcctccatttatgacaatgatttccttgagttggtgtgggaaaacggtgaggttgttgtacgaggaggttcatcaaacagatcacgaaagacaaacgacgaaagaatacatgaagatgccagcattaacaaaagaacaaggttaaacccattattatactcacttgaagatcactttccacctcaaagggactctgacatgagcacttcacaccaaagcaatggccaagattcgtgtggtcaatcctcccaaagcaagcttcatgaagaatttgcaaacttacttaagcccgttagcataggcaataatcacttacaacagtgcttaccttcatctccgctcaagaaacaaagaacagttgattcaactcaaacacca

SEQ ID NO: 20223 - DNA, 1516 bp, Glycine max
cattaattcacatagtttgtttcttgtcccattaccgatattcaaaagatgggcatccaacatgtgctggttttgccatttcctgctcaagggcatgtcaatcctctgatgctcttgtcaaaaaaactagctgaacatggcttcaaagtcacttttgtcaacacagatttcaaccacaagagagtgttgagtgcaacaaatgaggagggatcagcagtgagattaatctcaatcccagatggtttaggccctgaggatgacagaaataacgtggtcaatttatgttcggaatccttaagcagtaccatgacttctgcccttgagaaggtcataaaggatattgatgcacttgatagtgctagtgagaaaatcacaggtatagtggctgatgtgaacatggcatgggccttggaactcacagataagctaggaatcaaaggtgctgtcttctgccctgcttcagcagctgttttagtcttgggtgagaacattccaaacctcattcaagatgggatcataaataccgaagggttcccgattataaaagggaaatttcaactatccccagaaatgccaattatggacacagctgacattccatggtgcagcttaggtgacccaaccatgcacaaggttatatataatcatgcgtcaaagattatacgatattcacatttaacagattggtggcttggaaacaccacaagtgaccttgaacctggtgctatatctttgtctccaaagatcctaccaattggtccactcatagggagtggtaatgacattagatcattggggcaattctgggaagaagacgtctcttgcttgacctggcttgatcaacaaccaccttgttctgtcatatacgttgcctttggtagctctactatttttgaccctcatcaactcaaggaactagctcttggacttgacctcacaaacaggccttttctgtgggttgttcgtgaggatgccagtggaagcaccaaaatcacatacccagatgaattccaaggcacttgtggtaaaattgttaaatgggcacctcaacaaaaggtgttaagccaccctgcaatagcttgttttattagtcactgtggttggaattctaccttggaaggtgtgtccaatggggtacctttcttgtgttggccatattatactgaccaattagttgacaaggcttacatttgtgatatgtggaaggtgggtttgggattcgatttggatgacaaagggctgatatcacgttgggagataaagaagaaagtagaccaaatccttggagatgagaacataaggggaaggtctcaaaaactgaaggaaatggttctaagtaacattgcagaagggggacaatcctatgagaattttaacaagtttgtggagtggctcaaggaataaaaatgtatttgttgatgctctgatgttgtgaacaatgtttatgatgttcctgaaaaatattgaacatttaaatttagctacctgatataggcaataaattagaattcatgtt

SEQ ID NO: 20224 - DNA, 487 bp, Glycine max
caacacccaagaattgtgctttagctataataaaaaaaattaagaatgatttaattataaattaagatgtgatctaaggggagataagaccatgtgaggggtcctctctgattttgctccaaaaccttccccttcttctgatttgtagagactaacccaagaaagaaccaaccaaaaacaagtgcttcttagagcttggtatagctctctctctctctctctctctgagcgtgtgcgtgtgagggcacatgcagagcagtgagtttgagacagagaaagaagcagttcaagattgttgttcaattttgcaaaaaactgcccatcaagtacttttgttgctgtttttttttttttttttcgattttgcttcttatccaacccgaactctaggcataattgggattgtatctgaactatattcaggtttaacctcaaaaatttcctctccaattccgatcaaaatcgacgaaacaagggtacttaaccc

SEQ ID NO: 20225 - DNA, 317 bp, Glycine max
gatgatttatatgtattggtatcaatttgggccgtattgatcctccttcatcatagctgcccaccaagtatttgatgcattgcccaactgatatcctcccccacatccagacttctacccaattccaataccatattagaaagagaacatcaactatcaaatcttaacaaagtattcacgagttatcacccaccccttttcctctttgtctctgcatcgcctcaagatgacctcatccgagacccttgcattcatggagctcgccatacaacaggcaaagttagctttggatgttctttgagtgccccgtggatgtg

SEQ ID NO: 20226 - DNA, 465 bp, Glycine max
atcctcatgaaaaacttaggtattccagctatctcagaggtggaaactcgggaaccaatatattatggtcttgctgattgtagttcgaaaaagtcattggtaaactggactctgccatatgcccagcgctacattcataaatttcatattgataaatatgataaactcaagcagtctggttgtgatattttcaaccatctgaatgtcattggtgctgagaagctgttctacaggaatgttataaagacctgtggcagtgtatcaaaaaaaacgagtcgaatgtaggtgtcttttgcagggaaacattttgtacaccattaaagaatcagattatcattccttggttatggagctctctagtttgttactaaatgggacttctgaattgcacttggcaaatttccttcatatgataacaaccatgacagaatctggttcctctgaggagcaaatagaatttttcat

SEQ ID NO: 20227 - DNA, 616 bp, Glycine max
ctagtccgaccggttctactacgtatcggaggttttatcagcttaacttgcattcgaactggtcttacccagcgccaaccggctaggttcgttgcaacttaattttttttttttttttaaaaaaaaaatcaaaacagagacacaaccctagctttcacatccgcgaaacccgtcaccaccggcgcacccaggccaacgttgttctcttatcgtcgccggcgctcctgattgtcgtgctgtttggacactcgagcacgtcgccctcgcacacgctctccatctcgccgtcgcactcgcacgttctgagtttcagtttgaaccgaagcaaatatggtgcggcacaagcgtgggaggccttcaccggaaaattctccgtccaaacggagaagaagacgttctccgttggaatgtcgtaggagatgggttgtctcttccaaagactcttctaattgcacggataaggttctggttgtttcatacaatatacttggtgttgaaaatgcatcaaaccatccagatctgtattctaacattccacatagtttcttggagtgggacaggcggaaaaggctcatacttgaagagattaataactataatgccagcatactgtgct

SEQ ID NO: 20228 - DNA, 417 bp, Glycine max
agatgtgctagtttaaaactcttttttacagtactaattaactctgattccataaaaacaaaaaaaattaactctgattaacagatacgtgagtggaagcactgggaagactctattggcaatgacaataaaaatgaaacacaaccagttttggaaccaacagtgactcatgttcaccaacacgcttttatccagaatcgttttactggtcttggcaaagattctgctgttctgggttgggtgaaatcattcttcaagcaattttatggatctgtgaccaaattagattatgtgacattaaggcttgggttcattatgacccactgcaaaggaaatccaaagtttaatttccataaatacatgattcgtacccttgaagatgatttcaagaaagttgttggtataagctggtatctt

SEQ ID NO: 20229 - DNA, 422 bp, Glycine max
ctctttcttctgtctcctacccctgcctcatagcctcagcttctgccccaaattcacatcttttccttccacaaatcaaacctccgtcgccaacaaagcccaagccctttgaactcattctaccttccttaaaaacacaaaatccccaaattcacatcactcattcccttccagtccacgccacagaacagtcgccacccccaccctcataggcccacctgaactctacaatccctaccccacccaagccccagccccaaccccaaccccaaccccaacccaaccccaaacagtcacaagaaccactccaattgaccctttcatagatcaaatggtggtcaaattcaacaccatgtcatccccaccacccccaaacatgaccctaacagaaaacatgtctcccacattcttcacaacgggaa

SEQ ID NO: 20230 - DNA, 537 bp, Glycine max
gcgcagatggattccaccgagctcttgtctatgatttcttcccgaatggttctcttgaaaagttcttagcaccaccggacaacaacgatgttttcctcggttgggagaaattgcaacaaattgctcttggtgttgccacagggattgagtatctccatcttggttgtgatcacagaatacttcacttcgacatcaatcctcacaatgttttactagatgaccacttcctccccataatcacggattttggacttgccaagttgtgtcccaaaaatcaaagcacggtgtctatcaccgcgctcgagggaacgttagggtacattgcccctgaagttttctcaagaaacttcggtaacgtgtcttacaagtctgacatttacagctatggaatgttgttgctagagatggtgggaggaagaaagaatacaaatatgtcagctgaggaaattttccaagttctataccctgaatggatccataatttgctggaagggagagactttcaagttactattgaggatgagggagatgttcaaa

SEQ ID NO: 20231 - DNA, 495 bp, Glycine max
ctttctctcatccaatccaatcaacaacgcacccttcatctcttccctttcactcattctttgatcccctttttcttcacgccaactctctcttctgggtttctttcattttcagaatctcattatcacctcactgtgattatcttctaattccaaattggtgtttggttgctgagaaactccaagaaaaaaaaaatacagcttttccgtgtattgatgatcctctgttcactcagaaaacttttctcttttgtgtgtagagtctagtacctcagactgcatgacccacttctgaattttctttgttttcgtcgtccttcgctagaaaagctataaaagacaagattttttaatctggatcttgccttcttctttttttccttactcataccatatttcgcttcattttttttttttttactttgttgagacttgagagtgttggaaaatgttggggactgctctgcaatttggttgtgttcgtggtgatgatcg

SEQ ID NO: 20232 - DNA, 995 bp, Glycine max
gaaagtatggagcctaatcagagtttccggccctttgaggggggaatggagatgtccttggatacgtctgatcatacatcagatcttgagagtgaaaggacaaatggaaaaccaaagaataaacttcctcgtcctcgtaatcctctaattgatgctgttgctgctcatgacaaaagcaagcttaggaaggttactgaacgggttatgcctcaaattgcaccaaaggtagatgaaagagattctttactagaacagataagaacaaagtccttcaacttgaagcctgctgtgactacacgacctagcattcaaggtccaaaaacaaatttgaagtttgctgccatcttggagaaagcaaatgcaattcgccaggctttggctggaagtgatgaagatgatgatgcagattggagcgattcttgaaattactgtgagaggtgttctcagctggtcgatgttttgatactatggttctgtcttgagccaggtttatctagtcgtgctcccctgtaatgaataggaaatctacctgaaatgcaaaattctttatcctggtgtgttcatacatgatactgtgaactccatataggatatagctcctgctcttagtattctttgttcacatatatatgcatgaacatttatactagcatgcagattgatgcagatccaatttcggaggcgaaactcacttcaagacaactcgggttcagcgtgcaagcgctgtacaggtccagatccaagctatcaacaaatttccccatgcctcccgttcatataagcacatgtatatttgtgttgtgtcataattttttgatatatagttatgattatccaattttggaattctgtgatgtagtgtttcgagttagtttccccatttataatgcagttcatctgtgtccagtatagtaacatgtatacgtgagtaaaatcatttcagtgtacagttttcaccatcaactttgcccatcgatttactctttctttatgat

SEQ ID NO: 20233 - DNA, 459 bp, Glycine max
cgaaggtagatgaaagagattctttactagaacagataagaacaaagtccttcaacttgaagcctgctgtgactacacgaccgagcattcaaggtccaaaaacaaatttgaagcttgctgccatcttggagaaagcaaatgcaattcgccaggctttggctggaagtgatgaagatgatgatgcggattggagcgattcttgaatttactgtgagaggtgttctcagctggtcgatgttttgatactctggttctgtcttgagccaggtttatgtggtcatgctcccctgtaatgaataggaaatctccctgaaatgcaaaattctttatcctactgctcttagtcttctttgttcacatatatatgcatgaacatttatactagcatgcagattaggatcgatgcagatccattttcggaggtgaaattcacttcaagacaactcaggttcagcgtgc

SEQ ID NO: 20234 - DNA, 830 bp, Glycine max
caggaattcatggagcatatgttgaccgtgatgctttaactgctgctggggaaaaagttgccaatgttgattggagaaaaatctcaactgaacattttgaagctgccgaagcaggccttataacaaattactatggagtcaaattaatgtgtgaagcacttattccccttctagaattgtcaggcacaccaaggattgtcaatgtttcctcctccatggggaagttggagaaaataccaaatgcatgggctagaggagccctaagtgatgctgagagcctaacagaagaaaaggtggatgaggttttgaatcagtttctaaaagattttaaagagggttcattagaaaccaaagggtggccacatgctttttctgcatatatagtctcaaaagctgctttgactgcctacacaaggattcttgctaagaagtacccatctttctgcatcaatgctgtttgccctggctttgtgaaaacagatctcaactacaatactggctatcttagtgttgatgaaggtgctgaaagtgttgtaaggttggctctgctacctaatggaggtccttctggtctattcttttctcgaagtgaagtggcaccattctgatccaaagactgttgtgtacttgaagaggataaataataagcatggtttcatgataagacatgtatcaaatttgtacctagcacaacaagaaaataagccacatgtctgatcactgatggctgcccatcattgatgagaacaaccctatagtgaattctagatattacaatgacattactaatttgagaaatctaattttggatataaaaaaatctgtttgtt

SEQ ID NO: 20235 - DNA, 621 bp, Glycine max
caagttacaaattacaagaagtaagtcacatccatgtagttatagtgattgcgtttgtgactttgtaacttggtctcgtggtatggagagggtatagcttcaaaggactcgtctctcggttcctcaggctctgataggctataggatttgctggcggtgattacaaatcacaagcatttatcatggtccttttcccatcttttgtgaatggattggtaagaactgtgtcaatcaagaaagagaagaattgtcaaaaggaggatggaagaaaagctgtggaagaattggcaaaggaagcaaggaagaatgaattgctattgagttcatctggagttgtgaagtcaaccaaggccaacaattttgtttctgtgttcactaataggggccagaaaggagtcaatcaggatcgtcttcttgtttgggaggaatttggttgccaacaagacatgatgttctgtggagtttttgatgggcatggtccatggggacactttgtagccaaaagggttaggaagttagtaccagccgttttgctatgccattggcaggaaaatctggctgcaacatcacttgacctggattttaaaatggaagctgacaaaaatatccatggattggaca

SEQ ID NO: 20236 - DNA, 251 bp, Glycine max
acaaactgcaactgatatatcagatatacataacttattttctcacgatcaaataactactaaaactcaaaactgtattctattagttttctgtttgtgaaatagatgtgaaaaaagtgatgaggttgaaggtcctttgctagcagttaccatggtcctttttccatcttttgtgactggattggtaagaactgtgtcaatcaagaaggagaagaattgtcaaagggaggacggaagacaagctgtggaag

SEQ ID NO: 20237 - DNA, 390 bp, Glycine max
tttgaaaccttctaaactcactctctcactttctcactccctcactccctccgttgacgtttttgttttctttttctctgtgttctgaagaagttttagggtttcgttttgtttctctcttcggccacttcaggctatggattcatttgagccagatggaaatgggaaggagtcactgccaccaccacctcctgttgttccctctgatattgtacctctcaaagcagaggaggtgctctgtacccctaccgagcataataagaaaaaggcttcccgacttccaatagccagatctggtctgggatcacacggaaatcgcatacaattactaacccaatcactttcaaagttaatgtcgctaacaatgataggcatttctaccattatagt

SEQ ID NO: 20238 - DNA, 471 bp, Glycine max
cgcgactctcgatactaaccaccaggacaaccaacccgccagaatggtcaacctccgcactcagaagcgcctcgcggcctccgtggtcggttgcggaaagcgcaagatctggctcgaccccaacgagaccagcgaaatcgccaacgccaactcccgtcagaccgtccgcaagctcgtccaggatggcctcatcatccgcaagcccgtcaccatgcactcgcgtgcccgcgcccgggagctgaccgccgctcgacgaattggtcgccaccgtggtttcggtaagaggaagggtaccaaggacgctcgtatgccaagccaaatcgtctggatgcgccgtctccgtgtcctccgccgtctcctcgtcaagtaccgtgccgccggaaagatcgacaagcacctttaccacgagctgtaccacctgtcccagggtaacaccttcaagcaccagcgtgctctcgttgtacacatcca

SEQ ID NO: 20239 - DNA, 548 bp, Glycine max
gcgcgagctatagtgagcaattcactttagagaacaataagcaatctcagttgtcgatattatgtgcacatgcatattgaaatatcgagttttattttcattaacgattgaaattacttacttatcctctgaagtgaatctcatttttgaggcgctaaatttcttgttcctcggtacccttgtaatcaagaaaacaccgacaatttctggcttctttccaggtttttctagtgaagcacaggcaggcttctctagaactacggatatagaaaaaggccatagttattattgtgcagcagctgattgcatcgtgggtgaaacaaaagtttctcatgtaaagggttttgttatgcatctggtttgactatgtgcttatatcaaatctataagcatatgagacatttttaatgtattgttccttttttcttttttgttcaattattttagctaaacggttctatttccaaatttgtacacctattgtgacttgaaagactataattacccctcatactatctgcagttctcgagctgatgtaatccaaaaa

SEQ ID NO: 20240 - DNA, 420 bp, Glycine max
gaagtgttgaagaaccgtcacaaaagattcaggaagcaatgcagtgatatgaaaatgatagttggtcaaaagggatttcagtgggatgggacacaaaacatgatagtagctgatgataaagcatgggatgaatgtataaaggcccatcctgatgctcaacctttcaaaaaaagagtcattccgtattatgatgatttgtgcataatttatggccatgcagttgctgatgggagatacagcctttcgtgttttgatgtagattttgaatacgaagaaaaagatttggatgacaagactatgactagtaaaggagtggatgatcaaactcccccagcagttgttaatcaaggtagaattgactggtctccaatgatggaccattttttgttgaattatggtggaccagtgtgtaaagggaac

SEQ ID NO: 20241 - DNA, 589 bp, Glycine max
tccacgcgtccggtctgttttgcattccacgagttgctatttggtgaggtgaactcacacgtgtggagggtgttaggtagaaggaactaggaagagaggcagcgcacgaggtggtagcactacatgtttcttttcattcattgttgaacttcaacttcaacttcaacttgaacttgaacttgttgcatttggatctcatggcagaagaagcactactgcaaaacaagcaggttctattcaaagggtacatagatggtgttcctaaagaaaccgatatggaactcaaggtcgactcacatattgcgctcaagcctcccccacaaggctcatcagctattctcgttaagaacctttatctctcttgcgatccatacatgcgcggtcgcatgcgtgatttccacggatcttatatccctccttttcttccagcccaggcacttgaaggatttggtgtgtctaaagttatacactctgataatccaaattacaagcctggtgatatcattaccggcttcactggctgggaagaatatagcctcatccaaagaattgaacagcttcgaaaaattcaccccgatgatgccattcc

SEQ ID NO: 20242 - DNA, 479 bp, Glycine max
ctcttctctcttctctctctagggttgccttccttctctctcctttcctcctccttcccgttcgccggccggaatcctattttccggccatatttccggctgcctgcaattccccttcaccttccgaactcaatcaatcttttcaattcgaagctgttgctatcttttgcagcgatattggagcagagagagggaagatggcaagtcaaagcggtgcctctagaaggagtatttcgtcgtcgacgaggagagcctctgaatcaggggcgcctcgaaaatcaatttcctcttcgcgacctttggcattggccggagagcggactgtgaaatcattgcgacttacaaaggccctgacagtacctgaaacaacaactgtctatgaagcttgccgtcggatggctgcccgtagagttgatgctctatggctaactgattctaatgctttgctctgtggaatcctcacagacaaggatatagca

SEQ ID NO: 20243 - DNA, 441 bp, Glycine max
  unsure (1)..(441): unsure at all n locations
atccaaagccaccaaatcagtttgtggcataaaatggagccaagggagatagcttttcttctgcctttctctatttctctctagagcttaatttctttctctatcaccccttgcttgcactttccatcatattttggatcatttaagtttttgacactaggcgaacattattgtattgaaaacactttcatttgatcttcttcttgttcatagtcttatgaccatagagatattttaataagaagatcggtttgtttctgatatagtttctagtgtttcatcaagtcacgtgcttcttattgttttttttttacaagcttacaactcangtacccatcatatatacccatataacagaattattaggaaattnggtgtttttgtccccaaagaatgaagggccaaaataatcaataccccttaaactctgtttccaagttt

SEQ ID NO: 20244 - DNA, 321 bp, Glycine max
ggtttatagaaacgttgaaaccctgacgagtgacgtggatttcatttcgcaatgggattctgggggatcgaagtgaaacctggcaggccatgtccttatcacgctgacaatgtgcgagggaagcttcatgttactcaggctactctaggcattggctcatcatcggagaaaagcattcttcagtgctcttctggacacaaaagtccagttttcttgtgttcattgctaccagataaggttgagtcatgccctttgaatcttgagtttgacgcagatgacttagtggcattctcagttgttggttcacgagcatccaccttt

SEQ ID NO: 20245 - DNA, 355 bp, Glycine max
  unsure (1)..(355): unsure at all n locations
ttattttgcccttttcgctcagggattgaagtgaaacctggcagaccgtgtccttatcacgctgacaatgtgcgagggaagcttcatgttactcaggctactctaggcattggctcatcatcggagaaaagcattcttcagtgctcttctggacacaaaagtccagttttcttgtgttcattgctaccagataaggttattttgcggatgatgatggggatgatcttagggatgactatgaatatgattcatggggagaggatattgaaggaactgagtcagaggagtcgtctgaatatgatagtgaagatggatatgctgatgactntatcgntgatagtgatactgacatgta

SEQ ID NO: 20246 - DNA, 618 bp, Glycine max
caagagctttgacgtcgcatgccccccttccttaacctcggatttcggctcgagctactttggcattacttccaaggtttttcttccagaaaaacacaaaaaaatcatctgatagtcaaatagttgtagtttcttggtacttgttttgggaagctttcacaagaggttctttctctggaaattcccgttcaactgggcaaatctcctttggcattttggagtctttgagtgactccttttatcctatcaagcaaatatcctttgccattaactttcctgtttcattagtcaagatatattgttaataaactggcttactatctgtgacaaacatcagtatcaatcagacacattttgcattgtacacaaatatcctttgaagtcaatatccatacatctgttgtggacctcaataccccctggatttcaatgcttctatttgcttgagaaggcatctagtagatggatgctcacatgactgatttggattgggagactttcagtgacggcagcagcagtgaggatcaagaggatattgattttcaatatggtagacaagctcggagcatattatcaagtttagaggaaagcattgggaggatagatgattttctctca

SEQ ID NO: 20247 - DNA, 516 bp, Glycine max
tgcggtttgtgtgggatccaaaagtttatgttcctttattcactctcaattttccaccgtattcggcttcgtcatttccccaatcttcaatgtattcttccattctcgctttgaaatacctaacgcgggccaccccctttgttcggtcgtgctcttatttaccttcgtcttccctttggcagagttacgtgattattcgccgcagcaaacttctccaaggttatttttttccgctgattctaagctcaacgccttgtaccaattcacaccccaacttgatctgtgactttggccttttcagctacatttcaagagcttcttcatttcctttttgttttttgggggttttttgttccctatttttttattctaatacagtgatatcctagtacgtgtttttgtttttgttttaattgcagttgttgtattcgctgctaaactattctgggtctgtttttttttttttttttttgttgagcttcgttcaagtttgaattgaaagttttctcctttact

SEQ ID NO: 20248 - DNA, 399 bp, Glycine max
gtggcccagtattgatcatcagaagagtcatgtttgctctccagttccctctctgtaggtaggagttcttttctctcaaacattccataaaacccatgatttttgtggacaccaccttatactgctttcaatttacgagttaccttggctttgagtttctttcagtcattttcacaaacacctttcgctcagcgttaaagaaccgaagaattttgggttattttattttggcgctctgtccaatttcgatagactgaagtgtgcattgctgatttatcaaatcatgatcagaatcagatttaacttaactcttttctctgttgagctatcacgcatcagccatagctcactcactgttactcatagtcataaagttgagcacccccttatgagtgctac

SEQ ID NO: 20249 - DNA, 450 bp, Glycine max
gaaaataaccatgataaaatagaaaatctagagggttctcctgcggatcaggatgaagcaggggacaaattagcagatgtacttgatgatgatgatgatgatgatgatgatgaagccagtgatagtcatgggagtgaaggatctttgcataataaagtggaagagaatgcaaaagaagctgaggaagaacctattgttaaatctgaaactgatataaaggtcagaaacaaagagtcttctgatgaaatcatcaataaggggaatgatgcatctgaaaatactgagggattatcaagggaagaattgggccggcttgttgcttcacgttggacaggagaaaatactgataagccaagtgctgtacctgatacaacattagacaatgaagatcgggaagatccaaaggggagaaataatgaggaatatgaaggctatgcttctgaaactgat

SEQ ID NO: 20250 - DNA, 1107 bp, Glycine max
ctctctctccctcgcaaatgcgattcgttcgtgacgcgttcggcatttagaagataagaaaaataaaccaatggcggaggaaaaacggttccgaatagggtacgcactgttgccgaagaaacaaaacagctttaatccgagactcgctcgtgaatctcgcgagatctcgagggatagacctggttcgagtcgacccgaaccggaacctaacggatcaaggtcccttcgattgcgtcctccacaagctctacggcgacgattggaagcgtcaattaacggagttcactgttaagtaccctaatgccgtggttctcgactcgccggaatcgatcgagaggctccacaatcggatttcgatgctgcaggtggtgtcggagctgaacatcgacgacgggagcgagacgttcgggattccgaagcagattgtgatatacgacaaagagacgctcttagaccggcggaactgggaggcgctgaattttccggtgatcgcgaagcccttggttgccgacggcagcgcgaagtcgcacaagatggcactggttttcaaccacgacgggttgaattcgctgaagccgccggtggtggtgcaggagttcgtgaaccacggcggggtgatcttcaaggtccacgtcgtcggcgagcgcgtgaggtgcgtgaagcggaagtcactgccggacgtccgagaagacgagctggtgagggtttcggaggatttgcggaggttttcgcaggtgtcgaatttggccacagatgagagaattgacgataggtattataagatgatgcatttggatgacaccgaaatgcctcccctgagcttcattactcagatagctcgggggttgaggcgtgccatgaagctgaacctgtttaattttgatgttattagggattctcgatgcgggaatcgttaccttattgttgatatcaattacttccccgggtacgcaaaaatgcccggttatgagactgttttgacagactttttctgtgatgtgttgtgtaagaaacagcaatggggcgaggactgttctgagaatgctggttttgatggtatgatgatgggtaacaaagatgtgaggcggatgatgtgatggtgatgag

SEQ ID NO: 20251 - DNA, 419 bp, Glycine max
gtagggtgctcctcattagatggacgcaatttattggagtcttccaaaattgctcttgataaaggaaagcttgatgatgctgtgaattatggaacaaaggcattagctaagatgatggctgtttgtggaccctttcatcaaaatactgcaagtgcatatagtcttctagctgtggttctctaccacactggagattttaaccaggccaccatctatcagcaaaaggccttggatataaatgagagggagctagggcttgaccaccctgacactatgaaaagctatggggatctttccgtcttttattatcgtctgcaacacattgagttggctctgaagtatgttaatcgtgctctattccttctacattttacatgtgggctgtctcatccaaacacagcagctacttatataaatgt

SEQ ID NO: 20252 - DNA, 622 bp, Glycine max
gacagcttccacagtaccggaagcaaaaattctcggccagattccctaacatgttgcctgaggcattggacctgttagaaaagatgctgatctttgatccaaacaaacgcattactgttgatgaggcactatgtcacccatatctttcatcactccacaacatcaatgatgagccagtctgtcccaggccattcagttttgattttgatcagccaacgtgtgctgaagagcacgtgaaggagctcatttggaaggaatcagtgaagttcaatccagatccaccatgccagtaattctttcttatttgtataaatgtaacgagataaacctctttccccttaaatatattgcctgtgcatccgccagatgatttgctagagacaaattgaagttctcttccttgtaatcttgttctagaccaacaaggatatggaaacaaatttctcctggaaaatgggtaaacgttagaaatccagttggacaggcctttataagagtaataaaaaagctgtgttgtattgtgctcgctcaagtttgctttgggaggaatagggtgtcacagagcctctctcttatttcatgacaattatcttttaatgtcactttccagctttagtgttta

SEQ ID NO: 20253 - DNA, 497 bp, Glycine max
gaggctccagaagtaatagaaggaaatcgccctcctgggaattggccagcggctggtagagtacaaataaatgaattgcagatacgttacaggcctgatgcaccactagtacttcgtggaatcacatgcacatttgaaggaggtcacaaaattggtattgttggcagaacaggcagtggaaagtctactcttataggcgccttattccgtctagtggagccagcaggtggaaaaatcattgttgatggaatagacatttgttctattggacttcatgacttgaggtcacgctttggtattatacctcaggatcctactctttttaatgggacagtcagatacaatttggaccctttatctcaacactctgatcaagagatatgggaggttctagggaagtgtcagttgcaagaggctgtccaagagaaagaagagggattagactcttcagttgttgaagctggagcaaactggagcatgggacaacgacagctatt

SEQ ID NO: 20254 - DNA, 410 bp, Glycine max
gtcagatgctggtcaaggattcctctcagcgtctaccattgcacaaactccttgaacacccttggattgttcagaatgccgagccctccggtgtatataggagctagtgcacctcattcttttattgtattttcttaatcgtggaaatcatcaaaaatagcagctgcttctaagtatttgacaacatttggtatagagatgatgcaaactatttgaagaagttagttgcttgctgggttaagagaagattttatatttgttaaaacatgtagccgtttggttgagatgtcacttgttatttgattgtaatttcctactacccaaggcagagctaattattttgcggtaactccaaaaggagccgcccgtgttatcatcaaaaaaaaaaaaaaaaaaaaaaaagggggggg

SEQ ID NO: 20255 - DNA, 591 bp, Glycine max
cacgtaataacaataaataatcataatagtggcacactaattcaccactttccacacccaactgcgtaaagctcaaagctttttgacagtttgagcatttcagacaaacatgggggatgatggaaagaagattagtggagagggggggttagtgaaggttgagccaaaacccagcaatggtttcacctcaaaagtggttgatttgttggagaaattggtggtgaagttcttgtatgattcttcactgccccatcactacctcactggtaattttgctcccgtgagtgagacccctccaaccaaggaccttcctgtcaaagggtaccttccggattgcttgaatggggagtttgtcagagttgggcctaatccgaagtttgctcctgtagctggatatcactggtttgatggagatgggtgcgtgattctcttcctatgtgcaaacatatatttctttgaagtttgttatagatgtatttttttgtgtcaatagacgggcaatatttgctgaatcttattattggaatttggaattgcttggggatattgttgagcatcaaacttcaatcaaaatctctctagtatttttgg

SEQ ID NO: 20256 - DNA, 316 bp, Glycine max
cgaagtttgctcctgtagctggatatcactggtttgatggagatggaatgattcatggcttgcgcatcaaagatggaaaagctacatatgtttcccgttttgtgagaacttctcgccttaaacaagaagaatactttggaggctccaaatttatgaagattggagatctcaaaggtctattcggacttttaatggttaacatacatatgctgagaactaaatggaaagtgctggatgcttcttatggaactggaacagctaatactgctctctatatcaccatgggaaacttctagcactctcagaagcagataaa

SEQ ID NO: 20257 - DNA, 744 bp, Glycine max
ctattttggtgtaaaagccgaattcacactccctagtccctaccacatatctccccacccatgagcaatcccggcaaaatgtataattattgaacagcggaacatacgatgatcacccgccaccatgcctttgtccgctaaaattagttcgctgcaacgacaaatacaaaggttgcgtatcgtgctagtgctactactactacttgctgctactgtcactgcttgctacacctcactcttcagcttcggagattccctcactgataccggcaacttgtacttcatttcccctcgtcagagccccgattgcttgctccctccctacggacaaacccattttcatcgccccaatggacgatgctccgatggacgccttatcctcgatttcctcgccgagtctctggggcttccgtatgtgaaaccgtatctgggtttcaagaacggcgcggtgaaacgcgggaatattgagcagggagtgaattttgcggtggccggagccacggcgctggaccgcggtttctttgaacaaaaggggttcgctgttgatgtgaccgcaaacttttctctgggggttcagttacattggttcaaggaattgctgccttctctctgcaattcttcttcaagctgcaaaaaacttattggcagctccttattcactgtgggacacattggacgcaatgattatggctatcctttgtctgaaacaaccgcatttggagatcttgtgacttacatacccca

SEQ ID NO: 20258 - DNA, 359 bp, Glycine max
ttttcgcgtccgcccacgcgtccgcccacgcgtccgctcggtttcaactaatctgtttggagcagggtcctctgcttccactactctatttggtggagtatcctctgcttcaacgacgccgtttggcggagcgccctcagcctcattaccaccacgccgtttggtggaacgccctctgctcctacggcgccgtttggcgcagcttcctcaacgcccacaacaactacatccacgactctgttcggaggagcgtcttctgcttcagcgacgccgtttggagtagcgtcctcagcttcaacgacgccgtctggtgcagcgtcttcagcttcaacgacgccgattggtgcaccgtcgtctgc

SEQ ID NO: 20259 - DNA, 1350 bp, Glycine max
ctcctaccccacaagatgagatgagggcaggtatgagctactttcatggagacaatttggaaaggtgtaccacagtttctgcgtcgggtagatacagctctgaagaacattggaattaatgaacgtgtcccatataatgctcctgttattcagttctcttcttggatgggaggagaccgtgatggtaatcctagagtaacccctgaagttacaagggatgtgtgtttgctggctagaatgatggctgctaatttgtacttctctcagattgaggatctcatgtttgagttgtctatgtggcgctgcactgacgagctacgtgttcgtgctcatgaactccttagctcctcaaagagagatgcaaaacattatattgagttttggaaacagattcctcccaatgagccgtatcgtgttattctcggtgatgtaagggacaaactatataacacacgggaacgtgctcgccaattattagccaatgggacctctgatatccccgaggagactaccttcacttacgttgagcagttcctggagcctcttgaactatgctatagatcgctctgtgcctgtggtgaccgaccaatagctgatggaagccttcttgatttcttgcgccaagtttccacatttgggctctcacttgtaagacttgatatccgtcaagaatcagataggcacactgatgttatggatgcaatcacaaaacacttagagattggatcataccgagagtggcccgaggaaaagaggcaggagtggctcttgtctgaactcagtggaaagcgccctctctttggccatgaccttcccaaaacagaagaaatcaccgatgttttggaaacattccgtgtcatttcagagcttccctcagacaacttcggtgcctacatcatatcaatggcaacatccccatctgatgtgcttgctgttgagcttttacaacgtgaatgccatgtgaagcagccactaagggtggtgccactgtttgaaaagcttgctgatcttgaggccgctccggctgcggtggcacgtcttttctctatagattggtacagaaaccgcattgatgggaagcaagaagttatgatagggtactcagactcaggaaaagatgcaggccgtctttctgcggcttgggcgctttacaaggctcaagaagaacttgtgaaggttgctaaggagtatggtgttaaacttacaatgtttcatgggagaggagggactgttggaagaggaggaggtccaactcatcttgctatattgtctcagccaccagacaccattcatggctcacttcgggtaacggttcagggtgaagtcattgagcagtcttttggagaggaa

SEQ ID NO: 20260 - DNA, 1207 bp, Glycine max
gcttcatccccagaataaatcacaccccccattgcaatgacccccagcaacaactcttctgcatcttcaaactcccttttggcttttctaagtgctgtgattctttctttcatctttttcttcaggtcctaaagcatacttgtgatttcctccattatttcctttgagatttggacagtagttggtcatacacccaattctaaattagagttgggatgtctggaggagtagtttgatacagtgatgcatctccacagatacttgagtaaagctatatgctgtggtgtagatttttactatggagttaaatgcaagttatgacgtcgagcattcacattctacacaaagaatacagcatgagctgtggcctctagatccaattgatccaaagaaggcaaagtttccatgttgtttggtttggaatccacttcctgtggtctcatggttggctcccttcattggtcatgttggcatttgcagggaggatggagttgttttagatttttcaggatcatatcttgtgaatgttgatgattttgcatttggtccagtggcaagatacttgcaacttgatcgtagacagtgttgcttcccccctaacctatctgcgcatacatgcaagcacggttacctgcatgccgagtatggtactgcaatcgcatgggacgatgcgttacagacaagtttgcggtattttgagaacaaaactcacaaccttttcacttgcaactggcactcgtttgttgccaactgtctgaatcggctgtgttatggtggatcaatgaattggaacatggtgaatgtaggagctttggtaatatttaaggggcactgggttgatttcaggtcaattgtaaggtcttttctgccttttgttgtggttgtttgcttaggtgtttttatggttggatggcccttcttacttgggctactatccttctctctactcttaatagggtggtttctattgggtacttgcctatttagaaacctattagagtgctagatggtctcttgaattgaaagatggtcatgatttgtgttccctcttctccaaataacaggtttaaatgttgatattggaacaagaaatagttatctcttatggaaagttaatggaatagcttttgaaagtgtacttgatgcttcgttagaccgtgacccatgcaattgtattgactaattggtggaactgtaaagcaacctg

SEQ ID NO: 20261 - DNA, 302 bp, Glycine max
ttcgagcgattcggctcgaggcggaagtgcgaagaaattgactctgagcacgttgctcttcttctgcacgcagcaggttgcaaaatgagaaaaggaaagggacaagtgggtgataatagtcaacctgtaagagagatgttgaggtggacggatgagatggacaaccgtctactaaatgcaatggttgaagaagctcgagcaggtaatagtaagatagatggaagttggacaccacaagcttacacaaaaattgtccaaaccttgagagattcaggattaacggatgttacaaaaaaatcatg

SEQ ID NO: 20262 - DNA, 426 bp, Glycine max
  unsure (1)..(426): unsure at all n locations
cggctcgttcccacatctctcgtatacccttttgtctttcttcactaaggtatcttattgagagttcaagactagtcctttgatacgttgaatttctttcaagtattgagattcatttaaaaaatcaattttttgatatcttatacatacatctattgggatgtctagaaccgtggagatcacagttttgtcggcagagaacctccaaatgaacaaaaaacccattagagggaacgcatttgtgacggttcaatccgacgctagcaacgacacaagtgccacaacagtggattctgaaggagggagttacccttcctggaacgagaagcttgtgatggacgtgccattgcatgcaaggtttataacccgtgaagtgaagtgcaagacatcatcggcggngtcgaacagtatcggagtggcgagaaa

SEQ ID NO: 20263 - DNA, 412 bp, Glycine max
ctcgctcgccaaaagaagcagctggagagtgagacagcgcagagggtgaacaagcgtcgtctggagcgcgagcgagggcgcagggaagccaccgcggatatgtctgaggacttgtcggaaggagagaagggagatccggtgagtgacgtgtcggctcacggcggcgacgccgccaacaaccgagccaggttgcctagaatcagttccgctgatgccatggagacttgggccaacagtcagaaagggaagaagctctacattgtactcatcagcattcatggcctaattcgaggcgagaatatggagctaggacgtgattctgacacgggtggtcaggttaagtatgttgtggaacttgcgagggcattgggatcaatgccaggagtttatcgggttgatttgctaactagac

SEQ ID NO: 20264 - DNA, 449 bp, Glycine max
cccgcgtccgtaagctcggaattcggttcgggggacaccaaaaaatctaccaaagttggcccgtgctactcaggagcttcggcttaagcaggagactcctgacccacctgaagctttgaaaactgttcctagcctttctctacaagatattcctaaagaacctattcgtgttcccactgaggttggggatatcaatggagtaaaagttttgcagcatgatctcttcaccaatgatgtcctttacactgaaatagtattcaacatgaaatcattgaagcaagagcttcttccattggtgccactgttctgccaatcattgttggagatgggaacaaaggacctgacttttgtccaattaaaccaattaattggaagaaaaactggaggaatatcagtttatccattcacatcatcagtgcggggcaaggaagatccatgtagtcacatgg

SEQ ID NO: 20265 - DNA, 514 bp, Glycine max
gtccactcttaacaactttgtttctgtaaatagaagaaatcgtgatagtgccattagagccttatctgaagtgcctgttcttagaaatcaagctcctcattgtcaattgaagactgcaaatactgaaacacaggacttgattacaagatcatcactttgttttgaccaaagtgatgaacctgctagggcgagtgagattgaatctttgaagcaacttaatcctgataatgtcttctacaaaaatgaaaatgcagtttcttttaagggtgactcctctgttagagaacctaaatctaatatggaattagatctaaagaataatacacctctaggggatacagcatcaattactccttctagcattgatatgatcactacggatgttttggcctcagaccctccattacattcatcacctgtgtggttaaattcttgcaagtcttccagtaacaagatatgttccaacatgcaattttcttttcaagagcttaagaaaaggagagagaagaggttt

SEQ ID NO: 20266 - DNA, 829 bp, Glycine max
tgaaaaggcttcacctaggctatattttgatgaacagttgaatagcaagagatatgagacaataacacctgataccctgacaagtgaaatcccacgtagcactgaaacctctaatcgaaagattgaaatacttgaagctttgagtgaatcaagtacaaaggaggttgctaatgaaggcgacaatgtggagagtaaaggtgaaaaccccccaccgttggctggggccaatgtcatgaatgtcatattggttgcagcagaatgtgctcccttcgtcaaaacaggtggtcttggagatgttgctggatcattacctaaggctttggctaggcgtggacacagagttatggttgtagtacctcggtatagtcattatgctgacgcacaagatataggagtatggaaacgatacaaagtagatggtcaggacatggaagtaacatatttccactcttatattgatggtgttgacttcgtttttattgacagtccaaacttccgccatttacaggataacatatacaggggaagccgagaggatattctaaaacgcatggtgttgttttgcaaggcagctgctgaggttccttggcatgttccatgtggtggtgtttgctatggagatggaaatttggccttcatcgcaaatgattggcatactgctttgctgccagtgtatctgaaagcctattatcgtgaccatggtataatgaagtacacaagatctgttcttgtgattcataacatagcacaccagggtcggggccccgttgatgattttcgcttcacggacttacctgaacactacatagaccttttcaaattatatgac

SEQ ID NO: 20267 - DNA, 429 bp, Glycine max
cctccacaatgcaaacacaatccacttcaatcttcattcccagattacccttccttccattcccctcacaacaattacaactaccaaacccttccctcacaaccgtcacttcccacgcatccaatgctgcagcaacaacaacaacaacaacagcatcgaaatcgacatggtgaagaacagccaaggaatctacgcccccaaagcctccaaggtggtcgtcctctgggacctcgacaacaaacccccccgcggcccaccctacgacgtcgccatctccctcaaaaccctcgccgcccgcttcggcgaccttgtcgacttctccgcctacgccaaccgccacgccttcgtccacctcccccagtgggtcctccagcaacgccgcgaccgcaaaaacctcgacatcctcgaacgaaagggaatcatcacccc

SEQ ID NO: 20268 - DNA, 442 bp, Glycine max
gcctgtaaagacacaaaaggtgatctaaagccttataccaaaaggaggttttccaaaaaatccagaaaggaaaatacatctgccattttaataacagacacctctttgtaaaagagcacaggaaaaaaaagaaagttttaacaaaccaagagtcagaaaataattcaagtctttacaggtcatttaacttgaaattttaagttagctacaagttaatgcaggtttcgcctttgtgcaatttgatggtggcactactggtcttccattggcatttatcaattaaaaactacgtcctcttggaaagagattggttttggagttctaaacatgcgcattgtagtgtcaaaacatttgcctttgtaaatttcggttccatttttcctaaattgaaacatttttttcttcaatatatttgcagccgtgagttgcttttcttttttta

SEQ ID NO: 20269 - DNA, 583 bp, Glycine max
agaaaagtcgagctgcacggccagctgttgatcaagataacgggacagctacgcaaaccaaagttgacaccaagacacacaacgtggctagaggaacccaggatgacactgagggggataacaaagttttgacacctaactctgatgcaaatggaaactctaagacagttgtgacacccaaacctgatcctgaagtgggtgaaaacaagccattgaaatcagattcaaacaaggagaacgtggaggtgccagaatctccttctaaatccaaagttactggtttggtagtggataattcagcccagaaggacgtagatgtcaaacaatccaaggttcagaccactaaaaacacaaagccaaatattgactctgacaatgtagcgtcctcctcctcaactaacaatgctgacaaaactggtggatttaatacgaatatgccaatgaaacagcaaggggaaaagaaacctgctgcacagcctcatgcatccaggactgttcttgaagagaatatagtactaagtgttgcattggagggatcaaagaggacacttcccattgatgaagagattgacaatgtgacatc

SEQ ID NO: 20270 - DNA, 407 bp, Glycine max
tcttcactcaaattcgaagcgaaggagagaaaagaagaagcgaagtgtgtttgggaacaatggcagagcaaaagaaccggtggagctgggacgtcgccggctttgacccgtggaagtcgtctacgcctccgcagtcgccggcggcggcggaacacggcgatcggaaacctagtgcgccgttggtgcggcggtactccatttcggccacgtcggttcttccgcaatcgaagcacgctgtggccttcaagcttcagcggctgaaggaccaagtcaagcttgctaaagaagactatttgcaattaagacaagaagcaagtgaacttcaagaatattcaaatgcaaaacttgatcgagttacacgatatctaggtgttcttgcagagaaaacccgcaatctagatcaagtt

SEQ ID NO: 20271 - DNA, 420 bp, Glycine max
tttaaactcgaaagaaaaccagcttgttgttaatgtcttcggggtccgacaccacccaaaaacgacaacttccacttcaacacttgaagccaaatttttttttcaaactccaaacaccccctcctctctctctctctctctctctctctctctctcttatatgctttctttcttcaccaaacacaacacccttgtgatctgtctgtctctgcgttttcagtacgcatagatcctgctctattgttttctgaacccactcttccactttcaattccttagccaacacttgattatggggtccatcaaagatttcttcttcaatgcactctaacttaatcacctttctttcataatcataaccaagctatggattttaagattttagattttccactgcaaccaaattcactctcggaaaat

SEQ ID NO: 20272 - DNA, 567 bp, Glycine max
ttatttgctgaggaactaaggatggggaacagtgggtttttgtattacaatcaagcaagtggaggaccctcttcttataagagtactcttgggggtcatcaccaccaagcattgttggcacagacccaccagggacatgttgggtttggggcagcatcatcgtctacatcatccttaggtgttgtgaatgcgttgaggaattcaaaatatgccaaagctgctcaggaattgcttgaagagttttgcagtgttgggagaggccagttcaagaagaacaagttcaataggcaactctcaaaccctagttccaatcttcgaggtagcggcggtggtgcggcggcgcttcttcgtcttcctcaaaggatgttcctcctttgtcagcagctgatagaattgagcatcaaaggaggaaggtcaaactcctaaccatgcttgacgaggtggatcggagatacagccactactgcgagcaaatgcacatggtggtgaactcattcgacatggtgatggtgttcggcgcggcggtgccatacacggcgctggctcagaaagcaatgtctcgtcact

SEQ ID NO: 20273 - DNA, 465 bp, Glycine max
ctcgagccgctggattatggggtgcatgaaaacaatgatgaccttgacaatgggaaaactagtctgccccaaccttctttttctcattttggtcatgtgaatgcactcgcaggtttcttggaggagcacaaagtatatgtgaatagcttcttggggaatttgaggtttgcaaaggtgggtggtgtgccatcaagtgtgcctggagaagaaagcccttcaacaaacggagagggagatattagtagtaacaatggtaataatggtaatggtaataatgaaaacaaggatgaaaccggaggaaattcgccgcagaaggttgccaacaacatattcagtattcctctctcgaatgtggagcgtctaaagtcgacactttccacagtttcattgacacacttgattgaactgctaccgcagctggggagaacatctaaagaccatcctgataagaagaaactaatctcg

SEQ ID NO: 20274 - DNA, 544 bp, Glycine max
ggaggtaagtatagtgagttatccatctggaccaaccttacagcaatgagtcctttggttcaagtgcagaacatattcaaaaattgaacctagttagttaagttagtcttttttctcaagattgaagtcaagagagacttgtttattagtatttcttggccaaaacacagaaaagtagaaattgtggaatttagagtttgtggctgtgagcttcagagtataagtgtggtagcaaggttaacatttccttgactatcatttcttttccttctttctctcccactaaagatgtgaaatgtacaatgaatataggttttgatatggaacatgtagaatataaagtataaacagttttaatatgggcctatattcattgtacgtctccactcaagttaaaggaacaatgggctacttggatccagattattatactagtcagaagttgactgaaaagagtgatgtctatagttttggagtgctaatactggagctgattactgcaagaaagccaatagaacgagggaaatacattgtgaaagtggtc

SEQ ID NO: 20275 - DNA, 610 bp, Glycine max
aaactatactgcaaaagtttctgattttggtctctccaagtctatcttagatgaggaaaaagattacgtctccactcaagttaaaggaacaatgggctacttggatccagattattatactagtcagaagttgactgaaaagagtgatgtctatagttttggagtgctaatactggagctgattactgcaagaaagccaatagaacgagggaaatacattgtgacagtggtcaggagtacaatagataagacaaaagacttgtatggtcttcacaaaattattgacccggccatctgttcaggatcaacactggagggttttgagaagtttgtggaccttgcaatggagtgtgttgaagattcaggagctgacaggcccgcaatgagtgatgtggttaaagaaattgaagacatgttgcagtctgttggtatgcacctaacatctgaatcagtaacatccacaacatctagtcatagatatcaggaggtaagtatagtgagtttccatctggaccaaccttacagcaatgagtcctttggttcaagtgcagaacatattcaaaaattgaacctagttagttaagttagtcttttttctcaagattgaagt

SEQ ID NO: 20276 - DNA, 679 bp, Glycine max
  unsure (1)..(679): unsure at all n locations
aaaaaactatcccacaataacctctctcaccggcgcaggtccacttttgtgcgtgacgctcacgcttgcatcagaaccaactatatataaacacagcgcgcgctccaaaccttaaactgaaaaacaaaagaacaccaaaaccactcaataagaagaaggaacactcgctctgcaaagtgtgtgaacgaaccctaataatggagacgaaggagaacggaccgagcaagaaggtttcgaatgggggaatagatggacccacgaacccgatggtcactcctctgctcaatgatctctaccaattcaccatggcttacgcttactggaaagctggcaagcatcaagaacgtgctgtgttcgatttgtattttcggaggaatccgtttggtggggagtataccgtcttcgctggcttggaagagtgcataaggttcatagctaatttcacgctcgctgaggaggagatcgattttgttagggaatgtttatcttcctcttgtgaggatggattctttgactacctcagaggacttgactgctctgatgttgaggtgtatgctattcctgagggaacagttgtttttcccaaggttcncctgatgagagttgaaggtcaagttgccgttgttcaattgctcgaaacaccttttgtgaatctaattaattatgcgtcattagtttc

SEQ ID NO: 20277 - DNA, 435 bp, Glycine max
tcttttcttcagtgtccgctgctgcaaattgcaaagtgcaaaacctcaaaacctgagagagaaaatggagaagatgaaaatagaagaggttcaatcaaccacgaagaaacagcgtgttgctacacacactcacattaaaggcctaggtctcgaggcgagtggaaaagcattgagttttgctgctgggttcgttggacaagttgaggcaagagaagcatcaggtcttgtggtggacatgatacggcagaagaagatggccggccgggcacttcttctcgccggaccgcccgggaccggcaagacggcattggcacttggaataagccaggagcttggcaccaaggtaccgttctgccctatggttggctccgaagtttactcctcggaagtaaagaagactgaagttctcatggaaaattttcgacgggccattgg

SEQ ID NO: 20278 - DNA, 624 bp, Glycine max
  unsure (1)..(624): unsure at all n locations
aacaaaacagagaaaatggcgctgttgtgtggcggcatgccatggtcgaaggtgatagttcctcccattttccaccactctcacacccctcgcaccttcttcttccaacgacgccgtttctcagtctctgctctctccgaacaaccaccacccgttcgcgttcgtttcgctccttctcccaccggaaacctccacgtcggcggtgcccgaacggccctcttcaactacttgttcgcaaggtccaaaggtgggaaatttgtgctgagaattgaggacactgacttggagaggtccagtagggagtctgaggaggccatgctcaaagatctttcttggcttggacttgattgggatgaaaggcctggtgttggaggggattatggtccttataggcagtctgagaggaattctttatacaaacaatatgcggagaacctacaccaatccggtcatgtttatcgctgcttctgttctaatgaggaactagagaaaatgaaggaggttgctaaactaaagcaactgcctccagtgtacacaggtaaatgngccagtgcaacatatgatgaagtagaagaggagctagataaaggaactccttacacatatcggnttcgagtgcctaaa

SEQ ID NO: 20279 - DNA, 400 bp, Glycine max
tagcatttggcaagatctgatttccctcttcacaagtagagaaagagaaaggcatagtttgctgcaggtttgatcttcaagttgcaatctttttgttgtctcgactgggtaagaagaacatatttgagatctgtcactttgtttcagtccagatcttcaaagtttcctttttgttcttttggtgcaaaggattaaactaaggaatgccaagaaaatggggaggaagggaaattggttttctagtgtgaagaaagctctcagccctgactcgaaggagaagatagatcagaaatcaagtaaatctaagaagaaatggtttgggaagcaaaaatttgagacttcagtctcatactcagaagctgataaagcaccaccaccaccacctcctattcctccacca

SEQ ID NO: 20280 - DNA, 409 bp, Glycine max
cgcggcataacctaaacttacccttcttctctctgtgtgtgtgcgcatcaaacccaaccagaagaaagaacagaaatcaagtatttctaagaagaaatggtttgggaagcaaaaattggagacttcagtctcatactcagaagctcataaagcaccaccaccaccgcgacctattcctccaccagaagcgattaaattaactgatattgaaaatgaaatcagtcatgatcacgactatgttgttgaagttgcaactgccatggatgccgaggaacctgttcctgctgttcagatagaacctgttagggttgaagctgccccaattgctcattatgctggtaaaccaaaggatgaagtggcagctatcaaaattcaaacagcttttcgtggatacttggcaagaagagca

SEQ ID NO: 20281 - DNA, 486 bp, Glycine max
  unsure (1)..(486): unsure at all n locations
gaggaagaagccattaaattgatgatatggaacaacagtgaacccagtttcagcttaagagcaaaccgtgcaagaggtttttcaagagatgaccttgtgacacagcttaatgcattgaaggtcccacacaaactttcaccgcatttggatgaatttgttcgtatcaaaactgggttgcaggtatgatagtgagacaaagggttgattacaaggatgctttcatatgtgaattttctaacttgtataatgattttttgagtcaaacactgattagaggagaaaagttttggggactaactaaacatatttcctaccatgtgtaatagctaataggttcgatatcaatagtgtgaaattgggctttaaccagctactgacctactgtgggtgtatcttttccttttattttatgctttatanttttcacatgggaggcaattgagttatattcgttttgcttgtattatcctgtatgaactaagcatg

SEQ ID NO: 20282 - DNA, 938 bp, Glycine max
gcgagatgcttctgcgtgccgcttgtttcgttccgcgtcgggaagatcaacaaggaagggactcgcttcagccctacctcgaataggggtaacttgacactcgtactactgccaagttctgatcttcgtctctcattcattggggatgatggtagaacagagagattattcacccttaccaacaaatcccaatgctctgctgttgtggttgatgaaatcccaactgatagttctggccgatcgttccttgtaaggactccagatagcagagctttttatttctggtgctctgaaaagtccaagcttttgggaattgaattacttggaaagatgaaggatttgctcaagagaaaaccatccattgttgagttgagtggcattagcaagtcacgacttgactgctttgcaactcagcttcgggcctttcttgtggggacaacgggaggcagaagtcatgatagttcagtctgtgcttcaacatctgctaattccatgtcttgctccaatgttgcttccgaaagttcgcacccttcatcttcaaaatttccccgatctcgaaacattggaggtcagacagcaaagggagatacaacactttaccagagtattcttagtccaagatcaagttcttttaaagaggttccaccaagaaacttgtcttctcacaggattgcagccagggagaaaattaagcgtcgtggtgacaatcatcagccaacggttgacaccttgacaaatgattcaacacacattttggatttatcttcaacttctgatcatgacaaagcatcagaagttaccaaaactcttgcattttcaccaagttttctgggatcacttggaaagcttggtggtgttccatcaaagcctgggctgagtggggaggtcccctccattgtgtcacccattttttctccctaatattgttggtgtcccca

SEQ ID NO: 20283 - DNA, 486 bp, Glycine max
ggggtaacttgacactcgtactactgtcaagttctgatcttcgtctctcattcattggggatgatggtagaacagagagattattcacccttaccaacaaatcccaatgctctgctgttgtggttgatgaaatcccaactgatagttctggccgatcgttccttgtaaggactccagatagcagagctttttatttctggtgctctgaaaagtctaagcttttgggaattgaattgcttggaaaggtaattttagctattcttcttgattgaattacttggaaaggtagtgtttgatattgaatttattctgctttcttcgtcgtttctcctcgattttattggtgttttgaatatatttaatgattgatattttgtcatcaaactcatttttgtacaaatcagatgaaggatttgctcaagaggaaaccatccattgttgagctgagtggcattagcaagtcacgacttgactgctttgcaactc

SEQ ID NO: 20284 - DNA, 346 bp, Glycine max
  unsure (1)..(346): unsure at all n locations
cacaaaacagaacaacacaaactcaaatctcttctcttcttctctctctctatctctcagacacaagcacacaaatgaaaaaaagctaacaataataatatctctgcaaaccattaaggccatggcttttcttctccccaacctccaaccttcacttttagctcaatccaaatccaacaaagacaaagcaaaccttcaccaaactctctcacctcaaaaacccacttctcagtttcctatatcttccaccacatgctcctcttcttctctccaaactgcacaagctgcacaggtcagcacaccacangacaagcagcagcaacagccaaaggatgaattctacctc

SEQ ID NO: 20285 - DNA, 371 bp, Glycine max
tcttaaaccaaggttttgctctgtctctttttattgcaccaccatccaacccttctcttctaagtaactaactaacttcatttcatttctcagttctcacccatggcgaggcctcttctcacctcttccatgcacaatcttctattctcctccatgcccatccccacacttttcttagctatactctcagtcttgtgtttattttccatcatcacttttctctgtggttctgacaaactgaagaagctccacttagaagcagagaaagaagcagcaataaaaacgaattccaaggagcacaagctgatttcgaagctgaacagcaatattggcaacagggcactctccatggtgaagatgttgtcttggag

SEQ ID NO: 20286 - DNA, 612 bp, Glycine max
gtggataatctgatagacagcatcaaggataacgaccaaaacacagactacaaagatgaagaccttgaaagcaagaaatgcagttctaattgtgatggggtgcagaaaaatctgctatttgtcaaagataacaatgaggaggagggactgctaaccataggtcttggaccaggaaagctaaagactcgtcgaacagggtttaaaccttacaaaagatgttcggtagaggccaatgaaaacaggatcggaacagcctgcatccaaggtgaagaaaaaggtcccaagagaatacgcttgaatggggaggcttcaacttgatgcttgatatatccatgcaaccacacaaagaaaatctctagttttgcatatattatctaagtttccttgttcattgtctgtattgcttattttctaattctgcagctcacgaaacttgtcgtgtaggtctgtgtaccatattaaattactacatacacactttttactttcttggcctgatgttactgcagttaaaaactccgctaaaatagacttagacaagaaacattaagtaccgtttgagcatttgatcatttaagtaatttatgatgcttcattcagtcaaaaaaaaaa

SEQ ID NO: 20287 - DNA, 2400 bp, Glycine max
gagtaagggtgtaaaaatatttgtttcattttattttattgaaggagtagaatttgggaactaggttttgttaagtttgggcttgatcaccccatagggaagttttggagaatttgtgggtgtcaggggaaaatgcagcaagatcacaggaaaaagagttcagctgagatggactttttctccgaatatggtgatgccaaccggtacaaaattcaagaagtcattgggaagggaagttatggtgttgtctgttcagccattgacactcacacaggtgaaaaagtggcaattaagaagattcatgacatcttcgagcatatatctgatgctgctcgtattctccgtgagataaagctgcttagacttctacgacatcctgatattgttgaaataaaacacattatgctgcctccgtcaaggaaggactttaaagatatttacgttgtttttgagctcatggagtctgatcttcatcaagtcattaaagccaatgatgacttgacaaaagaacactatcaattttttctttatcaattacttcgagcactgaagtacattcacaccgcaaatgtctatcatcgagatctgaagccaaagaatatactggcaaatgcaaactgtaagcttaaaatctgtgattttgggttagctagagttgcctttagtgacacaccaacaactatattttggacggattatgttgctacaaggtggtatagagctccagagctatgtggatcattttactcaaagtatacaccagcaattgatatatggagtataggttgcatctttgctgaagtactaacaggaaagccactttttcctgggaaaaatgtagttcatcaattggatctgatgacagatctgcttgggactccttcacttgatactatatcacgggtacgtaacgagaaggcaaggagatacctaactagcatgcggaaaaagcagcctgtgccattcgctcaaaaatttcccaatgcagatcctttagcactaaggctactggaaaagttgttggcttttgatccaaaagaccgacctactgctgaagaggctttggctgatccttacttcaagggactggcaaaagttgagagggaaccatcttgccagcctatcacgaaaatggaatttgaatttgaaaggcgaagagttacaaaggaagaaattcgtgagctgattttccgtgagattctagagtatcaccctcaactattgaaggactacatgaatggaacagagagaactaattttctttatccaagtgctgttgatcaattcagaaagcagtttgctcatttagaggaaaatggtaaaaatggtcctgttatgccacttgacagaaagcatgtttctctgccaaggtctacaattgtacattcaaatacggtacactcaaaagagcaaacaaataatgctgccagcaaaaaccggccaacagttgaggaatataacaagaacccaagagatacagaaattccagtgccaaggtcaatgcagggaccacaaagaattccactagcaaaacctggtaaagttgttgggcccgtagttccatacgagcatggtaacattgtcaaggattcatatgatcctaggtcattcatcagaggttctgtgcttcctacacaacctgttcccccggcatattactatcaaagatccagcactggaaaccaagaaaggccagcgacagaagccaacaagagtgtgcctttgcaggcaaaacatgcacagcaacaatgcggagttaatgccaagatggcaccagacatagctattaatattgatacaaatcccttttttatgacaagggcaggagttaacaagttagagcaaggtgatcaaatagccatagagacaaacatgctgcagccaaaggcacatcaatatggtggaatcggtgctgcagctggggccactgctcatagaaaagttggtcctgttcagtatggtatgacaagaatgttctagaagaagggtgtttttcttgtgaatattttggccagggggagcaatcctgttagagaaaaagacactttttagggatggagctgttgtagtctctggtgatggtttgtgtaaaaatgagagtgagaggcttaaaggcagtgcttccttagaaaaaagtgtcagctttctctggcctacaaagggtatgaactttggttacaactatcatgagactgttgacgatgaaattgagtcctatcttgtaagtcaatccataaccattttaggtgtttgcagtgaagacacaatcttgaaacagatgtcttggatgtttgtattttaattggattaatggaatttaaaagcctcgcatcctatacctcaacaaaaaaaaaaaatgttggtgggcaaaaaaaagatggtctacaaccaatatttgcg

SEQ ID NO: 20288 - DNA, 332 bp, Glycine max
gtggcttttagtttctccactttcattctcactcatcgcaccctcttgcaaagttaccatgaatttcttcaactgggttcatactttcatcgtttttcatgtctttgctgcaacaccccacttcttcttattagcagattcctccgaacaactccccaccaactttctagatgctgccaagaagcctgaggtatttgattggatggtcagaatcagaaggaagattcatgagaatcctgaattgggttatgaagaatttgagaccagtaaactcattagagaggaattggattaactgcgtatcccatataaacaccctgttgcaatcactg

SEQ ID NO: 20289 - DNA, 578 bp, Glycine max
  unsure (1)..(578): unsure at all n locations
ngtacgcgtgggcggacgcgtgggcggacgcgtgggcttgtatgaggttcctggcagacagtctgctatcaagggaagtagaaagatttctcatactgatgatttcaggtttcttgacaaggcagctctgcaattgaaagaagatggtgctaatccgagtccttggagactgtgtactgtgactcaagtagaagaagtgaagatccttatgaaacttatccccataccagcttgcacaatcatgctgaacgtggtcttaacagagtttctcactctctcagtccagcaggcttacactctcaacacccacttgggtcgcttgaaactcccagttacatgcatgcctgtattcccaggcctcagagttttcctcatactttctctctactactccatttttgtccctgtctttcgacgcatcacgggccatccccacggtgcatctcagcttcagagggtaagaattgggttggcagtgtctattctatcagtggcatgggctgcaatatttggaaggtacagaagaaactatgcaataaaacatgggtatttggctagtttcctcacagcaatgccca

SEQ ID NO: 20290 - DNA, 918 bp, Glycine max
gcggcaccatggttgggctttgaaagtcactaagaagatgaccatatctttaaaccccatcgtcagcttcagctcaacgaagttggaaacaaagtatcaggatgcatcaagatattctgttggagcttctttaccaaaggcaacccagtttacacctttgttgatagtgtctagatcgagaaagcttgtcaaggaaagaagatttggtccttgtttttcagtggcagatagtgatcagcttgcagcagacaacagtagtagcaaggattttgacaatgttgaaagttcagcaaccaatgatcagtcagcatccgtgaattccccagatgaaaacttccaattgcaaaccgaagtaaatgcggagtcaggatctccaacattagaggcttccatttccaatggttcaattaaccaagagcaagggtcagaagcatctcctaagtcacaatctgcaaccaaacgacctaacctgactgcaagagagaggttaaaggcagctcgatccctcaaccgatacgccgaatcaaaagcatctaaacaagacctgagcagcagggtgttggaggcttcaaaacaaagtgacaaagggtcagggaagaaaaaatctggacttccagaggcccctattaatttgtttgatgatagcaaacgagggttgtcaacaggcttcactttccaatttcctggaggttctgatctctttttcattatcttctcatttgtttttatcagcacagtgatgtttgcagcaacttacattgtgtggaaagttggtgcaatccatttcaatgagtacttaggtgtggtgttaagaattcaccataaaacaatcagatagttgatttattatatatatgtagacaagcttcggctgcttcaaacttcatgaactgatgatgttgatgatcagtttttcac

SEQ ID NO: 20291 - DNA, 490 bp, Glycine max
aaaagcatgacacccttgtttgccaatgtagtgatagaaccatgcttactacacggagacctctggagtggaaacatcagttctgacaaaaatggagagcctgtcatattggaccctgcatgttattatggacacagtgaagcagaatttggaatgtcttggtgtgctggctttggaggatcattctataattcttattttgaggtgatgcctaagcaaccaggctttgaggagaggagagacctttatatgctgtatcactatttaaatcattacaatctctttggttctggataccgatcttccgccatgtctataatcgatgattatcttgcaattttaaaagcttaggattgcgtgctttatcgtcaagcttgtacatgcatgaggttcttttcctgtacattgaactacttatatttccctaatcagctcattcaatgaaatggaggtgttattgataccaatgcacaagttattttgtttcctc

SEQ ID NO: 20292 - DNA, 570 bp, Glycine max
gtcttctcaatcttgggtaccaagcagttgcttatattgaagcgtctgcattcatctatcaggatggaaagattctaattgaggttgatcatctacaagatgtccctggcccatacatcagataaagggtgctaataaagatgcagtagcagcagcaggttcaatgcttaaattggatggttcatatactactaagagttatcttgaaataattttggaaagactaccggctatagaaagaacttctggtgggattcattctcagcaatcagcaaggctgctggagattgttgagtttattcaatctcaaggatgtagctctgcttcagaatcctcatcaagtagggtagtctctccaattgaaggggttattggaggagatgcaatcaaggattagaaggcttgaaagatggctagcgataaatacggttctatggacatttctgatgtctgccctcgttggttattcactgtatcaaagggagcgtcaataatgatctttggaaattttcaggatcatgcatttgccgttcttggttagttacccttcgtataccgatcccaattttt

SEQ ID NO: 20293 - DNA, 431 bp, Glycine max
gcttgacgtccttgcacccgtccgtaagctcggatttcggctcgaggaagacgctccagaaagagttctaccagattctatcctccaacagagaccacccgcatcccgaaactgtctccacgcgctcctccgtccccgcaccgcagcagcgtctccgattacgacgacgaaatctcaatcaccgaggacgagttccgcgtttccgagaccgagcgcgtttccatgctcgccatggaggatttgaaagccatagctgagtgcatgatttcctccggctacggcaaggagtgcgtcaaggtttacatcgtcatgagaaaatcgatcgtcgacgaagcgctgtatcatctcggagttgaaaaattgaacctctctcaggtccagaagctggattgggaggttctcgagttgaagatcaagagctggttaaaagc

SEQ ID NO: 20294 - DNA, 455 bp, Glycine max
ctcgagccgaatcggctcgagggacaagctgcggcagtcccgcaacagaagaaacccaaggggtcacaagataaacagcagaaagctaagctccttgagagcttatatagtgaaaaccacaagctttcaagtttatgtggaattctcttcccccaaaatagtcagtctgtctggagtggaccacactcactaatacagaagagaaattctgctcgtactagttcaattcacgctgctattaggactttcatggggtagcttttatcttgatcagtttattacacttcccagcagcctatgtcattaatattttagttgacatcccttcgttacatgatgtgtgtattatagtcacaatttcttggtagcaacagcagattttgtaatttttctttctgttctttttattttctcgttatgctatggaatgacgtatatgaaagaatttgtgcttc

SEQ ID NO: 20295 - DNA, 1915 bp, Glycine max
ctcgagccggctcgagactcactaacatcacaacttctctctttctacacaaataactccttctcagtgtgagcagttgataagagagatgatgatcaacgtgaaggaatcgaccatggtgcggccggcggaggaggtggcgcggcgggtggtgtggaactccaacgtggacctggtggtccccaatttccacacgcccagcgtctatttctataggtccaatggcgcccccaactttttcgacggcaaggttatgaaggaggcactgaccaaggtgctggtgcccttctacccaatggctgggcggctcctgcgagatgacgacggtcgcgtcgagattgactgcgacggtcagggggtgcttttcgtggaggccgacactggcgccgtcatcgacgatttcggcgatttcgctcccacccttgagctccgccagcttatccccgccgtggattattcacaaggaatagcatcctatcccctgttggtgttacaggtaacacatttcaaatgtggaggggtttccctgggagttggtatgcaacatcatgtagcagatggagcctctggtctgcacttcatcaatacatggtcagatgtggctcgtggcttggatgtttccattccaccattcattgatcgtacaatacttcgtgctagagatccacctcgacctgtttttgatcacattgaatacaagcccccaccagccatgaagactcaacaacctactaaaccaggctcagactcggataatgcagcagcagcagcagcggtgtctattttcagactcacacgtgagcagctcaacacactgaaagccaagtctaaagaagatggcaacacaatcagctacagttcttatgagatgttggcgggtcacgtgtggagaagtgtatgcaaagcaagagcacttcctgatgatcaagaaaccaaattgtacattgcaactgatggaaggtcaaggttgcaacctcctcccccaccgggttactttggcaatgtgatattcacaaccacacctatagctgtggcaggtgatctcatgtcaaaaccaacatggtatgctgcaagcagaatccacaatgcattgttacgaatggacaacgattatttgagatcggctcttgactatctagaactgcaacccgatctaaaagcgctggttcgtggggctcatactttcaagtgtccaaaccttggtatcactagctggactaggcttccaatccatgatgctgactttggttggggaaggccaatattcatgggacctggtggaattgcatacgaggggctatctttcataattccaagctcaaccaatgatgggagcctatctgtggccatagctcttcagcctgaccatatgaagctgtttaaggatttcttgtatgacatttgaggaatcattgcctgtcaagccatatggaacgccacaatgtttctaggtggggtttttatcccccccggtacctttgttatctttagatgcttttgaccaacggtatgcaactgttaatgggactcatttcagttttatatggactacattaagtgttatacatttttataatctgtaaaacataaacgaactttaacaacagttaatttggtattacagtttgtgcatatgaattgtttaaggattgtctgcacaatcttttgctcctaaatgtaatgccataactgaggtgtattttatctggacacatctgcattgcattctgtgaggaatttttccaattcttctaattggaggaaatttgaaaggtaattgtacaagctggttttgtcccaagatataggttgttcttgctacttgcactagtactccagtagaagaaatccttcctttctccttgtctaaagatttcccttgagtcagctttatgaataaggatgagattattgt

SEQ ID NO: 20296 - DNA, 418 bp, Glycine max
cgcccaatccctacccagacaactcccaacttctctcagtactctcatcaggatccgtgtgagcagtcgagcagagagatgatcatcaacgtgaaggaatcgacggtggtgcggccggcggaggaggtggcgcggcgggtggtgtggaactccaacgtggacctggtggtccccaatttccacacgcccagtgtatacttctataggtccaacggcacctccaactttttcgacggcaaggttctgaaggaggcactgagcaaggtgctggtgccgttctacccaatggctgggcggctccggcgagacgaagacggtcgcgtggagattgactgcgacggtcagggggtgctcttcgtcgaggccgacaccggcgccgtcatcgacgatttcggcgacttcgctcccacccttgagc

SEQ ID NO: 20297 - DNA, 500 bp, Glycine max
  unsure (1)..(500): unsure at all n locations
gttacaggtaacacattcaaatgtggaggggtttccctgggagttggtatgcaacatcatgtagcagatggagcctctggtctgcacttcatcaatacatggtcagatgtggctcgtggcttggatgtttccattccaccattcattgatcgtacaatacttcgtgcccgtgatccacctcgacccatttttgatcacattgaatacaagcccccaccagccatgaagactcaacaagctactaatgcatcagcagctgtctctattttcagactcacgcgtgaccagctcaacacactgaaagccaaatccaaagaagatggcaacacaatcagctatagttcttatgagatgttggcgggtcacgtgtggcgaagtgtaagcaaagcaagagcacttcctgatgatcaagaaaccaaattgtacattgcaactgatggaaggtcaaggttgcagcctcctaccccacccngttactttggcaatgtgattttcacaac

SEQ ID NO: 20298 - DNA, 446 bp, Glycine max
gggaaaaagggttatggactgaaggcaattgagaatgtagctcaaggccagtttcttattgaatacgttggagaggtacttgatatgcaagcatacgaggcacggcaaagagagtatgctttgaagggtcatcggcatttctattttatgaccttgaatggcagtgaggtgatagatgcaagtgcaaaaggaaacttggggcgtttcattaatcatagttgtgatcctaattgtcggacagaaaagtggatggtgaatggggaaatctgtattggactgtttgcattgagggatattaagaaggatgaagaattgaccttcgattacaactatgtgagggtttttggtgctgctgccaaaaaatgttattgtggttcacctaactgtcgaggttatataggtggtggtgatccacttaatgctgaactgatagttcaaagtgattc

SEQ ID NO: 20299 - DNA, 668 bp, Glycine max
gagataattacaggttcaattcccatagcctgaaatataagttctgtttctagttccccagcagacataattacaggttcaattcccatagcctgaaattatgtctgctggggaactagaatcagagagagctggagagccaggaaaattgattcgtgaacgctatagaacagcatctcaagtggtccagaatcaaggaaaaatgagctgtttgatgatcaatgatattgatgctggccttggtagatttgggaatactcaaatgacagtcaacaatcaaattgttgttgggactcttatgaatctgtcagacaatcctacaagagtaagtgttggtcaagattggcgagaatcagatgtcacaaacagaattccaatcattgtaacagggaacgatttttcaactctttacgctccactgatacgcgatggaaggatggataagttttactggcaacctaaccaggaagatatccttaatatcgttcacagaatgtatgagaaagacagtatatctagggatgaagttgaaagggttgtgaacactttccctaatcaagctttggacttttatggagctctaagatcacgtacatatgacagatctattttaaagtggattgatgatattgggaggtgtgaaaattttggaaacaaacttctcaaga

SEQ ID NO: 20300 - DNA, 641 bp, Glycine max
cgatcaaagaagatgtggaggaaggcatgcagaaaggagtcagagagccactggtggtccgtgcaagcaaagggcatccatggatggtttactttactacattcgttgcagtgtgtggttcttatgaatttggagcttgtgcgggatattcatctcccactcaagatgctatcaggaaggattttagtctgtctttggcagagtactccttgtttggatccatcttgacttttggtgcaatggttggcgcaataacaagtggacctcttgctgattttattggacgtaaaggggcaatgagagtgtcaagtgctttctgtgtcgcagggtggcttgttatttatttttctgagggtccagtgcctttggacattgggaggttagcaacaggatatggaatgggagttttttcatatgtggttcctgtctttgtagcagaaattgcaccaaaagaactccgaggggcactgactaccttaaatcagttcatgatagttactgctgtgtctgtgtcattcataattggaaatgtactttcatggagggctttagctataattggtctcgttcccactgctgtgttgcttttgggtctgtttttcattccggagtctcctagatggctggcaaagagaggacat

SEQ ID NO: 20301 - DNA, 491 bp, Glycine max
gtggtggcagcccacatactgcaggagacggcttttggaaaaagttatgcatcagataagcttagtggggcaagaagattgcgtgatgccatagttcttgggtatcaactccaaagggcccctggtcgagatattacaatcccagaatggtatgcaactgctgaaaaccaacttggccgctcaacacctggttcccctgtggatgatggaagatctgcgtttagcttggacattgaaaactttgacattcttcatggagatattcaaggacttccagatactgtggcattcttacagaacctatctgaattacaggacaagcacactaggcgggagcgtaaggctgcggctaatctctccaactgggaggaagaaatatttgtgacaagagctcctggaaggttggacgtcatgggtggtattgctgactattctggaagtcttgtcctgcagatgccaattaaagaagcctgtcatgttgctttacaaag

SEQ ID NO: 20302 - DNA, 453 bp, Glycine max
attattttcattattcaacattatgttctgtatcgtggtaaaaaatcctccaaattggagatcactacagagcaagaagatcaaatcagagagcaccttgtcagacattctgatcaatcatcaccagagaatgtgtaagatatgacttacttcataatgtatattaaacttcccattgtatgttatttgtatcaaaatccaattaggatgtttttcttatcccatacatcacgggcaccattttgatgggagcttcaataaatattgtataagttttaagaattttaggccagcattcttttatactattttgtattacaaatttgtatatgaccaagtgactggcatgtattatcaagctactcaattacctactggtgtttgtggccgtttgaaattttcccacgatgtgagtgtttgaattcaaattagattatctaaatttttgttaaa

SEQ ID NO: 20303 - DNA, 230 bp, Glycine max
gtccatgcacgcgtacgtaaagctggaattccgctcgagggcaaggaggatgaagtcctagtccggcacctcaggcccagggggggtatgggagcgctgcattgcatatactcgacccctcgaagctatcgtcaccgaagttcagctcagaaacctaccatgatatgatatgtcttctataaccatactcatactccaatcagtgttgcttcttctactccatactcact

SEQ ID NO: 20304 - DNA, 662 bp, Glycine max
gggatcagcaactatgatatctttctgaccagagattgtttagcatattccaagataaagcctgctgtaaatcagattgaaactcatccatacttccagcgtgattctctagtcaaattttgtcagaagcatgggatttgtgtcactgcacacactccactaggaggtgctgcagcaaatgctgaatggtttggaacagtttcatgtttggatgaccaagttctcaaaggtctggctgaaaaatacaaaaagactgccgcccagatcagccttcgctggggaattcaaaggaacactgtggtcattcctaaatcgtcaaaactggagaggttgaaagagaactttcaggttttcgattttgagttgtctaaagaggacatggagctcattggaagtatagatagaaaatatcgaaccaatcaaccagctgtgttttggggcatagatttgtatgcgtgagaatgcccttcctaagtctgtatcatggctgtttgaccttgtgttaagattcagatttggtataagctgatctttcaggctccttagtagctcagtttatttgataatgtaaactttctttgttgatggttgaaaaatcatcttctcatcccatatccaatctcgtggactaaataagagagacttctgaatgttgttgcttc

SEQ ID NO: 20305 - DNA, 873 bp, Glycine max
tcgctctctcgtccgggagtccttaatgtgccatctttgccagtggaatgataaagggaggatagtcaggtgcacaaaatgtaagcggaaaagattttgcttgccctgtttaagaaattggtatcctcatttgaaagaggaggatattgctcaggaatgtcctgtgtgctgtggtaattgcaactgcaaagcatgcttgagatctgatgaacctattaaaaaaatgaaaggcaaagcaaatactgatgaagatgacaagattgaacactctatgcatttgctgcaagtacttcttccgtatttaaggcagttggatgaagaacaaatgattgagaatgagatagaagctaagatgcaagggctctcggtctcaaagctaaatatagtaaagacagattatgcaaaagccgagcgtgtgtactgtgacaactgcaaaacatcaatatttgattaccacagaagctgtacaaaatgctcttttgatctttgtctcatctgttgccgggagcttcgtaatgggcagcttgtaggtggtgcagatccaattgagtgggagtttgtctttcaaggtcatgattacatgcatgctcaaaaagaaaaggctctaaaggaaagaaaaatggtaaagcaaaatgcatcaaatgctgatgctaagcctgaggttcgtgaatggtcaagatgtgggtggcatgcagaaagtaatggtaacattccttgtccaaaagtcaatggtgaatgtaaccatggtttccttgaactgagaaccatattaggcaaacattttatcactaagatagtgcataaagcaaacaaactagcacaggcattcactcttcaagatgtagttaagaaccctgacaacttctgttcatg

SEQ ID NO: 20306 - DNA, 388 bp, Glycine max
tgacatcacaacacgaaacacacacatgacacaacacagcacgctgcaagaacaacaacaacaacatagccacaacacaaccaaatgacacccacaaagagggagacaaagagagacgctactacttcttcctcctctctgctcgcagaaccctgaagctccagaagccccttttcgaattaattcgcttctcttttatctaaattcattgattcttttcgtcgacatgttggagggtccaacctttcttgtttcgagggacatactgagctcttgtgagcaagagaccaggtggatctacaattccttctgtgtgatggagctcgcgagcaataagcgtcgactggaactagaagaagaagccgtgttgacaaagtcatgcaagctt

SEQ ID NO: 20307 - DNA, 287 bp, Glycine max
attgacacaacacgaaacacacacatgacacagcaacaacagcatagccacaacacaaccaaatgacacccacaaaggaggagagaaagagagacgctactactactactactactactacttccccctctctcgcacagccctgaagctccagaaccccgttttggaattaattcgcttctctttaatctaaattcgttgattctttccgttgacatgttggagggtccaacctttcttgtttcgagggacttaccgagctcatgtgagcaagagaccaggtggat

SEQ ID NO: 20308 - DNA, 361 bp, Glycine max
  unsure (1)..(361): unsure at all n locations
ggatttttgaatcaccttctgttgggcacccctgcttcaccactgaggaaaatattgctagaaagtagactgggcgatgccattgttggtggtggggttgaagatgaactactccagcctcaatttagcattggaatgaagggtgtttctgaagatgatattcataaggtagaagagctggtcacaagtacacttaaaaagttggcagaagaaggttttgatacagatgccattgaggcttctatgaatacaattgaattttttctgagagagaacaannatgggtcattntctcgtgggttgtctctcatgctccagtccattggtaaatggatgtatgataataattccttttaggcac

SEQ ID NO: 20309 - DNA, 943 bp, Glycine max
accagcataatcgtaccagtgtctttcatcatcctcttcgtgatcgtcttctgttgttgctccactcactatctttatttttcctattctatccttctcgcttcttaggttagccgagcgtcatcgatccagaaacgataaaggcagtcataaagtgagaatggatctgtgtgctgctcatgcgaagaaccttttccacacaaattcgttttaccacagacccattccctccaatttgggaaggagcagagtgtttgagatcactgtttcgaggagaaacccttactctaaagggtatcgcctatttgttgtcagcgccacggggaagaacaatcatgaccacaactcctcttcttccggcaatgatgaatggtccattccagaagaagatggtactagagggaataattcttctgatggcaacaaatcagataacaactctgagaaatgtcatcatactaatctggattggcgcgaattcagggcaaagctatatagggatgagttgaaagaactatcagtcgctgacacgcataatcaaggtggaacattgcctatttccaaacctcttggagcacagtgggctcatcctattccagtacctgagactggttgcgtacttgtggctaccgaaaagcttgatggtgttcgcacatttgaaagaactgttattctccttctcagatctggaactagacatcatcaaggaggaccttttggaattgtcatcaaccgtcctcttcacaaaaagatcaaacacatgaaacctacaaaccatgatctattaactaccttctctgattgttctctgcatttcggcggacctcttgaggcaagcatggttttgttgaaaacagaggagaagatgaagcttccaggatttgaagaggtaatccctgggctatgttttggatctcgaaacagtttggatgatgctgcagga

SEQ ID NO: 20310 - DNA, 461 bp, Glycine max
atcgtagtgtctttcttccttctccctttgtgatcgccttctgttgttgctccactcactatcttcttcttctaaaattattttccttttctatccttctatctatcattcttttacgctaaaaatcttctcgcttcttagcttagctgttctgttccagaaacgataaaatcaatcaatcaaaggaagcaaaaaagtcagaatggatctgtgtgctgttcatgcgaagaaccttttccacacaaattcgttttgccacagacccatttcctcccatttgggaaggaccagagtgtttgagatcactgtttcgaggagaaagccttactctaaagttgggtatcgcccatttgttgtcagcgccacggggaagaagaatcatggcaactcctcttcttctggcaatgaagaacggtccattcccgaaggagatggtactagagggaacaattcttctgatg

SEQ ID NO: 20311 - DNA, 592 bp, Glycine max
cttcttgcaactgctagtgtgaagggcactttaattagaatcttcaatacaatggatgggtctcgtttacaagaagtaagaagaggggtagatagagctgaaatcaacagtatagctttgtctccaaatgtccagtggttggcagcatcaagtgacagaggcactgttcatgtattcagcttgagagtgagagtgtctggggaggatagtttgactcagccaaatgcttttcaagggcctgcactgtttcatcagaattcttcatcttctttagatcccttgatttctccaaatactggtgctaaccccaattcatcattatctttcatgagaggagttttaccaaaatattttagctcagaatggtcatttgcccagttccacttgcctgaatacactcatttcattgtggcatttggatctcagaactctgtgataattgttggtatggatgggagtttctatagatgcagctatgatcaagtacatgggggagaggtggtgcagcaggagtatgttcgtttcttaaaatttgaaaataggcccaaataaaagttgctcaacatccttgccatgcagcaactatcctcaa

SEQ ID NO: 20312 - DNA, 564 bp, Glycine max
cttggctagggcaccaacaccgctaacactctgttcattcattcttctccgtcagaagcagagagtaagaatgctctcaggggatatacctccaaatcagaccatttacataaaaaatatcaatgagaaggtcaagaaagatgaattgaagagatctctgtattgcttattctctcaatatggaagaattttggatgttattgctctgaagacacccaagcttcggggacaggcatgggtttgtttcagtgaagtcactgctgcaagcaatgcagtgcgacaaatgcaaaacttccctttctatgacaaacctatgagaattcattatgcaaaaacaaagtcagactgtattgcaaaagaagagggtagttttgttccaagggaaaagaagaagaaacaagaggagaaagctgaaagaaagcggcgtgttgaggaagcacagcaatctggtgtggctaatggaacacatagtgcaagtaatggtggtccaactgcatcattccgtcaaggacccggtgctcaagaagcagctgctcctaacaatattttgttcatagagaatct

SEQ ID NO: 20313 - DNA, 473 bp, Glycine max
gaggggcatttcttataattcacacttcacacacatacacacacagcagttatacggtgtcgtttcatccacttatattcttttccaaaaaaaaaaaagctaaccctagcttgttccccctttcgcctttagccgcgtttttccgatctcgattgctttcctctctctctctctcttgattcctcccccaatcttaacgccacctctctaatcgattccgcctctcgctagctcttgattttctgcgccgatcgatcccaatttttcccaggtcggtgcgctggatccgtttttagggtttccgtcgcggatctgtttttcccgatacgggatctggtaggggacattttttatttgatttgggttctgggtctttgtcgtctcgtcccgttttttgcgattttgggttaattattttcgaatcgtgtttgatttgggttcgatccttctgaaacttggtttgggttgttaga

SEQ ID NO: 20314 - DNA, 343 bp, Glycine max
tctcgagccgattcggcttaataatttattctgtttgtggtctcactagctagaaacaacatcactacacacaaatggcacatactttatccactaatctggctcttaaccttcccacatcgaggtatgttcgtccctcgagaccaacccaggtgaagcccatgaaggtcatgatgggtgatgcaagagaaaagctagaacatgtccatgtgcctaaacacaacaagcaccaccagcccctccccaaaaacaaagttgctcctaccccacccgtaggtaattaattaagctctcctacggcaaggacagtgcaagggatgattgagacgatggagagaatgat

SEQ ID NO: 20315 - DNA, 537 bp, Glycine max
tagctgtcgagctcttatttttttccctcacgtgctagaattggcctctcctcgcttattgtcgttgaaggaaaaatttgttgggatctttacattgatgggcttcttgttaattcaaatggaaatttgttggatgctctaatagaataatctactataaaaagctagaaaagatgataatgatggattcctggctaaaataattagcgttgcagagatcatgcttttttgttgatgtcaattttcaatgttgtttacttttcaagttttctttttcatttaacctgagtttagctattgatgttacatacatgccatttggactctttgaaatatgtaatctatgacttcaaggaaatggttagaagttattcatactttcaattaagctcaaattaaaaatatccttttactagctgttttctttaatctttataataagattatcctcccaaacgaatctgcaatcagtttcgtggaggttttccacatggatttccttaataccatgatgttgagaaaccgagaaacctattt

SEQ ID NO: 20316 - DNA, 498 bp, Glycine max
caaaaccataagatttttctcgtgaggggtctggctcacaagccaataaaggcaacctctagaaccttcatcaccgcgcgcgccccgtgcaagtctaataattgacctttaaaaatcaaaaccagtgtcattgcttcaccagatttccactttattgcatcatttacaaaattagttaattcgatcctcttcagcttcaccttccttgggggcaggttttcaaggactctgaacatttgatccatcaccatctcttcttagcagtgaggtgaggtgaggtcactacaatggcttctgcttgtgtgaccctgaaagccaatacccatttagcaaactctgagaaaggctttcttggagaaagaataaaaggtggcttcaacaacagtgccttggtgatgaatcagttggctatacgttctagaagccacaagagggtgaaacatggtgttggtgttgtatcttctgttctcacttcaaacaatgccaaagaatcactga

SEQ ID NO: 20317 - DNA, 569 bp, Glycine max
acactacgaggacaagttttcccacaacaaatttcaaacttaaatatgagttttgagtggagtgaagttactagcactttacactagggagaaacattgaagccatcactgaaatcaagcaaatggggaattgctcaatgaagggtaccactggagaatgtcaccactctattcgtgttatgtgtgacagtggtgccattttgcagttaaaagctcctaaaacagtggctcaagtgcttcaacactacccgggttatggtattttccgccagggtcatgcttcagcacctttgccagagcaagagagtttaagctatgatcttttctattatcttctccctttgaaggaggttcaagtggagcaccaaaaaagttgctgcgacaaagtccaacaagtgggtcaaagatcagaggaaatgtgcaaatctgcagcatgtgattatgttgagaatttgtcaaatgggtcagcgcttgaagtgctgccaacagctaagaatggggtgtggagagtgaagttgttgattgacccgagacaacttgaggaaattctgtctgagcaggtgaatact

SEQ ID NO: 20318 - DNA, 507 bp, Glycine max
acaatttggggtttttatttatttcgtttcggtcaaaaaaggagaaaggagaatatatattatgggaaaaaactctcccttcgcctctccagcttcttcttcttctccgttttctgatgctttttctcgaaggtactaattgaagatcccctttccttttcgttttcggtctccccttttctgaccctcaattttttttttggagcatcgtgctgtgataatatatatactctcttcttttcttttcttttcttttttttttttccttttcaagatttatggagatccctgggttagggttagatataatatttctgtagcatttttcaattggttcaactctctctctttttattctctcccaaaagaagaacatttttttctagagtagttggtgtttattatttttgctttggtggtgtgtgaggattgtgtggtgtgatctgattctataaacctagggtttttgatagcggggaaattgatgttgatgaaggtgtgtatgag

SEQ ID NO: 20319 - DNA, 413 bp, Glycine max
ggaaaatagataaagggagtgggagtgggagcaaatgaggcgaatagacaatgaaggtcggcggcgtggtgttatacggcggagttccacgtggcagcgtcgtgcctcttcttctcagccgccgcagagtttctctttgcgcctcttcttcttcttactcctccatttctgaccacgtttctttcgtgaaggatgtagctgcgactcagcctcctcagcatctttcacaactcctcagtattctgaagaccagaggtgaatctattatctccccgggtgccaggcaaggattaattcctcttgctataccactgtcaaaaaatagctctggtaatgtgactgcacttgtgcggtggccgacggctccacctgagatggaaatgccaagtgtggaagtcagaaaatatggagta

SEQ ID NO: 20320 - DNA, 447 bp, Glycine max
gctcggatttcggttcgggcttaaactcttccttactttctcactatcctgtccctgaagaatatgagcacccacctcgtggcttcagtacaaaatttgatggatcttctatccttaagagatgtagttccaatgccaattctaggaacgttgactcagaacgagccaggtttgattccaactggttaaaccgttggatggaattagataacaagagcagccaaactggagatgcttcattgaaaaatggacgccctgatgatgataaaagtgacaagattctcgaagtggatacttggaggccacacttcaagtctcaccacagtagcagctccttccaagcagcacattattatttgagttctgattacaataatgagaactttggagcggcacatgagtctccatcaaaacgttcagcaaaggctctaaaccatagcttctcat

SEQ ID NO: 20321 - DNA, 777 bp, Glycine max
cgttcccattcctctctccctaacctcaccggcagcgccttcacggtcatcgccgccgacaccccccctcccttcttaatggcctcaatcccagtcgcgtgttccacacaccccaggctccaagcctcacccttattccaatcccacgcgcgctcccgcagcgcgtccttctggagggttcagcagaggggttcgatgggtggtggtggtgccgcgtcgagtttcgcctgctccacttctcagttccgcggcggattcgggttccggttccaccggagacaggggaagttctcgttgctctctttcggcggtgacgacgacggaagcgccgttggcggcgaagcgagagaaagagacttgtctcagcttctctccgcattgcttcccgttgttgttgctgccaccgccgttgccgctctcgctaaaccctccacttttacttgggtatcaaaagagttatatgctcctgcacttggtgggattatgttgtctattggaataagactatccgtagatgacttcgctcttgcatttaaaagacctttgccacttaccattgggttaattgcgcaatacgtgcttaagcctgttcttggaatcttggttgcacaggcttttggtttgtctaggatgttctacgcgggctctgtcctcacagcttgtgtttcgggggctcaactatccagctatgcaaacttcttaagcaaagcggatgtagccttgggccagtctctcacaagctatagcacagttgcatcacgtattgctacacctctg

SEQ ID NO: 20322 - DNA, 490 bp, Glycine max
tcggttcgaggcctcttttcgatgcacgtggattccgcgtggcgaatcggcgtagaaaaaaacctgttaccggtcgagacggttgacgccgggctcaaatccctcgcgggcgggtgccctaatttacgcaagctcgaggtggcaggttgcagcgaggttgggatttcaacgattggcgccgagtgtgctaccttgcaggagctggagctgcagaggtgtgacgacgccgttttgggaggtgttgcagggtgtgagaatttgcagattttgaagatagttgggtgtgtgaaggggttttatgagtccgtggtttcggacattgggctaacgattttggcgcaggggtgtaagagattggtgagattggagcttgttggttgcgaggggagttttgacggtgtgaaggcgatcgggcagtgctgtgtgatgctggaggagttggtcattgtggaccacagaatggacgatgggtggcttcgccgggtttcgt

SEQ ID NO: 20323 - DNA, 550 bp, Glycine max
tcggttcgaggtctacttagttggggatgatgaggcaatgtccatggaggaaagaagaatgtctttgccaaaatatcaggtgcatgatgaaagtagccaggtaagtcatactacctctttaatagatggagttgctttcacatctaaccagatgagtataggctttatgcttcctgttttcagattcagttgtttacacattgtttcctatttaaagaggtacattctgtataaatttttaattcttttttaaaaataaaataaacggaaaagaaaatatgatcattttaatcctccctcttgcttccaacctaaatgggtagtgcatgctattttattttgaacggcctctatggttccaatttttgtgggcttctaaagattcgagtaggtattgtattaatttcttttagtagttaattataattaccacaacataatttgtgaagcttgctgcaaactaccaacttcgtgatctttcaccccagcatttgtataccgtaaaagagtatgtatatatgatttttattgggtttggttttgccaatgt

SEQ ID NO: 20324 - DNA, 547 bp, Glycine max
tcgaatttcgcctcgagagcgggctatggtggatactttgtttgggaccgagttagggattcgggccgggtcggaggttcgagctgaggtatccgaattggtgagtcagttggaagcggcgaatcctacactcgcccccgtggtagaacctgcccttctcaatgggaattgggtgttgctgtacactgcatcttctgaactgttgcctcttctagccgcggtaagattgcctttgttgaatgtggacaagattacacaaacaattgatactagtagctccactattataaactccacaacattgtctagcccttttgcatccttgtctttcagtgcatctgcctcatttgaacttcgaacccctacgagaattcaggttacatttaaagacggttcaatacaacctccagagataaagtctaatgttgaactaccagaaaatgtagacatttttggccaaaagcttagcctacagcctctgcaacaatcccttggcccacttcagggtctggtggaaaacatatcgcgtgtcatttctggtcagcca

SEQ ID NO: 20325 - DNA, 600 bp, Glycine max
aaggatcagctgccaccagcgcctttcgtccagcataccctcgtaacaattctgataatgaggagaatgtcatctgttggtggaaactcctcagagatttccaagcagaggcaggattgccttgattttgatctgaatgtggctgagggtgaagaaggactgctaaaacaaattggtgaatcttcaggccttccttctggccaatcatcagttgaacttggtcctaaaagatcaagcaggtttgagttggatttaaacagtattggtgctgatgatgatgcccaaccttcagatcagaggatggagggggcactcttttcaggaagaaatggttattggagcccatcacctgcttcatcgtcgtcatcaatgcaacctttagtacgaaacatcgatctgaatgacagaccattctttcaaaccgatttagtggaccaagggcttagtaagtcatcttcgattattgaagcatataaacaatccaagtcggatgctcctgtgatctctattttgggtgccaaggtggaagttggtacaagagaatatattcctcaaactttgtcttttccaaatgggcaggctattgagcctgcaatggat

SEQ ID NO: 20326 - DNA, 447 bp, Glycine max
  unsure (1)..(447): unsure at all n locations
gacgttgcactgcactcgtaagtttggaatttgggttggagcccaaccacattttttctggggaagcaggcttgaactaatgttggggaacacgttcgagcccaaccaaaattctaaacctccaaacaaggaggttcctcctcaggaatttaatgatagggtgctggaaggttttcaagtcacccccctttggcatcaaggttttattcgcgatgatggaaggtcaaattatgtagagacggtaaagacagctcgtggggtgtatagtacacgtcctgtatatggttggngtgatgttggttctacgcagaagtctactgctgggtggcttgcagcttttcctgtttttgaaccacattggcaaatatgcatggctggtggactgtcaacaagttggatagagtgggatggcgaaaggattgagtttgataatgctccatcttattc

SEQ ID NO: 20327 - DNA, 427 bp, Glycine max
gtgccaagtaccacaacgcagaaatgctgcaaaacccaagagtattgcgatattccgctcagccattcaatcctccaactcgcacggcagcatcatcactttctccatgccaattaatacccacttctccatcttttccaatcctcaaacagcaatgcagattctcacgtagagagctcacaatctttagcaactcttgcttgctactactcttgggttctcaggcagtggatggatccagagcaagagcagaagaagacgttggtaacacaagtaacattgatcaactagaagagaatctggcttttgctgaagaagatgctgctaacataagcagcagtgatcaaccagaagagggtttgactttggcagaagatgatgttggtaacacaaggaacagtgatcaaccagaagagaatctgacttt

SEQ ID NO: 20328 - DNA, 388 bp, Glycine max
gaaaatggaagccactactatgttccgttttttctctgccgttatggtcaatcctaaacctcacaaactcttctcttccctctctatctgcccttccgccaccgctccccgccactttcaatccctcaaattccccactaaacagaacgctcactctgaaaaccgcgatattggcgaccgcgtcgtcttcgatgacggcatcttcgaaagcggcgccgttttccaaaacgacagcaatctcaccactaacacacccaaacgcagacccagcccaaggacaaaagtgacgcggataacgcgtgagaatttggttccggacaagtggagagaagttcagtcagagaccaaaatcaccattaacgagaggcgcaagaagaagaagaacata

SEQ ID NO: 20329 - DNA, 745 bp, Glycine max
cttaacaacagtactaaactgaaatgaattatcaaatcaaccatcagtgatagcattgggaataggtatacattaaacattacactctacaaaatactacaacttattttcccctacaaactctgtttcacttttattagtgcaaactccagttttacaccattaagaaaatgaagagcacatcttcaacgggatcaaatgaggtaattcgttcctattctgctctttacaacacaattttttttgctcctttccttcaatatcaacacttaaactactaaaattataatctttctatgattgcagataaaatctgtcattatcaagccgcctttgatcttacagtttatcgctgcctttagcaacgaacaaaaacatcatccctgttccagcgttctaccatacacaatgggcaccacagtatctagagttcgttcatctaagatataatggagcaatctacaaaatacaggtcaggcgccacaaagaaagagtctatttggcagatggattggaaaatttcaggaaacaattgggaatctatgaatcaacaaccattcagttttttgcttgtgatcatcactccccctttgacatacatttcataccaaccctggagcggcaaacttgtggcaggcagagacattcatgcagaaagcatatttggactattcagtttactcaggaaatggtcggtgctcctgaacctcttgtatatttattaggtgttcacattgggcttatg

SEQ ID NO: 20330 - DNA, 846 bp, Glycine max
  unsure (1)..(846): unsure at all n locations
ggtgttttcgtatggcagagcccacacgcgtttggcaacaatttatttcagattgggagaggcagagaaggcactgaattgcaatgaaacaagctcatgtgttgattcggtactcgctttccaagctcaggctcttcaaaatcaccttagcaaatgcactgaagctcggaaagtcaaagattggaaagttatattaaaggaatcacaggctgcaatatccttgggtgctgattcagctccactggtctattctttacatactgaagccctgctgaagctcctaagacatcaagaggcacacgctacctacgagaaaatgccaaaatttgaccttgattcttctaacaaattatttggccccgttcgtagtgcctacctattgatgataggcacacacatttacttggcagccggcaggtttgaggatgcagtgatagcatctcagcaagcatctaagttagatccaagtagctttgaggtgaatgcagtggtaaggagggccagagcagtggcatcagccagaatgagtggtaacttactcttcaaggcatcaaaattcacggaagcatatgctgtatacaatgaaggactagagcatgatccatacaactcagttctgctatgcaatagagcagcatgtcgttctaagctaggtcaattcgagaaagcaattgaagattgtaatgtggcacttatagttcaaccaagttatagcaaggcaaggttggagagggcagattgcaatgccaagttggaaagatgggaagctgcgattcaagattatgaaatgctgnttagagaaaagccaggagatgaggaggtggccagggcccttgtttgagaccc

SEQ ID NO: 20331 - DNA, 448 bp, Glycine max
cccacgcgtccgtgtttttgaggtttctttgctacgcctaaactttttgtactccaacaattttattttttttttatcatttttggatcgaatgtcacctaatgttccataatagataacactccgagatgggaatcctattattccactttgtttttatataataagtgccatagtgattgattgatcaataagcggctatggtatgcctttcgcttaaaaaatgattatgaatataccaggtctattctttacatactgaagccctgctgaagctcctaagacatcaagaggcacacgctacctacgagaaaatgccaaaatttgaccttgattcttctaacaaattatttggccccgttcgtagtgcttacctattgatgacaggcgcgcaaatttacttggcagccggcaggtttgaggatgctgtaacagcatctgagcaagc

SEQ ID NO: 20332 - DNA, 614 bp, Glycine max
aacgaaacaggcgttgggttgagaatagaggggcgcgtaagaataaattagagggaaagggggggttgacacttccattttacgaaactcaattaacgtgaaatcaggtctacgaaaatcaccttttggacacctgatttcagttctttttcttctcaataattattatttgtatttgtaaacacacactatcaaagcaaatggggtgctcattctccgggttgaacgcactttacgactccgtgaacggcggaggtgatgtttggatcaacgagaaccgtttccgcatcgtgcgccagctcggagaaggtggcttcgcctacgtctacctcgtcaaggaggctcccgacgactccgccgccgctggcctcgccaagaagctcaaaggctcctctcatctctccgatgatggaacttatgctatgaaaaaggtcctcattcagaacaatgaacagctggagttggtcagggaggagatccgtgtttcatcactgttcaatcatcccaatctgctcccgcttcttgagcatgcaatcatttctgtcaagcctacccatgaaacatcttggaaccatgaagcatatttattggttccagttcatttggatggaaca

SEQ ID NO: 20333 - DNA, 470 bp, Glycine max
ttcgcctcatataaacgaaacaggcgttgggttgagaatggaggggggcgcgtaagaaaatctgaagcccgaataaatttaaggaggagggatcagagaggtgttgacacttccattttacgaaaactcaattaatgtgaaatcaggtcaacacctgatttcagttcttttgtattcaacagagggaacgaccgagcaaagcaaatggggtgctcattctccggtctgaatgccttatacgactccgttaacggcggaggcgatgtttggatcaacgagaaccgtttccgcatcgttcgccagctcggagaaggtggcttcgcctacgtctacctcgtcaaggagactcctaatgattccgccgtcgctgctggcctctccaagaagctcaaaggctcctctcatctctccgatgacgggacttatgctatgaaaaaggtcctcattcagaacaatgaacaactggagtt

SEQ ID NO: 20334 - DNA, 394 bp, Glycine max
catgtttttcgtcaactggtagatttgataagcattacatccattatggaggttttggttcgattagtaggtgctgatgaccatgtatatcccaattttatagatgtgatgcaatggttggctgagagcaacctgcttgagatgattgtcgataaattaagtccatctagtcctcctgaagttcatgccaatgtagctgaaactttgtgtaccataactcgagttgcatcatctactctagctattaagctttcaagtccaagttttgttgcaaaaattttgggttatgcattggaagattcacaatcaatgtctagccttgtcaactctctttcagtgtgtatttctttgttggatcccaaaaaatcagctatttcatctccactttttcatt

SEQ ID NO: 20335 - DNA, 352 bp, Glycine max
gtacgtaagctcggaattcggttcgaggttttttagcaccaacttcaattattacaacaaagtataattaattaggcagagaaatatggtggtgaaggtgtatggtccagcaagtgcagcctgtcctcaaagggtgttggtttgcctcttagagaaaggagtagagtttgaacttgtgcatgttgatcttgatctaggagagcataagacacctgaatttcttctcagacagccctttggtcaagttccagctgtagaggatggtgatttcaggctctttgaatccagggctattataaggtattttgcatcaaaatatgctgaccgtggccctgacctattgggtaaaacc

SEQ ID NO: 20336 - DNA, 394 bp, Glycine max
gaagctttagagaagtggctccagtaccttagagaagaattacctactgtggccttcaagtgcagcacacaacaacaaagatcaaacttaagtgcattgtactggtgctgatactctcatcaaattgttgaaaaattactcaagaagtcatgagctcaagaagtcgatcactgggggtttgattggcttgcccaatgttggtaagagtagtcttattaatagcttaaagaggtcccatgttgtcaatgttggttctactcctgggttaacaagatcaatgcaagaggttcatttggacaaaaatgttaagttgctggattgccctggtgttgttatgccgaagtctcaaaaaaatgatgcttccgtggttttaaaaaattgccagagaattgag

SEQ ID NO: 20337 - DNA, 414 bp, Glycine max
atctcctttcgtctctcttacgccatcgacttgtatccaatctaagtgggactgatgatgaaatcgaggaaaatattactctctgataaggaagaagatgaatatgatcaacttccatccatacgagtgttgacaaaatctcagttcaaaaagttgcccgagcctctaaaaaaagattatctggatgaaatggattacagggagactctttacttaaagaaacagttgaaggaagactgtcggaggcgcaaagagaaactactcctaacagataaaaagtttttgaacagtgataaccctgatgatcaacaggcacctcctgaacctgttttgttaccagatatggccgttcctccaagttttgacttagattgccatagccatagatatcgttgccttgtttctgatgaccga

SEQ ID NO: 20338 - DNA, 396 bp, Glycine max
tgcaagttacagcattaccctctgtatcagaggaaagaaaatgagtgaagagagaaaaacttaaaaattgaatagaagagaaaatagaaagaaagaaaatttcgaatttttcttcatctaaatgtcaatttttctttcttttcttaaccaaataaaataaaatgtatcattatctgtattttcttactttagtccaaacacatgattaaagtttagcaacaaatttggtgtaactcccgatatttcaaaaccagaagtaatcagtgtgatctatactgtcagtagagtattatcaacatgctttgtctaaaaaaaaaaaagaaaaaaaaagaaaactgggagaaaatagaaatcagataaaaaatacacacaacatacaaatcccaaagcataaaa

SEQ ID NO: 20339 - DNA, 596 bp, Glycine max
gcggtaggcaggaagacaaagttaatgagatggatcaaccgcccatcttgattaagcctctgcaagctgtacagtctcatcctcaggaaagctcgacgtctgctccaaaacctgcagactgtactgaaactggcagagtgaatgagcttttgcaggttttgcagcataacaaaacggagaatcaggcatcctccatagcagctgagctaggatctggaaacaagttggatgatataaggaatttagaaactggacttgaagatggtggaactgttcaatcagcaaagcctttctgagcattgaatacctgaattataaatttctatcatttgtggctatttattgtgcctgcagatttatctgtcataaagtaggtaaatatctgacatggtgaaatatttagagtttttagttctagtctcaaggatcttaaataattttaaacttgcaagcttgtggagaaaaggtagcttgttatagttgtatttattgtttttacattagagaccataccttcaagtcggatgttaattacattcctagcaatcgaatattgtccaaaactttaatttaatctttcaatccatttaattgag

SEQ ID NO: 20340 - DNA, 380 bp, Glycine max
gttttaatgattggtgactagcacaagcatattcgaaccacccagatgaatattccttcacccttagtatagtgtagtagccactgggattcgaatcaacagagaagagatgggattgaattggcatagatgggttgttagtgcttttctacttgttgcatgggctttaattcttgacactggagagatatgtttctgtatgggtggaaagaccagtgattttctgagaaatgattatttatcgttggatatgccaatagacagtgatacgttccgtgtgcctcctggttacaacgctccccaacaggtgcatataacacaaggagatcacgtagggaaaggtgttatcatctcttggattagcccacatgaacccggtt

SEQ ID NO: 20341 - DNA, 485 bp, Glycine max
ggtgtcagttggtgctgttgccacgacttggttccgttttcatcatcattgcaggacccatggggggaaaattgagggttggtgtggaagttgagaaaggggaagaagatggcttgttcacaaaggaaagtgtgtgtaaagctgtgaacactgttatggatgatgagattgatcagcttggcagagaagtcagagcaaatcacaacaaagtgaggagcctcttgctaagtaacaatttcgagacatcttgtgtagatgctttcagccacaggcttcaggatttagtctaagttcagccccagtttaattaaatcactgcataagttctatattattgacactgaatccagtagggttatttggtcgtgtaagaactaaaaagcgtcctttatgattgatgcattaaatcatgggttgagaaagaatatatgtacaaaacctagtcttgataatcttaaagaaatgtttattattttgtaataatc

SEQ ID NO: 20342 - DNA, 656 bp, Glycine max
  unsure (1)..(656): unsure at all n locations
gggagattattcatagctgacacaaacaacagcttaattcgatatctagatttaaacattaatgaaactgaactccgtacgttggagctcaaaggaattcagcctcctaagccaaaatcaagatcttttaaacgtcttagacgacgagcatcagctgacacaatgccaattaccattgacaccatttcatcaaatgtgggaagaattaattgcaaggtttactattgcaaggaagatgaagtttgtttgtaccagtctttgctgtttgaggtccccttccaagagggagtttctaaccctgccgaagcagacgtcactcttgcacattttgtgaaacccaaaacttcaaccagcaacttcctgcagtcagttgccccttaagtccgtgggaccgtggcaccttaaaccaggttcttccagtgctgctttttcttgctcatcttttgtttatttttctggatatactagtagtattcaaatgcttgagagtcatgatctttcttctgatacaacccatcgtaagttcattactaacaaaaattaaggtttttgtctacccttcctcgcttctttgaagatgtggtcaccaatcatcattgtgtaatcatgttgtataatttattttattggatacnnnnnnnnnnnnnnnnnnnnnn

SEQ ID NO: 20343 - DNA, 609 bp, Glycine max
  unsure (1)..(609): unsure at all n locations
agagctatcacgtcgcatgctcgcgtacgttggctcggaactcggctcgaggctcaggatcgagtgtccggagccgtcaaactgtgacgagtcanaaaatggatggatgactgactgtagtcaacagaagtctctggacattcgtcatcagaagttatcaactgctgccaactttgtgaaaagattgcatgatcttgcagttcagaagaggggttatgttgacttgcaagagatggtcagggaggacagtatcacatgctcatatggatccactcttccacaagatcctacttgtacattaccatgtagtttgacagaaacagatccttatactttcctgatacgtggagaaaattatcttgaagaccgccagaaggttaaagcaaagggaaccttgatgaaaatggttgctgcagattgggtgagatctgacaaaagggaagatgaccttggtggccgtcctgggagcattgcgcagaaatatgctgcacagggaggacccgagttctttttcattgtaaacattcaggttccaggttctactacatatagtctagcactatactatatgatgaatactcctgtggaagatgctcctttgctagagag

SEQ ID NO: 20344 - DNA, 488 bp, Glycine max
tttgtgaacaaaattgttatttgaacacaacatatgtcccataattgatactccacatacaaaaaaagataagaaatggattcactacttcatatccaaaagcctcatgttgtatgtgtaccattcccagcacaaggccatgtaaacccctttatgcaactagccaaactccttcattgtgtgggtttccacataacctttgtgaacactgagttcaaccacaaccgttttgttaagtcccatggaccagactttgttaagggtctccctgatttcaaatttgagaccatacccgatggcttgccgccttcggataaggatgcaactcaggatgttccagcactgtgcgattctactaggaaaacttgttatggtccattgaaagagttggtgatgaagttgaactcttcttcccctgaaatgcctccggttagttgcatcattgctgatgggactattggatttgcttgaagagtcgcaagggattt

SEQ ID NO: 20345 - DNA, 502 bp, Glycine max
catcatgtgggaattcgaattaattcccgtttatctacttttatctatgtggggtggaaaaaaacgtttgtattcagctacaaagtttattttgtacactgcgggaagttctgtttttttattactgggaattctgggtatgagtttctatagctctaatgaaccaacattaaatttcgaatcattaactaatcaatcatatcccgtggcactggaaataatattctatatcgggtttcttattgcttttgctgtcaaatcaccaattatacccttacatacatggttaccagacacccacggagaggcacattacagcacttgtatgcttttagccggaatattattaaaaatgggagcatatggggtggttcgaattaatatggaattcttatctcgcgctcattctatattttctccctggttaatactattaggttcaattcaaataatctatgcagctttaacatctcttggtcaacgcaatttaaaaaaaagaata

SEQ ID NO: 20346 - DNA, 1002 bp, Glycine max
cagcaaggctttcattgttagatcggggttttatatatgcaatagctcatatacgtggaggtggtgaaatgggaaggcagtggtatgaaaatgggaagctgttgaagaaaaagaacactttcactgatttcattgcatgtgctgagtatttgattgaaaaaaaattctgttctaaggaaaaactgtgcatcgaaggaagaagtgctggtggtttgctaattggtgcagttcttaatatgagaccagatttattcaaggctgctgttgctggagtaccttttgtggatgttgtaacaacaatgcttgatccaactattcctctcactacctcagaatgggaggaatggggtgatcctagaaaggaggaattctacttctacatgaaatcatattcccccgttgataacgtgaaggcacagaattatccacacattcttgttacagcaggattaaatgacccacgggttttgtattcagaacctgcgaagtttgtggcaaaactgagggatatgaagactgatgataacatactgctgtttaaatgcgagcttggtgctggacatttttccaagtcgggaagatttgagaagctccaggaagatgccttcacttatgcatacatcatgaagactctaaacatgactagtcggctttagtctttcagtgcgtgaggcgcagatgcaattgataattgagaattgagatagaccaattattacattcatggcttgagtgagatcatctgcgtaaataccatcatcttaggaactacattgccaacaacttcagaataaaatctgaaattacctttgcaattcagaaagcatgtcattggtgcaattctattagtaatatcctactaatggatgatgtggcaattaaggatggtgcatttgtgtgtttggatttggtatcattgcttatcttttaaaaaaatgtctgaattagtgttaaactggatttggggttaataagggatgtttggtttgacaaaaaaaaaaa

SEQ ID NO: 20347 - DNA, 409 bp, Glycine max
tcggtatgccgcgcgttttcaatggtagttaaaaatccgttatctaattatcctttggaggccagttgttcctaaagctgtctcccttcactttttcgctctctgcttcccattcttgcttctgcttgcttcatccgtttctaggagctcagcagttgatggactgttaccccaagagcagtgacaagaaaacattaaagaggtggttttttattgataaaagagttgggtgaagtggaaatctgataaatattattttgattggtgactctatactccttaaagttcttacattgttgctggactgtaaattgatttaaaatctggatcccatggacttgaagtcgaatcatactcctgttctcactgatgctgcacctgtaacaaagtctagactgggtgtgcattc

SEQ ID NO: 20348 - DNA, 358 bp, Glycine max
cggctctcatgcaacaaactacctgttcaacccaaacccaatccaaccaaccacacaggcggaatgtctgcccccaacgccaacaaccccaacgacggcatcgtcggccaggccgtcaactcgggcaagaacgccgccaactacgtctccgagtccatccagggcacctctgctgaggcttccaaggaggccaacaagcagcaggccaagggcaacgttcccggaaacgcctccctcaccgaccgtgcctccggcgctctcgccgctgccggcgacaagatcgaccagaccaagcacgagggctctgctgaggccaacaagcgctctatctagagtgttagatcctatgttcgacttt

SEQ ID NO: 20349 - DNA, 392 bp, Glycine max
  unsure (1)..(392): unsure at all n locations
ggcttttcttgcaagaacagaagcctagaaaagattctctagtagtacatgctgctgcagtttcaactagccagggaaccccagttcaaactagctctagcgacccttttaaacaacagcgagtcatggtcattggtggagatggatactgtggttgggcaactgccctccacctttctaacaagggttatgaggttgccattgttgacagccttgttcggcgcctttttgatcaccagcttggactggattctctaacaccaatttcttccatccagaatcgccttcagtgttggaaatctctcactggaaaaactattgagctctacatcggtgacatatgtgattttgagttcttatctgaaaccttnaaagtcatttgagcctgatgc

SEQ ID NO: 20350 - DNA, 571 bp, Glycine max
gacccctcaaataaagaggttcttgaatcatcaaacaaggaatcacatgatgtggcaaactttgggattgtcacggatgaagatagagaagctgaccgtgaggctttagaaaagatttcaaagatgatagaggaaaggttgaagactagacctttgcctgcaccacctgcacagccaactggtgatggttctgtaaatttaacttctgaacaacctgttaaagcccgagatggagactctgttgtggatacagagaagaatgaatctgctgaaaataaaaatgagaaagagacgaacaatgataacaaaccaaccagtgaacatgaaaggactgaaagccctgatagaaggcatgatagaaaaagcagagagagggaccgagatagggagctaaaacgagaaaaagatagagaacttgaaagatatgaaagagaagcagagcgggaacgtgttcggaaagagagggaacaaagacgaagggttgaggaggctgagcgtcagtatgaaacatatttgaaggattgggagtatagggaacgagagaaagagaaagagcgtcagtatgaaaaag

SEQ ID NO: 20351 - DNA, 387 bp, Glycine max
  unsure (1)..(387): unsure at all n locations
gtaagctcggaattcggttcgagatcacaatctgttttgatttcggagctgtgggttttattgaaagaaaaaaaattagaagcaaaaatgatgcagtcgttgatgagcatgaaggcttacgtgggtacgaggttaccgattttaacgaattccgagacgagtacgaggaagcagcgcgtgaattgtccgaaccgtaggaatgtgatggtttcgtgcggttcggagaggaatgggaacgaaggaataggttcgaactcaggttcgtttatgtctccgagccataattacgcgatcttgaagcaccggatggagaaagcggccaagtccgaggttagtggttttgtttttttttttttttaaggaaggaaaatgnnnnttttttctttt

SEQ ID NO: 20352 - DNA, 519 bp, Glycine max
  unsure (1)..(519): unsure at all n locations
tactgaagcagtagtcaaagaaaggcttcgtatatacaatgaaaagagtcagcccgtggaggaattttaccgtagtagagggaaacttcctccacttcttcctcctgcacactgtatgtcaaagctcattactcggtcagatgatactgaagcagtagtcaaagaaaggcttcgtatatacaatgaaaagagtcagcccgtggaggaattttaccgtagtagaaggaaactgttggagtttgacctgccaggaggtatcccagaatcttggccctaagttgctgcaagctcttaatcttgatgattatgaggagaagcaatctgttgcagcataagatatataagcatacaatacaaatgagtatttcattctttgcaagaaagcatgcttgacgattttgcaggaaatagaaccaaagaaggtttacttctctattggtattatttgggtaaataattatatcatgaggtgttggaatctgatataacttcttccctgttgggatttnctgctatttt

SEQ ID NO: 20353 - DNA, 516 bp, Glycine max
cggactacagctggtgttgttcagcagtttccaaacaatacatgtagtgtatatattacttactcgaaggaagaagaagcaattcgctgcattcaaaatgtgcatggattcgtcatggagggtagacctttaagggcttgttttggaaccactaaatattgtcatgcatggctccgaaacgtgccttgcagcaatccggattgtctatatctgcatgagattggctcccaagaggatagtttcaccaaagatgaaataatttcagcatacactagaagtcatgttcaacaaattactggtgctgcaaacaatatacaacgacaagcagggaatgtattacctcctccattggatgattgcatggataattcatcaggaaaaccaattgtgaaaaattcatcaagtacctctgttagcattgtaagaagttcacctcctaatggaacttctgggagacctatagctcaaactgcggtttcatggggtacacgggctacaaattgtcagccagctgct

SEQ ID NO: 20354 - DNA, 368 bp, Glycine max
atccgtcaatacctcctttggattttgctatggatgtgtcaagaatgaggaatgttgcttgctatatgagtcatagttcgactcctaatgtgttggttcagttggttctctatgatcacaataatttgatgttccctcgccttatgctatttgcgatggagagcatccctccgatgagagagctcagccttgattatggggtagctgatgagtggacaggaaagctctctataggcaactgaacgattttgaaagtttcatacactttataatatactgaaactgactttcgggcatttgttgcagagatagtcaagttgatgcaacacaagttttcaacactgccaaattacaaaaagcagtagtag

SEQ ID NO: 20355 - DNA, 1085 bp, Glycine max
ctcgatccgcgatctgccgcccttttttttttaagccgaaaactattttttggatctttttggtagtacgaatgtcgcgtttagagttggcaaaatcaagataaaaatggaaaatagaaaatagaaaaaagtattttggtccaccttccgtcttctatcgccgttgtcttcctccatcgtgttagggtttccactttgcagagtttcaatttactctcattatcacatcgcaattcctccgtgtttctgttttgataactcgcaaatattctacttaatagccccacatctcgttccctgaatactgattttgagctttcccctgatttttttagggaaacaaattattgccccttcctctttttccaatcatctccagtgaaaaaaaaaaaaaaaaaactatatctgaagtttattggggatcgggtattgggaaatgcctcgagacttgtcacgatcccgatcgcctccctataggcggaggcattcaccatctcctgtgggacacaggtatagcaggaggagcagaagagacagaagcagatctccttattcgtcctactcttacagcaggcgaaaaagtcgttctgtttatttgtttgatatattttgtaaattatttgctatgtaacttaaacattttatttatctatattttgctgctgatctttcttataatgtcattgtaaactgtactcgttggacataccgaggacattaaacagttataatatttgatatctacaaaattggaaatctggattagacttgaacttgagatcatggtgagggctatgttatcgacttgagaataataatgcataaaacactgagttacggcttgcttttccctactatccattatagttatgctgtatttaaatgtcactgtaaaaatatgatgattttccttggtcgggtctttttcaagaactgactatttttttgttggaagaaatgaacatggcatttccaggattacagagctatggcattataatgaccacagcacgttagtcaaagatgaatcccatggttgataatgcttgatatttaaattcaatatctacttgatatttgcttat

SEQ ID NO: 20356 - DNA, 974 bp, Glycine max
cagaccataaatacagcaaaaagagtgatgatataatccaaagtggacatgttagtgatcctgggattggcaaggctgacttttgccgtttctcctaagctcaagcgttcctgctctgacctggaaagaagggatgtactaaggaagacttctcatctctttccgtcttcaaagtcacagtcttttgagaatttgcaggggttatcagcatatcagatggttaatctagaaagccccaggtcagtgatgactcacggcagtgctgatagagtgatgttgaaaaagcattcctcaagtcaagttctcccttctagaagtaaaagactgtggtggaagttgttcctctggagccacaggaatatacatagatttcagttaggcaaatcgacacaaatacatcctgtgactgctgctttaaatagtcaatgtgggtactcctcagacacccttgaaccaaaacaagacaaggctttgagccatgtggaatcacattcaccaagctcatcgtttggggaatactttcagaaaagctgcgatgacagaaattttgataaccaaaggtggagcagatttcagaaagataattttggtttctggccacaaaatcaatgggtggctttctccacagaatcatcctcatatagcagagtggatgagtgggtgaaagatctcgaaattcagcagccacctcttgaggatgatttcaatgatgacaatattggaagcattgccttcccaccttctcctgatgatggtagatcaatggcaagaagcacagcccagttgattcaacatccagatgccaatctttcaaaggagatattgaatgccaatagtgtggtccagtccctgaacccagcctcaactgcagctcatatatcaagcattggcataaaagccatcccctctctttcacactttttcagtctccgctgtgtcaatttgtcgaacaatctcatagttcatatcacgcc

SEQ ID NO: 20357 - DNA, 554 bp, Glycine max
ggaaaatgggtgatattgtccacacattaacaaacagcaggtggctggaaaaatgtgtagcttatgctgaaagtcatgaccaggccttggttggtgacaagacaattgcattttggttgatggacaaggatatgtatgacttcatggctttagacagaccatccacacctattatagatcgtggtatagcgttgcacaaaatgattaggcttattaccatgggtcttggtggtgaagggtatttaaattttatggggaatgaatttggccatcctgagtggattgattttccaaggggtgatcaacatcttcctactggcgtaatagttccagggaataacaacagttttgataaatgcaggcgtagatttgacttgggtgatgcggactatctaagatatcgagggatgcaagaatttgatcaagccatgcagcatctaaaagaaaagtttggtttcatgactgctgagcaccaatatatttcacggaaaaatgaaagtgacaaaattatagtcttcgaaaggggcaacctcatctttgtcttcaattttcat

SEQ ID NO: 20358 - DNA, 316 bp, Glycine max
ctcgagccggctcgagcttcatcgaacgcgctctgaaggggctctaggatttgcgtggtgctcatcttcagctttgtgctgtcttcatcgcgcagtggttctcatccagtcgtaaagaaagccagcaaccctcgaccgcatggttgctagctatctagcacgacctccgtacctccatagcagcgaaacatggcgggcttcgatccatacgggacatctgccagtggctctatcgttcgggatggccccagatctccagttctacagcggagccacgggcgcgacttcaggaactgggatgcacccctcgacgaca

SEQ ID NO: 20359 - DNA, 838 bp, Glycine max
ggttcgagccgaatcggctcgagcttctcttctcacaccacttactttctctctcctctccatgtcttcttccttacatcaaacgtagaatttttttttccttttcccctttttttaatcttaacccaatttttactctcgcaaagtggtgtatttggggaagtttgatttggaaatgaacaaaggacagtcaccggagcctcttgatttcttcatctggactgttgaggatgttggcttgtggctggagactataaatcttggtagttacagccaaatttttaaagaaaatggtgttaatggagaatacctggaaggcatgtccatgtttacgactgaacagatcctacgttttataagacgttgccacatgaagtggggagacttcatcacattatgcaaggaattaagacggattaaagtggcttgtctgaaaggggagcagaaggtgcggcggccatggtgggcaccggcttgcctatctacagtgttcttaaaggttgcaaaatccatcagacaatcaacagttgtttccttgaacctggaaccatgataatccactaagttagacctctgcatatgtgcaccagtgtacgtatagcaaatttctctttgcctagaccactaaagataggaaagaactttttctagcccccttttttatcttaagttatttttcttttgattccaaatcctggctgtttcttctcctctggagaactgacctgttatgcagtagaaagtccttgtgcactaatttccggtgctgtgtaattatgtattctcttatatgtgaacgcaaatccgatatataaaaaaaaaaaaaaagggcggccgc

SEQ ID NO: 20360 - DNA, 470 bp, Glycine max
ggctcgagatttttgttgtttctaacctttgaaggcgccttctcctctctttctctttctgcaaccgaaccaaaaattagggtttctcgatcttcttcatttgtcactgctctcaccgtttcagggttttaccttcccaacacgacacagggctggttctgagcaattttgttcgttttgaagagtatttatctgtttcagcagtttttttgttttatttattttttaattgggggctacttgtaaaggtgttatcccgattctggaaaggaggggttttccctttgaatttcgcggacaactgttgactacgagaattgtgattgactatgcgaacttcatgggctgatttggctgcaaattctgctaccgaaaatgcaggtcctggttcttctgctgacaatgtgggaacttgtagcactttagctcccacgcgatctgtatatgtacctcctcatctgaggaaccgt

SEQ ID NO: 20361 - DNA, 288 bp, Glycine max
ggcgccttctcctctctttctctttctgcaaccgaaccaaaaattagtgtttctcgatgcttcttcatttgtcactgctctcaccgtttcagggttttaccttcccaacacgacacaggtcctatcccgattctggaaaggaggtgttttccctttgaatttcgcggacaactgttgactacgagaattgtgattgcctctgcgtccttcatgggctgatttggctgcaaattctgcagctgagaacgcaggtcctggttcttctgctaacaatgtgggaactggtag

SEQ ID NO: 20362 - DNA, 474 bp, Glycine max
cagaaattactaaggataggatattaacagaagtagaagtttcagataaacttcttgactttcgctcaaaacaagctggtttcctagatactagctttgacacaataagtcgttctggtccaaatggcgctatcatacactacaaaccagaaccagagagttgtagttctgtggatgccaataaactgttcttattggatagtggtgctcaatatgttgatggcacaactgacataacacgcacagttcattttggcaagcctacagcaagagagaaggaatgctttacccgagttttgcagggccatatagctcttgatcagtcagtctttccagaaaatacccctggttttgtgctggatgcgtttgcccgatcctttctttggaaagttggacttgactacaggcatgggactggacacggtgtaggagctgcattaaatgttcatgaaggcccgcaaagtattagtcatc

SEQ ID NO: 20363 - DNA, 942 bp, Glycine max
attctcataagagacaatggggagcaagttgggatgagcaattttccatactattttggagaggaatcaaagaacggaggcatgactattttagctggttgagaatcacccaagttttatccactgctgtcatcttaggattactttggtggcaatcaggtactaagaacccaaaagatctgcaagatcaggcaggattactattctttattgctgttttctggggattttttcctgttttcactgcaatattcacatttcctcaagagagagccatgctgagtaaggagagagcagcagacatgtacagattgagtgcatacttcctggctagaaccacaagtgaccttccactagacctcattttaccagtgctttttctgcttgttgtttatttcatggccgggctcagactcagtgttgcaccaatttttcctcaccgttctcactggtttcctctgcattgtggctgctcagggacttggacttgctattggggccacacttatggacttgaaaagagcaacaactttggcttcagtaactgtgatgaccttcatgctggctggaggattttttgtgcagagggtccccatatttttttcttggatccggtacatgtcattcaactaccacacctacaagcttcttctcaaggtgcaatatgaacacatctcaccagtcatcaatgggatcagaattgatagtggtgcaacagaggtagctgctctaatagccatggtttttggttaccgtttcttggcatatctttctctaaggagaatgaaacttcaatctggagcttaaattcaacttgatcactctttgcatgtgggtgataatattaattaaacaaagaatcacatgtactaagaaggaccaataattgaagtacctagcacattagagatagtggcttttttttatgtcttgggaatatcg

SEQ ID NO: 20364 - DNA, 536 bp, Glycine max
ggaatatcaacatcactgacttctattacgcaatacagtgtacacccatttcaacttgcaaaatggtattgctctcgagccgaatcggctcgtgatttggttattatcttcatggctcaatgagaaagtcgacatgaaccaagagtagcactacattactactatccattgagccaatcaatctctctaccattgaagcaaaacaacctccgattctgaatagaatatcccatgatcaccatttacaacagagattgagaaggcatttcaccctgaccccacctacctcatgaactgtaaccatgccgccgccactttccttcgctctctcttccaaccgccaagttccgtgcttttcccaaaaagccctttccgcagtcctcggcccgaaccaaatcctgttgcccaggaacgccagactcggactcagactcagactcagagcttcaaatggtgatagtaacgttcaagcagcaaattggtccaagtggatacccgcagggtctttcgctgccgataaagttttcaggttaatc

SEQ ID NO: 20365 - DNA, 718 bp, Glycine max
tcagttacatcttctgctcttgacgcatctcctcatgtccatgaatcctccaaacccacacctcccagtaataaggaatgcccggctcagcaagtattgtgtgatctgccgcaggctgaacttcagctcctctgctcactgcttgctcaagaaggtttgtccgataatgcatatggtcttgttgcggaggtaatgaaattccgggcgggcattgctccaattcactgtcagctttttgtcactcatctggcagaagcagttcgaaacttgacttcatctgcaatggatgagttacgcacttttagtgaagcaatgaaagctcttatcagtacaacatcttctgatggcgctgcaattttaagagttttgcaggctttgagttccttggcaacctcattggctgagaaagagaatgatggattaactcctgcactttctgaagtttggggaattaattcagcattagagcccttgtggcatgagctgagctgctgtataagcaagatagaagcctactctgagtcagtatctgagtctattacctcttctagaacatctgtgtcaaaaccatccagtgtcatgcctccacttccagctggttctcaaaatatcttaccatacatagaatctttttttgtggtctgtgagaagctacatcctgcacagtcaagtgctagtaatgacaccagtgtttctgttatttctgatgtggaagatg

SEQ ID NO: 20366 - DNA, 390 bp, Glycine max
atgataaacctctctctcttctcttgttaatcaattagaatcagattctttcttctttctctctccgttttagttgctatggaaaatactaagaagcgagaggtgagggagggtgaagatgatgaagatgaaatgaagatggagaagttttacgcgctgttaaggagcttccgagacgcgcgtgatcggcggcgaagggagttggaaaaagaaaaacacgagagccgccacagctggaagaagatgaagaccaccgccgcaacaaccaaggacaataaatcacaagtttcttttgaatttcaggacttcaccaccgagattcatttcagaaagccacctttgacttttgcagatccagttgcatcatgtgacacttggatcaaagacgac

SEQ ID NO: 20367 - DNA, 265 bp, Glycine max
ccgtgacttactacatctaatttcatttgcctcttttagtagccatggttttccaaacaaacaataatcctcactttatcttgtttcccttaatggctcaaggccatatcatccccatgatggacatagcaagactattggctcaccgtggtgtgattgttacaatattcaccaccccaaaaaatgcatcacgttttaattctgttctttctcgtgctatttcatcaggcctccaaatccgcctattaccacttcacttttcatt

SEQ ID NO: 20368 - DNA, 365 bp, Glycine max
ggtgtggtacccatactgagtatataatttcacttgatgctgatgacttatcccaaggaagcaatgcttatgttggaaagctaagctcggattttcttggcaccaacttcacaatttatgacagccagccaccccatagtggtgcaaaaccatcaagtggcagggccagccgtcggtttgccagcaagcagataagcccgcaagttcctgcaggtaactttgaggtggggcaggtctcctacaagttcaaccttttgaaatcaagagggccaaggagatggtttgctcattgaagtgtcccaggactcctgtcgtctcaccatcggttgaaagttcagatagcacgccggtcaatggccataaga

SEQ ID NO: 20369 - DNA, 375 bp, Glycine max
attcgtgaccgtgaattcgtgctccacattttacccacaacacaaacacaaagacctaccacgatatccgccatcatccatcatcacccacccattaaccaatcgaattaagactcaacaaaaagcaccacccttcactgttcccacatagaaagcttcgaactttggaatttcctagctgaaattcgctcgtttcggttactgggtcggtctccgagctatgcgtggagctgagggtggtgatggtggcttcgccgtcagaggcggtaacatctactggcggagaaaagaggaaactgatttcagaggaatcgttgtaatcttcgcttgggtttctgttccgcagaacctgttacaagaattcgttgatctgtg

SEQ ID NO: 20370 - DNA, 849 bp, Glycine max
ctcacgcgttcgctgcggcttcttctccttttttgtctcacccaggagtttatgttccatcacccccaatggctcccccactaggtatccagccaatgcagcagccaggatctgtgcccccaatgggcgccattcagggcttggcagaagacttcaacgcactcacattgcaaactcgtcctggaacaatggatccattatttgatgccaaggaacttccaaggccattggaaggggatgttgaaccaaagaatttgggtgacatgtatcccatgaactgcagtccccggtatctacgactcactaccagtgcaggtcctagctcccagtccttggcttcaaggtggcatcttcctcttggagcagttgtatgtccgcttgctgagcctcctgatggggaagaggtgcctatagttaattttgctccagctagtgttgtccgctgcagaagatgtcgcacatatgtgaatccttatatgacatttacggaagctggaagaaagtttcgttgcaacgtctgtaccttgcttaatgatgtgcctagtgagtattatgcacaattagatgcaactggaaaaagagttgacataaatcaacgacctgaacttacaaaggggaccgtagaatttgttgcccctgctgagtacatggtgcggcctcctatgccaccagtgtatttcttcctcattgatgtttccatatctgctgttagaagtggcatgattgaggttgtagccaatacaataaagtcatgcttagatgagctgcccggctttccacgtacgcaaatagggtttgcaacttttgacagcacaatacatttttataacatgaagtcttccttgactc

SEQ ID NO: 20371 - DNA, 457 bp, Glycine max
tacgaatggtccgggcgtgctgcctaggacttatccttagtcgaatcgccgttatcgggccccagggaactccgcgcccagccgcggcaagttgcgagctcgtggctttatcgcaccgcggccgtgcgggcgcggccctatcgtcccgcgtacggcttaaccggctgcccggcgcgctggataccgcccggccccgccgagacggaaccgggaggcccgcgccgggaatcggccgcgccgaagcgcgagccgactctcgttgcctgtccgtgcagcgacggcggacggcaccgggaccgaccgaacgcccgaggacgctcgacggccccggcgtgactccgcccggggtgaaccgtcgtgtttctcgcccgtacgtgttaggtactgtcctcgctttccgctttaaaatagactgccccctctcggggaacccgtctccgcgttccgagactcggta

SEQ ID NO: 20372 - DNA, 270 bp, Glycine max
tgaagaaggaaacctggttggtttgggattcagattcatacaatcaacactaccggctacctcgagaggagtccttaattcacttgctgaagtggctgataggttgatggtgcagtctctttggagcaatggtgattccaatagcagtgtcgctggtggtgattctcatagggttggcttataaggccgtaaagccgccacctcctaaaatatgtggatccgtaggtggtcctgaagtacgcttcaccagagtgaagctcagtgatggga

SEQ ID NO: 20373 - DNA, 549 bp, Glycine max
aatgaatttatcgagtctctatcggctagtgagattgaactctctgaggattacacctgtgtgatttcccatggttctaatccaaaaacaacccatattttctgtgactgcattttggaaagtcatgttaatgattctgaaagacattataaggctgaagaggagggaacgggattgccccttttcagtgttaacattttgcatactccaagccaatatccttctcatgacttcttaagtgtctgtcaccattgcaacaagaagttggaagatgggaaagatatttacatatatagaggtgaaaaatcattttgcagtttgagctgccgcgaaatagagatcacgatcgatgaggagcaagagaaatccaattcatcaccagaaaactctccaaagtgtggatttggaggggaagtttttgaaacaggcactcccatagctacatagagggattcctgccattggcctgagtccatgaagcgagtagacgtgtctgatcatctgttctaaaagagctgtttttgtttgcatctattggcagccatggat

SEQ ID NO: 20374 - DNA, 462 bp, Glycine max
gtcgaatctttatccctcggatacagtggccaattgtgttgctgcggtagtcactgtgtacatacagatacagagataaataattaatttcaattttagacccttcttcttcttcttctaactgaaaccgcagccacccatactcagaaaagagtacaacggtgacttctgcgagggctttttcccctcttgaaacagcttcactgaaagagtttctgttgttgggtggcaatggaagttttgcgaccaaaacttccttctttcaaatttccaagtgccacttattgctgctcgatcactagtaggagctcatcatatgtcagatttgggttccgtcgcgtatctgtttgtgcatcaactgtcactgaagcagtagctgaacctactgttggtttcctcttctttgggtcactccacccgaccccatttccccatacttaaccaggaagtaaatggctcaaa

SEQ ID NO: 20375 - DNA, 445 bp, Glycine max
ggttcatgctgcgtaaaattgagcctgctgctagtaccactccctctcccgccgatgcaccacaagtttaatcaaaatgtggtttatgattttcaagcgttttttagtttcgtacctgcacatagctctgggcaaagctagcctagtcaaaaccatatacaagcaagacacgagggatgcatatatgaagtataaaaattaatgcgtgggggtcaacatttaggaaatgtcttctagagttactgtacattttaaaatgtttgttggcttggtttattattttcatctttgaattccaagactagtttggtcgactgttgtcacgttagtttgtatcctgctgcagaataacttgcttgtaattgtatactgattagttggtatatagtgatatattatatgtactaaatgcattaatgcaggttatgattttgctaatcttgtt

SEQ ID NO: 20376 - DNA, 556 bp, Glycine max
ggcacagaacagtggcaggggattgattcagaaattgggaaatgaaattgaaaccacacttccttggaatgcagatcctgtggcaattaaatttgatgaaaaggggagggccattgtggtattagatggagaatatggaagacaattggactctgttagtgaagtggaagaacatgaaggaagtttgtggataggctctgctgtgcaaccattcattggtcttataaaagcttaggcctttatttacgtgtttgtggaaaaattattaagtggtcctcaatcactaccttattcatggtgttagcagatttttatatgacacataattaagtatgtgtcacgtaaaaattagttaagactatagataagtaatgatttaaaattacctaataatttttcgtgtttgtgtgttttattttcaggtcaaattttaaaatccaaattccaaaataaaatgtattttggataaaataaggttgggttagttttctttatctgatgttaaaagagctttcttctgattttaagaataataaaaaatggtattcttattctt

SEQ ID NO: 20377 - DNA, 503 bp, Glycine max
tctcgagccgattcggctcgagcgattgctcctctttttctttgtcccaaacacacttcaactccactcatttccttttagtggctcttgagtcttgaagttccttattagataagatttatgcaaatcccttcagaaaatctccaatatccaataattgcgccaaacccaaatccatttcacttcatattccttcaacaactcgtcacctgaaccgaaccatgagagaggcgcagaacgacatcgttgcaacagaattcgcaacgacaacaaacgacgaggaggttccgtccggcgtcgttttgttcgggaagtacgagttgcgaaggttgctgggagttggcgcattcgcgaaggtgtaccacgcgacgagcgtggacgacacgcaccagagcgtggcgttgaaggccgtgagcaagaacaaggtcctgaacggaggcttcgccgccaacgtggagcgcgagatctccatcatgcgccgcctccaccaccccaacatcatt

SEQ ID NO: 20378 - DNA, 317 bp, Glycine max
ctttgtcccaaacacacttgaactccagtcatttccttgaagttccttatgcaaatcccttcagaaaatctctaatatccaattgtcaacaatcaccattgcggaagcccaaaacaaatccatttcaccgaagaaccatgaccgttacaacagaattcgcagcagcgacaaacgacgaggaggtgccatccggcgtcgttttgttcgggaagtatgagttaaggcggttgctgggagctggcgcattcgccaaggtgtaccacgcgacgagcgtggacgacacgcgccaaagcgtggcggtgaaagccgtgagcaaa

SEQ ID NO: 20379 - DNA, 551 bp, Glycine max
cttttatagtcagaacttcaattatattcagcaacaaataacataccatacaagaacgacaaactgaagtgtgtgtagctctatgggattatcactttccttactccaatctgcgtgggaagaaattgttagacattttcccttttctgatttgcctctcagcatcagctttgcttccaaagatggaactttgattttaagggcatcaagcttcaagagaagagaatcagaaagtgctattactgttttgtcaaacgggtccagaagttcgaaccggttgagggataacagaccccaacatgtgatccttgaaagaaacttttcgtttgttcaagatgaggagaacaataaaatgggttgggatactcttgcaagcaaaggtggggaattgaaacataaaccagtgcctgtgctttctctgcctcaagcagcgattttctctcactctagacctgcctctgagcttgatgctgcagcaacaaagcttcagaatgtttacaagagttaccgtactcgaataaaccttgcagattgtgcagaggttgtggaag

SEQ ID NO: 20380 - DNA, 729 bp, Glycine max
cttgggagtccttcgcatatgagtgctagcatggtgatggtgggtttgcctccttctttgggtattgggagtgactctgatgctcaaaagcttaggacccgtttgagggatgaatttgatgttgaagtaccaatttattttcgtggtggggaagatggctctgttactgcgtatgcacgaatttctcgtcaggtttacaacaaggttgaggactattataagttcaggaatgcggttaatcaacttgtgcaagatgggtttacttgtgctcttctttcggcttgaaattggggtagcctatgctctgctcttagttttaattaactcctcaataacatattcgtccattttatatgtgggatactatttgcaaatgttgagtttgcactttgctgattgcgctattttgcccggtctgttgaaaatttcattgtctatatatccaagtatttgagtggacatttgttgtttaacattttcactactcgtttctgcaatattgcaccatcagtactgtagtggtctggtggttgcttctttgatattttacaacattgctgctgaagcacaaataaacactcatgatatccataggtttacactattttgggtgtataattggaaatttgcaaaccattctatctcattagatgctgtgtgtatctattatttggaattaattccctgttgacacttctaactttttcatcagatactctgttttgacct

SEQ ID NO: 20381 - DNA, 521 bp, Glycine max
aggttagagggcataaaatcaattcactcaagcatgctcaaatctttccaaggcttcgtcaattctccttccaaagcttccaaatgcttcgctccaatggctttaggctccttcgatcgctgcccgaaaaactcctccgccacgccaacgaacccatatatgatggagtgtgccaaaggggttataggacattgagttctggtctttgtaatccatccagagttattgggaatttttctccaaatgttggaaatggtgttaatttgaagaacttgttgctttttggagccgcggatacatattgggggacatctagatccgttcatgggtcagcatcattggcaagggactattacgaagtgcttggtgtgagtaagaatgctagttcttctgaaataaagaaagcatactatgggcttgcaaagaagctccatccagacacaaacaaagatgatcctaaggctgaaaagaagtttcaagaagtttcaatggcatatgaagttttgaaggatgaggaaaaa

SEQ ID NO: 20382 - DNA, 431 bp, Glycine max
gggttttagggcattttttcgcaaccagaaaacccccaattctccttccaaagcttcctcatttctctctcaaagagctcccaaatgattcgctccaatggcgtcaggctccttcgatcgctgcccgaaaaactcctccgccacgccaacgaacccatatacgatggagtgtgccaatggggttataggacattgagttctggtctttgtaatccatccagagttattgggaacttttctccaaatgttggaaatggtggtaatttgaagaacttgttgctttttggagccgcggatacatattgggggacatctagatccgttcatgggtcagcatcattggcaagggactattacgaagtgcttggtgtgagtaagaatgctagttcttctgaaataaagaaagcatactatgggcttgcaaagaagct

SEQ ID NO: 20383 - DNA, 258 bp, Glycine max
atggagttgagcagaacagaaagacatattttgaaagaactgggattcatttgtcatgttgaacatcctcataagttcatatcaaattaccttgctaccctcgaaacacctccagaattgaggcaggaggcttggaatctggctatatgatagtttgagaactacattgtgtgttcgatttaagagtgaggttgtggcttgtggagttgtatatctgctgctcgcaggttccaagtaccccttcctgagaatccaccg

SEQ ID NO: 20384 - DNA, 1734 bp, Glycine max
tgttgattctactggacatatcaataagaaagcagttgaacttgagtctattgctggtgcatactggagaggagatgaaaggaagccaatgttgcaacggatatacggtactgcatgggagaatgaagagcagttgaaagcttaccttcacttcaaagaggaagccaagcgtcgagatcacaggcgcctagggcaagatcttgatttgttttctatacaggatgatgctggtgggggtctagttttctggcacccaaagggtgctatggtcagacacataattgaagatttctggaaaaaaattcacatgaaacgtggctatgatctactgtacacaccgcatgtggcaaaacctgatctttggaagatcagtggtcatttggatttctacaaagagaatatgcatgatcagatgagcgttgaggatgagctttatcagcttcggccaatgaattgtccttatcatattttggtgtacaaaagcaagcttcattcctatcgtgatttccctatcagggtagcagaattaggaactgtttatagatatgaactatctggaagtttacatggccttttccgtgttagaggtttcacacaggatgacgcacatatattttgtttagatgaccagattaaagatgagatcaggggtgtcctagatcttactgaagaaatactattgcaatttggttttgaaaagtatgaagtaaatttatctacaaggcctgaaaaggctgtgggagacgatgatatatgggaaaaagctacctctgctttagaagatgctttggatgataaaggttggacctatcaaattgatgatggaggaggtgccttttatgggccaaaggttgatatcaagattgaggatgctcttggtaggaagtggcaatgctcaaccatacagcgttttgacatcacatatgttgactcaaatactgagaaaaggaggcctataatgatccatagagcagtgcttggatcattggaaagattctttggcattctcattgagcattatgctggtgattttccattatggctttctccaatacaagctcgagttttacctgttactgatgcccagcttgaatattgcaatgttgtgaccaacaaacttaaaatgtatggcatccgagctgaagtttgccatggtgagcgcctacctaaactaataagaaatgcagagaagcagaaaattccattaatggttgttgtgggctcaaaggaagttgaaacagaaacagtcactgttagatctaggtttggtggggagcttggaaccatgccagttgatgattttattgacagaataaagttgggaacagaaaacccaatatcattatgatgatattttaattggcaaaagatggtcatcttatttgtttatgtaatgattggaaaagaatgaaggcaataaacatttgaaacatcatactttgtatattagacaagtattgaatagtccacgtcgttgaagaacaaaggctctggcgtttgcaccaggtaagcatacgatttggctcgataatttgtacttgtatcaatgattatgaaatatagctaatgtaacatcagaattgaattgtagttaattgctattatcatatgacagaagccagccaccccaagtttttgtgaagggtcaagttggacaacaagtgctcaagactaagttgtgtccagcaaaaacaccaaacccaatgtggaatgaggatttggtgtttgtggcag

SEQ ID NO: 20385 - DNA, 407 bp, Glycine max
tcagcaagtggtgccactcaacgctgagcaaagcgcggattttaagaaggagatcgccactggggtgtacgagatcgacgtgaagatgtaccttagggtgaggttcaagctgggggtgttgaagaccaagacgctcaagcccaaagtatcatgcgtctggcgtgttcctttcaaaggaagcgccgcctttgagaccaccaagtgccactgggatcgctgatggattcgcatctgttttcactcatttcttccttttcatatttctttattgattggttacttttggacataggtccttcagggttatcccttcgctcgaggggatttttgctccattctttatcctttatatcacactcttgtcgttatttgttaataaatcaattttattttcattccccttcttc

SEQ ID NO: 20386 - DNA, 430 bp, Glycine max
gtcgattgcacgcgtccgtaagctcggaattcggttcgaggaagaaccctgggtgcacttgctttgactggtaaagtgcattacagaatgccttttgaacctgttatgcctggagtgacctttttagagtttggaactgctcaggctgcagttgaattaattaagcagggcaagattgctgcagtttttgttgagcccatccaaggagaaggtggaatttacagtgctacaaaagaatttctacagtctctacgtaatgcttgtgatgaaactggggcacttcttgtgtttgatgaggttcaatgtggtttaggtagatcagggtttctctgggcccatgaagcatatggtgtcttcccggatatgatgacccttgcgaagcctcttgctggaggcctacctattggagcactcttagtgactgagagag

SEQ ID NO: 20387 - DNA, 426 bp, Glycine max
gtcgcaggcacgcgtacgtaagctcggatttcggctcggggaaaaaaaaaactacttctttcaagaccttccttttttcgttctcccatcaaacccccatggaagtattcccaaggtgctgtcttcgatgttccaacacatgaagaagctgaagtgggtactcgcgaactcgtttcacgaactggagaaagaggtaatagactccatggctgagttatgccccataacaacggtgggcccactagtccctccatcgttactcggccaagacgaaaacatcgaaggagacgtgggaatcgaaatgtggaagccacaagactcgtgcatggagtggctaaaccagcaacctccctcttcgggtatctacgtttcctttgggagcattattgtgcttaccgctaaacaattggagagcatagcgagggc

SEQ ID NO: 20388 - DNA, 690 bp, Glycine max
  unsure (1)..(690): unsure at all n locations
tcaggaactatgtgatgcatcaaacactttctacttactattaccttatgaagccttctggtggcccgcagcaaagtcatggatgtcttcatcaaggctgctgaatatatggaaattccagttcgtaggactgatgatgaacctcttcagaagctttttatgttggtaaggagtgagttgaatcttgacctcaaaaacatcaagcaggagcaggctaagttttggaagcaacatcctgcgctggttaagacagagctgttagttcaagctcagttgacccgtgaacttgcagccttgtcgccatctttacaaagtgatttcagacaaattttagaaacagcaccccgcctacttgaagaattaatgaagatggcagttataccgcgaaatgctcaggggcatggatggctgaggcctgcaattggtgttgttgagctttctcaatgtatcgtccaggctgttcctctcagtgctagaaagtctactggtggatcacctgaaggaattgcaccatttctgcagttgccacatataagtgagactattattaagaaggtggcccgcaagaaagtgagaacatttcaggaacttcatgacatggactctcangagcgagctgaccttcttattcaaacaggtgggttatcttccgctgaagtggaagacatngagacggtactggacatgatg

SEQ ID NO: 20389 - DNA, 515 bp, Glycine max
caacaatttcagagttgctccgatttcctcatcgtggggcaccatcaattgagttaacaatctttgttccatttcggcatgaaaccctaattcactcgcttctcgatctcgttagagcaatctttccacgctcgtcttcgcgctccatctgtacaagaagatccgtcacgagcgttggttatacgatggatgggaacaaggacgacgcgttgaaatgtttaagaatcggcaaagaggcgatggaaagcggcgatcggtcacgcgctttgaagttcgtgacgaaggcgcgtcgcctcgaccccactctccccgtcgacgatctattgtccacgatagaggtggatgcaggggatcaggcccccgccgccgaggcggagggccccacgaagcccactgatcaaccttctatccgccggagggccaccggggcggctgcgaccgtctcggccgggccctcgtcggcctcgtcctcttcggcctcgtacaccgaagagcaagtctcaattattagggaa

SEQ ID NO: 20390 - DNA, 598 bp, Glycine max
acttaatgaaaggtttttaacccttatgtcaatgggcccttcaatcagtaaggatgacaaagtttcaatactagatgatgctattgattaccttaaaaagctcgagagaagggtaaaagagttggaagcttacagggtggtaacagacatagagactgggactagaagatcaccacaagatacggtggagaggacttctgatcattattttaggaaaaataataatggcaagaaaccagggatgaaaaagaggaaggcttgtggtgtagatgaggcagaaaaagagattaattcagatgctttaaaaggcagttatgctaatgatgttactgtgagtaccagtgacaatgaaattgtgatcgaattgaagtgcccctcgaaagcaggaaggctgctagaaattatggaagcaatcaacagtttcaatatagattttagttcagttcagtcaacagaagctgatggaaatctttatctgaccattaaatctgtgctcacaggaccaagtgttgcaacaaccaaaagaatcaaacaagcactccaaaaattggcttccaagtgctgaatttttatctataccttaaaaaccgtggggggt

SEQ ID NO: 20391 - DNA, 640 bp, Glycine max
cctttgtaaggtcgaccatgcataggagcctcttgtacctgttttcagctattcataccaaattatgcgtagtcttcaaaggaacatgtgtgatgatgagacaggccatgttctttatgagaccatgtttgtttggaacgagttcttaactcgaggaattcggaatcacctccagaatactatttggacagttgcgctagtgtatggattttttaaacaggaaatgcttatgatatccagacgggagttcacacttacgctcattgcaagacgatcacgtcattatgctggcactaggtatttgaggcgtggtgttaatgagaaaggaagagtagcaaatgatgttgagacagaacaaatagtctttgaggatgttgctgaaggtcttcccatccaaataagctctatcatccagaaccgtggttcaatccctcttttctggtcacaggaaacttcaaaactaaatattaaaccagatattatattgtcaaaaaaggatcagaattatcaagccactagacttcactttgaaaaccttgtcaaaagatatgggaatcccataattattttgaatttaataaagacccatgagaagaagcctcgcgagtccatacttcgtcaagagtttgctaatgccata

SEQ ID NO: 20392 - DNA, 561 bp, Glycine max
ggctggggtcaagcctgatgagcaaacttatagtttgttgattgacgtgtatgcgcacgctgggacgtgggagagtgcgaggattgtgttgaaggagatggaagcgagcaatgtgcaacctaattcttatgtttttagtaggcgcccggcgaattatcgcgacaaaggggagtggcagaaatcgtttcaggttctgaaggatatgaagagcagtggtgtgcagcctgataggcatttttacaatgtgatgattgatacgtttgggaagtataactgcctcgatcacgccatggctacattcgagaggatgttatcggaggggattcggcctgataccgttacttggaacacgctgatcaattgtcattgtaagtccgggcgccacaatatggccgaggagttgttcggcgaaatgcagcagaggggatactcgccttgcattactacttataacattatgattaactctatgggggagcagcagaggtgggagcaagtgagtttgtttttgagcaagatgcagagtcaggggttgctgcctaattcaattacttacacaac

SEQ ID NO: 20393 - DNA, 436 bp, Glycine max
ttttgggaatggaattagatagaagggacaatgcccatactgtgaaaaggaaattgcaggttgccttcaatgtcccaactgaggcaagctcacttatatgtggggacatggtcttgaagaatgacctaagtgtggttagaaatgattctccacttctactcactaggacctttttacataggagttcatctaccccttgcctttcacctactggcagggatcttctgcagagggatcagagtggaccaattgaggttataggttgctcagatatgttttcaggaaccaaacagctggttaaggatattatgaaggcaataaaagttggcattgaacctatccccattcagagtggattaggaggtgcatattattttaggaacagcaatggtgacaatgctgctattgtgaaaccaactgatgacgagccttatgc

SEQ ID NO: 20394 - DNA, 583 bp, Glycine max
cgtattttaatgcccgaaagttggataggatggcctttgcgtaaagattatatcgccccaaatttttatgaaatacaagatgctcactaaatgataaaaataagaaactaatccaaacttctacaacccctgatattcaaagaatatcagtacattctcttatagatcagacaaagtaattgacattaaatcagtcagaataatggaagtatcattcacatcttattatgtatgtgagaagtcacaaaattcataaattattatagggattaaaatgggataggggttctttaagattctaaaataggaacaatacttatttattatgagccaagccgttaaaataatattggatgaacctccaaaattctttatcatgaactatttaacgtgcacatcaacatcaacaattattttggccacgaaaaacaaatagtatgatcatgggagatgaagaaaaccggtaataacttaatgaaagaacgggctcgattttttttgggaatccaattacgatgaaatttgaattattccactccacccatgaaccttattagagttgacttttaggtctttaaaccaa

SEQ ID NO: 20395 - DNA, 462 bp, Glycine max
gtccatctggtaagaaatatgatgctgtgattcactgtgcaatgggctttccatggtccacctttgagcctaacttgaccgtgactggaaaggttgtagacataactccaagctctgcttcaatgctgacatttgctctgaaaaaacttaccttctccaaaaagcaacttgtgcctttgcttttatttcctaaaggtgaggaccttcaacatcttattcatttagtcaaggaaggaaagcttaaaacagttgtggactccaaatatcctctaaccaaggctgaagatgcctgggctaagagtattaatggccatgcaactgggaagataattattgagttctagatatgcataggatgtgaatggattcaggaatacccttgcagttttactttggtatgacatgagacgaatatcatttgttgtgtccctacatactgtaacaattgaattggtctgaatc

SEQ ID NO: 20396 - DNA, 404 bp, Glycine max
gtttaaaccaagcctcaactgatgaaggcaagttccttctttgtgcacgcaagtgccgacgtgcaactcacactgactatattatctctctaaactgtgatgatgtatcaagagggagtagtacctatattggaaagttgagatcaaactttcttggcaccaaattcacagtgtatgatgcacaccctccaatttatggagccaaagttacaaagtctcgttcctccaggctagttagtctcaagcaagtttctccaagagttcctgctggcaactatcccattgctcatgtgtcatatgatctgaatgttttgggctctaggggccctagaataatgcaatgtgttatggatgccatccctgcctcagctgttgaacctggaggtgtggccccaacacagact

SEQ ID NO: 20397 - DNA, 407 bp, Glycine max
caaattagatgttgtggtttataacattgtcattcgagccattggtctatcacatggagttgatttttcaattagggttttccgtgaaatgaaggagttgggtatcaaccccactgttgtcacttacaacacattgattaggcttctgtgtgattgctatagacacaaggaggcacttgcgttactccgaaccatcatgccccgtgatggctgccaccccactgccgtttcttaccattgtttttttgcctccatggagaagcctaaacagatacttgctatgtttgatgagatggtggagagtggggttaggcccaccatggacacctatgtcatgctcctcaacatgtttgggaggtgggggttttttcgcccggtttttatggtgtgggaatagatgaagcaac

SEQ ID NO: 20398 - DNA, 339 bp, Glycine max
agtggcagaaaattgtagtgctgaggatgaacagctatttcacgagggtgttttcaataatccagtatcccttgacaagaacttctggaactatctttccattgcttttccttcacgaaccaaaaaggaaatagtgagttactactttaatgtcttcatgcttcaaaggagggcagagcagaacaagaaccacctgttaagcattgacagtgataatgatgaatggcaaggtagtgagggcaatgattttgcaactcgagaggaagacgaggactctgttgctgagtcccctgtatgtcatgatgagacttgtatggctgactgccacaataatgatct

SEQ ID NO: 20399 - DNA, 375 bp, Glycine max
gtctaagaggagatatactactagatgatttcctagtggctgaaaattcgccattgcagcctgacattaattcttctgagagagcttcacctgttacaagctccaaacaaaatcaatctaacttgacttataatgtaacagcaccaaatttggatggtggaccagatactccttcatttggtcactcaggcatggacaaaaattccttggagaaactgagggaagcatcagctgctgaagctgaggcagcgggtgctgtctggcaaggctggtgcagtctatatcaagtaatccagctgaagcaacatctctggcagttgagaactcacaagctgcagaaacagtttcagatggaagtgacactgagggagatgt

SEQ ID NO: 20400 - DNA, 345 bp, Glycine max
tcccatcggttttaaaaagtactttggcgtgtggttggaaacaaataatagagaaaataaaaaaatgagggttaaggtgcatagctctgatgataccaagaaggatgaagaggttgtgcttcctggctttagattccaccccacggatgaagtgcttgttgggttttatctgcagagaaaggtggacaaaaagcctctaaaaattgaactcatcaaacaggttgatatctacaaatatgatccatgggatcttccaaaggtgaattcttttggggacaaagagtggtattttttctgcataagagggaggaagtacagaaacagcgtgaggccaaacagggtaac

SEQ ID NO: 20401 - DNA, 522 bp, Glycine max
caatggacattgatcccatttctgatacagttaccaatgggtttgaagatgataccaagaagaagggggaatttccatgtagttctgctgatggtacaagaaaagataatagaaggcttaatgtgccagtgaatgagaatgtctatggtggaatgacaaaggcagagatctcagaagctcttgaaaaagaactccagttagcccaacaggacagaattgtagagcaaaccaaagaaaagaagaatagcttggagtcttttgtttatgatatgaggagtaagctcttccacacatatcggagctttgcaagtgaacaagagaaggatggcatatctagaagccttcaagagactgaggaatggctttatgaggatggtgttgatgaaactgaacatgcttattcttcaaaactggaagaacctgaaaaggctggacaatccaattgagaatcggacaaagatgtttaagaaagagtgcatgctccaagagatttatcgtagtgcatttttaagcatccggctt

SEQ ID NO: 20402 - DNA, 839 bp, Glycine max
tgcgataccggatgatggggaggagggtgcggcggatttggataagagatttgggttctccaaggagttcactagtaggttggaggttggtgaagaagtgggtcgagggcattttgggtatacgtgttctgctaagttcaagaagggtgagctcaagggtcaacaagtagctgttaaggtcataccaaaagcaaagatgacaacagcaattgctattgaagatgtgagaagggaggtgaaaatactgcgagctttgaatggacacagcaatctgatacagttctatgatgcatttgaagaccaagataatgtctacattgttatggagttatgtgaaggggggggaggctcttagatatgatattatcaagaggagggaaatactcagaagatgatgcaaaggctgtcatggtacagatactaaatgttgttgcattttgtcatctacagggtgtggtacaccgagatcttaagccggagaattttttgtatgctaaaaaggatgaaagttctgagttgaaagctatagactttgggttatcagattttgtcagaccagatgaaaggcttaatgatattgttggaagtgcatattatgtggcccctgaagttctccatagatcttatagcacagaggctgatgtgtggagtataggtgtgatagcatatattctattatgtggcagtcgtccattttgggctcgaacagagtctggtatttttagggcagttttgaaagctgatccaagctttgatgaaacaccgtggccatctttatctttagaagctaaagattttgtcaaacgcttattgaataaggatccacggaagcgaatatc

SEQ ID NO: 20403 - DNA, 783 bp, Glycine max
tctctatacttctttgaaaagcagaagagcaaggtcatggttatatgggacagggtggttcagaagtttcattgcagactatggagtgcctttcatggtggtcgtgtggacagctctatcattcatagtaccaagtaaagtgccttctggagttccaagaaggctcacttctcctcttgcttgggaatctacatctttacatcattggacagtaatcaaagatatgggggaggtttctctggcatatatttgtgctgctgttattcccgccttaatgatagcggggctttacttctttgaccatagtgttgcttcccagatggcacagcagaaggaattcaatctcaggaaaccttctgcataccactatgacatattgttgctaggattaacgacattgctttgtggattaattggcttacccccttcaaatggagttctgcctcaatcccccatgcacaccaagagcctggctgttttcaagaaacagttgatccgaagaaagatggttaaaagtgccaaggaaagcataaggcagaaagctagcaagtctgaaatatatggggaagatgcaagcagtgtttatagaaatggatagctgtccagataatcatttagtggtcaaagagttagaggatttgaaagaggttgtcctaaacggtgaagacaaagggctcaacaataagagtacctttgatcctgagaaacacattgatgcatatttgcctgtcagagtcaaggagcagagagtgagcaatctttacaatcactgctagtggagca

SEQ ID NO: 20404 - DNA, 454 bp, Glycine max
ctctctctctctctctctctctctacacataacacttctctcaacgctgacaactttcactaagcagagaagcatggtgtcaaaaaatccgaacccctctgaggctttttacttggacccctccggcatgtcgctccccggaatcctccccttcgccgccgccgccgccgccaccgcagtttcctttgaggaccctgctaagaagactcgcaagccttacactatcaccaagtctagggagagttggaccgaacctgagcacgacaagttcctcgaagctcttcagttatttgaccgtgactggaaaaagaatgaagcatttgttggatcaaagacagttatccagatacgtagccatgctcaaaaatactttctaaaagttcagaagagtgggacaagtgaacatcttcctccacccagaccaaaaagaaaagctgttcatccatatcctcag

SEQ ID NO: 20405 - DNA, 998 bp, Glycine max
  unsure (1)..(998): unsure at all n locations
aaaaaataatagttaatagttaatagttaatagttaatagaaaaggatgagaggaatgcatataatatgattatgattatgcagtgctggattgagtcaaaggcaaagaaagagtgaagcagtaaatctatgatctagctatctacatgggtggtggaggaacactcgtgcaagggattcgacgcttgtttaaacgacgcgcttcttctcctgcttctgacgatcacaaccacaacaatgtcaatgccaataatagccgcgttttagtgagagatttgcgcgcgcaattggcttcaattcccaacactcttgaccccgtttccgatttcgatttctctaccttgaagcccatcaaagttcccacaccaatccccttcagaccctcttccatggatcatcacaaaaagggtgcaccagagacagagttttttaccgagtatggagaggcaagtcaatatcagatccaagaggttgttggaaaaggaagttatggtgttgtgggttctgccattgatactcacacaggtgaaaaggttgcaatcaagaaaatcaatgatgtttttgagcatgtatctgatgccacgcggatccttagagaaattaagctcttgcggttgcttaggcatcctgatatcgtggaaattaagcatattatgcttcctccttcacggagagagttcagggatatctatgttgtgtttgagttgatggaatctgacctccatcaagtaatcaaggcaaatgacgatcttactcctgagcaccatcagtttttcttgtaccaacttcttaggggcctgaaatatatacatacagcaaatgtgtttcatcgtgatttgaagccaaaaaacattcttgctaacgctgattgcaaactaaaaatatgtgattttgggcttgctcgagtttcatttaatgatgctccatcagctatattctggactgactatgttgcaactcggtggtaccgtgcacctgaattatgtggntcttntttc

SEQ ID NO: 20406 - DNA, 363 bp, Glycine max
gtgggaagaagataacaatgttgaagttgggatttgggtttcgaatatcgattctaacgcctttactgccggcggcactgtctaagtatgaagccatagagcctttgctgcagcgcttggactccaaaagggcacctccatccgtgcaagaagccgccgccattggtcttctcaaaaggctgcttcctatccatttctccagttttcagttcaaaatagtttccaaggatgtctgtggcggagacagttgttttctaataaacaatcacaacaagtcaagccagaatgagcctgagattatcattagaggaaccacggctgttgagattgcatctggccctcattggtaatttaagtattggt

SEQ ID NO: 20407 - DNA, 290 bp, Glycine max
ggttttagtctgttagggaaaattgtaatcgctggcagatagtgagtacgataaggaataatgatgaatgtgtaacatatcataaagcgggtaagcttgttggggcccctgtagtcttcagagatcagatcaccctattattgttgcaactgcacttccccatactagacttattatttatgtcatatcaccaaatcatataacattaagtttaatttagtgtcaatgtaaaagaatttatcaaagtggacttggaaactttaatcaaaattttaggtttatttttgttt

SEQ ID NO: 20408 - DNA, 1306 bp, Glycine max
gaataagaggaggaggaagagtagggaggcgagtgaagaggttaagcccgtgggggagaacaggttagccgcggttgaggttgttgaggatgaagaagaaggaagtgatggtttgaggaatttgcttggcgaagagtttgcgaggagcaagtggaggggttccacgaggttgctgcttctggatgaacgctacgcgggtcgcggcatggaggagttgcctgaggcaattaaggctgttttgaaggagtatgcagaaaagagtacaaatttgacgcttgagctagttagatgcaagctgacactattctatgattactggcagatgactgaggtcttggaggccttgctgcctgagggtatgattattccttctgcttttgagactgttggtcatatagcacacctgaatttgagagacgaacatttaccatacaagaggctaatagcaaaggttgtgctggataagaataagccaaggatacaaacggttgtgaacaagattgattcaattcaaaatgagtacaggaccatgcagcttgaggttttagctggaaaccactctcttgtgactacagtagttgagaatggtattcactttcaggttgacttagcgacagtatattggagttctaggctaggaactgaaagacaaaggcttctgagtggttttacacggaacgatgtcgtctgtgatgttttctctggagttggtcctttagccatatctgcagcaaggatagttaaacgtgtttttgctaatgacttaaatccttatgcagttgagtatctggaaagaaattgtgttctaaacaaacttgacaggaagattaaggtctttaacatggatggaagaaggttcattaaatctatgtatgacagtgatatttctcagtccatcacacaggtggttatgaacttgccaagtgaagctgcagaatttctagatgcatttcggggaatatacaaaaatagacccaaggatggggaatatactttgccattgatccatgtttatggattctccaaagcacgagatccagaatttgattttcacgagagaataagaattgcgctgctagaagttgcggtcaacgtagacatgcgacgggtacgacttgttgctcctggaaaatggatgttgtgcgcatcgtttattctccctaaaagtgtagcatttgctgatactgctgcagttgatacctaaacaatatttattcattgcatgtagtaaattttgttccattgcattagctgtctaaaattgatattgtgtatatatgtaacatgagtatttatttattttttt

SEQ ID NO: 20409 - DNA, 963 bp, Glycine max
  unsure (1)..(963): unsure at all n locations
ggcgacactatangaagagctatgacgntcgcatgcacccgcgtacgtaanngctcggtaattcggcttcgagggaactaaaccataccatataaagagagcaccgcagatgaagccgtttctcatcccgtgtgagggggtgccctatgcatcatcctttacgatgcaatcagagagtttaaatacacaccagagtagtacaccgaacctcaggcattttcttctttcagagaacgcctataccacttgcagagaaccgaaaatgatcgggtttgctttggtagatcaggcatacacggatggggcctctttgcacgtagaaatattcaagaaggagacatggttcttgaatatcgtggtgaacaagtgaggcgcagcattgcagatttgagggaggcacgctatagattagaagggaaagactgctacctgtttaagattagtgaagaagtggtggtagatgccactgataaagggaatatagctcggctgattaatcattcttgtatgccaaattgctatgcaaggatcatgagtgtcggtgatgaggagagccggattgtactcatcgctaagactaacgtggctgccggtgatgagttaacgtatgactacttgtttgatcctgatgagccagaggcaaactaagtcccatgcctatgtaaagctccaaactgccggaaattcatgaattaggaaggattatacaaataaatgaacaccagatgactagtattgtttcttctccgcaaggagcactaaccccccatcccctcttttgcagggaagctcacagttacaccaaagctgtattttttatcaaaccaaaagaagagaaaacaaagtagggagaaaaaaaaaggcatagtttagtgtttttcttttacccttttgatttcctttagacattcatccaattttaataaaaacctagatttggtaaaaaaaaagnaaaaaaaaaaa

SEQ ID NO: 20410 - DNA, 1222 bp, Glycine max
gcaccgtgtccacaagattcttagagctcggcaaccttattgggacctcaacttctacattaatctttccaccagacatcagcttccatgattttctgcactctattctgaggtgaccaattctgttcttcttttctcgcataataaagtaatcaataagcacataaaccttcgaggacatggcatcagccttgtccacgaccagtgtgctttgcaggaggaaacctcagcacatgcatattatcctaccctcttcacagacactccaaaatggaactctaagaactgatgtaactgcttcagcctcaaaagataattcagcatagaaagtgacaagtgttgttcctctttgttggtgaacagaagaacagttttggcttctggggtttccttgttgggtttcccgggtgagagtttggctgtggtgaaacaaggccttctagcagggagaattcctggcctgtccgagccagatgaacaaggttggaggacctatcgcaggccggatgagaagtcaggaggacatggtgttggatggagtcctattattccatacagcttcagagtgcctgaagaatgggaagaggtaccagtatcaatagcagatcttggtggcacagagatagatttgagatttgccagctctaaggaaggacgtttgtttgtcattgttgctcctgttcttagattctccgatgatcttggtgacaatgctacaatagaaaaaattggacctccagagaaagtgatcaatgcatttggtccagaaatgattggggaaaatgtagaagggaaggttctgagcgttagtgcagcagaacatgaaggaagaacttactaccagtttgagctagagcctccccatattttcattactgccaccgcagctggcaaccgcttatatttgtttggtgtaacaggcagcggtcttcagtggaagagacactacgatgatttgaagaagatagctgaatctttccgggttgtataactaaaatcttctgtgaacccagagctaattgaaatgcagctttctatatttgtagtgtagtacaacaaagaggttgtttcccactactttgtctgactgggatttatgtgaatcaagagatcatataggcaaaatctttgtaccttcaatataccaaaccagtcgtgttatatttcaaagttgctgttctacgttctaagtacacatcaaatgctatgaaattttatagtg

SEQ ID NO: 20411 - DNA, 404 bp, Glycine max
ccaacccacaaatcatatcaatctcatttattccaatttgcaaagtacccttcttccacaccacactccactcagatttcttaatattctcacaaaattattctctcccttccgtaatggagtccacgccggtgaattgggaagccctcgacgctctgctcatcgatttcgccaaatcggaaaacctaatcgaggactcctccgcgctctctccgtcgtcgccgtcgtcatcttcgtatcactcccgcctcgtcatccgtcagatcagacgcgccgtcgagaccggagccattgacgccgccgtcgctctccttcgccttcacgctccctccattctcactgacctcaagattctcttccgcttgcgcaaacagaaatttattgagcttctacggaaggggact

SEQ ID NO: 20412 - DNA, 342 bp, Glycine max
ttcatattaactaaggtgaaacatattaagctgcttcattatcataatggttcaagtctccctaagtgcatgagcctctaacattttgattcaaacacttatttctcaacatcttatctatattcacattccagatcaagtttatagcaattctaagtactcagctactcaagcaatgatgggtgataaacaacggtacccgacaatagaacaaaagcttgctggccagcttcacttgagatccaactccaaccttttcccacatgttcgaacttgttacgaacgtctgaaaagaccagctctgtttcagcaacgattttcactaaaaaatcattcaaatgc

SEQ ID NO: 20413 - DNA, 488 bp, Glycine max
ttgattgcagcgaatcggctcgagtcgtttttatattcatattttatctgttttcatttcattattttcttcttctcccttcgatttctccagaacagcaagggagaatcaattcctcatcgttgcaatttttctttcactctctagattctcatctttcctctcttctaccccttcagaaaaaaccatgtcttcatattatatgtatatctagctcttcattttttcttgctcaagattatgctgtaaaattctgaaactcacagtttcagccacattttagacttaaagatctgcgcgttgacccttggcaggttcagcttttggagttgttcatcctcataagcctttgattagtccaagtttttcttttttttctctctctctctctctcaagttcaaaggcttggctcctcttgcccgtgtctttctctctcccttgctgtggacttgtggaatgctaaggtcagagatttctgagacatgtt

SEQ ID NO: 20414 - DNA, 470 bp, Glycine max
cggctcgagggccactcgtttttatatcatttcattattttcttctcccttcgatttctccagaacagcaagggagaatcaattcctcatcgttgcaattcttccctctctagattctcatctttcctctcttctatctccttcagaaaaaaaaaaacaaaaaaaccacagcttcatattatatatctagctcttcattttctcttgttcaatcaaggttatgctttaaaattctgaaactcacagtttcaggcaaattttagcctaaagatctgtgcgttgacccttggcaggttcagcttttggaggggttggagttgttcttccacataagccattgattcattccaagtttctcttttctctctctcaagttcaaaattttgttgtttttctttctgtctcttcggcggacttgtggattgctagggtcagagatttttgctacatgttctagcttgacttatggt

SEQ ID NO: 20415 - DNA, 950 bp, Glycine max
gctcgtgggaggcaggagccgtcgatcccaccggtgtggcgcagagagctcctgaacgcgcgggacccacctcgagtcacatgcacccaccgcgaatacgaacatgtcccggacaccaaaggcaccatcggccccttagaccacatggcccatcgctctttcttcttcggccccagtgaagtcgccgccatccgctccctcatcccccaaactgatcaacgctgctccaacttcgaggtcctcaccgcatgcctctggcgctgccgcaccattgcgctgcagcccgacaaagacgaggaggttcgcatcctctgcatagtcaacgctcgctccaagtttgaccctcctctgcctagcggttactacggcaacgcttttgccttccccgttgctgtcaccactgcggggaagctgtgcgataaccctttgggatacgctctcgagttggtgaggaaagccaaagcggatgtgactgaggaatacatgcactcggtggctgatttaatggtcaccaagggccggcctcacttcactgttgtgagatcgtatctcgtgtcggatgtgactcgtgctgggtttggaaacattgagtttgggtgggggaaggctgtttatggaggacccgccaagggaggggttggagccatacctggtgttgctagcttttacatacctttcaagaatgctaaaggagaggaagggttggttataccggtttgtttgccgtctgaggccatggagaggtttcagaaggagttgaacagtgtgcttaacaaccacatcgtccaacctagcatcattgtttcttccttgtagatcgattcaatactattccagtttttactttgtgccaattaaggaataaagaaataatttagcatttcattttgatgtgatcgagtacgtataattaattattaacaagccagtggtaccaagacaagagtgac

SEQ ID NO: 20416 - DNA, 441 bp, Glycine max
cacttcactgttgtgagatcgtatctcgtgtcggatgtgactcgtgctgggtttggaaacattgagtttgggtgggggaaggctgtttatggaggacccgccaagggaggggttggagccatacctggtgttgctagcttttacataccctttaagaatgctaaaggagaggaagggttggttataccggtttgtttgccttctgaagccatggagagggttcagaaggagttggactgtgtgcttaaccaccacatcgtccaacctagtgccattgctccaaactctaggttcattgtttcttccttgtagatccagtacttttcgactttacttcgtgccaatgaaggaatcaataattgagcatttgatgtcatcgagtacgtatgtgtaatcaacaagccagtggcaccaagagaagaatcacaattactattacct

SEQ ID NO: 20417 - DNA, 401 bp, Glycine max
acacaagtgatagagaactcagtcctcaagaagaaaaaacaattacagcagtagtggatgcaagcgcatatccgcttgcgatagttctggttggagccatacctggtgttgctagcttttacatacctttcaagaatgctaaaggcgaggaagggttggttataccggtttgtttgccttctgaagccatggcgaggtttcagaaggacttagactgtgtgcttaaccaccacatcgtccaacctagtgccattgctccaaactctaggttcaaggaatcttcctcgtagatccagtactgttcgactgtacttcgtgccaatgaaggaatcaataattgagcatttgattcgtctctcgctgccactcgcctgtcgagtacatatacgtactcgctgaca

SEQ ID NO: 20418 - DNA, 556 bp, Glycine max
ggaacttcactctaaagggatcttcattctgaacaccttgaccgtttaatgttcttctcaatggtaatgatcaagcaattttgggagatgttggtattcctagccttttgcttggctcatcattcataagctcggacatggcctaagaggttttggacctcccaattacatggctccagagcaatgggaaccagaggtcagaggtcctatatcttttgaaacagattcttggggattcggttgcaccattgtcgaaatgttgaccggtaatcaaccttggtatggatgtcctgttggcagaatataccagtctgttgttgaaaagcatgaaaaacccaatattccaagtggccttccttcttcagttgagaatgtcctcagtggatgctttgagtatgatttgaggaatcgcccgttaatggtagatattctgagtgtctttcaaaggtttgtaaatatttatatatttatttattttttaaaaattctcttgaaaatttctgtggctgtgtaagcttttgcttagtttcaaaaagttgtaattatcttgggtcct

SEQ ID NO: 20419 - DNA, 469 bp, Glycine max
aaagacttctccactttcttcttcactgaaatagtatataagggccaacatagccacccaaaaccgcagtctactagaagaacaaactctcaatcaattcatcaaccttcttcgtcttgcacaaactcagggataactgatcattcagtggtgactctaggaaatccacaaatggatcatttctccatacaagaagattcttcagcttctgttggagaggaagagtttgagcaaacaccgcaaaccagttattccggaggagacggagataatcttggacctgatgccaaaagatggaagggagataacgaaaacgatggctattcagtctcagcaagcagatctgttagagagcctagagttgttgttgaaaccacaagcgaaattgatatacttgatgatggctttaggtggaggaaatatggacagaaagtagtcaaaggaaactcaaatgcaaggagctattaca

SEQ ID NO: 20420 - DNA, 556 bp, Glycine max
caattacaccctctcttctcccattcgcaactttcctcacggcatcctcagcgaagacggattttacaaagtggcagtaaacgataccacactttggtttcaggttggctccatcagctttgcgatggaatgattttcaatcatgatcctccaatatgtgctgactgctgggattgtggagggccaaaacgttgtgggatggagtgcaatgctcttgtggcaaacaacgttgggggttatcatgtatgcacagccataggacgtggccaaaaaatagatgttgacattattgataagaaaaatccccacactggtgtcattgttaaaatgtcgaacagtggccctaagtacaactgttctctagctgtgtctgttctttgcaatttaaatggagtgcaaggaccgcgaactctggagagattaggggcctgtgattatgtgactgcgctagtgcacccatctggctgtgccatcattgtaaatgttcatggaggagggttggggtggtttggcaccttactgatcattgacttgtgtctttttgctgcatatctct

SEQ ID NO: 20421 - DNA, 1244 bp, Glycine max
  unsure (1)..(1244): unsure at all n locations
tcacatcctgggctgaagtttacagaagcacaggttaaatgttacatgcaacaacttttacgtggacttgatcactgccacagctgtggtgtacttcaccgtgacattaagggttccaatcttttgattgataacagtgggatattgaaaattgcagactttggtttggcaagcttttttgatcccaatcaagctcagccactgacaagccgagttgtcactctttggtataggccaccagagcttttgcttggagccacttattatggcactgctgtggatttatggagtacaggttgcatacttgctgagctgtatgcaggcaagcctataatgcctggaagaactgaggtggagcaattgcataaaatttttaaactttgtggttcaccttctgaggactattggagaaaatcaaagttgcctcatgcaacaatatttaagcctcaacaaccctataggcgatgtgtttctgaaacgttcaaggagtttcctgcacctgcaatagaattgatagagacccttttgtccatagatcctgctgatcgtggaacctcagcatctgctttgaatagtgagttcttctcaaccaagcctctaccttgtgatccctcaagcttaccaaagtatcctcctagcaaagaatttgatgccaaagttcgggatgaagaagctagaagacaaggagcagcaggaagcaagggccagagacatgatcttgagagaagaggtgctagagaatcacgagccattcctgcacctgatgccaatgctgaactggtcttgtcaatgcagaagagacaagggcaggccaattctcagagcaagagtgagaagtttaaccctcatcccgaagaagttgcttctgggtttcccattgatccccctagaccatcacaggctgcaggattaattgcagatcccccggttcatcaacataaaagagcctcccattcaggtccactgactcaccgtgcggcatgggctaaagccgggaagaaccaggacgatgctccaaagatttcaatggtgggtgacttatcaacagtatcgggcttagttgcagcaaggaggagtatgttgtctgacgatcgcagagaaaggtctggatcatcacaaacagtggccccaaaactaataaacaggttcccaggatccttcaaagaggcttctgagtcaatgatgcaacaggatcagaagtatcatgcacatgttcctcanaaggaagaagggagaggcagcag

SEQ ID NO: 20422 - DNA, 492 bp, Glycine max
gctttttgtttattccaatcctaactgaccaacaaatggccgcctgttttgaaaatgtgttgtctaaccaaaaaaaatcggtaagtgatgataaggacaaagcgaagtgccttatggatgcctcgcaatctaccctctcacagcagttttcaccaggaaaagcatcttctgctgagttctcttggcaacttggcttggatactggtcattgcaaagttttcttggagtcggaagatgtaggaaggaccctagacctatcgctgtttggttcttatgaagatctgtataggagacttgccatcatgtttgggattgaaaggtctgagattttgaaccatgtgctctaccatgatgcagctggtgctgctaagaaaaccggagaagaacccttcagtgacttcatgaagacagcaaaaagattgacaattctgacggattcaagcagcaaaaacattaaaagggcctttattacaggaactcgtaatggtgaac

SEQ ID NO: 20423 - DNA, 443 bp, Glycine max
tcgttcgcccaccactctctccagctccaaagtcaccggactactgcctgcttctaaatagcttataatcttatctgaagatagagatatcatcatgggagaggtggcagtaatgcattctgagcctctgcagtttgattgcaatgacatgaagcatatcactgagaaagatgtatataatctattgtcaaacgaagagcacatacttggagaagaatcaagtcaatcatcaaatgacaaaaagatcaatgatttgagagagagaggatacatgaagtatggatgtcaacattaccgaagaagatgccgtattagggccccctgttgtgatgagatttttgattgccgccattgtcacaatgaggcaaaaaataatatcaacattgaccagaagcatagacacgatattccccgccatcaagttaaacaggtgatatgttctc

SEQ ID NO: 20424 - DNA, 583 bp, Glycine max
cattcttacaagagtagcgtgtaggaactgttggccatttcttttctctctatcttcttccacctttgtactggtcgccgaaaggtagaccgtttcagttccataatattgtactgatccctctctctctctctctcccttggatctctttgtggcttggtttgtctgtgtgtgcgtgtttatgtgtgtgctcctgcatcatgattccagcctatcgccactcagtatcttctgttatgcctctggatcttaatgaagatcaaaaccacgagttcttcagtccaactcaccacccttactattcgtgttcttctctatcttcatatcctattctcttcaacccgccaaatcaagatcaagaagctcgatcatacgactgggaaccaacaaagcacttaccaagtcatgaagaagaggttgagaagattatccctactagtggatcatggggtcactccggtggaagaaagtgagcataaggtgacagtttggagaaaagaagagaggaatgaaaatcttgctgaagatggttcggtgaagtggatgccttcgaagatgagaattatgcggaagatgttggtgt

SEQ ID NO: 20425 - DNA, 387 bp, Glycine max
tttcattaaaggcctagatattccagaagaagcaaagagtaatatgttgaagttaacacctgatacttatgttggagcagctgttgaattggccagaacagtggaaaatgtggtgaatactgtgattggaataaagatctaggaaacaaacaaatggttgaaacagtttgctcgagatattcattagttgatgatactattggcaaggcaattttgcatcctcgccaccatttaccaaatggctattagttgatatattaacttttaaataagatgttccattttgggaaaaagggagaaaagacatgattttccctgattataaaaccattttgatatagaatggtgttaaggattttgtaacatagtgtacgagtttaaagtgcc

SEQ ID NO: 20426 - DNA, 425 bp, Glycine max
gaaaatgggaaaattaatcataatagtacaagtgcttcaccaaaaggaaaagtgcaaaagcaagaatgcaatgggcatgcggctgatggaactcaagttgaaccagctctagagacacggcaagatagcaatgacaaagctgcaccatgtcattgagctgtaccataattacagagataaagagagaaaagagaggaaaagcttatcacacgaacacgataggcggtgaacttgacttgagtttgaagcaaatgtaaagcgcggcaacacgagatatcactatactgcaggggagaacaagggaaggaggtagaacttttggttctctctgtattcctttctttgctccattccttttttgttgtcttaaaatattaactgttacagcaagggaaacccattcttaattctaattttggcctttc

SEQ ID NO: 20427 - DNA, 1128 bp, Glycine max
  unsure (1)..(1128): unsure at all n locations
actcgagccgaatcggctcgagcggctcgagaagcaaagcaaataagagtgctccatttcctacaacactgtaacctcatcctccaattcccacacccactccttcccacaacactgtagcacagcagcagtggctaagctagcaggatttcatcgagaaattttgtattttttggcatattatcttgctgaaaatatattagatggccattgcaccttttggtaatacatcagctactcaatggggaattcatcctcagattttcgcgggatcgactgagttgggaaagattgcatcatccaggaacaatgttacaagcaggataaggtttatggttgccccatgttcgagctttttttcttgtcattccttgcatgcactatttgacaaaggttcatcgcagactttgcgacatcgcaggggatcgaggttaatagttagagcagatgcagattactattctgtactcggggtgtcaagaaattccagtaaatctgaaattaagaatgcttatcggaagcttgcccggagttatcatcctgatgtgaacaaagaacctggtgcagaacagaaatttaaagaacttagtaatgcatatgaggtcttgtcagatgatgagaaacgatccatatatgacacatatggagaggctggacttaagggttcaggaatgggcatgggggatttcagcaatccttttgacctgtttgagacactgtttgagggcatgggtggcatggggggaagcagaggatcttggaatggagcaattgagggtgaagatgagtattacagtcttgttttgaacttcaaagaagccgtttttggggtggaaaaagagatagagattcgccgattagagagctgtggaacttgcaatggttcgggggctaaaccagggactacaccatccaggtgtagcacttgtggtggtcaaggccgggttgtctcatcaacaagaactccattaggcatcttccagcagtcaatgacatgctcttcatgcaatgggactggagaaatttcaacaccttgcagtacatgttctggggatggtcgggtaaggaaatcagtacggataagtctgatggttcnagctgtgtngactctggtagtcgtctaagggt

SEQ ID NO: 20428 - DNA, 397 bp, Glycine max
gcaaagcaaataagagtgctccatttcaaacagcactgtaacctcatcctccaattcccacacccactcgttctccttcccactaagctagcagaatttcatcgagaaattttgtatttttttggcatattatcctgctgaaaatatattagatggctattgcaccttttggtaatacatcagctactcaatgggggattcatcctcagattttcgcagggtcaactgggttgggaaagattgcatcatccaggaacaatgctacaagcaggataaggtttatggctgccccatgttcgagctttttttctcgagattccttgcatgcactatttgacaaaggttcatcacaaactttgcatcgtcgcaagggatcgaggttgatagttagagcaga

SEQ ID NO: 20429 - DNA, 1071 bp, Glycine max
atactattgtgtggggtctgcctccagagaccttgctgtggcagaacttcgtaccatggtgcattcgcttttcttagaatcatgtgcatctgttgagcttgcttcgcgcctactatttgttgtcttaacagtttgtgttagtcatgaggtccaattcaatggaagcaagaaaccaagaggtgaaaataattatttagcggaggaaattattgaggatttacaagcagtatctgaaagccagaaagaaacaaaaaataggaaaatgaagaagcaaggtcctgtagcggcatttgattcctatgttctggctgccgtttgtgctcttgcctgtgagcttcagctgttccctatgatctcacgaggagacaatcactcagtccccaacaatgtacaaaatatagccaagcctgtcaaaatagatggatcctcccatgagttgcagaatggcttagattcagcaatacgtcatactcacagaattttagcaattttagaggcactattttcattgaagccatcttctgttggcaccccttggagttacagctcaaatgagatagttgcagcagctatggttgctgcacatgtttctgaactatttagaaggtcaaaaacttgcatgcatgctctgtctgttcttattcgttgcaaatgggacaatgaaattcattccagggcgtcatcattgtataatctcatagatattcacagcaaagctgttgcatctatagtgaacaaggcagaaccattagaagcaaccttaattcatgtaccgatttggaaggattccctcgtttgtgttggtgttaaaaggcagaatcagtgtgaaagtagtagctgttttgatgctgggcggacatctgttgtaccttcagaagattcattcccatcaaaacttgaccataattctaacaaaaccccatgtccaaagggtgcatcagattataccttgggtaaaggtgtcacaggtttctcattggatgcgtctgatctagccaacttcctcacaatggacaggcctataggattgaattgcaatgggcaaatttttctaagatccatgctggcaga

SEQ ID NO: 20430 - DNA, 683 bp, Glycine max
cgataggaggcaagggcctacagtggtagttgaccgccatgatctggggggagatagagcacaagactgtgagcatgagctgttagctatggtcacacgaggagacagtcacacagtccccaacagtgtacaatgtgtgtccaagcctgtcaggatacatggatcttcccatgcattgcagaatggcgtagattcagcaatacgccatactcacagaatgttagcaattttagaggcgctgttttcattgaagccatcttctgttggtacctcatggagttacagctcaaatgaaatagttgcagctgctatggttgctgcacatatttctgaactatttagacgggcaaaagcttgcatgcgtgctctgtctgttttgatgcgttacaaatgggatgatgaaattcactctagggcttcgtcattgtacactctcatagatattcacagaaaagcagttgcatccatagttaacaaggcagagccattgggagcaacctttattcatacccctatttgtaaagacccctgtgatagaagtaaaagaaaaaatcagtgtgaaaatagtaggtgccttgatcctgggcagacatctacttcgacttctgaggattcatcccgctcaaaattcagcacaaaaagtgagagaacttcatattcaaatgaagcatcaggatgtacct

SEQ ID NO: 20431 - DNA, 494 bp, Glycine max
  unsure (1)..(494): unsure at all n locations
ctttgaaggagagncgagctgctggatactcttcaataggactaggaacttcatccttctaattttcaagaggtattttggcaatggacgaatgtgttgagtgtgtggccagttctaagttgatgtgatcgataatcaaatattttttgggttacatctgaagctctcattagtagaaagttgcttcgcctttcagggtgctttagatatgtatgcgactttgctccaattatacaagtttgtgcatgacgaatgattaactaaattcttttgcgatattgatatcccttattaagtgcacttgtactggatagaagttaacggatactggatcacttgttcattctcccccgatttcccccatctcactctttgtagtatttctgcgtgtctttacctgtgatggtgactcataaaaataatgactctgacaaatgtgtcacgattctctcttcagaacgttttcttgtgatttaattcaattgggtgtttgc

SEQ ID NO: 20432 - DNA, 1257 bp, Glycine max
cacatggtttgaatgtaattggtatgccaaaacttgaacagcagaattcttttaatgatcccaagagactgccaggtggatctgtgtctcctgctgtaaacaatacagtgtctcaacaaactaaaaatgcttggcaaccatcaccaaacaaagaacaaaatctgggcttaatgtcatctgtttcttatgtcaaaaaggaacctagtgacttatctactgagcagcaaaataggcatagtttgtctaaattgcatgggtattctcctgttaattctgctcagcttgaacagggtggtgctagtcaaggaactgtaggggaggagttttcaagaggtcaagcacctccaagcatgcctcctacatctactggcttgctgccacaaagttctgcttccccttctgtaatgacccaactagaccccagtgtctcgctaagctctcagatcccatcaaatgcttctggaattggtgcaaggacatctcttaaaaagcctgctgctgcccaaaagaaaccacatgaagcacttggttcctcacctcctcctgcaaataaaaaacaataaacttctgggggatctgtagaacaaagcattgaacaacttaatgatgtcactgctgttagtggagttgacctcagggaagaggaagagcagttattttcagggcccaaagaggatagtcgagtgtcagaagcttctcgaaaggctgtgcaagaagaagaggaaaggctgatcttgcagaaagctccattgcaaaaaaaattaattgacatcatggccaagtgtggcttgaagggtatgagcaatgatgtggagaaatgcttgtcactgtgtgtggaggaaaggatgcgtgggctgataagtaacctgattagaatatcaaaacagagggttgattttgagaaaacaagacatcggactgttgtcacttcagatgttcggcagcaaatcatgacaataaataggaaagtaaggaaagagtgggatataaaacaggcagaagcagagaagattaggaaactacataatgttgacagcaatactggacttgatggtgacaaggagaaggacgacggccgtggtaaatcaacaaaggtgaacaaggaagaggatgagaagatgaggacaaatgctgcaaatgttgctgctcgtgctgcttatgggggagatgacatgatgtcaaaatggcaacttatggctgagcaagccaagcagaaacgtgaagggggggtggatgtgtcatctggttctcaaccag

SEQ ID NO: 20433 - DNA, 789 bp, Glycine max
gaaattcaacgtgggtggcagggtgatggaaacaacatccacaaccctcgccaatgcggggcgcaggtcaatgttcggcgcaatgttcgacgacaattggaacctaataccaaacaacgacgacaacaacaacaaccaaagattcatcgatcgcaacccggattgcttcgcgattctcctcgatctgctccgaaccggcgagctctacgtcccacccgatatcccggagaagctcctctacagggaggccctctactacggcctattggaccacgtgcgcgccgccaagtggggcccattcgacggcaacaggttaaggttgtcgcggtctctgcagggccaggcaccgggcgacggaaccgccattcgggcgggcccggatggcggctgctgcgttgcgcatggcagcatggttcatgtctatgattggatgttggatgaacaccctcctctgaacctcgattaccagagggtcaacgatgttggttgggttgactccgacaacgtggttatcggagtcagcgagcgcctcgggcgaggtgacggcgggatggggctgttcagctcccacacaggggagctgaggtacaagtttcacgtctgtcatgacaatcaggtgaagagttacactgctggagctctgagtttcagttcggattataagatattttctagctgcaaagggaggagtaatgagtatggtgttggggtttgggatcaggttactgggaagcagattgatttcttctacgagcctttggggtggtcccttggggatgctgataagct

SEQ ID NO: 20434 - DNA, 547 bp, Glycine max
atgatgttcatttttagttatggaaagaagtgaagctgggttagttccagaatggttgagaagtgctggaagtgttgccggggctggcagttcagcccaacagtttgccttctcatatggtcatactgattctctttccgtagctcatcactcaaggaatagatcttctaagaatggtagtgattttgatagtgctcgttctgtgtttcttgaacggacatcctcatcaaattcccggaggagttctataaatggttctgccaagcatgcctacagtagtttcaacagaagtcatcgtgacaaggaccgtgacagagagaaagatagatccagttttggagatcactgggactgtgatggttctgacccattggccaacctctttcctggaaggatggagagggatacattacggcgttctcattcaatggtttccaggaaacagaatgaggttatacctcgtagagttgtagttgatactaaatctggtggcagccatcagaacaatagcaatggcatactttctgggagtaatgttagtaatagc

SEQ ID NO: 20435 - DNA, 1003 bp, Glycine max
  unsure (1)..(1003): unsure at all n locations
aaaaaaataaaaagaataaaaaaaacagacgtctggagaaagtcgatgcgataccaagagcgaattaggaaacgttggctgggaattgggtggtaaagtaaagaaagggttgaggccgagttggtttcgtggaaggaagaaaccaagaaattaacagagaaaataagaataagaatggtgtggtgaatggtgatggaaaagaagatgaaggtccgttcggaaagggaaaagacgaaagttgtgattaggcatttgcccccttctctctctcaatccgatctctcccaacacatcgattctcacttcgcttctcgctacaattggttctctttccgtcccggcaacaacagtcacactcgtcagaggcattcccgtgcctatatagacttcaagtgtcccgatgacgttttcgagttcgccgagttctttgatggacacgtttttgttaacgagcgaggtgcccagcataaagttatagttgagtacgctccttctcagcgtgttccaaagcctagtgccaaaaaggatggacgtgaagggactatatacaaagatccagactatcttgagttcctcaaactaattgcaatccctcaagagcatcttcctagtgcagaggtacaattggaaagaaaagaagctgagcaagctggggctaacaaggaaacacgaattgtcacacccctgatggaatttgttcgtcagagacgtgctgttgacagtggtatgcaggcttcatcagcggtggcaaaagttagcagaagatccagagctgctttgcctggcaagcctggctcangcaatactaaacgaggatctgaaaagaaaaagtatgttcagaaggacaatgccaagggtgttgctcgcaaagagtcaaaagacaagtcagcctttgttgtggtcccccggcgagacaatcaatcagctgaatcaatgcatggtattgaaggtcccttttctggaatttcactgacttctgactcangaaagaaaaaaatccttc

SEQ ID NO: 20436 - DNA, 478 bp, Glycine max
ctcgatctcgaatcggctcgagcgataccttggtagagagggagtgaattaggaattaggaaacgttcggaattgggtagtaaattaatgggttgagccgagttggttcgtggaaggaagaaataaagaaatcaacaaaggcagacaaagagcttaggaaaagaagaataagaatggtgtggtgagaaagatgaaggtccgttcggaaagggaaaagacgaaagttgtgattaggcatttgcccccttctctcactcaatccgatctcttccaacacatcgattctcacttcgcttctcgctacaattggttctccttccgtcccggcaacaacagtcacaagcgtcagaggcattcccgagcgtatatagacttcaagtgtcccgatgacgttttcgagttcgccgagttctttgatggacacgtttttgttaacgagcgatgtgcccagcataaagtgatagttgagtatgcacct

SEQ ID NO: 20437 - DNA, 370 bp, Glycine max
  unsure (1)..(370): unsure at all n locations
gacagaaattgttgtccctgactggcgtgggcgtctgtgtatgaatgtgtttgtggagaaaatggaagctgcgatgggactgatgcggaggattcctccgaaacacacagaaacagctctgtcagcgcttctgagccttatgcctgacaactcctccgatctcctctctcaagtcgatcagcccctccaggttctgtgcgatgtggaatgcggcaaggagttcattttgtgcgaatacaatagagatgccgactcttacagatcaccttggtccaataaataccatccaccattagaagatgggtccctcccttcttcagagtcgcggaagcttgaaattgagcanatgacatattttgcatatatcgtg

SEQ ID NO: 20438 - DNA, 568 bp, Glycine max
gatggggaagccagataaggcacaatgactgacaattagttgtcattgtacatcatgtgcaattaacaaccatgaagccaccattaatggaagtactaagtaacaacttccccatgatctcctatgcaattctcagcttgagatataagtcttaattaaacaaacttggcattgtagtagtagaaccttatttgactcaggttttcatggctgcatttcctatgttctacaaaacgccttacaaggaccaaaatctgccaacccaaaatgtaatgaggcagaatgagaagaggttcatgtatgagtgtgataatatgaagaggttcatctcttcaactcctggtcaaatttgcaggagtagccaaccatggaacaaagtcaacaatgtcctcacaaaatcaaacacaaaagagaggaatgttcctaggagcatacttcatggcagatgctctttgcataagaatgtcacaaaactttgtggttcagacagtcacctaaagcctcattaaggaatgttattcaaagacagaaaacctttccagagtttggtgttcagcaggttctagct

SEQ ID NO: 20439 - DNA, 974 bp, Glycine max
cattaagcttcggaaaaaagttgttgttgtagtagttgtttgtggtcggtgatagttgagtttgaagtagtgcttcgcgtctacattcagttcaatggcttcttccatctgtgctctctcgccttccgtccaatcacagctcactaaaaccaccctcgttgctccaatccctctctatcaacgaagcaagtgcgaaatgagcaggaggagttttgcgtttaagggaattgtggcctctggcgtttcggtcgcggcttctactctcacagccgaagcagaaccatcttccaaaggttttgaaagattgccgtacaagccggaagggtacaattattggacatggaggggtcataaaatacatgctgtagtgcaaggagaaggctctcccattgttcttattcatggttttggggcctctgcattccactggaggtacaacattccagaattggctaagaaacacaaggtatatgccttagacttgctcggttttgggtggagtgacaaagcacttatagattatgatgctatggtgtggagagatcaagttgttgactttgtgaaggaaatagtaaaagaaccaaccgttttagttggaaacagccttggaggatgtactgctttggttgcagcaactgggttgcctgatcttgtcaatggtgttgctcttctaaattctgccggacaatttggcgatgggaaaagggaaagtgaaacttctgaagaaacagctctacaaaagtttctcctaaagccattgaaggaagttttccagcgtgtagttcttggatttttattctggcaggcaaagcaaccagctcgggttctgtcagtcctaaaaagtgtgtatataaattcttccaatgtggatgacctatcttgtggaatctataacaaggccagctcaagatccaaatgccggagaagtctactacaggttaacgacgcgcttcatgatgaatcagagcaagtac

SEQ ID NO: 20440 - DNA, 542 bp, Glycine max
gcattgtttcttcaaaaagacaaggcattaaaagcgttgcacccagctaacttccattgtgtgtttgagtggaacaattctattgttgctaacttcctttggaccaacagaatgggtcattaattgaccatatagatatgaagctattaatattcaattggatgcccgatatgagtagtacagacgtaagtatctgaatatctaatgatttagtattgtttttggcaacttttgcaagctgtgctttcggagattgttcatttgtatactagattttggttgaatgaaaatatgaaaatgggtgtcatctgaaaatctagttccttcgttcttgtgtatttcttctggtatactatctcttcacactctgcagagtgcttgatttttttttgccttgtggcagttaatataaagccacaggtgtatcaagtagcaagatgcttgccatgcaattcaatatactttatacacgtctaaggtaatatgaaggagcttcttttttatttcctattagctcggtctctagtattgaagactgaaac

SEQ ID NO: 20441 - DNA, 369 bp, Glycine max
actcttttgagcagacgtggatgatgtttccaggaacggatctgtttgccagaattccatttcatgcggctcatactatattggaaacagatcaaacgcagcttgacttcgagtcaatctggctacagagcattgtgaaggtaaaatcttacattatatcagaggcaggtgttcttgcagacaagataagtcctggagtgctcaaatcacttgtatccttaaacgacaagccaaagtaagatgctttgagctgactatttagtgagaaaccttgtggtggcagtatcaactgggtggaaaatggcaagtgttgtctggaagtctttcatgaggcatttaggctgaggtgtatcaattctgttgctgtga

SEQ ID NO: 20442 - DNA, 589 bp, Glycine max
ctgttttatgagttttctcgcgggaaggttagctgggaaagaagctgcgtactgtttccaggaatccaaacaagccgtgggaaaactagcccaaaaaaaccctcttcccaagaccaacaacaacaacaaccttaactttcacgaaggacatgatcgtgcggatgtgcttcccgaggttctaaggcactctcttccttccaaagtgtttagaaatgatgaagccacctccttttccttctctgcctccaaatgggtccttcgttccgaccccaaaacccaatcttccgtatcccctgatgctctcaatcctctgcgtgcttatctttccctgccccaagtcagctttggccctaaaaggtggcaactgcctgaagcagcaaacacggtttcagcctcaacagctaatgaatcgcgtcaagacaggtatgccagccatgttaacccggagaagttgaaagctgcaggggaagggcttgcacatgttggaaaggcgtttgctgttgcaactgcatttatatttggtggtgctgcattggtatttggtgtggtggcttccaagttagagctgcagaatatgagtgacatcaaa

SEQ ID NO: 20443 - DNA, 942 bp, Glycine max
ctcgagccgaatcggctcgagaaggagaagcgctttgctgatcccgaacagcaggaagttacgtgtaacggggagctgcttcgaggatcagacgcttattgatggtatctgcagtaaatataacgatgcagtgattcatctttttgttagggtgaaatatgcagaagttaggacgggacaagatgagttgtccgtcgtggcaaaggagttgaatgatacaaaagattatgatgctagttgtaggagaaaatatgatattagtaaagaagatacaagaagggagtatggagtcgttgagccaattatgccaaggaaggctcttgatagggatcttcttttggagccggttattgttaacaaaaaaattgaattagcttctgagatttggaatatgataaactctacatatgaagggctagacattggaaattatccaatcagatctgcagagggtacagggggtgcttactttatgcttgattcaaccgggcaaaagtatatatctgtttttaagcccattgatgaagagccaatggctgtgaataaccctaggggtttacctttctcagaagacggtgaaggcttaaagaagggaacaacagttggtcagggagcattcagggaagttgcagcttatattttggatcacccaatgagtggtcgccgatcattatttggtgatgagaagggttttgccggggttcccccgacagttatggttaagtgcttgcataaaggatttaaccatcccggggagttgactactaagattggctccttgcaaatgttcatagagaataatggaagctgcgaggatatgggccctggggctttcccagtgaaggaagtgcataaaatttcagtagtggacatgcgactcgcaaacgcagatagacatgctgggaatattttgattggcaaagagaaggaaatgaccaggct

SEQ ID NO: 20444 - DNA, 410 bp, Glycine max
ctcggaattcggctcgggctcttttttttctctctctctctctctctgaattcggaggacagcccctttgctccgcagattcgattcaatcgccgatctttatcactcactgctcctcgggaatccctcgtctcccccctttcaatctctgtctcttctccctcaatataatgttccagattttcaagggctggttctgactcgatcaagcttttgactccttaaaaaagaaaaaaaaaatatggagggtgacacattctctggtcttggcaacggtacccagattgatagcaagatcttgcagacatttaagaaaagctttgttcaagtccagaacatcttggatcagaaccgggtactcatcaatgagataaaccatttttttgagtccaaggtctctgacaacctca

SEQ ID NO: 20445 - DNA, 405 bp, Glycine max
gttcttcgagcttggctttttgagcactttctccatccgtacgcaggcgatgttgataaacatatcctagcccgccaagccggtctctccagacgtcaggtttcgaattggtttattaacgcgagggtgaggctatggaagccgatggtggaggaaatgtatctggaagaagagaaggagcaagaaaacgacgtagcatcatcggatattaatgttcccgaagaggatgagaagccaacgcaggaggctccactccttcgaattgactcagagtgcatgtcgtctatcgtcaacgacgtcacaaagagcggcaaaaccatccaaaacgacaaccaaatggacgcattcgggtcggtggagcttgacttttcgtcctacacgcatgcgcaccattctttcggcgtg

SEQ ID NO: 20446 - DNA, 441 bp, Glycine max
attcttcttctaggtatgcgtctggggggaaattttaatcactaccagatgcagataatgaataataataatgaatgtgtatcgaaaaaccgatgggattgctgggtgctgcttctgaacatgatgtatgggccactactgtgatatggcacccacatttcgtatactattataataatactatcgacctcctcctatcgggtctgacatctcgtctaatcttcgtggttacaaaggagacctaactcctgctcaagcccttgatttgatatccacacagagactacgttttgattgatattaggtcagagaaagataaggataaggctggtatccttcgccttccctctaatgctagaaactggatggttgccattctttgggaggtactgccaagcaagctcatatggcaggttaagaatgtgaagatattggaagctg

SEQ ID NO: 20447 - DNA, 356 bp, Glycine max
ttctatttctcccgagtattctgttctcctttattaagcagctaaaaattttaaggaacgggaaaatgaagaatctttgtcagaattttgatgttagagccacgattccggttaaaataggaaaaaaatcgacttgggatgttttgtttcctcgtaggttgtggttgccgacgtggacgtgtgatcagaggaaggaggggaagttgaacttaaaggtgcagtgcggtactaggaaagaagggtgggttgaatctgcgggaaaaagcgcgtttgggtttggcgtttcggccgcggttttgttctctgcgttctgctactcgcccgcggcgcttgcagagtccctcaccgttgctttt

SEQ ID NO: 20448 - DNA, 524 bp, Glycine max
gtgactgtggtggagagtggaagcagggctctgcggtggctggggttggatggagaaaaaagttccattggtcttgatgtgagcaaaatgcaaacttggcttttgaattgttaaaggcacttctttttagtgttttaaacaataggtcttacttggaagtgatgcttatgttgttattttgatgactgtttcggcagagtgtgaaggttaatttgataatgacggattattccatgcccgggatgacaggatatgaattgctcaagaagataaaggagtcatctgtttttagagaggttccagtggtggttatgtcgtctgagaatatcttgaccagaattgataggtaagctcttgattaagataagatgctgtttggttttaggagatataagcctttatttttgtttgaattctttgatataattgcttgatttatgtgatgatatttactagatttggatgatgtttgttgattttacctatgctaatggtttggacatgattcacatctagacttgaat

SEQ ID NO: 20449 - DNA, 558 bp, Glycine max
  unsure (1)..(558): unsure at all n locations
gcgcgcgtacgtaagctattaattcggctcnagttatctcttactattctgagagcaatggcttcccccctagacataaaaatctgttggtccctttttcatgcttttcttgacatgcatatgtcgtgcctcgtcacgcactctctctgagtcttccattgccacacagcatgaagagtggatggccatgcacgaccgtgtttacgctgacagtccagagaaggacaggcgccagcagatattcaaggagaatttggagttcatagagaaacacaacaacgaaggaaaaaagaggtacaatttaagcctaaacagttttgctgatttgactaacgaagaattcgttgcttctcacacgggagctctctataagccaccaactcaactaagggtcgttcaagattaaccacagtcttggcttccataagatgagtgtcggtgacattgaggcaagcttggattggagaaagagaggagctgttaatgatattaagaaccaaagcagatgtgggagttgctgggcattttcagctgtggcagctgttgagggaatcaacc

SEQ ID NO: 20450 - DNA, 361 bp, Glycine max
tgcccgtccaccatggccaccaaccattcaaagtcgggctttgatttttctgtcctcttgcaggatgctaaaggcgatgatgtggatcttgctacttacaagggaaaagtcttgctgattgttaatgttgcttccaaatgtggcatgaccaactcaaattatgtggagttgaatcaactattcgagaaatacaaagacaaagggctggagattctggcatttccatgtaatcaatttggtgaggaggaacccggaagcaatgatcaaattcaggagtttgtctgcactcgctttaaatctgaatttcccatctttgataagatatgtgatgaagtgaatggagacagtgcttgtcctttgt

SEQ ID NO: 20451 - DNA, 745 bp, Glycine max
gggagacgtaaacagtgctcaaatgaatcatgcaaacagaggatatatccacgacttgacccggtggtcattatgctagtaattgatcgggagaatgaccgtgcccttttgagcaaacaatcgagatttgtacctagaatgtggagctgcttagcaggttttatagagccaggagaaagcttggaggaggctgtaagaagagaaacgtgggaggagactggtattgaagtgggagaagttgtatatcatagctctcagccatggcctgttggaccgaatagcatgccatgtcacctcatggtggggttctttgcatatgcgaaatcccttgaaataaatgtggacaaagaagagttggaagatgctcagtggcacagtagagaatatgtaagaaaggctctgacatttgctgaatacaagaaagcccaacaaactgcggtagcgaaggtagaacaaatgtgtaagggagtagaaaaggctcacagcttgtctaccgattgcaatgtggaaagtggtgaacttgctccaatgtttgttcctggaccctttgcaatagctcatcaccttatttcctcctgggcattcccagatcataatgtaaatggcagtgaatgtcattcaaaacaggctagtggttctatgtcaaatttgtaggagtgcaaattatttttttaaaggcacctttgattttacattgttttccatactaaactgatgtgagatataatcaatcaccataagactg

SEQ ID NO: 20452 - DNA, 504 bp, Glycine max
tttatcgtatatttctatgaattatcttttgattagcaggatctatgaggacaagatggtatttcagtccaaggccgacaaagttttcgactcaaacaatactttcagaagtatctatattttcttaagacgagtgcgattaatttgaaattgcaaactgtcctttttttataaactataaaatttaaacatatgttatgtaaatgttaattgaggatatagatacgtggcagttaattacagcctaataattattttttttgcaaatatttttattaatactgttcataatcttttctataccagactttttttttcaggtacataaaatttcgatcattgatattatccattttgcattctttttctgtaactcttttttttattattacagtgtagtattatttctcacatttattatttttggttcctcttttattaatttgattttctttatagatatctacacttatagtgtctaccgaatatatatatataaagagc

SEQ ID NO: 20453 - DNA, 711 bp, Glycine max
gaatgtgaaagctgcagtcctttttgttgtatttgcttcgtgtttcctgtttatgctttacaaactgatgtcgtcgtggttcattgatgttttggttgttctcttctgtattggtggtattgagggcttgcaaacatgcttggttgctcttttgtccaggtggttcaagcatgccggagagtcatacatcaaagtacctttcttaggagctatctcatacctgactttggctgtttctccattctgtataacattttccattctctgggcagtttatcgcaacgaatcctttgcctggattggtcaagatatacttggaattgcactgataatcacagttctacagattgtacatgtaccaaatctcaaggttggtacagtacttctcggctgtgccttcatttacgacatcttttgggtatttgtctcaaagaagtttttcaaggaaagcgtcatgattgtggtggcccgaggcgatcgaagtggagaagatggaattcccatgttactgaagttccctcggatttttgatccatggggtggttacagcatcataggttttggagacatccttttaccaggaatgctggtggcattctcactcaggtacgattggctggcaaataagagccttagaagtggatatttcttgtgggcaatgtttgcatatggctttggtcttttagttacgtacgtggcactaaacttgat

SEQ ID NO: 20454 - DNA, 1178 bp, Glycine max
ctcgagccgattcggctcgaggccagaatagattagagggaaatattccttcagagattggcagtctggattatcttacaagtcttgatctcagtggaaatttgctgagtggaacaataccacccacgcttggaggaatacaacgcttagaaagattgaatctctcacacaatagtctttcaggtggtctctctagcttggaaggtatgataagtttgacatcttttgatgtatcatacaaccagtttgagggtccacttcctaacattctagccttccaaaatactacaattgatacattgagaaataataaaggcttgtgtggcaatgtcagtggcttgacgccttgcacattattaagtgggaagaaatctcacaatcatgtgactaagaaagtcttgatatcagttttaccccttagtttggccattctgatgcttgcattatttgttttcggagtctggtatcatttacgccaaaattcaaagaaaaaacaagaccaggctacagatttactatctcccaggagtccaagcttattgttgccaatgtggagttttggtggtaaaatgatgtttgagaatattattgaagccacagaatattttgacgacaaatatctcattggggttggagggcaaggacgtgtttacaaagccttgttgcctactggtgaactcgttgctgtgaagaaactccactcagttccagatggagaaatgctcaatcagaaagctttcacaagtgagatccaagctttgacagaaatccgacatcgtaacattgtaaagttacatgggttttgttcacattcacaatactcatttttggtgtgtgaattcctggagatgggcgacgtcaagaagattttgaaggatgatgaacaagcaattgcgtttgattggaataaaagggtggatattgttaaaggtgtagcaaatgctttatgctatatgcaccatgattgctcacctccaatcgttcatcgtgatatttcaagcaagaacgttcttttggattccgatgatgtagctcatgtcgcagacttcggaacagctaagtttcttaatccagattcatccaattggacctcatttgcaggaacctatggatacgctgctcctgaacttgcatacacaatggaagcaaatgagaaatgtgatgtgtatagtttgggg

SEQ ID NO: 20455 - DNA, 959 bp, Glycine max
ctggttctcaagctgatttgtaccatattttgatctacatgttcctgagcccaacagatgatttgggtgagaaccaactctttgctggtcagaaaaatctgcagcttgtgcttttgcttctggctgttatctctgtgccctggatgctattgccaaaaccttttattttgaagaagcaacatgaagctaggcacggggttgaatcctatgcaccacttcaaagtacagatgagagcttgcaagtggagtcaaaccatgattcacatggtcatgaggaatttgagttcagcgaagtctttgtacatcaactcatacataccatagaatttgtacttggagcagtctctaatacagcttcttacctccgtctatgggcccttagtcttgctcattcagagttatcaagtgtattctatgagaaggttctgatgatggcatgggggtacaataatgttattatcctgatagtgggtctcattgtcttcatttttgctaccgtcggagtgttacttgtcatggaaactctcagtgcctttttgcatgcgttacgtcttcactgggtggagtttcaaaacaagttttatgagggcgatgggtacaagttccaccctttctcgttctcgtggctggatgatgaggaatgatatgctctaaaatcacattaataagaacgaggagttatatagctttggacctgtattgattctttcatttgatgtaactagtcagtgatcggtatatgtgggcattgtatgtggtggaatcctgggagctttttcatcaaacgtggtgccgttttgtttatttatccattgaggaaataaatattctcaattaggggagtaactttgtatgagctaggcagccgtgtctgcgtgtaataattataacttccaagataaacttaatattcatatctttatttgttttagttttaaaaaaaaaaatccttattctcc

SEQ ID NO: 20456 - DNA, 644 bp, Glycine max
cagctgatcaagctctctcatcctctctttctttctcaactctcacaacacaagaagatggcttctatctcacagggccttcttctcaccactgccatgcttctctccaccaccctgctttatgttgctttctccaggccttcatttcaaattcaccactctaacaaacccaccttgcgctcttgcttgtattcagaggaaaagaaaagggagagaaagaagaagaaaaagaagaaagtgaaatttgcagatagtgtgaaggatggaagagaaaggaatgagcaaagaagcaactgcagaagacaaagtggtggaatgccattgccagcaaacagaatggctttgtataacgggattctgagggaccgagtgcatagaatggagtgctcttactaattaaggataaaacgtagaacatagaaccctgttctgttctgttctgttacgtacgtgctgtagtgtacatttgtgttaggactgagctgatcaagctctctcattctctctctctctctctctctctctgaattttcaaatataattttgtgttggctgttaatacttcttacaatgcaaaaaaaaatgaaaaagaaaagatatatgtggtattcttgtggttgtaaaaaaaaaaacaaagggcggcc

SEQ ID NO: 20457 - DNA, 345 bp, Glycine max
attcgttcggctcagtcaacataactataataattataactcctctctttctttctcaactctcacaacacaagaagatggcttctatctcacagggccttcttctcaccactgccatgcttctctccaccaccctgctttatgttgctttctccaggccttcatttcaaattcaccactctaacaaacccaccttgcgctcttgcttgtattcaggtaaattcctttcatttttctctctctagaaactagaaactgtttgctaaaacaattaattctacactattcaacgattcatttcttatccaaaattcattagattttgattattgttttcaaaataac

SEQ ID NO: 20458 - DNA, 766 bp, Glycine max
ggggcttttggcaaaaagcacgcactgcaaccgctcctccacctgaagagtgaagaccaaacccaccatggacagcagaaacgtcgtcgtttgcgacaacggaaccgggtatgtgaagtgtggttttgctggggagaatttccccacatcggtttttccctgtgtggtgggaaggccaatgctccgttacgaagaatcactcaccgagcaggcgcttaaggatattgttgttggagaagggtgtgcagacttgcggcatcagcttgatatatcttatcctgtgaacaacggcattgtgcaaaactgggatgatatgtgtcatgtttgggatcacgcgtctttcaatgaattgaaggctaatccaccagactgtaagattttactcactgatccgcctcttaatccttccaagaatcgcgaaaaaatggttgagacaatgtttgagaagtacaattttgctggagtgtttatccaaattcaagctgttctaacattatatgctcaaggtttgctgactggattagttattgactcaggcgatggtgtcactcatgtggttccagttgttgatggctattctttccctcatctaactaaacgaatgaatgttgctggtcgacatataacctcctatcttgttgatttgctttcaaggagggggtatgcattaaataggactgctgattttgagactgtcagggaaatcaaagagaagctatgctatattagttatgactacaagagggaatatcagttggggcttgag

SEQ ID NO: 20459 - DNA, 444 bp, Glycine max
tgaatgtagacgcaggagttggctgcctcagcgttgaacactgttccatgctgttaaagcctccgttcacactctcacaccgattcaatttcagattttcctgtcaaactcgcattttccgggcacgaaactcgaggaattcgcgcatggcgcctcccatcctctccctcgctcttccctcaaacaccggtcgagttctcagcattcaatctcacaccgttcaggggtatgttggtaataaatccgctgtcttccctctgcaattactgggatatgatgtggatccaattaattctgtgcagttttcgaatcatacaggcaagctgagtctttaatttttcattcagcttctcaggattctgtggcttgatatacggtgtgacgctgtctgtcaatgtgaataagtttaggtgtggtatggtatgcttgattaagtaattctgc

SEQ ID NO: 20460 - DNA, 435 bp, Glycine max
cccacgtgtccgcccacgcgtccggtcaaactcgcattttccggtagatttatcattctcttctgattctcagttttatcaacctcaccgcattcgcttttcattccaattttcgtcgtctttgaccgatttcgtttttcaagggcacgaaactcgaggaattcgcgcatggcgcctcccatcctctccctcgctcttccctcgaacaccggtcgagttctcagcattcaatctcacaccgttcaggggtatgttggtaataaatccgctgtcttccctctgcaactactgggatatgatgtcgatccaattaattccgtgcagttttcgaatcatacaggatacccgacgtttaagggtcaggttttgaatggacagcaactctgggatctaatagaaggccttgaaggaaatgatttattggtctatactcac

SEQ ID NO: 20461 - DNA, 485 bp, Glycine max
ttgttcgtgggcggacgcgtgggaaatggctcaagagtactttgaatctgctaaaggtggactaattgtcgatgttagctgtggtagtggtttattttcccggaaattcgccaaatctggagcatattctggagtcatagcactagatttttctgagaatatgcttcggcaatgttatgatttcattgagaaagatgacacgctttcaaccactaatattgctctcgtaagggcagatgtttctagacttcccttcccatcaggttcggttgatgctgttcatgctggtgcagctttgcattgctggccgtctccctccaatgctgttgctgaaatcacccgggcactaaaaagtggtggagtatttgttgggagcacttttctgcgttatagttcaaaaactccctggtttttacgccctttcatggagaggactccacaaggctatggctatctaacagaggaagagatcaaagacctttgca

SEQ ID NO: 20462 - DNA, 289 bp, Glycine max
atccccggggggagaggccaaataaaggggggcccccctttttttttttttttttgctttttttttaactcaataatcacaaagttcattcattatgtcaaattatcaattccttttacagagccagtgggaatgagggattcagttgtgaaatctgcattagcaataccataatgcaactacaaatcttagatgtatacgcgctgaaagcctaaaatatgaggtttgtagttgcattatggtattgctaatgcaactacaaatcttagatgtatacgcgctgaaagca

SEQ ID NO: 20463 - DNA, 433 bp, Glycine max
  unsure (1)..(433): unsure at all n locations
taatcatagaatcgccagtagtattgaaaagaaaagctttgaagagttgcacactgcatgctctttcagcatttttccatttgtggatgaagctggatttctttatagagaaataaatgcattcttatatcttacccgggggcttacttgtgtattttgaggccatgcagaagttaagaaattcccctccaagtttagcaggaccccgggtggaagcccttttgctggggcttcattcccaaaaactgaaatcttagttgtatacgcgctgaaagcctaaaatatgaggtttgtagttgcattatggtattgctaatgcagatttcacaactgaatccctcattccccctggctctgtaaaaggaattgataatttgacataatgaatgaactttgtgattattgggttaaaaaaaaaaaaanaaaaaaaann

SEQ ID NO: 20464 - DNA, 719 bp, Glycine max
agtatgaatattatgacatgttttatattggtaatgttacgtttgatctatgtctcttctccatctatttctggctttggctttgctttgaatgacttaaaacaattttctcaactaatagaatatggccttgggccagagtctccacaaattgcaaactgcttttactaaatgaaattgactacatatgctgcctcttttttatcctttatttgagcagatcttcccatttgcagtactgccctcctgctaatgctcgataatacctatccctacagtagacaggtcttccatcagcagcctcagcagcagcagctgctagatcatcatcagttatcacctcgactggtaatttaagcagctcctcttttcttaagagctttgtgttaaccttgggagcttgaacagttgatttaatttcttctttggtaaaggtagttcgaaaaaaattctccaatggtgtagcaaagataaatagcataactcctgtaacaagcaatgctcctgtcccaactagagtttgtttcagcaatttaacgactggtttaaccttgtaagagcccaacaatctatcacgagctaggatctcgggcggcttgacccacatctgtccgtcgtaccatccactttcttcataagggatgaccgctgatagcagttctatcaccaacacatctccaacccagataaatcctcactcgagccgattcggctcgaga

SEQ ID NO: 20465 - DNA, 266 bp, Glycine max
aaatcaaatttaacatattgctcttctagtctgtatccaaaatctttctgaattcatgcaatgctgtgatactttgtgatgtccagtaccttgttggagcccatcaatctatcacgagctaggatctcgggcggcttgacccacatctgtccgtcgtaccatccactttcttcataagggatgaccgctgatagaagtctatcaccaacataactccagcccagataaatcctcaacacaatcatagacacaatgaagagtgttcc

SEQ ID NO: 20466 - DNA, 913 bp, Glycine max
aaatcacaagttcctcatttctttaattttgggtataacataaagtcctctcatttacaacaaaattaaatgtcatatctatatatcacatgaatatacaaaaaaatgctataagaaggatatgattcaacaatgaaatttggtagctacttgtgttctaggtcctgtagttggttttttaaaagtaaatgttcataccgcatcctttcaagcctactctcaaccatgtacatttcatctttgaggtgatgaattcttttctccaaccacgctatgtctgaaggacttctagtgacctcattgttcatcctattcgtgatgtctacaggagtgttcatatgtatgtgttgaggtctagccaacagcacaagtatgctacactgctgaatgaagaaaatcagagcgacaacagtaataaggagcagagaaagattgctatgacttctcaaagatgatctgaacttcgtcataaactctttaaacagtgaaacagatgatggttcgatgaaatttccctgcaagtgagagccgacattgtgggtagcagcatcaaaggcattggatgtagctagtatctttgtagggttactttgctccggtgacccttctgaagattctctagtcttcacttctctatctaaattgatttcaccattttgagcttgtttttcaaggttcttctgcttcaacatttcatgtgccatgtttatccatgtcgcataagcatctcgacattcttcaattgttgattgtattattttgcctttccaaatagtttttttagaaaatgccacattcacatatacccgcaaagtgcagcattcttttgattcatccttgtctctctctacactccacagtccctcaacccggaaataatctgcataaggtacatcactgacttcttgcgacg

SEQ ID NO: 20467 - DNA, 512 bp, Glycine max
caaatataaactcatggttatcatgacgataaaagcaacagttcatacaattaatgttatataatcactgacttaggatcttggatcaccattcaccaccactgttagtcagcatcaagcatacccgtggtctcaacctggtttgcaatagagatatcataagctgcatcattgcatgaacataaacacaatgataacttatatgtttaaaatataacaaccacttccaacggaaacttatttttgcttaactaagcaacaaattcaagagcagaaaatcaatgaactatcacagtacttcttggcggggaaaaaatagcactttaatctaattttttttaagcagcacttcccaaatcactttctccaagttaatgtgtgaaagaccacctagtttggtgcccttccttgctcttcttttaaatttcatgaccttttgccctaatttttttttctattctctcccctccatcaattcataggacctgtgttctccaaccttctcttttttt

SEQ ID NO: 20468 - DNA, 472 bp, Glycine max
atcttctacgctgtcaaactcgtttccgggctccctatctgcattgctagcttccctctccagttcctcccatgtttttcccttctcttcttctgaatcctcctaggaatcctcatcgccatcatcatcctcagactcaacaagtgattcactatcacaagcttcatcctccgaatcagattcaggttccacatcagatggttcgtaacctttatctgactcctctgagttctcagattctgaatcagtagcttccaaattcagaaactcccaaccaccaccttcaataaagctctgagggtcatccgtgattgtcttcaggatctgacgccagttcagattcagcctgctctcataatatttgatgtctgttgtgtcaagccactccttgatgccatccattgatgtagaagggatagtatcaatcctgaggtcatccctcttgaagtcctctgagccgaatcgctcgaga

SEQ ID NO: 20469 - DNA, 561 bp, Glycine max
aatacacaaatactaaactttcttacattatatatgaaatcattccatcaatacataatactataatcttggaccgaaaataccaggatacattaaaaattaaaaaccaagaccaaaaggaataataatattagaaattaaaataatagctggaatctcaatttcacatccatatattgtggctggatctaacatccaaccattttcccacatattctatcatttgtttcccttcatttcttttccaaattatcatgcacacacacacatatatatatatatatatatatatatatatatatatcaatcatggcttagaactgcaaatagtatccaagaaaggagaggagggaggcaccaaggaatggaccaagagcagcaacgccgcctttgggtgccagagctggggcggggacgattgcaggagcttcggccttgtcgtgaccggcgtgagccattgcagtgctaatagaggtcacgacgaggaggacgacacatgcaaccttcttcttctccataattaaacttttgcagtgtaaagaaagggaattttagtgaaat

SEQ ID NO: 20470 - DNA, 397 bp, Glycine max
taacatagagtaacaacactatagattaaaggttagaaaatggaagttacaattgtaaggttctcctttaataaattcaccaacctaaactacataactctaaagcgaagtaaatatattaaattattttctctctctcatttttttcctctcaatatctatatctacacaagctcccctatatgtatctgagacagcagcggcagtttcagatagatccctcccaatctctgaaattttggaacccacatgttctttgaattttgagacggaatcaaccagctgaaagagttccctggcatgcatttgaatttcttcttcactttgtttaatcacttcctgcaacttcaattcggatgtcttgagaacctcagctgcctctctttccataatgtca

SEQ ID NO: 20471 - DNA, 431 bp, Glycine max
cttccttgtgtttttcccggtaccatagctgcttctctaagatgaagaacagggtaatgactttgcaattacagtgaaccagattgatcaagaggatagcctgaattgatatcttaaatcctaatttgcaggttgcaaaaatacagaaaaatagttcacaagatgaacatcctccgctctttttggaacagtcccactggtctaaaaacaactcatttttggggtcctgccttcaattggagccttccttttgcggcagcaatggacacaaagaaaccaccggaaacaatatctgtcaatatgaccggaggttaattaattaattcctatttagtgttaacttttgtttgagaagaattaattcgtaattgaatccattggttttatttcctatttatataaagctcctagttaatttaaatttggaaatc

SEQ ID NO: 20472 - DNA, 545 bp, Glycine max
tatattacagatgaaccacgattgatcaagaggatagcctgaattgatatcttaaatcctaatttgcaggttgcaaaaatacagaaaaatagttcacaagatgaacatcctccgctctttttggaacagtcccactggtctaaaaacaactcatttttggggtcctgccttcaattggagccttccttttgcggcagcaatggacacaaagaaaccaccggaaacaatatctgtcaatatgaccggagttatgtgtgtttattcggcatcgttcatgaggtttgcttgggtggtgcgaccgcgtaacctacatcttcttgcatgccatgtcaccaatgagactatgcaactatatcaactctcaaggtggttcagagctcaaaggacccttgaacagaacaaaaaggaaacagatgcagagtgaaacgtcgatttgtttgaactttgaaattcaaagaaaaaatttgtcctatagctttagaaacaattccttgacagtaaaaaataaaataaaaaacaaaaaaaaaaacaacgcctttatgact

SEQ ID NO: 20473 - DNA, 395 bp, Glycine max
  unsure (1)..(395): unsure at all n locations
agactagttccttctttaacactctgtgagaccttgcaagcagcgcctctggaggaagttgttgaagcacgaacagttcctactgccactactcacatcccaccatggatgctgcatccatttacaagataaattaatcggcatgacaccgttatgtttgtgacatgtgattaatgttaaaagcataagctatatatatctatatgtcaaaaacataatgttatagctaattgttaagtttgataattaactgctcgtccttgtaagtacaggatgtgccctccaaatttgatcgtttgccaaaaaaaacattcatagacgaaggctactacatggtgcaagagtgcaagtgatttgtataagaaacagttaaaatggcttctattatttttaan

SEQ ID NO: 20474 - DNA, 404 bp, Glycine max
atgaaaacgtaagtaatttcttacctgagataaattctgaattcatctttccctatggtgatgaagcagaatattgcaatagttcctcttttcccaactccgcgttgaatatagcagacaaagggaaaagcaagatggtttgacgtaagattcaaatgggtcaccctcacactgcatgcagctaaaggcaaaactttttcgccgtcagtattgacttgaactctcaattatttctgttcttaattagtttcaacgtgtaaggccacaatcaagagactcagcaaggatgaaggccgctatatgtaatttcttaatttctaattatgttgtcaatttgttaataaacttgaggaacttataacacagatttattattcgagtatatatataatgctactgttggc

SEQ ID NO: 20475 - DNA, 418 bp, Glycine max
cacagaggcaaagcagaaaagcagaaggcggaaaactgcctcgtggttaaggaagtgtgtattgcagcttggtccaactttcattaaacttggtcagttatcatcaacaaggtcagatctatttccacgtgaatttgtggatgagctcccaaaattacaggacatggttcctgccttctctcctaagaaagcaagaaaattcatcgagagtgaattgggagctcccattaacatattatttgaggagtttgaagatcggccaattgctgctgctcctctcggtcaggttcatcgcgctattctgcataatggggaaaaagtagtcatcaaagttcaaaggcctggcctgaagaagcttttctgcattgatttgaaaaacttagagttgattgcagagtattttcagagaagtgaaact

SEQ ID NO: 20476 - DNA, 419 bp, Glycine max
tgcatacaactgctgattgttgtgattacttgtggtactcattaaccattgatcttgatgctggtgctcaaactttccttcatattaaatcccttgggcatgctcttcatgctttcataaatgggaagcttgcagggagtggaaccggcaaccatgagaaagctaatgtcgaagtagacatccccatcacactagtttctgggaagaacacaattgatctcctgagtttaactgtgggacttcagaactatggagctttttttgacacatggggtgcggggatcactggccctgtgatattgaaatgtttgaagaatggcagcaatgttgatctctcctccaagcagtggacatatcaggttggccttaaaaatgaagatttaggtctatctagtggctgttctggacagtggaatcac

SEQ ID NO: 20477 - DNA, 388 bp, Glycine max
gaagggtggttgatctctatgctgatctctctaattcctttaccaagtccagagaagcttcttctgaaggtgactcctctgggactctgaagtctgatggaaaagtcaaccagaagagaattagatccagctgatttattgaatttgagctttcgggcacgcaatcaagaagtttattctgaatctggaaggaatttgtttggtgagactgtgtaacttcctccaaagttatttttgtgccaagtcttccatattggtgtttatgtttagaggcccagagatttagttaatcatctgatctataaaagtggcttcaatttgaggactatacacttgtgatttttctgtacctcagttaacttcatgaaatggagcatgttcacggacc

SEQ ID NO: 20478 - DNA, 628 bp, Glycine max
gcaatacagccccaacgtgagatggatgcttcttggttatgtgggagagactgatgcagggcttttggaattctctaagggttgccccagtcttcagaaacttgagatgaggggatgttcctttttcagtgagtatgcactagctattgctgcaactcaactgaattctctcaggtacctatgggtgcaagggtatggagcatctccatctggacgcgatcttctggcaatggctcgcccctattggaacattgagctgattccttctagaagcgtggttgttagcaatcagcaagaagagcctgtagttgtcgagcacctggctcatattcttgcatattactctcttgctggcccaagaacagattttccagataccgtaatacctttggatcctggaacatatgttgacacctaaacttgtacataccatttttctttttcttccaaatcttgtttgttagtggtggcagtgttttagtttagagggtttcaattttctctgcaattcctagacaatagtcttgtaataagctcgtgttctttgcttccgatcaactcttgcagcaggttgtttttttcccctgaagatgctcaattttgtgaatataaagcatggattgtttct

SEQ ID NO: 20479 - DNA, 412 bp, Glycine max
gttaggagcgtgcgtgagagacagcacatcatggtacggaatcggagaaggatgcctccgcggcggtgcacggcgtctatgggcagcagcaacgggagcgagagcgatgcgtcagacttggtgatgcggtgcctctcgtgcgaggaggaatacgacatggacgactcgggaacctgcagggagtgctaccaggaggccaacgaggctgaggaggagctccgccgcgagatcgaagagctcaaatccaaagtctccttcctcactctcccctatcccaatctaaacgcttacaccggcgatatcatccttgttcccgccgacgactccgacgccgttcccatgcccggtcacaagcaccttatggatagtcgctgtcctgggtttaaagcattgcttgggaacgatttggctg

SEQ ID NO: 20480 - DNA, 264 bp, Glycine max
agcgtgagagcacagcagtgtacgaaatgcctccgcggcggtgcacggcggcgtattcggcagtggcgcagatgggcagcaacacgagcgagagcgacgcggaggagctggtgatgcggtgcctctcgtgcgaggaggagtacgacgtggacgactcgggaacctgcagggagtgctaccaggaggccaacgaggccgaggaggagctccgccacgagatcgaggagctcaaatccaaagtctccttcctcactctccctctcc

SEQ ID NO: 20481 - DNA, 1213 bp, Glycine max
atggaagaagaaaaacaatgcatcttccaaatctaggaaaagtggatcttggagagacagtgttggagcaagcagtcagttgactgtctatcatggctatgtagctagttcttatcatacagggattatttcaggattcatgctaatatcttctcacatggaaaatgtggcatcaagtgggaaaatggtaaaagctgtaataataggtcttggagctggtttactttccatgtttcttcacgggtgtatcccctttttggaaattgagactgtggagttagaccccatgattgttgatattgcaagggactacttcagttttgttgaggataaacgcctaaaggtgcatgtagctgatgggatccagtttgtccgggagattgacagttctggagcacctcagattcatggaaaaagtaatgatcctagtaatactgagtctgctctaaatgcaagttcaactgtgtctcatgctggtgtaaaagtgacaaaagttgatataattattgttgatgttgactcttcagacccaagctcgggattgacatgccctgctccggattttttggatgagtcttttcttgagaccgtaaaggatagactttcagaggatggtctctttgttgtcaatttggtgtcacggtcccaagccattaaagatatggctctctcaaaaatgaaaaaggttttcagccacctcttctgcctccagcttgacgaggacgtcaatgaggttcattttgccctcaaatctgagtcctgtattgaggatagctgtttctccgaagcttctcttaaacttgataaattgttggagttcaaacacccggagataggtcaaaacattatcaatgcgacaaaaaagatcagacgtttaaagtgaaacttgctctccttccttgctatcgttatgagcatgatactcttcgtatgtgtgatgtgaatgcttgctatctcaaatgcggaagtgatttcagccaaaggtttgtcattgatatgcggattactggttgagtgagtataaatgacgtgtgataatattgtagcgcattcaccctttatttcatatggttgtttgcttcaacgtttaagggttatggtcttatggataacattccctggaataattcgctgttaatactatcccgtaggaattttttttcgtttaggtttggttggcctggaattaaataacaaatactggaaacttttt

SEQ ID NO: 20482 - DNA, 428 bp, Glycine max
caaaaagataagacatttgaagtgaaacttgctctccttccttgccatagttttcggctcgagattcttcgtctgtgtgatgtgaatgcttgctatctcaaattcggaagtgatttcagccaaatgtttgtcattgatctgcggactgaactgtctagtactcatcaatagtacttaatggttgagtgatgtataaataaatgacttgtgagttgtgatgatattgtagcgcattcaccctttatttcatatgggtgtctgcttcaacgtttaagggttatggataacattccctggaataattcgctgtgaatactatcctctaggaattttccttcgttaagatttgtttgactggtctttaaaaaacttactggaaagtttacaattcttggaaaagtaatactattttcttctttatcttcccc

SEQ ID NO: 20483 - DNA, 404 bp, Glycine max
  unsure (1)..(404): unsure at all n locations
cacgcgnacgtaagctaggaattcggttcgaggttggcgcaaaaccatttcgctaacggagttcttccacggcgagatctcgtcggagctatggaaaatgctggtttcaatttcccgaaaagccctccgctgcaagtcgagcgccgagagcctcatcacctacgtccgcgagctccttccgacgatcgaagagatcaaatattccggcgtggagctgccggcgccgcgccagtctcagctcgaccgcctctcggagatcctccgctccggcgtcgagctctcgcaccaggccctcctctcctcccgctggaacgtgtaccgcaacttccagcttgccaaaataatgtgaaagctcgagaagcacttgacatggtttttgtaggttccatgcatgcacatatatt

SEQ ID NO: 20484 - DNA, 478 bp, Glycine max
gcataaccaataattgaatttgaatcatttgggtctctagacacaaacactaccccctctttccccctcctcaacattgttatgatcccttgttggtaaccattccatttgcacttgtctttgcaaccaaaaaacaagctctatgaccaacgaaatgaaagaagcaagtgccttaggagctagaacagcacgagcatgcgagagctgcctaaaagtaagagcacggtggtattgtgcagctgatgatgcattcctttgccatggctgtgacaacatggttcactcagcaaaccaattagcaagtagacacgaaagggttaagcttcaaactgcatcctctaaggtcaactactcagtgacccctaaggtagcatggcacagtggattcacacgcaaggcaagaacgccacgccacaacaacaacagacactcatcattgaaacaacaacaacaaaaaaaaaccattacatgaagaacg

SEQ ID NO: 20485 - DNA, 743 bp, Glycine max
agctcggggaaggttgacaatgggaagtttttgagggtgtatttgaaggaggatctgcctagtcggcttcattatgccgcgagtgatcggattgcgccgataattgggttgattgaggaaggtttcaaggttgagcagaagagaaccaagcgccaagagtgtggcggttcgcacggttatgacaatgcggttttctccatgaggactatttttattggacatggtcctcgatttgctagagggaggaagataccgtcgtttgagaatgttgagatttataatttgattacttctattctcaagataaagggagcacctaataatggctctgcctcatttgcagagtccgttctactatctgctgcataagtgatactaagaccgtgagtttttattggtggacagcattgcagatgttgaactctagcgaacaaaatatttgatcgctaagctgtatgataggtaatgtgctctctaggagtgatgctcggatcagaaatatgggcatgctgaaagaataggggtcatatacctttgcacgcgattgctgaaattagtctatatgtaataaaggtagttccatccacttggttccatttttgtttgttatgagcagcacaagtagagggcaagcttagctttaacaacgtgtctgtaagtagtatacgatcacaggatttaaatgttcttgagctagagtgagatccccatttggatctcaaggatccatggatttgaacact

SEQ ID NO: 20486 - DNA, 401 bp, Glycine max
gaagaaacctgtggctaaaagcggaaaaacatctcaaaagcctaagaaggctaatgatgatttagaaaaaactgaggaacctcccaaaaaggtctctcattcaacccgacgaagaaaatgatgcgtggacaaggctctgctggaaattcctgaggatgaacttgatcgtctaaatatacctattaaggatattattttacttgaagaacatagggagcggctggcgaaaaaagaggcgatgacttcaaatacttcttccaccaaccaaagtggtggagattctcttcatgaggctggttcttataatgaaggggcttatgatgatggagcttatgatgatggggcttataatgatgaggagttcttaggttcagaagatggtagagacccatatgataatc

SEQ ID NO: 20487 - DNA, 1523 bp, Glycine max
gcctgcgatctggttgatatgaatagcaaaaaagaggagcaggagcatttagcatgtcaggttgtgatgaaggatcaagaaaatttgatacctaatgatcattgcttaactttgttacccttggtggactcttccaataaagactacacagaatgtgaaggtgggatgatcaatgcttctgatgtagctgagaaggaggacttacaagatggagttttgatgaacaatgacccagtttctgctgctttggatcaaactattacaaattgtgttgtttctgctcctttgatgaacaatgaaaatgttgcttcttctggttgttctcatgttacttctgatcaagaggacctctcatgtaaaccgttgtctaacatggatggatcttggggtccaggatttgatggtcgtttggaggatggtaacacattatcaaagcatgaagttctgaatggcattgaaatttccaagagtgaggggcaattctgtccatttgacgatgctcgagtatccaatgttattagtcctctacgatcacctggtagacctgaagttgttgatgaggaagctcaggcctctcaagaactgaaggaagcagagactttaaaccatgtatctcttgaagctgtgcagcccgctgaatcaatccttcagccatgcacctcccatcttggccagccttctcggtcatttattgaaggtgaaaaatgtcatgtaactgatgtttcaaatcctgctttaagttaccaagggactatagagccatctgtatttaaagaaacgcctgattcggggaaaacagatatgcaacttgagagtcagatatttagtgacaaagtagaaagtataaacaaatctgctgctgctgacatgccagagcctgaaaagttgctctcagcttaccagcatgatggtgaagcaaatcatttgctgatggcatctactcctgacaatcagggtgcaactgaaggccatacaggtgctgcaggagaaaaatgcatctccggtaaaaaacgtagctacacagaaagtactcttacagtgcagagtatggatttgattgaatcttacgcgggagctcaatccaagagaactgctgagtctgttcccgatgatgatgatctactgtcatccatattagttggtagaaagtcttcagtcttgaaaatgaagcccagtcctgcagcccctgaaatagcatcaatgaagtgtgttcgttctgcttctgcaccacgtactagtgccttaaagaggaaggtgcatatggatgatatgatgtgtcttgcatggcgatacaatacgccaacagttgacaaatacggaagacattcgtcgcatacgcaaaaaagctccttgcactcgtcatgagattttaatgattcaaagacaatttttggaggatgaaattttccatgaaccaatatttacggatttgtctactgatttgactattctgcgaaatgagacatttgatctgactggaatcaaggttattgagtatggtttagatagttcttctgtagaaa

SEQ ID NO: 20488 - DNA, 477 bp, Glycine max
ctcgagccgcgacaattgaagcgatccccagagtgtaacaatggctgggaaaactcaaactcactactttcttctcttgtttctcttcttaatctccatcaacgccaaacttgatctctacccttcagactacaaggcactcctaactctgcagaaggacctcggagtcaacggtcaagtctccgcaactctggcttgcgaaacagagggcgtgttctgcgagcggaggaagctctccggcaaggaaacctacgccctccgaatcaccagactcgtcttcaaatccaacaacctcaacggtgttctgtccccttccattggacgcctcacggagctcaaagaactctctctctccgacaacaacctctttggccgactccctccccaaatctttgactgcagaaagctccaaatcctcgacctcgccaacaacctcttctccggcccagtccccccagagctctcctccctcacgcg

SEQ ID NO: 20489 - DNA, 591 bp, Glycine max
  unsure (1)..(591): unsure at all n locations
aaacattgtgacaacagtttcacctacttacgcccaagaagtgagaacttcagagggagggcatggtctccattcaacactctctgcccactccaaaaagttcattggtattcttaatggtattgatactgatgcatggaatcctgccaccgatgcatttcttccagtccagtacaatgcaactgatcttcaagggaaagcagagaataagcaagccttgagaaggaacctaggtctttcatctacagatgttaggaggccattggttggctgtattacaagactggttccacaaaaaggtgttcatcttattagacatgcaatatatctaacattggagttgggaggacaatttgttctacttggttcaagtccagtgccacacatncagaatgaatttgagggcattgccaaccactttcagaatcatgatcacataaggttgatattgaagtatgatgaatctctctcccatgtcatttatgctgcgtctgacatgttcatcattccatcaatctttgaaccttgtggcctaacacagatgatatcaatgagatatggtgccatacctattgtccgaaaaactggtgg

SEQ ID NO: 20490 - DNA, 406 bp, Glycine max
cacacacacgacaccatcaacccaaaacaaagaaacaatggctctgagattcgcagcagctgcttctgcttctgtctcacgaatatcaaggccacaaaacccaccattcttttcacttcaacaccgcaacaacggtactctcaaattccatagcccaccttttcatcatccacttcccacaccctcaaaacgctgcaacgttcgagccataagcgaggtagctgtggaacctgaaatttcaaagaaagaacaaaatgagtcacctaaagattggaagattaaaatgctctatgacggagattgccccctctgcatgcgcgaggtgaatatgctaagagagaggaataagagttacggcacaatcaagtttgttgatataagttctgatgaatactctcccgaggag

SEQ ID NO: 20491 - DNA, 412 bp, Glycine max
aaaaacaaagaacaatgattctgagatctgcagcagctgcagcttctgcttctgcttctgtctcacgcatatcaaaaccccataacccaccattcctttcacttccacaccccaacactctctaattccataaccaaccttctcataatccacgcaacaacgttcttctgccacttccctcacggtctcaacgctgctacattcgagccataagtgacgcaactgcggaacctgaaatttctaagaaagaacaaaacgagtcacctaaagattggaagattaaaatgctctatgacggagattgccccctctgcatgcgcgaggtgaatatgctaagagagaggaataagagttacggcacaatcaagttcgttgatataggttctgatgattactctcccgaggagaatca

SEQ ID NO: 20492 - DNA, 794 bp, Glycine max
attattgacgatgttcttgtgcatcttccaaatcccgtttcccccccaccccgtccccccaaaagaatgatgttattttgaatgacatgtcttatattttcaggttttgagtgccaaaatagaggaatatgcaccaatagcgtatactccaacagtgggtcttgcatgtcagaactatagtggactgtttagaagaccaagaggaatgtacttcagtgctgaggatcgtggagaaatgatgtctatggtgtataactggccagctgagcaggttgatatgattgtagttactgatgggagcagaatcttgggacttggagatcttggagttcaaggaattggcattgccattgggaagcttgatctatatgttgctgctgctgggataaatcctcaaagggtacttccggtgatgattgatgttggtactaataatgagaagttactcgaagatcccttatatttgggattgcagcagcatcgtcttgatggggatgattatcttgctgtagttgatgaatttatggaggctgtctttactcgctggccaaatgtgattgtgcagtttgaagatttccaaagcaaatgggcatttaagttattacagcggtatagaaatacctacagaatgttcaatgacgatgtgcagggaacagctggagttgcaattgctggacttctaggtgctgtacgggcgcaaggaagaccaatgattgacttcccaaagcagaagattgttgttgctggtgctggaagtgctggaattggggttcttaatgcagcgagaaaaacaa

SEQ ID NO: 20493 - DNA, 1045 bp, Glycine max
cggacgcgtgggcggacgcgtgggcaactgcctctctctcctttcaatgttcatggtggtgtgtgcagcgcgctaaactagttggattcgaacttggagatcaaagaagtttatatgtttcgccaaaatttgagcaggggacctctcaaaatattgacgaggtggctcatattccttactatcttacaagtcagttgtgctatcaaagatcctgatgtagaaggtgaagctctgcttgatcttttgcatttcctcaatgattccaataagcaaataacggactgggacagttttttagtgagcccgtgcttcagttggtctcatgtcacttgtagaaacgggcatgtcatatccctggccttggcttcagttggattttctggaacgctttctccctcaattatcaaattgaagtatttgtctagcttggaattacagaacaacaatctttcaggacccttgcctgattacatttccaacttgacagagcttcaatatctaaatcttgctgacaatagttttaatggttctataccagctaattggggtgaactaccgaatctaaagcatctggatctttcatctaatggtcttactggaagtatcccaatgcaactcttttcagttccattgtttaacttttcagatacgcacctccagtgtggccctggctttgagcagtcttgcgcttctaaatctgaaaatccagcttcagcccacaaatcaaaattggcaaaaattgtacgttatgcaagttgtggtgcatttgcacttctgtgtcttggggctatctttacgtatcgacaccatcgaaagcactggcgaaaaagtgatgatgtctttgttgatgtttcaggtgaagacgagagtaagatttcttttcgggcaattgagaagattttcttggcgtgaactccaacttgccactaaaaatttcagtgaaggcaatgtaattggtcagggtggctttggaaaagtgtacaaaggagtactctctgataacacaaaagtcgctgtgaaacgcctcattgattatcacaatcct

SEQ ID NO: 20494 - DNA, 843 bp, Glycine max
aagggtaattaatcaatgaagataccccatgaaggaattggaaggttccatcatcatcatcatcatgtcactgatcagcaatcactggctcctaggtttcatggaaatggtgtttctctcactcttggacttccacacagcactgagaataataataacctttccctctcaggaactactcatcaacatggattcctctcacagaacatgcacttgggaatgagatcaacaaccaataatgcgaataatgagttttgtggtgccatcaacactactccaccttctaattctcactcacgcaccagttatgagagcattgacattattcaaaacagaaagaggtttgctgcgcagttgttgcgggatttcgtggcttaaaagaattgataattaactagctagctaggataattaatcaatgaagaacaccccccgaaagaattgaattattttcttctttttctgatgttgcaatatattatatatccacaaaacacaatgcagttcagagtgttacgacacactaacttagcagaagaatagcaacaggaggggaaaaaaaaagaaataaaagaaatggagaagtttatggtaacttgctccatgtataaagatggaaactggttcaagattatgaacttgcagggaattcagatttacatgttctgaattagtttaatttaaggattcaagttgagttggggaaggtatattgtatatggtattgaaaagtagctaggtacaatacaaggaattgaatggtttgtttggataggtaatgtattatatattggatttggagttatatgccttactttgttaaattaattattcattcattgc

SEQ ID NO: 20495 - DNA, 501 bp, Glycine max
agacattggaaggttccatcatcatcatcatcatgtcactgatcagcaatcactggctcctaggtttcatggaaatggtgtttctctcactcttggacttccacacagcactgagaataataataacctttccctctcaggaacgactcatcaacatggattcctctcacagaacatgcacttgggaatgagatcaccaaccaataatgcgaataatgagttttgtggtgccatcaacactactccaccttttaattctcactcaggcaccagttatgagagcattgacattattcaaaacagaaagagatttgctgcgcagttgttgcgggatttcgtggcctaaaagaattgataattaactagctagcaagggtaattaatcaatgaagataccccatgaaggaattgttttttattttattttttatgttgcaatatatccacaaaacacaatgcagttcagagtgttaacttagcagaaaaatagcaacaggagag

SEQ ID NO: 20496 - DNA, 548 bp, Glycine max
tgtgaaacggacatactggtttgacatttataagaacgttgataaaattccattggtgaagtgtccagtgctagtaattcatggaactgctgacgaggttgttgattgctctcatggcaagcagttgggggagctatgtcaacagaaatatgaacctttgtggctcaaaggaggaaatcactgtaatttagaactctatcccgaataccttcgacatctcagaaaattcatatcctcggtagaaaagccgccatcacaaagagtgagtttcaggagaagcatagacagagttgaacaatctagaggaagtactgattgctttgaaacaccgaggaagagtactgatcagagggacaaaccaaggaaaagtactgataggacagataaactaaaatttcatgaattcaaatttaacaatacggaaaagttagagaagataagagtccaatttgatcagatggagaggtcacgaagaagcgtcgagtacaatgataaatcaagaagcattgagttccaagatagatccaggagaagtgttgatgttcagt

SEQ ID NO: 20497 - DNA, 433 bp, Glycine max
ccgggtgcggttgtggttgacatttgatggtgatgggagttttataatgaatgttcaggagctggccactatcaaggtagagaagctcccggttaagatattgttgttgaataatcaacacttgggtatggttgttcagtgggaggatcggttctataagtctaacagggctcacacgtatctgggagacccctctaatgagaatgccatattccccgatatgttgaagtttgctgatgcttgtgggataccggcagctcgtgtgaccaagaaagaagaccttagagcggcaattcagaaaatgctggagacccctggcccctatcttcttgatgtcattgtaccccatcaagagcatgtcttgcccatgattcctagcaatggaaccttccaggacgtgataactgagggtgatggcaggacaagttactga

SEQ ID NO: 20498 - DNA, 1172 bp, Glycine max
caacaattcccctttgacatggaatacccgagcacgaatgattgctgaaatcgctagtgctctctgcttcctacattcttttaagcctgaaactattatccatggtgatctgaagccagaaactgtactacttgattcttcactgggttgcaagatgtgtggatttgggctctgcaggctggtgagcgaggagtctctcctccgtcctagtttccgcttgagcactgaaccaaaaggtgctttcacatatacagatccagagtttcagagaactggaatactaaccaccaagtctgacatctactccttcgggctcatcattttacaacttctcactggtaggactccagttggattagcagttttagtacgcaatgcagtttcatgtggaaagttgtcttcaattcttgattcttcagctggagaatggccctcagctgtggcaatgcaattggttgaactgggactgcaatgctgtcaacaataccatagagacagaccagagttaacacctacacttgtgagagaattggagcagttgcatgcttcagaagagcgacctgtaccatcttttttctcatgtccaatccttcaggaaataatgcatgatcctcaagttgcggcagacggatttacctatgaaggagatgccatacgtgaatggttggaaaatggacatgatacttctcccatgactaatttgaaattaagtcacctgtttcttactcccaattacgcacttcgacttgccatccaagactggctttgcaaatcttgaagcttcttctatttatctgggctaaagttcttttttttatcctcattagtttggggccagtttcgtttcagtcccatgattttcttttcttgtttcagtttgtgtgtgtggttgtaaatttattttgtatcccacaaaacattttcaaattgatttgatcccagcttacgccattcaagtagacagaaggaaaaaagaactgtattttggccacaatttccagccaagagaagaaggaaaaagagcggaaagtaatagaccgtcatcgtctgtgcacccgtcatgatttagacttcaatatgttatgggattaaactgattcttgtctcatatttgagggggcaaaagaaacaacttagcctttttatttatgtaaatatttgtatattttatt

SEQ ID NO: 20499 - DNA, 465 bp, Glycine max
accacattgatctttcaaaatcttcataaaacaaagttcttatgctccaaaattggatccctgacctgccattgaagatgaatctaatgaagctaagggtaaatcatcttctgagttgagttgattgggtacagaaacgcagcgtttagagcaccagcgaaactcttttgcacgaacaatgaagcttcagattttcacccaactaaaccaatctcaaaaatccgcattggcggtggttttcgtcattctcttgccgcctttctttcccaatcttttccaacctctcggtcgttcttcgccttctgtgttctctgagtggaatgctccgaggcctatgcacgtggctttgctagagggtgctttgcaacgccaaacttcagttgaacttcaaactagtctctggtctcccttggctttccaaggatggaaaccttgcactgagcgtccaaaaccacactcactacc

SEQ ID NO: 20500 - DNA, 573 bp, Glycine max
gtggcaacaaactcttattcccactcagtggtgaatttgccaaaccgggataaccgtatccctattcaggaatacaatgttctcgttaagactccctattcctctcgttaaaacaccaccttctccctcttgttattattctcactattatcactatcgttatcgttatcgttgttatcatcctttccatcaccgttcccaaacacagagtcttatcgtctcgaagcgcggttccgccattgcgaagtgtcacgctgatagcgtgacacttcgtgatgacggagtctcgctcgcccaagagtcgttggagccacttccggcggaactcgcggcggagatgatgccgaagcatgtggcggtgataatggacgggaacgggaggtgggcgaaggtgaaggggctgccaccatcggcggggcaccaggcgggggtgcaatcgctgaggaaaatggtgaggctgtgttgcagctggggaattaaggttctaacggttttcgcgttctctacggataactgggttcgccccaaggtggaggttgacttcttgatgaggctgtttgagagaacaataaa

SEQ ID NO: 20501 - DNA, 516 bp, Glycine max
ctctttctaaacaccactttctcccaaaacaaaactcatctagattcttctctcttcaccattccagatgaagaagtccgtcctcgctgcctccgtcgccgccgccgcttcagccaccgcggcatctctctcctcttcttcccatcaggatgagagaagccgtgagaactcttcgtcgcagaattcatcttctacggagaaattcgctcccagatttgatggattgcgcttcattgaaaccctcgtaactgcccatagatgatgattattcgaggttccccacttctcactcaattggggcctcactcctgcttccctcatcccttccctttaccttttttctttcccttctgttatgccctttagaaaaagaaaaattcatgtatggggaaattcttaagtcttttacttctgtttttccccctctcttaggagaattagagagaaaaagattgtaattttacgggattatttcattgccctttctgggaaataaaaaagtgacaaggttttagg

SEQ ID NO: 20502 - DNA, 316 bp, Glycine max
taaatttctctctctttctaagctccacattttcccgttactcccatctagattcttcagttcccccttcaccactccagagatgaagaagtccgtcctcgctgcctccgtcgccgccgccgcttccgccaccgcggcgtccctctcctcttcttcccatcaggttcccctctagctcgtctggctgtctttagattcaagttgagaaagaatttttcaaatttcaatacacaattgcgaatatcaatgtacaaaatgaaaaaaaaaaattgttgctttggaaatcaaattcttaattgaaataataaaatacgta

SEQ ID NO: 20503 - DNA, 298 bp, Glycine max
ctaaatttctctctctttctaagctccacattttcccgttactcccatctagattcttcagttctcccttcaccactccagagatgaagaagtccgtcctcgctgcctccgtcgccgccgccgcttccgccaccgcggcgtccctctcctcttcttcccatcaggatgagaggagaagccgtgagaacacttcgtcgcagaattcatcttccacggagaaattcgctcccagatttgatggattgcgcttcattgaaaccctcgtaactgcacatagatgatgattattcgaggttcc

SEQ ID NO: 20504 - DNA, 592 bp, Glycine max
acaagatccaagacttttaatccttgtctctcaattgcttcttgatccatttaacttgactccagaagaagcaagatctgccataattggtcatgttgttcatttggttaatcgggactacgaagccatggctcgtgactattatgctcttgattttctatcacctgatgttgatgtgttaccaattgttccagcactacgggacttttttgatgatgcacttaattatactgtcagtgaacttaacttcaagacactagtggatggcctgggaaacgttttgtatcaatttccatttaatgtcccagcctactatgctttaatattgaggtctctcactgttttagaaggtttagcactctatgctgatcccaattttaaggttcttgcggcatcatacccatattttgctaagcggctcttgacagatccaaacccatatctaagagatgctcttatagagttgcttttccaggatgggaggttcaggtggggtagacttgaaaacctgctagcccaggggagaatggacagggatttctctgcaaaagaggctttgcaacctgtcctgaaggtattattgagtccagat

SEQ ID NO: 20505 - DNA, 615 bp, Glycine max
gatgggaagcatctaaaagcagggccggttgttggatttgtgtattgggcccctgagtatcattttttggtcttcttcaatcggcttaggcttcaacagtagggttttgttcataatatcagagacttgtaaatgctttcttcagatccccagcgttctaggttttgttgaatgctaaattgtgcttcaatggaagatatcaccaggttatcatcactacagggtttccatttaagctttaaaagatcttcaccactagctttctgccgagtagcataggttgagcatttggctgcttgtctagaactcaaatgaccgaggtatcttaagcttggtagctgtagcttgactaactatagattgaagagggattcatgatatcagcactaaagcacaacgtactagtctcttcattccgcattttatggaggtgtagtgttcagggtatcttcatcaactttgtacattgttcctaatttataagaaaaattcccatgtatcataaaattcatgatatcatcgttctttctgtaatgatgaaattttcatcacaattttttcttctttggatagtatttagagggtctttagtattagcttcctcattaattctat

SEQ ID NO: 20506 - DNA, 553 bp, Glycine max
ccctcgagccgattcggctcagcttttaaaccttagtctcccacggaagacttcaacagaagaaaaaggaagaattaatatcactcttccatggttgccgacgaagcttcaccattcgagaccagcgatatgctggcaacgctcctggcgtcgacgccgctgttgtcagagtcatggcggctgtgcaccaccgtggccgccaccgcgccgaggagtttcatgactgagcagcacggtggcggcggtgtggtgtacgtcgctttccccggcgtagaaatggcggcgggatcggactctatctgcagaaacttggtggcgttggaaagcatcggcgacgtgccactgttctcggcgcggcgtcgcaacaaggaaggcgatgaacctgtgatggtgcatgctgggatgctgaatctcttgtccacctttttcgaaccatttcagaaacagatgttggcactcatgggaaattccaagaccaaatcaattgggctaactggccacttctttggaggagccacagtcctactatgtgctctttggcttcttttttacc

SEQ ID NO: 20507 - DNA, 620 bp, Glycine max
ccttccttagcttcgaatttcggttggggaaattgaagccggttttcacattatggcctttgggattagctttggtttccagtggcctggcttaatccaccggttttaaaaaaggccggccggccttccaaggcttctattaatggaaatgagtcttcccaacccggatttaagcccgccggaaagggttaagaaaccaggccggtggctggagaagtactgcaagaggtttggagtcccatttgagtacaattgccttgcacaaaaatgggaaactataagacttgaagacctcaaaattgataggagtgcaagtactgtggttaactgtttgtacagattgaagaacctatccgatgaaaccgtgactgccaactgtccaagagatgctttgctgaggttgatcaggaggatcaatccaaacatcttcatgcacggggtcgtcaatggcacttacaatgcaccatttttcgtgacaaggttcagggaagcactcttccacttctcatcattgtttgacatgtttgaagttaacgtgcctcgtgaagatccatctaggcttatgattgagaaaggggtgttcggaagggatgcaatcaatgtgatagcatgtgaggggg

SEQ ID NO: 20508 - DNA, 771 bp, Glycine max
cccacgcgtccgaagaattgcagcctatatggttgagggacttgcagctcgcctggccgaatccggaaaaagtatttacaaagctctgagatgcaaggagcctccaacttcagatcgtctagcagctatgcagatactgtttgaggtttgcccatgtttcaaatttggattcattgctgctaacaatgcaattacagaagcagtgaaagatgacatgaagattcatataatagattttgacatcaatcaaggaagtcagtacataaatctaatccaaacacttgcttcaaggtcaagcaagccaccacatgttaggttgactggagttgatgatcctgagtctgtgcagcgatctgttggaggcctacagaacataggacaaagactagaaaaacttgcagaggcacttggtttgccattcgagtttcgagcagtggcatcaaggacttccattgtcaccccatcaatgctcgactgtagtcctgatgaagcacttgtggtgaactttgcattccagcttcatcacatgcccgacgagagtgtttcaacagcaaacgaacgggaccaacttcttcgcttggtgaagagcttgaatccaaagcttgtgacagtggtggagcaagatgtgaacacaaacaccacccccttcttacctagatttgttgaggcctacaattattactctgctgtgtttgagtcacttgatgcttcctcttcctagagaaagccaagacaggatgaatgttgaaaggcaatgcttaacaagggaca

SEQ ID NO: 20509 - DNA, 608 bp, Glycine max
agcatgatccattcgaggtacttgacaaaaaaggtgtgggtcaactcatcaagatatgcacagaaaagggtcgtgctgctaggccaaacttaaaggttggaatatgcggagagcatggcggggagccttcttcggttgcattttttgctgaaattggacttgactatgtttcatgttctccttttagggttccaatagctaggcttgcagcagctcaagttgcagtttaagaggcagttaccaatgaatggcatgtgagaggattattgactctcgacaaccgtaaataactctggttcatcataagcccgtatacatcagaaatggaactcataacatataattgtaaaagtgaaagcaaaggaaaattaatttgcaaatgtttgttaataaaaaagagaaaacatggtgtacatgcaaatgtttctcttataccgtgtctcgtcataaaataagacagattcttgtacatgttgtattttatcacaataaaatctttaaaagatagaagattcttgtaaaaaaaaaaaaaaagaaaaaaaaaaaaaaaaaaaaaaacaaagggggggcccccatcattttgacccctccccccgggttttttttcc

SEQ ID NO: 20510 - DNA, 499 bp, Glycine max
ctaacctgaacttgaaaggttatcttcagaatgcctatgttcacccagtttttaaggacagcatggatgacgatgatgacgaggaagatagactcagtatagacttggaaactgaaagtgtgactgtgcgcacaaaacgccaatcacgaaggaatacaccattgccaagcaaaaataatgatgcatcatctccttctctgtctgatggtattggaaatcatccagagccttaaggcaaaatgagataactgtacattcgaatttaggtcattattttctcaacagactaggatgatgtgcaagtgcaaatatagtaagttgcatcacttgacaaagttgaggaagatgggctatctcttgtagtgacttctgctgaagcaattgttttgaagttttttccaggccgatgtaatcgctacatgtagactatctggaagatatttttgcaatgcttaggattttgttgaatactagtgaatttgcttccttattagatgaa

SEQ ID NO: 20511 - DNA, 616 bp, Glycine max
  unsure (1)..(616): unsure at all n locations
ggcaatgggaattcagaaatatgtcttctactccatccataactgggacaaacatcccgaggttcccctcatggagatcaagttttgcactgagaagttcctccgagactctggcctcaatcacgtcattatccgcttatgcggtttcatgcagggccttatcggccagtatgcagttcccatcctagaagaaaaatctgtttggggtactgatgcccccacccgaattgcttacatggatactcaggatatagctcgcttgacatttatagccatacgaaatgataaattaaatggtaaacttcttacatttgccggtcctcgtgcctggacaacccaagaggtgataaccttgtgcgagaggctagcaggccaagatgctaatgtcactacagttccagtctccattttaagactcactcgccagttgactcgctcttttgagtggacaaatgatgttgctgacagactcgcattttcagaggtccttaccagcgatactgtattctctgttccgatggcggagacatacagtcttcttggggttgatgcagaagacatagntacactcgagaagtatttgcaggactacttgactaacatattaaagaaactg

SEQ ID NO: 20512 - DNA, 434 bp, Glycine max
cggaatttttatgaggtgggacatctgatcaaaacaagattccttggatccggtgggaaacggtatgtttgccaaaggtacaaggaggactaggagtcaaggatatcacttcgttcaatatatcattgttggaaaagtggaaatgggacctgtttcagaatcaaggggagacttggacaagagttcttgaatcaaagtatggagggtggcggagtctagatggagcttcgaggactagtatcgaatccttatggtggagggacctgaagacgataaatcatcattcacatcagggacagcaagttgaataggtcaactttgaggaaggtcgggtgtggggacaagttcaaattctgggaggataagtggataggtggagatactcaattgttagagaaatatccaagattatacaccacatcggctcagcaaca

SEQ ID NO: 20513 - DNA, 483 bp, Glycine max
gagaaagctaggaagagaaaggaggaaaatattaaagctcttgcaattctcatgaactgtggagtcgtgttgggtttctattgttggggttgggagttcttaactgcccttcttctcttctctcatcaaccttattgatcattctcttcttcctcttcttcttcaaaaaccaatttctttttatacaaataaagaagataccaaagaaaaacatagcaaaaaaataaaaataaaaaaatggaaggaacaagcaataaggggttgttggaatgtggaaggaagtgcactccaccgccgtttttgttgaagacttatatgcttgtggaggatccggccaccgacgacgtcatttcgtggaatgccaaagggacggcgttcgtggtgtggcagccgcccgagtttgctcgggatctcctcccaacactcttcaagcacagcaacttctctagctttgtacgccagctcaatacttatggctttcgt

SEQ ID NO: 20514 - DNA, 596 bp, Glycine max
atcgaaactgtgaaattcctcatgagggtcctttctgtgatcttatgtggagtgatcctgaagatattgaaacatgggcagtcagtccccgaggagcaggttggctttttggatccagggtcacttcggagttcaatcacataaataaccttgatcttgtttgtcgagcgcaccaactcgttcaggaaggccttaagtatatgttccaagataaaggccttgtaactgtatggtctgcacctaattactgttaccgatgtggaaatgtagcttctattctgagtttcaatgaaaatatggaaagagaagttaaatttttcaccgaaacagaggagaacaatcagatgagagggcccaggacaggcgttccatatttcttataagttggtgcaaattttgttttgaatttattgtaaaattagacactcatgtatttatgctttgccttttaaaggtggattttattggtcacaagattaccaatcaaactatatcttagctctgggtcgcacagactaattttatgtttaaatttttattgaaaaatattttttttcttaaaaaaaaaaaaaaaaaaaaaaaaagggggggccgcc

SEQ ID NO: 20515 - DNA, 420 bp, Glycine max
  unsure (1)..(420): unsure at all n locations
gagaagagtgcttttcttgacattagcttgttgcttcaaagaaggtggacttatattgctgttctggacattgcttgttgcttcaaaggatatgcattgatagtgctttgcttgacatttgtgcgttgataaatgttgaagatatacttggtgctcattatggtgacaacgtgaaatagtattgacatattggctgaaaaaatctctcataaaggttagtgatggtagaggtacattgcacgactttaggacatggttacaaaaaattgccactcaagaatcaccatgagaaccagggaagctataattcaagttttggaagacaacaccttgagtgagactcatgaaaatgattggttcttatcttgatttatcnttttttgactatcatatgttcacatcataattgcttttttcttt

SEQ ID NO: 20516 - DNA, 727 bp, Glycine max
atggagtatgatgagaagaggatttctgctttgcagcagaggctgcttaatgggattagagagaagcttgatggggtggtggtgaatgggagcttggagaggcgctatgtggggaatttgaatttgtcatttgcttatgttgaaggggagagcttgctcatgggtttgaaggaggtggctgtgtccagtggcagtgcctgcactagtgctagtttggagccttcgtatgtgttgagggcgttgggagttgaagaggacatggctcacacttctattaggtttggaattggtaggttcactaccgaggctgagattgatagggcggttgagctcaccgttcagcaggtggagaagttgagggaaatgagtccgctttatgaaatggtcaaggaaggtatcaacatcaaggacattcaatgggcacagcactgattattatcaagctctcagattgcaatgcaagtgatggggaagcaattgtgattgaactccagacgtagctgccactcttgcaattgcggtttcttagaacttgctgattatttagtaatttgtatgttgaggttacattacaattaaaaatttaccctggcagagctatttattaggtatacaccgtttgtttcaatgattgttagttgtgcttgtcagcgatgtttatgaagaagaaagacatgcattggcagtttggtactgtatggactaacaaatgttggtgtgttttatt

SEQ ID NO: 20517 - DNA, 917 bp, Glycine max
atttacatcattatttttccgcctgctctcttttacctcattgtgcctctttacaaccagttgtaagatagcatgtgacctaaaagaaaatacgttgtggttgatctcctcttaggctttccccaccgcagaatctcattctccaaaatggaggccagggtctcatcttctctcggcctcccttcccccaaaccccaccaattctcagtctcaaacctcaccgatttcccttctctcttcacacacacccccactctccccttcgcctccacctccaaatgggcccggcccaccccaaagcccaacccaaagcccctcctcaaaaccctctccgtcctcgaccgcgccctcatcggcgccgccgcgggcggcctcgccggcgccttcacttacgtctgcctcctccccctcgatgccatcaaaaccaagatgcagaccaagggcgcggcacagatttacaaaaacaccctcgacgcaatcgtgaaaaccttccagtccgaaggcatcctcggcttctacagcggcgtgtccgcggtcgtcgtcggctctaccgcctcctccgccgtatacttcggcacctgcgagttcggaaaatcgttcctctccaagctcgaagcgttccccgccgtgcttatccctcccaccgccggcgccatggggaacatcatgtcttcggcgatcatggtcccgaaggagctcatcacgcagcgaatgcaggccggcgcgaagggccgctcgtggcaagtgtttgctgaaattattcaaaacgacggcgtgatgggcctctatgctggttactccgcgacattgctgagaaacttacccgcgggagttctgagttactcttctttcgagtatttgaaagccgcggtgcttcagaagactaagcagagttacatggaaccggtgcagagtgt

SEQ ID NO: 20518 - DNA, 478 bp, Glycine max
cggaattcccgggtcgacccacgcgtccggctctgcctggggacaatgtaggcttcaacgtaaagaacgtgtctgtcaaagacgttagacgtggcgatgttgctggggacagcaaaaatgacccaccaatggaagcagctggcttcactgctcaggtgattatcctgaaccatccaggccagatcagcgccggctatgcccctgttctggactgccacacggcccacattgcatgcaagtttgccgagctgaaggagaagattgatcgccgttctggtaaaaagctggaagatggccctaaattcttgaagtctggtgatgctgccattgttgatatggtccctggcaagcccatgtgtgttgaaagcttctctgactaccctccacttggtcgttttgctgttcgtgacatgaggcagacagttgctgtgggtgtcatcaaagccgtggacaagaaggctgctggagctggcaaggt

SEQ ID NO: 20519 - DNA, 428 bp, Glycine max
ggggcccgtaaacacacgcttcgggtctttaaaccctgcgtggcaatccctgacgcaccgccgtgatgcccagggaagacagggcgacctggaagtccaactacttccttaagatcatccaactattggatgattatccgaaatgtttcattgtgggagcagacaatgtgggctccaagcagatgcagcagatccgcatgtcccttcgcgggaaggctgtggtgctgatgggcaagaacaccatgatgcgcaaggccatccgagggcacctggaaaacaacccagctctggagaaactgctgcctcatatccgggggaatgtgggctttgtgttcaccaaggaggacctcactgagatcagggacatgttgctggccaataaggtgccagctgctgcccgtgctggtgccattgccccatgtgaagtc

SEQ ID NO: 20520 - DNA, 440 bp, Glycine max
  unsure (1)..(440): unsure at all n locations
acccttcgttagncggatcaagccttgaaggccggcgaaccaagccttccgatttaaggccaccaaaccaggtaccatgaagggagggcccttgtgggggggtgtcctgatgtttcctgggtgccctgcctccttgcaccaggcctggccctgcgagacccaaggctcactgcagcgccctcctgacccctcccggcaggggctacgttagcagcccagcacatagcttgcctaacggctttcactttctcttttgttttaaatgactcataggtccctgacatttagttgattattttctgctacagacctggtacactctgattttagataaagtacagcctaggtgttgtcagcaggcaagctggggaagccagtgttgtgggcttcctgcttggactgagaaggctcacgaagggcatccgcaaatgttgtttcac

SEQ ID NO: 20521 - DNA, 543 bp, Glycine max
cttccggcaactttcttaaccgtaggcttgcccagaacctccaggacaagcgccagaagcccctccgggtagctactaccctgaaccccccaatagtggagggcagtatggtagtggcctaccccctggtggtggttatgggggtcctgcccctggagggccttatggaccaccagctggtggagggccctatggacaccccaatcctgggatgttcccctctggaactccaggaggaccatatggcggtgcagctcccgggggcccctatggtcagccacctccaagttcctacggtgcccagcagcctgggctttatggacagggtggcgcccctcccaatgtggatcctgaggcctactccatggttccagtcggtggactcagatcacagtggctatatctccatgaaggagctaaagcaggccctggtcaactgcaattggtcttctctcaatgatgagacctgcctcatgatgataaacatgtttgacaagaccaagtcaggccgcatcgatgtctacggcttctcagccctgtgga

SEQ ID NO: 20522 - DNA, 1217 bp, Glycine max
ccgttttaaaactatctcttgtactaaaatatgaaacaccacctgagaaataaagcctaacattaacttgtttcattggtctttacttcctgctcctatactcacgtctaagttagctgctataacttgcagcttgattaactaagaaatatggttcccaaagtttatgctggtcaagaaatggcaatggttgagaatgagaattgcataatgaatgggaagtggaagaaacgtgtgcatgtttttggtgagagggtgatgagatttcctaacaaggcttggcagacaacgtggaaggtgggacgtgaagacccaagaaggttgatccatgcatttaaagtgggtttgtctctaactcttgcttctttgttgtatttgttggagccacttttcaaggggattggacagagtgctatttgggctgtcatgaccgtggttgttgtgttggaattcaccgcaggggcaactttatgcaaaggactcaacagaggattggggacattgttagcgggattattggcatttcttgttgggtatattgcaagtgcatctggccgagtctgtcaagctattatcatcggagctgcagttttttctataggagctcttgctacttatatgaggtttattccctatataaagaagaattatgactatggtctagttatatttctcttgactttcaacctgattgctgtgtcgagctaccgggctgaaaatgtcttgaaaattgcacatgatcgcgtatacaccattgccataggctgtgctgtttgccttctgatgagtctactggtatttccaaattggtcaggcgaagatctccataattccacggtttacaagctcgaaggccttgccaaatctatagaagcttgtgtgaatgagtacttttacggagaaattgaaggctctggggatatgaaattatctgaggatccaatatacaaaggttataaggctgttttggattcaaaatccattgatgaaacactggcattgcatgcaagttgggagccaaggcattcgaggtactgtcataggtttccatggcagcagtatgtaaaagtcggagctgttcttcgtcaatttggttatactgtggtagctttacatggctgtttgagaacagaaattcagacacctagatcagttagagccatgttcaaggacccctgcattcggctggcagcagaggtatccaaagtactgataga

SEQ ID NO: 20523 - DNA, 249 bp, Glycine max
catgcatctagactccccattaacccacaaaatgaccaaaatatccgtttttaacactatttcttgttgcatttcgacattgtcactatagtctcgtctcactctatagcttgcacgtaccttgatgaattaagaaatatggttcccaaagtctatgctggtcaggctctggcagtggttgagaatgagaattgcatgatccatgggacgtggaagatacgtgtgcatgtttttggtgagagggtgatg

SEQ ID NO: 20524 - DNA, 821 bp, Glycine max
gctactttagatggaagactcttctaaatcctcctcttcttcttcttcatcttcttctcctgcttcatacattcgtatggtgcagcatctgatcgagaagtgtttgatctttcacatgaccaaggaagaatgcatggaagcgctctctaaacatgcaaatattaatcctattataacatccactgtgtggaaggagctagagaaggaaaacaaggaattcttcgagccttacatgaagtcgaaagctaaagacgacagaatgtctcaggaagagacaaaccagataatacagaagatgatctcagagttagattcctctaaagatgactaaacagccattgaaaacgatatgacctttgtgttttggtaccttagtccttcaaagtctcatgcaccaactggcccaaaggcactgatatccctacgctatactactatatatctctactctcttgtcactcgtcactcctcactgtacaactatcgtacatggtgtctctacttacatggatggatgtgttatatatatatatgctatgcttttctaattacctatatatacctaactagagttcttgtgcatatgctatatggctaggttatccacgacctagcaaataacacaatgccatgtcagccatgtaatttcatctcagatagtatatgtatcagtatatatgcatgtatattatcacatgtatatgtttgtatgggattagctagattggttgtatccaagaacagaaatataaattgtctccttttaaatatttacatgcatatgtggctacatatttaatttgtgaaaggagatgtagata

SEQ ID NO: 20525 - DNA, 432 bp, Glycine max
tcttgaagtgagcttgcacatatagctaaccagtgttagtatcattgatcatgggagagtcttctaattcttctgcttcatacattcatatggtgcagcacatgattgagaagtgtttgatctttcacatgtcaaaggaagaatgcatggaagctctctccaagcatgcaaatattaagcctgtcataacatccactgtgtggaacgagctagagaaagaaaacaaggagttttttgaggagtatgccaaagccaagagtaaggacgaacgaatgtcggaggaagagacaagccaaatgatacagaagatgatctcagattcctctaaaggtgcgggctcatacggaaggagcacggagactagacaacaagagtggtccactacctcatgaacaaaaattctagtgatctctccctatcttttatttaaat

SEQ ID NO: 20526 - DNA, 1083 bp, Glycine max
gattttggacatttatggggacgcttcatatctctccagagcttcttcaggcgtgtcagatgatatggaaccctcatcaacatctcatatgccagaatctgatgagaatgcagcacttgaatccaaaaaaatgaaccataatatgcttatggctctcataaaatatttacagaagaagagatttagttttattgagaaggccactgcagaaggaactgaagaagtcgtttttgatgcagtcggggataactttgcatcttacaataggcttaagaaaacaaacaaggggcgtggtaatgtacctgttagttcaggagctcgggagatggcttcaatgttggatactgctctactcgaagctttgcttctaactggacagtcttcagtggctttagaattactgagaggagttaactactgtgatttgaaaatatgtgaggaaatacttcgaaaaggcaaccatcatgttgctttattagaacttttcaagcacaactcattgcaccgggaggctcttgaacttcttcacaaattggtggatgagttgaaatctagccagtctgaaattacacaaagattcaaacctgaggatattgtggagtacctcaagccactatgtgggacagaccccatacttgttctagagttctcaatgcttgctcttgaaagctggccatctcaaactatagacctctttctgtccggaaatattccagcagatatggtgagctcatatttgaagaagcattctccaaacatgcaagctaggtacttggagctcatgcttgcaatgaatgagaatgcagtatctggcaatttgcagaatgaaatggtgcacatctatctttctgaagtactcgattggcatgctgatttaagtgctcaacaaaaatgggatgagaaagatcattccccaacaaggaaaaaattattgactgccttagagagtatagcaggatacaatccagaggctttgctaaaacgtcttccaccagatgctttgtatgaagagcatgctatattgttggggaaaatgaaccgacatgaactggcattatctttggatgttcttaagcttaatgc

SEQ ID NO: 20527 - DNA, 428 bp, Glycine max
gaattataaaattggtcattggagtggataaagaagaaacgatggcaagtccaggatcgcacattgttgtccttgcgttcgtgttgctcatttcatcaaaacttgcagaatgtcacaacatagttcgcttccttcctggcttccagggaccccttccttttctacttgaaactggttacgtggaagtgggtgaaactgaagcagaggagcacgcagaactcttctattattttatcgagtcagagaacgatcctaaagggaaccctctcctactttggctaaccgggggtcccggttgctctgctttctctggccttgtctttgaaataggtccactgacatttaaaaacgaggaatacaatgggagcctacctaatttgaccttgaagccacaatcatggacaaaggtaagtagcattatatttgtg

SEQ ID NO: 20528 - DNA, 475 bp, Glycine max
  unsure (1)..(475): unsure at all n locations
agcatactttgacatcttctacagccgccctcttccgccagggttgcttccatatctgagactggtagctctagggggcactgatgcattcctgttggagtcaatatttagaaactccatctggggtcatcttgaattgcctgtgagccgcgacaatgaggagctaatatgcagagtggttagagagacctgcaaaactgcccttgctggttatcatacaaccattgaagaggatcaaaagttgaaagaagcaaagctagattcaaggcatgctatagcagttggaattcgagaaggggagaagcacctcctgcagcaaattgacgagaccttcaaggagaaagaattggaattggcccagttagaatattatcaagaaaggaggctcaaggaccttggactttgtggggaaaatggtgatatccttggagaccttggaaaattcttctaggaagcanaagcagaagcagtacac

SEQ ID NO: 20529 - DNA, 437 bp, Glycine max
caaggatgctgtgatttttggcctctcaggatgagaatgactggccggtgattgatcccttgccatcttatggtagagggagggacacacaaggtggaaggtttagcagcctgatttttggaaccaacctcactgatgtaatcataactggggacaatggcacaatagatggacaaggtgatctgtggtggcaaaaattccacaaggggtgagctcaagtacacccgtccttacctggttgaaatcatgtactcagataatgttcagatatccaatctcactttggttaattctccatcgtggaatgtccatcctatatacagcagcaaccttgttgctcaaggaatcacaattcttgctcctgtgacatccccaaatacagatggaatcaacccggattcttgcacagacacacgaattgaggacttgtacattgt

SEQ ID NO: 20530 - DNA, 460 bp, Glycine max
ttccacgcgtccggctttttcccggtgaccttgaaacgtgttctctctctgagaaaatctcagaggccaccgttgtcgtcaccgtcaccgtctccgccatggaaggaggtggaggaacgctctcggagattcaccaatccgcgaagaagctcctgctgaggtctcgcgacggcctcgaacgtctcgaacgcctcgagtactctgccgccgccggtgccgccttctcgggcgccgactccgagctgtcgttcggccgtgaagaaggatatcacacagatccaaaccctctgcgtcgagatggaccgactctggcgatccatcgccgcaaaacctcagcgcgatctctggaaaagaaaagtggaacaaatagctgaagaggctgaatcactgagagcaagtttggataaatataacttacgggatcagaaacgaatgagagaagctaatgagagaacagaac

SEQ ID NO: 20531 - DNA, 654 bp, Glycine max
ctagttcttatcaaacttgtccttgccatgacatagctaattaactttacatttgcacaccactttctatattttgcaactcttggagctgaaacactcacgcacttcatcaaaactctcctcagttatccctccaacagaagataaaacatggttctagttgcaagtcatggcgaggaggaaaagggggcagaaggcattgctgctgttgattttcgaggtcaccctgtggacaagacaaaaactggaggatggctagcagcagggctcatcttaggtactgaactggcagaaagaatatgtgtaatgggcataagcatgaacttagtgacctacttggttggagttttgaatctcccttcagctgattctgccaccatagttaccaatgtcatgggaactctcaacctgcttggccttcttggtggcttcatagctgatgccaaacttggcagatacgtaactgttgccatatctgcaatcatagctgctttgggggtgtgtttgttaactgtggctacaaccattcctagcatgaggcctcctgtgtgcagcagtgtcagaaaacaacaccatgaatgcattcaggccagtggcaaacaattggctttgctatttgcggcactttacacagtagcagtgggtggtggagga

SEQ ID NO: 20532 - DNA, 930 bp, Glycine max
cggctcgagcagcgccggaggagcagaaagaaaacaaacttccagagttccttcctcagttctctctctttctagaatcttccaattccaaccttattttttcttcaataacaccattaacttactgagtagcgagaacgagtcatggaatccaaacccggtcaaactatcaagctcctctgcagctacggcggcaagattctccctcgcgccaccgacggcgaactccgttacgctggcggccacaccagagtcctcactgtcgcccgttccatttccttttcagaattgatggtgaagctaagcgagttctgtggttcgtctgtgatcttgcggtgtcaattgcccaagggagacttggagaccttgatctccatcaccaacgacgaagatctcgctagcataatcgaagaatacgaccgtgcctcgttgaaattggcgcatccgttgaagatcaaagccgttctatcgccgccgaaatcgtcgaagaagactccgtctgctccgtcgtcggcgtcgtccagcgccagtcactctccgtccagatcgccgcacacctccacagattcgttgccgtacgcggcgtaccaccgcatcggccgccacaaccggccgcctccggcgaaagcttcttgctacacgcagttcgatggaagccctaggtttctgtaccgtggacctcactgcaattattactgccactgaggcgaacgaacgaacgaacgaaccgatttattcacagtaaatacagttgcaagagaatcgctattaccaagtttgattccatacatacgatgatgatgatgacgacgaaaaatatcaaaggaccaaaatagtagagaaatgagtggactgttaaatacaattaattaattttttttaattttgataaaattttagaaatggatgagttgaggttctaattttttt

SEQ ID NO: 20533 - DNA, 457 bp, Glycine max
cttataaattgatatgcttgaaaaatattgaagtgtcactgaattgctagcgaaaaaggcctcccagccttgtacatttaattataagcaaacgaatcacaaatcagggcattaattgcgggctaagactgacaatgctctacaattagtacaagttattcaacacacacataatgtttactcagctagctactgttacaaggcattttgtcaaggctaacaaggtctgtaaactgcagatatcaagtgaagaagctatagaaactgctaagcttcttgctttaaaagaaggtttgttggtatggcaatgataatttgtggctcttagtgatttcacagtagtttctatttgtcagttattcctgtgaaatccaaactcaatacttctctaatcccaaatatttaaattatcagttttcatgctgattatataattacttgtttttgcagatgggaa

SEQ ID NO: 20534 - DNA, 466 bp, Glycine max
ggggtaggaaccgggggtaccataacgggtgctggcagattgggcaaggagagaaaccccaatgtcaagctgtacggcatagaaccagttgaaagtgcagtcctcagtggaggaccgccaggtgatcacctaatccaagggattggtaatggtctcattccaagtgtactggattttaatctcctagatgaagttattcagatatcaagtgaagaagctatagaaactgctaagcttcttgctttaaaagaaggtttgttgatgggaatttcatcaggagccgcagctgcagctgccataaaattggggaagagaccagaaaatgccggaaaactcatcgttgtggtatttcctagttacggggagcgttatttatcttcaccattgtttgaatccattcggcatgaagctgaacagatgacatttgattaagaacaaaaatactatgtaacagtgctctgcgaat

SEQ ID NO: 20535 - DNA, 791 bp, Glycine max
tggtttgacagttatatctctcttacaaatattgtcaatggtggtttgaattgtatccttcatcagtaaaaggtgttattcgttgtcaattgatggacttggactgttattgttctggttggcttgtttttaaattgtgtttttgttgttaattcttataattgattattgggatgtccatcaaattatgcccatgttcacatttcgtggtaaaacattgaatttcaaattttccaaatagaagattattatgtttacccaactcaaacttgcatttcctgcagatgtttgattattgtgtaatattcaaatgtagcagtctaaaggtttaaggttgttgtgcagcagtatgcatttgcatctgaaggtgtgagtttggatgtgcaggtatgtgacaagggcaagtggttcgtctcttgcaaagatgttcccatgtctcttagaaatgtagtttttcccagcatgtttccaaatggtggaaactatcaggatgttgttgatagtaattgtaatatcagcaatggagatgatattattatagatgatgttaatggaaattctgaagatgatgtttaagcagcagagaatcctgtgatgcatgaatttactgaggaagtttctgatttcccacttgagcggttcatgaggttactgcctcatgatcagaataccggagctttctttattgcagtattgcagaaagtttctcctctgccagcaattcaggtaaaacctagaaaagaagttgctaaacatgttgacaaagcaaactaagacaatgaagatgcaca

SEQ ID NO: 20536 - DNA, 872 bp, Glycine max
  unsure (1)..(872): unsure at all n locations
tccgaaacttcctcatcaaccccaattacttcaaacagtgtgtttaactattggagcttattcaaaatggctagattctgcatcttgtggactgtctgtactgccctcagttttagatatcctaatgaatggcatgggtacatctgaagaatgtgcagctgctgctgctttggcatttagacacatctgtgatgactgccggaaaaagctttgtggatgcttagaaggtctattccacatctacaacaagaccgttaatggagaagatagtttcaaagttcctgctgaagactctttgcatctggttgaagcttttagttttgttgttactgaacttcctccagatgatgctaagagagctcttgaggcattatgcataccagtcataactcctttacaggaagctatcaatcaaggtccagaaagcttgagtaaaagaccttctcggcagttaacggttcatattgatcgatttgcctacatctttagattcgggaatcatcctcaagttgtggcggatgctattcaacggctctggccaatttttaaggctatttttgatattcgtgcttgggacatgagaacaatggaatctctctgccgagcatgtaaatatgctgtgagaacttctggaaggttcatggggctcacaattggtgccatgctggaagagattcagagtctttataggcagcaccaccaaccatgctttctttatctctccagtgaagttataaagatatttggttctgatccatcttgtgctgactacctgaaaaatttgattgaggcgctctttcagcacacaacacgccttntcacaaatattcaggaattcacagcccggcctgatatagcagatgattgttttt

SEQ ID NO: 20537 - DNA, 1215 bp, Glycine max
ctatctatttgtcttcttgagacctgagactgagtctgcccataccataatttacctcatagtgtcgacatggtttgcgaggaagagttgttgattgaaaaagtgtgctcgatctatgaacaaatctcaagcctcgagagtctcaaaccttgcaagaatgtcgacatgcttttcaccaaactagtcctgacatgcatacccccaagcccaatcgaagtcacaaagctaaacaaaaccgttcaagacattcgatcccaccttataaaactatgtggtgaagccgagggacatttagagagccactactcaaccatcctaggctcataccacaaccctcttcaccaccttaatattttcccctattattctaactacctcaaacttggtcacctcgagttcactatccttagccaacactgcacccatgttcccaccaaagttgccttcgtgggctcggggccccttcctcttacctcaattgtgttggcatcgaaccacttaccttccaccactttccacaactatgacatggaccctttagccaattccaacgctatgcgcttggtttcctctgaccctgacttgtccaagcgcatgtttttccacaccaacgacatattggaagtgtcgaacgctttgaaggagtacgaggttgtttacttggcagcacttgtgggcatggacaaggaggggaagaatcgaatcattgatcacttgggcaagcacatgaaccctggggcacttcttatgctcaggagtgctcatggggcaagggcttttctctaccctgtggttgagccttgtgattttcgaggttttgaggttctctctgtgttccacccctccgatgaggtcatcaactcggttgtcatagcacgtaaattatatcactctcttgagcaaggccttgttggctctatgatcctacctaacaagtgttccgagattcaagccttcaaccctctcaaccatggcaacatgattgaggaattggccgttgaggagcaactcttgtgaattattgcttcttttttttttttatctatctctactccgtctcatgctttagatgggagattattattggggtcatgtgcggtaccaacttattatgtagtttacataatatttccacttaattgtgtccgactgttttgtatcacatcgggtaaagcttaagtgttttacactgggcggttataaaatttgcaaaaa

SEQ ID NO: 20538 - DNA, 684 bp, Glycine max
cttcttcttcacaggaactctatattgcctagataaactacccttctcttatttcttttttcctttcaatctcattattattctttttgattcatttagctgatatggagttaaagaaaatgaaagttacaggtggctaaggcttggcaagttctatggcctactctgatacttgggcaatgtgtgagggaaaatacaactctggaagcttaaaatataaattgcagaaagcaagtaagagggattattgtaggaccataacttctgttatggaatttgaatcagactggataaagcacagaaagtcatcttcttataccgctcatgttattcgttccgcgacatcttttatgccttggtcttgtagaatcccaattggtgatgggtatcatgaatttctttagttagttgtactcattactcagtaagacattttcacattgtttggttgattggtcgccactcgccaacaaaatttctctacatcttcggcttacatcatatttgtgatcactaatttgaaaaatgcctagttttgtggctgaaaagaagatatttgtagagccaaatatgtgttttaccaatttggcccaccatgatagaccaacttttacaaaaaacaatcattatgtgagggctgagggtcttgatgaagatgatgatgggactaggcccattctaact

SEQ ID NO: 20539 - DNA, 612 bp, Glycine max
ggcgcgtgtatgcttagtgctagccgcacaggcggaaagaccgaagtgatagtctttcagttcagcattcagattgctccaatctttttctatagtctatacatatattaatctatttcaatattttattaccaagaagaatcattgctgggcataagcatacacaatcctattccttaaaaaaaaatgcttggagctgtagcagcttccacatcactatgcttttcaccatccacatactccaccagaattgttgttctcagaagaatctcaaattcaacactggcattgaacaatggtcactctttcttactcttatcagctaaacctatgcatttctcttcacacaagagcagtagaagacaaccccatttccttgcacaagctgctgcatcttctgcagtaaatgctgaatacgtggaggaaccagcaacaaatgtgaaattccagacatctttgaattttcctggttgctcaaattcattaactttgtttggaacaggatacagggagaaagtttttgcaattattggtgtcaaggtctatgctgcaggtttgtatctagatcaatctgtcacccaggaattgaatgcttggaaagggcaatcaaaa

SEQ ID NO: 20540 - DNA, 309 bp, Glycine max
atgtgctcagcggatggaaagatctttagagcctgggtgttatgcaaaggctctcctctccctttccggctatcaagaagtggacttcaaaatgtggagggaaaacggattcatgatttctttctgacactggcaacctgcaacaccattgtgcctcttgttgttgagtgttacacacctgaccctgatgtcaagctgatagattaccaaggagaatcaccagatgaacaagcactggcttatgctgctgctgcctatggttttatgctcatagaacgaacctcttgccatttagtcattgatattcat

SEQ ID NO: 20541 - DNA, 807 bp, Glycine max
caaaccacccaatggaacactcgttttggtcactcccatgagacatgatcgcatccacctccaccaacgttggacctcaccctctgcgttttctgtccaaaccaaccacacattccgctacgaggtttctgtctctcagactccactctcggggcagcgctgttgcactttcctcgtccacacggaccacaccttagaagcccacgtgtcacttcaacggcaaagatggaagctttgagcagcacgaggaagagggtgagcgtgaggtgcattgtgaggtccaagtgatatcgtggagggaacgcagagttaacgcccaaattacggttgatgctgacactgagtccgtttggaatgctctcactgattatgagcatctcgctgatttcatcccaaatcttgtatggagtgggagaattccttgtccttacccaggaaggatatggttagaacaaaggggattccaaagggcaatgtattggcatatagaagcccgcgttgtgttggatcttcgagaagtcgtcaattcagcatgggatcgagaacttcacttttccatggttgatggggactttaagaagttcgatggcaaatggtccgtaaaatctggaacaaggtcatcaactgctattttatcttatgaagttgatgtgataccaaggttcaatttcccagctattttcttggaaaggattatcagatctgatctttctgtgaaccttcgagctctggcttacagagctgaaaagaactttgtgggatatcagaaaacttcagtgtcagaaaaccacttgcacataacttatg

SEQ ID NO: 20542 - DNA, 647 bp, Glycine max
ggtttaagttgctaagaaaactaagtaacttgcacatgcttggaggaaaggcacttgatgattgggcccaaattcgagatgaagagatggggcacatgcttggtgcaatgcacgattgtcacaagagggatgaggctgcggtggtggcggagatgttgacatattcaatggccaacatgattggccaagttatattggggcgtcgtgtgtttgagacagggggttcggactctaacgagttcaaggacatggtggttgagctcatgaccgttgctggttacttcaacattggtgacttcataccctttttggccaagttggacttgcaaggcatagagcgtggcatgaagaagttgcacaagaagtttgatgcgttgttaacgagcatgattgaggagcatgttgcttctagtcacaagagaaagggcaagcccgatttcttagacatggtaatggctcatcatagtgagaactccgatggggaggaactatcgctcaccaacatcaaggcactactcttgaacctattcaccgcaagcaccgatacatcttcaagtataatagagtggtccttagccgagatgttgaagaagcccagcataatgaagaaggctcatgaagaaatggaccaagtcataaggagggat

SEQ ID NO: 20543 - DNA, 552 bp, Glycine max
  unsure (1)..(552): unsure at all n locations
ggcaaagttttgattacccttctaacacgatgttggcaaggatgaagattggttgggaccttaaaaggaagataaatagaagactcatagcatggaagagtgatgatgatccaaccccaggagacttatcatggattattgtgcttcatccctatcctgaaatttacatgatgagtggaacaaagaagcaccacagacttggaccgtggaacggcttgcgtttcagcggcatgcccgagatgaagcctaatcctgttttcaattacaagtttgtctccaacaaggacgaggttacctacatgtggacattgcagactagcttgatcacaaaagtggttctcaaccaaacctcgcaacagcgtcctcgctacgtgtggtccgaggccactagatcgtggaacttctactcaaccatgccaggagagtactgtgactattatggcgtttgcggngccaattcattttgcagctccactgcatcgccattgtgtgactgcttaaaagggttcaagccgaagtctccggagaaatggaactcaatgtattggacag

SEQ ID NO: 20544 - DNA, 322 bp, Glycine max
aaaacctggtgagaaaggcttggactggccaacaaggaaacgcgtggcttttggcactgcccatggtttggagtatttacatgagcaatgcaatcccaagataatacatcgtgatctaaaggctgcaagtatcctactagatgatgaatttgaagctgttctaggtgattttgggctagccaagctggttgatgcaaggatgactcatgtcaccactcaagttaggggcacaatgggtcacattgccccagagtatttgtccactggaaaatcttcagaaaagactgatgtttttggatatggcataacacttcttgaactt

SEQ ID NO: 20545 - DNA, 431 bp, Glycine max
gtattcttgaaaggaccatctttatatgcttttcaaggacttgctggtcgtctggcccctgttggagtccatatagcattgctactgataatggctggaggaactcttagtgcttgtgggagcttcagaggttcagtcactgtgccccaggggctgaattttggtgtatatgatgttctggctccttctggctttctatcctctccaaccgatgcttttaatacagagattcatgtcaacaaattctccatggattattatgagagtggagaggtttcacagttccacaccgatctttcccttcgtaacatggatgggaaagaagtaatgaggaagacaatcagtgtaaatgatcctttaagatacggtggtatcaccatatatcagacagattgggagtatttccgctctgcaaattcttaaggacaatg

SEQ ID NO: 20546 - DNA, 450 bp, Glycine max
ctttctctctctctctctctctttcacgcactctctctttcacgaactcacgctctgtttcagatctgaagccacataaccctaaccatcaaacggctaggtgtcgctgggacttcaatggcagtgactgaagctcagaatcctcttcttggagaaaacacatgtggttccttgttaaaaaagcttcaggaaatatgggatgaggttggtgagagcgacgagcaacgagacaagatgcttcttcagttagagcaggagtgcttggatgtgtacaagagaaaggttgagcaggctgccaagtcaagggcgcagtacttcaagctctgtctgatgctaagcttgagctttccactcttctatcagcacttggagaaaagagctttgctggaattcctgagaatacttctggaactatcaaagaacagcttgcagctatagcaccagtacttg

SEQ ID NO: 20547 - DNA, 464 bp, Glycine max
  unsure (1)..(464): unsure at all n locations
tattttttagagtatagtttgttgtctctgggaagatatgtgatcatgcatggtaagaaaaaatatacttgagaggaaaaatcagaaaacggttattattttgttatttttgtttcctaatcctaccaaacatgacaagatcatttttaatctctttttttttaatttatatacttaatgctcttcatttttttttaatttttcatttctgacacttgaagtagcttgttaatgtcacatgcttctaagtgttataagtgcggccatttttgtcaaaagtttcctttcccattttcatgcactctgatccttagcatgtttttcatataacctattatttcacatttcagaatgagacatactgattctgaatctatgattcataaaacatgtttagattttataagaatatantaaatgatatgcttgaaaaaatagaagtgtcactgaattgctagcgaaaa

SEQ ID NO: 20548 - DNA, 391 bp, Glycine max
atctaacatttttctttagaagacttgcagttgcagcagcatctgttcccagtcggtggcagaacagcaccaccctcaatggattccaattccaaaccttccgcaccacccccgaaccctaaccctaaccctaattcatcaccctcggagaaacaccagagagacctactgaaccacgtcgaagcctacctcgcgaagcgcgacggcgtggacaagctcctcaagatttcgcgctacaccgcgaaactccatcctcgccacttcgctcctccaatccaacaaccctaccctctcccaccgcctaaaatccttcgaatccagcgtcggcgtgagccgaaaggccttcagactcggtaaattcgttcaagacctaaacgccctcaaaaccacc

SEQ ID NO: 20549 - DNA, 505 bp, Glycine max
acactatacaagcagctctgacgtcacatgcacgcttcggctcgagcttctttgaaggcatattggtcaaggtaaaggtactcgcggctcacaacattctaatacttctcctgctgctaatcattaccagtttaatcgtgtggctgctccacctcttgagagcccttcttctccttctgcttccccatcaggctcagcaaaaccaccagtgccaaagctagctcctcataggaaaaatgcttctgattcttctcctccccactctacatcaggttctggaacactatctaaaactaaaagcacctcatcaaaggttcatacagttcctattttggctggagttataggtggtgctgtgtttcttattttttcaagcattggcatatatctttgtaaaacaaaggtagctaatgtcagaccttgggccatgggactaagtggacagcttcagaaggcatttgtaactggtaaatctaagcatttcttttactataagttacatgag

SEQ ID NO: 20550 - DNA, 705 bp, Glycine max
cacgaaactcagtcggttcaaggatctctctatagccttttgctttgtggcagttttactctcgtttcaccacttgggtttgtgctgttctttgaatgaagaaggtaatgctcttttgaagttgaggcagagaatagtgagtgacccttttgatgctttgtcaaattgggttgatgatgaggcttctgttgacccttgtaactggtttggagttgagtgctcagatggaagagttgtggtcttgaatttgaaggatctctgccttggaggaactctggcacctgagcttgtgaaacttgtcaacataaagtccattattttgcggaacaactctttctctgggaccatccctgaaggatttgtacagttaaaagaactggaggttttggatttgggatacaacaacttcagtggacatctacctgctgatctagggagtaatatctcactaacaatccttttgctggataacaatgaatttcttgttggtttatctcccgaaataaatgaactgaggatgctttccgaatgtcaagtagatgaaaatcagctgactaatgctgctaaaatgccagcttgtacagaaagagctaccacaaggcatattggtcaagtaaaggtactcgtggctcacaacattctaatacttctcctgctgctaatcattaccagtttaatcgtgtggctgctccacctcttgagagc

SEQ ID NO: 20551 - DNA, 744 bp, Glycine max
ttggaatgtgagacacatgactctcctgctgctagtcagagtgctggtcctagttttttccatgacacagcaaatcataatagtagtggtgtatacagaagtgatggaaatgctacttcagctaaggtagccaaggagagccatgaaatttttattgatagtggtcaacgcagttatgatggattcatagggacagattctcatcgcactagccaacgagaagcagctctaacaaagtttcgactgaagcggagggacagatgctatgagaaaaaggtgcgatatcaaagccggaagagattggcagagcagcgccctcgcgtgaaagggcaatttgttcgccaagtacacgatgatcatccagtagcagatgtgggtggtggttcctgaaattgttttgttaccatcatcattgaattacagtctgacttccaaaactgatttgcctctcttgacaaggattaactgtaggatctagtttgtctggtgaaattatgtttcttcttagcattgttagtattctcttctggtttgctatactggctgtctcttagaatgtacgattgtaactatttagtaggattgatttgaagttttgattttacctagagtatttgttttcttgattgaatactaatatagggccatcgtggtataggcagtatgcgtctgtcttgaaagatccaaataccttttatatatatatatacatctcgcggcaagcatctttggtttgccatcgtt

SEQ ID NO: 20552 - DNA, 572 bp, Glycine max
ataaactaaaacccatccttccctaaaacaaatagcaacttgtttatccttaatctcccaatcaactcctccctcataagtcataacaccaaaatttgatcacctttttgcaacctatcttgctgtgctgtggtagcttctttgatgtagtcaatcatcttgtgctcaatcttgattggttgcaagtgaatccctgaactgaattacaatggctgaggaagatgtttacacaaaagatggaacagtagattaccgtggaaatcgtgctaacaaaaaggaaactggaacttggagagcctgcccctttattttaggaaatgaatgttgtgagagattggcatactatgggatgagcacaaatcttgtgacttatttcaatactaaactaaatcagtctggtcctactgcttccaagaataatgcaaattggggtggaacatgctacatcactccgttgattggagcatttgtggctgatgcctatcttggaagatatcttaccatcctttgtttttccatagtttatgttattggaatgacactcttgacactgtctgcttcagttccaggca

SEQ ID NO: 20553 - DNA, 693 bp, Glycine max
gcagaattttgggtacggaaataggtttcagaatggccgccatgatgagcgatttgtctctgagttgaagctttcaaaaagtgaagaaactctatcacgaaagtgcattgcttttcaggagccttgtgaagttgcttgttatagtcgtgtcgaaggcggagaagtatactttgacgatcgtagtttgagactttttaagcgccatattactgaggatgttggagctgatttgaatgaaggttatgatacatacattcccaaaaaaagacttaggctcagggggctttggcgatcttcttgcttgcattagagacaaaaatatccctcttcaaaacattcattttgtgacattcccgtaataaccttaacaagatactggcaacagcttatatccgtcatgagccttgggaaatgggagtgcacaaaaggaatggtgttgtctatcttgatgtgcataaattaccagaaagacctcaaagtgatttagatcgcaggaggtaggattacatgcctttttatttatgatgtttagatttgtaaatatttaatatagtcaatggagtagcaatcaaggcagatgatctcggtttgttcatctgtgtgatagaaaatgttatcaataaaacaaaaaaggctagatgttagggaaaatggaaaagcatcttgctcaggggaagggtgtgactgtggtat

SEQ ID NO: 20554 - DNA, 533 bp, Glycine max
tttcttttttgcagacattccgtaacaatctggacgggatactggaaacaggttgggggcgtcacaagccttgggaaatgggagtgcacaaaaggaatggtgttgtctatcttgatgtgcacaaattaccagaaaaacctcaaagtgatttggatcgcaggagatgttatgtaggatattgttttgagagccttgcaactgaagatcctaatagagcagatggagaggggatacatcatgttgatgccaatgctgaattctgtgccgtgattaagacaaaattaggagctcaccgcatcttaatgggtgctgagatggattgctgtgattcgactaatgagggaaagagattttatgtggagttaaagacaagttgtgagttaaattatcacaccgaggaaagattcgagagggagaaactgttgaagttttggattcagtcatttctggctggtgttccatatattgtcataggatttagggatgatgcaggtcgtcttgttcggacagaaagacttagaaccaaagatata

SEQ ID NO: 20555 - DNA, 654 bp, Glycine max
acgagtacatacttgacactcttcgtagtacacaagatgataaaactgcagtctatgatcagatgaaaagacaagttgttgagttggctaggcaaactttccatccagagttcatgaatcgcattgatgaatatattgttttccagcctctggattccgaacagatcagcaaaatagtggagctccagatggagcgagtgaaaaacaggctcaagcagaagaaaattgatcttcattacacagaaaaagctgttaaacttcttggtgtactgggttttgatccaaattttggagctagaccagttaaaagagtgatacagcaattggttgaaaatgaaattgctatgggagttctaaggggagatttcaaagaagaggactcaatcattgttgatgctgatgtgactctatcaggcaaagaacgttctcctctaaataaactgcttattaagaagttggacagccctgatgcggatgccatggtcgtcaatgattaattttgcctactagcttcagttagataaaagcagagttttaaaaaaaaaatggtaaaactccatagggtacgaacgtagtgcttttttttttttgtgtgtaactattgtcttgaggatattgtgtttaaaaataattgttgattcaggttttattcga

SEQ ID NO: 20556 - DNA, 431 bp, Glycine max
ccgccagctaaccacaggtaatcgacaacagcaagatcgatctctgtccagtcgaatcttcccaacatggccgactctcaagttactctgcgcacgcgcaagttcatccgcaaccccctcctcggacgtcgtcagatggtcgtcgacgtcctccaccccaaccgcgcgaacgtttccaaggacgagctccgtggcaagctcggtgagctgtacaaggccaagaaggacgatgtctccgtcttcggtttcaagacacacttcggtggcggcaagagcaccggcttcgctctcatctacgacagcgccgaggccatgaagaagttcgagccccgctacaggctagtacgctacggcatggccaccaaggtcgagaaggccagcaggcagcagcgcaagcagcgcaagaacaggatgaaggagttccggggcac

SEQ ID NO: 20557 - DNA, 464 bp, Glycine max
aaaaatggtgtctataaatttgttccggacatttatttctcctccgcgagagaataaagttctagaagcatttgacgtggatgaggaagagccttccatggatcctgcctggccttacttgcaaattgtgtatgaactgcttctaaggttcgtcacgtcacccgagactgatgcgaagttggcaaaaaggtatattgatcattcatttgttctgagactgttagacctttttgattcagaggatcccagggagcgggattacttgaagacagttcttcatcgtatttatgggaaatttatggttcaccgaccattcatcagaaaagcaatcaacaatatattctaccgcttcatttttgaaactgagaaacacagtgggattgcagaactcttggaaattttgggaagtataattaatggatttgctttgccactgaaagaagatcaaaagctatttcttgtgg

SEQ ID NO: 20558 - DNA, 714 bp, Glycine max
ggggacgataacaatctgcaaagataaaataaacaaaaagaactcgaaagaaggaggaaaacaaaaagaaaaatttagtaactaccgataccatataataataagaatagtattattaaaagagaaagggaagggaaggtaacacgctatggcggcggaatcgggtggtacgccgacaaactttgatcttcccgaggaggtggtgcaagtgctaccgtccgatcccttccagcagctcgatgtggctcgcaagatcacttccattgctctatcgacacgtgtcaacaccctcgaatcagagctgtcctcgcttcgcgcccagatcgccgacaaagacaacctcatcgccgaccttcaatctcagctcgactccctcgacgcttccctctcccaaatcgccgacaaactcctccaaaccgaacaagataaggagagcttgctccaggagaatgcttcgctttccaacaccgtcaaaaagctcaatcgagatgtctccaagttggaggttttcagaaagacgcttatgcaatcacttcaggaggaggatgataactctggaggaactccagacactgttgctaaaatacagagtcaagcaagtttgacttccacgtcgcagattggagataatgatgtttcattgccaccgtctgtatcttcttcaacaggaaattcttttgccaaggatcatgaatctgatgccataagacctag

SEQ ID NO: 20559 - DNA, 434 bp, Glycine max
cgcgtgcgcgcgcacggaaactcggaatgagactcgaggaagaatttctacattcccatccctgtccagctcggccatgggaggctgcaccagactcggactcgccgcaaagctaccgaaggcctcaagaaagcactccgactgctctcggcacaatatgctatattcgcgtctctacacaagatctaccagtccgagggtgtcggcggcctctactcgggtcttgaggccgaagtcctcaaaggcttcctcagtcacggcttgacgatggtgatgaaggatcgggtgcacgttggggtcatccagctatactatgctttgctcatggtcacgaagaaatggccggatgagctgcagaaggcgcaggccaaagcgactcacgctattgaagatgccaaggacaaggtacaggcttctgcggctaatgctatcta

SEQ ID NO: 20560 - DNA, 586 bp, Glycine max
tgtagtcgtttaaggtacacctgagcgcaaaagggggcgatcatctaattggagggggggaaaggaatcttctagaagaggaagtcatgcaaaggacactacagactggctagacagactgatagaggtgataaatcaaccaaagtttccctgagcccatctcctggttttcagatgatgcagtcaaacgaggtgcagcagtttgggcatattgactcaaatagtacaaagtcatttgctgttgtaaatacttcaacatctagccttccagatttgaacacttctgcttctccacctgttttgtttcatcagcctttcacagatcagcagcaagtacaattacgtgcacagatctttgtatatggagctttgattcaaggcatggtaccagatgaggcttatatgatatcagcttttggaggatcagatggtggaaggagcctttgggataatgcttggcgtgcctgcatggaaaggcaacatggtcaaaaatctcatcctgctaacccagaaacacctctgcaatcacgatctgttgctagaacctctgatttgccacataagcaaagtgctgctcaagcgaaag

SEQ ID NO: 20561 - DNA, 1122 bp, Glycine max
ttcttttcgtccgtcatggggctgtattcagaggaaaactttcaaatgagattctggtggctgtgaaaatcctcaataatacagagggagaagggaaagagttcatcaatgaagtggaaattatgggcaaaatccaccacatcaatgtggttcgtttgcttggctattgtgctgaaggaatccatcgtgctctggtctacaatttctttccaaatggttcacttcaaagcttcatatttccaccagatgacaagcagaatttccttggctgggagaagctgcagaacattgctcttggtatagctaaagggattgggtatcttcaccaaggttgtaaccatcccattattcactttgacatcaatcctcacaatgtgctacttgatgacaacttcactccaaaaatttctgattttggcttagccaaattgtgttccaagaatcctagtttggtgtccatgacagctgcaagaggaaccttgggatacattgcacctgaagttttctccagaaactttgggaatgtgtcttataagtctgatatttatagttacggaatgttgttgttagaaatggttggaggaaggaagaatgtagacacgtcttctgcagaagatttccatgtgttgtacccagattggatgcatgacctagttcatggagatgtacatatccatgttgaggatgaaggtgatgttaaaattgcaagaaaactagcaattgttggactttggtgcattcagtggcagccattgaaccggccatccataaaatctgtcatacaaatgttggaaagtaaagaggaagacctattaactgttcctcctaatccatttcactcatccacttccactattcctagtggattcacttcggcaagactacctttggaattggaagtaattcaagaatgagaaattaacttattgatttatttacaacgggagatgattagtgtttacacatattttgttttctcctcaaggaaatattgttgtgtttgaatcaaatgtatgaaaataaagtaaattattattataattaatcaattattcttttatatatatatatatatatatatatatatatatatatatatatataaatgatgtttaatatttg

SEQ ID NO: 20562 - DNA, 585 bp, Glycine max
ttgacaaggacagttattcagatcttgataccttaaatgctttcaaacatgaactgacattattagaaagggtgcgacatccgaatgtggtccagtttgttggagctgtcacccagaatatacctatgatgattgtgcgtgagtaccattctaagggtgacctggcaagctatcttcaaaagaaagggcgtttgtctccatcaaaagttctacgctttgctcttgatattgccaggggcatgaactatcttcacgaatgcaaaccagatccggttattcactgtgatttaaagccaaaaaatattttgctggatagtggagggcaattgaagatagctggatttggcactgtgagattttcactaatttcacctgatgaagcacagctggtacagcctgagcctaacattgatctttcaagcttgtatgtggcaccggagatttacaaagatgaagtttttgatagaagtgtggatgcatattcttttggtctcattatatatgagatgatagagggtacacagcccttccatccgaagtcctcggaggaggcagttagactgatgtgcttagaaggggaaagac

SEQ ID NO: 20563 - DNA, 979 bp, Glycine max
ggcttatgggtccaaggacatattaggcatgaggagcaatagcagcctgagaagtaatagtagtttggttcatgggaatgctgttgatgctcctaaaaataccaacattggtggaggttggcagttggtttataaatcagctgatggtgctgggggtgggaaaagagaaggactccaaagggtttatttgcacgcagatactgctgcactttctcactctcagcatgtttcatttgtttcaacttctggctatgacataccgatagatggcggtgaagcatatcaagctgctgctcttgtcagccagtcagttctaggtactcatgatatgttgcatctgacagaagttgctgcaaaagggccaaaatggagagctctgctagagccaggagtcaagcgtgcattaattgttggagtaggacttcaaatacttcaacaggctgctggtataaatgggtttctctactatgctccccagattcttgagaaagcaggagtaggggatcttttatcaaatttgggccttagttcagcatctgcttcttttcttgtaaatatcattacaacattctgtatgcttccttgtatagctattgcgataagactcatggatatttctggcagaaggtccatcatgctgtacactgtacccattttgatagtttgtctcctgatactagtgatcaagcagttctttcaaatcaattctgtcgtcgatgcagcaatcactgctattagtggtgtggtttatgaaagcgtcttctgcatgggctttggcgttattcccaacatcatatgtgctgaaatctttccaacaagtgttcgcggaatctgcatttctctgacttctcttacatattggggttgcaccttgattgtcactttgatattcccctacttgctccagcttctcggtctcactggtgtctttggattgtttgttgctggctgcatcatttcatggatatttgtctacttg

SEQ ID NO: 20564 - DNA, 474 bp, Glycine max
tgtcaattaaatttattttgctactgttattttgttatttaattcaagactgtgtatcttcttcgtatttattttccttcattttttgttttattttccaacaagaagttccaagacaatttaattcaattttttgtttccaacactactatttcctaagacatttaactgaacacaaatttccacacttcctaaggtacacccattttactggaagctcggtaacagcttcctgcttaccaaccttccaaaattgaggtcattatcctattatcttgtacatatttttaattactattgtctccctttcctgttaaataccatatgaacttctaaacacgtgcaagaatttacaaaggtccccgatttccttactttttaaaaatatttttctccactattttcccctatacgaactcgtgttttatttttaaacagtgtattaattgcggggtgctgatcctctattcattc

SEQ ID NO: 20565 - DNA, 537 bp, Glycine max
gtccgaacgaacgcgcggtgagtagttcaatgaatgaatgaataatcaaacccgattttgataataaaaaaaaaaaagtcgctcacgtagcgtgttgtggttaactaactccgttccgttccgttctgttctgttccgttacaatggcggaaacctctgctgcactatgcttctccacattcagattctctttcgctccgtcccgttctccttccaagaccttcttcaacaacagctccttccatttccctcctccttctagttctcacacgtgtcttctccatttcgctcccaaagcctccccctccggcaacttctccggcgacgattctttcggttttttcccttggtccgattccgacaacaacgaaattcaatggattcctgaggagagaattacgttgttcactgctgatggattgatccagattggaggctccatggttcctcgccgtgtcagctcttcagataagaacacgggaaatccaaactgctaaaaaattcaacggttcaggagagtattacatgaatccaatc

SEQ ID NO: 20566 - DNA, 1450 bp, Glycine max
atctacttttgtccttcatcatccagagcatgggcatgcagttgtgcttccaattatttcatgtattattgatggtacactagtctatgataaggctagtcctccatttgcttctttcatatcttcagtctgcccaaaaattgagaatgaatactcggaggaatgggctctagcatgtggtgaaattttgcgcattttaactcattacaatcgccctatttacaaaacagaaagacaatctggtgaaaccgaaagaagcactagtggcagtcatgccacaactagtgaacctgggaaatctgggcataattctttgacacagcaagagaagaaacctattaggccgttgtccccctggattactgatatattgttggcttcaccagttggtattagaagtgactatttccgatggtgcagtggtgttatgggtaaatatgctgcaggagaactgaagcctccatcaaccgcttcttcccgtggttctgggaagcatcctcaacttgtgccttcaactccaagatgggctgttgccaatggtgctggtgttatattgagtgtttgtgatgatgaagttgctcgcaatgagactgctactttaacagcagctgctgtccctgcgcttttgcttcctcctccaacgacagctctggatgagcatcttgttgctggattaccagctctggaaccatatgctcgtttatttcatagatattatgcaattgctactccaagtgctacacaaagacttcttcttggacttctagaagcacccccatcatgggctccagatgcacttgacgctgctgtgcagcttgtggagcttcttcgagctgctgaagattatgcatctggcataaggcttcctagaaattggatgcatttgcatttcttgcgtgcaatagggactgcaatgtccatgagagctggtatagccgctgatgctgcagctgctcttctttttcgtatactttcccagcctgcattgctctttcctcctcttagacaagttgacggagttgaagttcaacatgaacctctgggtggttatatttcttcctataaaaagcagatagaagttcctgcagctgaagcctctattgaagctactgcccaaggcattgcatcaatgctttgtgcccatggtccagaggttgaatggagaatttgcactatttgggaagctgcttatggcctgattcctacaagttcctcagctgttgatcttcctgaaattatagttgcaaccccgctacaaccacccatactgtcatggaatttgtacatacccctactgaaggtcctggaatatcttcctcgaggaagcccatcggaggcatgtcttatgaaaatatttgctgctacagtggaagctattcttcagaggacatttccacccgagtccactagagaacaaaacagaaaatcaaaatacctagctggcattggc

SEQ ID NO: 20567 - DNA, 359 bp, Glycine max
  unsure (1)..(359): unsure at all n locations
tatattcatagctagtcgtgtacgcaaaactcatagccatggcggggcaatcgcggaagtggatgatcctggtggccagcatatggattcaggcattcaccggcaccaacttcgacttctccgagtactcctcttccttgaaatcccatctcaacatctctcagctgcaactcaactacctcgccaccgccagcgacatgggcaaggtcttcggctggtcctctggcctcgctctcatccacttaccgctctccctcgtcttgctcatcgcctnctncatgggcttcatcggctacggcctccagtggctcgccatcaaaaatctcatcaccttgccttattctctctacttttcttct

SEQ ID NO: 20568 - DNA, 841 bp, Glycine max
tcggtggccttgtgaatatcagaagtgttgcaaggcattattgtggtaacctaaccaggaaaattattttcaatacaaggtactttgggaagggtagagaggatggagggccaggttttgaggaagtggaacatgttgattccatcttccatttgctcgagtacgtttatgccttttctgtttctgattatgtgccatgcttgaggggacttgacttggatggccatgaaaagaacgtgaaagaagctttaaagatcatcaagaagtatcatgatcccattgttcaagagagaattaagctgtggaatgatggattaaaggttgatgaagaggactggcttgatgttctggtctccttgaaagattccaacaataacccattattgacgttggaggagatcaatgcacaaattatagaattgatgcttgcaacaattgacaatccatcaaatgcttttgaatgggcacttgctgaaatgataaaccaaccggagttactccaccgagccgttgaagaattggatagtgtggtaggaaaagagagactggtccaagaatcagatatacctaaactcaactatgtgaaggcttgtgcaagagaagctcttcgccttcatcccattgcaccttttattcctccccatgtctctatgagtgacacaatggtggcaaattacttcatccctaagggtagccatgtaatgcttagcagacaagagcttgggaggaacccaaaagtgtggaatgaaacctacaagttcaaacctgaactccacctcaagagtgatgggtctgatgtggatttgacagaaccaaatttgaagttcatatcatttagcac

SEQ ID NO: 20569 - DNA, 412 bp, Glycine max
cctaaactagcactcagatccaacggccccatctgcgcgcagtccacaccatcaacagcggcgatcgcgccagcgttcgccacgccctcctcggactccacctggcacatgattaacagctcgtcgaggtaattaccgagatacccctcgtcgaggccgtacttggaggcccggacgatggggtgggccgcgccgcggagtccggtgggaggaaaacggcagtaggagaccgcgtcctgtgccgactgcagggagtcaatcatggggaacatgaggccctgtgggccgaggtcgagggctttcttggcccaagcagcggtggacttcgggacgcggaggatggcggcggtgttggcggcggctagggcgtggaggcaggggagggcgtcttggatgcccccaggaccgtgct

SEQ ID NO: 20570 - DNA, 950 bp, Glycine max
  unsure (1)..(950): unsure at all n locations
ccataattcattttacacctcagattaccagtatagtccacagaacaataacaccaatgtacaggatatggcatataagtttatgaaaggtataccaaactttgtaaagatagttgaagttggtccaagggatggattacaaaatgagaaaaacattgtaccaacagatgtaaagattgaattgattcatagattggcatcttctgggttatccgtcattgaagctactagttttgtatctcctaaatgggtccctcagttggcagatgcaaaggatgtaatgcaagcagttcataacctgggaggcattagattgccagttctgactcctaatttaaagggttttgaagctgctatagcggctggtgcgagagaagtagctgtttttgcatcagcttctgaatctttctcaaaatcaaacattaattgtagtattgaagagagccttgtccgctatcgagctgttactcatgcggctaaagagctctctattcctgttcgagggtatgtatcatgcgttgttggatgcccggtggaaggaccaatccctccgtcaagagtggcatatgtagctaaagaactatatgatatgggttgctttgaaatctcactcggggacacaattggagttggtactcccggaactgtagttccaatgcttttggctgtaatggctgttgtgccagcggagaagcttgctgtccacttccatgacacttacgggcaatcccttgcaaatattcttgtgtcccttcaaatggggatcagtgcagttgattcttcagttgctggtctaggtggctgtccatatgctaagggagcttcaggaaatgtagctaccgaagatgttgtgtacatgctgaatggacttggtgtgaagaccaacgttgatctncgaaagctcatgtcagctggtgaagtcatcngcaagcatttggggcgcccatccg

SEQ ID NO: 20571 - DNA, 416 bp, Glycine max
gttggcagatgcaaaggatgtaatgcaagcagttcataacctgggaggcattagattgccagttctgactcctaatttaaaggtgcaaataactgctagagcaacaataaatgggcatctttatgttcagatgtctgatctgttacaattatagggttttgaagctgctatagcggctggcgctagagaagtagctgtttttgcatcagcttctgaatctttctcaaaatcaaacattaattgtagcatagaagaaagccttgtccgctatcgagctgttactcgggctgctaaacagctctctattcctgttcgagggaactgtagttccaatgcttttggctgtaatggctgttgtgccagcagagaagcttgctgtccacttccatgacacttatgggccatcccttccaaat

SEQ ID NO: 20572 - DNA, 501 bp, Glycine max
  unsure (1)..(501): unsure at all n locations
catagctacaacaacaacaagctccttgtatatggaagaaagcaaattgtcccacaacatacctacagggagttcgagaaaactcgtcacttcccaaagccctccttcactttcccttgaaccaaatgagaagctcaagaataacagtcaagaatgcaagtctccaaatactaatgacaaggccaaggacccagaaaaagggcatagtgagaatattggtaaggttgatgatgatgtagaggaaacggggcgtgagaggctgaagaggctccgggaagaggtgaccatggagaaggtcaacattccagaaaattggggtcaggagccaaagttgaaggactggatggactatactatgtttgatgcattctttcctcatagcttgattgtgactgctcgtgatgctcttatttgctatgcancgtaagcaaagtcaccaagactatattaaggatctagagtagttgctaatatatatttctatggactctatatatatat

SEQ ID NO: 20573 - DNA, 477 bp, Glycine max
atcaaatattattatgagcaataaaagagacagacttgaggtcaccgagtgttaggagcagcagccaccatgttccatgtttccaccgttgcgctgaatcctcaacctcacactttcctctttccactccccttttttacttcccgcaacctccaactttcacaaactctacaattccccagaaactggaacctccgctctatctcgccatcgctgcacccaacgccgcaatacgacgattccgaagaccacgtcatcggcgactgcgtcgtgttcgaggacggcgttttcgacgaaccgcttttccataaccaccaccacaatcccgacaatcttaccgtcgataagcccaagcccaagcccaggcccagttggaggaaaaaaagtggaggagacattgggcgagaatttggtcccggacaagtggcgagaggttcaggcggagataaacattacgaagagggagatgcggaagat

SEQ ID NO: 20574 - DNA, 432 bp, Glycine max
ggttccccctgctgaattggaacatatacttcacaccaatcctgaaattgctgatgctgcagtagttccgtatgtatcaagtcctttaatgttagtgttcagaagcaaataagttgtcttcaatgacaatgaattacatttgctagctttttcccaattctagttcccgtggggaatcaaagtttcactttttgactttaaactagtaattattatatatctttgactcctttaaagtgagcaaatcactttaacagttaaactaaataatctcagtcaatgagaaaatcatcggtcgatattatatgatattatatgcacacgcataacaaattataaatgtgttggaattctcaattgttgattttttcataaatgactatgattacttactttatccatgctcctcaatttagagaagtcatccaatcc

SEQ ID NO: 20575 - DNA, 303 bp, Glycine max
  unsure (1)..(303): unsure at all n locations
atcaaagtgatcaaattaatggttaacttctccaagttaatttgattttatggaaaagttaatttttagattaattattagttacttggttttgccatatatgtacaatatcatcactaggtcaggtttctcttgcttgggatatttatttctttctctaacaggtctagctagtactaatggaaatgtggtagcccctctcagcattttgaaggctttggtaatcaatttcagaagccctttttcaatgttgcttgattgtcatcatatgngtgagaatctgacactgatctgaattttatt

SEQ ID NO: 20576 - DNA, 721 bp, Glycine max
attgtgtttacgctggatgaaggacctggagtactgtttaaggctttggcagtatttgcattgagggacataaatttaaacaagattgaaagccgaccacaaagaaatcggccattaagagttgttgatgactctaacactggaactgccaagtatttcgattaccttgtctatattgattttgatgcgtctatgactgagccccgagcacaaactgctttaggacatctgcaggaattcgccacatttcttcgggtgctgggctgctatcccatagatacaaccatatagtctatagatagctatctgctttttattggtcaattttcaatgaatgtcattatattcaagcctgaaactttgaagagaatttgcagctaccttcatgtccaaataaaacaagagctgtcagatggtcaaaaatgtatttacattacataatagttagcctttattcattttgttagtcagttttatagattgacacgtgtgattatactaactctcttatacacatatataagagaagcagagacaagtattgtaatttttcattcaatcaatattcagaactttcttctttttttattcacatagatgattttatacggttccatacatgttgcagggagctgttacccaccaatattttgatggacataatggaacaatttgagtctgtgacttgcaatggattactgcagggagagggttagttcac

SEQ ID NO: 20577 - DNA, 665 bp, Glycine max
aattaatatgcacatcaccttcttctcctactcctcattaagctagttagctatctatctaggtgcaaccttttcatcgatctatcaccctctttcatatattcctaactggtcccccaaaaatcaatcaaatggcggcgaaacgattttttgatgattctgatcaagacaacaataataagccaccaggcgataaacggatgagaactacaccaagaccttcttttgcttcggtaataggagaagtggtgatggtgaaaaacttgcagaaccttttctcaggcttggagcccttgcttagaagagtggtgaatgaagagatggagagagtgatgaggcattttactgtgccacgtacaataagtaggtccccttcgttgaggatcgaagcagcatcattggagcaaccatcaaagtatgaactggtgttcagcaagaagctatcggtccctatattcacgggaagcagaatagtggacatagatgggaattccatccacgtgattctggttgacaaaagtggcggtgaagtagtagcggttcccactagtctgggccacccgataaagctagagatagtggtgcttgatggggattttccagctcccaacaacaacaaggaagaatattcatggacgagtgaggagttcaacaaccacatagtg

SEQ ID NO: 20578 - DNA, 414 bp, Glycine max
ccctcgcgtccgcccacgcgtccgggagaaaccatcgaactatgaactcatgttcagcaagaagctattggtccctatattcacaggaagcagaatagtggacatagatgggaacccaatccaggtgattctggttgacaaaagtggcggtgatggtgaattagtagcggttcccacgagtgtgccccagcccataaagctagagatagtggtgcttgatggagattttcctaacaacaaggaatcatggacgactgaggagttcaacaacaacatagtgaaggagagaacggggaagaggccattgctcacaggagaattgaatctgaccatgagggatgggattgcaccaattgaagagattgagttcactgataactctagttggatacgaagcaggaagttcagagttgc

SEQ ID NO: 20579 - DNA, 905 bp, Glycine max
ggtagaagcaactcaggtaaagtatgggaaaaatatgccagttgcggcagctgcagctgcagctgctgctgttgttgcatcttctatggtagttgctgtaacaaagtcgaacgctgactcgaatcttgagattcctgtagcagcagctgctactgctactgctgcagctgttgtagcaaccactgctgctgtaagtaagcagtatgagcagggaagttggagtggtggtgatacagagggtgctggttgtgagccgaagtgtagtggtgatggagagcataatgctttaggagaaaacacagaaggcgagagaaaatctgatcgatcagtaagtaatgacagcacaaagtctgattcagcgctagatgatgttgctgagtatgatattccgtgggatgaaattgcggtgggagagcgtattggacttggatcatatggggaagtttaccgtggtgaatggcatggaactgaagttgctgtaaaaaagcttctatatcaagatatctctggtgaattacttgaagaattcaaaagtgaggtccaaataatgaaaagactgaggcatccaaatgttgttctcttcatgggagcagtaactcgacctccaaatctttcaattgtttctgaatttcttcctagagggagtttgtatagattaattcaccgacctaacaatcaattagatgagcgaaggcggttgcggatggcccttgatgctgctcgaggaatgaactatctgcacaactgcactccagtgattgtgcatcgtgatttaaagtccccaaatcttcttgttgacaaaaactgggtagtaaaggtatgtgattttggcttatcacgaatgaagcacagtacattcctttcttcagatcaactgcaggaacagctgagtggatggctccaga

SEQ ID NO: 20580 - DNA, 566 bp, Glycine max
ccttcttttccgcatcaatctatctatctcatgtgggcaagcgagtgctccatgttccgcaggctcctctgcacctctcttccccgtctttcaaaaccccaatcttcaagctccttaaccattctcaactcctcactcacccaaaaacaaaaacaaaagcccttatctccccaaaccatcaaatccttctcctcttccaaaatgggggacgcgcgaagacccttattcgtcccaatccccactttggaaaaagcagaacgctccgacctcctccgcgccctagaagcttccatgggctcccctttcagctccgagcctctctctccaaaccctaaccctctaatcatcgtcatcagcggccccagcggcgtcggcaaggacgccctcatcgcgcgcctccgcgacaactcccgcctcgccctccacttcgtcgtcaccgtcaccacccgcccccgccgccccgccgaggtcgacgggaaagactacatcttcgtatccaaagaagagtttctcgggatggtggagcgggaggagctgctggagtatgcactggtctacggtgacta

SEQ ID NO: 20581 - DNA, 1072 bp, Glycine max
cattctggtatagttagatagctagctctctttcactacttctctgcctttaatcttccttcttatggaaccaaactttaacaacaacccaaagatgttacagaaaaagtggctttctactgctttgaatgtgagaagccaaggatcaggcagtgaaaccatagtctttgctcatggctatggaacagaccagtccatctgggagaagatcactccctcctttgctgaaaactaccgggttgtgctgtttgattggcccttttctggagctgtgaaggatccaagcctctatgaccctttgaagtatacctccttggaagcttttgcagatgagtttatcactcttatggatcagatggacctcaaagctgtcacctttgttggtcattccatgtctggcatgattggttgcttagcctccatcaagaggcctgaactctttaagaggcttattctccttggtgcttctcccaggtatattaatacagatgactatgaggggggctttactagctcagatattgagcagttattgaagaacatagagttcaattatgagaactgggtttctgccttctccttactagtagtggatccaaatgatgagccatccgttaacaaattcagagagtgcttgaaaaaaatgagagctgaagttccagcttccttggccaagactgtgttctatagtgactacagagatatacttgagaaagttgaaactccatgcaccatcattcagacttccagtgacattgttgttccacacaaagcagcggtttacatggagagcaaaattaaagggaaagttacattggaggttgtagacaccaaagggcactttcctcagctaactgcaagccttcagctagttgatgtgattaagggtgttcttggatgataattctcagtttcattccttttgtttagttttatacctgtttctcatttcatttataggttgatgtagttgtgtgatgattttatggttttcttgatgtggaaatagtgtggtatgtgttaattaattcattgtttgtacttgtgaaatagtgatgttaattagccttgt

SEQ ID NO: 20582 - DNA, 561 bp, Glycine max
agctactaagccattggggtggcatatctgcccaaaaagtggtgcattttgaaaacctcagcaaacctcaatagtgatcaagtggcaccaagtgtgtcttatgcttgtcaaaatgcagattgcacaagtcttggatatcaaacttcatgtggtggtttagatgctcgtggtaatctttcttatgcattcaatagttacttccaagtgaatgaccagattgacagtgcatgcaaattccccggtctttctgttgtcactgacaaagatccttcaactggagattgcaagttcaaaatcatgattcagacagattctgctggtctacatgggaatgggagaatttggtctctcagaatagtactctttgtacttttgtttttcactcttatgtgacctttaaagattttagatttatttttggagaatgtcaacagtgcctgatttttcatattcatcatgtgggttagagctaatatatgtaaagcttgttgaagatcacagaaacttctttgcagtgttcaaccgctgacaatattggctttaaagtgacttttggtcccc

SEQ ID NO: 20583 - DNA, 846 bp, Glycine max
gcttcttggaatgagccttcacaccacaaaagacagcgaagtagtaatgatgagttactttctgattctcaggatggagaactaggaaatcaagttcaaacactttcgcatcatttgagtttgccaagaacgtcgtcggatatgtttgctatggatagtttgcttcagttttcagattctgttccttgtaaaatcagagctaagagaggctttgctacacatcctcgaagcattgccgaaagggtgagaagaagtcggatcagtgaacgaataagaaaattgcaagagcttgttccaaacatggacaagcaaactagcacagcagagatgttggacttggctttagactacataaaagatcttcagaaacaattcaagactctgagcgataaacgggctaaatgcaaatgtataaacatgcagaagtcagaagcagatcgagttgcttgagtttcttttgtacaggtaataaaaggaactatgcaaaacttgaataggacccgggttttatattttgacgtgctgaaaaatcaaatagatcaagaaagctaatataagatgcagaaagccagcttttaactcttcattgctacattgtgtattttgagttaacgggggttccagccacacagacaataaatcataattctgtatacaaaaattctaaggaattaattttagcgttattctttttccccctatagttatcaaagacttggcagaatttggattagtactatgtgtcgattgttattgaattgatgcattataaatgaaatgactcgagtaagcttgtcttaatacatattatcttagatataaatgaaaatgaacattgactattct

SEQ ID NO: 20584 - DNA, 358 bp, Glycine max
tcttcacaaagctctccaccatttctctttctctctctctctctctctctcttctggtttttttattctgaatcagaaacaatccctcttcccttgaattattttcatggcttatcatccaccgccgttctacttgtttctctcatcctccttctctcccaattccttccacatcttacttttccgtcacattcgcattcaatcctgtaacactttctgacgcttagcaggtaccaccaaactcaacagcgtaggagccgttaccgttatgggaaagcgtaattctcaacgtaaaaatgctgcaatgttggatagcgacgatgatagtagtagtgtgagttcatcatcaacttcacga

SEQ ID NO: 20585 - DNA, 428 bp, Glycine max
acgagatgaattgaaaaaaatgccagctcctgaggttgctgtgaattattatacaggagatgacttgtatttatttgatgaatttcaaacttccagagttcctaattcaagaagacctaagatagagaatctgtacgatgtatttgtaaatatcagagatgacgaagctgaacattgtaagacaatgaaggcttgtcaaacccatgggaacctccggtcacctcattcatatgcagaggatgatgacagctcagtctgtgctcttgaagcagattgtgaaggaatagtagactgtataaagaaatctgttgcttctaatccagctaaggtgaagtaagataagtggcccaatacatagtacattcatttaataagattgtacgcagggaataatgattggaggtagtaaatagttgaaatttggaaag

SEQ ID NO: 20586 - DNA, 705 bp, Glycine max
taagatttacaacttttttcttcctcatggtcacaatgcttttaccacttgttctatgtcttactctccctgtgtttttcttgttcttcatccaacaccttagagccttcaagaaaccccccctacctccaggtcctaaaggccttccaataattggaaatttacataaattagataactccattctttgcatgcagctatggcacctctcaaagaaatatggccctatattttcccttcaattaggtttaaggaaaactattgttgtttcctctccgaaactggccaaagaggtactgaaaaaccatgacctagagtttagtggacgacctaaattacttggccaacagaaattgtcctataatgggtcagagattgcattttccccatacaacgaatattggagacaaatgagaaaaatttgtgttgcccatatctttagctccaagcgtgtctctagcttttcctctataagaaagtgtgaggtgaagcaaatgatcaaaacaatatctgggcatgcctcttcttcgggtgttacaaacttgagtgagttactcatatctctctcaagcactataatatgtagagttgcttttgggagaaggtatgaagatgaaggaagtgaaaggagtaggttccatgggttgctcaatgagcttcaggtattgatgggtaccttctttatttcggattttattccattca

SEQ ID NO: 20587 - DNA, 399 bp, Glycine max
ataagatttaccgctatgctttccacaatattgttaccacttgttctatgtcttactctccttgtgcttctcttgttcttcatccgcaatctcagaaccttcaagaacccaccccttcctccaggtcctaaaggccttccaataataggaaatttacatcaatttgatagttccattctttatctgcagctatggcaactctcaaagaaatatggccctatattttctcttcaattagggttaaggccagccatagttgtttcctctcctaaactagccaaagaggtactgagaaaccatgacctagaggttagtggacgacctatactacttggccaacagaaattgccctataatgggtcagagattgcatttatcccatacaatgaatattggaga

SEQ ID NO: 20588 - DNA, 449 bp, Glycine max
agcatagtcaagcttcgaattgttgaatgtggaaggaggagaaggagaaggagggtgttgcgccacgaacacatgaattagaaaagaagcagctgcagcaacttttcttgttcaatacccatcaaatgcaaatacaaagacactctcttttttaattactactgttttatgttcctttcttccttctgaatctgaccaaccagtaggactccttcaaagggattttgagtattgtttgaattgctggagacctgagagtgaaaactaactccacaatccatggataaagatgctagggtggaagagactgttgatttgcgaaccaatgtggagttggtgagatcagtctctgataagcatcatgatcttttaaggccatctgctcggaactattcaagaggacaatcaacagatacaactggccgtggaaagggaaagtatgccttaat

SEQ ID NO: 20589 - DNA, 461 bp, Glycine max
cattcatcaagttcctagaggaaaagaagctgccgccgcattactcctcaactgatctgggaaaataaggcgtctcttcttaccagctgctgctaatgtttttcctgcctgcaattttccatcttccctgcagaaatttccaaaacaaatagttgttggtgatttgtcaacatgaagaagttgttagattttgggaagaaagccctcttttatgttagggtgctttctggatatgaagagcgaagaatacgatcttataggctgcagcttgagcaacgtgtacaacaggcacaagcaaggagggcggccataaataaagtaccagaacaggttatattatccgaggttcgtcgaatggttgaagagatgcaggctttgaataagaagctggaagaaacagaggcagccgttgaagactatttcaaacctctagacaaggaagctgagttaataatgaaaat

SEQ ID NO: 20590 - DNA, 347 bp, Glycine max
cacacacaatgaagcggaaggaaaagagaaggatgggggactaaagagaatttggtcgccaaagacggaaatctcccattctgcattaccagctttatcgttgagttcgtgacttcgtttagcacatgcaggtgagtttgtaggtttgttatggacgaattggatctggactggatacgaccggagtgccccgttgaaaagactgcaacataagcccattgtattctctcaaccactcatcttcttgcaatgccctgctagctgctccaaattgaggaaaagcaaccaaaatggtgaagattattagtagcattatgaagagggtcatcttgtaagagaatgccatc

SEQ ID NO: 20591 - DNA, 394 bp, Glycine max
ttcaaacaatgccgggcaggatgtgacttcaaatgaccagggtggagcagtggatgatgggtcaactaagaatgacccggaagaagatgacgaggatagtgatgctggggacttggcagaagcgggggaacatgagactgacttggacctggcatggaaaatgcttgatattgccagagccattgctgaaaagcaatctgtcaatacaatagaacaggtggacatattatcaacattggcagatgttgcattggaaagagaggattttgaaacttccctctcggattaccagaaggcactaaccatcttggaacaactggttgaaccagatgatagaaatattgctgacttgaattttcgcatatgcttgtgtttggaggatagttctaagcct

SEQ ID NO: 20592 - DNA, 1037 bp, Glycine max
cccacgcgtccgcccacgcgtccgttcctttcctttcctttccctgctattgctatgcctagttgctaacaccctcttcctttctttcctttccgaaccttcctcgtttttgatgctttgacttcttccaattgattctctctctctctctctgggttctctggcatcaaagttcgtacctttttgtgatttggaaggatctgatgccagtttggttttctggggtggctgtgttccttgtcccactttccttctttttataggatacttgactaattgaaaaaattccttttgttttcattgttatattatagtcaagttatttgatgtattttagttcttcagtttggaatccgttttgggtttggttatgctgttatggtggctttggaagtttgaacaagggggattcttagatccttttgcactttccctctcctgaaattttgcagtcatatcaaatatttgcgttattttttcttctttcgtaagagcatagctcttgaaatagagaaagtatctttagcttttttttttttatgttaaggaatcttgtgaggggttggatcagatgtcttgtgagttctgtgacatgagattttgtatttaagacatctatagatcagtgttttatcatatacgcagtgtctatagtttcatttgttttataggtttctttgggttttctgtctgtgctgggaaattcaaggttttgtttagttccatctgttggtagtttaaatggttttgggactcttatagggagttttgaagtgtgaagtttttgatataagaagatatgttctaggttcactttggctctctcaagttgttgatcaaatggcttattcagccgaaccctcatcatctttgagctttacctcatcttcccatctatctaatgggtcggttagtcacaacatatgcccttcttatggctctgatcctggacctaacttagaggctatcagtttgagtaagcttagctccaatttggagcagcttttgattgaacctgattgcgattatagtgatgc

SEQ ID NO: 20593 - DNA, 450 bp, Glycine max
attgcctctttaactagtagggtacctgtacctcatccacccatcttcaacttgtgataaatttctcctacctccattctgatatctcaactcaataataatagcacaccatggttgcttccctctcaaccctggttcttctattgtgtgttatttccacggtagcttggtactcatgcctctacttcctcaaactcaacaacaacactcagaagaagacccttccaccgggcccaccgggcctccctatcttcgggaaccttctatctcttgacccggacctccacacttacttcgccgccctggcccagatccacggcccaattctcaagctccgactcgggagcaagctcagcatcgtcataacctcaccggccatggctcgcgaggtgctcaaagagaatgacaccgttttcgccaaccgcgacgtccccgccgccggaaggtcag

SEQ ID NO: 20594 - DNA, 774 bp, Glycine max
gacgaaaacgatgtcgtttcgtccaaaagaaaccaaagcgacgaagatgaagacaaagaagaagaagaagaagaagaagttcactccaagttgaagggtttggcctctcttgattccttagaagactctctccccatcaggagggggttatcgaaccacctcatgggaaaatcgaagtcattcacggatctatcacaagtgaacacactcaacacagtgaaggaacttcaaaagcaagagaaccctttcaacaagagaagaagggttcaaatagccacgaagttgacaagaaaatcttctttttacgcttggtccaacccaaaatcgatgccccttttgcctgttcatgaagatgaagacaattttttggaagaggaagagaagcccaaaaaagtgtcaccatcttcttcttcttcttattcatcagaagaaaataaacaagatcatgttttggttcctaagtcttatgttgatcacatgagagcaagatttgggagcttcaagtctaggagcctctcggatctgaaagaacatgatgaggaacaagaacaagaagatgatgatgatgatgcgtgatgttttggattatttaataatgtggtttcggtgtaaataaactaaatattatagtgcccatttttaatttagctagcttaatggattttgcctaaaggaaaaaaaaaaactattttggtgctgctgaaacgacaacaattttagaaaaagagtgcttaaaatgcgctgtgggttgcaaaaagagtctacaatataata

SEQ ID NO: 20595 - DNA, 392 bp, Glycine max
tgtgaagccaccaccatggcgatgaccaccacaacgacgtcgtctccaccatttctcttttcattcctttctccaaaaccctttcccccaaacccttcgctccctcttccccaattgcaaaaccgaacaccgctcagttccacccatcgcttcttctctgccatccccaaagcgaaacgcggcgtttcagggacccatttgtgcctcgcttctcgcgccaaagccaaacccaccccgtcttcggtggaacaagagagcgacgacaattttagaaaaagagtgcttcaaattgcgctgtgggttgcagaaggtgtctacattctatggctcttccttcttccttatgcccctggagatcctgtatgggccatcagttctgacacattgaactc

SEQ ID NO: 20596 - DNA, 807 bp, Glycine max
gcaagcttcggattcggctcaccctgtatccctgcaaacataaggactttccggttacatggtccatcgggtcgaatgatttgaatacgagcgaatccaggtaaatttgcctccgtacccagaacggaaccttcgctaagccttcttggtgtttgcgtcaagctcaccgaggaaaaacgacaatattttatttagttgcctgtgtttcgagacgccaaataaacgacattatcactggcaacccgaaacacactcttcatgccgtttcattcgtcacttcgcgcgtctccgactcttctcgctagtatccactgctagatgtaaattttcacagaaaccgcctcaaaatctgaagcaacgctcgatcccaaaaatgcgttgttcgacggcgttctccgttttatgcctaggtgtgtttttgcaggtaccatgggtggcttcagtttcgatgccgacttccaactgctacgctttcgacaattctagtcgcattggtgatttcagtggctggactggttatcttttcgagtatgatcaaaagcaaggttctgatttgtccgtgcgattctgcaaagatgtggagagtagatcacaaacgggatatgttgattttggccgatttgataggttcaactactttgttgctggttctggtcaatctgactttgtacaagaattttataatggtgatcttatgggttgcgaacaaagttacgacaaaatgggacgaacagcccaggtaaatatcatatgtgggaaatgtttgaatggacaatgtaaaggtcgtcctggatgcatatgtaatgt

SEQ ID NO: 20597 - DNA, 580 bp, Glycine max
tgcatgtatctatgaatgatggaaccaccacaaacgaggttgatgatcaacgttttcatagtgagtttcttagcactacttgtgaacttggtggtgggagtgctcggcgctgataactatagcagagatgattttcctcttgactttgttttcggttcaggaacctctgcttatcaggtggaaggagctgctaacaaagatggaagaactcctagcatctgggacacctttgcctacgctggatatgcccatggagaaaatggagatgtagcctgtgatgggtaccacaagtacaaggtgaatacgctgcacctcatttgtggaaaataaaaaagattgaggcataagctggacaaagaaaacaagcttagtcattattttgttctacttataatgccctttaagacttgaaaagatattaattgttttcacgaaaatatataatacaggaagatgtgcagctaatgctggaaacagggcttgatgcctatagattttcgatttcatggtcaagattgttaccaagtactgtaatattgaacgcaaactcttggaattttatgtatctatatttcttttt

SEQ ID NO: 20598 - DNA, 752 bp, Glycine max
cgaaagaagaaaattaaaacgaacatgcatgtatctatgaatgatggaaccaccacaaacgaggttgatgatcaacgttttcatagtgagtttcttagcactacttgtgaacttggtggtgggagtgctcggcgctgataactatagcagagatgattttcctcttgactttgttttcggttcaggaacctctgcttatcaggtggaaggagctgctaacaaagatggaagaactcctagcatctgggacacctttgcctacgctggatatgcccatggagaaaatggagatgtagcctgtgatgggtaccacaagtacaaggaagatgtgcagctaatgctggaaacagggcttgatgcctatagattttcgatttcatggtcaagattgttaccaaatggcagaggacccgtcaatcccaaaggattacagtactacaacaatctcatcaacgaacttatcagcaatggaatccaaccacatgccacgctacacaactttgatcttccacaggtacttgaagatgaatatggaggatggattagtcgtgacatcataagagacttcacatactacgcagaagtatgttttagagagtttggtgacagagtgttgtattggaccactgtaaatgagcccaatgttttcgccttaggtggttatgatcagggaaacagcccacctcgacgatgttctcccccattttgtgctacaaacgacacaatgggcaactcaacatatgaaccctact

SEQ ID NO: 20599 - DNA, 585 bp, Glycine max
  unsure (1)..(585): unsure at all n locations
aattttcagctcaagataacanagatccttatgctgaagaggctgcagctcagagagagagggaaagacanagaatgctttctattccaggacttgttgccccgagcgagttgcaagatgaaatggttgactcatagatataggctatacgatatgggcgtaagcacagtacaccaaagggcattttgacttgtgtcacaagcgccttgattcaatcaaataccagatggtttgggaacacatgcagcattttcctctttaaaatttagtttccctgcttttcccaatatatcatgttgggactggtttggcataggttcatgatttcagaggttttgccggctggtgatagtgccttgtctattggtgagtgtagattattcagttgctaatttaggatgataatagtcatttgtgggattcatcaaggcagctttcgatagaatcacaggatggatgactccttaggtgtgacctaatctctcgcggtttgtgcagaaaaaccccttgttcatattttgtattttttttcaccaattaattttaggggaattgatgtaccataattgcagtaatatatggttt

SEQ ID NO: 20600 - DNA, 275 bp, Glycine max
tgagtgtgctgaacaaggacttgctgcacattggctttacaaggaaactggcaatccttttttatccatagacagcatgcatgaacctgaaactgaagcatcctcctatttctccaaagatctagaggaaggaaattcttcagatattttattaagtaaatataagtcattgaaggctggacatccagtcctcagagtagaaggaagtcacttacttgctgcaattatcatcagtgtagaaaatgatgaaagagaattgctagttgctgtgagct

SEQ ID NO: 20601 - DNA, 334 bp, Glycine max
gaaaaaggagagaatgtggatccaactttttacaaaagtttggttggaagtttacgttacttgacatgtacaaggccggatattctctatgttgtaggcgtagtaagtcgctacatggaagctccaaccacaactcacttcaaggcggcaaagagaatccttcgatacatcaaaggtaccacaaactttggcttgcaccattactcttctgacaattatgacattgttggctatagtgatagcgattggagtggagacctggatgatagaaagagcactactggttttgtgttctttatgggagatactgctttcacttggatgtcaaagaagc

SEQ ID NO: 20602 - DNA, 405 bp, Glycine max
tgaagtactgccaagcactactgaaatccttgaaaactggccgtgctccagaagtagagtcatggaagcagttagcactatctcttgaggagaggattagaattcaccaacagggtggatatgctgcaaatttagctcctgcaaaattagttggcaaattgctcaacttttttgatagcactgcacatcgagttgttggtggtttaccaccgcctgctccttcgtcatcagcaggaactgttcatggaagtgaaaaacaataccaaaatatggcacctagagtatcctctagccaatcaacaatgtcgttggctccatctgcttcgatggaacccataagtgagtggtcagctgacaataatagaatgggaaagcctaataggagtgtttctgagccagattttg

SEQ ID NO: 20603 - DNA, 667 bp, Glycine max
ttcttttatggcagtattgtgtacatggttctctttatgatacagtgtagaataattgaatatgatattaagagtgagtcagtctacagcgctatggggtttccagcagcagcggtggccgaatgaccaaacccctttcttaacctcaaatttcaacagaagacaagtcataatatgcggcctccgttccagctacaaagcgcggcgtcgcacaaggatattgtcgaaagagagcatagaagtgattcacgcactcaaactcgccagatcccccgaccacgttctcaatgccaaactctctcgcctcttgaaacccgatgccttaaacctattggacgaattgcaaagacaaaaccaactccacttatctctcaaggttttccactttattcgtgaggagctagggcatgatacgctgctgcaactatacgccgacatgatactgctcctcgggagaaacaagaggattgacatggcagaggaattgttttctgaagctttggagaagggactgaaaccggacacaagactgtgcagtgaaatgattggggcttatttgcaacttgggatggcggacaaggctatgcagatatacgcatccatgaaggaagattgggcttgttcttcttcccccgataagttcactttcaccatattgatcagatat

SEQ ID NO: 20604 - DNA, 435 bp, Glycine max
ggagaaaacattttggagtctttcccatcacaaattcaagcaactttggtgatggtagttttgaatttattatcgaatcattcgccagatgaagagtacattgggcaatatgtggaacaatcgtgggttgagaatcaaactataaaggcagcctttgaaaggtttagtacgaaattgaaggagattgaaggtattatagactcaaggaatgcaaattgtgatttgaaaaataggaatggagctggggtggtgccttatgaactaatgaagccattctcagggcctggagtcactggaaagggtgttccatatagcatatctatttaaagattgttattttatatacaatatttataattaatttcttactaatgcaatgtatgtgttctgtggaatctttaataaaatattcacatagaattaaattccacaact

SEQ ID NO: 20605 - DNA, 1009 bp, Glycine max
caacagcgccggacacgacagcgtcgttccagttcaaaaaccctctctcgcccctcccctaatcaataatcaccaccaccaccaatcagaaacttgcttcgacgtcgatttttgtcgctcgaagctctcctcctttaactacccttcccagtctcttagccaaagcgtttcttcgtcgtcgcttgatgtcggagtggtgccggacgggaacacagtgtcggacatgtcgtattcgagtgggattgtggtgtcgggtggacaaggcgcgacgcagttgtgtgggatggatcgggaagcgagggtgctgcgatacagagagaaaaggaagaaccgaaaatttgagaagacgattcgatacgcatcgcgaaaggcttatgcggaaacccggcccaggataaaaggccggttcgcgaaacgaaccgaaattgactcggatgtggagcgtctctatagccctggcgctgcggcgctcatgctggacactccatacggtgtcgtaccaacgttttagttaattaatcaaaaagaagaagagacgatgggtgcatgaatatagtgttgggaaatcttagaataatgattagtgattctgtgggattattaggggaaaaaaggtgaagaatcgaatcggtacgaacgcgattcttagctggagcgcgatgggaagattattgtgaagatttgtctcgatcgaccagaaaagcccgtttactttttataaaagaagaaacagacacttttaaaagggggctgctgtttcatattcacctcgcgtagaactagaacctgtgcggtacactcttttcacttgccttgccttctgtctttttttagtataaaagcgtctttctgctatcagccagatcacggatctcttcctccgttcctgttggctgtcactcccaactatatttatcatatcacttcctcattatatgacgatcatcaaagcctttgctttatcaccgagttatatgcattctatgctcagataaaatagaacaacaaa

SEQ ID NO: 20606 - DNA, 1007 bp, Glycine max
ttctctgaaatggaccccttcctcgattttgattactcaaactccttccaaaacaacaacagcgccggaaacgacagcgtcgttccagttcaaaaaccctctctcgcccctcccctaatcaataatcaccaccaccaccaatcagaaacttgcttcgacgtcgatttttgtcgctcgaagctctcctcctttaactacccttccaattctcttagccaaagcgtttcgtcgtcgtcgcttgatgttggagtggtgccggacgggaacacggtgtcagacatgtcgtattcttttggtcggaacagttcggattcgagtgggattgttgttgtgtcaggaaatagtgtggggcaaggtgcgacgcagttgtgtggaatggatcgggaagcgagggtactgcgatacagagagaaaaggaagaaccgaaaattcgagaagacaattcgatacgcatcgcgaaaagcatatgcggaaacccggcccaggataaaaggccgcttcgccaaacgaacagaaattgactcggatgtggagcgtctctatagccctggccctgcggtgctcatgctggacactccatacggcgtcgtaccatcgttttagttaatttcaaaatgaagaaacgatggagtgcatgaatcttagaataatgattagcgattctgtgggattgttaggggaaaaaggtgaagaatcgaatcggtacgaacgtgattcttagctggagcgcgatgggggaagattattgtgaagatttgtctcgatcgaccagaaaagcccgtttactttttataaaaaaaaaaaaaaaaaacttttaaaagggggctgcggtttcatattccccccgtgtagaattagaatctgggcggtaaactcttttcaatgccttgccttccgtctttttttagtataaaaggttcttttttctatcagccagatcccggatctcttcctccgttcctgttggctgtccctcccaactatatttatcatatcacttttttatt

SEQ ID NO: 20607 - DNA, 591 bp, Glycine max
  unsure (1)..(591): unsure at all n locations
atggaaagcaaaatgagtggatgaaatgaaaccttggtccctgcctttgtgagaagaggagagtgatgatgatatcaggaggaggaggtggtggagggaaatcatcgtggagttcatcaacatcgtcatgggtacccacaacctcagtgtcggcatctggaaagaggattcagagggaaatggttgaactcaacaacgaccctcctcctgattgctctgctggccccaagggcgataacctctatcactggattgccaccattattggaaccccagaaacaccctaccaaggtggcatctttttccttgacatcaaatttccaattgattatcccttcaagcctcccgaggtagtattcaaaacacgcatttaccactgcaatgtagaccctgatggccgtgttagtatgggaatattgaaggatgattggagtccagcactaacaattactaaggtgctactaagaagttagatcaattttgaccaatcctgatccttctgatgcggttgtccctggcatcgctcatttgtattcgggagacagagcanaacatgatgatattgctgcagagtggactgtccgatttggc

SEQ ID NO: 20608 - DNA, 371 bp, Glycine max
gcacaagctcactgaaaaaggcttcctccccaggattggaatgcagtaccactggaaaaaccgtaactacaaaaattttgatgacttcttgatggacatgaagcaaagtaaaagaaaaaatatacgtcaagagcgcaaaaagatctcagcccagaacttgattatgaaacgcctccggggttatgaaataaaggctaggcactgggattccttctactctttttacaggaacacaactgataacaaatggggcactcctcacctgacaagggaattttttcatgagctgggagcaaaaatgggagataatgtgctacttgtggtggctgaagaaggggatgaactagttgctggagccctaaatcttatcg

SEQ ID NO: 20609 - DNA, 375 bp, Glycine max
caaatctggaaaggaaagataatccgaacttgtttctagggtttccgatggagatgagattgcacaaacacaatactaagtcaaacaaatttctataatcccatttcatttcccttgacaacaatgccaactttgaattcagattccggataacagaacagaacaagtttgaatttctgtttttttttagaactcgagaacctcagaaagaaacccaatcggaagcgatggagaggtctagatctaagaggaactactactatgaccaagactatgattccgagaccttagcgaggacaaggccgcgctataaccaccactacaccaccggcgggaaccagcgccaccgcggaggcggcgccgcccgccacgcga

SEQ ID NO: 20610 - DNA, 647 bp, Glycine max
ctttaatattagaatctcataaatgctttttttgttttttcttttaatgttgagaattgagattagattttaagatggcgtgcatacatttttgttcctttgctctcttcattttccattcgtagacgccaagaaccctaacagatcaaaacccagaagctgaaatctttggggcatgaggttttgcatgtgttcatttatgggatttgtgtaatttatccccttttctggtttgactttatttgagctgaaacaagaaacctaacaggagaatgcaatggacctggataatttgtgaggatatttaacatagtgtacattgtgctcctgtaattattttcatcagttggtgttgtgatggatggtgataatggtcttaacatacgtaattggggttactatgaacccgccacgtcgtttaagagccacctggggctgcaactgatgtcatccatgccggaaaaacctctaattggagggcgcaatgctgcggttttagctggtactaatggggcatttcaccatagggacattggtggtatgccccaagctacataccctatggaatacatgagggatgcatggattagtcagagagacaaatatatgaatatgataccaacaaatactactatggtagtattccg

SEQ ID NO: 20611 - DNA, 284 bp, Glycine max
ggcgtgcagaccactgtctccccttttgctctcttcattttccattcgtagacgccaagaaccctaacaggagaatgcagtggacctggataatttgtgaggatatttaacatcgtgtacattgtgctcctttaattattttcatcagttggtgttgtgatggatggtgataatggtcttaacatacgtaattggggttactatgaacccgctacgtcgtttaagagccacctggggctgcagctgatgtcatccttgccggaaaaacctttaattggagggcg

SEQ ID NO: 20612 - DNA, 1056 bp, Glycine max
  unsure (1)..(1056): unsure at all n locations
cctgacagtgttacagagtgaatgccaacaacttatatgtgaaattctgcgggccactcctgacgcagcatctgctgatgctgctgtgcaaacagctaggcttgcgagcaaagtcccttctaaagataaaagggatggatctgaagatggtcttacctttgcatttcgctttacagatgcttcaatatctactcctaaccagggagttgatcttgttcgccaaggttggagtaggaagggtcccaatgtgcttcaagagggttatggttctgcagcagtccgccctcgcgtccgcatatatttagcagcatccatataccgacctgtgcttcagttcacggataaagttgcttcaatgctgccaacaaagtattcccaactcggcaatgatgggttgctagcttttgtggagaactttgtgaaggaccactttttaccaactatgtttgtagactaccgaaaaggcgtacagcaagccatatcgagtccagctgcatttcgtccaagggcacatgttgctactacttacacttcatcaattgagaagggtcgacctgttttacaaggattattagctatagatcacttaacaaaggaggtgcttggctgggcacaagcaatgcccaagttctctaatgatctggtgaagtatgtgcaaacttttctggagaggacttatgaaagatgccgaactgcatacatggaggctgttcttgagaagcagagttatatgcttattgggaggcatgatattgagaagttgatgaggattgacccctcaagtgcatatttaccgaatctgcttggtcagttaaatgtggaaagtaattcatctgatgctgaaacaattgaggctgaattagaacttagtgaattactgctaagtttgcgtcctattaagcaggaaaacctaatccatgatgacaacaaacttattctgttggcatcccttagtgactcattagagtatgttgcagactctattgaaaggcttggacagacaactcaaagagcatcanatcatgtcgngggaaaataccatcacagtcattcaga

SEQ ID NO: 20613 - DNA, 457 bp, Glycine max
acagactccaagactcatgagcattactccatcaagtagaaccccagctccaaaaaagccaaaggcaaaagatcctcataaaagagacatgacatttgaggaaaaacaaaaactaagcactaaccttcaaagtttgccttcagagaagcttgatgctattgtacaaatcattaagaagagaaattcagcacttaatcaacatgacgatgaaattgaagtggacattgatagtgtggatgctgagactctctgggagcttgatagatttgttaccaactataagaaaagtttgagcaaaaacaaaaggaaggctgaacttgctcaagctagagcagaagctttgcagcagaatgccatccagaagagtcaggcaccagctatggcagagattccaaaagaaacactaacagatgaaaggaatcttccccaacccttgcctgcgcaaaggggaaatcaa

SEQ ID NO: 20614 - DNA, 572 bp, Glycine max
gtctcatatgtgcgccttctctgtgctatattcatctcagttcaaagtggctagtatagaagaaccataagcactgagggaaaaagtgattagtactttagccaacaaattaaaaatggctgtcaccaaggtctacattgtgtattactccttatatggacatgtagacaccatggctagagaagtacacagaggggctgctacagttgaaggtgttgaagcaacactttggagggtacctgagatgctttcggaactaatattggataagttgaaggcccctcctaaaccaaatgatgtaccagacataatgccagaacaacttgtggaggctgatggtttgatatttggttttccttctcgttttgggatgatgccgagccagctcaaggccttctttgatgcaactagtgagctatgggcatcccaagcacttgccggcaaacctgctggaatcttctggagtactggtttttatggtggaggccaagaactatcagcattgacagctataactcaattagctcatcatggtatgctttttcgttgctcttggatacaccttggaagtg

SEQ ID NO: 20615 - DNA, 1071 bp, Glycine max
ggaatatttgtgctcagaaagttaattctatggtcatttgactcatatactttttgttgaccttgctctaatggtttttgctggtgctaagcctctcttggataaaacgcttggcattcttgtggaaggcttgattgacacatttatcagcatttttcatgaaaatgaagctacagatcttagtgcacttgatacaaatggattctgtcagctcatgcttgagcttgagtacttcgagaccatattaaatccatattttacttctgatgcaagagattccttgaagtctttgcaaggattacttttggaaaaagccacggagagtgtgactgatgctgttgacaatccaggacacaatcgtcggccaactcgtggtagtgaagatgcacttgcagatgataagcaacaaggaacaactgtgtcacctgatgagctcatttctcttgcacagcagtacagctccgagttccttcaatcagagcttgagaggaacacgccatttaacacagcatggcttttgcggaaatccttttcctttgggacttctgtggccagaaacccagccaaaatctgccctacctctccccttcaaggaaacttcaatgggattcttcctaagcagaaacccaaccagaggtaccctacaaataccggaagcctccaagcttctcttcggcataagacattgattggttataaaattagcctcccttattctttttagtttgtttggcctattgtatttattgtagtatatttttgggcttagtagttaatgaaaatttgcattctttgcactgctatcttctttgtaaggtggatgacaattaccacatattaagagttttgaacatatgtacccattcatgtatgccaacctaaatgcagtgagtttggcattgagttttaaatcagtattttggtcaaaccattcacctcctctcctttactcgagggtgcccgtcaccaatcacctattgatcgaatacggcgttaatgccgcagttacacgcggcatgaaaacctgcgtacaactaatgctgaaccatcccttgcccactcgctctcccc

SEQ ID NO: 20616 - DNA, 263 bp, Glycine max
gaaacaaataactaagaatgaaagtgaaggtgatggggttcagcgtgatacccaaaatcagaagcagcagcgtttgcctgttctccgttcgagcctgccacgaactccctcatggaccttcctgcatctacgttggccccctccacaccgcaacccaagagaccctcgaagctctttactctcaggctcgtgatgcttattacagtggagaccctttgatacttgatgacatgtttgatagagtagagttgaagcttaagtgg

SEQ ID NO: 20617 - DNA, 482 bp, Glycine max
agactatatcttctgcttgtggcttttcttgcatccatctgaaggatttcagagtcgtgtgaaagtttgctagaaacaaactaagagaaggtaacttatgaagctctttctaggactcaactgaaaaggaagatgatcaaggtgtgcttggtgattatcatatagttgaaacttgaaagcacattaaatgatctcataatggagccccagacacgtgaaatagagggtaccaaggatgatgtctccatcaatcgggccaacaaagacgagtccagctctaggatggaagggtttatcaaggatgaatttgattgtgtattaaatgagaaggaaccacctgaagggctggttgatgctggaggaggttcatttggaaatgaagagaacccttttcatattggggatgaacctttgacagtcttgatacaaaaagagaaaaaacttgttgatgaagtatctgtaaggacttcagaactagcgca

SEQ ID NO: 20618 - DNA, 422 bp, Glycine max
tgacgatgaagatgaagatgaagagtctctgcggcagtaccgatttcgtgtaagaacagttggtgtccgtcctgtaaagtgagacgattctactgtacagtacatttaaatggctttttttatcccatagactatagtgaacatgtaagtaacatttgatgggcaagaacgagcctgttacaacagctcaatcatgttgtctgccttgaagatatatgaatcctttagagaaatgcactggcctgtactgagttggtttgatagtcaatgatgatgagctatttgaactctgaatttttacctggaatccatccgttcaaagctgctatcatcctgatgtcctgtcaatcacattcctttgtgatagaaagtttaagggttcatgtttctgtattggaccaaaagtgtggggattggggaga

SEQ ID NO: 20619 - DNA, 530 bp, Glycine max
tcgggactgtttacaagggcgtgttgccagagagcggcgacattgttgcggtgaagaggtgtaaccatagtggccaggggaagaatgagtttctgtctgagttgtctataattggaagtcttaggcataggaatttggttcaccttcaaggttggtgccatgagaaaggtgagattttgttggtgtatgacttgatgccaaatgggagtctagataaggccttgtatgagtctagaatggctctgtcttggcctcacaggctcaaaattttgttaggcgtgtcgtctgttttggcctacttgcatcatgagtgcgaaaaccaggtaattcatagggacattaagactagtaacattatgttagatgaagggttcattgctaggttaggcgattttggtttggcgaggcaaacggagcatgacaagtctcccgatgccaccgtggctgccgggacaatggggtacctcgcgcctgagtacgtgcttaccggtagagccactgagaaaactgatgtgtttagctatggtgct

SEQ ID NO: 20620 - DNA, 513 bp, Glycine max
ataactttgcataggtaggcgcttacatcacagaaatactttatcaaaatgatagcattttaataaacaagagcatttgagaattgaaaatagtgtctgttattcgaccaatctaaatccaaatggcatcccaagaacctacagcttcactttgttctgtttcctctcatgtccccaggccacttgctccccatgacagaccttgcaacaatattagcacagcataacatcattgttaccgtagtcacaaccccacataacgcttctcgtttatcagaaacctttagtcgtgcttcagactcagggcttaacctcagattagttcaactccaatttccatcccaagatgctggatttccagaagggtgtgagaattttgacatgcttccttcaatgggtatgggtttgaatttcttccttgctgcaaacaactttctacatgaaccagcagagaaagtgtttgaagagttaacaccaaaaccaaactgcataatctctgatgtgggtttggca

SEQ ID NO: 20621 - DNA, 1144 bp, Glycine max
  unsure (1)..(1144): unsure at all n locations
cagtccccaacgactggttctgttttctctctgctgcttcgattcattcacacaaccatgactagccttactaatggcgatgctggctccctcaacaaggtccccacgatcaagttcaccaagctcttcattaatggagacttcgttgactctctgtcaggaaagacatttgagacaatagatccaagaacaggagatgttatagcgaggataagcgagggagataaagaagacattgacattgctgttaaagcagcacgtcatgcatttgacaacggtccatggcctcgccttcccggctctgagagagcaagaatattgctgaaatgggcagaaataattgaggaaaacgcagaagaacttgcagcactagatgcgattgatgcggggaagttgtaccatatgtgtaggaatgtggaagttccagcagcggcaaacactcttcgttactatgctggtgctgccgataagattcatggcgaggtgttgaaaatgtcccgagacttccatgcctatacattgcttgaaccacttggtgttgtgggacacattactccctggaatttccccaataccatgttctacatcaaggttgctccttctttagctgctggctgcaccatggtcctcatgcccgtctgagcaaacacccctctctgctttgttttctgctcatcttgctaaattggctggaatcccagatggagtgatcaatgtagtgcctggatttggcccaactgctggtgctgcattaagctcacacatggatgttgataaggtcagctttaccggttcaacacaaacaggccgtgtgataatgcaggctgcagcaaagagtaacttgaaacaagtttcacttgaattaggaggcaagtcacccctcataatttttgatgatgcagatatagacaaagctactgagctagctctactaggcatcctatataacaagggagaagtttgtgttgcaagttcccgtgtgtttgttcaagaatggatctatgatgaatttgagaaaaaactggtggagaaggcaaaagcttnggtcgnntgggatccccttgatcctaagttcaacaaggccctcangttgacaagggacaattttgaaaagttctttcatatattgagcatggaaagaaag

SEQ ID NO: 20622 - DNA, 627 bp, Glycine max
gcgaaaagggaggatgctcagccgctgtgttttgaggtgaccgaacgaacagatagagggtttgcaggttggtggggcagagagaaagatggatccatgcctaacttcttgcggtttgaggctccttgtgttctacaaaacaacagggaaattgttgataagaatggtgaaataaactacttcagtggcctgttcctttgtagaccaaccgggcaagggaaatccatgctgatagtgaggtttggaggaacaaaaagatctccactagcaaaagtgtttcctaagtggtacctccaccagaatgcaagcaaggtgtttgagcaagacatgggattcttgtcatcacaaaatgaaattcttctgagagaaaaggttccaacaaaggaactatacctgaatctgaaatcatcagacacatgggttgctgaatacaggaagtggatggacaaagcggggcatggaatgccatatcattttggtcacagcactatctctttgcctaaagagcctgctgtggttgaacatgctcctgcgggactcgtcgcgggacaatcagcttcttcacctaccaaggggggcattggtacaatgcatgccccaaatttcgccaacagatattttaggcat

SEQ ID NO: 20623 - DNA, 667 bp, Glycine max
accaaaagcactatagtgaagggggtcaagtcaagtgcccaagatgtctcttccaagcccaagattgattctttagctctcaagaagaagctgaacacctcaatcaagcgcccgcctgattctaagctgaagtctgtcaccaccactgtcacaaaatctgaggtgaaatcaaaaccggtaactgcatcatcagcatcgtccaaaacaataacaacgacaactactaccaaaaccaaagtgagagagaagaaagtctatagtctgcctggccagaaacatgatcctccagaacagaaagaacccctgaggattttctatgagtcattgtcaaaacagatgccaacaagtgaaatggcagaattttggttaatggaacatgggttgctatctcctgaaaaagctaagaaagcatttgaggaaaggcagaggaagcaaaaagagcttcgaacaggaactcctgttaaggtatcaaagcctccaactaagtctgcaatgtcacagaaacgtcaacaggtatcaaagatcagtgacataaaagccaccaaaagaattgccgatgagagtgatgatgatgccgatttcgttttaagtcataaaagaagaacatggtaagaggaaggaaagcctttcataatgtttatttaataaaaaaaaaaataaagggcgg

SEQ ID NO: 20624 - DNA, 491 bp, Glycine max
aatgcaaaacttgatagagcttagagatcaagtaattaggatatgggaacttctgcgatcctctaatgattatgatccagatcttttactacctatactacaggttcttcagcaacctgaagcacgcagacttggggagcgtgttatgggtgggatcactcaacgtcttgcagcacgctttctgcaacaagtacttcgagttccaatgccagcttcctcatagattttgtgccactgtcaaggtcaacagatgtaatctagataaggttaccatgaacagggaatagaggagctatattcttacaaagcaagaaaaaaatatattctttcaaaattgtttgattagcttgtttgtttggatcctctaatttgcaaaaaatctgtatatattatatactgctttattgatgctgcaagcatcataatcagcttcattatataacaataatgtaatagtgttaattgaaaagggattgctcttggcttcttgc

SEQ ID NO: 20625 - DNA, 406 bp, Glycine max
tgtcataaactactggtcgattagttttataatactataggtttatttagatcttagtggtggttttcagtataatttgcactgccattatagttcatttgttattgaatgaattatatgccatacttatattgttttgtttctttccactcaggttaccatgaacagggaatagaggagctatattcttacaaagcaagaaaaaaatatattctttcaaaattgtttgattagcttgtttgtttggatcctctaatttgcaaaaaatctgtatatattatatactgctttattgatgctgcaagcatcataatcagcttcattatataacaataatgtaatagtgttaattgaaaagggattgctcttggcttcttgcaaaaaaaaaaaaaaaaaaagggcggcc

SEQ ID NO: 20626 - DNA, 1081 bp, Glycine max
aagtttcactctttcctttttcccacttcaccgtcttccccctccttccgctgccttcgatgggtttgaagtagctcaagacaccacagagttccaacaagacgaaccagaaacagaacctgtggaaaaaacagaacaagaggaagagcaaaaggtttctgattcatacgatgctgggaggctctatgttggaaacttgccatattcaatcactaattccgcattggctgagctctttggagaagctggcaccgtggcgtctgttgagattatgtatgatcgtgtcacggacagaagcaggggatttgcatttgttacaatggggaatgttgaggatgctaaagaggcaattcgaatgtttgatggctcgcaagattggtggtaggactgttaaggtaaacttcccagaggtacccaaaggaggggaaaggttggtaatggggtccaaaatacggaacagttacagaggttttgtagacagccctcacaagatctatgctggcaacctaggctggggattgacctcacagggtcttagggaagcttttgctgagcagccaggcgtattgagtgccaaggtcatctatgagagggacagtggaagatctcgaggttttgggtttgtttcttttgaaactgctgaatctgcacaggctgctttggacattatgaatggtgtggaggtacaaggtcggcccttgcggttgaatttggctgaagcaagggcaccttcatctcctccagtaattcagaaaaatgtaggaagcaatgttgaaagctcggaattggtgtctagtgccagcacataaggaaatatggtcgatcaaaattttgcccgcaaaatgcacgtcattcagcttcttcctgaaaggtttctcttggcaaatttcctgtcaattgctagtcactttggtatacactaactagaccttcaggcagttgtgaaatgtacttgttattgaacaaatattgcccatatctataaggggtcgatgttagttacagtttgtaattatgaaagtctagctttcacagtttggtgaactaataattcattcaagtgataattcttttaagtcct

SEQ ID NO: 20627 - DNA, 396 bp, Glycine max
cgaggattccctcaaaaggatggaattgacttcaatgaagttttctctcctgtagtgaaacacaggtcaatcataattcttatgactatggtggcagaatttgatcttgtgttagaacaaatggatgtgatgacaacatttttgtatggaaagcttgatgaggtgatattgatgaaacaacccgaggggtttgaagtcagaggtaaagaggattatgtttgcaaattaaacaaatccttgtatggtctaaagcagtcccccaggcaatggaataggagatttgatgaatttatggctcacatacagtttcatagaagtcactatgatgactgtgtttacttcaaatttccttctaaagttgagtttgtgatattgctattatatgttgatgatatt

SEQ ID NO: 20628 - DNA, 644 bp, Glycine max
ctgacgcgtgggtcggcagatgcgaggggtgagggggcgtgtacattataatcttaaaaagagtgttcttgtcactccatcagacaattggctccgctgtgatgattctttggtcatgcagtttttggagataaaaaatggatataactatttcagatatgtacactcgctatcctactcccaatctcagagagcatttgaagctgccaaagcaattaatgacataaatggcctagcgagcatattacagcaccgtccttatcatatagattcccttctaacaatggcagaatattttgcggtattgggtgaacaacagatgtctgcagatgctattgccaggtgtctatatgcccttgaatgtgcatggcatcccatgttcaatccattgcagggaaattgccggctgaagttcaaacatgatacaaacaaacctatattcacagctcttttcacccacatgaaaaacttggacaggcgtggctgtcatagatctgccttagaggtctgcaaattgttgctttcgctagattctgatgatcccatgggggctattttctgcattgactactttgctttaagggctgaggagtatgcatggctggagaagttttctgaagaatataaaagtgataactccattt

SEQ ID NO: 20629 - DNA, 457 bp, Glycine max
  unsure (1)..(457): unsure at all n locations
caaacctttgcttcactccttcaacgccgtactatcgtttccgagaaccatctctttttttctcgccgctcttccccgcaatcgcaacgcgcgttttgcttctccttttatcgcagattctctgcgtcgtcaccagactcacttccgtgattcgaacgcggcgtggggaagagaaaaccctaatccgacatggggaagaagaagccgacggcgagggacgaagagaacgcgtcgcagcaaggcggcggcgggaaatcgaagaagaaggcggttgtcatcgacgacgatgagtactccgtcggaactgagctctccgaggagcaggcaccggcgtcagaggagaaacccgccgcggcgggaaagaagaaaggtaagaaaggtaatgctaaagctaagaacaatgatgatgatgttgatgaggatgnngatgtttctggaattgtgtttgctgggaaga

SEQ ID NO: 20630 - DNA, 349 bp, Glycine max
gaaggacagcaccacctgattttctagccaagttaacgttcctcatatggaatcaccatgaacagatcaagcacatagatactgttagagcttacacctttggtgcacattactttgtggaagttgacattgtgttgccggaagacatgcttctccaccaagcacacaacattggtgacacactccaagagaagctggagcagcttccagaagtcgaaagggcttttgtgcacgtagattttgagtccactcacaggccagagcacaagaccatggtgtgatgatatgccatgggacaatgatggcatatcttagctttgctaattttcttagttattttatgcaagtc

SEQ ID NO: 20631 - DNA, 508 bp, Glycine max
tcggttgcattaagggaatgactttgtgtgttgtttattcatcaaccactaaaaacatggcagaggaatgtcttactggtgtctccattgttaattacacaaagtgcaccatccacatatacaagcgagacacaataatttcctttaatgatgaagattggcagggcgtaatatcaaatctaagacccagtgacaatgtggagatttttgtagttcttggtcatggattgacggttgtgaagacagctctctatctaatatatgatgatgagtcaatcactgtgaaaatggagccatcacctaatgtgataatggagtcatcgtctaacatgaaaacagatccatcacctaatgttaaaatggagccattatctaacatgaaatcagagccatccatgaagccaaagaaaaatatttttgctagacttatacagagaatgggagaatgtacatgcatgaggtgaaatagaggcttcaacaattttttactaggtctgccaatgccatt

SEQ ID NO: 20632 - DNA, 379 bp, Glycine max
gaaaaaaacaaaaccagagagaaaaacaggttcctttgaagtttgatcaatggcgtcaaggaggagctttctttcaaacccgaaccgttacatctttccgacaacctcagacacccatttgagcccatcccaagagggcaagggcatgttcgagttggacgaggccgagttatggaacaacaaccactcttcagccacaacggatcagagcaaaaaggggttaccctctccgggttcccgttccgttctgaagaaagcttcaaggaacaacaacaatggttggagaggcagaatcaccccagcgtcattgcctgtgaacatacccgattggtccaagatcttgaaggaggactacaaggagcaccccaagtgggagagt

SEQ ID NO: 20633 - DNA, 519 bp, Glycine max
gattgatggttggctgtctgaggttaacgtaacttgtgcaggttttgaagcatatgctaggaaggagcgttcaaaactttatttgtgttgcattactgaattaattcttatgatataaaattgttctatgtttgaatatcaattattgataaatgtcttgttttcatgaatgaatgcaggcattgcaacttctgctcgagtttttctttgctgaagtttggacaagccaactgttacgggactacaaagagttttaaagactaagtaggaaatcctaattagtagggatgcctaatcaaagaacatttatgatactgtacagatacgacagacactattcaaagatgaaaaaatgtgaggtgacaagggcaaataaagggggaccttattagggatacttatcagcacaagcaccagcagcatcaatctttctaacatgcaaattgttcctctttgtattcattgtattcaaagattgaaaatgaattctctcctaatagccatgttactgttttctgc

SEQ ID NO: 20634 - DNA, 814 bp, Glycine max
tttgtgttctgttgctattttcaggttaggtgacagctgctggaagaagaagttgccactttcaaatggtagagttgatgccacacttaatggtgcaaaggccttcatgaaagtgaggaaagacaactcctccttggttgttcctccaatcattgtgaaaaagaatagtaggaacactttgattgtgcttttgagtggttctgcttgtctcaatctaatattggttggagcaatctgcttgagcagtttttatgttttttggtgcaagaagaagcttagaagagttggcaaaagtggcactaatgtggaaaccaatttgcgttgcttcacttatgaggaacttgaagaagctaccaatggctttgagaaagtgctaggaaagggagcttttggtattgtgtacgaaggagtcatcaacatgggttcccttactctcgtggcagtaaaaaggttgaacacttttctcttggaagaggttcaaaaggaattcaagaatgaactgaatgccattggccccactcatcataggaactgggtccgtttacttggattttgtgagactcacgacgaaaggttgctggtttatgagtacatgagcaatggaactttagcaagccttgttttcaatgtggagaaaccaagttggaaactgaggctacaaattgcaactggggttgctagaggacttctatatctgcatgaagagtgcagcacacagatcatccattgtgacataaagcctcagaacatactccgtgatgattactataatgcatgaatttcagactttggattggccaagattttgaacatg

SEQ ID NO: 20635 - DNA, 614 bp, Glycine max
  unsure (1)..(614): unsure at all n locations
ccttttccccaccacattatttttccttctcctacttccacaaaatcggcattctatcncacaaccactattgcgtagctccaaatttttatatctagctctttcttatgctagaatttgattcctcttcattcttcaacaactccaatgtattccttagctcaacacaagtatacaccaaacttccaccaccaagtttgcaagaaccatccaccccgtcacccgtctcgagtacattgttctaccacaaccactaccaccaccaccacctctaggtctaagtccaatgctaagtcattggtcattgagacccggctcgtgccggtgccgccaatgccaacggtcgttaccactgagatccaccgtccaatgaacaatgacccaagtttgcaatcaacatggtctcatagagcttgggtggcagctggatgctcaactttggtcatttccttgggagagtccataaagggtgctactgatttgaacatgtgggttgagcccattgtggcaggttgggttggatacatcttagctgatcttggatcaggggtttaccattgggccatcgacaattatggcgatggctcaaccccaatagttggggctcaaattga

SEQ ID NO: 20636 - DNA, 516 bp, Glycine max
cggctcgagcacatatttaatgtaaacctccaagtttctttgagaattcgataacaacacgcatcccttttccccaccacattatttttccttctcctacttccacaaaatcggcatttcttcccacaaccactattgagtagctccaaatttttatatctagctctttcttatgctagaatttgattcctcttcattcttcaacaactccaatgtattccttagcccaacacaagtacataccacgcttacacctccaagcttgcaacaaccacccaccccaccacccatcgtctccagtgttttgttccaccacaaccacaacgtctagggacaagcccaatcctaagccattggtcattgagccatggctcgtgccggtgccgccaacggtggttaccgccgataacccccgtccaatgaacaatgacccaagtttgcaatcaacatggtctcatagagcatgggtggcagctggatgcacaactttgctcatttcattgggagagtctataa

SEQ ID NO: 20637 - DNA, 393 bp, Glycine max
agaatactattgctgcgtaatttcactgtgctgctctacgtatccaataccacacaactctgttcaggtgcaaccgcagcctccatgtcagccctcccacgggcatgcttaattatacaaaatgccccgactacgatctctactacaagcacatcatcacggctgatgatgtgtctcggagttctttggtggcatgtacagaggtccagcttccaattaaagacgtgcctgacgctataaacccatttacctttgtaactgcagatatcatcattcgagtagacttaactgatgaatgtgcagattgcaactatcgccatggagggcagtgcaaacttgacagcacagagaaattttgttgtgccaatgcagttataaagaaaggggtggggt

SEQ ID NO: 20638 - DNA, 478 bp, Glycine max
ccaaactagcaaaggaatcttccaggatttgacttgaacatattggagctagctgaaattctcttagcaaaaatggactagaatatatgatgtatatcatattataaggatcatgcattgtgctatttggggttggttttcatgacaatcctagtggaagggaacttctatcagagctataatgtgttcatcggttaacttgctaccaagtctactctttaaaccagattactaaatactaataggagaggttatctagttgttccattgtacatgattagtttgattctggcactagttactcactcagatttccaactgcagttgctagcaattgaaattttggatttgttgtgtagtagacacatcttattacaaagggtcagcaacatctcagtaattgattgttaaaagttgtgacaggttgacacttttggtcatatgagaaatgctgtaaacgattttttaggcctgggac

SEQ ID NO: 20639 - DNA, 902 bp, Glycine max
cgcgtacgaagtcggaatcggctggctagcaagggtgttgtagtatagttagagatatcactactacaccaccctgcatagtttgttcagctataatactacttgagcttctttacctacttttcaaacctacattgcacacaaaatggcaacatcttggtcatgttatctacttgcattgcttctttttatgtcaactattgtatcagagagtagagtggcaaggaaggacttgggcctggaccttggtgggttgggggttggacttggactgggtttgggcctggggataggaggtggcagtggctctggagctggtgccggagcagggtctggttctggttctggttctggttctggttctagttccagttctgcctcaagttcagcttcctcatcttccagttctggctctggcggctccggagctggctccgaagccggttcatatgctggctctcgtgccggatcaggatctggaagaagtcaaggaaggggaggtggcggtgccggtggcggaggcggtggtggtgacggtggctcaggctatggtcatggtgagggctatggccatggtgagggttacggtcaaggcggtggtgattaaggaattatgttggaaaatatgtaatatagtttactcaaatgaaagaaaatggtcttcagtgttataatttgtgtaataaaaaagtagtacgtggtctgtactgtgttgtctgtaccaaaataataaacacatgcatgtaagggggtggacaccatgcatcctgtgtgttttgttgaagaatcaagtgaatttcagtttgaaacagtttacaaaatttgatccatgactctaattaattaagtctgcctatttcatgattaaaaaaaaaaaaaaaaaaactcggactagttctcgt

SEQ ID NO: 20640 - DNA, 471 bp, Glycine max
catatatgtttgtatataagagaagtggaagagggagagtgagggaaggtaacaataagggaaatgaagaggagcagagatatggagaagagatcagagattaaatctgcaattgaagagttgtctatgctggttatagtcaaacctgaaggaaatcatgtcatgattgctcacatccccaccaagcctttcctgtctctatgtcacttggttctacaagttcttgataagataggaccaacgatggccgttttgagacaagacgtttcccagaatattaagaggttggaagtgatgcatgaattgaatccctcaatgaattcaaatttggttgaaatattgaaatcagaagctaccaaaggcaaagcaaggaagaggtctagttgtagtaaagcctttctttggctcactaggtccctggatttctcctcagcattgttacaatcactagaagaggtccgtttaaggcct

SEQ ID NO: 20641 - DNA, 441 bp, Glycine max
cttggttctgggtgtgtcctttatttccaacatagctactttcatggctgtgactacctcttccagttccaccagcggcttcttcagtctccggtcaccaaattcggtcgattccagcagggtctcctccacccacggctcttcctccgcttgcggaaagttcgatggggtggccatgtggttcatcaacggcgtcacaaccgctttcttcgcctccttgaaccgttgctcttgcattcgcatcgccaccgaagaagacggcgacgatgccaacgacttgccgttgatgctcaacgacggaaacctccgccaggatggcgtcgtcgttgcgtgcaccaccagcaggagaaggacgggtaaagggaagaagagtggagctgttctcgtcgacgacgactgaaaaaaagtggtaacaaatacgtactacgtaccctttgatga

SEQ ID NO: 20642 - DNA, 353 bp, Glycine max
ggttgattaaattttgtagagtccattagttacgaaagctgaagcttcttaagcacttcccttggttttcggtgtggttctttccaacatagctacttccatggctgccactaccacctcttccagttccagctgcggcggcggcagcttcttaagtctccgatcaccaaattccgatgagtccagggtctcctccacccaagcctcttcctccgcttgcggcaagtttgatggggtggcaatgtggttcatcaacggcgtcacaacggctttctttgcctccttgaaccgttgctcttgcattcgcatcgccaccgaagaagacggtgatgatgccaatgacttgccgttga

SEQ ID NO: 20643 - DNA, 556 bp, Glycine max
aaccccttcatatccctcacactttcttcccttttccccctctcttcatcttttgcttccttcgtatagggataagagagcagcaagtaatgatggatgcgctgataaaggtgcagttcaacgcaccaaaaccataaaaagcgcttctttcgtcttatggcatgtctgaggaggaagaagcactgcgtcaaaggccaacatcgttgatttctttcccaccccatgacaattcttcgcttcttctgccccttctttatactcttcttcactccaatagcttctgtgcaagcgttcaccggaacctatggtataaattatggtaggattgcaaataatattccttcacccgatgaagttgttactcttctcagagcagcaaaaataaggaatgttagaatctacgatgctgatcacagtgttctcaaggcatttagtggaactgggcttgaaattgtagtggggcttcccaatggccagctgcaagacatgagttcgaatccagaccatgctttgaactgggtaaaagaaaatgtacagtcatttcttcctgacacac

SEQ ID NO: 20644 - DNA, 423 bp, Glycine max
gttctgctttgccttttacttactcaacaacaactcaattataaaagccctgcatatccctcacactttcttccctttccccctctctcttcaacccccaaaaccaaccctcatcttctgcttccttcttatcggagattagatagcaagtaatgatggatgcgctgataaaggtgttgtagttcaacgccgcaaaaccataaaaatcgtttcttttcgtcttatggcatgtctgaggaggaagaagcactgcgtccaaggccaacaacgcgtttcattttcaaattttgatcatcctcgccagtcaaatatgtacttgattcttcgcttcttctgccccttctctatactcttcttcactccaatagcttctgtgcaagcgttcaccggaacatatggtataaattattggaggattgcaaa

SEQ ID NO: 20645 - DNA, 458 bp, Glycine max
aaacacaacaagaagaaagaagagggtatttctgcagcaccaccaccatcaactaccgaatgtgctctttctcctttctcctttcaacaaacaacaaccaccaccaccctctgtcgccacatatttaacaacaattactacaacttgactaaacaaaactgtttttctttttttcttttttttttaccatggaactggctttgagtttgggagacacgtccaagtcttttacctttctcgacaaggccgcggtgaatttacccaccaacaaggacccacctgggttgttcagcttggcgccgagtttcgccgccaccgccgccgccgccgataaaagaagcgatgctgctgagaggaggggtttttcttcagatccaccggttcagctcgaccttcttcctttctctccggttctcagaccccaacaacaacctccctctcaacttcggatcccttgg

SEQ ID NO: 20646 - DNA, 765 bp, Glycine max
gtgcagtgaaacagtagtagaagaagaaaacacgagttacgcacagtcccggtgccgccaccaccaccattggtttcagtcaactaatggcaaccactctcactccaatccaaaccctcaaattctgttctcccaatcccaaacctctcttcactcccaaacctctcttctctcccaaacctccttccatctccacacctcacaccttccgcgccgataaactctctctctccgtctccgccgccacctcctcctccaacggtcctccctctcctccctcccccgctcgctcaaaggttcgtcgacacacgatttccgtgttcgtcggcgatgagagcggaatgataaaccggattgccggcgtgttcgctaggagaggatacaacatcgagtccctcgcggttggcctcaatgaggacagggcgctcttcaccatcgtcgtgtcagggactgataaggtgctgcgccaagtcatggagcagcttcagaagctcgtcaatgtcttaaaggtagaggatctttcgagggaaccgcaggtggaacgtgaactgatgctcataaaagtgcatgcggatccgaagcaccatgcggagttgaagtggttggtggacatcttcagagctaagattgtggatatctcgcaacattcggtgacaattgaggtcactggagatccagggaagatggctgcggttcaaagaaatttcagcaagtttggaattaaagagatagccagaactggaaagattgcattaagaagggaaa

SEQ ID NO: 20647 - DNA, 377 bp, Glycine max
atggggacgaggttttgaggtagtggaaatagagaggctggaggagagtttgttggagaagaacgagcgagaagacgaggaagcggtgctttatgcggcgtcgtttcgggaaatggaagagggtttcgtcaagtaccaaacggtgcagtgggtgctttactcggtgttgctgattttggcgtggggcattggaattctgatgctgctttatcttcctgtgagaaggtttatacttaggaaggatgttcgttccagaacgctctatctcactccgaatgccattggttacaaggttacgaggccggtatcgtttccgtgctttggagtgctgaagaaggagatacacgttttgctgcactctgtggcagatgttgtga

SEQ ID NO: 20648 - DNA, 670 bp, Glycine max
atcgataaaagcaaagggcatctgtccatagaatagaattgcaagtattctaccaagaagtaagaagcacacccatccaccgttcaacgccttctactaatacttctcctttctctttcccaaacacaaatcactcttctcttctaattcttatcacaccactcccctctttaatcatgcaacgctctcactctttccctctctagagacctcgccctgccatgtcatcacaaaccgcgcccacggaggcgccggagccttatacgccgcttctccgctcccgcaccgatgccggccgaggtcccgcccccgcgctggcgctccttctcggccgcgccggccgccgtggcccatccatgctggtacgtgagacggcggcgcgtgagctcgaggagcgccgcgctgactggggctactccaagccggtggtggcgctcgacatgtcgtggaacatggccttcgtggtcgtctcggcggctatgctcgcatgcaccaccttcgagcacccgaccacgccgatccgcgtgtggatcgttgggtacgcgctgcagtgcctcgtgcacgtgttgctcgtgtggctcgagtaccggcgccggagccggagggactctcgcagcggcagccagagggcgcgggacgtggagagcgacgccggcagcggcgacgatga

SEQ ID NO: 20649 - DNA, 786 bp, Glycine max
tttttgcgtgggtggattctgaaatcgttgagagcactgacatggccgatatcactgttgatgcaaggagttttagttgggcagtggacagtgcgataaagagtgagactgcgtcaatttcgggagaatcccgaatccatagtttttgttccgtagtggacaatgccataaggagtaggactgcatcagatttgggaacatctccttctcctgtccatagtcttgcttcggcagtggccaatgcaatgagcagcagtagtgctgcaccattttcacaactggaagtggtgcccaacgccactggacttgttcctgcacgattattcacctgggctgagcttaaagcagccacctacaatttctcacctcacaaccggattcgtcattttggaagctttggctttgggtacagaggcaaactcgttgatggtcgtgaggtcgcaatcgttaagggaacccagtttggtaagtctgaatttgccatcttttcccgtttagaccataggaacttggttgggcttgttgggtactgtgaaaacagagatgaaaggctgtcagtttacgagtatatgaagaatgggttgctgcgtgattgcttgcatgataagaacaatgtggacaaggatagcagtgtgttgaattcgtggaaaatgaggatcaagattgcttgggatgcttccttgggaatacaatatctgcataattatgcaaatccatctattattcacagggatatcaagtcttccaatattcttcttgatgccagttggacggctagagtatttg

SEQ ID NO: 20650 - DNA, 401 bp, Glycine max
  unsure (1)..(401): unsure at all n locations
tatgaaatcgctgagagcactgacaaggccgatatcactggggatgcaaggagttttagttgggcagtggacagtgcgataaagagtgagactgcgtcattttggtaagtctgaatttgccatcttttcccgtttagaccataggaacttggttgggctggttgggtactgtgaaaacagagatgaaaggctgtcagtttacgagtatatgaagaatgggttgttgcgtgattgcttgcatgataagaacaatgtggacaaggatagcagtgtgttgaattcgtggaaaatgaggatcaagattgcttgtgatgcttccttgngaatacaatatctgcataattatgcagatccatctattattcacatggatatcaagtcttccaatattcttcttgatg

SEQ ID NO: 20651 - DNA, 575 bp, Glycine max
tttttgaaaagaaaaaaaagaaaaaaacagttagagtggaaaatggcaggaagcagcattaacagaggagaaagatggtctctcaatggaatgactgctcttgtcaccggcggcactcgtgggatcgggcactccatagtgagtgacttggctgcgtttggcgctgcagtgcacacctgttccaggacccaaacagagctcaacaaatgcttacaagagtggcagagtcaggggtttcaggtaactgggtcgctctgtgacgtgtcctcaccaccccagagagagaagctcattcaggaagttgcatccaccttcaatggcaagcttaacatctacgtgaacaatgttggaataaacattagaaagccaaccattgagtacactgctgaagaatattcacagattatgacagttaatttagactcctcattccatctgtgccagcttgcatatcctcttctgaaagcatctgaaaagggaagcattgtgttcatttcatctgttgctggtgtagtgagtttaggtactggagctgtctttgcagcaagtaaagctgcaattaatcagcttacaaa

SEQ ID NO: 20652 - DNA, 243 bp, Glycine max
aagatagcagagcagaggcgtttaggctctatcagaagactacttccctatggattccttggttcaagtcgtgctcctttaggactcaaatctaaggatgcttgattttctttttccccttgttcgttagttgattgtaccaccatcttcttaattttgcctagtttgttcgattatgtaagagagccatgtgtgtgctccatgatttttgtataatatagcactttcctatagactatctca

SEQ ID NO: 20653 - DNA, 397 bp, Glycine max
caaggctattcggcggcacggtcatcgtaaagggcaaaccaccccttcgtccctccggcgaaaactccggcgtccgctttgtctgcacccaccgcaccctaatggaccccgtcgtcctctcctccgtcctccgccgcaaaatccccgctgtcacgtactccgtctcacgcctctcggagatcctctcccccatccccaccgtgaggctcacaagaacacgcgacatagacgctgaaaagatcaaacgtgagttatccaaaggtgacttagtagtgtgtcccgaaggaacaacatgtcgcgaaccctttcttttaagattcagtggtcttttcgccgaactaactgaccggatagtgcccgtggccatgaactatagggtagggttcttccatgcaac

SEQ ID NO: 20654 - DNA, 473 bp, Glycine max
tccttggtctttgcggaaacaaagtagatgctatcgatcatcacaacactgaaattgacaaactgtcaaaggaaatagcgttagagagggataatgtcagcaatgatcccaagtccatcatgcctgcggcatttgtttcgtttaaaacacgatggcgtgctgcagtttgtgcacaaacccaacaaaccagaaacccaacaatgtggttgacagagtgggcgccagagccacgtgacatctattggtcgaatttggcaattccatatgtttccctcaccgtgagaaggttgatcatggctgttgcattcctttttctcaccttcttttttatgatcccaattgcaattgtacaaggtcttgcaagtattgagggaatccgcaaaagagcaccatggttaaatcctcttattgatattcctttcattaagtcgttcattcaaggttttctacccggtattgcattgaagcttttt

SEQ ID NO: 20655 - DNA, 374 bp, Glycine max
gccccaaatgatgaatacatcatgagcgggtctgatcgtggccgtatattcatctggaagaggaaggaagctaagctgctgagattaatcggaggtgatcaacacgttggctagtcaacttgaggcccatgcacatatacctattctcgctacttgcggtatagaaaaaaatgtgaaaatctgggctcctctagggaatgatataccttcacttactgcgaatgtgaaagacataatggtgacaaacagacagggcggagaagaccgatcacgggtaacccttactcctgatgttataatgcatgttcttcgcctgcagaggcggcagacattggcgtatattgaaagacgacataatacggcagatatttgta

SEQ ID NO: 20656 - DNA, 840 bp, Glycine max
cgggaagtgaagatcgcaaagggaaggaattgcatattaaaaccgaagatatgctgttaaagcttcaagctaaactggtttctcctttagatgcctgcaaccacatcatacagtttttcaactacgtggatggcgtgtcagactttcctgcttctgctatatcctcaaaggatctgtcaacatctaaggctaaccttgcaatggacacaacaacatcatctcttccacaatctacttctctaatacaaaaatacacttatgacatgagctacactaggtcaaatgatcttcaacaaaaagacctcaaatcctccctcttaagtgaacataaaaatgagaagtgatttccacttagaggctctattagggaaaggaggagggctcgaaagcttggagagcatcgtgcggataaaagaggccgaagcgagaatgtaccaaaacaaggcagatgaggcaaggagagaggcagaagggttccagaagatgatcaagacaaaggctgcacagatggaagaagagtatgcagaaaggattggcaagatttgcttgaatgaggcagaggaaaggaggaagaacaaatttgatgaactcaatgtcttgcaaaattcccactacgattacttcaacatgaaaagcagaatgcaagatgagatccatggtttgttgaagagaatggaagcaacaaagcaccaacgggtttaatatacatattttcttcttcttcttgtttaatgttttactgtctagaacactagtaaaatgtgtgtactttattgatctagtgccgatttgtattttgcttggttttattaattaaaaaatgtaccctttttattgtta

SEQ ID NO: 20657 - DNA, 751 bp, Glycine max
gctctttagggcctatcagtgcttccttggcttcttcctcgtcatctctatcgttgtatccgtattcacagatcattatctagaaaaagatggcggctgagctagtcaatggtgcaacaagcgagaagctggctgaaactgattggacaaaaaatattgaaatttgtgagctagttgctcatgataaaagggaagcaagagatgttgttaaagctataaaaaagagactaggaagcaaacactccaatactcaactctttgctgtcatgttgctggaaatgttgatgaacaatattggagagcatattcatgagcaggtgattgatactggaattattcctattctagtaaaaattgtgaagaaaaagtctgatttgcctgtgagggagcggatatttctcctactagatgccacacaaacatcccttggtggtgcatctggaaagtttccacagtattataatgcatattatgatttggtgagtgctggagtgcagtttgctcaaagggatcaagtggtccaatcaaataatcctagttcacaacctagtaggactagtaatgtaccaaacagggagcaggcctcacctagacatgaagcagttgctcagccagcagagtcccagactgtccctgaatctagcattattcaaaaggctggcaatgcattagaaggactaaaagaggtccttgatgctgttgatgctcaaaatcctcagggagcaagggatgaattcacccttgaccttgt

SEQ ID NO: 20658 - DNA, 364 bp, Glycine max
ttaaaagagataaagcaagataattggtttggtggcacttgatcttccgtggtgaaatgaaatgctgaagctctttagggcctatcagtgcttccttggcttcttcctcgtcatctctatcgttgtatccgtattcacaggtaattcttgacatgctgttcagatttcgattgctattgtaacatgatgacatttttcactttggactgagctcattttactggaagatcattatctagaaaaagatggcggctgagctagtcaatggtgcaacaagcgagaagctggctgaaactgattggacacaagatatcgaaatttgtgacctagttgctcatgatacatgggacgcaagagatgttgt

SEQ ID NO: 20659 - DNA, 315 bp, Glycine max
atgaaatgctgaagctctttagggcctatcagtgcttccttggcttcttcctcgtcatctctatcgttgtatccgtattcacaggtaattcttgacatgctgttcagatttcgattgctattgtaacatgatgacatttttcactttggactgagctcattttactggaagtttttcttggtctccgttcatgctattcataaagatcattatctagaaaaagatggcggctgagctagtcaatggtgcaacaagcgagaagctggctgaaactgattggacaaaaaatattgaaatttgtgagctagttgctca

SEQ ID NO: 20660 - DNA, 502 bp, Glycine max
cttgtgcatccctcaactcctgttatggcttccttgctgagtggccactcttctgcaacaaagttggatgggtggtggtggtggtggggtgaagggtcgtgatcatgatcaaggtgacaatactttccatggcttggcaccgctacaagggttgcgagtggaaggggatagtaataataatattggctcaaaagaagtgaaaggtgaaggacaaaacaggtttgagtggagcaataataataacaacaacaacaacaatggtggtggtggtcaaaaccagatggagcatgtgggtttgtctgatcctaattcgctttattggaacactgcaacgggtttgggtgcttggagtgatcaacctaacaattggtccttcagtcacttctctgatctagaaaaaaagatgaagcatctttttcaaaaagctacatatgaagaagaagaaagtctctctccctcgtttaattaaggtcatcttttggtccctttaggcttaggtttt

SEQ ID NO: 20661 - DNA, 499 bp, Glycine max
ggtaatgctgcattgacaatgctttttcatgcacctataaaatgcacatatttgtgtagcaatagatatatctctcaatctgtgtgttattaccttaggagttaggtaaatatggcatactctcaacttcaaaagctggaagctaacgtgagtatcaaggcttcagctgaacagttctatgatgttttatgccacaagacacaccaaattcccaaaattttccctgaaaaagcactgtctgttgaaattctgaaaggtgcatggggcaccgagggatctatcatctcctggaattatttatacgagggaaaagtttgtgtggctaaggaggtgattgaaggcatagacaagaaaaacaaaaaaatgagcttcaaggttatagaaggagacgtgctgggacattataagagcttcaagtttataatgcaagttactccaaaggaaaaaggcagcgtagtgcaatgtgtcgtggaatatgagaaacagaaagatcacattc

SEQ ID NO: 20662 - DNA, 540 bp, Glycine max
aaaaaacagatggccaaatacttggaagtagtgttgcatctatttctatccaacttttgaggaaaggtggtccagatgcagtttgtcagcatctatgcagtttgcagaaggggtcaatatgcatagttaatgcagctagtgaaagagacatgactgtattttcacttggaatgatcaaggcagaattgatgggaaaacgtttcttgtgtcgcactgctgctagttttgtttctgcccttatgggaatcatctctaagcctccaatattgccaaatgatattggaatagctagagaaaggaatggtggtttgatagttgtgggatcatatgttccaaaaacaacaaagcaggttgaagagctcaaattacagtgtggtcagttcttaaaaagcattgaggtatcagttgaaaaacttgcaatgagtcctattgaggagatggaggaggaaatcagtagagcagctgaattagcagatgtatatcttaaagctcataaagatactctaataatgaccagccgaaatctcataactggaaaaa

SEQ ID NO: 20663 - DNA, 378 bp, Glycine max
tttctataaatcttcatacatctcctttcccacttgtcttctctgctttcgaaacaacacgcacaaaacaaagccttctttttcttgtgtgatctcacaagcccctaaaagccaccatgtcttccttcaagagcaaattccaagatgagttgattgccaatgctacttatattggcaccccaggaaagggtatccttgcggctgacgagtcaaccggcacaattgggaagcgtttggcgagcatcaacgtggagaatgttgaaacaaacaggcgcattcttcgtgagctcctattcactgctcccggttgtcttgagtgcctcagtggtgtcatcttgtttgaggaaaccctctaccaaaaatcagctgcaggagtac

SEQ ID NO: 20664 - DNA, 721 bp, Glycine max
  unsure (1)..(721): unsure at all n locations
agagctatgacgncgcatgcccgccttccttagcctcggatttcggttcaagtccacttttgacactgccaagtgccatccattctggggctttatgttattacagcaaactgaactgaagcaagttccatccatgtctcggcttcaaaagtcaacaggtcagcagcaaatgtttcattccctacaccaaattctgtccccatacatgtcaagtgttgttgtatctgtgttattgtggcatgtcattgctgtgcttttggtttcaaatttggcctttgcttcaagccttgaggaaacaaatggacacccaaaacacaaaggtgaggtgatctatgcccacaatggagctgttgccactgatgaccgtagatgctcaaggattgggaaggatgttcttagagaaggagggcatgcagtggatgcagcagtggcttcttccctcttgttgggggttgtgagtcctgcttcaagtggccttggtggtggagcctttttgcttctcaggttgaataatgggggggcaaaggcttttgatatgagataaactgctcctgctcttgcctccaaggatatgtatgctggaaatactactttgaaggccaaaggtggcctatctgtagcagttcctggagaacttgctggccttcatgaggcgtggaaacaacatgggaagcttccatggaaaagacttgtaaagccagctgagattctagcacgtaga

SEQ ID NO: 20665 - DNA, 685 bp, Glycine max
taggtggctctttgcaagacaaggtcatatatggagctgaagattgtcgtcaaccgtgtgctccttttgttttgaatgcgaatgaattgtttggtttcactcaagggtgcttaccgatgtataggtgggatgagctaaacagctttttccaaaaagcaggggttaaggttgtctttggattaaatgctcttgctggaaaatctatgaagtctggttctgctgttggaccttggaactacaccaatgctgaatcgttaatacgatacacagtcagaaagaagtacaccattcatggttgggaacttggcaatgaattgtgtggaagtggaattggagcaagtgttgcagcagatcaatatgcttctgatgttgctgctttaagaaacatagttgaaaatgcatatagagggattgaacctaagccactagtcattgcacctggaggcttctttgactcggattggttcaaggaatttataagcaaatctggtaaatctgcagacgtgatcacccaccacatttataaccttgggccaggagttgatgaccacctaactgaaaaaattcttgacccttcctatctggatggagaggctaacacattcagcagcctcaaaggtatacttcaaagttcatcaacctcagtaaaatcatgggttggtgaggcaggaggggcttacaatag

SEQ ID NO: 20666 - DNA, 326 bp, Glycine max
ctcgagtacttttccatatgggtacttcgaaagttctcagcattgttttcttcgtgctattgggcgtaggcatatgctccgctgcaagaacactcctcaccattggtggaggtgtgcatggtgagataggtgttggtgttggtgtaggaggttatggtggtggtggaggttcaggtggaggtgcatgactttagagcccttgctcaatatctatctgcaagctggcctttctgctctcaagacaccggattcttttttttaaatgcttggattcattataattggaacaccccccttcaaccctttttcaattaaatttttataaa

SEQ ID NO: 20667 - DNA, 911 bp, Glycine max
agttggaggaaggaagtcgggcagagcatttgcaagcgcagaagtgtagggtgcgtctcgatcacttagaatctgctgatgcagaaaatatgtcagaatggaataacactcgcatgaagcggattcttgttgattacatgttgaggatgtcatactatgacactgcagtgaaacttgccaaaagcagcaacttgcaggatcttgtcgatattgatgtattccaagaagcaaaaaaggttattgatgctttgcaaaataaggatgttgcacccgccctagcatggtgtgctgataacaaatcaaggctgaagaagtctaagagcaaattggagttccaggtgagaacttcaagaggtcatagcattaagaagaagcggggaccatttgagaagctatcacatatgctaggaaatatcttgcgccatgggtgagccacccacatgaaagaattgcagcgagtcattgcaacactagcttttaaaagggatactgaatgtgccacatacaaggttttatttgaagctaagcaatgggattatctagtggaccaattcaaacaggagttctgcaagttatatggcatgactttagagcccttgctcaatatctatctgcaagctggcctttctgctctcaagacaccatattgttatgaggatgattgcacaaaagaggaccccttatcacaggaggctttccgcacactagccatgccattaccatattcaaagcagcatcactctaagcttgtttgctatataactaaggagttaatggacactgagaacccaccgcaagtcttgcccaatggatatgtttatagcactaaggctcttgaagagatggcgaagaagaataatggtacaatcatctgcccaaggacgggtttagtttgcagctacacagaactg

SEQ ID NO: 20668 - DNA, 393 bp, Glycine max
caagtattttggcttttatactcttgccattgctcggtatctcaccctgtctcactagctcgcatcctctcatagtctctttgcgccctctctcgctcgtgtcgccgacgaaggtgtccaacgccgctgttgaaggtgatcactgccgccgtcgaaggtgtccagggcagccgttgaagcttccttccggagaagaaggttattggttacatatgggtgacgattctcgcaccattgagaacacgagggaacacgacgagaccgtttgcaagcccgacgatgatgaggaaccaggctataacgcttcaggttttgctgccgcctctacaccaggagaagcgaagcttggtgtcgtgtcgccattgatcgaaggcatgccgctttcggtgttgg

SEQ ID NO: 20669 - DNA, 480 bp, Glycine max
cacaatttctgattcctctctctctctctctctcactctaatctaatgttttcttttcatacacacagagtcagactcaaacattcattcaagacacagtgcacaaaaagcttatgctatcccccctaggcccaggaactaggaactaggaaaatgccccattcacaaaaaccctaataactaacctttttcagacccaccaaaccaatcactaccctcaattcccctctttacttattccctcccaaacatcaatctctttcgatttttctcctaaagctacttcctttcgcctttttttctcttctgggtacacctccaccacttcctttcttttccctctttggttcaaatcacgttcttccgttctgatctcaaacacccaccttttttgtttctcaaattgttttccaccagtttcgtgctcaatccgtcagatcagtgttcactgtttggtgattttgaattttgatctaatta

SEQ ID NO: 20670 - DNA, 579 bp, Glycine max
tggaatattgaagagaacaaaggaagtgaaagcaacatgatgcaatgagttacagtgagatacgaaaatggtgttaatgggaggagttggagtaccctcaatctcaatctgttttttgttccaaacaagacccaccagacatttgtgtctcaaattcagattgaaaccttcgctttcacattcaatcactagcatggcattgaccaacaacaacaacaccaacaccaacgaaaggaagcttccaattctgctgtttgatatcatggacacccttgttcgtgaccctttttaccaagatgtccctgccttcttcggaatgtctctgaaggagctcatagattgcaagcaccccactgcttggattgagtctgaaaagggtctcattgatgagatggagctagcaagaaaattttttaaggacggaagggattttgatttagaaggccttaaaacttgtatgagaagtggatattcatacatagaaggcatcgaacagttgcttctttccttaaagctaaataactatgagatgcatgcttttacaaattatcctatatggtaccagttgattgaagacaa

SEQ ID NO: 20671 - DNA, 289 bp, Glycine max
tctcacccttcactttctaatccatctgctcctaagctctcgcatctttacgtccacgatgaagtacgccgtttcgccacttctctttagcgtcggttcctacgctgctgctatcaagcagtcgcagtgctacttcgagcttgaagcctctgggggcgccttgggctacgtcggccagacaaacaatggctatagccgcatcggcggagaccgctctcccgcaacttactacatcagcaacggggtcatcaccgatttcgccgggccacggatacctttctccttgggc

SEQ ID NO: 20672 - DNA, 488 bp, Glycine max
cccactcgttcgccactttccacctttgactgtagccattcacgcttgttcctctcttctttgtccttcctcacccgcttcaaccttttcactcctctctctctctctctctctctctttctctttctctaacctttcagttatcggattcatctccattctccatctcttctcagttctctctctattctaagttggtgagtagttttgggtgaaggagaagaaggagtggctttatctttttgtgggtaaggacacagcagcatgcggtggtggcctagtctttctgttgatgtattccgcaaagggatttcattgaatctgtattgcaaagtgattctgtaatttgtgtggtgtgatttaaaccttttttaatcttctctttaagccgtttccatgggatccaatttcttggttgttcttccttgctacgtccgtcagatcagctgaagggtagcattagcaaacacaaattcatctttctctct

SEQ ID NO: 20673 - DNA, 317 bp, Glycine max
attaaagattcctgtagcgagttcaataataagtcctccaccacactcagatctgcgagtctctgtattgtgtatactgctgcaaattcgatgttcaattcccaatttctattttcaaattctcagaatttcaacggtttaattttaagtgtatgagatctgagcagaaatcataattttccatcgcaccggaagccggaaccctaaccgaacctgatcccaatctccgatgtcttgtttagcgctttctctgcaacccgcaaatggatccgacattctcctccagacgcgcgagtggtttccttcctcacgcgccc

SEQ ID NO: 20674 - DNA, 421 bp, Glycine max
ggagctttttaagcatgtggaaaaccactctattagtgcaacacgaatcaagaacgtgtatgatatttggtctaagaaaattggatcaatgaagacttggccagttgagagcagatatgcagtccatttggagttcatgcttttctgtcttttgcaaggcaatgctgaggatgcataccagcttgctctatgccttgggcaagaaaaaggtgatattggtcctatgtcaaagatgatgatgggtctgacattctatgagttgtggtactcttctatccccaaagaattccagtggagaaattcagatcagtttgacttgcaagagagctcagatatggagggaacttcattcaacaatgagactgtacagtcagagaggtataattcagttgaatcccacatggctgactcccagtcccag

SEQ ID NO: 20675 - DNA, 417 bp, Glycine max
gacacagtcaaatcagtgagtgtctatggttctgccagacgttgtggtggccaaggtgatatcctttctggaagtgtagctgtcttcttgtcatgggcacgtcaacatattttggctgctgattcaaattcgaatctcagttgtaaaaatccaatagttttgggatgcatagcagagcctgctatattgaggaaggcggcatcacttgctttctcgaataagaaaagatccacagtcactggtgacatcattgaatgcttgggcagaagtttggaagacatttctcctgcatgttaattccatgtgagcctttggtctacagatacgtacagttggcaaccaaaggctcacatggaattaacatgcagggaaatgtcttccatgtgagcctttggtctacagatacgtacagttggc

SEQ ID NO: 20676 - DNA, 573 bp, Glycine max
aactttccacattcaacgataaatatttttctgttctgtgctcaattatgcaggcccatatttaaataccgtttatgttcttatatccataattatatttttgtttcagatttaaaaatccaacagttttgggatgcatagccgggtccgctatattgaggaaggctgcatcacttgctttctcgaataagaaaagatccacagtcactggtgacattattgaatgtttgggcaaaaggtagcgtattctggaattaaattatttgcatgattgtgaccgagttatttttaagcttttgcattctttgttgcagtttggaagacatttctcctgcaagttaattccatttgagcctttggtctacagataggcaaccaaatctacatatcctacgagaatcttttttttttttggctgttttccttctttattgagttttctcctttcttgtgttcatttctccccgtttggtctgcatagtctactttgaatatgtaaagtgtgtttgttgtgccatgacagactctctattaaagatttaaagtattagtgtgcggaacagagtttatccg

SEQ ID NO: 20677 - DNA, 357 bp, Glycine max
cgcctcttcttccaaatgttcttccgaaagccatgggcaactccgccactccactctctatcatctctaccctccacagcaattagcttctcaaaaactaaagacccccacaacaacaaattaaggtacaccatattttcatgtctcttccttgcttcatggctccttattctccaccgcttcaacttcacaatattagcaccctccaccaccacaaccacacccacatgcgacggatcaaaaccgttattctacatctacaaccttccctcgcgcttcaacctaggactcctcgaacgttgtcaaagcctcaacatatacaccaacatgtgccctcatgtcgctaacaacggcctt

SEQ ID NO: 20678 - DNA, 415 bp, Glycine max
tatctagtgaaaatgaattgaagggctaaagcatgaaagatttgatattgatctcttggaatttgaaagtttagaaattggaaaatagtagtgagagtattgatgatgggcaagaagaagccacaaaaaactaaggaactttctgtggcaatagctgaagcatcatcaacaatagatgagaaagagcaacatgaagttcaagttcaacctcaacctcaagctcctcgaaagagaggtagacctcgtaagattgttttaaagttggaagaaagtgaagaggaaaaggcacaagtgatagagcatggaggagcacaaggcacagagagttcaatggaaaaaggtacaaccaacgaggaagaaggaacatcatcggcatgcatgagggttacaacaaaacaagaagagatacaacttc

SEQ ID NO: 20679 - DNA, 368 bp, Glycine max
atcttgaccactgctacaattctggataagcaccacagacccatcattgctgatccagaacggagaagggccaatgcatttgagtacggatcggggtttgtgaaccctgcaagagttcttgatcctggtctcatctatgactcaaagccagcagattttgttgcattcctgtgttcacttggctatgatccgaggtcactccaccaagttacaagagacaacagcacatgtgatagggcattcagcacagcatctgatctcaactacccatctattgcagttcccaatcttaaagacaacttttcagtcactaggattgtgaccaatgttggcaaagcaagaagtgtttataaagctgtagtgtcttc

SEQ ID NO: 20680 - DNA, 374 bp, Glycine max
gcagagaattctatttaatacttgttgaatttctattcataagaatagtgacagttactatttttctgttttaatggttctctattcaacaataggttggaatgtcaagctatgggataattttactctgaataggaaaaaggaaaaaagaaaagtagaaagaagtcttttattttaaaacacagttcagtcatgtaataagctcagtcaaatatattcacacatttgatcttgattcagtatttatcattcgaagacatggtttctagtaattcgattgagacatattaatcaaacttttcaaaactattgagttctttcctttttttcatattatgttctgttcactcagcatttggtgctattttctcttt

SEQ ID NO: 20681 - DNA, 953 bp, Glycine max
  unsure (1)..(953): unsure at all n locations
attatacagctatgacttggacagtacaaaagaagaaagacatgctataagaactcaaaatagaaaggagtatgagaaactccgcagacaatgccgccaactgctaaagcacagcaccgggagctttaagtttaatgaaataggtgaaatcagctatgaaggagatagtgcaagtcttattcaagattatggttctcctagttctgaagatgcaacgagtgccagagaatctctttctagtgaggaacgaagcccagatgctgaatattcagatgatgatccatctagtgccttgttggaaggagatgatgctccaaacatcagcaatgctgatgcctctgcactggataccgatttcactgattcagactcctcagaaggtcctgagataattcagacatttccttctgacgatggtcaggaggagaacagttccaagacaactcccaaggaaaattcttctccctcaccgatgaaagtcccatcaaaacaatggacaaatgaagattttgccacatggcaaaggatcatccgacttgatgcagtacgtgcgaatgcagaatggatgccatactccccttctcaagcaattgtaccagacagtagggcatatcgttctgctgaggctgttgggttgaaggattatagtcacctagatgccagcagaatctttcatgctgctcgactagttgctattctcgaagcatatgcgttgatacgaccctgaaattggctactgccagggtatgagtgatctgctatctcctatagttagtgttatacctgaagatcatgaggctttctggtgttttgttggattcatgaaaaaggctcggcaaaatttcaggcttgatgaggtgggtattaggaggcaacttgatatagttgcaaagattatcaagttcaaggatggccatctgtttaggcatctgcagaagctccaggctgangat

SEQ ID NO: 20682 - DNA, 350 bp, Glycine max
  unsure (1)..(350): unsure at all n locations
ctctaaattctgcaccaaaatnngnnaaatgaccaaatacttcttgctgnaaatgtcgaaaatgcctgcaggcacaacatgtgaagtgatgcaaaacggcaacacttgtttcaccagatcctttcgtcattgatggggaagaaaggaggcagctggttctcatctgtgaagaaagttttcaagtcatcttctaaagattcgccccagcctgagaagaagaaggacaacacacagaaattacagcatgaagtggcagaggtggtgtcctttgagcattttcctgcagagagttctccagataatgtgagcaatgcagagatgagtacgacatcaacgccaggaccaacgaa

SEQ ID NO: 20683 - DNA, 626 bp, Glycine max
acaaaatccaatattcaccatattcttgaaccaaattaacaagcaaggctagtgtactctacttgcagcctgaagctactagcaagcatcgtataggaagatggagaagaacaaagttgatgaaaatcctgaagaatttaactatgagatgaaatgggttcgtgattcttcattggatcacaaaggaagagttcctctccgagcttcaactggttcttggaaagcttctctcttcatcattgcaattgagtttagtgagagattgagctactttggaatagctactagcttggtcatttaccttacgaaagttcttcatcaagaccttaagacagcagttaaaaatgtgaactattggtctggtgtcaccaccttgataccattgttaggaggattcctagctgatgcttacttaggccgttacaccgctgtgatagcatcatgcattggttatctcatgggtttggttctgctttctttgtcatggttcttaccaggtttcaaaccttgtgatcatcccagtacatgcaccgaacctaggaggattcatgaggtgggtttcttcctaggcatctatttaatatccggatgaactgggggccataaacctttcttgtagagctttg

SEQ ID NO: 20684 - DNA, 478 bp, Glycine max
gctgtggcaagtgggtaaaactctctggtatagatcttttgcctggtgatgttgtctccataggtcgctcttctggtcagaatggggaggagaagtctgtaccagcagacatgcttctattggctggaagtgtgattgtgaatgaagcttattctgacaggcgagtctactcctcaatggaagatttcaatcgcgggtagggcgatggaggagacattgtctgcaaagcgagataaaaaccatgtgttatttggtggaactaaaatattgcagcacactccagataagagttttcctctaaaaacacctgatggtggctgcttggctgttatcttgagaacggggtttgaaacaagtcaaggaaagttgatgcgaacaatcttattctctacagaaagggtgactgctaatagctgggaaagtggattcttcattttattcctggttgtatttgcccttattgctgctggctatgtgc

SEQ ID NO: 20685 - DNA, 626 bp, Glycine max
gcaaaatttaccgtgcgagagagttggattcatgcgctgggaactactaccaaatcatgagtgtgcctaattcctcctgtaatatccatgaaaaggaggagcaaggagacgatgagaagggcaagcttgtatcattaggacaaatgaatagtttaagtgtgaaagaggatagtagaacatcaaagaacattagttctgaaggtgaaagaagaacaccagaaatcatgggaagatgtgcatcctggtgggcaaccttcacattttttgtgtgtttgtgttcattaaaattcagcaaaccacttctccaaccacaaggacccaattcactatggcttgccatattaggaatgttcagttttactgtgtttgtatctgctgcttctgttatggttgttgttgaagcacagttcactcgtatgcagataactgttatgctcagtgccttcttggctctgctgttagcttaattagacagttttcatatgtgtacttatgtttcctttagccatggcggaaaaagttgttgtaatctttttatttacataatttcattcgcataacaataaaacgatgtttgggtatgtgctatcgacgattcaatagacagaacatattcatagaaaaaa

SEQ ID NO: 20686 - DNA, 665 bp, Glycine max
ggtttgtttgttcgatcagccattgttggggccttctgtgtttctatcaagacgggcaagtttgtttcaaatagtgagttaatcacatgtgctaccattgcagtttctacaattgcaactgttatgtctcaagctttcaaaccttctgaagaaattaaagggcaattccaggctctttctgttttagagggattggcaacacaactcacttcattttgtgacacatctttgattgccatgggaaaaacttgcacagcattcaatcaaatttgcactgctgggaaaaatgttaaagtgattgctggcagattgttggatgtagtttccaattttgtgaggaaacttttgggattggatagtgcttttcttagagatgcagcgcttatcttctctcaagatgttgatggttggctgcgcaatatcagctggtgtcaggaacaattcctactgaaagcatacatgtctcaagatgatcttattgtcttgcgttccttagttgtcaaaggtgaaagaatgagagagcaaatgctggaaggagaggttaaagtgtctcctagtgtttgtaatcttattgtaaaaggttgtgaagaagctcctaagttgatgagagaaagtgtgctacattgttcccacgatgtcacggaaaattccacttgtcatttttg

SEQ ID NO: 20687 - DNA, 400 bp, Glycine max
atcgagcacgaaatcagcgatggctgaaggtaggtatgaggtggtgaaggcacaaaagagaaagagagcaaagaagatggtgctcttcatttttggggggctatggaagaccttttcttagagatgcagcgcttatcttctctcaagatgttgatggttgctgcgcaatatcagctggtgtcaggaacaattcctactgaaagcatacatgtctctagatgatcttattgtcttgcgttccttagttgtcaaaggtgaaagaatgagagagcaaatgctggaaggagaggttaaagtgtctcctagtctttgaacaatgtagcacactttctctcatcaacttacctcgagccgaatcggctcgagctcgagccgaatcggctcgaggttctagatcgcg

SEQ ID NO: 20688 - DNA, 475 bp, Glycine max
tattttagttgtctcagtcatcattcatctcttgcatgcacccagcaataagtaagtggtatgggcataattggtgtctccaaggactgaaatttatttgcaagttggcttgctcttggaatctcaaattctgggtttcaagtttatttgctacagcaaaatgactagtacagaggaaaagcctgtgactgtgagtgaggaacatgatgcaagttcttgcagaagaacagtttctcttccagttcaaaaggttgatgatccaatggcgataactgaagaaaccacacatgttcctcctcggaagcgacagaatcttcttctagaaataccctcaagaacagaagagagttctcaagaatttgttgcaatcaaaatgccaccgacacccagttccaatcccactcctactccaaagagagtgaattttcttgtatcggacaccggcagatattgaaaaaccaaatactgcagctcc

SEQ ID NO: 20689 - DNA, 592 bp, Glycine max
atctgatctgaatgcgaagaacgaacgagagtgcagcgccagcggcaatgggaaggagcactttggctttggttctcgcgattctgatctctttgcagggaaccccccacgttagatccgatgcctccgatcatcgttacaaggacggagactccgttcctctttacgccaacaaagtcggtccctttcacaaccccagtgaaacgtatcggtactttgacctgccattctgtgtaacaggtcatgagaaagataagactgaagccctcggtgaggtgttaaatggcgatcgccttgttagtgctccttatgaacttagtttcaagaaggagaaagactctaaggttgtatgcaagaggaagctcacaaaggagcaagttgctcagttccgagaagcagttaagaaggactattatttccagatgtactatgatgacttgccgatctggggatttattgggacggttgacaaggaagggaaaactgaccctagtgagtacaagtattttctttacaagcacattcagttcgatattcattacaacaaagatcgagtcattgaaatcagtgcccggatggaccctcattctgt

SEQ ID NO: 20690 - DNA, 704 bp, Glycine max
ataggattggtcaatattggaaacagttgttacatggcagcaactatgcaagttgtgttttcaacaagatccttcacatcacggtactatttgaaccaaagtctaaagaaggcatttgagatgtctcctgctgatcccactgtagacctaaatatgcagttaacaaaattggctcacggcatactttctggtaaatattctgttccggcatttgagaatgatgaaaaagaaaatgttgctacttcaactacaactgctaaacaagaagggatacgtccacatatgtttaaatctgtaatagctgccagccatcctgaattttcatctccgaggcaacaggatgctttagaatttttcctacattttcttgatcaagttgagcgagctaatgctgggaaagttgaactggatccatcgacgagtttcaaatttggtattgaagatagaattttgtgttcatctggaaaagttacatataatagaaggcatgactacattctttctctcaatatcccattacatgaggcaactaacaaagaagaattagaatcctttcacaaactgaaagcagagaaacttgcagaaggaaaggaaataaatgccaatgagattgtgcgtccaagggtacctttagaaacttgccttgcgaatttctcagctcctgaggagatacatgatttttacagtactgctttgaagacaaa

SEQ ID NO: 20691 - DNA, 437 bp, Glycine max
aaagagcaaggacgatgcacgcgcgcgtacgctcggtcctcggctcgcgagaaaatcacagagaaaaaataaagacacagcttccaccagatcagtttccgttcagtggttcagagatgctacaaccaatcaatagtcatcatcttcagaaaaaaaaaccacctttttttttctaaaaggaaaaaaaattccgagctcaacgagctacccaaagcgattttgattcgcgggcttttcatttctgtataaatcttcaatcttcgaggaaaataacgctaccccatctgtttataatcatatggggcacaagtgaacgaaaaagaaactgtcgagaaaattgaggtttgaagcttgtaagttgtaacgtgtcctagaatattattatgtctttgcttcgacggagaaaagggtcggaaccgggaaagggtccgagccat

SEQ ID NO: 20692 - DNA, 867 bp, Glycine max
gctcaacaagcatcaccaaggagtacactgagtccaagaagcattcagagtgattcaattgatttggcaattgatggagtggtggatacctcaattgagcaattgtatcacaatgtgtgtgaaatgaggagctctgatcattcccctcaagggctagtttctactcttatgattatgatggcgagtccaggattgattcagaactaggccatcttgctggtgatattgtggatttggagatcacaaaggaggtggttacagagaataaagaggactacaatggcaatgctagtggcaaaactcctgagatagatgttgttgtgtcaaacaaggatcaaaaagtcattgcaggatcatccaaggcaactcctaagaggaccgaaaagggtgtcaaaaaagcgaacagtgctaattaccggacagggaagcataggaggcaccttggtttgaaggcgatcgaggagcgtattgctgcagggttagataatcctgacttgggaccatttttgctgaagcaaacaagagatatgatctcctcgggggagaatccccgaaaagcgcgtgatttcgctcttagagctttgaaatcatttgagatttgtgcagatgggaaaccgagtttggacatggtcatgtgcctgcatgtcttggctacaatatactgtaatttaggacagtacaatgaggccattcccgttcttgagcgttccattgatattccggtgttggaggatggccaagagcatgcactggctaagtttgcagggtgcatgcaattgggtgacacttatgcaatgatggggcagattgagaattctctgctgttttatgcagcaggtcttgagattcaagggcaggtcctggtgg

SEQ ID NO: 20693 - DNA, 516 bp, Glycine max
cttcttcttcttcttcagggactcaccatttcttctccttcaatgcttcaccatggatcgtgtcagccataggggttcacggtttcttctcgatgcgtctccgctgttagagttggagttccaacctaccatggatcctgtcatcaattgggtttcaaactttcttcacagtcttcagcattgcatggatcctgtcatcaactgggttttaaactttcttcacagtcttcagcattgcatggatcctgtcatcaactggctcatgtccctgataagttgcttagcggcaaagattaatcaaatacttgaaaaattcactgggcatcaatttaacgttaagactgacgcttgtgatgaaatttcattgggtggagaatggttgttgtatgttgctattgctgttgttgtagcactggcagctattcctgttgtctggttgctttggaaggtggtttttggtgttgtttggttgctttggaagctgatttctggtgttgttttgttgctatggaacgt

SEQ ID NO: 20694 - DNA, 326 bp, Glycine max
  unsure (1)..(326): unsure at all n locations
cgcaatattncttctccttcaattaattcttcaccatggatcgcgtcagccataggggttcacgctttcttctccgtgagtctccgctattagagttcgagtttcaatccatcatggatcctgtcatcaattggtttgtgtccctgataagttgcttagggacaaagattaatccaatactggaaaaaatcacagggcatcaatttaacgttaagactgaatcatgtgatgaaatttcaatgggtggaggatggctgttgtatgttgctattgctgatggtgtggcactagcagctactgctgttgattggttgctttggaagcta

SEQ ID NO: 20695 - DNA, 1615 bp, Glycine max
cgcgtttcggctcgaggttctcttcttttgttctttccatcatctcccacaactttctggttgccctggaatttccaacactaattcacataacccgaagttgaatgttaaggatctgacacttttttgagatagaatgagatgcatgtcctaagagtatttgccagactttgtcggaattccattgtaaattttcaagtgaaatctgttctggaaatttcctttgttcattgagatttttagaggtgcataagatttttcaagttttgaagatatatttctcttgagaaaaaaagacggattttgaaactctgaactttgtgcaagtcgtacgttacagggacgatcgctacttggccatcgtctcagatagaagctctgaagtgtcattattagttgagttttcggcatagatttacattttccatagctctggaactgaaatctggacaattttccttttacagcgttgaaccagagtttcagcaggagcagatttaggaaatagaaaaattggctcctttcccccttagtttcagaaggaattgattgctcgacgactgctacttttgtaaggaacgggttcaagagatggagaacgagtcatttattcggagcaataacaatacgaacacaatgtctagtgttagagagaaaaacggaggggatgggtcgttgttgttgagggcgaattccgatagcgcgttggcaagcaacgacctcggatttggtggtgcagtgggggtattcggaagcggctaaggtgcatgaaggtgcaggttaaggacgattcttccggtccggttcagaggactacggttcgggtggatcgccgggtcgttagaaccgacaaggattctttaaataagcccacgttcggtgtcaattataataatcatcatcatcagagtaacgggtatccgaatctccgtgaacgtacatcttcgccgcaaccacgaattctcaggttccttgcggatgtctcatccaaattaaagaatgaattggaactcacggaactcacaaagttcaagtgccatgagaggaggacaaagcaacgggggtgttaggggaattgcctccccggacaggggtgcgcacgataagagaggggcccataacaacctccttaatgacaataacaagtccgcagcctcgtcggatactgcgcacgatagcaagaagggagggtcgccgtccggcagcggagacgcggctgctccgccggtctggccacccaagttcgtgattgccttgaccaacaaggagaaggaagaagattttctcgccattaagggctcaaagctgcctcagagacccaagaagagagctaaattcattcaacgaaccctcaatcttgttagtcctggcgcatggttgtgcgatcttaccttggaacgatacgaggttagggagaagaagatatccaaaaagagaccaagaggtttgtaagccatgggaaacatggactcggactctgaatagagaatgagtgaaggtgctaagcaagctttatgcttgctaaggatgtgtaggaaatgcatggcatggcatctcagctaggtgccaacgaatccaaatcgaaatccaaaatattttagctttgccgctgctt

SEQ ID NO: 20696 - DNA, 324 bp, Glycine max
tcgaccctttcttctcttcttttgttctttccatcatctcccacaactttctggttgccctggaatttccaacactaattcacataacccgaagttgaatgttaaggatctgacacttttttgagatagaatgaggtttgctatttagacagccccaatatctctttcttcttcttcttttggttctccttttggccacggagaataatgaaacttgtttctgtctagattgactcgagtccttctcttcttctttatttttttttttggatccattttggttcacagatgcatgtcctaagggtttttgccaaactttttggg

SEQ ID NO: 20697 - DNA, 250 bp, Glycine max
caatttgagtttgttggataaaaatgtatcaatatatttaattcttaattccaattatcggtgtcctacctaagagtttacaattactccagtaaatttatcttttcgatgatgatgatcatggcgctggtggcaggcacgggttcaagagatggagaaagagtcatttattcgaagcaataacaatacgaacataatgtctagtgttagagagaaaaacggaggggatgggtcgttgttgttgagggcg

SEQ ID NO: 20698 - DNA, 860 bp, Glycine max
  unsure (1)..(860): unsure at all n locations
gaagagcnangacggaggatggcccgcgtccgtaagctcggcgcgggtggaggtccatttattgtttgccaaagagagctgcattcaagggtactgctcctatcaacttgtcagatcgtctcaaccaggttcttcgttgggcacttggttccattgagattgtcttctgtcaccattgccctctgtggtatggcttcaaggaaaagaagctaaagtggcttgagagatttgcctatgcaaacacgactgtctatccattcacctccatgcctctagttgcctactgtattcttccagcagtttgtttactcactgacaaattcatcatgccaccgattagcacctttgctggtttgtactttgttgctctcttctcctcaatcattgcaactggtattcttgagttgaaatggagtggagtgagcattgaggaatggtggagaaatgagcagttttgggtcattggtggtgtatcagctcacctctttgctgttatacaaggtctgctaaaggttctggctggaattgacaccaacttcactgttacatccaaggcaacagatgatgaagagtttggagaattgtacacctttaagtggactactctcttgattcctccaaccactatcttgatcatcaacattgttggtgttgttgctggaatctcagatgccataaacaatgggtatcaatcctggggaccactgtttggaaagcttttcttttccttctgggtgattgtccatctctatccattccttaaaggtttgatgggtcgacaaaaccgcacacccaccattgtagtgatttggtcagtcctattggcctctattttctccttactatgggtaagaattgat

SEQ ID NO: 20699 - DNA, 579 bp, Glycine max
actcgagcgattcggctcaggagaagaatgatgcaaatggagaggctgcaagcgtaaaagggatggatgatgacagaggggtgttgatgtcccaaatgaattttgagaagaaatttggacaatcctctatttttgtgacttctaccttgatggaagagggtggtgtgcctccttcttcaagtccagctgccctgcttaaagaagccattcatgtgattagctgtggatatgaagataaaactgaatggggacttgagcttggttggatctatggatctatcacagaagatattctaacaggttttaagatgcattgccgtgggtggaggtccatttattgtatgccaaagagagctgcattcaagggtactgctcctatcaacttgtcagatcgtctcaaccaggttcttcgttgggcacttggttccattgagattttctttagtcaccattgccctctatggtatggcttcaaggaaaagaagctaaagtggcttgagagatttgcctatgcaaacacgactgtttatccattcacctccattcctctagttgcctattggattctttcaacagttt

SEQ ID NO: 20700 - DNA, 438 bp, Glycine max
cctactttcacaacactgacctcaaagtaatctcttttctctcttatctctcattcatccatatatacataaacctgaacacccttttattttcacgtcccaaatcataatttccttacagcaacacaagcctgcaattcaagttaatttttcattagcaagcttggttaatcctaaatcttgttatggagatgaattcagttcctggtgttattatgtctgaggcagaatatgaagaagatactttctatgctgagattaggaggcagattctgctattgacatctgaagacaatgaagatttactagaaacaagaagtttcaaccccattaatgtcacaaatggtggttcaaacaggtcagcttacagctttaactgtgcatctccatccgcaagcaacttttctttgtgggaaagacatagttctggttcaccac

SEQ ID NO: 20701 - DNA, 605 bp, Glycine max
actgctagaaaattcggtttttggcttctgggtatttggttgaaacctttcttatgtgctgagtaaaggttaaagggggcaaagattggatcttttctacttgagggtggtgagtggggaactgaaagtgtgagtttgtagtgttcttttgcagaaatctgagtgaatggagcctcctacggggttttgtgcttctttgttgagtttcatccggtttcttccttttttcattgggcttctgcttcttggcaccatcaaaggtgtccttttctgcccgttgatatgcttaataattgcaactgggaacactgctatcatacttggactttggatagtgcatgctgtttggacatattactgcgttgtgagagctaaacaatttgggcctattctgaagcttgttattggcctatgtgtactaccagtgctgttggttgagtatgccattgctggtattctaggaagtattgctggaggagcagcctatggatttctctcacccatatgtgctactttgtaagctgtagaagaaggaaaagatgacaaattttaccactgcttcattggtggttcatggtgcactgttgaaaagagctgcatggttg

SEQ ID NO: 20702 - DNA, 393 bp, Glycine max
cggctacaaaccgccaagtcagaggtggccagctttgggggaccgatgtgtacacagacgattcagatcttgttgctggtctcatgcataccggttactgtcgcccaacagcgtctccaccccatgcagccatacaagaattgcgtgcaaccgttcgtgtactacctcctcaagattgctatatttctacactgagaaacaatgtccgttcccgtgcttggggtgcagcaattggttgtagttatagagtggagcggtgttgcattgtgaagaaaggaggtggaactattgatcttgaaccttgccttacacatacatcaactattgagcccacccttgctccagtgactgttgagcgaactatgactaccagggctgcagcttcgaatgcat

SEQ ID NO: 20703 - DNA, 510 bp, Glycine max
accgaatttgggacgcgtaataaagaagagagagagaaagagaagaaaatgaattactagtacaaatatacaagttttgcagaaaaaagcttcactgtaactctaatggcgatattctcggaatcaaatcaccatcacaacacttccgatggggtctcccagcgagtcaacagcccgcgtttctcgggtccaatgactcgccgcgcccactccttcaaacgtaacaacaacaacatcgccgccaacaccgccgccaccacctcccacggcggcgccggcggcagtggcgccgtcgaagttgagcttcaaatcaactcgcccagatcggaggaagcgtcggagggtgtgccggtggggaagcacagccaccatcacgtgacccagagagtgcacgtgagggggttgctgaagaagccccttgcgtccatcgttgaggatttggggttgagggaaaggaagaaaattgggcactggatgttcttagtgttctgtggggtgtgcttgttcatg

SEQ ID NO: 20704 - DNA, 341 bp, Glycine max
ctgaaaacagtaacactgacgacgaagaaacgaatcaggttgatcaaatacgcgagtaggagtggcacaatgtgttgagtgtggagcaagaacgtttttatcaatggcggaatgtgtggcttctgcattctgtgttaagctgaatgcgcagagaaggcctgttagagagaggggcttctcgggccagattacaagtctcaagtctgttcaaagaaagtattccagaaatggatgtaaatttgttcacttttctatgtggaagacatttgagctgagtgtatttggggccacacacttgaaattcactcctcatcttcaggaatttccattaaagtgcattg

SEQ ID NO: 20705 - DNA, 350 bp, Glycine max
gttcccaataaaagccttgattttttcatatttgatccaaacaaacgtgggaatttgaattgggaaagacgctacaatatcataagaggcatcgctcgcggtcttctttaccttcatgaagattctagattacaagttgttcatcgtgatctcaaaataagtaacattttgttggatgaagagttgaaccccaaaatatcagattttggcatggcaagattatttgagatcaatcaaactgaagccaatacaaatacagttgtcgggacctttggatatatggctcctgagtatattaaacatgggaagttttcagtcaagtcagacgtttttagttttggtgtaatgat

SEQ ID NO: 20706 - DNA, 445 bp, Glycine max
atacaggccacgagcccacactcgcttccctgcattgctttgctcaactcgttagagctcaaagacaccatcgtatccaactccatcatcttccctcttagtgatatctcgaattgctccacatacattctcccatgaggcactccatctccatcgctgtcaccgcccttgttggcgccgccgcagccagcgtcaacggtccttggcaaagccacagctcatggggtacggccgtttccagcacgccgagcgcctctaagaccatcatctcgagacccgacaatcaagccgagcggcactggtgtcaccatttctgatcccacgatcaagccaaccgccactgggggccacaacaccactgagacggagactttgacgaccttcaccactgtcaccacttgccccgtcactcagacgacctcgggccatggctctacctacatca

SEQ ID NO: 20707 - DNA, 479 bp, Glycine max
gcggcgcgtcgttgatggcgaaggcggcgattaactctcacgcgcgggctctctacgcgctggccgtgattcagttcaacggaagcgggggcgctatgcgcaagagcggcgtttctcggacacgtcgacgcgctgcgcgagctcggccactgcctacaggacggttacggcgtacggcagaacatcgccgagggacggcggttcctcgtgcaggccaacgcgcgtgagctcgccgccgtgctgtccaccggcgccgccgcgcgtaccttgctgagttggaatcttcagccgcagcagctccggcaggggtccgggtgtccgcttctcagcgatttcggatgcaacgtgccggcgccggatgtgcatccggcgagcctgttcatgactgagtggttcgccgctcacggcggttctccgggaccggggctgagactctgttctaacgcggggtgcgggaggcccgagacgaggaagcacga

SEQ ID NO: 20708 - DNA, 482 bp, Glycine max
gtttgtgcagattcggttctactgtttgcaaaaccgagggagctgcgcgtcgtttatggcgaaggcggccattaactctcacgcgcgggctctgtatgcgctggccgtgattcagttcaacggcagcggtggcacgaagagcgacaaggacctacgcgccggcgtggcgctgtgcgccagagcggcgtttcttggccacgtcgatgcgatgcgcgaactcggccactgcctgcaggacggttacggcgtgcggcagaacatcgccgagggacggcgggtcctcgtgcaggccaacgcgcgcgagctcgccgccgtgctgtccaccggcgccgccgcgcgcacctggctgagttggaatcttcagccgcagcagctccggcaggggtccgggtgtccgcttctcagcgatttcggatgcaacgtaccggcgccgaggtgcaccccgcgagcctgttcatggcggagggttcgccgcgcggtgg

SEQ ID NO: 20709 - DNA, 777 bp, Glycine max
cttctttcatcttcttccactgtctgtctacactacggacagagcttttttcacaccacagctggaattgctgcaatagagcccttcttctcccttcttcttctctacccacacccaaacccaaaccaagttctttctttctaattcccttgataatgtaaaatcacagaaaaacaaaaaaagctactcaaaacttggctccaattagcctttctttttttgttttgaggaaaaacagaaaagttccacacaatgtcttcttttagagctctcttcttcttctttctcatcaacgtctccttgctcctcacactctcttctgcggcggatccattcgtttcatacgaatttgaagtctcttacatcactgcatcccctcttggagttcctcagcaggtcattgctatcaacaacaagttcccaggtcctattatcaatgttactacaaacaacaacgttgctgtcaatgttcggaacaagttggatgagagcctcctcattcattggtctgggattcagcaaaggaggagttcgtggcaagatggtgttcttggcacaaactgtcctattcctgcaaagtggaactggacttaccagtttcaggtgaaggatcaaattggaagctttttctacttcccttcccttcatcttcagagagctgctggtggatttgggggtttcatcataaacaacagacccatcattccgattccttttgataccccacatggggacattgttgtttttattggagattggtacacccgcaatcatacg

SEQ ID NO: 20710 - DNA, 527 bp, Glycine max
cgagtccgaggaatgattaccgaaagagaaaaagggggaaagaaaattatagcatagtaagctctagtactcataagctacagtaatttcatttcggtgttatcaatttgcctgtgtgttcttcttctgtatcgtatcaccgtcgcgcgattttccatctccacgacttcgaggtacacgacgatgattcataatgagaacccactttggttttgattattgttgctgttgttgttaacttgttattgtatgttctagggtttagctggtttgaagcttaagaaacgaaaccctagcttgcgaatcgtggttggtaaggacatggcctcttacaggcccttccctccccaatcgagtcaaattccaaacccgatcccaggtgggaatcatcagtataataataataataatcaaaatcaaaattggggtgcttatggagatccctctacttcttcattcccccaaatccctccaaattccaattatcatcaaaatcaacatcatgttccatatgcaccagcaccttc

SEQ ID NO: 20711 - DNA, 502 bp, Glycine max
acgaggtttttgtggaggttgagccaattctaagatctgcaatggacgggcacaatgtgtgtgggtttgcctacggtcaaacaggcacaggcaagacattcaccatggatggtacaaaccaggagccaggaattattccgcgtgctcttgaagagctctttcgtcaagcctctttggataattcatcttcttttacctttacaatgagcatgttggaagtttatatgggcaatctcagggatttgttatctccaagaccgtccggcagaccacatgaacaatatatgacaaagtgcaatctcaatattcaaacagatccaaagggattgattgaaattgagggtctctcagaagtgcaaattagtgattatgctaaagccaaatggtggtacaacaagggcaaacggttcagatccacctcttggactaatgtgaatgaggcatcaagcaggtcacactgcttcatatatctagcttgacgaggataagcatatttcggcgt

SEQ ID NO: 20712 - DNA, 739 bp, Glycine max
cgcgagcgtgcgcgataggagtttgcttgcggacactgcgaagatagttgagaagaataagatctgcaagcgcaaagacagtttctgcagaaaaattgtcacagacggattgttagccctcggatacgatgcttccatttgcaaatctcgctgggaaaaatctccttcatatcccgctgggggatatgaatacatagatgtgatgatggggaaagagcgagttgttattgacattgacttcaggtcagaattcgagattgctcgatccaccaaagcgtacaagacgattctccagaaccttccctacatattcgttggcacgtgcgagcggttgcagagcatcgtggcgctcgtgtcggaggcagcgaagcagagtctgaagaagaagggaatgcacgtgcctccatggaggagaaccgaatacgtgaaagcgaagtggctctccccttacacgcgcactcacgatatcaaagaggagaagaagaaggaagaagaacaacaacagctttttaaggacaatttattcgccgcggagtcagagagttccggcgaagataacacggcggtggtcgaatggaagccaccggagctgaaacctaagggttcgctttccggcgtgaaggttgtgactggtttggcggtggcttttcatgatgacaataacccataaaattttgaatttttttcggcttttttttttcaatttcaaatgtctaaaatgaggattaaaatctatatg

SEQ ID NO: 20713 - DNA, 1011 bp, Glycine max
gtaataacctcaaagcaaccattaagcaaaggttgcttagtggttgtgtgtgtgactcttctctcctcacaatgctgcctcacaagcacactctggtggttgtggccactgtggccacactcgcgctggcggcggtgctcgcagcaccacaagcagatctggcctccgagcgagctgcattactctccctccgttcctccgtgggaggccgtaccctcttctggaacgccaccagggacagcccctgcaactgggccggggtccaatgcgagcacggccacgtcgtcgagctccacctccccggcgtcgctctctccggcgaaatccccgtcggaatattcgggaatctgacccagctccgcaccctcagtctccgtttcaacgccctcagaggttccctcccttcagatctggcctcctgcgtcaacctccgcaacctctacattcagcgcaacttgctcaccggccaaattccaccctttttgtttcatttgccggacctcgttcgcttgaacatgggcttcaacaacttctccggcccctttccgtccgccttcaacaaccttacccgtttgaaaactttgtttctcgaaaacaaccagctctccggcccaatccccgacttgaacaaactcaccctcgaccagttcaacgtctccgacaacctcctcaacggctctgtccctcttaagcttcagacattccctcaggactcttttctaggtaactccctctgtggccgaccactctctctctgtcccggagatgtcgccgatcccctctcggtcgacaacaacgccaagggcaacaacaacgacaacaagaagaacaagctgtccgggggcgccatagcggggattgttgtcggatcggtggtgcttcttctcttgcttgtgttcctcttcattttcctgtgcaggaacaagagtgccaagaataccagcgccgtcgacattgccactgtcaaacatcctgagacggagtccaaagttcttgccgacaagggggtct

SEQ ID NO: 20714 - DNA, 264 bp, Glycine max
ctcctccttctccctcagaattcgctatgctgcctcagcttgcacactctggtggcgaccctggctgtggtgctcgcagtagcacaagcagtagatctggcttccgagcgagccgcattgctcgctctccgttccgccgtgggaggccgaaccctcttctggaacgccaccagggagagcccctgccattgggccgcggtccaatgcgagcacgaccacgtcgtcgagcttcacctccccggtgtcgctctctccggcgaaatc

SEQ ID NO: 20715 - DNA, 456 bp, Glycine max
tttcgcttttgaggaaacaaagcaacacccgaacgaaccgcgcaaggtaacgaacgtagctgagcaaaagcaagcagtaacaatgccattgtcaacggtcgtttcccccttttgttcttcctcagccaccttcctatccacagttatcgcgcgctcttcactccctccaaaacgcaacgtctccccttccccattttccactctctctcgcagaggcattgctctgctttccttcctctccctctccctctcagcaccagcctccgccattgacattggcatctcaggaccgaaggattggctgaaagaccaaaaaaagaaggcctccaagtacctattggcccccgtcgatgcctcccgccaaatccttcgctctgcctatctcacgctcacggaaactgacgctgcttatacggatgaggatttggagaagattcagcagctctttatatctgc

SEQ ID NO: 20716 - DNA, 1189 bp, Glycine max
cgcgaccctctcagttctcacacaacataaacacttacaagaacagagcaatatatctatctatttctctgttctgttgtctcagcaaaacaaataataaaatcctctcgtagctaccttcaacaactcttgttcatggcgtgtcaccgttggctctgtatatcactgttgctgctgctgctgctgagtttagcttcgcagagttgccacgctctccattcgttcgggttcgacattcaccaccgtttctccgatcccgtgaaagagattctcggcgttcatgatttacccgacaagggaactcgacaatactatgttgctatggcccacagagaccgaatattccggggccggagactcgccgccggttaccactcgcctctcacttttatcccctccaacgagacttatcagattgaagcctttggattcttgcattttgccaatgtttctgttgggactccaccattatcgtttctggtggcattggatactggcagtgacttgttctggttaccttgcaattgtaccaaatgtgtgcatggtataggcttatcaaatggagagaaaattgcttttaatatctatgatcttaaaggatcatccacaagccaacccgttttgtgcaatagcagcttatgtgagctacagagacaatgcccttcatctgataccatctgtccatatgaagtaaactatctatcgaatggtacttcaactactggattcctggtggaagatgtgttgcacttaattacagatgacgataaaacaaaagatgccgacacacgaattacttttggttgtggccaagttcagactggtgcatttttggatggggcagctccaaatggtctgtttggactaggaatgagcaatgaatctgtcccaagtatcctagccaaagaagggctcacttcgaattccttttcaatgtgttttggatctgatggtcttggaagaatcacatttggggataatagtagcttggtccaaggaaagacaccattcaacctcacggcattgcatcctacttataacatcaccgttacccaaattattgtgggagaaaaagttgatgatctcgagtttcatgcaatatttgactctggtacctcgttcacatacctaaacgacccagcttataagcagattactaacagttttaattcagaaattaaactacaac

SEQ ID NO: 20717 - DNA, 573 bp, Glycine max
gctaaagagttgactcttctttgtcacttgggcttgggtgttcaagcagttcctcagacagcaaggcctcttcagctgctgcctgcactgctatgtcttcagccaaagatattgatgaggaatcatctttagatattgaactggacttttctcttcatcttggctgtgagaaggtacacagccagatgaaacctgttaatccaagtttgaagacaatggagctgcaaccaaaatttgatttggagttaagcctttccactgggccctgtgactccggatattacaagcctacatctaaatccatcacctcttcaattgaatatggagatgccattagcattcagtgggacacaaaatacagatgagggatcaacttcatgtagctggcagccagggattgttttgccatcttctaagatgtcatcaaatccaggtactaattttcttttaagtcagtcatcgaagcagtttgatcatagtcccattgttgtggacctctcgtcaaccggaccaaaaagttcagtcacctgcacttctgggcttacacagcagcaacagccactacatcgccct

SEQ ID NO: 20718 - DNA, 543 bp, Glycine max
acaaatctgaaatccccctttgacttttttcattttgagacgcctcattcccaactttcctcccaaacacccttttatttttttttgtgagtgatttcaaagcaaacaaataaaaaaccatttaacgctctctcttattattccaatttccaaatcacaaaacaaaaattctctctctctctctctctctctctctctctgaatttatactccaatttccatttccatcgataggaagaaggaacatagctgactgaattcggcatctgaaccgcactccccttggctttgttattcgcactcctcgcacttcgaatccgttgctggcagctgcagatcaaaccttgtttcacctgaatgctccttctggactcgatttagatcgagttcttcgtaccctgatagtgtgggaggatatatatgaaaaacggggtgctggaatgcactgtgtgccattccaaattggtttccccctcctgcaagactatatcaagggcttatgatcgccataaaagtaggatatcgaccaagcaacgtgctctc

SEQ ID NO: 20719 - DNA, 339 bp, Glycine max
actcatccctgcaaaaaatatccatccccaatggcccaaaacaacttctggcacatcttttgtgcaactaggaacatcttcgaagcacactctcgtcacttactaactctctcactaatcttcctctttcccctttcattctccctcttactctctcccaccctctccaacctcttcaaccatttctataccaacattatcccttatccttataattatgcttctacaacaaacccaaattataaacaccactctctcttctttcatctcctctattcccttttcacttttatcttctcaaactgtggagtcattagcatcacctacagcgttttccac

SEQ ID NO: 20720 - DNA, 340 bp, Glycine max
ctcgagccgctgaaaatggtcaagaggagtttgtgagggaacaattaaacagaggtgtagtaccagatggcattgatgtgcactgcttggcaggtctcataaaggcttggtttagagaactaccaactggggtattggaccctctttcgccagagcaggtgatgcaatcccagtcagaagaagaatgtgctcagcttgtgaggcttcttcctccaacagaagctgctttgctagattgggcaataaacttaatggcagatgttgctcaaatggaaaacttgaacaagatgaatgcacgcaatattgcaatggtttttgctccaaacatgactcaaatggc

SEQ ID NO: 20721 - DNA, 941 bp, Glycine max
attaatttgaattcttgatggattcccttccttccgtgtcgccctccatggtcctccctcccagccaccctttccgccgcctccctcccagcctcgtctccgcccgaaccagaagccgccgccgccgccacgtgtcggtgtcctgcaccctctccggcaacggcaccgacgacgaggtcgagagggccctccacatggacggcgcaattcccggcacctccgacgagttcgtcaagcgcgtctcctcacgcgcctacgacatgcgccgcaacctccaacaatccttcgacaccagcagctacgacgttttagatgccaacccctggagagagacttcgaagcccgtgtatgtactcacacagaaggaaaatcaattgtgcacaatgaaaacccgcagaaatagaagtgaagttgaaagagagcttggattgttgttttctaaaggcagcaagtggagttctggaattggaaatcagtccaaacaagtaaggggagggacgactaataagtttcaaatgcttgtggaagatgttagagaaggagtgctggtatttgaagatgcaaatgaggctgtaaagtattgtgacttgctagaaggaggtggtcaaggttgtgagggtgttgccgagatagaagcctcatcgatatttgatcttggccagaaaatgagggctcttgcagttctattccgcagagggaggacacctcctctacctgaaagtcttaagctcaatctgcgagctcgtaaacggtcccttgaagatcaagatgatttgatgtgaaattcatattcccttttccttttgttgagagggaagcaactgtacgctaattgctaatatgcttaagctccccaaaggaacaaaagatgtatattgatagaaattcattcatcatataatcgaaaaagtatagcatgtatatggttaatggtttaccct

SEQ ID NO: 20722 - DNA, 1940 bp, Glycine max
gctccatcgagatgcaaatacttttccaactgttgtggggtttcattgtggtgctgaaaagaagaaggaagacgttgacaattgccgcagcaaatctcctagtgaatacatcaatctcaactcccatgtacctgttggcatgcaaatgatgcctacatcacaatcaagtagtccttttcctgcagttttcaaggcaaagcaggagaaatataattcaaaacttgctgagatgttccagaaagtggaagatcacgattcaggtgaccgaagatcatgcaacatgtccaattcaagtgtatgtgatggcagtcaaatgtctcccacatctgtaacttctgtaaccacagatcttgggttaggaatatgctcttctcctacctgcaataaattgaagaaacctgctgttcaatatacaatggagcctccaaaggaaatcccaagtcgattttctccaaacaataatgtggctgatgggaatatgttgaagcatccatcacagtcttcatcctgcttaagttttgactattgtggacaagttgatgcaaaaaatcccaaaattctttttgaagctctttccaaggaggtaagctggcaagatgaagctttacgggctatcgtcaaaacaattgtttgcagccctacaaagagggttaaacaccgtggaccaaatcagcctggggacatctggatgaattttgttggacatgatagacttggtaaaaagaaaattgctgtttctctagctgagctattatacggtagccgggagagctttatttttgtggatctaagttctgaagaaatgaaaggatgcaatgtgaaattcagagggaagactacccttgattttattgtaggggagtgttgcaagaaacccttgtccgtggttttccttgaaaatgtagacaaggcagatattctagctcaaaatagtttgtctcaagccatcaagacaggaaaaattacagactcgcatggacgagaagttagtgtaaacaatacaatgtttgttttttctttctcagattaccaaaacagttcgatgccaagaggggaaccttctaactattctgaggagagaatactgagggcaaaagggggaggtatcaagataaaagttgaacatgtgattggagacatcagaagccaaagcatcagtctaacaaacaattcaatagatgccattcctaatctaaatttcctaagcaaacgaaagttgattggtgacaatgaatttcatgatccgcatttactctctgatacagctaaaagggcacatacaacatcaaattggctgttagatttgaatctcccagcagaagagaatgaacagaaacaaacaaatgatggaaactctgatcatgttgtctcgactgagaatcaaaagctttggttgcaagatttgtgtgatctggttgatgaaacagttgtttttaaaccttatgattttgatgctcttgcagatagagtgttgaaagtgatcagaagtaacttcaacaaaattctcggatccaagtgtgcattgcagatccagacagaagtcatggaccaatttcttgcagctcaatatgtctcagaccgggatacggaggtggagaactgggtggaggaagttctatgtgaaggatttacagaaatacagagaaggtacaacctcactgctagttctattgtaaaacttgctacgtgtcctgagcaagctgctggtgtacaccttccctcaaggataattttagattgaattcaaaccagcaaatgttctattttctgtatggatgtataatttagctgtagcatatagtgaaactaatttagccttcaatcctattattttgttgggtttgtttgtctaggttttaattgtgtataatatgtaatctgcagctagtgctatgtgtgattatcccttgcatgtttaaatcaaatgccttctttgtttc

SEQ ID NO: 20723 - DNA, 747 bp, Glycine max
agatagtttttcaattctctcgaggtgtgtactctggtcttccccacattctaaaattgtgtttgtgtgtgcgtgcgtgtaacataatcatccatcttgttgcttattcaacattacatttggtgtgttaattcatacaggaactccctcttcccagaacaagatttgagatgttaatcccagggagtgaaattccatcatggtttgtccctcaaaaatgtgtttcattagctaaaataccagtccctcataattgccctgtaaatgaatgggtgggatttgctctgtgcttcctattagtaagttatgcaaatcctcctgaggcgtgccatcatgaagttgagtgctacttgtttggacctaatggtaaggcgattatcagttccaggaatttacctcccatggagctagattgccctcacctttatattctctacttgtccattgataaataccgtgacatgatttgtgaaggtgttgtcggcagtgaaattgaatttgtattgaaaagttatggttgccaatcattggaaatagtgaggtgcggatgtcgtttggtatgtaagcaagatgttgaagatatttatgaaaatagtatcatttcttctagtgaagagatcggagtggccagtgagaaggtgcgaattatctaaaaacttgtcatgtaattacgtatgtcttgttatctgtatagaaacttctcattctccataaaaaaaaaaaaaaaaaaaaaaaagaaagggcggc

SEQ ID NO: 20724 - DNA, 424 bp, Glycine max
ttcttttgttattttgtctcatgcaatttctattataaatttgaataaatctgtcaaatttttctaacccaagttccaaacttctctcgtttccatcacaattctctccgaatcctggtgggtctgcacccgtttgagtgtttgaccgatcgttcgttcattgcagcgtaatctgctgcaaagcgagcgatgaagggtgttggaggatatcacgattggccttattacgcgtcgccgacttcaaatttatcagctttcgcggcgccttttagtgtgaatccctacacttcaagcgaggcttcgtctcagttcatggatacagctgaatccgcagaaaccctgcccccaattcagtttcaaccctaccggtacgatttcttttcgggccccgttagagaattggattccgctgcgcaattctctc

SEQ ID NO: 20725 - DNA, 1803 bp, Glycine max
ttcgtccttccacgcgtccgcgactaagaaaaacatatcacacaatatggcattcaagggctatttccttctcggcctcgttgctcttgttcttgttaaatcttccaaagttacatgcgaagaagaatcagttaatacagtttcacctattattgacatttcactcaatcggaagagtttcccagaagggttcatatttggggcgggatcttcctcgtaccagttcgaaggggcagcaaaggaaggtggtagaggaccaagtgtatgggataccttcacccataattatccaggaaagatcatggatagaagcaacggagacatggcaattgactcatatcacaactacaagaaagatgttgggatgatgaaggatatgaatttggattcatatagattttccatatcttggtcaaggattctcccaaaaggaaagctaagtggaggtataaatcaagaaggaatcaactattacaacaaccttatcaatgagctagtggctaatggtatacaaccacttgtgactctatttcattgggatcttccccaagccttagaagatgagtatggtggcttcttaagtccacgcatagtgaaagattttcgggactatgcggaactttgcttcaaggaatttggtgatagggtgaagcattgggttactttgaatgagccatggagttacagccaaaatggctatgcaaatggacgaatggcaccaggacgttgttctgcttggatgaatttgaattgtactggtggtgattcttcaacggagccttatttggttacacaccatcaacttcttgctcatgcagcagctgttcgtgtgtacaagaccaagtatcaggcatctcaaaatggtgtgataggcataaccttggtagctaattggtttttgccgctcagagataccaaatctgatcaaaaggctacagaaagagcaattgacttcatgtatggatggtttatggatccattaacatctggagactatcccaacagcatgcgatcacttgtgaggacaagattaccaaagtttactgcagagcaatccaaactacttattggttcatttgattttattggcctaaactattactctacaacatatgcctctgacgcacctgatctaagcgaagcccgtcctagctacttaacagattctcttgtcactcctgcatatgaacgtgatgggaaacctattggaataaagattgcttctgattggttatatgtttatccaagaggaattcgtgaccttttattatataccaaggaaaagtacaataatcctttgatttacatcactgaaaatggtataaatgagtatgatgaaccaacacaatcacttgaggaatctcttatggatatttatagaattgattatcattatcgtcatcttttttatcttctatctgctattaggaatggctcaaatgtaaagggatattatgtatggtctttgttcgacaattttgaatggtcttccggttttacatcaagatttggaatgatttatgtagattacaaaaatgatttgaagagatacaagaaattctctgcattatggtttgagaattttctgaagaaagaaaccaaactatatggttctagcaaatagtattatgaaatttgtttacaaaatagttatatatatttgtaaataattatttgatttgtatttggtcattcttttattctatcgaggtcctattggccttagaggggaaatagagatgtagatctattgatcaccgctactattttgttacctcaagaatgaaagaaattttttgttat

SEQ ID NO: 20726 - DNA, 941 bp, Glycine max
cttttatgtttttgattgattattacagatgaacgtgatgggaaacctattggaataaaggtgtgtgtatacaccaaaacatgcaaatgttcttctagttaaatcattacttttgataaatataaaaactaactctttttttttcgtaattatgcagattgcttctgattggttatatgtttctccaagaggaattcgtgaccttttattatataccaaggaaaagtacaataatccattgatttacatcactgaaaatggtaaataacaattgtttatacacatttaatttccatttatgaaataacatatgttatacatgattttcaatttccccaatctattgaaaagaatgtgtattctaacttatggcttacatattctttacttaatttataggaataaatgagtttaatgaaccaacatattcacttgaggaatctcttatggataccttcagaattgattatcattaccgtcatctcttttatcttcaatccgcaattaggaatggcgcaaatgtgaagggatattatgtatggtctttgttcgacaattttgaatggtcttcaggttatacatcacgttttgggatgatcttcgtggattacaaaaatggtttgaagagataccaaaagctttcagcgcaatggttcaagaattttctcaagaaagaaagaagactttatagctctagtaaataatatgaaattcgtttattcattggttatattttgtaaataattatttggtttttctttgatattcttttattctaaagaggtcctaatttgacttagagggtattgattattcttttattctaaagaggtcccattggactgagaggtgaaacaaagatgtgtatcggttgattatagctgctatatattgttattgttattgttataacaagaatgaaaaaaccttttcgctccgat

SEQ ID NO: 20727 - DNA, 820 bp, Glycine max
gaaaaactgttcccgacaaatgggaatttgccaatgagtatttcaagcgaggacagacggatcttctcgccgagatcaggcggcggaaggtggtgtctccggtgaccggaaaatctaccggcggtggcgttaacatctcggcgtcccactccggcggcgacgacatggggtcgacatcgacgggatcgatggacgcggcaacggcggcgggcgctgatatatcgggcgagaacgagaaattgaagaaggacaacgagaaattgagcggcgagttagcgctggcgaagaaacaatgcgaggagttggtggcgtttcttagagactcgctgaacgtgagccccgatgtgatagagcgcatcattcggcaaggaacgtgtgtgtccagcaacaatgatgcggtgcgttttgatgctattattaataatgatcttgatgacgacgaaaatgcggtaggtgagtgtgaaccacaacaaccaccacccaaaggtgacaatggagaaagtttgaaactatttggggtttggttgaagggtcaaaatgggaaagagaattcaattggtaaatgccgcaagagagggcgccaagactaccctattgctgccactgccaaggaattgaagaccctagtctagtacaacatatcatattcttgttaattaattaccttttaagaaacaactattgtagccagatctagaacacaaagaaaaatactctcttagtcatcatggaaaatgtatggctctttcatggtatttcgttgtttggtttgatggtgcaagggacctaataaaggatactaatgatgatgattaagatt

SEQ ID NO: 20728 - DNA, 1010 bp, Glycine max
cccacgcgtccgcccacgtttcatatttggcatcaacaatcaacaatcaacaatcacaaatagaaactcactctttcgaaaaaaccagaatttgaatatgacgttagggtttgagggttatagttataccacaacacttggaaggaagagggtcgtgttattacacaatgaagcttcttctctcaactctaattcggcggtgaatccattgaagagaatgtgcagcggaaaattcacttttgactctgaaaggtctcgccttgaggcccttcctcttgatgttctgattagggtgttgtgtggtgtcgatcatgaagatttggagcaacttgttcgtgtctcaaaaactgttagagaagcggctgagattgctaggagaatgcattttgagtatagcactccaaagaagaaaacttttgctcttcctaaaccgtttgatatagagggtgctggtgggtttgaggaaattgatactccaaatgccccattgaggaaacctaagtcaaagctgattggaaagaatctggctagcatctcagtggcattgttcgcttccgctaattaagaagaacagtgactggacaaggaaaaagaagcaacttgtgatggcacggacaatttctcttgttttgggtagttctgtgaacagatagtattaatttgttatgtgtatattagttggtacttggtagattagagagggacttgatacatacttagaagatctcactagctgatttcacacgttttgaaatagtctttacaagctaaatcttcttcaattccttcattgaagattgctttgacttgtttgcaatctttctgtatatctataggacaagtagaaagtgggataggttatagatgattatttggagggaaatccttggcccttctagtgtgataaatttaactgtgcacagtccattaagcatagttttgtgcttctctaataaaatgagtaaagtttccgctattaaaaaaggaaaaaaaaaaaaaaaaacctttaa

SEQ ID NO: 20729 - DNA, 494 bp, Glycine max
ctcgagccgattcggctcgagccgttcggtagttgcccttgttcatcaccaattccatttcgatttttggctcacccaaccatcacaaatagaaactcactatcgcaaaacaaacaaactacaaacccagataagggaaaaaggttgttatctctgttaagtttccgtgtgtgagattttcagaatttgaatatggcgttagggtttgagggttatagttatacaacaacacttggaaggaaaagggttgtgttattacacagtgaagcttcttctctcaactccaattcaccggtgaattcattgaagagaatgtgtagcaagaaattcacatttgactctgaaaggtctcgccttgaggcccttcctcttgatgttctgataagggtgttgtgtggtgtcgatcatgaagatttgaagcaacttgttcgagtctcaaaaactgttagagaagcggctgaagttgctaggaggatgcattttgagtatagcac

SEQ ID NO: 20730 - DNA, 493 bp, Glycine max
agctgaagcataataatattgagaacttgcatgatcacatttatgatttattataaatatatacactacctaaacagataaaattacccctatttccactccacccacagatttgatgaaaactgtccctagctagttatactactactccatggagcttcccagcttgattacctcaaaattcaatactaagctgcccaataaagaaaaataaaatcttaaaattttacagaaacagctaccgggaaggcttaaaataccccagagcagcacacaacttagaaagagatagctagctaataacatgacacaaacacacacttataatctcaacgctgccgcaaagtgccaacatcatcgtacatccccaaccttagccgacagcgccgctcgaagctgctcctgcgtgtaaaatctacttcccatcttcaccgttgcttgttggatcgtcaaatcgttgaccaacgttacggtggcgtagtgcacgtccaag

SEQ ID NO: 20731 - DNA, 383 bp, Glycine max
cagtaaacaacaaaaggacaaaaaaaaactcttgatcattattaatggcctctcattccccaaagagagaaggcccttattatcttaatattgtactattccttaccattctcatctccatcatcaacccttcacaccaagacccttcttcccctctccccccaataaacccaagactcaccaaagcctacacagcactccaagcatggaaacacaagatcacctcagaccccaaaaacttcaccttaaactggtgtggccccaatgtttgcaactacactggcatatactgtgcacctgccctagatgaccctcacatctacactgttgctggagttgacctaaaccatgccaccatatctggctcattgccagaagaactt

SEQ ID NO: 20732 - DNA, 421 bp, Glycine max
caacaaatggattccccccactttccttcatttgcatctctcagagttcttctgtttggtttctgcgttataactttgtttcctgagtttgtagtgagcataacaaggcactacacatttaatgtggagtacctgaacgtcactagattgtgccacacaaggaacattctgagtgtgaatgggaaattcccaggacctcgcttggtggcaagggaaggtgatagggttgtggttaaggtggttaaccatgtctcaaacaatgtatccattcattggcatggcatccgtcagataacaactgggtgggctgatggaccagcatatgtgacacagtgccccatacaaaccaaccagtcatacacatacaacttcaccatagttgggcagagagggactctgctttggcatgctcacatatcat

SEQ ID NO: 20733 - DNA, 521 bp, Glycine max
aattagaaagaaaattttactctgctagatctgatgaaaatcacgagaagaaagaaacaggtaatgtagagtccactgacaaatggacaagtggggatgaccctaatcagaaaactcgcaaagacaatggagaagatggaaaatgtgatacaagagacaatccaagtagttccagcactaatggaaaaccttctgctgtggaggaagaagaagtgattctcttcaggcctctagcgaggtataattctgcaccattgtacgcactttttccccctcatgagcagatgtcatcaccaaaagacaaggatgataaagtcttgccttctgatgattgtctgcgccgtactacatctctgcctatggcacaaaatccatttcaaattgatccgtggggattccaaggtgacattaaaaattcaaggatgaacaaattgttccaactgctagaaccttctatgaaggaatcaaatgcacacacattttttgagggtacaatctctgctgggcatccctcactcaat

SEQ ID NO: 20734 - DNA, 548 bp, Glycine max
  unsure (1)..(548): unsure at all n locations
gcaaagcaaaccaaaccaaaccgtgagtccgtgacaagatctgtgttgtgatttgtgtgtgacgtacattccaaaactttcaatagttgaataatggctgttgagacttctgataaaccaaatttacctcatgattttgatgatgatgatgatgggccagtaatttacaaaaggtactcatcatctaagaaaaatcaattgcattcagaagtaaggaagtcaagttctcacagtcatgctggacagtcatatagacagatttctgatgcaccttctttgaatggccaaacttttagcatgcagaaaggtagtactgtcccttctcctaagccgtcacccgtgaagccttctgtagctatctctaaagcttcaaaatctcttgtcaacacctcctctacgaagttgccagtagcaaactcaaaagcaccttctttgggagataaacagaaaatgtccgttgatgttaaggtggaaccaaaatatattgaacgctgtgctaaaaantttgttgaagattcagaagatgatgaggataataaaccattgag

SEQ ID NO: 20735 - DNA, 653 bp, Glycine max
cggctcgagattaaatggcacgtttcatctactacgacacgaaaccccgatccagagaaactcctccttctcctcaacatatccttcatttatctcacctttctcttcctcaaaacctatctccacccttcttctagtcctaatattgttcatgcctccacaaaaatcttcaaccatgctagaatgctaagtgacatcagtgttgatggctgcactgatcttcacaagtactcagattatgactccaagtgcttatatgtcaaatccaatgttcactgcaggtcaaaagggtacataaactatctccaaatcttctactgcagctttggccactccccaattttgggtcattcactgcttgtaatgtggcttgtggtattgttttatcttttggctgatacagcttcaaactacttttgcaataacctagaaggtctctctgacatcttaagactatccccaaccatagctggggtaaccttgctttctcttggaaatggtgcccctgatttttttgcaagtgttgtttctttcacaagatccaatgatggggcagttggcctcaatagcattctggggggagcattttttgtctccagtgctgttttgggggtcataagtttccttgttagagcaaatgaaattgcaattga

SEQ ID NO: 20736 - DNA, 513 bp, Glycine max
ctgtaattcctccgatgcttcctcgtctggcttggtggactgggcgatccctctctcacgccttgctgttgcctcctcccacctccagcaccaggtttattgccaagtgtttgaataagaacatgggcgtggacaataatttgcttgccaaacctagaaggcgtgctaattttcggttatgcaatgtgtcatgttacacttctgaagtattggagattcaatctgatgctcctacactgcatgttctgtttgttcctggaaacccaggtgttattttattctacaaggactttgcggaatttctatatgagtcgctggagggaactgcttctgtcacagctattggccatgtctctcactcaagaacgaacttggaacatggacgcatgttttctttacaagaacagatcgatcacacagattgacttcatcagagaggaattggaaaatgttgagattcctatattactggttggacactctattggttcatacatatctattgaaatgttc

SEQ ID NO: 20737 - DNA, 394 bp, Glycine max
catcaaccaaacaaacactctctcattaggtattccctcctaaaaaacaccaaaccctctcaaaccttaatttacccaaaatgataaaacactctcttttagtcttacccatctcattaacacttgtaatttctctcttgcattcaaccactttagcagcgatagctccggccaccgcaccggcacaagctccccccactactccagcggcctccgccccaacaccaccccagccctccggcggcaccaccgacatagtgcaagtccttcaacaagcgaactcgttcaacatcttcctccgcctcatgaaaaccacccaactaataaaccaactgaactcccagctcctaaccataaagtccggcgggctcaccatccttgcccccgacgacgg

SEQ ID NO: 20738 - DNA, 944 bp, Glycine max
tcaccccccctccccctttccccattctccaatcaaaaatcatttcttttctgggggagcaaagatgggtgtgtcgaaattgggttttttggggcttctttttgctgattttctctttgcagttggagctgtggagctgggcaggaaccaacccactgaaagaatttcaggtagtgctggtgatgtattggaagatgatccagtgggaaggttgaaggtttttgtttatgaacttccaagtaaatataataagaaaattctgcaaaaggatccaagatgtctcaaccatatgtttgctgctgaaatctttatgcaccggtttctcttatccagccctgtccgaacccttaatcctgaagaagctgattggttttatacccctgtatacaccacttgtgacttgacaccaaatggcctccctttaccctttaagtcaccacgaatgatgagaagtgctatacagcttatttcttcaaactggccttattggaaccggacagagggggctgatcacttctttgtggttcctcatgactttggggcatgtttccattaccaggaagagaaggcaattgaaagagggattcttacactactacggcgtgctaccttggttcaaacatttggacagagaaatcatgtgtgcttgaaagagggctcgattaccatccctccgtatgctccaccacagaaaatgcatacccacctaattcctgacaagactcccaggtccatttttgtatacttccgaggactcttttatgatgttggcaatgaccctgaaggtggttactatgcaagaggcgcaagagcagcagtgtgggagaactttaaggacaatctgctgtttgacatctccactgagcatccaaccacttactacgaggacatgcaaagagccgtgttttgtctgtgcccacttggatgggccccttggagcccaa

SEQ ID NO: 20739 - DNA, 279 bp, Glycine max
tcataatcggatcaaagagtatctggggtcagcaaaatagtataaggaaaaaaaatggatttttggaaagtgggtttgcttagtcttctttgtgccgcttctgcttttgcaattggggctgtggagctgggtcgacatcaacctactgagagaatttcaggtagtgctggtgatgtgttagaagatgatccagtgggaaggttgaaggtttttgtttatgaacttccaagcaaatataataagacaattctgcaaaaggaccctagatgcctcaatcat

SEQ ID NO: 20740 - DNA, 410 bp, Glycine max
gttggatcggttcaccgagatggagtatgagcattgtgtgaaggcctttgattcttatgttagtgctgctaagatgatggatgagttggtggggttctatggttggtgtaaagacacgggaattgcgaggtcttctgagtaccctgatgtgcagagaatcactgataagcttttggggactcttgagggtttcttgaaggagatgagttgtaggccaaagagtcctgagaggaagttagaagtgaaggtaactgtgaatgaatcacaaccagaggcagatatgaataaggtgaaggctcttccagcacctgagactgagagttttacacctccaccacccatgtcggttgcacagcctaataaggcagctcccaattctcaaaagcagacgagtgatttggtggatctaa

SEQ ID NO: 20741 - DNA, 1058 bp, Glycine max
gctgagactgtgccggttgatgctgcggctgctctggggcctagagctcgtggacgaccgaagaaatacgctgatgagatggttgctgcaggccgaggtaggggacgaggccgtggacgtggtggcggcggcggaagaggacgagggagaggacgcggtcaattgcctgcgcactcagaaaatcaggggcaagacccgtgggtcgtccgaagaaggggtcaacttctgctagtacttctcaaaatgctgctaatgaagatctcaggaggaagcttgaacactttcaatcaaaagtcaaggaatctcttgcagtgcttaagcctcattttaaccatgaaagtccagtcactgcaattgctgctattcaagagctagaagtactgggaactatggacctcaatgtaccactaagggatgaaacacttccacatcaagtggagctgccaccaccacagccaccagtgcagcagcagcagcagccaccacagcagcagctgcagcagccaccacagcagccaccacagcaacacctagcaccacaacaactgccgccacagccaccgatatttcagcaaacatatcctccatttcatctgccgcagttccaccatcaccagccttcgctgcagttccagcaacagcagcagcagccgccacagccaccgccacagctattccagcaccaggcacagcctccttcccaccaacagtttcatccttaggaatcaggcccaggctaggaagaattacatggtcctcaatttgataatatgatgctaggatagaattacatggtcttcgatttggttatgaacaatctgaaacaagtgttttaacaaggcacatgagggtgtaacatatttgtaaagcgagtaggcagtagcagaactgatttttcgtcaagtgaatcgattgtccatttagtttgttgttgtgcactgttctagattgacccctgaagtaatttttagattttagagtactgataattctgttattgaagtaatatttgtttgactttggcagcttaagattattagtgatattgttcatgttgg

SEQ ID NO: 20742 - DNA, 566 bp, Glycine max
cttgaacacttttaatcaaaagtcaaggaatctcttgcagttcttaagcctcattttaaccatgaaagtccagtcactgcaattgctgccattcaagagttagaagtactgggaactatggacctcaatgctccactaagggatgaaacacttccaccgcaagaggagcagccaccactgcagcagcagcagcagccaccgcagcaacagttcccaccaccacaacagcagccaccacagcaacacctagcaccacaacaactgccgccacagccacaggcaccaatatttcagcaaacatatcctccatttcatctgccgcagttccaccatcaccagccgacgctgcagttccagcagcagcctcagccgccacagctattccagcatcaggcacagccaccttcccaccaacagtttcatccttaggaatcaggcccaggctaggaagaattacattgtcctgaatttgataatgatgctaggaagaattacatggtcttcaatttggttatgaacaatctgaaacagtgttttaacaaggcacatggagggtaacagatttg

SEQ ID NO: 20743 - DNA, 602 bp, Glycine max
gagactcccatgttccaattttggcaccactgcctattggttttgctgtgtttctagtgcatttggctacaattcctgttacagggactggtatcaaccctgctagaagtctaggtgcagccattatcttcaacaaggaccaagcttgggatgaccattggatattttgggttgggcctttcattggggcagcacttgcagctttgtaccatcagatagtgatcagggccatccccttctcgtcgaagtgatgcaacattgaagatgaattgaaggaataatgcctcaaaaataaaagtagtaactagttgagtccaagacagcattcccacgtaaaagatgttcctatgacttctgctaatgatttactactactactactattaatttatgcataattaatctattcaaatctcatgtatttggagacgcattagaacttgcgcaaaccgtgtggtatgcatcgtttatttctttttttgtccttctatttaacagcttctctgcacaaagcagaaactgcaggtctatatttgctagagtaaattgtataattatgttatgatgttcaataatcagccaaaaaaaagggcggccgccga

SEQ ID NO: 20744 - DNA, 442 bp, Glycine max
gtcagtttctcacctaacaatagcccagtctcaaagctgcagtcaaaaccaaacgtgttgagttcgcagaattctcttgaacttgttaatgattcgctagaaaacgaatcttgtttgacacttaacaatgacgagctgaggcacaagataagagagcttgaaagtgctttgttgggacatgatacatatattctggatacttatgataccataattccagaagaatctgattcatttttgtaagaggcagacaggtggaagagaatgatggaaatgatatctagaggggatttaaaagagatgctttgtacatgtgcaaaagcagtggcaggaaatgatatggagacaactgaatggttgatgtcagagttgcgtaacatggtctccgtctccggcaatccaatccaacgattgggagcatacatgttggaggctcttgttg

SEQ ID NO: 20745 - DNA, 711 bp, Glycine max
cttgtctacaattagacaccctccgagaagttccaattttctttggcgtcttttctccgccgcactgaaacccgttttcattcgatccggtgagagagagttcccctttggttgcgtgaatcttcagaaaagggttgtccttgtaatataatagtttgtgaattggagtttgtgtttatagcaagaaagaatggatgagtcaaaaaacaggcataatgataatttgggtgtgaacaaaatggggaaaaacattaggaagagcccattacaccagcccaattatggcaacaacaacaacagcagcatgaatgggggtagacagcaacagcaacagcctcagcctcaggtttacaacataagcaagaatgatttcagggatattgttcagcagcttacagggtctccctctcagtctcaggatcatcctcaatccaaacctcctcagaatcagaacaattccccaaaacctcaaagtatgaggttgcagaaaattaggcctccccctttgccctatgtgaggcctccattgcacaccaccttgccagcagctagacctgctcactttagacaacaaccatcaccaaaccctaataatatagctgagtcaccaatctctgcctacatgagataccttgaacattcaattacagatcccacttcaaggggtgcccaatttcaaccccatcatcatccagcttcttctgctttgct

SEQ ID NO: 20746 - DNA, 352 bp, Glycine max
  unsure (1)..(352): unsure at all n locations
caacatattattaagacacaccccaaaccaaaccacttcacacagaacacatatccattggtggtgagttccaacttctttctttgctttcttttctgtcttttagcttcccaaaggaatatactatcatatatcatagtatatcctctttcttttgtttttgtttttgtttagctgaagttggatcagtatggcaaatgctaaacacacttcacttgcaattctgatcgggaaccttctcttatatccactattctttgttttatttaatgtagatttgctgatcaatacactcttcattttatttctcattcggntctatgatctattggcttttgtagtcggtactatt

SEQ ID NO: 20747 - DNA, 591 bp, Glycine max
cggatctccgttcagggaattgacggcgttctctttccgcctcaggaggaagatgccgggcccgttacccgagcccagcccgctaagggcgtcgtcaagcaaagaagaggtaaattgttggaaacagcatgttggatgcttggaagctttggacagaactctagattcatctcttgtcaatgaagagctcttatctggatgctagcaagactagttatgaacgaaaaccctgcacaggaaattccaaagatgtaaaaagtcaacggaatatgaaggccaggttacttgaaatgggttaatagcagcagctgctatggatttggttttcccacgtttttgtgatggtctttttttctttctccttctcgatttttcttcttgtggatttgggtcttggacttgagaacaaaagtttctcaagtctagtgaaatccaatatatagtgcaatttagattcagttagagaggttgtgttggtgggatgagaaggttttatgtaataagatggcagtgaaatctgtgcccgattcagtaagtaattttacaaaaatggaaatacagtaataatcaataaaatgattcttttctgta

SEQ ID NO: 20748 - DNA, 384 bp, Glycine max
atgtaaaaagtcaacggagtatgaaggccagcttacttgaaatgggttaatagcagctgctatggatttggttttcccacgtttttgtgatgctcttttttctttctcctcgatttttctccttgtggatttgggtcttggactagagaacaaaagtttctcgagtctagtaaaaaacaatatatagtgcactgagcatattataatgcaatttagcttcagttagtagtgctgctacaaatcgttaggaggttgtgttggtgggatgagaaggttttatgtaataagatggcagtgaaatctgtgcccgattcagtgagtaactttactcaaaaaaatgcaaaaggaaatacagtaataatcaataaaatgatactttttaat

SEQ ID NO: 20749 - DNA, 626 bp, Glycine max
ttccagttaagcatataaatccaagtttgaatacctaacataacaatatataaggccgccaccaaataccaaatagatcccattggagagtaggaggagttgttcacccacatcaccttaccattgtcattttcttccccccttcccctacaaaaacccatcccctccttccaaaaccatcctcatccaaattatcccatcatacctttactttacccctcccaaagaagaaaaaaaaaaggaaaaggattccaacatatttgcattatacaattcaaatggaacacacaaaaatggagatgggtttggttttggtggtaatggccatgctgtgcgcaggagctgtggcacaatcgagttgcacaaatgtgttagtgagcctgtcaccatgccttaactatatcacagggaattcttcgaccccatcttcaggatgctgctcacagcttgccagtgtggtgcgctcacaaccacaatgcctatgtcaggttcttagcggcggtggatcatcactggggctcaacatcaaccaaactcaagctctggctttgcctggtgcttgcgaggtgcagaccccacccaccagtcagtgtaacaatgctgctgcttcaccaccaacaggaaca

SEQ ID NO: 20750 - DNA, 348 bp, Glycine max
ctaaaatgtttctattaccttagccaaaccaagattggggaaaataattcggaacactagttgtgctgaccaaccaaccatgtttcctttacaacgcggcaatgagctggtaatccagttttctaatggtcaccacccgcagcacaaaatctcccaagatctgattctggatgatcaagatatcgatcaatctccccttgtcggttattccgataaaaaattgcgtactagccgtccaaaaaaactattttatcatgaggctgatacctgtcacgctaattctaaccaagaatatacaaaaaagatggttcatagagagattgaaaagcaaaggaggcatgaaatggt

SEQ ID NO: 20751 - DNA, 359 bp, Glycine max
caccaacacacacttttttatttagtggaaaatttcattgaaacacctcacaaacatgccttttgaatcatcagccaagtctagtcaatctccccctgctgaaggcgacaagcacaagcatttggacagggaaattagggagatggtatctgccatcactcaccgtgtaactgattttcacaaagctggctccacccaccatttggagaaagagcatgaagatgacacgaggatcattaccctcacaggaaccaatgatggagcaacactgcgaagcgaattggatgaaaaatcgggcaaaacttctcatggtgagtctgaagaattgagcacctttgttaacagcaactttcaggcca

SEQ ID NO: 20752 - DNA, 518 bp, Glycine max
accaggaaaggaagaagagcttgaggaagtgatgggagatgggagggtcggtaaaggataacagcgtctctatgattaattgttgtgttgtttattcttttgccgattccacccattcctatgattttctttggttcctttctttccactctcctctccgctctccacaatctgttatggtcatgaagctgccggtctgactgggttacattcaagacaagaaaaaacaacaaatcgcttctttcttttttcgtcttttctttcctttttcttgtttaaggcttaacaaattatctcagctctagtagatgtagattattacagacagatgctagttaattagctagctccacaagatgtttaaaaatgtgatctatccatatcaagctggaccaaatccaaataattttactggagcttttctttcttggtaaaagctggacatttttaaaggtttgggtgccactataacgccaccaaagttttctttcttgatttttaaccaagttacatttttt

SEQ ID NO: 20753 - DNA, 487 bp, Glycine max
cggaagaataacttaggaggaagtgggagctttctattaataggtcaagtatggctaagtcttaagcaccaggtaagcgtaaatgggaattcgggtttacctaataatcgccgttggagccgaatcaaccagtacttagaatgaactatgcgtaaactaaaaagaaaccaactctttagaggacgacacatagctttaccattggtaatgggatctagaagaataatccgttgggttcttccggatcgtctaggatcacaactaccgacatcaaaacttaatagatttttacgccatcaacaagataggattatcaaagcgatagaccgtggggatctagtgctggccttcaagatgttcacatccctagcacagaattcatacgtcttccgtacaatgtgaatttgtagaatcatgaaaggttgatactggagcacgaatatcgaccagttaaataaaatcttagtgaaactggacaggatcatta

SEQ ID NO: 20754 - DNA, 307 bp, Glycine max
cagataatgagtataattccaaagacagctctgtgtagttggtttatgaaccccagccacgtcctcgagcaagtgctgctcttgctggggaagcaattgtcaaagtggcatgtggaacaaatcatacagtggcggtggataagaatggcttcgtctacacgtggggttttggtggttatggaaggctaggacatcgggagcagaaggatgagtgggtcccaacgacgtggtgaaagttttccaaaatagaaatgttttgccacccgatgcaatcatatcagcaggttctgtgaattctttatgtact

SEQ ID NO: 20755 - DNA, 697 bp, Glycine max
tacttatagcaacatggtctgaaaactcaagatatctttgaaaattgcggggcatagcagatgctgatacatgaaagcgaaacctagctatcatcatcatcacagaagaacaacaacagaggaaaaaagaaaaagaaaaatgttagaggtgaagagaatcggtgtggtggggagtggccaaatgggatcgggaatagcccaagtcgctgccatgcacggcatcgacgtttggcttcacgacctcgaccctcaagctctctccaaagcctcctcttccatctcttcctccatcaaccgtttcgtttccaaaaaccacatctctcaggttgcgggtgctgatgctttgaaacgactgcgtctcacgacggatttggaggatttacagctagcggatttgatcattgaggcgattgtggaatccgaagatgtgaaaaagagtttgtttgcgcaactcgataggattgccaagagttctgcgattttggcgtccaacaccagttccatttccgtcacgcgtctagccacctctaccagcaggccacgtcaggtgataggaatgcattttatgaacccacctcctgtgatgaaattgattgagattgtacgaggtgcagacacttctgaggagacattcgttgctacgaaagcattgtcagagaggcttggcaaggtagtgataacctcccatgattattca

SEQ ID NO: 20756 - DNA, 567 bp, Glycine max
gttcattcaggatcttacactcttggtcaagagcagtatcattccaatggagcgcattgatgatgctgtggagagaattttgcttgtaaagttcaccatgggtctttttgagaatcctctagctgataccagcttagtcaatgagcttggaagccaggaacacagagacctagcaagggaagcagtgagaaaatctcttgtgctgcttaagaatgggaaaaatgaaagtgcttctcttctgcctcttccaaagaaagtcccaaaaatcctagttgctggatctcatgctgataatttgggttaccaatgtggtgggtggacaatcaaatggcaaggattcagtggcaacagtgacacaagaggaacaactattctcaatgccataaaatcagcagttgatacaagcacagaagtagtctttcgtgacaaccctgacaatgagtttgttaagtccaataacttcgaatatgccattgttgtagttggtgagcctccttatgctgagactgctggggacagtacgacacttacaatgatggaatctggcccaaatgtcatcaacaatgt

SEQ ID NO: 20757 - DNA, 1372 bp, Glycine max
  unsure (1)..(1372): unsure at all n locations
gcaacccatgaatgacacctttgtattggatctcaattctagtaatcctgagtggcaacacgtccaggtaagctctcctcctcctggtcgttggggccacacgctttcttgtgttaatggttctcatttggttgtatttggaggctgtggaaggcagggcttgctcaatgatgtgtttgtcctggacctggatgcaaagcctccaacttggcgtgaaatttctggattggcacctccgcttcccagatcatggcacagctcctgtactcttgatggtactaagttgatagtttctgggggatgtgcagactctggagttctcttgagtgacactttcctccttgatttgtcaatggagaagcctgtctggagagagataccagtggcatggaccccaccatctcgtctgggccacacattgtctgtttatggtggtaggaaaatactgatgtttgggggtctggccaagagtgggcccttgcgttttcgttccagtgatgtattcacaatggatttaagtgaggaagaaccttgttggagatgtgtaacggggagtggcatgcctggtgctggaaatcctgggggcatagctcctcctcctagacttgatcatgttgctgttagtcttccaggtgggagaattctaatatttggtgggtctgttgctggtcttcactctgcctctcagctttacattcttgatccaactgatgagaagcctacatggagaatcctaaatgtacctgggtgccctccaagatttgcttggggacacagtacatgtgttgttggaggaacaagagctatcgtactgggtggtcaaaccggggaggaatggatgctaagcgagctccatgaactttccttggctagctctgccatctaaatccagtgaataaacactgttgtattgaagggaatactacacggctctgcttgatgtcgtgaatttgaacataagttagcgggaaaggttgcattagcgggaatggatgctaagcattgctctggtcagaatgtgtatatcaagttgttacgacaatgcatttgcttgaatggttggttctggctcgagaataacttctcgttgagtgacatgagacgaagttttttttgaggtttgtgagactttgcccttcagtacgcataatgaattattcttcctgaacagaatattagtggtaatatattagggtagtttctcacttgattttccatgtggtgtcttgttcaaattctgtaatttgaatcccgataaagagaaaagaagaagaagaaaaaaaaattgtatgttaattcccgtaattagatctattatatttggatgggnnnnnnnnnnnnnnnnnnnnnnnnnnnnnnnnnnnnnnnnnnn

SEQ ID NO: 20758 - DNA, 545 bp, Glycine max
cttgtcttgagaccatgaggtttaagagccactctgtcgccgccgctgctgcaactttcaactctcgttgtttccgtgaccacaacacaaacagaatgaatcgtcgcgcaaagctttccctcttgaacgcgttcttcagaacccgacgcccttttcaccaatccccaattgctgctccattcactccaccgacccacgtcgcgtccacctcaaagttccactctttttccaatacccctcacacccacttcgcgattcggcaatatccgagaagtttcgctggtgggtctggcgcgttggaccacaccaaggaggtggacaccatcaacctcaagtttgcagaggcgagggaagagatagagatggcgttggagtccaaagacaccgtttatttcgacgaggaagccgagtgtgcacgcgccgccgtcaacgaggttttgggcatgttcgagggattgttggctaagttgccagagagggaaagaggggctctgcagaggtctatgggtctcaagattgaacaattgaaagctgaacttgcacaa

SEQ ID NO: 20759 - DNA, 510 bp, Glycine max
aaaaaaataaaagagaaaagaaatgaagttgtcaggtgacagaagcagctttatcttctttttctgacccctttcatagtaatgattccgcagcttgttactctcttctctctcaaaacaaaacttgaatccatccatactctacataccccttgcccttgctttgcttctttctttctcacaagcaccagcagcactcaaatcaatcaatcgtttttaatgcccttgcttctccctctttccgtgtgtatgtaaaatctttgtttttatcagaggtggtgcagaaagttgtgtctcagatccctatatacaccgaaaacgatacaactgtgtgctgtgtacagtgtgcaccgtgcttctctctctctctctctctctcaacatcatcattttacatattactactacacctagctattaccgaatagagtggtcctcaacctcaacctagagcctcactctttttttttgccttttcctttgctctttaccctatattattcagcccaa

SEQ ID NO: 20760 - DNA, 315 bp, Glycine max
cttttctctctcaaaacaaaacaaaacttgaatacatacatacatacatgccccttactttgcttcttcatctctctctctctctttctcaatattcaccagcacagcgcacacacaaatcaatcaatcaatgaaatcgtgtttaatgcctttgcttctccctctttctgtgtgtatgtaaaatctttgtttttatcagaggtggtgcagaaagttgtgtctcagatccctatatacaccgaaaaagatacaactgtgtgctgtgtacagtgtgcaccgtgcttctctctctctctctctctctcaatatcatca

SEQ ID NO: 20761 - DNA, 549 bp, Glycine max
cgagagatgctggcgcgagtttcattaatgtatccatgtctaccatcacctctaaatggtttggtgaagatgagcagaatgttcgcgctttattcacgctggccgccaaggtctccccaactattatatttgttgatgacgttgatagtatgctgggacagcggaccagagttggagagcatgaagccatgcgcaagataaagaatgagtttatgactcattgggatggacttatgacactctccggggagcgcatccttgttcttgctgcaaccaataggccatttgacctcgatgaagcaataattaggagatttgaaaggagaattatggtagggatgccatctgtcgagaacagggaaaagattttgaggactcttttggcaaaagagaaggtggatgagaaacttgattttaaggaagtcgcaaccatgaccgaaggatatagcggaagtgatctcaagaacttgtgcacaactgctgcttacaggcctgttagagagttaattcagcaagagagactaaagactctggagaaaaagcagaagg

SEQ ID NO: 20762 - DNA, 438 bp, Glycine max
ggtggataagcctgcggctagtcgttctgaatcagctgagatatatgttttggggcttaaatataaggcccctgccaaaattgatccgcggcttcttgatgtgaagcatctctttcagggatctgtggaaccgcagcctaaggtggtggatgtacttagagatagtaagcaaaaaatggcaccgtgatggctatgaagatggagacacaactttgaggaagctgtcttcagctgcaaatttcatttggtcaaattctcctctggagatccttggttcagtcacttccataacctttactgatccagctgattcactgatcaaggatcatgacctaactagtgaagaggtaaaatctctctgcgatgatttaagggttctggggaagcaagacttcaagcatcttctaaagtggaggattcaagttagaaaagctcttt

SEQ ID NO: 20763 - DNA, 956 bp, Glycine max
cgtacgcgtgggcggacgcgtgggttttagtggggtatggcttgacatgggagtgagcatgaggaatgtggaaccttcaccgactacagggtcgctttctttgcttcatcaaacagcatatggttccatgacttctgctgcatctgctacatttcctgtaaccactgtgtgcttcaatagcaataccgttgatgagagaaaacctagcttctttgagtttaaaccacacagtggatcaaatatggttcccgcagactttgacaaccatgcaagtgaaaaatctactcaaatagacggtcaaggaaaagctcaagcttttgattcatcacccttagtaaaaaatgagtcagcatccccttcaaatgaattaagtctatcatcgcctgttcaaatggattgctcaggaggtagtgcccgtgttgaaggtgatttggatgaattgaaccctaggagcaacataacaactgggcttcaagcatcacaagttgacaatagaggtagtggactttccgttgcagctgagcgagtatctgatgatggatacaactggagaaaatatgggcaaaaacatgttaaaggaagtgaatttccacgcagttattacaaatgtacacatcctaactgtgaagtcaagaaactatttgaacgctcccatgatgggcagatcactgagataatttacaagggaacacatgatcatcctaaacctcaaccaaaccgccgttactctgctggaactataatgtctgtgcaagaagacagatctgataaagcttctttgactagccgagatgacaaaggatccaatatgtgtggccaggggtctcacctggctgagcccgacggtaaaccagagttattgcctgtagcaacaaatgatggtgatctagatggtttgggggttttgtcaaacccgaataatgatgaggttgatgatgatgatcccttctcaaagc

SEQ ID NO: 20764 - DNA, 700 bp, Glycine max
tgtgaaatgaaaacggttcaatgtgcaggtatttgatggacatggagggaagagtgctgcacaatttgtccgtgataatctgccaagagttattgttgaggatgttaactttcctttggaccttgagaaggtggtaaaaggtcatttttggagacagatgcagcatttctaaaaacatcctctcacgagccttccctttcttctggtacaactgcaataactgcaattatatttggaaggtctttacttgtagccaatgctggagattgccgagctgttttgtcccaccatggaagggccatagaaatgtccaaagatcataggccaaactgcatcaatgaaaggacacgagttgagtccctaggtggcttcattgatgatggttacctaaatggccagttaggtgtcactcgtgctcttggagactggcacattgaaggaatgaaggaaatgagtgaaagaggaggaccactgagtgctgaacctgaacttaaattgatgacattgaccaaagaagatgaattcttgataattgctagtgatggaatatgggatgtttttagtagccaaaatgctgtagattttgctagaaggaggcttcaagagcacaatgatgagaaacaatgctgcatggaaatagtgcaggaagcaagcaagagcaggatcaacagataacttgacagttgtgcatggtgtgttt

SEQ ID NO: 20765 - DNA, 604 bp, Glycine max
tatatatgtgggaaaataatgatctaagaggacaagcatcttttagtgattttgcataggaggatatgcaattgcaacctttaatcagggtttgacatgtaatatgaaaatggtcaaatgtgcaggtatttgatggacatggagggaagagtgctgcacaatttgaccgtgataatctgccaagagttattgttgaggatgttaactttactttggagcttgagaaggtggtcaaaaggtcatttgtggagactgatgctgcatttctaaaaacatcctctcacgagccttccctttcttctggtacaactgcaataactgcaattatatttggaaggcgagcacttgtctccactgttctttgtccttcagaactgtgggatatattatcttttcatacaataagtgtagctgtgaaaatggcacattagcattcaagtcaaatggggtgccagatatcatcaacattatttcttgcatgatttattattgtatctatgcctactctatatccccttccctgttaggatagcaattaaccacttatccgttagctagttagttagaaaggattggttagatcaataaggtaagagggattcat

SEQ ID NO: 20766 - DNA, 549 bp, Glycine max
cggctcgaggtacctttgggagatgatgtgggctctagaatatgatcctgatttgttcttgatgtatgaaatgcctctatcagcttctgaaaaggctgagggctcaaaagggaaaacaaagtcaatacgtcaatgtggaaagtatgagagagaaattgtgaagagtggagcaaaaaatgcagaagcacctcttcctatgtctattttccttgttgctagtgtattgaaagataaaagtgcaaaactactccaagaagcacggggcttggatgatgttgtcaagattttgaatgacacaactggtaatatagatgcaaaaaaagcttgcagtggggctatgaaacttcacaagaacatatttgaaaaaggccaagaaaccctagcaccaaatacatcgaaatacccaatgattcttttgtaatgtgttgtatggtagatgtgttgctccctgggagacaataatggagaacataggactttaaagaattgaaaaaaggaattcaaatatccaaccatcaaaatccctgagcaattgttgtatgtgaaatc

SEQ ID NO: 20767 - DNA, 676 bp, Glycine max
ctccatgttctgtctccaatggcaggagctactgcaacaacaacagcattaatcaatctcacgcgcccttcacactcctccaagcttcgccacttctctgcaaacaacgctcccttttctatccaaccctttcattccggattctaccacaaccgccgtttaaagcccataatcaccaattgccatggcaagctgaatagctcgggtgggggagaggcatacgcgatggatgaagcgggttttgacgagtacgatggagttgaagaggaaagcgatgacgaggatgatgcagagagtagcgtggatttgttgatcagattcttgcagagcatgtttaagaaggtgtctaagcgggcaaagaaagcatctcgctctgttttgcccacagtgatatcgccccagctcgtttcttttgccgttgatgggactctgctacttgcttcactttctgttgtcaaagcacttcttgaggtcatctgcactcttggaggtactgtatttgctgcaattctggtcctgcgtgtgatttgggcagcagtttcttacttccagtcaagtgggaatagcttcaatcaaggggggaattcctttggtgctgttgcctaaacctctcttcaacttttaacaaaagatggcttatgtgaatttgtagtcccaatgatgaaaatgagatttg

SEQ ID NO: 20768 - DNA, 388 bp, Glycine max
  unsure (1)..(388): unsure at all n locations
ctgaaagaaggaatttgtactagtatggtgcaactgcaagcagtagtgagtgatgaagatgaaaagtggtttccatttaattgaagtggtagtatgctagccaggtagcatttacatatttgctttggtgtgtggcactgcaaattaagagcaaacaaagtcttggtctttgtggctgtgaagaagggaagggatgctttgcttgatgcttggaaaaacaaaaacaaaaaggcatgaggatgtgatgcccccatttttctagttttagttttatccacaagctttgttttgtgagttgtaactttgtatttgtaacctataaacccacacaaccccaaccttcaccacccctcatcctcatctttcactctntttcattttgttttgt

SEQ ID NO: 20769 - DNA, 607 bp, Glycine max
gccagacaccagatcaacaacagactttatctgcaattggggaggatttatttgcaatagcacaagaccagccattccgttttccatctaccttcacctttgttattagagcattttctacacttgaaggcctaggttacatactcaatccagatttctcctttgtgaagattgccgcaccttatgcacaggaacttttagacataaggcaaaagcgaccgactgggccacaactcgtggaggagataaggaaacaagcagatgatgcaagaaccaattcaatatcgatgccttacagagttcaaagaatagaggaatttgtcaagcaacttgaggcaggagacctgaaactccgagtccgagtacttgagtctgaaagagctgctcgaaaagcaacaatattacaaatggctaccatgtattcagtattggggggaaccctgctaaaccttggtgtcactttgagtagccaaggcaatcaagcttttgcaaatggatcattcattggtgcaggcattttaggggctctatttttaaggtctatgcaacgggtgaagaaacttgaccagtttgagaacatgatataattcgttcccaccaaattcaa

SEQ ID NO: 20770 - DNA, 1666 bp, Glycine max
  unsure (1)..(1666): unsure at all n locations
atcatccccgtattataaacccaggattgcctcttcttccaggaaccccctcaacaaaaggaaactctcattcaccttcttctctctccctcactccctctctttcttaatacaccaccttcccaaccctcttccattctccttctccaactccaacccctgcttcccttttttcattttctcactccccatcttctgagagtgatgggtgtttgctaccgctgttcccacacctcccacatcaccgccatcatcatcaccagcttcttccgccacaagccttagaattatactattcccaccctccctctttcttcaacaacaaccgttgacttcactacagtcacgtggtctttctctgaggatccaaccatggcggctggaactgtcttctgcgctgctgctactgctgcttctaatttgacaacaaccacttttcttcacaaccaaacacctccttccacctcctctcagcctcctctcgattctcttttcctctctgcctcttcccctttcctcgggtcaagatctatagtgagttttggagatgttcaaggagggaaggggtgcaatgattcattcttccggccctatgatgagaatggggatgaggacatggacgagtacttccaccagcctgagaagaagcgcaggctctccgtggagcaagtgaagtttcttgagaagagctttgatgaggagaacaagctcgagcccgagaggaagatttggctagccaaggaactcggcttgcagcctaggcaggtggcgatttggtttcagaaccgccgcgcgcgctggaagaccaagcagatggaaaaggactatgattccctgcaggctagttacaatgatctcaaggctaactatgacaaccttctcagggaaaaggataaactcaaagctgaggtggcaaggctcactgagaaggtgcttggaagagagaaaaatgagagtcacttggaacaggctgaaaccaacggattgcaggagccgctgcacaagtctttggttgattcagcttctgagggtgaagggtccaaagtgacctttgaggcttgtaaacaggaggacattagctcagccaagagtgacatatttgattcatcagaaagcccacaatacactgatggagttcactctgcacttctagagactggtgattcttcttatgtgttcgaacctgatcgatctgatgtgtctcaggatgaagaagataacttgagcaagacccttctgcctcattacatttttcccaagcttgaagatgttgattactccgacccacctcatggttcatgtaattttggaattccggaggaagatcaagccatttggtcttggccttactgaattttctctatagcatatagagcatgtctctaccttctactctcaagttcttctgtttaaacttgagatcatgtggtagaaaagggtgagttaataataagccaaagaaaaaatggcactctactggtttgttcccaatggtggtttcttgccagctttttttttttttttttttttactttgcaatgtaacttttggttcaaatgtaaataaataatatcttcttgttgaggatgtagctctgaatatcacttcaaggaggaatttacttaccnnnnnnnnnnnnnnnnnnnnnnnnnnnnnnnnnnnnnnn

SEQ ID NO: 20771 - DNA, 480 bp, Glycine max
cctagtttcctaattcccacactaccaatctcaacaacaaccgaaaaaagtgaacaaatgattgaaacatcagaagcttcagtttacggtgtgatggcaagttggctcacaccctccaatctattcattttcatcaatctcgtcattggaaccatcgccatctcctctcgtttcgccaacacgaccaaaagacaacaccagctcgtccgttctccttctttgctagaaaggcttgcgtcctttaacctttgttatcacaaacatgaaccaacaacaaggatgatgacgacgacaacaacaatgtttcacagagttgtggacccagtcgagcgtctggatgaattcaggctcgaccaggtcccctcctcgtccttgttggacagggttaggtctttcaacctggggttttataagagtgataatattgaaagacatggtccggtccataattctgacttgccccaactggtccagctggat

SEQ ID NO: 20772 - DNA, 638 bp, Glycine max
gcgggttcagtcacaatcacaaacccccaatgctgcaactgatagaaataatggtttgcttgctcaatctcgcctgcagacaggcaatgatcgtggtactggttcctctcagactccgatttcaaccttgttagtgcaaggagctgcttcgttttcatccctttcatcagcattaaattctgcgatggattctgctgaaagattagttgaggaccttgagtcatatattcataatcacccaacaaatggtgtcaatacaaattcaactcatgatgggaatgttgctgcaactgattccacacctgcagcttctacatctcattttagtaggaatgttgacaccactgctgatattggcttagaaattcagacagcaggtagtaacatgcagactgagactagtccattggacccttcgtcgtcttcatctcccagaggaagcactcgtgtttcgacttcaaggcaagtttcgaatgatcgcagaagaaggagatcgaggtgaaggtcttttatgtaaggagatgtaaatcatattaccagaaggttcccaatttatagaaagcgacaatatgttttttatagaaaattttctgtcaatttaagcaattggtttgtataaaggaataaacaaccatttt

SEQ ID NO: 20773 - DNA, 419 bp, Glycine max
cttaatctcggcatggcaacccaagcttcacgatccgagattgaggttgtggtagacacgaccacctccaacgataacaacaatgaggaaccaacctcgttgtccttaacgtcgtccctgaattctatactaacaaaattccatgcaggttacttcacaataagcctctccctcggtggccaagctttgttgtggaagacactgatcgaatcatcatcatcaccaacacacgacacaagcgccgctctacgacgcgttctttgcacgcttccttccgcagcagctattcttgcactgtggtcgttggctctctttgctctcgtgttgctctctcttctttacctcctacggtgcttgttttactttaagatggtaaaggcggagttcttgcatcccgtaggggttaactacctcttcgc

SEQ ID NO: 20774 - DNA, 618 bp, Glycine max
ttctcctttggcgccgacggggcagaaacagaggggtctcaaacaaggaacgatcataggaatcgtggtcggagacataatcggcgtgggaatcttggccatgctgtgtgtctacgtgtaccgtttgaagaaaaagaaggatgcggagagcacaaagaagaagaacgaagcggctataacaagaagcagaagcgagagttcctcgtcaacaacctcagaatccagaggcttcacgaggtggtcgtgtttgaggaagagaacggaagaggaagattcttccgagacaacaagctcttccgaaagtgaagtggagggagccacggcggcgacacatgatgataataataataacaacacggggactctagttactgtggacggtgaacgacaactggaggtcgaaacgctgctgaaggcttccgcgtacatattgggtgccacggggtccagcataatgtacaaggcagttctggaagacggcacgtcgttagcggttaggagaatcggcgagagtggcgtggagcggttcaaggacttcgagaaccaagttcggcttattgctaaactggtgcaccctaatctggttcgcgttcgtggattctattggggacacgacga

SEQ ID NO: 20775 - DNA, 570 bp, Glycine max
  unsure (1)..(570): unsure at all n locations
ctcgagccgaatcggctcgaggttgaaaaccctcacacagaaagagtggtttgtgcggtggtgaagaagcgttcggaatagaagaagaagatgtcgtcggtttacgttctagagcctccgacgaaggggaaggtggtggtgaacactacgcgcggtcctttggacattgagctgtggccgaaagaggctccgaaggccgcgaggaacttcgttcagctctgcctcgaaaactattacgacaacaccatcttccaccgcatcatcaaggacttcctcgtccaaagcggcgaccccaccggcaccggcaccggtggtgaaagcatttatggtggtgtttttgctgatgagtttcattcacgtctgaaattcaagcacagaggaatagttgcaatggccaatgccggaactctgaattccaatggaagtcagtttttcatcactctcgaccgctgtgattggcttgatcgcaagcataccatttttggaaaagtgacgggagatacaatgtataatcttttgaggctgngtgaacttgaaactgataagaattgaccggccttagatccgccg

SEQ ID NO: 20776 - DNA, 795 bp, Glycine max
ctcgagccgaatcggctcgagtgtaaatgagagtatggtgactggtgaatctatacccgtttcaaaggaggtcaatgcatctgttattggaggtacgatcaatttgcatggcgtccttcacgttcaagccaccaaagtaggatctgatacagttttgagtcagataattagtttggtggagacagcccagatgtccaaagctcccattcaaaagtttgctgattatgttgcaagcatatttgttcctacagttgtggtgttggcattattgacactattgtgttggtatgtagctggggctcttggagcatacccagatgaatggctgccaaaaaatggaaatcactttgtttttgctcttatgttttcaatatctgttgtggtgattgcatgtccatgtgcacttggtttggcaacaccaactgctgtcatggtggcaacaggggttggggccaacaatggtgtgttaattaaaggaggagactccttggaaagggctcagatggtgaagtacgtcatatttgataaaacaggcactctaactcaggcaaaagccactgttactgttgctaaagtgtttggaggaatggaccgtggagattttcttacattggtggcttctgctgaggctagcagtgaacacccactggcaaaagcaatatcgcaatacgctcgccattttcatttctttgatgagtcttctcccaccagtgataccaagagtgcttctgaggactacaagtcagggtggctttatgatgtctcagacttctctgctcttccaggaaggggcat

SEQ ID NO: 20777 - DNA, 583 bp, Glycine max
gttgctggaagcaaaggaagattgggctatgcttcattaataccatatgttgagcctgtggtacaagcccaaagtgctgaagtctattttgacttctttcctgtggaagttgatagtcaagagggagttgctcatattggtgaactcaaatctggggtttatgtaccactgcccacaaaaactaatcttgtggaaactcccaaagaatggcagttggatttgccttgtgataagattccaagtgtgttaaccactactgatgagagattggttggcacagagcatgaaggatatgacccatttcttggtggtattcaaaaatatgcaactcccatgatgcctcttgatgaggagattctttccaaagttgcacaagacatggttgaagaatggtttgattgtgttgatgaggaggatacatttgaagaagtttctttgagtgctgcactcaatggtgttgaaggtttggactacatggaacgcattcctcttgccacttcagagggttttccccatgttctgtccaggaaaaatggtgaaaaaggcaagagaagatttgttactggagatggtaagaaatgtc

SEQ ID NO: 20778 - DNA, 801 bp, Glycine max
caagatggtggagacagccctgttgttagtttgtttaaatcaacagctgctgcaatggtttcataccctggctgtccatcacctacctctttccacattatgtcaaaaccagcacacgccccagctcttttatgcaaggctaacttgaacactggaagtgtgctggagtatgcacttgctttcgctagtgctgcgttggataaatattgtaataaatggagtgctgcacccaaaacgggcttcattgacatcacaatttctaaagatttctatcgaatatacagtggtctccaaattggatacttggaagaatctgcccaagtgccatcaaatagtcatgaaaggctgggagattcaattgcttgggggggctgcactataatttatttgcttgggcagcagctgcattttgagctgtttgacttttcatatcagatcctcaatatcgcagaagtggaggctgcatctgttatgcaaacacataagaactcacaatttgccgtgcagggatgggaagccttattggaagcaatgaaaaaagcaaggagattaaataaccatgtattttctatgcttaaagcacgttgcccccttgaagaaaagacagcttgcgctattaagcaaagtggtgctccaatacatcgtataaaatttgataacacagtttcagatttgaaacactgccgcagaaaggttcttaaccgagtagtctagtggtagacttccagcaaattctgtgccttgttccctatacggtgtacatttaactatgcggtgttgtttgtaatagatactaagtac

SEQ ID NO: 20779 - DNA, 878 bp, Glycine max
ctcgagccgctcttacggaagagtcactgtgcttttcctgcttaaagtgtagtggggttgtgctttttggtttcatctgctgtttgattttttttctgaacaaggaaaacagctgcacttgcatcacagctcaagccttaaagctttagttctgaaaaatatagaaaaaaagaagaagatggaaacacgagtgtcttccaccaagatcattcttctgccattacctggctgtttttaatgctttggttgacattattgagggtatgctttaattgaagactttgttgtgcttgtccttggatgtgacacgcaagttttgcttcaacatgtgctgctgcttccaccgaattctcttcaattttactctccatgctggggtgttgttggtgaaagaaagctgagagatcttcagagttgttgatctagtttttcttaaggagaaaatgggactgccgctgattttcttgctaattgagctgcatttagtggtctgcactcagcaggtccatgaatatgcagccaccaagctgcaacattccagtgacagaagccattttagtattgcaatcccaccatcaaagtcatcttctgaaggtcattcaagtattgcacacccaccttccgagtcatcttctggtgtacctgcaagtattgcactttcagcttccaagtcaattcacaaagctcctacaattatatggacacatagttctgtggattctcctatcttacatcataagcatcacttttcaaaagaaagttctccaatccaactccagtggcagcgccaacctatccagtccaggctcctacatacagtcatcaaggtccttcagtcttcgaatcacaacctcctttctcctcaccaaatattaagg

SEQ ID NO: 20780 - DNA, 792 bp, Glycine max
cttggccttaacaagccgggggcttaacccttcggggagctcaacgctcccgatgttaaccttttccgccacaaacaacccaacggaatgcgcggtttgtttatcagagttcgagaacggggaaacgggtcgggtcttgcccaaatgcaatcacagtttccatactgagtgcatcgatgtgtggtttcagtctcatgccacgtgtccgctttgcagggaaaccgtggaggctatgcccgagcgagaaacccgatccgaggtggctgttattgtgtgcgagaccgaaccggttcgagaagaggtgaaccggtctggaccggtgggtgcttcttcttctgctgctgctacttcgttgcatatcgagaacttggggtgcgaggatgggtgtgaatcggagtcatcgtttcgttcgccggtgagtcgtatattgtcgttcaagaggattctgagtagagagaagaaaggaagcgttgtaggagtgtgcagctccatgaccgagttagacgtagaacaacgtggagagtgtgactcggtgagttgatggcagcgacaacgtgaaatcgaaattggaatgagtctgagattgaggaggaatttacgctgcggcagagtttgcagaggtgacatgacacacaacactgtcgagtgtcgacgtaatatctgatatgtaccataccttgtacagtcaaaagagaatgacaggttaaaagattcttttattttatttaattttaaagtttgtgtttttgccattttctttaaatttaatagaagaaaatgaatttttgtttt

SEQ ID NO: 20781 - DNA, 704 bp, Glycine max
aaccggtctttacattttacctggaactcattagggacttgcttcactcgtctatgtatatgtgcttctttcttgtaatttttgtaaactatggtattcccttgcaccttatacgggagctttatgagacatttaggaacttcaaagtccgtgttgcagattacatacgttatcgtaaaatcacttcaaatatgaacgatcggtttccagatgcaacccctgaagagcttaatgcaagtgatgcaacctgcattatttgtcgtgaagagatgacgacagccaagaaacttatatgtggacatctttttcatgttcattgtctccgatcatggctggagcggcagcacacttgccccacctgcagagccttggttgtaccacctgaaaatgggacaacttcggctgcagggcagcaaggatcccagtcagatgtccatcaacgggggacaactgggacaggcagtggaagcacagctcagactgaggctactgatagtttgagtcgacatcaagctagactccaagcagctgctgctgctgcttcaatatatgagaagtcttatgtgtatccctctatgaattctcttgtatggtatgacatttttcccaagatgctttcctttacaattttctcccttttaactccaaaaggaacctcttgtagttgtaccccactcattagtcactagtcacatattaactcg

SEQ ID NO: 20782 - DNA, 552 bp, Glycine max
gttatctgacacttctctctgacttccctttcatcattcccatttctctttcctcagccttcccattatttattttcgcatccctctctctctctctctctctctgtaatcttatctccttttagcttgtctctcatcaccacttgatagtgatgaatttttttaaaagtactaataatagtataatactaccccctcttgtgtggtgttcatattcttcaaagtccaaagtagcttctcactgcagattctttcctctttttttatagtacagtactaggtgatacctaaatggtaagctgacctaagcgaaaatttgttccattctttccaatttcttaaaagaagttagctcacagcagatccatacaaacatgatgactccaaacttgaatctggaaccagaaggtggtttaaaagtcctcagccaagtaggtttcgataaatcaatacaagagacatctcatgatcttaccaaggacagcactgctacttcctcctgtcttaccaaggctgatcctgacccaggttctgtttcccttgacttgtccc

SEQ ID NO: 20783 - DNA, 655 bp, Glycine max
acagatcttatagaagattttgaaacaatctgacgtgccaccactctgggatgcagccgcaatggccgcacgcacctctgaactgagatgcatcggtctccttgtagtggcccaatgccactaagcaccgctatcgataaatgacaatctagatttatggtgaaagcatgtgtttgtttaatcatttttccaagaagcacaagatgaatgttagtacttcatctcagcggatccaccaatgagctgctcccttgacaaaggctccctagtcaaggagaaggttgatcaataatgcttaatattacttcatcgtgacctgtgatcagaaagctcttttaaattatcctgctcctctttgatgcatggttcatccactgccattgagtccacccccaacactgcatctttatcctcagcttcaacacattcacttttcacccttctgcgaacaggattgctgtcatcgccagcctccctgtcagattcgggatcccatctttcatctctatcatcttgatcttcatctctctctagaagctctgcatcaggtggccgttcctggaatgggacacttggtgcatgttgaagcctagataaattatcaagaagttttgctcttatgtcatccaataattgtcgggagttcttgttttcc

SEQ ID NO: 20784 - DNA, 488 bp, Glycine max
cactctgggatacagccgcaatggccgcacgcaccactgaactgagatgcaacggtctccttgtagtggcccaatgccactaagcaccgctatcgataaatgacaaactagatttatggtgaaagcatgtgtttgtttaatcatttttccaacaaacacaagatgaatgttattacttcatctcaacggatccaacaatgagctgctcccttgacaaaggctcctaccatagtgtaacatacagaaaaaataactactacattcatcttgcagtaatattaaacatcaaaagccaaggcaagcttgcaccatatatgtcttcagtttactagtcaaggagaaggttgatcaataatgcttattattgcttcatcgtgacctgtgatcagaaagctcttttaaattatcctgctcctctttgatgcatggttcatccactgccattgagtccacccccaacaccttggagcatgaaatctccttgaaag

SEQ ID NO: 20785 - DNA, 471 bp, Glycine max
caagaagcctgataatgaatttggggatcagcatcaccacaatgatctccctaatttgaacatggaccccatggaaggcactggcatttctgtattgctgaaaaggtctagcagcaataaaggaccggtagttcaggccagggcttgtactgccactaccatgtcttacgatgatctgtctcttgcaggagacagtgtaagcagttttagaagctcaactagacctggtagttattctgcctcatcatcaattgatctcagctcaagtaggcaaacagagtttcgtgtgcaaaggcagttgagtggcaggaaattggatgtggactgtggatatgactcaaggatcaagcctccaagcactgcttcatctttctctggagcttcaatccattctcgccaagagttaggtcttgcaactcgagagacttctggcagtacagaatgtggctctgtagaggaggttccccgagt

SEQ ID NO: 20786 - DNA, 425 bp, Glycine max
cctttacaaagcaaaaatgattcatatcttggaagctgtcataaatgagagaaatcttgagctacaaaagaaaaacatgatagctccaaggaccacaatgaaagagggtgatttgcatgagtttcttgagattgattccactcattttgatggtgctagctctgatgattctgacatatcagaaataagtggttctaatcccgttagtgctaatggagataaaccagttgagaagctagaaaactctcatccatcatcaccacaccatatgaataactgcctagttagattaacaaatgaaaatgaatgtttggaagaacataatttgaggaaagaagaatcttctagtcccagctccagttctgccactgaagacaaccaacctaaatcactatccaccaaagaatcatcatccatttcaacag

SEQ ID NO: 20787 - DNA, 914 bp, Glycine max
taacaaaacaaaatacaatagatttggtaaagggcagtggcactttaaagggaagaaagcaccacctcaaaccagaaggggaaagtgctcctaacattagattagaccctctaccatgttcctctgcctctgaagtctgaacctcccacaggaatggcaatggagaagacaacattgtttgtgttgttgctgaatgtgcttcttgtgttcagtgcctctcttgtgtcctcagagcaaagtcatgtctcagctgtaggggacccaggaatgcagagagatggtctaagggtggcctttgaagcttggaacttctgcaatgaagttggtcaagaagctcctcacatgggtagtccaagagctgctgattgttttgatctttcaggttctctgactcacaaggtcacagaagctgataacagacttggggtgggggactcatttcctggtataaatccagaaaatatcaacaccacagacctttatgcaattgaaaaggaattgtatttgggttctctatgtgaagttgcagacaccccaagcccctggcagttttggatggtaatgctgaaaaatggaaactatgacaccaggtctgggttatgtcctcaggacgggaaaaaggtacccccttttagcccgggaaggtttccttgttttggacaagggtgcatgaaccaacccatcttgtgtcatcaatggacgcagctcaaagatggcacaatgcaaggggggttcagtggtacttatgatttggattctggttgtggaggtgaacacgatggtgtgtcttactatgaggtagtttgggcgaagaaagttaatgttgggagttgggtgttcaaacacaaactaaggacttcaaagaagtacccttggttgatgttgtaccttagagctgatgcaaccaaaggatt

SEQ ID NO: 20788 - DNA, 1699 bp, Glycine max
atttgtagagtgagagagtttgggttgtgggctgctccagcctctgtctgtggttggtcttatcttttgctgaaacttgaaattgaatctctctcaagcttcctttcttaaaaggttaggaatttgaagcagaagtaagaactaggaagagatgggagtggatttgagacaagtggtggcaggtgtcctcaccctcacaatgtttgtcatgcttggaaatatgatcaaaagagaccacttcgataattcacttcaagaaaagcttccaggaggatcggaagatgccaactttgagactgctacgtttgatgctactcatgtaagaaagaatatagggctttggaagggagatgtggatgacctaaaaccgtgttgggttaagccatcttctgatgatgtggagcagacccaaggatttgttacttttgcgttaaccaatggcccagagtaccatatttctcagatagcagacgcagtgattgttgctagaaatctgggggcaacgcttgtgatgcctgacatcagaggaagccaacctggtgacaagtggaattttgaggatatttatgatgttgatgtgttcatgaaaagcatggaaggggtggtcagagtggtaaaggatcttcctactcgtatatcaacacgaaatattgctgctgtgaaagtccctatccgggttacagaagattacatagctgaacatgtggagccaatatacagaacaaagggaagtataagacttggaacttacttcccttcaataaacatgagaaaggcagggaaaaagggtgacactgattctgttgcatgcttagcaatgtttggaagtttagagttgcagccagaaatgcatgaagtggttgactcaatggttgaaagactaagaactttaagccgaaattcagatgggcaattcatagctgtggacttgagggttgagatgttgaataagaagggctgccaaaatagtgatattgatggggagaaaagctgctacaatgcacaagagattgcagtatttttgaggcagattggttttgacaaggataccacagtttatgtgactgaatcaaggtgggatagcagccttgattctctcaaggatttgttccctaagacttacacaaaggaagccatcatgccggcagataagaagaaaaagtttctagattctgaatttgagaaagtgattgacttttacgtaagtgcagagagtgatgtgttcgtaccagcaatttcaggtctgttctatgcgaatgtagttggaaagagaataggttctggaaaaacacgcatactggttccagctacatctgcttctgcctccaatttcctctctccttatgtctccaacaaaaaccactttgcttattcttgttactgttagcagcagcagcaacaacaacaactttatttatttattatgctccaagacacaatctcagtttcccaaactacctgcccgttatggctttttgcttttccaggcgttcaccaaaaagggttcaccgtcaaatgtgtacagagtgctttctattcatcacattttgttgtaaaattctggttgcctcagttttttatctatcataattggtggtggtgaaactaaagataatgtatttgtttgatctccatggtataatggcatcgcatgtattggaattttctttcgtggtaaaaaggtatattttttcttggt

SEQ ID NO: 20789 - DNA, 435 bp, Glycine max
ctgagcttatagatcccttgtttacacttacaaactagaactaggagaggagaccataattgctttcaataaaaatgctttatagtttgaacctcttctgcaccggttattgattgacttcaatatctgaacttggcagtccttccagaaaagcttccaggaggatcggaagatgccaactttgagactgctacttttgatgctactcatgtaagaaagaatatagggctttggaagggagatgtggatgacctaaaaccgtgttgggttaagccatcttctgatgatgtggagcagacccaaggatttgttacttttgcgttaaccaatggcccagagtaccatatttctcaggtaacttattcaatcatgtaattgcagctattatttccttattctctgacactctagtgatgccttattcagatagcagac

SEQ ID NO: 20790 - DNA, 403 bp, Glycine max
gattcttaacctcaacaactcactcaactaacgttacacagagagagagagagagagattaggagggaaatggctgcacctgcgaggcctctgttcgttctcttcggatcctccatcgtccagctcagtttcagccatggcggttggggttcccatctttctgacatctactctcgtaaggccgacatattgttgcgaggatactatggatggaactcgcgacgtgccctccaagtcctttatcaagtttttccaaaggatgctgcaacacagccttctcttgtgattgtttattttggaggtaatgattccatgggtcctcatttttctggcctaggccctcatgtgcctcttcatgaatatattgaaaacatgagaaagattctgattcatattcagggtc

SEQ ID NO: 20791 - DNA, 517 bp, Glycine max
gaaacttatcacaaggttcactgccaagtgagaatgcagaaaatattgctggaataaagcagggtcgaattgagtcttcccatgttcataataatagcagtagaacttctactagtttccaattggataagcgggggaatcaaaatgtagttggaaagagaagcaatatttcatccagtgcaaaagaatcagaagttcagcctgtcactagagatgcatcacttcatccagtttcaaaagagaattttatggagtcaaaaacacaattttgtggcaggggaaagagatatgccgttactgtaaaaaattcaaacccaagatcatcaggtccagctacaagggttaatcgcccagactctggaggatttatgaggaggcctcgccggaatatgcagcgcactgagtttcgagttcgggaaagtgctgaaaagaggcagtctactagttctgttttgaccgatcagtttgggttggataataggtcaaatatcaatgggaggggagcaggtgtatctgg

SEQ ID NO: 20792 - DNA, 816 bp, Glycine max
cactaacatttccctttacttgctaaaacatggtccaagaaaagaaactagttgacgaggtgtccggttggctcaaaatttatgacgacggttcagtggaccggacatggtccggaccggaccaattcaagttcatggccgaaccggcccctccccatgaacaattcatagacggcgttgccattcgcgacgtcgccgttactcacggtggtggccagagtggccaccatgtccgactttatctgccagagataaagccggaagacagccaaaaactaccaattgtcctccatttccacggcggcgggttttgcataagtgaaccggactggttcatgtactaccaagtctacacccggttcgcccggtccactcggtccatcgtggtttccccgttcctccgccgtgccccagagcaccgcctccccgccgccatcgatgacggctttgacaccctcctctggctccaaaccgtggcccggtccggttcactcgagccgtggctcgagcaacacggtgacttcaaccgggttttcctcataggagacagttctggcgggaactcggtgcatgaggtggccgcgagggccggttcggcggacctaagcccggtccgggtcgcgggggcaattccggttcaccccggttttgtccggtccaaccggagccggtccgagatggaaatgccacagacaccgtttttaacgttggacatgctggacaagttcttagccttggcgcttcctgttgggggccaccaaggaccacccctttacgtgcccgatgggtgaggcggcaccgcctcgaagggctgaa

SEQ ID NO: 20793 - DNA, 633 bp, Glycine max
cttttattctatctcactttcatactcacccttattgcagtattttgacctcaatggcaccaagttctgcagtgccagatgaacaggttgttgttggagaggagattgagcatgtaagagtggtcactttgaacaggccaaggcaattgaatgccatctcaccagaactggtttctcagctagcaacatatttggaaaagtgggagaaggatgagaaagcagaactagttattataaagggagctggtcgggctttttgtgctggaggagatttgagagtcttctatgatggaagaaaaataaaggatgcctgccttgaagtggtctacagattttactggctttgctatcacattagtacctataagaaaacccaggttgcgcttgttcatggaatttcaatgggtggaggtgcagctttgatggtcccattgaagttctcagttgtaacagaaaaaactgtttttgccactcctgaagcaagttttggatttcatactgattgtggtttctcatactaccattctcgtttacctgggcatttaggtgaatacttggcacttactgcaggaacgttgagtgggaaggaaatagttgctggtggactggcaacccattttgtcccttttgaga

SEQ ID NO: 20794 - DNA, 356 bp, Glycine max
  unsure (1)..(356): unsure at all n locations
gagacaccttctacgcnncgttgagttttatagaaacacacacgattctgcaacaatgcgcaccttctacttcttaaaaacaggcgacgaggaacacggggaagggaggtgtgttgtggttaaggaaaaggaaaaggaaaaggagagtgtgaagatgaatatgagaaagcaggggaaagtgtgcgacgtgacggaacaggcaaggaagccagtgacagtgagcaaagagatgatgcgtctacacgacgccgttccgcgatctccgctgcctcgtggtgttagacttcccaaacctgttgatgaagatctctataagatcccaccagagctacttcgcacaactaagcggaagaaaa

SEQ ID NO: 20795 - DNA, 321 bp, Glycine max
cgcgctcccaatttgggaatttttcgaaaccctaaaaagatgaacccctacgacagcagatattctgacgcctcttcttttcgcggccgtcgtagtgatttcgttggacctattccgccgccgtctttcgtcggccgcggcggcgcggtttcctacggcgtccctggacccaacgggttccgatccgcacccgttgctccggtcccaccctttgtgcctccttccggaggctttaatgtaggtcgacgcggtggcagagcgggctatggtcatgtgagtgatagaatgggtcgtagcggtggtggaagaagtcgtggtggt

SEQ ID NO: 20796 - DNA, 416 bp, Glycine max
aaaaaccgaaatctcggtctagcaaattatgaataaccaaaccctaccaccttgcttgttaaacactctagtctgcccacaaaaggggcatatgatactgaggcacaagttccttggaagaccttcacttccacagttgcaagttacagcattaccttctgtttcagaggaaagaaaacgaaggaagtgagaaaaattttaaaattgaatagaagagaaaatagaaagaaagaaaattttgattttttcttctaaatgtcaatttttctttctttcctcaaccaaataaaagaaaatgtatcattgtctgtattttcttctagtccaaacacatgattaaagtttagcaacagatttggtgtaactaacgatattttaaaaccgaaagtaattagtgtgatctatactgttagaat

SEQ ID NO: 20797 - DNA, 723 bp, Glycine max
tgctgtcctttatgcttccgtttaagattaactccgaaattgtacagagagagcgttttcgtgttgtgtgtgttttcttctgtcacaacgtaatactattattattgttgtttgggacacaacaactcagagagttcttgcaaatttgcaatctctctctctctctctctctctatcccctttctgccgacgattttgtttgtcccctttggatcagttcgtgcccttgttgttggtttgtagcttttgctgaaatccagcaataatgaagaaggttattggtcaaactgttagggaccttaaaagagaagtaaataagaaagtgctgaaagttcctgggattgaacagaaggttcttgatgctaccagcaatgaaccatggggtcctcatggatcacttcttgcagatattgctcaggcaaccagaaaccctcatgaataccagatgatcatgtcagtaatctggaagcgaattaatgacactggcaagaattggcggcatgtctacaaggctttgacggtactagagtacttggtggctcatgggtcagagcgtgtcatagaggacatcagagagcacgcccaccaaatatcgacattgtccgattttcaatatattgattccagtggaagagcccagcgaaacaacgtcaggaggaaatcacagagtctcgttctccttgtgaatgataaagaaagaatcacggaggttagacagaaggc

SEQ ID NO: 20798 - DNA, 524 bp, Glycine max
gtaagttgcagaatagtttcactgtgaattttgcttcgtttcacagtgactccgacattgtagtgagagaagccctttgtatttttgtttctctctctcttttcctcgtaattctatttttgagataactaacaagtctttgcaaattgcaacttggttgctgctgttggctcaatttctcgttttctctctctacacccaactcaccttcaggttctgctttctgccgactagtttgaccagtttatggttcttgcacgcgagtactgaaaaccagctacaatgaagaaggccattggtcaaactgttagggaacttaaaagagaagtaaatcagaaagtgttgcaagttcctgggatacaacagaaggttcttgatgctaccaacaatgaggagtggggtcctcatggatcacttcttgcagatattgcacaggcatccagaaattatcatgaaaacttaatgatcatggcagtaatctggaagcggattaatgacactggcaagaattggcggcatgtcta

SEQ ID NO: 20799 - DNA, 510 bp, Glycine max
gcaagattcaaattttgtaaatgcatttcgcttcttatctgctgaaagtgtcctaaagaatgaaggtgatccctgtgttccaactccctgggagtgggtaaattgtagcacaactacacctccaagaattacaaagataaacctgtcaagaaggaatatgaagggtgaaattccacgggagctcaacaacatggaagcattgacagaactgtggttagatggcaacatgctcacaggacaacttcctgacatgagaaatcttatcaatctaaagattgtgcatctagagaacaacaaattgactggtccattgccatcttacttgggtagcttgccaagtttacaagcactgttcatacagaataactcatttagtggggtaataccatcaggattactgtctggaaaaatcattttcaactttgatgataatcctgaactacataaagggaacaagaagcattttcaattgatgctaggaatttctattggagtactagtgattctatt

SEQ ID NO: 20800 - DNA, 436 bp, Glycine max
ctagaacaagtgaagataaggagggagggatgtatcaaacattgagctttcaatctcacctcttcttcacaaaaggtaaatgatttttgcacattttgcagcaaaccatctgagtcttctaaagaaagaaatatggaagaaaccaaggggtattacttacttgagcaaatgtgcttagtgatttttagctatcccaataccaatgtatcctttggtagctctatttacttagatatatgtgtcattccaaaatgaaagttttcagtctgggagcagtagcatttaaagcattagttagatccctttggacattcaattgtatattggctttaaaatgttgataagtaaacggtcctgtttttttggtttagctagtttggggcctcctaatttaattgtcccagttaaaatagacgggaaaatactgaatttcggt

SEQ ID NO: 20801 - DNA, 678 bp, Glycine max
ctgagaagtaagacaagagcaaatatcaaggttactgccaaggatgcagctgacccgacacactcatgtgctatggagtttgataattttgttgtgatcactggtgaatcagaagcagttaaaagagcactatttgcagtttcctctattatgtacaagttcggtcccagggaggacatctcacttgacacagctgtaccagaagcccctcctagtattattattccctctgatgttccagtttatcctcccggcggactgtatccagcttcagatcctattgtcacacctagagcagttcctcaaattataggcgcaacaaatgtaccagatctgcaaggttatgctgatgcaggaaattcatggcctctgtactcatctgcccttcccgtcgtttctggtgttggtgcttcccggtctgaggagttaattattagaatgttgtgtccctctgacaagattggacgtgtcattgggaagggtggtagtacaattaaaagtatgaggcaggctagtggtgcccatattgaggttgatgattccaaggctaattttgatgagtgtttaatcattataactacaacagagtcgccaagtgatctgaagtccatggcagttgaagctgttctgctgatgcaagggaagataaatgatgaagacgataccactgtttcaatc

SEQ ID NO: 20802 - DNA, 360 bp, Glycine max
ctcgagccgcggtaaaactatgctgatggacctgttgtttgatcaattgccttctaattggaggaaaaagaggattcattttcatgactttatgttgaatgtgcatagcatgctacaaaagcataaggggttgtcagatccacttgatgtggttgcaggggagatttctgatgatgcaattttattatgtcttgacgaatttatggtaacagatgtagcagatgcattggtactaaatcgcttgtttagacatttgttcaacaaaggcattcttctagtggccacatcaaatcgtgcaccagataacctatatgagggtggattgcagagggatctctttctacccttcattgcagcatt

SEQ ID NO: 20803 - DNA, 792 bp, Glycine max
gtggatggcattgatggagaaaacaaatgcactaccataggttgcctagggaaaaaactaggaccaaggattttgggaagacggcctgaatcaactgtcctagaagtgatataccaaacattatatgaacctgttggtaaaaatgaacttcagggaagatctgatattccacagaccttagaagagttcatgactgaaatgaagaaaggtggatatgatgccaagacatttgcagttaaacttcgagaaatggttacccttatggagcaaaggaccaggatggccaaaatccaagaatatctatatcgacatgtagcatcaagcagcataccaaaacaacttcactgcctttccttgactttggccaatgaacacaccaacaacgcagcggcacgccttcagctcccctctgcagaactagtccctgctctggttgacaattcctacttccactttgtccttgcctcagacaatgtgttggctgcatcagtggttgcagcatcgcttgttcgcaactttttgagacctcagaaggttgttctgcatataattacagacaagaagacttattatcccatgcaggcttggttctcattgcattctttgtcacctgctataattgaggtcaaggcattgcaccattttgattggtttacaaagggaaaggtacctgttttggaagctatggagaaagatcaaaaggtgaggtcacaatttagaggggggtcatcagctatagttgcaaataccactgagaagccaaaagtaattgcagcaaaactgcaagcactt

SEQ ID NO: 20804 - DNA, 1102 bp, Glycine max
atcgagccgattcggctcgagactcatacctcttctccaacatgaaagacaccattgttctataccctaatcttggtaggggacacctagtttccatggtggagttgggaaaactcatactgacccaccacccttcactttccatcactattctcatcctcactcctcccaccaccccttccaccaccaccaccttagcctgcaactctaatgctcaatacatcgccaccgtcaccgccaccactccctccatcacgttccaccgcgttcccctcgccgcactccccttcaacacccccttcctcccccctcacctcctctccctcgaactcacccgccacagcacgcaaaacatcgccgttgcactccaaaccctcgccaaagcttcgaacctcaaagccatcgtcattgacttcatgaacttcaacgaccccaaagccctcactgaatatctcaacagcaacgtccccacttacttctactacacttctggcgcctccactctcgctttactcctttactaccccaccattcacccaaccctcatagaagaaaaggatacagaccaacctttgcaaatccaaatccctggattatccacaattacagccgatgattttccaaacgaatgcaaagaccccttgagttacgcttgccaagtcttccttcagatagcggaaaccatgatgggtggtgccgggattatagtaaacacatttgaagccattgaagaagaagccatcagagcgttaagtgaggatgcgacagtaccaccacccttgttttgtgtcggacccgtgatttctgcaccgtatggagaagaagacaaagggtgtctgagttggctaaacttgcaaccgagtcagagcgtcgtgttgctgtgtttcggaagcatgggaaggttctcgagggctcagttgaaggagatagctattgggttggagaagagtgagcaaaggttcttgtgggttgtgagaaccgagttgggtggtgctgatgactcggcggaggaactgagtctggacgagttgttgccagaagggtttttggagaggaccaaggagaagggaatggtggtgagggatgggccccacagcggcga

SEQ ID NO: 20805 - DNA, 373 bp, Glycine max
attctccctacaagttacaatcattaggagagacaaaaaaaaaaaaagcacttactcttgaatattcatgaccatgaaggactctatagtcctatactcagctttgggaaggggacacctagtttccatggtggaactaggcaaactcatactaacccaccacccttcactttccatcaccattcttttcctaaccccaccccccaaccaggccacacccacctcccccaccgccttcacctgcgacgccacctccaaatatatcgccgccgtcagcgccgccaccccctccattaccttccaccgcatccctcagatctccatccctactgtcctccctcccatggccctcaccttcgagctctgccgcgcc

SEQ ID NO: 20806 - DNA, 312 bp, Glycine max
ctcgagccgactcgttctagatcgagagctgccgctcggatctagcactctcgagccgctcgccccgattcggctcgagattgccgctatggccaaggttctcggctatgatatttacgatctggagttgactgaggttcataacaactctgaactcaggaagcttctcatgaaaaccagctccaaatcgattcttgttattgaagacattgactgctctatcaatctcaccaacagaaagaacaataacagctcgagttccgtttctgcttcgacaggttactatgattcggagatacgcggtggcggcgg

SEQ ID NO: 20807 - DNA, 523 bp, Glycine max
aatggcagcaactttcaaattcagacaaagatctttttccactcctggaatgctttacatctatatcacatgctctgggtactggtttcactcaatttgctgaacctgtatttaggaggtgcataaatataatccagacccaacaatttgctaaggctgatcctgccgccaccacaggggttcagtatgacaaggagtttattgtatgctctcttgatttgctttctggactagcagagggtcttggcagtgggatagagagtttggttgcacaatgttctttgagggacctacttctgcattgttgtgtggatgatgctcctgatgtaagacaaagtgcctttgccttacttggagaccttgcgcgagtgtgctcggttcatttggactctcgtttgtctgagtttcttgaggctgcagccaaacaactggagatttctaaggtcaaggaggctatttcagtagcaaataatgcatgctggtcaattggagaactagcagttaaggttcatcatgaaatttc

SEQ ID NO: 20808 - DNA, 1825 bp, Glycine max
tgttgaaatttaaaatggtatagttgatttactggtgtactatgaaaaactatggtgtcgagggagtccatgaatgtgcttagttaataattttcagatttcagcatcttccattaaagatgagattgtgggaatccaattgtttgttcaattgcttttcattatgcttatctttcggtgcaggcaagagctgagtatgacaaggagtgcaagatttgtacacggccattcactgtttttagatggagacctggtcgagatgcaagatataagaaaactgagatctgtcagacatgtagtaaattgaaaaatgtctgtcaagtgtgccttctggatcttgagtatggactaccagttcaagtccgggacacagctctcaatattgattcccatgatgccattccaaaaagtgatgttaatcgggagtattttgctgaagagcacgaccgtaggctagagctggtatagattatgaatcctcttatggtaaagtacgcccaaatgatactatcctgaagcttcaaagaacaacaccatactacaaaagaaaccgggcacatatttgcagtttctacattaggggtgagtgtaccagaggagctgagtgcccttatagacatgagatgccagtaactggggaattgtctcaacaaaatattaaagatcgttattatggggtgaatgatccagtggctttgaagctacttggcaaggcaggagagatgtccactctggaggctcctgaggatgagagcattaaaactctttatgttggtggacttgatgctagggtcactgagcaggatttgcgggatcacttctatgcccacggagaaatcgaatccatcaaaatggttctccaacgggcttgtgcttttgtaacatatacaaccagagaaggtgcagaaaaggcagcagaagaactctccaacaaactggttattaagggcctaaggctaaagctgatgtggggcaggcctcagacatcgaaacctgagtcagatggctctgatcaagcaaggcagcaggcttctgtggctcatagtggattgttgcctcgggcagtgatatcacagcagcagaaccaggaccaaacacaaggaatggtttactataacaatccaccaggaccaccacctcttcagcaggaaagaagctactacccatcaatggatcctcaaagaatgggtgctcttgttgcatctcaagatggtcctcctggtgggccttctgggtcaggggagaacaagcctagttcggacaagcagcaaatgcaaaattatacccatccaatgatgccacctccacctggccaatatcatcatcagtattatcctccatatggttatatgccaccagtttccccttatcaacagtacgcatctccatacaatgctgcagtggctccatcccagacaccagctgcaaatcatccttatcagcattctatgcagccagggtctggacaggctgcacatgccccagctgaatctggaacatcaacatcaggatcgcagcagcattaaacttgcccatatactgatgtttctagccatgtttaagtttttccttaaactaactatgctgtcagggaagatattttcactcaagttgtcaatttactatctctactagctggatattgatttccttgtggcatgaacgagttattttataatttgattttatgcttttgtaactcttggcttcctggttaaatcatagtcatgctcagctttagtattacttattgaattctaatgttactacaactgaacttttgttgtggatataaagcatttggtaaagatgaccaattgatttt

SEQ ID NO: 20809 - DNA, 572 bp, Glycine max
gcctgctgcgacggatagcacccaaatccgtacccaacggaagttttggatttggattttgctctaaatcacattctttgcttcttttttcttactttcttgttccttcttcagcttggatttttggcgtaacgaggaaggggttattgttgagaaaccctagcctaaacctaaaccatggcgcataggttgctgagagaccacgaagccgacggctgggagcgctccgatttccccatcatctgcgaatcctgcctcggcgacagcccctacgttcgaatgacaaaagctgagtatgacaaggagtgcaagatttgtacacggccattcactgtttttagatggagacctggtcgagatgcaagatataagaaaactgagatctgtcagacatgtagtaaattgaaaaatgtctgtcaagtgtgccttctggatcttgagtatggactaccagttcaagtccgggacacagctctcaatattgattcccatgatgccattccaaaaagtgatgttaatcgggagtattttgctgaagagcacgaccgtagggctagagctggtatagatta

SEQ ID NO: 20810 - DNA, 433 bp, Glycine max
  unsure (1)..(433): unsure at all n locations
cccaaatccgtacccaacggaagttttggatttggattgttgtgctctaaaccataatctgctgctccttctactttcttgtgccttcttcggcttggctgttttgtgagacaaaaatgggttattgattgagataccctaaacctatcctaaaccatggcgcataggttgctgagagaccacgaagcagacggttgggagcgctccgatttccccatcatctgcgaatcctgcctcggcgacagccctacgttcgaatggtctgtttcgaatcctcttcgtttgttaggttttttatttttatttttctcttttgttcttgcgagattgaatgagttattgaattctaatgttactacaactgaacttttgttgtggatataaagcatttggtanagatgaccaattgattttaaaaaaaaaaaaaaaaaaa

SEQ ID NO: 20811 - DNA, 328 bp, Glycine max
tttagactcctctcctcactcacctacttagtgtttgaagtcttttgttctacgggtcctcttttatcctaactagcaacacccatttgtaataggctactttattttttaaactcttttaaaaaagttaacctagcttttctttgcatcctctgactgtcttccaccggtcaccgcaaaccaccaccgacctccgttcgactgttagtggtggtcgatttacatgtaatcttccattttggtgcaacgagcaagggcttgttgctgttgaaatcctaagcatggcgcataggttgctcagagatcacgaagccgacggttgggaacg

SEQ ID NO: 20812 - DNA, 596 bp, Glycine max
catagcaacgaaatgtgaaatcaggtacaaagcccccacttccaattaatccatcacagttccggaaaggagcttaccatgagtcattggattttgtgctgacattatgcgatacatcatttgggttagtggatgtatttccagttgaagatcgcaaacatgccctgcatgagtcgcttgcagagatcaatttacatttagcagaggctcagagcactggaggagtttgttttccgttgggaaagggcatgtaccgtgtgcttcatatacctgaagatgaagctgttctcttgaattctagggagaaggcgccttacctgatctgtgttgaggttttgagatgtgaaatgccaagccattccaaggaggcatccagttctcagaaactttctcaagggggaatccctttggcaaatggagatgctctcttgcaaaaaccacccccctgggcttatcccttacggacagcacaagaggcgtaccgcaatagcaacgataggatgtccagttcaactgctcatgcaattgaccaggcgatgactcatgtatctgaggcaaaaatcaaatttgttagtgtgaatttttctgtggaaatg

SEQ ID NO: 20813 - DNA, 469 bp, Glycine max
  unsure (1)..(469): unsure at all n locations
aagctcnnaattcggctcaagtgttttttccccaaatttccatcacactgggggctgttcaaggattgcacaatattcatcccacctttaatgttcccaacatgcccggtacactcacatcaagaaactcaactataaataatgtaccatcggggggtgttcaacaacccactggaagcctttctagtggaagatttacatccaacaatctcccagttgcattgtctcagctatctcatggaagctcccattcaggaatcaccaatagaggaggtataagtgttgtaggaaaccctggatttagtagtagcacaaatggagttggtggttctattcctgggattcttcctacatctgctgcagttggtaaccgaaatgctgttccaggattgggagtcaacccaattttgggaaatgcaggtcctcgaatcacaagttctgtgggaaacatggttggaggagggaatat

SEQ ID NO: 20814 - DNA, 606 bp, Glycine max
gcaccagatcagttctggcagttggagcaagcattttgggatgctttgcattttcaaaagaactgataatgattcgggaagctcctgttgaatcacagggtgtaagatttcttcagctagctcctggtgaatttttcttcactactttaaaggtgtctggatactgtggccttctcttgggaattcctgtcatcctctatgaaatcatagcctttgtacttccaggacttacaaaagctgaaagaaggtttctagggccaattgttttaggctcatcggttcttttctatgccggaataactttctcctacttagttctgacacctgcagcattaaatttctttgttacctacgctgaaggtgctgttgaatcattatggtccattgatcaatactttgaatttgttctggtgcttatgttcagtacaggcttatctttccaggtacctgtcatacaatttctattgggacaacttggactggtgtctggagaccagatgctatcaatttggaggtatgttgtggttggtgcagtagtggcagctgctatagttaccccatctactgatcctctcactctcggtcttccaacggccaccctatttg
